United States Patent Application Publication US 2006/0134663 A1 - sequence listing, part 83

SEQ ID NO: 232050 - DNA, 723 bp, Homo Sapiens
  misc_feature (131)..(417): n is a, c, g, or t
  misc_feature (447)..(474): n is a, c, g, or t
  misc_feature (497)..(530): n is a, c, g, or t
gagtttgccattgccttatatggcttaagttcttatcttatacagttgtgttacatagtgttacatacctaagccaaattcttaagggaccaacagttgtgatcataagaatgtcacttatcaggggccannnnnnnnnnnnnnnnnnnnnnnnnnnnnnnnnnnnnnnnnnnnnnnnnnnnnnnnnnnnnnnnnnnnnnnnnnnnnnnnnnnnnnnnnnnnnnnnnnnnnnnnnnnnnnnnnnnnnnnnnnnnnnnnnnnnnnnnnnnnnnnnnnnnnnnnnnnnnnnnnnnnnnnnnnnnnnnnnnnnnnnnnnnnnnnnnnnnnnnnnnnnnnnnnnnnnnnnnnnnnnnnnnnnnnnnnnnnnnnnnnnnnnnnnnnnnnnnnnnnnnnnnnnnnnnnnnnnnnnnnnnnnnnagaatattgcttatctagagacaacattcnnnnnnnnnnnnnnnnnnnnnnnnnnnnagatgaggtctcactctgttgcnnnnnnnnnnnnnnnnnnnnnnnnnnnnnnnnnnttttcatctgctattttcctctgcacaaggacattacaccaaggttacatctctaaatatgcttcataatgcaaactggatgtctgttggaaattgcatatgtggcaatggcaatccctaataacaattacccttatgaaaaggaatacctgattccaaaataaacacccattaccggtttccaaaacccaat

SEQ ID NO: 232051 - DNA, 401 bp, Homo Sapiens
  misc_feature (140)..(292): n is a, c, g, or t
  misc_feature (295)..(295): n is a, c, g, or t
  misc_feature (305)..(305): n is a, c, g, or t
  misc_feature (329)..(329): n is a, c, g, or t
  misc_feature (361)..(361): n is a, c, g, or t
  misc_feature (363)..(363): n is a, c, g, or t
aaaacctgacatttgttttcttagtccatagaatactcgaataaagatgatgtgagggtaggagggtacacacaaaggacagaggagggcagttgaaatcagctcactgagagctgcaagtggtgagttgattttcaatnnnnnnnnnnnnnnnnnnnnnnnnnnnnnnnnnnnnnnnnnnnnnnnnnnnnnnnnnnnnnnnnnnnnnnnnnnnnnnnnnnnnnnnnnnnnnnnnnnnnnnnnnnnnnnnnnnnnnnnnnnnnnnnnnnnnnnnnnnnnnnnnnnnnnnnnnccntgagtgtggntggtgtagtctcaccctacttacnacttgtagtcccagcccacctcagaaggctgnangggtaggaagatcgcccctgagccccaggggagggttg

SEQ ID NO: 232052 - DNA, 622 bp, Homo Sapiens; identical to SEQ ID NO: 33229

SEQ ID NO: 232053 - DNA, 358 bp, Homo Sapiens
  misc_feature (141)..(141): n is a, c, g, or t
  misc_feature (227)..(288): n is a, c, g, or t
gggtccgctgcgtccgccgaggcccccgagtgtcagggacaaaagcctccgcctgctcccgcagccggggctcatctgccgccgccgccgcgctgaggtagagttcgcccggcgtcgccgcccggtgtagggattcttganaaaaaacccattggggggcaagaaccctttgggaagcaaaaacccaaaaagggccagggaaaacccagttcaaatgggggttggcnnnnnnnnnnnnnnnnnnnnnnnnnnnnnnnnnnnnnnnnnnnnnnnnnnnnnnnnnnnnnnaaggcgcccaaaaaaggaaaaatccgccccggggggaaaattctcattttttccccgcctttttataaga

SEQ ID NO: 232054 - DNA, 933 bp, Homo Sapiens
  misc_feature (41)..(157): n is a, c, g, or t
  misc_feature (168)..(169): n is a, c, g, or t
  misc_feature (172)..(173): n is a, c, g, or t
  misc_feature (176)..(176): n is a, c, g, or t
  misc_feature (178)..(178): n is a, c, g, or t
  misc_feature (190)..(192): n is a, c, g, or t
  misc_feature (197)..(209): n is a, c, g, or t
  misc_feature (231)..(241): n is a, c, g, or t
  misc_feature (243)..(285): n is a, c, g, or t
  misc_feature (293)..(301): n is a, c, g, or t
  misc_feature (317)..(317): n is a, c, g, or t
  misc_feature (319)..(336): n is a, c, g, or t
  misc_feature (340)..(341): n is a, c, g, or t
  misc_feature (344)..(344): n is a, c, g, or t
  misc_feature (349)..(362): n is a, c, g, or t
  misc_feature (379)..(391): n is a, c, g, or t
  misc_feature (396)..(396): n is a, c, g, or t
  misc_feature (400)..(423): n is a, c, g, or t
  misc_feature (445)..(446): n is a, c, g, or t
  misc_feature (453)..(453): n is a, c, g, or t
  misc_feature (457)..(472): n is a, c, g, or t
  misc_feature (494)..(508): n is a, c, g, or t
  misc_feature (510)..(512): n is a, c, g, or t
  misc_feature (514)..(529): n is a, c, g, or t
  misc_feature (538)..(538): n is a, c, g, or t
  misc_feature (540)..(540): n is a, c, g, or t
  misc_feature (582)..(593): n is a, c, g, or t
  misc_feature (595)..(596): n is a, c, g, or t
  misc_feature (599)..(601): n is a, c, g, or t
  misc_feature (606)..(608): n is a, c, g, or t
  misc_feature (641)..(724): n is a, c, g, or t
  misc_feature (731)..(731): n is a, c, g, or t
  misc_feature (737)..(738): n is a, c, g, or t
  misc_feature (761)..(764): n is a, c, g, or t
  misc_feature (781)..(782): n is a, c, g, or t
  misc_feature (789)..(789): n is a, c, g, or t
  misc_feature (796)..(796): n is a, c, g, or t
  misc_feature (815)..(815): n is a, c, g, or t
  misc_feature (818)..(818): n is a, c, g, or t
  misc_feature (822)..(822): n is a, c, g, or t
  misc_feature (859)..(866): n is a, c, g, or t
  misc_feature (884)..(884): n is a, c, g, or t
  misc_feature (921)..(921): n is a, c, g, or t
ggcaagtagctgggattgcgggcatgtgccccacggccagnnnnnnnnnnnnnnnnnnnnnnnnnnnnnnnnnnnnnnnnnnnnnnnnnnnnnnnnnnnnnnnnnnnnnnnnnnnnnnnnnnnnnnnnnnnnnnnnnnnnnnnnnnnnnnnnnnnnnatgtgtccacnncgnntgncnccctgggggggnnnaaaannnnnnnnnnnnngggggggccaaaaaaaattaannnnnnnnnnntnnnnnnnnnnnnnnnnnnnnnnnnnnnnnnnnnnnnnnnnnnngtttgggnnnnnnnnncaaggccggggggggngnnnnnnnnnnnnnnnnnnttcnnacnaccannnnnnnnnnnnnntctcttgttgtgtggtnnnnnnnnnnnnncgcgnccgnnnnnnnnnnnnnnnnnnnnnnnnggtgtgggggttggtggggggnntttatcnaacnnnnnnnnnnnnnnnnaacaaacacacccccccgggcnnnnnnnnnnnnnnncnnncnnnnnnnnnnnnnnnnaacaccgcnanaaacccgccccatccgtttggtgggtgtggggggggtggcgnnnnnnnnnnnncnnccnnnccccnnncccgcgcccccccgcgggccacacaccagtccnnnnnnnnnnnnnnnnnnnnnnnnnnnnnnnnnnnnnnnnnnnnnnnnnnnnnnnnnnnnnnnnnnnnnnnnnnnnnnnnnnnnttcaacntttttnnatctgttgtggtgtggggggggnnnngggcggcgcgcgggggnnaaggccnacgcccnagcgcgccaacgcgcaacnaanaaanagccgagcgccagagggctgggtttctcgttcggttnnnnnnnnatgttgggcggcccctgngtgccgcgcgcggaaggccgccggttgggctgcgccnacgtccgccgcg

SEQ ID NO: 232055 - DNA, 656 bp, Homo Sapiens
tccggcgcgggagccagcgcggctgtgtggctatctgcagaagctgtcgggcaagggccccctgcgtggctaccgcagccgctggttcgtgttcgacgcgcgccgctgctacctttactatttcaagagtccgcaggacgcgctgcccctcggccacttggacatcgcggacgcctgcttcagctaccagggcccccgacgaggcggcggagccgggcacggagccgcccgcgcacttccaggtgcacagcgcgggagccgtcacggtgctcaaggctcccaatcgtcaactcatgacttactggttaccggagcttcagcagaagagatgggaacattgtaacgtccttgacatggtcaagtgggaaccgatgacctcatccactcccgcgggattttcccaagggcccttgtggccacgagataacactgactttgggcgtccctctccgccaaatggcttctggcagaaaaaacccagtaaatgttcccaagccgcgcggacacttggggcccggtaatcacttgcccgagaaagaacactagcttcccgacatgctcgccggaccccccgagggcgcatcctggaggtgccgctgccaaatctctttaccatacaggagggcaagagcggcgcggctctcagataggatctc

SEQ ID NO: 232056 - DNA, 580 bp, Homo Sapiens
  misc_feature (242)..(242): n is a, c, g, or t
  misc_feature (370)..(379): n is a, c, g, or t
ggaacacaagttgccatcgtcagacattttggccttcagatcctggaacacgttgtcaagtttcggtggaacggcatgtctcgattggagaaggtgtatctgaagaacagtgtcatggagctgattgcaaatggaacattgaacattttggaagaggagaaccatattaaagatgctctgtctcgaattgtagtgaaaatgatcaagcgagagtgggcacagcatttggcttgacttgctantagaattggaaccctctttccaaaccaaggggaaacccagacggaaatgggggagttttaatccctttttgcaacttgggcaaaggaattgaaatggactttttttcaaaaccctttccccccctccnnnnnnnnnnggggagacttccccggaaaaaccttttaacccccaaaaaattggggagagggggacttttccagggttttctctggcgttttaacccccccttttttcgagaaaaaataggtggggaaacccccgagtttttccccccccaggggggggaaaaacaacaaatattttctcttccctcgggggggaccccaagaggggggcc

SEQ ID NO: 232057 - DNA, 863 bp, Homo Sapiens
  misc_feature (312)..(327): n is a, c, g, or t
  misc_feature (354)..(354): n is a, c, g, or t
  misc_feature (368)..(370): n is a, c, g, or t
  misc_feature (375)..(375): n is a, c, g, or t
  misc_feature (383)..(383): n is a, c, g, or t
gggttcttcctgtgtagccttagtaacttgtacctttcctgacatggcaggggctccaaaacatctgttgcaaacaatgtatatctaaaagacctctataaaaataattagaatgtaaaactgttaacagaatggaggttgagaaaatgactttgcaagtagcaattaacttgccaactcataattagcagtagattagaggattgtgtattttttaaatgtggtttaaatcttttcagcttgcagatgctagattttcctaagctctgcaactaactgaagaacaagtattgatgaagccttcacagttcnnnnnnnnnnnnnnnngagatgtattttcacttttgcgccccnggggtttaaagtgnnngggcnccccttgncagggtcgctgagcacctcacgacacgcggtgatagactgaactatcgaagttctcttgctaagagaggtcctcgagcaataaatgtaattatgttaagacgaatttcgctactaaatctcatttcttgatgagaatctgggagtgaaacactgtaaatgtgacttacctgtttcgttgagtgaaggaagaaatgtagacttttgaaatccgagatccgcaatggagattaaagaagctattggttatgttgtccaaacggacgaaactagaagcaaccttctggaaaaaaagcaggccagtggttgaaaattaaagaataacccccatggttttaaaatttattggcaagcgacctttttctccttttaaatggttggggaataactttaaatcattttggaaatcagttttgtttgaacccttgagaaaaaccataccggaaatggtgaaatattgtagggtaaattgattttacaga

SEQ ID NO: 232058 - DNA, 1030 bp, Homo Sapiens
  misc_feature (887)..(887): n is a, c, g, or t
aacgcacattgctccataagaccttacaataaatcacaaaaacatgtgcggccgccctcggcccctcgagaagcctttctacacccattcggtttggctgccgcgggcccaggtagtgaaacgtgacacatgggtcattaccttgtcttccatagggagatccgtggaccatggactacgggctttgggatttctccacacaaataaaaaacacgccccggccggacaacccgaaccgtttcttgaacataaactcccaaatggggagtttctggagggccctttaactggaatcctactcaacagggagtcccaatgggaaccttcgaatatccaaatttaccccccccggccctgggcccacttctattgcacggaactgttgggaaattccattataacccatttctcgcccgaccttggcgaaaccctcattcacccaacccggtctttgtatgacactcctggaaatccgccccaagtgggtaatccaatacacccctttctccgcccttgtgagataataaataaatttgtgcccccttggggagcgaaacaccggtgcgggtcgaaaaagaaactcttgtgtcccattaattgtggccccacgtgttcttcagaatatcgaacgcccggtggggggaaatacactccccccaccaccgtgatattgggcctttgaacaaactacaacaaaccacaataattctcctctatattaaacccctctctttttatatgggaacacactaagcggcgccacggcgtttcttttcaccccgcgtacaaaccccgtccctaaccctcccgtggcacagaaaatatattggcgggataaacaaaacaccgcgcccggggagatatatcgttgcgccgcgtgcgtattntcccatttctcgcgagagcgtggatgcgcaagaagcgctttctcacgttgctccgtctctaccgtgtgcacataatcgcgggcggcacaacaaaaggggtgtgggcacacacctaaaatcccccacgtatctcacccccaccc

SEQ ID NO: 232059 - DNA, 829 bp, Homo Sapiens
  misc_feature (192)..(413): n is a, c, g, or t
  misc_feature (458)..(715): n is a, c, g, or t
gggaataattccttcctcttcagttttttttaaatattttgagaagtattggtattaatttttctttgtatgtatggtagaatttgacaggaaagccatctggtcctgggcttttctttattgagacacttttaattactgattcagtcttattactcattgttggtctgttcaagttttctatttgttccnnnnnnnnnnnnnnnnnnnnnnnnnnnnnnnnnnnnnnnnnnnnnnnnnnnnnnnnnnnnnnnnnnnnnnnnnnnnnnnnnnnnnnnnnnnnnnnnnnnnnnnnnnnnnnnnnnnnnnnnnnnnnnnnnnnnnnnnnnnnnnnnnnnnnnnnnnnnnnnnnnnnnnnnnnnnnnnnnnnnnnnnnnnnnnnnnnnnnnnnnnnnnnnnnnnnnnnnnnnnnncaatagttaagctatagtaatagctttgtaactgttatagtagannnnnnnnnnnnnnnnnnnnnnnnnnnnnnnnnnnnnnnnnnnnnnnnnnnnnnnnnnnnnnnnnnnnnnnnnnnnnnnnnnnnnnnnnnnnnnnnnnnnnnnnnnnnnnnnnnnnnnnnnnnnnnnnnnnnnnnnnnnnnnnnnnnnnnnnnnnnnnnnnnnnnnnnnnnnnnnnnnnnnnnnnnnnnnnnnnnnnnnnnnnnnnnnnnnnnnnnnnnnnnnnnnnnnnnnnnnnnnnnnnnnnnnnnnnnnnnnnngaaactactaaaagagaatataggggggaatgctccagaacattggtctaagccaagattttatggttaagacctcaaaggcataggcgacaacaccaaaaataaggcaggtgg

SEQ ID NO: 232060 - DNA, 918 bp, Homo Sapiens
  misc_feature (462)..(471): n is a, c, g, or t
ggggggctcggcgctcaggtggctccttcttcgcttctcccgatccccggcggtgccaggcacggtgccggctgccgagggaacgcctttgtgcccggtgctgggaacccgcgacggtttttacgcgccccggtccattgtttcgcttatctgggttccaggcaggtgcgggcggcgcgcggggtccgcacgtgtcaccccggcggctggggcgccgggacccgcgggcgccggcaggggcgttcccgggcgcgcggcggcgatgaagcacctgaagcggtggtggtcggccggcggcggactcctgcacctcaccctcctgctgagcttggcgggggctccgcgtaaacctagatctttacctgctgctgccgccgcccaccctgctgcaggacgagctgctgcccctgggcggcccggccaactccgcctaagcgctcacccccttctcggcctcgggannnnnnnnnncgcccggtccctcgcccccccaagggcctgggagtctccaacctggcgcgccccccgaaggccacgctggcccggcaggggcctgaacctccgccccaaaaacccgccaacgacccaccaaagaccgcgcacaaaacgcaaacagaaggcccgtcgcccgaatgtagccccgttccccgcctcgcggacgccctccccctcgctcccccccgctatgccacgctgcggcccatcttgttaacccgccccaccgcccctgcgtctcggcccaatctgtcgccctgcgccactgtcaccccgcgcctcgggacaaccccgagagggcgcgaaggcgccgcccgaaaccgcagccacgcccctcatacgcaccgcgcatctcccactcccgcaaccgcatattgccacctcaatgcacccatgccggtcctcgctatcccccacggaacc

SEQ ID NO: 232061 - DNA, 919 bp, Homo Sapiens
  misc_feature (215)..(215): n is a, c, g, or t
  misc_feature (217)..(383): n is a, c, g, or t
  misc_feature (393)..(407): n is a, c, g, or t
  misc_feature (435)..(448): n is a, c, g, or t
  misc_feature (461)..(469): n is a, c, g, or t
  misc_feature (493)..(503): n is a, c, g, or t
  misc_feature (547)..(556): n is a, c, g, or t
  misc_feature (696)..(705): n is a, c, g, or t
  misc_feature (723)..(743): n is a, c, g, or t
ggggtcctgaagccaacctttgatcattcacaggcaggatggctctctctcgggggagggtgaccaggttaattaccctctatttgtgttgactaaaagcccctgtcatttaatgttttttcaataagtgctggcagggctagctagtcagggctcgtggctgccagaactctttctgtgcacggcccagccccctagcggctctttcactgaanannnnnnnnnnnnnnnnnnnnnnnnnnnnnnnnnnnnnnnnnnnnnnnnnnnnnnnnnnnnnnnnnnnnnnnnnnnnnnnnnnnnnnnnnnnnnnnnnnnnnnnnnnnnnnnnnnnnnnnnnnnnnnnnnnnnnnnnnnnnnnnnnnnnnnnnnnnnnnnnnnnnnnngggggcgcgnnnnnnnnnnnnnnnaaaaagaatttttcacacacattttgtnnnnnnnnnnnnnnccacccacaaagnnnnnnnnngaggggccccaatgggcttctccnnnnnnnnnnngggcggggccaaacaccaggggggtgggggtcctcccccacacnnnnnnnnnncgcccccggggggggaagaccgagggcggctcccagaaccatttcgccccggggggcctttttgcggggcccttttctccgggggcctccccaaacgcgggggggccttcaggcccccgcctttacataatactatactnnnnnnnnnngcgggtgcgtacctgcannnnnnnnnnnnnnnnnnnnnctatcctccctccaaaattccccgcggcccagggtggggggccatccctacaaaagagagcgcttgagaggcacgcggtgagaatcggcgcggcggggcgcgcaataccgccttttgcggcgcccgttggaagaatgaaaaaattcctcccccgccggggagaaacccgtggcggg

SEQ ID NO: 232062 - DNA, 988 bp, Homo Sapiens
  misc_feature (576)..(584): n is a, c, g, or t
gggacagctgctgtttcggcgcggggccgggccgctgccgcgacgtgtggaggcaggagatcgatgattgccgcaggagaagtgcgggcgcccttcacctggggcccctcccgaaccgcccccgggcccatgcccctccagggcccaggagcgagccagcgggagggcgagggcgagcgctcctggtgaggacagattaaggcgaacccccagtcagcggacatttgagcggctcctcgccgcggtctctgcccccactccaaaccggactcgacgcctgtcccgggccgcgacgcacgcaccggaggaaaaagtgcttctcggctcgctccctctttgggggaagagagctcactcccccatgcgggcgcgggacactccatctctgttccctgccggtcggccccccaaaccccgggggatcccaccctgcggcgcgcccccagggctaaacgcagggccgttcgggccacggcaaaaccggccttcccaggcatcccgcgcctttaaaacccggggtggtctccccctttttgggggtttcgcctcccttcccaaactaatggcccacagccnnnnnnnnnctcccccgcttttaacgctcctgccttggcaaaccaattcctcgcacccccgtggccaatcccaattttttttccgctcggagggcgcaaaaaaggggataacccgggtaattaaaattggaccgggcaattttccccaaggctcccccaaagcgctaatccgggggggccgtcttggcttcccaacaccttcgacgaagaactttctgcccagggtggcaccgtacccgcatgtgcccgcgcccttccagtaaatatccccctctcccaaaaatcaagccgcccccacgtttccccgtccgtgccaaccccgccccttgacccgcccgaaaggaggcggctcacgctcacctgatgagaaaccggccgctcttagtctcgcatcaaagcgctctcattccgca

SEQ ID NO: 232063 - DNA, 845 bp, Homo Sapiens
  misc_feature (459)..(488): n is a, c, g, or t
ggattgcaaacattgtagcaagtgttaccaacttttattgagttcgaccacgacttcactcctatattttgaaaagctgtttgccaaattgaacataacaataatgggaaaacagattttgctcaatcagacccagctcagtcggaacctaggtttattgtggatctgatataattctagcacaaaacaaggaaacctagcatttaataccaccagaaaatatacaatttctggcaggcattttttagaataccgaaaattgattataccgcgggcgcggtggcctcatgccctgtcatccgcaagcaccttagggaggccctaggggggcccggatccaccctggacccctgggaagggcgaaagaatcacggctgtgaaccctggagggtttacaagaacccccccctgtgggccaattaataagcccggaaaaaaccccccggctacgccccaacnnnnnnnnnnnnnnnnnnnnnnnnnnnnnntttttcaccctcttgtggggccccccttgggggggtggggagccaccccaccccaatgtgggcccccgtggcgggaacaaatcttcccccactcacacgcgtcattatcactcctccggcgaagaaaggcgcgtctttagacaacacgttgttccgcccacacgaggaaaccaccctccgcctctccgcgaagaacacccctccccgcgaaaacagaagatatcttagtacaagacggttctgctttaacatcggcggacccaaacccccccgctacacaaatagcgccccctataaaacccgcgccgcccccgagaatctccccgcggtgggggccaagaaaaccactagccaacg

SEQ ID NO: 232064 - DNA, 832 bp, Homo Sapiens
  misc_feature (401)..(537): n is a, c, g, or t
  misc_feature (544)..(553): n is a, c, g, or t
  misc_feature (707)..(715): n is a, c, g, or t
ggggaagagctgagctcggatggaaccagcttctaccagccaggctgggcacccactgggctgcatctggtggccttttctgattgctatttggactcactgcagctgcagaatgacagaggccatgtccaaaatcccttagagacactgttgtcttagagttgttaaaataagagcccccatatcaggtttagaaaatactgtcaccgaacgaacgtcgctgtcctcagctccacctccctttcctttgacagatatggttgttttctaagccaggactggttttagtcaggtcctgggcgaatcctgaaaaaaagaggtagtacgggtaaggaaggcacccaacaggagtttcacaatccagaaaatatcaaaatataagtgttaaaagagaggcacannnnnnnnnnnnnnnnnnnnnnnnnnnnnnnnnnnnnnnnnnnnnnnnnnnnnnnnnnnnnnnnnnnnnnnnnnnnnnnnnnnnnnnnnnnnnnnnnnnnnnnnnnnnnnnnnnnnnnnnnnnnnnnnnnnnnnnnnacgccannnnnnnnnnctccccgaaatccccgctacttgggcacggcctacagccggagaaccgcctggaaacccggcagcccgcaggttggccgcgcacccccggatccatggcccccccgcctgcacgcgcgggaggaacacaagggccgcccgcctccccctaagannnnnnnnnacgcgcgctgccagccgcacagatccgagccccgccgttgccccctccgccgctcgcctataccggcgcccgccgccgctaaatcccccgcctgcgggtaggatgcccagcttcccc

SEQ ID NO: 232065 - DNA, 1123 bp, Homo Sapiens
  misc_feature (277)..(285): n is a, c, g, or t
  misc_feature (303)..(338): n is a, c, g, or t
  misc_feature (372)..(447): n is a, c, g, or t
  misc_feature (459)..(469): n is a, c, g, or t
  misc_feature (516)..(570): n is a, c, g, or t
  misc_feature (833)..(887): n is a, c, g, or t
  misc_feature (971)..(971): n is a, c, g, or t
gggaccgcaaaggcggccgcggttctaggaacttgacgtgatggggcttcctgaggagcgggtccggagcggcagcgggagccggggccaggaggaagctggagccggaggccgggcgcggagttggtctccgccgcccgaggtccctcgctccgcgcacgttccctcgctgctgcgctaccgcgacctgcaccgccgctccccgcaccatgctacggaacttagcggacattttgccccccggatcccctacaagggttctggcccggtcctccgnnnnnnnnnatcggtggcgggcgttgnnnnnnnnnnnnnnnnnnnnnnnnnnnnnnnnnnnntcgccttccattccccgccgccatccgcggggannnnnnnnnnnnnnnnnnnnnnnnnnnnnnnnnnnnnnnnnnnnnnnnnnnnnnnnnnnnnnnnnnnnnnnnnnnnatcgatactcgnnnnnnnnnnnttaccgtattcccaccccgtgccatcgccggcggcgcggccagacgnnnnnnnnnnnnnnnnnnnnnnnnnnnnnnnnnnnnnnnnnnnnnnnnnnnnnnngcgcctctttatccggccgtccccgttcgccccgcaccgccttctccctacgccgcccgagcgcggacgactcatatttgtctgccgcgcccgctgccttgcgcgtatccttcgccgcacgcccctcgcttacacccgcgcctgtcccttcgtccggcgcccgttaccgccgccgccgtccggtcggcctatgccttctccgcgcgcctccttaattgcgctcctccgccgtccgcggctagaggccactgggtgacacgccnnnnnnnnnnnnnnnnnnnnnnnnnnnnnnnnnnnnnnnnnnnnnnnnnnnnnnntctctacaaacgtttccgcgcaccacccggcccgtgctcgcgctcgccgcacctgcgtctcgatggctctcgcgggatccgcgnctatccgcgccataccgtgtgagaccgcggcgccgccgccggctgttaaatatccccccgccctgctctccacaatgtacatatcgccccgccgcggctcggcgcgcgcgccgtcccactaccatgagtcccgccccccgccgcgcattatc

SEQ ID NO: 232066 - DNA, 1120 bp, Homo Sapiens
  misc_feature (718)..(718): n is a, c, g, or t
  misc_feature (806)..(806): n is a, c, g, or t
  misc_feature (1063)..(1063): n is a, c, g, or t
ggagagcggcgcctcccagcccctgctgatcaacatgtacctgccagatcccgtcggagacggtctcttcaaggacgggaagaacccgagctgggggccgctgagccccgcggttcagaaaggcagcggacagatccagctgtggcagtttctgctggagctgctggctgaccgcgcgaacgccggctgcatcgcgtgggagggcggtcacggcgagttcaagctcacggacccggacgaggtggcgcggcggtggggcgagcgcaagagcaagcccaacatgaactacgacaagctgagccgcgccctgcgctactactacgacaagaaccatcatgagcaaggtgcatggcaagcgctacgcctaccgcttcgacttccaggggcctggcgcaggcctgccagccgccgcccgcgcacgttcatgcccccggccgcagctggtgccgccgcccgcggtcggccccaggaccggcgcggctccaaaaagggtggccccgccgggcctccgcccccgggttgcgcccttcccccggggcccttctcccgaacacttccaaatcctttatatgggcggcgccccttcgggccaccgcccccgaggaaagccgttttccttatgaaacgccgtttttccggggtgtcggggcggccgcccgcgcgcgttctcctgtgtcgagcgtgtcatagtctggaaatccagtgtgggcccccgtangtacctgggcgtgttcgcccagaggcgagagtttccctcgtcggttcgcccggaggccgcaagtggcgctctgtggtaccgtttcgcncaaccgcactacaccagaacgacgccgtttcgggtgtggcgcgaccgatatgcgaagcacgcgtgttcctgacacgtacacacgaccgcgtcactgacgagttgttctctcgcccgctcgccactctagtacgttggatgctcccggccgctcgtatcgccagcatcgtgcgtgcgctgactccttcgcggcagcaccccccgtctgttataacgaggccccacctcatcggctggcgctgtcgttctctggcgacnctcggacccctcgaggtcggcgttggcgtcacaccgccgcgtcgctggacgcactgg

SEQ ID NO: 232067 - DNA, 891 bp, Homo Sapiens
  misc_feature (338)..(338): n is a, c, g, or t
  misc_feature (483)..(536): n is a, c, g, or t
  misc_feature (583)..(595): n is a, c, g, or t
  misc_feature (681)..(690): n is a, c, g, or t
gggacacatatttcggttggacataggtgggcactgacgtagattctttgcttcctgtacttatatgtgaatagcaaagtgttgagaactggaagcatgagtgagtgacatgcaaggaactgacattgaagtaagattcggtgagggtgaggttgcatttgtagaaagtggttatagtccacttagcaatggtcatcacagaggtggctgagggaccagtagatggttctgaaaagggattcctcaaaatttgcaattggttgatggcactcttcatctttctgatgttcatttagaagtgataattactgggaacctgatgctcagcactgtattangcattaaaaggatgaagatgactaagggaacaaaataacagcttagaataattctctcctttttagagcttttccctaactctggcccagtatcattaccaaatcacaatgcctatactctccggccaaaacgagaccttcccgnnnnnnnnnnnnnnnnnnnnnnnnnnnnnnnnnnnnnnnnnnnnnnnnnnnnnncgtctttcgccgcccgtggccccccgtgccgcctttccgctttccgnnnnnnnnnnnnngtcgggccccgcgttgcttcgggtctccgtttccgtgccaccccctgtccctgctcggcgcgcggggcgtcgcccttgctctccgnnnnnnnnnntttgggacctccttccgtgcgcgtccccgttgccgcccgacgtctggcgtcacgcgcgccacgcttggttgtccccgcgcgcgttgtcccgtcgggccctgccctgccgctcccccccctcgtatgtagccgccggcgcctcctggtgcccagcgccccgcgccccgtgtccgctctggcccccccgctccgtcgcgcgcg

SEQ ID NO: 232068 - DNA, 570 bp, Homo Sapiens
ctataaaagaacaactttgtacaaaaaagttgggcaccttccacaacacttgttgaaacctccaaggaagccaaggacaaagcaaaggacacggccctgggccctacctacaaggccaaggacctcgccagccaggcggccaccatgcctccaccctcccaaatggtgtttgtgtaaccaggcctccatccccaatccaacccagatttgccccctgccttggactgccctctccgggtgtactttatcggaatcaatgtggttcgaagggtgtaagttttgcacatacagggctgcggctctgcaaatcccactcagcagttgactctcaacctctaacctgttgtgaggttcttcctgtgctcaccttttctgccttttgagaagaccaactcttctcttggccaacaatagcccgggaagccccaagctggggccctggtcccagtatgtcattcctctcttgtgcatagggctcagccctctccctgtcagcatggctgatctcacacatgttccaggaaggcgggagaccccacaaggggagctgctgcatgaagttgtaaagga

SEQ ID NO: 232069 - DNA, 173 bp, Homo Sapiens
  misc_feature (97)..(132): n is a, c, g, or t
tgcaacaaattgatgagcaatgcttttcctataaaagaccaactttgtacaaaaaagttggatatttgaccccctaaaaatttttgtcctgcatggnnnnnnnnnnnnnnnnnnnnnnnnnnnnnnnnnnnnggactggaaaactttgtgtaactcagagcactaataaaggt

SEQ ID NO: 232070 - DNA, 385 bp, Homo Sapiens
ttggctttgagaacaaacctgacaatacaaaggaggaggaggacttgtatgtggatgtgatccgtgtgaggaaagtgatctctagattgataaacaatgggtgattgaacctgactctgatgctcctcaagaaatgggagatgaaaatgcggagatcacggaggacatgatggatcaagcaaatgaggaaaagtggctgctattgaagccctaaatgatggtgaactccacaaagcccttgacttattcacagatgccttcagtctgaatcgtctcttggccattttgtatgccaagagggccagtgtcttcctggaattacagaacccctatgctgccttcctacactgtgacggagcccttgaaataaatcctgattcccctc

SEQ ID NO: 232071 - DNA, 657 bp, Homo Sapiens
ttggctcagattgggattggcataaccaaaagtgactattcagcgttggatatcaaaacctatgtgttgccccccttcctccgctcccctttcccatgactacgtggccatttcgacttccttctctactcgttgcccatttgctcattgcaaatatgaagcttcttgctcctgtattggtccctagttacttacccttgttttgctgtcaagaccctgctactttttacttcctgattggcaactctcacgactccgcgcacctggccctgaacgatgctcctgtcctgactgaggagctggaagccgccctgctgtgggggtcaaggatatggcacggcatctgcatgagtacatctaagtcctgagcgtgaagctggcttcgcactgtcctatcgccacctactgcaagctgctgtaaggcgaggagagcctgttggctggtatatggagtgggagccgtgaatatctctgtgatgaattccactggtggcagtagcagtggcggtggcattgggctgatccactgtggaaccatgggcagcaatgccgtgagtctctacagcagagcaggtcctgcgctcctgaaggcttattccatccggaccgcatccgccagtcgcaggagtgcccgcgactgagccgcctcccaccact

SEQ ID NO: 232072 - DNA, 931 bp, Homo Sapiens
  misc_feature (687)..(790): n is a, c, g, or t
tgtacaaaaagttgggtcctttaagaatttataatccgttccccattaacttaatttagcttttccatcactgttaatgatcagagtaacaaagtgtgaaaaataagaaaccatcattgatgttaattaacacatttagatgggccagttaaaacagcttcataagttttaaattaattgtaaatggaatattcctcatttaaaatttttgcactgcattttctactgtaaaccaaaagaggttactaagcaaaaccacctaaatttaagttggtgatttaaatgaatctcacattaaaagaagcttgacagtgttatgaaagccaccagactcagccagtgtgtccccatgggtatccccagccatccttgctcaatccattacaggcgtgagccattgcatccagcccgccctcatggcttttacacctcttttcctggtttgcagaaagcaaggctggggtgtggaccctgcatcgaagctggttctgcttatgtccatgtgaagtgctttcaagtaaaatgctgatctgcaaaaagatgctgaaagtcctttgtctctttctggctaagttcaaatgccgaatttgattcagcaaatagttgtgagtgccttgaagtgcaaagaatgatccaggatcaggactccttccctacatatcattattttgatatgtatgtatgtannnnnnnnnnnnnnnnnnnnnnnnnnnnnnnnnnnnnnnnnnnnnnnnnnnnnnnnnnnnnnnnnnnnnnnnnnnnnnnnnnnnnnnnnnnnnnnnnnnnnnnngagtgagtttgcccaggctctatatcattctttttagcatgacctctgataggaggctggcggacagtttcaggacttatcagaagctccaaatatcttacactgctgattaaagagagacctgtgtttgaaaaccaaaac

SEQ ID NO: 232073 - DNA, 474 bp, Homo Sapiens
  misc_feature (66)..(75): n is a, c, g, or t
tggatacagaataattctgtgtaagcaaattgaaatactctttcttttttgtagcgtcacactgannnnnnnnnncctcaagataatttctatacaatttccttaatgtcacaaggaccatatctttcccgacctgtggcaggggccgtgcaggtggataaaggaagagctggtttccggagagtgactgtaacaccgttgactcgaattcttcttggagggggtggccgtctcttacacattggacacctctcaaagcctcctgagggcttctttgtcttctaaaatctctaccggtggtcctcctgcaggttctggctcacaaacatctccatgcctttttttccccccctgacgcaccttggcaaaacatcgtgaccctgagagccttgccccccttagctctgcttcatatcacataacacagactcactcgcaatttgctggacctctttggtattaagtgtttgaatc

SEQ ID NO: 232074 - DNA, 144 bp, Homo Sapiens
ttgcaacaaattgatgagcaatgctttcttttaaaagccccctttgtacaaaaaagttggctcaacataccatatcacagccctatactccctctacatatttaccacaacacaatggggctcactcacccaccccattagcaa

SEQ ID NO: 232075 - DNA, 591 bp, Homo Sapiens
ttgggtgggttcaatccgtgcttctgcctcggcctcccaagtatgtgggattacaggcatgtgcctccaagcccggctattattttggtctgcttatttcactcctgtcctaatgtaggagtgaatagctggaattcatgaataaccagaagaattcagaatttgaaggctcgtggtgatggttattgcctaaaataggatattgcctgaaatgatgctttagaaagcctgtttctctcatgatgttcgtccttattatttcgtaccccacaaaaggcttaggtcggggcttaattgtgatgtaattaaaattagtgatggaatattttggctcatattttatgactttgtatttcatccccatggtctgctcatcgtaaagttcatatctgatattagtttaactataagtattttattaataagaatttattttttgtggactttccaaatgatcggtattgctgattgcattattctattgttcttgttttagttgcacaatcttgtgtttggagaacagctggctaaggatgactctaagtgtactgtttgcatctccaatttgtgtaaagtatttgaatttaaata

SEQ ID NO: 232076 - DNA, 826 bp, Homo Sapiens
tgtacaaaaattttggagggtcctcctggtgccccctgcccttacaacatcatccaaggggagcccgggatccctgggcctgagagccccccgcttttgaaaggacttttagtatggccaagccccatgggtggtaaggtgttacaggattggtgggtatacctggacctgtggtattcctgggtttgattgagcccctgctattaaaggagatatggcatttgccaggtctactgggccattaggatgtcccttaccaccatgtttgcatgggttgccaggatccatggggccctatgccaccccatcggatgatcactgcttccttgggaccccggtgtgtcactcaatttcatgacccctgaacccttctgggaccaaaattctttaccacgggtaatctttgctccacgtgcaaggtttggaaccgttttttggccagaacttgagaaaggatgacagatgcctgcgctagtactacacaatgcccttcctgttctgcactattaacaacgagagcaactttgcatcacgatttgactactcttactgatggtccaccccagatcccatgcccatgtgtttggcgcccatcgcgggggcagacataacaccatttattaataggtgtgctgtgtgtcattgccctgtcttgctgatggccgcgcacaaccagaccgttcagatccattcgtgccccatcgggtgctcgtcactgtggatcggctactcttttgtaatgcacaccttcgctgatgcagatggctctggccaagccctggcgtcccccggctcctgcctggaggagtttaaaagtgcgccattc

SEQ ID NO: 232077 - DNA, 514 bp, Homo Sapiens
actataaaagccaactttgtacaaaaaagttggcccagatgcttccacttctacctttgtttttcaagattgccccagtggaaaatgacgaaattcacaatgaactgactgagatgcaaagttatgtttatcattaatgtctcccgggttgctttaccctcctgcttgcctttggtgcttccagtgctaatgcaaacctgggaagcagttcttggcctgcgcgatacaggtgactgacctacctccagaccatggtattttataacctctttattttctctgggccgaacatgcatttaaagatatccggtggctggttatgcttcttttggaggacttgttgttggaggttctagaaatggctgctactaccttaagcggtctgctacagtgtatctttcttaccatggacagtcctatgcttattcattttgagcaactttgcgaaagtgaactgcctaagaaagcaacgggagaccccggtactgtattaaataccattccttctgcacag

SEQ ID NO: 232078 - DNA, 424 bp, Homo Sapiens
ttggggtgcggggactcaaattgctgctggattctgcgtccaataaagcttcaggaatggctgctttggattgtgacaactaaggcgggccgggccctcaccagaacggccatctgatggcaagtgctgctggatggccagggaaagtggtgggggacaacatgggcctgtgacgtctgtgggtgcccgcgttccccagctccccccgcagcccgctcgaaagtggtccgctcaggttgacaactactggcgcattgtggttgcaaacccagggctgcgtgatctccaccgcttgttgtggcccctgttattgacgtgaccgccagagcaccctctaccctatggaggaactgggtgcgacgcctcaaccctactcggggctggccctagctgacctaaccatagttgtggcaacaatacctga

SEQ ID NO: 232079 - DNA, 116 bp, Homo Sapiens
gacaatcaaaggcaactttgtacaaaaaagttggctgaggcccacccattatcaaatatccagctcttcctccattctggccagtccctgcatcctccctggggtggaggatggaa

SEQ ID NO: 232080 - DNA, 488 bp, Homo Sapiens
ttggattaggtgctgcttccttctttcgcccgtactcccggtacatcctacaccttccttctcctgcatgccgccgaagttggaaaccaacgataatgtattatttaaatgtttaagcaccggaggtgaaatcggtgccacttctgccctggctttcatatccggcccctgggtctgtctctccttgtgtgtggtgaggagtgcgtttgactccaggtgagccgatttggttttccattactaaatgataaatgaacccctctcactcggccatattgagttgtttaaattctatgtgcaatcgagcttacaatgacgggttgaaatgtatcaaacctaatcttcccaatgtttgggatattaaaacacaaagtcctttacatgccaggctcaaggttttataagagttctagatttttaagagaattacacaaatttttgtgtgttataagcccattcattaggattgtgctggttatttggtatta

SEQ ID NO: 232081 - DNA, 381 bp, Homo Sapiens
ccaactttgtacaaaaaagttggctaaaaatcccactcctaaacacatccctattactcgatggatgactatcaggactctgacctcctgccctgctgatacaaaacaactgaactcatataattaatgcactgcttattaacggccatctgaaggctgtatggacttcgtaggtctcccgagtacatcaaatctgaattctttagagagaaccacgacctagcctcttggttctgtgaaaggccatacttcaaagatttacctgccttggatgaaggttgttcctgcagggaactatgttttagactataaaacattttgtattttgcacaatctgaaaatttttttcccatgcatgttccttcttattcccccctgcca

SEQ ID NO: 232082 - DNA, 890 bp, Homo Sapiens
  misc_feature (332)..(385): n is a, c, g, or t
ttggagaaaataactcgtcaagcggctttctcatgtcggccttgccttcctgtgttattgaccaagatgttctcctgggtctgctaattttgtacattctgcttctactaacataacatacaagcacaacatacagaacgtttctgagcacacatgatgcataattaggacactaagacctctaactaaacacactttgcatccccatgattccctctaatacagcgccctttcaggcagttcccccccgccccgttgggcacctttgtcacacatggcgcttgctaaaatacactctttcccgctggtcactgaggcctcgtcctatactnnnnnnnnnnnnnnnnnnnnnnnnnnnnnnnnnnnnnnnnnnnnnnnnnnnnnngtgaggtgacagttgtggggattctctgaggaaggaggctgcacaaaacacattttgtccacttttttatggtaattccccatgatgtcgtctctgaggatactgactttttgtcttggctctgtgtttgatccaggtgaagggcccatttgtcacctggcaggtggtacgggacattttgcatgccacgtttgaagagtctttggataaaacatctcattccgttggacgaagagctcgctacatagtcaaaaacccacaggcctatctcaactataaagtgtgcctggccgaggtgtaccaggataaagcacttgttggagatttcatgaatcgaagaggtgactatgatgacccaaaggtttgtgccaacgagtttaaagaatttgtggagaagcttaaagaaaagttcagttcagctctaaggaattctaaccttgaaatcccagacacactccaggagctgttcgccaggtaccgagttttggcaattggggatgaaaaa

SEQ ID NO: 232083 - DNA, 482 bp, Homo Sapiens
ttggtgaaagctccagatgttggtaatatggtggttatcatcacggttgaacataatggaatgtctcgcaaccttagaatgatcattttatgttttgataggtttcttactggaatttcttctattcctaatcaactaatctgctttgattgattcacaccgatctcaaagtctcacataatcctttcgcaaattctgggattctagtgacatttcgtgttttattcacagagggctggtttttagttttggccgcactgaaaacttatggcgttgaacacatctgatttcccacagcacaacatccctgcatggattagtttgtttttttactgctcactcccaaccttttgtaatgcctttttctgaacttattgttgattgttttctcggactaaagttgtgtaatactaaaatcaacacaacacccaactgctaccaaaaatctattgtggtatgcacttgattaacttataaaatgt

SEQ ID NO: 232084 - DNA, 690 bp, Homo Sapiens
  misc_feature (80)..(125): n is a, c, g, or t
  misc_feature (265)..(344): n is a, c, g, or t
  misc_feature (348)..(409): n is a, c, g, or t
  misc_feature (453)..(594): n is a, c, g, or t
ttggggtcattctgcctaaagcaacctacagattaagtgctatttttatcagactatccatgacgatttttattgaattnnnnnnnnnnnnnnnnnnnnnnnnnnnnnnnnnnnnnnnnnnnnnngtatataagcaggatggtggccatggaagtcagaatccactaaggagtatgtatcaactcacctgccaagaaaaagaaagtatatagtgaatacccttggaaacatctatgtttgtcttcctatcaatccagttcatctnnnnnnnnnnnnnnnnnnnnnnnnnnnnnnnnnnnnnnnnnnnnnnnnnnnnnnnnnnnnnnnnnnnnnnnnnnnnnnnngaannnnnnnnnnnnnnnnnnnnnnnnnnnnnnnnnnnnnnnnnnnnnnnnnnnnnnnnnnnnnnagtactgaattaagctatactttgcaatcaggttatttttacannnnnnnnnnnnnnnnnnnnnnnnnnnnnnnnnnnnnnnnnnnnnnnnnnnnnnnnnnnnnnnnnnnnnnnnnnnnnnnnnnnnnnnnnnnnnnnnnnnnnnnnnnnnnnnnnnnnnnnnnnnnnnnnnnnnnnnnnnnnnntctgtgagtctccaagctacaaaaatcttagaataacacttagataatactggcctctgtaaagaatttatgactaacatctaacatgagtgcaac

SEQ ID NO: 232085 - DNA, 932 bp, Homo Sapiens
  misc_feature (625)..(674): n is a, c, g, or t
ttggtttcattttccctttcaatgaaatggtgtgaagatgggaggcacaagagagggatcctgttttttctgcgggacacgtcttaatcccatcatgcgtgtttcttcagctatgtattctaataatctgctaaagtagaaagtaaaagacctgctattttatctcattgggaccgtacgttttagagatcgggaagtaaacagtccactaaccctgccgataactatcatctggcccggaggagaaccctgcaggtggttgtgagctccttgctgacagaggcagggtttgagagtgccgagaaagcatccgtggaaacgctgacagagatgctgcagagctacatttcagaaattgggagaagtgccaagtcttactgtgagcacacagccaggacccagcccacactgtccgatatcgtggtcacacttgttgagatgggtttcaatgtggacactctccctgcttatgcaaaacggtctcagaggatggtcatcactgctcctccggtgaccaatcagccagtgacccccaaggccctcactgcagggcagaaccgaccccacccgccgcacatccccagccattttcctgagttccctgatccccacacctacatcaaannnnnnnnnnnnnnnnnnnnnnnnnnnnnnnnnnnnnnnnnnnnnnnnnnggataaagtaaacaataggaaaggatttggtggggtgagggtggggtgttgagggctgggcctcatcttgtattctgaaagctgagaaacggctggtcagctggaaggctggtggatgggcaggagtgagccaagctgaggcgttctgcaagaagcagtctgagtctgtccaaccaatttgtatcctgtggggagaacaacttcattcttaacataccctacaaaccagaaaacagtttttaagagatgctgggcatg

SEQ ID NO: 232086 - DNA, 849 bp, Homo Sapiens
  misc_feature (110)..(196): n is a, c, g, or t
  misc_feature (416)..(427): n is a, c, g, or t
ttggtgttaacctacagttgctgtatccacaaattactctttttgttcttgaagttaaaaatacagtgtgcaggaagtgaacacttaatccttaatatccttatttttannnnnnnnnnnnnnnnnnnnnnnnnnnnnnnnnnnnnnnnnnnnnnnnnnnnnnnnnnnnnnnnnnnnnnnnnnnnnnnnnnnnnnngttttagccactactaatttatgattcctcattctttctatttgccgcaaaaatgagccttgcaaattgtgatttaatgaattttatatatgaacaaaatgtaccctgttgcctttttcttttgaattttaaattttattatgtgacttacacattactgtttaataaataattgatgtttattttggaattagtgggttttatttccataatctcaacnnnnnnnnnnnnattaacagaaaaaacaaagagaatttgaagaatatatcagagacaaatatatcacagccaaagctgacttcaggacgcttttgaaagagaccaaatttataacatatagatccaaaaaattaatccaagaatcagatcagcacctgaaagatgtagaaaaaattttacagaatgacaaacggtatctagtactggactgtgtgccagaggagaggcgtaaactgattgtggcatatgttgatgacctggatcgccggggtccacccccacctcccacagcatcggagcccacgagacgatcaacaaaataattctaaatactcttccatagggggcatctattcaaaatgcttgcatgagccaattttcaggtttttacatatatgtgcattagtcaacctattgcgaaaccatctgacaaa

SEQ ID NO: 232087 - DNA, 317 bp, Homo Sapiens
ctattagaacaactttgtacaaaaaagttggtaaacgctcactccctaattagcggtgtatttcttgaactttaatattgtgtttgtgataccgaagtatttgctttaattctaaataaaactttccattttacttttttattgccggtttaggagaattcacactatccgtccgcatcgccccccaagtttcttatttggactcttctcaaaagactcgtaaacttttaccttgcaaagatccctgtattaatcccctcgggtgctctcgagcaggcctcctcgtgagacactgcccccaacggacccattgctgc

SEQ ID NO: 232088 - DNA, 412 bp, Homo Sapiens
aaataaaaccaactttgtacaaaaaagttgggaagttgtcttgcttggagaggttagtaaagcaacgcgcgcgtcaccaaagtcatttctcttccgactcatacgtgatcgatggtgtgcgcagggggcggacttatttgcgcctcccgttccctccctctttccttacgtgtcagcccggcgccgacggacctgtgcgggggaggcaaatggagttcaatctggatgctcgtcgcatcgtccgcatccctctgggcgagatctataactcgcgggtccagcgcggcggcatccatctgcataaaaaccacctggtcgcgctggtgctgcccaccccccgcctattctacctgagcgacccatgccccggcctctacctggccggtcccgctgggaccccggcgccgccacc

SEQ ID NO: 232089 - DNA, 916 bp, Homo Sapiens
  misc_feature (466)..(503): n is a, c, g, or t
taatagccaactttgtacaaaaaagttgggaatgaatccctggaaatagatttagaaagctcagaagcaaattgtaaaataatggcacaatgcgaggaagaaattaataatttttgtggttgcaaagcaggttgtcagtttcctgcttatgaagataatccagtttcttcgggacagctggaagaggtatgtgtctgcgtgttggtatttgacaaaaggatttgatcagagtttaacccaagaacagacatgccagtcaatgaaagatagggttaaattattgggaaattagcttaaatgtcttaaaacttaaattgttctaattttacatgtaaggacttaaaatggatttgatatttatgaatttgaactagacagtagagtttttctggagagaaaaagcttttaaaaatcacaggatgtaagattcctatgtgttgtcttaagatgcatgttattgacctcnnnnnnnnnnnnnnnnnnnnnnnnnnnnnnnnnnnnnnaacgggtgtgagccacggcgcccagcccaggaagagtttttaaattagagctctgtttaattataccactgggaaatcatggttacgcttcaggcatattcttccccagagtactacttacattttaaatttcattttgtaaagttaaatgtcagcattccctttaaaagtgtccattgttctttgaaagtagacgtttcagtcattcttttcaaacaagtgtttgtgtaccttttgccaagctgtgggcatcgtgtgtgagtacagggtgctcagctcttccaccgtcattttgaattgttcacatgggtaattggtcatggaaatgatcagattgaccttgattgactgtcaggcatggctttgtttctagtttcaatctgttctcgttcttgtaccgaattattctactc

SEQ ID NO: 232090 - DNA, 616 bp, Homo Sapiens
  misc_feature (530)..(540): n is a, c, g, or t
ctaaagacaactttgtacaaaaaagttggggttgcgctgctttataaaacaactcttggtttgagctcccttcttttcactgaactcggacattttgggggatctgctcttgcaaaggacatcctttctggcctttgattacttgagaaaagtgagttcctttggggcctgaatggttgactaaaaacaactgctgagtgcctgaaaggtttttcttgaaagagtggtgagacaaagctcttcaaccggaaactttaaatttattttttggattactttcgattaacttgacctaaaatgtccccaattatgacatgcaaatgaaagtgccgttctccattggctcttaaccttgggaatcccccttttcaactcggccaggttatcttcatattttaaaaactgcccccacagaaatatttttcccaaaatatcactcatctttagtcttatcttcttcgtcatccaacttcaaaaacccttaaaatgttttgtttttcggtaactgagaaggatgagcaaaaggtgcnnnnnnnnnnntaacaaatggcaaatagatgaagttgttaatatatctttgcagcttcctagaatgttttgaaagtcttataaagcc

SEQ ID NO: 232091 - DNA, 924 bp, Homo Sapiens
  misc_feature (302)..(564): n is a, c, g, or t
  misc_feature (638)..(790): n is a, c, g, or t
tgtacaaaaagttggcacaaagatagcatgtaggttggtagaaacaatgcttggtgctgaagtattctaacatcattattttgctgggcaggaaaaatgttttgttcacacattgataacttaagtatgtcctgttaaatattttgcaaaagtactaaaataatataaatagaatgcatattaccccaaagagtagcagaaaaggttggggagggggaaccaaactgaagaaagaataaaggaaagaaatgaaacattaaagttacatatacatcacatcacaaaataaaatcatagaaatnnnnnnnnnnnnnnnnnnnnnnnnnnnnnnnnnnnnnnnnnnnnnnnnnnnnnnnnnnnnnnnnnnnnnnnnnnnnnnnnnnnnnnnnnnnnnnnnnnnnnnnnnnnnnnnnnnnnnnnnnnnnnnnnnnnnnnnnnnnnnnnnnnnnnnnnnnnnnnnnnnnnnnnnnnnnnnnnnnnnnnnnnnnnnnnnnnnnnnnnnnnnnnnnnnnnnnnnnnnnnnnnnnnnnnnnnnnnnnnnnnnnnnnnnnnnnnnnnnnnnnntgggctcaagcaatcctcccacttcagtgtcccgagtagttgggactacaggcatgcgtcactacacctaattnnnnnnnnnnnnnnnnnnnnnnnnnnnnnnnnnnnnnnnnnnnnnnnnnnnnnnnnnnnnnnnnnnnnnnnnnnnnnnnnnnnnnnnnnnnnnnnnnnnnnnnnnnnnnnnnnnnnnnnnnnnnnnnnnnnnnnnnnnnnnnnnnnnnnnnnnaagatgtacaattcagtggtttttagtatattcacacacaaaattgcacaactatcactaacatctaattttagatcattttgtaacttcaccaagaaaccccaggtctgtcagcagtcagttccattccccct

SEQ ID NO: 232092 - DNA, 653 bp, Homo Sapiens
  misc_feature (100)..(152): n is a, c, g, or t
  misc_feature (279)..(294): n is a, c, g, or t
  misc_feature (310)..(579): n is a, c, g, or t
atgagccaccgcgcctggcccattttcttcctcttttgaggtaatggatttgtttggagatggcatgttagtagacgactgaatatggaaaggatatcannnnnnnnnnnnnnnnnnnnnnnnnnnnnnnnnnnnnnnnnnnnnnnnnnnnnatggattagtctgaaatttaaagttctggccagtcggttttctttcatcttgtagtttttacagtatttccactgtgcatatgcaaaatgggtattacataactgtatcatatttggtattgataannnnnnnnnnnnnnnngagacggagtcttgcnnnnnnnnnnnnnnnnnnnnnnnnnnnnnnnnnnnnnnnnnnnnnnnnnnnnnnnnnnnnnnnnnnnnnnnnnnnnnnnnnnnnnnnnnnnnnnnnnnnnnnnnnnnnnnnnnnnnnnnnnnnnnnnnnnnnnnnnnnnnnnnnnnnnnnnnnnnnnnnnnnnnnnnnnnnnnnnnnnnnnnnnnnnnnnnnnnnnnnnnnnnnnnnnnnnnnnnnnnnnnnnnnnnnnnnnnnnnnnnnnnnnnnnnnnnnnnnnnnnnnnnnnnnnnncccgggtattgataatttatattccagataattttggtttgggctctttaatatcccacaaggggctcctaaaa

SEQ ID NO: 232093 - DNA, 276 bp, Homo Sapiens
  misc_feature (102)..(123): n is a, c, g, or t
ttggctcgtgtttatattattccacaaatactctgggtgcaacctcatagctctggatcagagtttctaaagtaaatgaatttcttatctccacgaacctannnnnnnnnnnnnnnnnnnnnngatagggagtctcgcttcgtcacccaggctggagtccaaagatccatgctcacctaccccttgccgagctgcttgaggaagaagcacccgacattctcctaatgagagtccacagcacttcaagtgtggatagtcagaagtttgtgacacagc

SEQ ID NO: 232094 - DNA, 676 bp, Homo Sapiens
  misc_feature (216)..(517): n is a, c, g, or t
  misc_feature (535)..(617): n is a, c, g, or t
gaataccaatatatgcataatgaaaaacactaatctgaacatctaagaatcacagagaattccaagtatactataaactcaaagggatccacccctaaacacatcatagtcaaactgtgaatgacaaagagtgtcatgaaagcagcaataaagcaaatcatcacatacaaaggatttcaaataaaattaactgctgacttcttaatcagaaactannnnnnnnnnnnnnnnnnnnnnnnnnnnnnnnnnnnnnnnnnnnnnnnnnnnnnnnnnnnnnnnnnnnnnnnnnnnnnnnnnnnnnnnnnnnnnnnnnnnnnnnnnnnnnnnnnnnnnnnnnnnnnnnnnnnnnnnnnnnnnnnnnnnnnnnnnnnnnnnnnnnnnnnnnnnnnnnnnnnnnnnnnnnnnnnnnnnnnnnnnnnnnnnnnnnnnnnnnnnnnnnnnnnnnnnnnnnnnnnnnnnnnnnnnnnnnnnnnnnnnnnnnnnnnnnnnnnnnnnnnnnnnnnnnnnnnnnnnnnnncccaacttccttgtacannnnnnnnnnnnnnnnnnnnnnnnnnnnnnnnnnnnnnnnnnnnnnnnnnnnnnnnnnnnnnnnnnnnnnnnnnnnnnnnnnncccatccagctgatatccccctatagtgagtcgtattacatgggtcatagcttgtttcc

SEQ ID NO: 232095 - DNA, 1008 bp, Homo Sapiens
  misc_feature (148)..(167): n is a, c, g, or t
  misc_feature (177)..(237): n is a, c, g, or t
  misc_feature (339)..(627): n is a, c, g, or t
  misc_feature (762)..(963): n is a, c, g, or t
ccataaaagccaactttgtacaaaaaagttggatttttaaaaaaacaaacagatgaaaacctcagagaaggcatgtggattataagatttgtctagtaaaaattgtaattgaatatgtttaaatatttaatttctcattttggggggnnnnnnnnnnnnnnnnnnnnagatggtgtnnnnnnnnnnnnnnnnnnnnnnnnnnnnnnnnnnnnnnnnnnnnnnnnnnnnnnnnnnnnncagaccactgctgcagggccatggggtgtaggagcaagggattaaaggtatataggcagaagaagcattttgagtttcacctcaaagaataagaagggttgnnnnnnnnnnnnnnnnnnnnnnnnnnnnnnnnnnnnnnnnnnnnnnnnnnnnnnnnnnnnnnnnnnnnnnnnnnnnnnnnnnnnnnnnnnnnnnnnnnnnnnnnnnnnnnnnnnnnnnnnnnnnnnnnnnnnnnnnnnnnnnnnnnnnnnnnnnnnnnnnnnnnnnnnnnnnnnnnnnnnnnnnnnnnnnnnnnnnnnnnnnnnnnnnnnnnnnnnnnnnnnnnnnnnnnnnnnnnnnnnnnnnnnnnnnnnnnnnnnnnnnnnnnnnnnnnnnnnnnnnnnnnnnnnntaaaaagaaaggttgttctctgcccccagccccatttatatagaaaaacagaagctccacccctcctgtccaaggaaacctggagcacagaggtggggttactttaagacttatggccgggctcagtggcctccnnnnnnnnnnnnnnnnnnnnnnnnnnnnnnnnnnnnnnnnnnnnnnnnnnnnnnnnnnnnnnnnnnnnnnnnnnnnnnnnnnnnnnnnnnnnnnnnnnnnnnnnnnnnnnnnnnnnnnnnnnnnnnnnnnnnnnnnnnnnnnnnnnnnnnnnnnnnnnnnnnnnnnnnnnnnnnnnnnnnnnnnnnnnnnnnnnnnnnnnnnatgccactcctctcaagcttgggtgacagcgcaaaaccctgtcct

SEQ ID NO: 232096 - DNA, 858 bp, Homo Sapiens
  misc_feature (363)..(380): n is a, c, g, or t
  misc_feature (402)..(451): n is a, c, g, or t
  misc_feature (458)..(494): n is a, c, g, or t
ttggcgagtctttgctgtgaagtgcgtctgaacagctcgcttgtgcccgacctactttttccttaaggcccactcgcggaaactagtttcttgtggggttatcgattctgtaccctgagtttcctggagattagtctcccctttgtgccccggggatgaggctggacggcgtcgcgctggcttgtcttccaccccttcccgcgccatgtttggaacggctgttgactggatcccgtgtggagtgtgatggagccttctcgaaacgggaaaacagtcctggccgaaggcttgggtggtgcctgggccggcttatattaggcactgcgtagaatgtttgctcactaagcccaaagaaaggtgtcnnnnnnnnnnnnnnnnnngaaacgggagtctcttgtcatnnnnnnnnnnnnnnnnnnnnnnnnnnnnnnnnnnnnnnnnnnnnnnnnnnccaaacnnnnnnnnnnnnnnnnnnnnnnnnnnnnnnnnnnnnngaggtccaaatggtagcagggatccaaagggaacacagtatgtaggtcaaactggcagtaacagtgtacagcctttgacaaactaaaaatattagagtaggccaaacacacctccaaactgtaaggctgtgcacaaacataaaaaatggcagccttccatctcctgcactggctgagtccatttacttgtgtacttgttctagtgagtggtgggactgtacatttttgaatagacctcaaaaatacttcattctgctgctgttcagttggctttttaaacctgtctgcagtagacactgaaaacagcaagaactttcggggtgaacacccgctgatcctttaacaaggattctggcggaaactc

SEQ ID NO: 232097 - DNA, 888 bp, Homo Sapiens
  misc_feature (43)..(71): n is a, c, g, or t
  misc_feature (329)..(380): n is a, c, g, or t
  misc_feature (463)..(583): n is a, c, g, or t
ttggctgaatattaataaaactttcttagcatcttactagacnnnnnnnnnnnnnnnnnnnnnnnnnnnnntgaaggaaaattaacccagaatccagcagagagcacaaaggagcctaaatagagagcacaaagtacacatgtggatgttccactactttaaaatagaaagaccttatgggaaaccagttctttaagatgtaattctaataagtagtagcagctgcttttaattaggacaggagatgtttaaggcagatttactgacagcatgaaacactgataaattattcatttatttgtttttgggacagggtctcactctgtcannnnnnnnnnnnnnnnnnnnnnnnnnnnnnnnnnnnnnnnnnnnnnnnnnnnaggctcaagcagtcctcccacctcagcctccccagtagctgggactacaggtgcacactaccatggccggctaatctttggannnnnnnnnnnnnnnnnnnnnnnnnnnnnnnnnnnnnnnnnnnnnnnnnnnnnnnnnnnnnnnnnnnnnnnnnnnnnnnnnnnnnnnnnnnnnnnnnnnnnnnnnnnnnnnnnnnnnnnnnagcctactctctgaatttctaaaagtcagtaggttgaccaaaaagtctagaaactggctttaagtcagtatgggacgtacttataaagagtccatggttttgcacgtttcggtagacaagtaaatctgagttatttttcaatgacttaccaatatttgaatagtaactaagatcgtcagtgtatctggacttctttttttgaagttctaaaacaattatagtagggatttattattttgggcctcccatccagatgtttttccaagatcatttttaaaattcatttgtcttctgtttccagataa

SEQ ID NO: 232098 - DNA, 409 bp, Homo Sapiens
  misc_feature (92)..(316): n is a, c, g, or t
acataaaagccaactttgtacaaaaaagttggaaaatatagaatcccgttactttaattatgttttaggaagaaatattttagaactagagnnnnnnnnnnnnnnnnnnnnnnnnnnnnnnnnnnnnnnnnnnnnnnnnnnnnnnnnnnnnnnnnnnnnnnnnnnnnnnnnnnnnnnnnnnnnnnnnnnnnnnnnnnnnnnnnnnnnnnnnnnnnnnnnnnnnnnnnnnnnnnnnnnnnnnnnnnnnnnnnnnnnnnnnnnnnnnnnnnnnnnnnnnnnnnnnnnnnnnnnnnnnnnnnnnnnnnnnnnnnnnnnnaactagaggtagccaaataaaaaagtttatttctcctttatgtgttcagtagtcttaagtttttatggtagcgttgaaaaaagtctgtctttc

SEQ ID NO: 232099 - DNA, 896 bp, Homo Sapiens
  misc_feature (85)..(145): n is a, c, g, or t
ttggctctcgaattgttttctttcttgaataatactaggtacttttgtcctttcccttttgactgtctggtatctttgggtcccnnnnnnnnnnnnnnnnnnnnnnnnnnnnnnnnnnnnnnnnnnnnnnnnnnnnnnnnnnnnntggggagcgggttacatgagcccaggagttctaggccatagtgtgcaatgaagatgcctgtgaataaccactgtactctaccctgggcaacacagcaagaccctatctcttaacaaaaaaatgatggtacagttttggatgtgcagacacatgtcaatacattcttgccccttgcaatcctaggaaaatgctgtcctggcttttccttcccctgaccttgtgcatatttccatagcactgggaaatctaatttctctttcctcccaaagtgctgggatgacaggcatgagcccactgcacctggccctctctggaaattattttaataagtggaaaaagaacattaacctctccccatcttctcagtgtgtctttttattatttctttgctgaaataatgtagaattgtgttttttaggtaaatattgcagattttcaagagaatcagtgggtgacttgtttccaggagtctgctgaagctatccttggacaaaatgctgcttatcttggggaattaaaagacaagaatgaacaggcatttgaagaagttttccagaatgccaacttccgatctttcatattcagagtcagggtcaaagtggagacctacaacgacgagtctcgaattaaagccactgtgatggacgtgaagcccgtggactacagagagtatggccgagacctggtcatgagcatcggagaagtgcattgatgtgagaggagcagtgcccaatcgggcagaagtttgcaa

SEQ ID NO: 232100 - DNA, 588 bp, Homo Sapiens
  misc_feature (311)..(319): n is a, c, g, or t
aaaattaaaaatgggaaaggtattgaaaagtatgcatatgtatgggtgtgtgtgtgtgcgcgcaatcaaactggggtgtaaataaattcccagggaattcgggtatccaaaccctatccccctagggaaagaacctttttttaaactcccctggccttttttatttatttaatttccggggttgggagaggtcggccccaaacaccagagtctgtacttttctataacccagctcaaattagggtagggcataggccaaggaggttcccacctccctaaagaagggactcgaattttagggactttatttnnnnnnnnnttcaaaacaactttcccccttcttgtttgcccaggccaagaaaacggcttttatgcaggctgtacccccttgaaaaatcctttctacagggctgctccaaaaagagcccaagttcgccccccacccgcgggcagacttgaattcccagtcgccaagtcaaccaagctttcttggaaccactccccaaaatttctatttgtacgttccctaattatccacaaaaacaaaatcggtgtattttacaaaccccactcccgggttggtttaag

SEQ ID NO: 232101 - DNA, 812 bp, Homo Sapiens
ttggacctttctttattggttgaacgatttttcttattaattccgataacgaacgagactctggcatgcttctcagttacgcgacccccgagcggtttgcgtcccccttatttcctggggacaagtgttgggcttcttcccgctattgaactttaataggtctgtgaagcacttctatgtcctgggcagatctcccgctacactgactgggtcttcgtgggcctaggctacctggatgttttactctaaccccctgaacctgtttctcaatgggtatcttggattgggttattccttgattactttgattccaagaaaatgcgggtcataaacttgcattaattcaatgcctgccctttgtactggctatccgtcccgtgggactggtgcatggtctacctcttccctccgattgcttcttttggggttttcctgtagcctctgattgggactgagaccatgacttattcttggatcgcttagctttccctgacctttggctgctccctcagataacccctgattatgataaaaacttacccccgtggggatttaaatgtcttggagtcgccgctgaagaggaaatgtctcaggagtctcaagatactgaaaatgactcggaaagtgacaagacggacactctgactagtgagtaggaactatttgaagatcagcaaaccgtacttcacgattctccagcaacagcaattcactgtgatgctgaggcttgttcatgtgccaaataaatattgtcagaccatcccatgtgaaagggaaggggaggtcatatggatcatataacactcaatgaa

SEQ ID NO: 232102 - DNA, 622 bp, Homo Sapiens
  misc_feature (147)..(385): n is a, c, g, or t
cgattagccaactttgtacaaaaaagttggcacagagagataaagtagccttcccaggcttttgtagcttgggatccacacccagccctgctggccctaggaatccgtattcttttttttgtttgtttgagatagtgtttcgctctnnnnnnnnnnnnnnnnnnnnnnnnnnnnnnnnnnnnnnnnnnnnnnnnnnnnnnnnnnnnnnnnnnnnnnnnnnnnnnnnnnnnnnnnnnnnnnnnnnnnnnnnnnnnnnnnnnnnnnnnnnnnnnnnnnnnnnnnnnnnnnnnnnnnnnnnnnnnnnnnnnnnnnnnnnnnnnnnnnnnnnnnnnnnnnnnnnnnnnnnnnnnnnnnnnnnnnnnnnnnnnnnnnnnnnnnnnnnnnngcaagaaaagaaagagaagactgagaataagaagatctctttgaaaataaaataagactgctaaaagtatttggtatacagtctggaaaataaagttgagggaatctctccagataaagagcaaaaagaactagatagacaaatataaagaaagaaaaaagacatagacaatcaatatgtaatgttaggagttcctggcagagagaaacagaaacagtgtacgtgaatatataaaaa

SEQ ID NO: 232103 - DNA, 843 bp, Homo Sapiens
tgtacaaagaagttgaggaagaataaccaaaaaacttataacaaacaccaaacgtaatattatttgtactcgtttaaactttagaatgctgctatttttattacatgttggtggtctgacttcccatttaatggattttgacgtactgaataagcatttcaagacgtgcatgccgtctatcccaacttcacttcaatgcggtaatgtggttacgactagggcttatgttgggggaaaaaacatactatccatctatttttcagcattttgtattagtattggttgaatgatctcctgacactgagtttaaagcagaaatatttttttgacttgcccacttatatgaaacccaaaggaagtcaattctgcagaagagtaacatgttttcttttgctaacagagaatctttcggcacaaatatttacaaatggcttagaggaactaagttggatgcatctcactgtagatattttgggagataactccaccaaggaaagctatgctattctatatctccataagtccttggaagcagatcctaattctggccagttctggtatttcctctgaaggtgctattccagtattgggaaagttcaggatgcctttatatcttacaggcagtctattgataaatcataagcacgtgcagatacatggtgttcaataggtgtgctatatcagcagcaaaatcagcccatggatgctttacaggcctatatttgtgctgtacaattggaccatggccatgctgcagcctggatggacctaggcactctctatgaatcctgcaccagcctcaggatgccattaaatgctacttaaatgccactagacgcaaaa

SEQ ID NO: 232104 - DNA, 349 bp, Homo Sapiens
ttggaaaatatcaatgccgtttccacccagtcactgttggtaagacccttcccaaacgaacaagtcgaatatgttgcttctttatctaccccatcattattgctggcgtttacaaagattcgacaaacgcgcttgcctgtttcacctaatttggccaaaatggtaaagtttggactttttcccattctcatttgttttaaaaaccattacaacccaatacaactgatctttgttttttaactgcagccattggtgctaacatatttatcacctaggaataaactttatttttcaaacctccggaaaaagaacactttttgccaatatgcctgaccactttgtggttttt

SEQ ID NO: 232105 - DNA, 854 bp, Homo Sapiens
  misc_feature (203)..(211): n is a, c, g, or t
  misc_feature (254)..(271): n is a, c, g, or t
ttggaggaagtatacattaagaaaaaacattaaaattttttttatctgtgtcctttgttgccatttctactgaggtgtttaccttttacttacttgttatattctaaatcttttgttagagcctaaaaatatcaatagaatgcatatgtatgtgataaagatagtcactctttgtcatatatgttgcagggcttttgtagggnnnnnnnnnccattttgcacctaaattgcttatgttttctgtttcctagaannnnnnnnnnnnnnnnnngtgtagtgaaatttcgtgttatttcattttgtttccacaactcagtgaaatttatatatatttttcattccactaaccagccatgggccttgagcaaatcactagtatttctagatctcagttattctgtagaattgggagaataatacactattgttttaaagaaagggagatgagccagctgatctcttgatccctctgagcattaggaaccttagaattgtgtagtattacattgtatattttattttttcagatggttgacattactactgaagaactgaaacagcagtttgatcaagaaataaaagtaatggcaaagtgtcaacatgaaaacttagtagaactacttggtttctcaagtgatggagatgacctctgcttagtatatgtttacatgcctaatggttcattgctagacagactctcttgcttggatggtactccaccactttcttggcacatgagatgcaagattgctcagggtgcagctaatggcatcaattttctacatgaaaatcatcatattcatagagatattaaaagtgcaaatatcttactggatgaagcttttactgctaaa

SEQ ID NO: 232106 - DNA, 458 bp, Homo Sapiens
acaaaaaagttggcaatgaacgttctatttataatttactttttcttccctttccaaatatctttccaggactggacccattcatggccccctcctttgacatctacacatacacctagtacagctgagccatcctagtttcctttccctactctagtaattcctcatcactacggcaggcattgcatccaccttattgaaaatcataaggcattgctgtgaaggctattgataatgaataacttgctcaaatctttggaaatgagattaaaattatgattaatttaacttctacagcgcttcacaatgctttccaacatttattctgctgcttacatcatcctaaattttcataaagctttataatttataaaaagcattcaggattttccaataggtactcccatttgaggatccttactttagagatgggataacagaggggcacggaaattgag

SEQ ID NO: 232107 - DNA, 599 bp, Homo Sapiens
ttggctctgttactccaaagtgttccttttttcgagacagtctggctgttgcccagactgctggagtgcatcaattagatcgggggtcattgctgcctctgcctcctgggttcaggcgattctcatgcctcaacctcctgagtggctggaattacaggcgtgagccaccccaaagaccaaatgttttccaaaatgatttttctttcctgatgtatctctatatctccatgcctatactgaaatagtgctacttcaatgcttaatataattctatcaacttgagtagtttgctcttcccttcatcacatacttgaaaaactgaggacaccgttactgttgctttttcaacacattacatgtgggaggtaggagtgaggtggtatgtctactgattttctttggtgacacgttcacagttcagtctaaactggtgggtgggacttgctgctgtcccgcttttcgaccttccccctacctctgaaagtctgtaccgttttaacctttcacaagctgttgaccacagaaactcatatgccacatgcattaataacatgtcttaagttcataattcaataccactggagagagctgttgatctt

SEQ ID NO: 232108 - DNA, 960 bp, Homo Sapiens
  misc_feature (377)..(385): n is a, c, g, or t
  misc_feature (493)..(544): n is a, c, g, or t
  misc_feature (627)..(737): n is a, c, g, or t
ttggatgatgtttttgacaagctaagtgtcattgcagaagactctgagagcggcaagcagaatcctggtgacagctgcagcctcgggaccccgcctgggcaggggccccaaagctaggctctgagaaggaaacacactcggctgggcacagtgacgtactccatctcacatctgcctcagtgagggatcagggcagcaaacaagggccaagaccatctgagccagccccacatctagaactcccagaccctagacttagccaccagagagctacattttaaaggctgtcttggcaaaaatactccatttgggaactcactgccttataaaggctttcatgatgttttcagaagttggccactgtgcccagccaaaannnnnnnnnaattgacagatatttaattgacaaaaattaattgatgaatcaaatatatatgcaaggtgtacagcacagtgtttttttcttttaagagacagggtcttgctgtgtcannnnnnnnnnnnnnnnnnnnnnnnnnnnnnnnnnnnnnnnnnnnnnnnnnnntgggctcaagcagtcctcccacctcagcctcctgattagccaagtagctgggatgacaagcatatgccaccacacctggatannnnnnnnnnnnnnnnnnnnnnnnnnnnnnnnnnnnnnnnnnnnnnnnnnnnnnnnnnnnnnnnnnnnnnnnnnnnnnnnnnnnnnnnnnnnnnnnnnnnnnnnnnnnnnnagcatgaaccacggcacctggcttcaaagtgatgatttgatataattatacattatgtactttcctttttaaaaatttgttatgggtacatagtagtgtatatatagggtacatgagatattttgtacaagcacacagtgcataatgatcatgttgggtagatgaggtatgcatcacctcaagcatttaccctttgtattacaaacaatgtgattatactctt

SEQ ID NO: 232109 - DNA, 855 bp, Homo Sapiens
  misc_feature (256)..(307): n is a, c, g, or t
  misc_feature (320)..(688): n is a, c, g, or t
tgagccactgcgcccagctgtgtgcttatcttttactttccctgccctaccagagatcagctatttctccaaggatccttggttttagtagaaaatgtagtttagaaatcaagatctgggtgttcatttatagaaggggtcattgcttctagaacctctcagcaaacagctaggaagtgtatgtatgaaagtgtgtttgcgtgtgtatttctatgtctatatattttttgagagacagggtctcacactctgtcannnnnnnnnnnnnnnnnnnnnnnnnnnnnnnnnnnnnnnnnnnnnnnnnnnntggtgtcaagcannnnnnnnnnnnnnnnnnnnnnnnnnnnnnnnnnnnnnnnnnnnnnnnnnnnnnnnnnnnnnnnnnnnnnnnnnnnnnnnnnnnnnnnnnnnnnnnnnnnnnnnnnnnnnnnnnnnnnnnnnnnnnnnnnnnnnnnnnnnnnnnnnnnnnnnnnnnnnnnnnnnnnnnnnnnnnnnnnnnnnnnnnnnnnnnnnnnnnnnnnnnnnnnnnnnnnnnnnnnnnnnnnnnnnnnnnnnnnnnnnnnnnnnnnnnnnnnnnnnnnnnnnnnnnnnnnnnnnnnnnnnnnnnnnnnnnnnnnnnnnnnnnnnnnnnnnnnnnnnnnnnnnnnnnnnnnnnnnnnnnnnnnnnnnnnnnnnnnnnnnnnnnnnnttggttgtttcattatggatggaggggatgatggtaaccttattatcaaaaagaggtttgtgtctgaggcagaactagatgaacggcgcaaaaggaggcaagaagaatgggagaaagttcgaaaacctgaagatccagaagaatgtccagagggaggtttatgaccc

SEQ ID NO: 232110 - DNA, 736 bp, Homo Sapiens
  misc_feature (65)..(442): n is a, c, g, or t
ttggcttcgtctgacccagctgttaccacccctggtagcccttttcatagctaccgtggctgggnnnnnnnnnnnnnnnnnnnnnnnnnnnnnnnnnnnnnnnnnnnnnnnnnnnnnnnnnnnnnnnnnnnnnnnnnnnnnnnnnnnnnnnnnnnnnnnnnnnnnnnnnnnnnnnnnnnnnnnnnnnnnnnnnnnnnnnnnnnnnnnnnnnnnnnnnnnnnnnnnnnnnnnnnnnnnnnnnnnnnnnnnnnnnnnnnnnnnnnnnnnnnnnnnnnnnnnnnnnnnnnnnnnnnnnnnnnnnnnnnnnnnnnnnnnnnnnnnnnnnnnnnnnnnnnnnnnnnnnnnnnnnnnnnnnnnnnnnnnnnnnnnnnnnnnnnnnnnnnnnnnnnnnnnnnnnnnnnnnnnnnnnnnnnnnnnnnnnnnnnnnnnnnnnnnnnnnnnnactggggggttctagctctggccttatttcctgagagatggggacggagttccccttctggttccctttggtggttctggcgtggcttcaggcagaagaacagcatggagacctctctcctctgccatctgtcacgtggaagagcagatgggtttttggaagtctttggggcagtgggaaatcaagcttgtctgcaggcagcaggagatactacagttcctggttccggagagaagggccactttctgagagagactcttgctttgttgcccatgctgcagtgcagtggtacaa

SEQ ID NO: 232111 - DNA, 501 bp, Homo Sapiens
  misc_feature (76)..(84): n is a, c, g, or t
  misc_feature (246)..(257): n is a, c, g, or t
  misc_feature (326)..(355): n is a, c, g, or t
ttggccccgactatgtgtgggtgtgtgtgttttcttggtattggtatttcgcgatctatctattgattcctacttnnnnnnnnngcgcctttgccctttgtgctgtactccagctcccgccatcgcttctgcttctccgttcctccaaacgcctgcgtctggacgtgagcgcacgtcgccggtttgtgccttccgtccccgcttctgcccctgccttcccctccttatcacggtcccgctcgcggnnnnnnnnnnnngctgtctcccccgccggccatggcgactgccacgcccgtgccgccgcggatgggcagccgcgctggcgnnnnnnnnnnnnnnnnnnnnnnnnnnnnnntgtcccggctccaggagaaggaggacctgctcgagctccatgaggggctggcggtgtacatcgtgcacgtgcgcagcctggagacggacaacagcccgctgcaggtgacggtgaccgagcacgaggacgtgcgcggccgtgacctc

SEQ ID NO: 232112 - DNA, 232 bp, Homo Sapiens
caaatgttggatcctaagaattgctttaagagtggattgttcattttgagacctgagtcatgcctctgctcccggccgaaaaatgcccgtccatcggtcactcagtgtctgaagggtttggtctccagttcctcttgctgaatttcttgtttttccccctgggaagcgaggtttactttggtgcttgatttcctccttgcagccgattaagcctgccctgaggatcatccct

SEQ ID NO: 232113 - DNA, 428 bp, Homo Sapiens
ccctctacaataagggcccactttgtacaaaaaagttggcttactccaccataaaaactgagaggcatacaatgttatacggatcatttattctaataattccatgctgcgataagaatttgaaacgctgggcttctagataaaataccgcaagggaaagatgaaaaattatgaccgctggtaatatacctcggactaacccctataccttctgcataatgaattatctgtctgccctttgcaaggagagcctgttgccccacccccgaaaccagtcgagcttttcctgggaggaaaaagaggacacccgtctatgtagcacaatagtgggaagatttataagtagaggcgacaaaccttcagttcctggtgatagctggttgtccaagatagaatcttaattcaactttagatttgcgcgcagaacc

SEQ ID NO: 232114 - DNA, 483 bp, Homo Sapiens
  misc_feature (210)..(435): n is a, c, g, or t
ccctgacatagagggcccactttgtacaaaaaagttggtgcagtttacgatgatagaaaggtgagggttccagtccagttctttaatgggcttttgactatatcactcttcagtcacctccatcctttgcctgagggaccatttcccggttctgtggtgtttccctaggctctccctcccttctactgtcttctagaggccggtgttctnnnnnnnnnnnnnnnnnnnnnnnnnnnnnnnnnnnnnnnnnnnnnnnnnnnnnnnnnnnnnnnnnnnnnnnnnnnnnnnnnnnnnnnnnnnnnnnnnnnnnnnnnnnnnnnnnnnnnnnnnnnnnnnnnnnnnnnnnnnnnnnnnnnnnnnnnnnnnnnnnnnnnnnnnnnnnnnnnnnnnnnnnnnnnnnnnnnnnnnnnnnnnnnnnnnnnnnnnnnnnnnnnnatgacataagtgatacgatactaccattggcataagaggtgtatcatc

SEQ ID NO: 232115 - DNA, 506 bp, Homo Sapiens
ccctgctaatgccaactttgtacaaaaaagttggatttgaaatccttccaacaaaatagataggagacttcgaagtgaaagcccaagtcatggcagttcaaaaggatacttttatgttaccttgacctgacctgctgccgctacgatagaaatgagttgcagacatgaaattatttgataaagctaaaggacatgtcccccacctgatcttccttctcaacaaacagttctacgggaaggaattgatgctttgctgccagcccgaaaagagaaaggaaagaatcacctctccgctcctttctaggtccttctttcctcattggaagacaaaacctacccaaccacctcacctcgatctgatccccaccccatgcctcttttttaactcctcccgctctgatgggacatttgttacccttttttcgtaatgaagttgtgtgtcaagcttaatctgaccgttctggtttcttccttttcttccattacatagaaaggaatgtaaactc

SEQ ID NO: 232116 - DNA, 721 bp, Homo Sapiens
  misc_feature (86)..(413): n is a, c, g, or t
  misc_feature (423)..(499): n is a, c, g, or t
  misc_feature (501)..(525): n is a, c, g, or t
gagccagttaaaagggtcaggtctggcactgaacacacggatctggaggcgatttggtttactctcaggtcaaaggcagagaggannnnnnnnnnnnnnnnnnnnnnnnnnnnnnnnnnnnnnnnnnnnnnnnnnnnnnnnnnnnnnnnnnnnnnnnnnnnnnnnnnnnnnnnnnnnnnnnnnnnnnnnnnnnnnnnnnnnnnnnnnnnnnnnnnnnnnnnnnnnnnnnnnnnnnnnnnnnnnnnnnnnnnnnnnnnnnnnnnnnnnnnnnnnnnnnnnnnnnnnnnnnnnnnnnnnnnnnnnnnnnnnnnnnnnnnnnnnnnnnnnnnnnnnnnnnnnnnnnnnnnnnnnnnnnnnnnnnnnnnnnnnnnnnnnnnnnnnnnnnnnnnnnnnnnnnnnnnnnnnnnnnnnnngcagagacannnnnnnnnnnnnnnnnnnnnnnnnnnnnnnnnnnnnnnnnnnnnnnnnnnnnnnnnnnnnnnnnnnnnnnnnnnnntnnnnnnnnnnnnnnnnnnnnnnnnnttttttaaaggcagaaatagatgtggtccaggtgggcatgcaatagatggctgaccaccttgagaaaaatatagcctctctccacgctggggcctccccagggagcctgaggtctccatgaacagagccaggtatctccaagaggcctccagaaacctgcaggtgccctgcagaggggaggccttgccatagcacc

SEQ ID NO: 232117 - DNA, 889 bp, Homo Sapiens
ttggcgacacaggaaacacggggctagagatgtagaagagacttgtgacagtatcaagcactctgtctggagatgaaaaagccacgggccccagggggctccagtcagaggcagcattcaccctgagcatcctccctccctgctggagcagctccccccatccaagtgtgagcagtggtcaggccacctcactccctgctgcagcggctcccacaatccaagtgtcagcagtggtcaggccacctcactccctgctgcagcggctcctcccaatccaagtgtcagcagtggtcaggccacctcactccctgctgcagcggctcccacaatccaagtgtgagcagtggtcaggccacctcactccctgctgcagcggctcccacaatccaagtgtgagcagtggtcaggccaccttactccccgctggagtggctccccccatccaagtgtgagcagtgtggtcaggccacacgagagggctgggctggccaacctaaaagctaccatcagtggctgagaacctgccacttctgtcagggacagaggcagctcaaaagccaaaagcctgagctctggccccagcaggccagctgtgggagcagaggccacatcccctctgcagaaggccacccattaggtcccactacctcaaagtcctgggtctctttgtggtctggggagaggccaaacccacatctctggccttagctctctctgaatcccaggagagttctgacacacaaaccgtatgcccttccacctgctctcactgctgcaggccaccctgcctggctgctggcctgttcccaccatgtctgggactggctctgcactcatgtagagagaggcatcaacagtacctccttctgggtgctctttcctctccccc

SEQ ID NO: 232118 - DNA, 854 bp, Homo Sapiens
  misc_feature (163)..(312): n is a, c, g, or t
  misc_feature (386)..(644): n is a, c, g, or t
  misc_feature (782)..(802): n is a, c, g, or t
ttgggtcaagagaaagatctgttcccacattcttgctaaaaaatacactattttctcatagaaggacatcagcaatgtgtcacaagggacttaagaaacatctaaaccctctgctacagtaaactgacttccggaaatctgtcctaaggaaacaaccagaacnnnnnnnnnnnnnnnnnnnnnnnnnnnnnnnnnnnnnnnnnnnnnnnnnnnnnnnnnnnnnnnnnnnnnnnnnnnnnnnnnnnnnnnnnnnnnnnnnnnnnnnnnnnnnnnnnnnnnnnnnnnnnnnnnnnnnnnnnnnnnnnnnnnnnnatccaattttcaaggatgatttaatgacattggaaatgttcttgctgtcatgttaagtaatgaaagcaggacannnnnnnnnnnnnnnnnnnnnnnnnnnnnnnnnnnnnnnnnnnnnnnnnnnnnnnnnnnnnnnnnnnnnnnnnnnnnnnnnnnnnnnnnnnnnnnnnnnnnnnnnnnnnnnnnnnnnnnnnnnnnnnnnnnnnnnnnnnnnnnnnnnnnnnnnnnnnnnnnnnnnnnnnnnnnnnnnnnnnnnnnnnnnnnnnnnnnnnnnnnnnnnnnnnnnnnnnnnnnnnnnnnnnnnnnnnnnnnnnnnnnnnnnnnnnnnnnnngccctgcgcagctataaagggagcaaggaagaactttatatacttatttgaaaagattggcagggtattttgttaagataaaatcaagatacagaaaaaattatgtaataaactatgtgtaagaaaaccaagttcagnnnnnnnnnnnnnnnnnnnnnataaacattgtgagtttagctgtggaatatgtgtcagcttatctctatgtga

SEQ ID NO: 232119 - DNA, 188 bp, Homo Sapiens
gagatggatggacgctcttattgcggcaaatcctgagaccctgctgatctgattggaaaaaccttgtctctattaaaagaaaattgattggttgagagggaaggtgcacctgtggtccagggctccttggcctatgacggagtcatggataaggattgcttggaccctgaacatggaagctccattga

SEQ ID NO: 232120 - DNA, 594 bp, Homo Sapiens
ctttgtacaaaaaagttggaaagaatcatcgttgaggacctccctgaagatttgtatgatggaggagtcctgcagaagcttttctagaaactggagagtgataagctaattgtggctgatgacgccccctcataaaatgctcataagcaaaaactgctgactgtcgtggagaagatcaatgatgccctgatacttcctcccaccagcatcatgtggaatgtggattctgttcttgctgccagcctgctggcgatcttattactgctcgttgctctgtctccttatttcttcgccccaattctactcctacaccatgtttccttcctcgtggttgtggtccacaaaagacaaggaatcctcctctctccgcaaatcctcgaggaaataactggtaacacagaggctctttcttggaggcaggatcatgatgcctttgataccttgttctaccatgccccccacaacctgaatgtggtgaaaaaaacactcatcatttttttgaacaaccacctgaataatctgaacctgcaggacaccgaactggaaaccccctttgctgatggtgtgtacctggtgctgctcatggggctcctg

SEQ ID NO: 232121 - DNA, 914 bp, Homo Sapiens
  misc_feature (59)..(93): n is a, c, g, or t
  misc_feature (118)..(136): n is a, c, g, or t
  misc_feature (360)..(410): n is a, c, g, or t
  misc_feature (501)..(509): n is a, c, g, or t
ccgccgattttttcttgttgtgggtttgtggggggtttcgtagggacccgccaaaaaannnnnnnnnnnnnnnnnnnnnnnnnnnnnnnnnnnaagaagaattttttatgaccccccnnnnnnnnnnnnnnnnnnngagggaaaccccccaaggtacctcgtgagggaggacgcccagggagggccggccccaaacgggccaaccctgcgtgggcggcctaacaattccctccttcccaccaaaagagcgcccgcggggcatagtgcaagaaagcggaaaatcaataagacatagccaccggggagagaggtgggagcccatacccctcccaacttaacctcaaaaaagaagggaaccannnnnnnnnnnnnnnnnnnnnnnnnnnnnnnnnnnnnnnnnnnnnnnnnnngacgagggccaacaccaccgaaacaaggacgagcacacccccagcgccagaaaggaaaggaataaccgcaacaccaggggacagaaagaannnnnnnnnagaacccaaaacactaaaagagagagatcaacgacccgccagcggaagggaaaaaaaggcaaagaaagacggagaggacgccgacacgccccgcaaaccgcacccccaacaaagacaccacaaaaactaaacaccagtgacgcacccccgcccccgtaccacaacataaaacacggccgggcacaacacacaaagcccttaaattatttcccacgaaccaaaaagaacccaaagcagacccacggggacagcgggggggcgcgctgaccggccgattctcccttttacttggcttcccctatccttgggcggttatgagactcataactttttcctttccccacccccccaaaaaaacacaaaataatattgggggcgtgcgcgtttccaacatctcaaagacag

SEQ ID NO: 232122 - DNA, 564 bp, Homo Sapiens
  misc_feature (72)..(129): n is a, c, g, or t
  misc_feature (137)..(187): n is a, c, g, or t
  misc_feature (293)..(302): n is a, c, g, or t
  misc_feature (320)..(328): n is a, c, g, or t
tttgtacaaaaaagttggggcttctctgctcgattgctcccgcggcgcgaggagctctcgctctcctcctcnnnnnnnnnnnnnnnnnnnnnnnnnnnnnnnnnnnnnnnnnnnnnnnnnnnnnnnnnnacgcagannnnnnnnnnnnnnnnnnnnnnnnnnnnnnnnnnnnnnnnnnnnnnnnnnngaagagaactagagggcgacgaagcgcggcgttcccgggccggcccggccccctcccttcggcatcgcctgtgttccacctacttcctccgcttccacctcctctnnnnnnnnnnaagttgaaggccccattnnnnnnnnnaggcccgggacctaagaacactatggaattctaaatgatccctctacccctcctaggatatgcccatatattactgtgtcatatgtccccccggggatacttattgttatcaatttgacttctggggccagggaaccgtggtcaccgtcttctaactctccaccaaggggccattggtcttcttcttgttcttctcctccaagagaacttttggggggacactggtcctgggctgc

SEQ ID NO: 232123 - DNA, 200 bp, Homo Sapiens
  misc_feature (43)..(75): n is a, c, g, or t
tacaaaaaagttgggcacaactttcgcctcaaaaaagttgggnnnnnnnnnnnnnnnnnnnnnnnnnnnnnnnnncaattaagcgggaactaaagccgggcccacccataaccctccccacgggcagccaggggcacccggggcccggtcaggccgggctcaaaaatgaaaccccttaagcaggattgaaaacccttgaa

SEQ ID NO: 232124 - DNA, 843 bp, Homo Sapiens
  misc_feature (265)..(313): n is a, c, g, or t
  misc_feature (349)..(659): n is a, c, g, or t
  misc_feature (662)..(712): n is a, c, g, or t
ttggggagaaaaagcatatgagatacagaagaacaaagataagaatgagacagatttctttttagaaatgatgcaaatcagaagataatggtatgacacctttactgaataaaacattttttggggtcaatgtagaattccacatctagcaaaacatcctttaaaatttttaccctaggctgggcatggtggtggctgaagcaggaggatcacttatgtctagaagttcagggttatagtgtgctatgattgtgcctgtgaatannnnnnnnnnnnnnnnnnnnnnnnnnnnnnnnnnnnnnnnnnnnnnnnntaaaatttcaccttaagataaaataaaggcttttannnnnnnnnnnnnnnnnnnnnnnnnnnnnnnnnnnnnnnnnnnnnnnnnnnnnnnnnnnnnnnnnnnnnnnnnnnnnnnnnnnnnnnnnnnnnnnnnnnnnnnnnnnnnnnnnnnnnnnnnnnnnnnnnnnnnnnnnnnnnnnnnnnnnnnnnnnnnnnnnnnnnnnnnnnnnnnnnnnnnnnnnnnnnnnnnnnnnnnnnnnnnnnnnnnnnnnnnnnnnnnnnnnnnnnnnnnnnnnnnnnnnnnnnnnnnnnnnnnnnnnnnnnnnnnnnnnnnnnnnnnnnnnnnnnnnnnnnnnnnnnnnnnnnnngannnnnnnnnnnnnnnnnnnnnnnnnnnnnnnnnnnnnnnnnnnnnnnnnnntgtaatattaaggaaagttctttacgcagaagaaaaataaaaccagatggaaacttagatctatgcaaagggatggagagcataacgaatgctaagtataaatgtatttcattcttatttaaaatgtattt

SEQ ID NO: 232125 - DNA, 218 bp, Homo Sapiens
taaaaaagctaacttcttgttggaatattatttttgtctgcagagcctgcagtgaggctggatttaaggtggtgtgtttgagccatttaataatgaaacccaactaggcagacaaagcgctctgaatgattccgattctgctgctatgggacgcaagcttggtcaaacttttctctgtggagattgatacacataccaaaatgacaagccaaacattt

SEQ ID NO: 232126 - DNA, 785 bp, Homo Sapiens
  misc_feature (70)..(517): n is a, c, g, or t
  misc_feature (590)..(618): n is a, c, g, or t
ttgggttaacaaagcagtcgaagtaaatatcaccaatactgtgatgagagatagacgtcaggttccttcnnnnnnnnnnnnnnnnnnnnnnnnnnnnnnnnnnnnnnnnnnnnnnnnnnnnnnnnnnnnnnnnnnnnnnnnnnnnnnnnnnnnnnnnnnnnnnnnnnnnnnnnnnnnnnnnnnnnnnnnnnnnnnnnnnnnnnnnnnnnnnnnnnnnnnnnnnnnnnnnnnnnnnnnnnnnnnnnnnnnnnnnnnnnnnnnnnnnnnnnnnnnnnnnnnnnnnnnnnnnnnnnnnnnnnnnnnnnnnnnnnnnnnnnnnnnnnnnnnnnnnnnnnnnnnnnnnnnnnnnnnnnnnnnnnnnnnnnnnnnnnnnnnnnnnnnnnnnnnnnnnnnnnnnnnnnnnnnnnnnnnnnnnnnnnnnnnnnnnnnnnnnnnnnnnnnnnnnnnnnnnnnnnnnnnnnnnnnnnnnnnnnnnnnnnnnnnnnnnnnnnnnnnnnnnnnnnnnnnnnnnnnnnnnaatatcatgtgaaattcactttcaaacagttccaaaaaacacagtgatatatatgtatatatatgggtgtatnnnnnnnnnnnnnnnnnnnnnnnnnnnnngagaaagcagtgtaataaaagttaagatcatttgggaaatctgggaattcttttacaatcttaggaactattctctaatgaaattatttaaatatgaaatgttacagtatttaatatgaaaaagagtgagttcgctgtatgtattctctcatgcaaaagtatcggca

SEQ ID NO: 232127 - DNA, 930 bp, Homo Sapiens
  misc_feature (666)..(691): n is a, c, g, or t
  misc_feature (719)..(878): n is a, c, g, or t
ttggcagtcgaacttcaacttttatgttaagagttttgtgatgaacttcaaaaacaataattctaagtggaagacctataaaggaattgtgaataatgaagaaaaggtgtttcagggtaactctaactttcgggacccagtgcaaaacaatttcatccctcccatcgtggccagatatgtgcgggttgtcccccagacatggcaccagaggatagccttgaaggtggagctcattggttgccagattacacaaggtaatgattcattggtgtggcgcaagacaagtcaaagcaccagtgtttcaactaagaaagaagatgagacaatcacaaggcccatcccctcggaagaaacatccacaggaataaacattacaacggtggctattccattggtgctccttgttgtcctggtgtttgctggaatggggatctttgcagcctttagaaagtatggtgactttacatgtttaaatttcttctctaattatgcgaacaataaaaaaccaaaaagtttattcttcagaaatgcatatgtacaaaagcagcatggcttctttcaaaataaaatgttaacttatattttacaaacaagttagataaaagtagaaatgatcgagtattactttattaatctttttttatagacagggtctccctgtgtctnnnnnnnnnnnnnnnnnnnnnnnnnntgctcaaactcctgggctcaagcaaacnnnnnnnnnnnnnnnnnnnnnnnnnnnnnnnnnnnnnnnnnnnnnnnnnnnnnnnnnnnnnnnnnnnnnnnnnnnnnnnnnnnnnnnnnnnnnnnnnnnnnnnnnnnnnnnnnnnnnnnnnnnnnnnnnnnnnnnnnnnnnnnnnnnnnnnnnnnnnnnnatgagccaccgcaccccaccatgtattactttataagcagttcttgtcattt

SEQ ID NO: 232128 - DNA, 132 bp, Homo Sapiens
aaagccaactttgtacaaaaaagttggctgacacctgcctatttgatccacaggatgagtcttgttgaactgggtttggctacctgtgacccccctgctgatgattgtgtcgctgctgtacatgaataactg

SEQ ID NO: 232129 - DNA, 162 bp, Homo Sapiens
ttggaaaagcattgccgataccacaaactttgttgagtttccagaatctgatattcttaagccaaaagtggcctaccctgtcctcctgagactgactactttaactcagactgggtcttcatcctttacgcgtaaaagggctttgagggcctgacggcaagg

SEQ ID NO: 232130 - DNA, 103 bp, Homo Sapiens
actatttaagccaactttgtacaaaaaagttggccttgatctctccctaaaaatatggaatggatcgctgaaaaatccggggaggacccgggctgaggaaaaa

SEQ ID NO: 232131 - DNA, 885 bp, Homo Sapiens
  misc_feature (199)..(497): n is a, c, g, or t
ttggatatactttcaccagagggctacacttaatgctgacacaccttagtcactattagttaatgtaatttatgttcagaattactgtgtttaaaattaaatgactttgaagacctttgtttttataaactctcttctgaaaaaaatatagaattaatcaagattgtacatttattttatatctaatactggagaaagnnnnnnnnnnnnnnnnnnnnnnnnnnnnnnnnnnnnnnnnnnnnnnnnnnnnnnnnnnnnnnnnnnnnnnnnnnnnnnnnnnnnnnnnnnnnnnnnnnnnnnnnnnnnnnnnnnnnnnnnnnnnnnnnnnnnnnnnnnnnnnnnnnnnnnnnnnnnnnnnnnnnnnnnnnnnnnnnnnnnnnnnnnnnnnnnnnnnnnnnnnnnnnnnnnnnnnnnnnnnnnnnnnnnnnnnnnnnnnnnnnnnnnnnnnnnnnnnnnnnnnnnnnnnnnnnnnnnnnnnnnnnnnnnnnnnnnnnnnngaaattattaaaaagttattgaggagcccaaataacttctgtttatgtgagttatacctattgctatttacaatattagaaattaacactgagaagtttttaaattttattaatttatttaaaattatattaaactatatcacatattaacataaataatatagtattttcatgaaaaatgactatatttttcaaaacaaaaacagtttattgagaagactgacattgtttttcattttttccagggtctaatatctggcttaattgaaaacagctttctgcattcaatatgttgtaatgtgttttggttgtactctatgaagaaatttgaccttatcaaatatataatgttaaagagaatttaaatacttctcaaatgattagagat

SEQ ID NO: 232132 - DNA, 129 bp, Homo Sapiens
  misc_feature (60)..(69): n is a, c, g, or t
ctcttctcctcttggcacatgcgtattcagttataaataagccatgcctttcttttgtannnnnnnnnnaagagaacgaatttaatttggttctgagtttaattcctggctctgggaaccttatttttt

SEQ ID NO: 232133 - DNA, 960 bp, Homo Sapiens
  misc_feature (183)..(206): n is a, c, g, or t
  misc_feature (208)..(468): n is a, c, g, or t
  misc_feature (547)..(583): n is a, c, g, or t
  misc_feature (611)..(843): n is a, c, g, or t
ttggcatgtttttctcctgaaccatttgaaagtatgttgcttacttcaggcccccttgttcctcaattatttagtgtgccacggtacagttgtcaactttaggtagtaaacatggatgcagttttttaaatcaaatgtttatcgttcatattctagtttgttcagttgattcggtaatgttcnnnnnnnnnnnnnnnnnnnnnnnngnnnnnnnnnnnnnnnnnnnnnnnnnnnnnnnnnnnnnnnnnnnnnnnnnnnnnnnnnnnnnnnnnnnnnnnnnnnnnnnnnnnnnnnnnnnnnnnnnnnnnnnnnnnnnnnnnnnnnnnnnnnnnnnnnnnnnnnnnnnnnnnnnnnnnnnnnnnnnnnnnnnnnnnnnnnnnnnnnnnnnnnnnnnnnnnnnnnnnnnnnnnnnnnnnnnnnnnnnnnnnnnnnnnnnnnnnnnnnnnnnnnnnnnnnnnnnnnnnnnnnatgagccaccacacccagccagtaatgttctttataggattttttccccctcccctccattagggaatccagtccaggnnnnnnnnnnnnnnnnnnnnnnnnnnnnnnnnnnnnnaatggttattattatttttgagacaggnnnnnnnnnnnnnnnnnnnnnnnnnnnnnnnnnnnnnnnnnnnnnnnnnnnnnnnnnnnnnnnnnnnnnnnnnnnnnnnnnnnnnnnnnnnnnnnnnnnnnnnnnnnnnnnnnnnnnnnnnnnnnnnnnnnnnnnnnnnnnnnnnnnnnnnnnnnnnnnnnnnnnnnnnnnnnnnnnnnnnnnnnnnnnnnnnnnnnnnnnnnnnnnnnnnnnnnnnnnnnnnnnnnnnnnnnaggattatttattgaattttattgtcatatatttttagtctccttcaatctggaatacttcgtcagccttttctttgtcttagacattgacaattttggaagaataaaggtcccccc

SEQ ID NO: 232134 - DNA, 468 bp, Homo Sapiens
tgagcaatgctttttcattatgaaaactttgtacaaaaaagttggaggaagggaagtttttaagtttccctgtgacaggacgaatttaaaatcttccaaaggaggagggaggatgtggcattggtggtctgacgcagggtggccgcaccatcttggtgtattgtgaagtctggatgtctatgccaagtttccgctgcgcattatctgcctacttgaatgggtttgataacgttgccttaactgtctgtgtgaggacagaaatgacctgcaggacccgttgttgattagtgcacgggggcagctcctcatgcaactcatttgctctccagatcgacggctgtacattgaggatggttaaaacccccttgatatgcgcataaagcccattctccacaccttggccctgtgaaccatgccccagtcttatttggagctgcacctctggatcacaccgaccccttacaatga

SEQ ID NO: 232135 - DNA, 647 bp, Homo Sapiens
  misc_feature (95)..(151): n is a, c, g, or t
  misc_feature (197)..(576): n is a, c, g, or t
ttgggagcagtcttttcaatgaatggcgctgggacaactaaatatttacatgcaaaagaatgaagttggactcttataacctaataccatacacnnnnnnnnnnnnnnnnnnnnnnnnnnnnnnnnnnnnnnnnnnnnnnnnnnnnnnnnncagagcacaagctttatgacattggatttggcattaatttttggannnnnnnnnnnnnnnnnnnnnnnnnnnnnnnnnnnnnnnnnnnnnnnnnnnnnnnnnnnnnnnnnnnnnnnnnnnnnnnnnnnnnnnnnnnnnnnnnnnnnnnnnnnnnnnnnnnnnnnnnnnnnnnnnnnnnnnnnnnnnnnnnnnnnnnnnnnnnnnnnnnnnnnnnnnnnnnnnnnnnnnnnnnnnnnnnnnnnnnnnnnnnnnnnnnnnnnnnnnnnnnnnnnnnnnnnnnnnnnnnnnnnnnnnnnnnnnnnnnnnnnnnnnnnnnnnnnnnnnnnnnnnnnnnnnnnnnnnnnnnnnnnnnnnnnnnnnnnnnnnnnnnnnnnnnnnnnnnnnnnnnnnnnnnnnnnnnnnnnnnnnnnnnnnnnnnnnnnnnngtcatttatgtcatacccaactaaaatgagtcaagaagccatgagaaaaacactaaggttacatacacctg

SEQ ID NO: 232136 - DNA, 451 bp, Homo Sapiens
ttggaaagcagacccatccctaactcactggatgacaaggctcgcctcttgcctggccaaattgatacatgtctgacacaagcgagagtggtggaggtctgactcgcttccttgctgaagcttcctaaaaagacagtaactcgatgatgcatactcagttgactgtgacccacaatgaggaggtcccacacacacccaaggcctcacacgcactggaggtctcacacgaagtaaaggtctcacaagcatctggggtctcacaggccaccgaggtatctcagacccaccaggcacgggaggcacctgcctcccacgcctcgtctactactcacctgactgatacccacgttctggcagctgaataaaaaagtcaatcaactgactcaaacaaacaaaatgatgacccacacgctgtgacaatgcctgccactgacaccaaaaaggtcagcca

SEQ ID NO: 232137 - DNA, 328 bp, Homo Sapiens
  misc_feature (57)..(118): n is a, c, g, or t
  misc_feature (155)..(214): n is a, c, g, or t
ttgggccaatgcctctgccagactcccagttcagggggccgtgcccgatggtgaagnnnnnnnnnnnnnnnnnnnnnnnnnnnnnnnnnnnnnnnnnnnnnnnnnnnnnnnnnnnnnncgggcccctgtcggctcagactgacaagcccggcgannnnnnnnnnnnnnnnnnnnnnnnnnnnnnnnnnnnnnnnnnnnnnnnnnnnnnnnnnnnggggaaagataagaggatgtgtcctctcaccgtgcctcccttcttgggtcctgagtttgcctgattgactgtgttctggaagcatacctagagaattgcttacatgaatttgga

SEQ ID NO: 232138 - DNA, 458 bp, Homo Sapiens
ttggcacttggctaccatcctcatttccctcagacttcaatatttaaacagaacttggcgaagaggccttttattatgtgaatatctccttagtgatgtgtctaactgaaccttatttcaagccttttgtgatgactgcattcgtctgcacatacactgtcgccttaattgttagttctttctcaggaaaagaattagccattattcatgaccagaagtaggcttttgatgtttctacctctgccatcccgcgtcgtcatgactgggcagcaactcataattatcggagaagctgcaccctgtattctcgtgttcattgtgttgcccacccgctggatcataacccttgacaatcctacggcaatgggaagctcctggttaatctctggtgcagctgaatattaccctaatgcctgatgtgacctcacagtggggcctctctgtctggggaccactga

SEQ ID NO: 232139 - DNA, 567 bp, Homo Sapiens
ttggacccgacgaaaggtgtggagggtacgtaacttagcactggatcactttaatttaatcttactttcctttgacctgactgcattgcttagacaggatttggcttgacgaaatgacatgcctaaattcaatcctatcttaaatccaattcacttcaaaataacaaaattacaattttatttccaatcgaatcgattcattttattgtctacactaactcatctcctctccctatgcggatgggatggttgattttaaccttttatttccactcattgaattgaaatgtagagttgacttggctgtgtgttttgattataagattcatgccttgcattgtcataatgcattgcatatcatatactatgcactttacctttgagaatatgttcatttcacgctcccttccctatgggagaggcgatctctgatctgatatgcatatcatatgatatctttccattctcacttcatcgtatggattggaacgtgacctgagatttggaaatgaatgtattgctcatcatatcaatcggaatgtaatattgcattgtacttgacttttt

SEQ ID NO: 232140 - DNA, 411 bp, Homo Sapiens
  misc_feature (80)..(350): n is a, c, g, or t
ttcactggtgatataattctctacctgggaaacttcaccgaaaaagatttcaccaaaagatttctaagcctaaataatgnnnnnnnnnnnnnnnnnnnnnnnnnnnnnnnnnnnnnnnnnnnnnnnnnnnnnnnnnnnnnnnnnnnnnnnnnnnnnnnnnnnnnnnnnnnnnnnnnnnnnnnnnnnnnnnnnnnnnnnnnnnnnnnnnnnnnnnnnnnnnnnnnnnnnnnnnnnnnnnnnnnnnnnnnnnnnnnnnnnnnnnnnnnnnnnnnnnnnnnnnnnnnnnnnnnnnnnnnnnnnnnnnnnnnnnnnnnnnnnnnnnnnnnnnnnnnnnnnnnnnnnnnnnnnnntccgtgctgcctaaagcaacttacagattaagtgctatttctctcaaactataaatgcaac

SEQ ID NO: 232141 - DNA, 419 bp, Homo Sapiens
  misc_feature (223)..(232): n is a, c, g, or t
ttgggacgctcctggggcgggcgttcctgatgccgtgggcaagagtatgactgttggaattattgtcatcctggtcacaggagaccctccaatccctgctaatcctaatgccgaaggtgtgggcgtcttcgcctagcgcaatgataccgtggagcacattgctgcccgcctgaacatccctttctgttcagtgaaccccagggatgccaaggcctgcgtaacnnnnnnnnnngatctaattgacatgacctccgttcctctggatgacattttgaagtaccaccttgccctagtgtttgccaggacctcccctatgccaaccctcgtcattgtggaatgttgccaaaaagaagatgctatcgaggctgtgactggtgacggggtgaatgactctcctgcttttaccagggcaaacattg

SEQ ID NO: 232142 - DNA, 935 bp, Homo Sapiens
ttggataatgaaccccatatttgttagacaggttaggtataagatggtctaataaatggtatatgcaactagaaatatttgctattactattgatatcttcaatactcaccattatactcaccattattacttgtgcttatgaaaattttcacagtaaggatcttctcagatcatttactttaaaatgtacacatcttcccagaaatcccattaatataactattgccatattttaacagcaaaagacccaaaactatatccatagatgaaaatatggaaccaagtcctacaggagacttttacccctctccaagttcaccagctgctggaagtcgaacatggcacgaaagagatcaagatatgtcttctccgactactatgaagaagcctgaaaagccattgttcagctctgcatctccacaggattcttccccaagactgagcactttcccccagcaccaccatcccggaatacctggagttgcacacagtgtcatctcaactcgaactccacctccaccttcaccgttgccatttccaacacaagctatccttcctccagccccatcgagctacttttctcatccaacaatcagatatcctccccacctgaatcctcaggatactctgaagaactatgtaccttcttatgacccatccagtccacaaaccagccaggtaaaaataagagagaaaataagattagcacctaagggagatgggacagatctaattctgagacacaaaggttagtcagacagtgtgtctggcagaacgtcaagccttgaaatccatcttcagaagttgcttggtgactcaataagtttttatttaaaggtggctgaatgacaggtaggaagtgtgttgccccaacggtacatttgtgaagatggtttaatgtttttggattttcactgactgaagggaaagttta

SEQ ID NO: 232143 - DNA, 861 bp, Homo Sapiens
  misc_feature (74)..(229): n is a, c, g, or t
  misc_feature (234)..(296): n is a, c, g, or t
  misc_feature (298)..(386): n is a, c, g, or t
  misc_feature (394)..(776): n is a, c, g, or t
atgcgtgatgtacttgtgtatcagtgtgtctgtacgtctgtgagtatgcgtgatgtacgtatcagtgtgtgtannnnnnnnnnnnnnnnnnnnnnnnnnnnnnnnnnnnnnnnnnnnnnnnnnnnnnnnnnnnnnnnnnnnnnnnnnnnnnnnnnnnnnnnnnnnnnnnnnnnnnnnnnnnnnnnnnnnnnnnnnnnnnnnnnnnnnnnnnnnnnnnnnnnnnnnnnnnatcannnnnnnnnnnnnnnnnnnnnnnnnnnnnnnnnnnnnnnnnnnnnnnnnnnnnnnnnnnnnnnannnnnnnnnnnnnnnnnnnnnnnnnnnnnnnnnnnnnnnnnnnnnnnnnnnnnnnnnnnnnnnnnnnnnnnnnnnnnnnnnnnnnnnnntatcagtnnnnnnnnnnnnnnnnnnnnnnnnnnnnnnnnnnnnnnnnnnnnnnnnnnnnnnnnnnnnnnnnnnnnnnnnnnnnnnnnnnnnnnnnnnnnnnnnnnnnnnnnnnnnnnnnnnnnnnnnnnnnnnnnnnnnnnnnnnnnnnnnnnnnnnnnnnnnnnnnnnnnnnnnnnnnnnnnnnnnnnnnnnnnnnnnnnnnnnnnnnnnnnnnnnnnnnnnnnnnnnnnnnnnnnnnnnnnnnnnnnnnnnnnnnnnnnnnnnnnnnnnnnnnnnnnnnnnnnnnnnnnnnnnnnnnnnnnnnnnnnnnnnnnnnnnnnnnnnnnnnnnnnnnnnnnnnnnnnnnnnnnnnnnnnnnnnnnnnnnnnnnnnnnnnnnnnnnnnnnnnnacttgtagatcagtgtgtgtgggggtgagagtttcggtgtgaatgtgagagcagagggatttaatactcaaggattctgaatggg

SEQ ID NO: 232144 - DNA, 224 bp, Homo Sapiens
  misc_feature (50)..(80): n is a, c, g, or t
  misc_feature (93)..(125): n is a, c, g, or t
ctttgtacaaaaaagttgggactttgtaccataaacttcgcatatttgannnnnnnnnnnnnnnnnnnnnnnnnnnnnnncttcttgcctggnnnnnnnnnnnnnnnnnnnnnnnnnnnnnnnnngggctgggctcatttactcttcacagagcctgcagggcagctgtattcccattatatgactccagccttctcggggcccttgcctgggtcagaagctgt

SEQ ID NO: 232145 - DNA, 853 bp, Homo Sapiens
  misc_feature (54)..(87): n is a, c, g, or t
  misc_feature (109)..(166): n is a, c, g, or t
  misc_feature (203)..(375): n is a, c, g, or t
  misc_feature (432)..(721): n is a, c, g, or t
ttggcaggcaccaaatgtgtgggttttccacaccaacaattcgccagtcctctnnnnnnnnnnnnnnnnnnnnnnnnnnnnnnnnnnagtctgaccctgccgcggttannnnnnnnnnnnnnnnnnnnnnnnnnnnnnnnnnnnnnnnnnnnnnnnnnnnnnnnnnagtgggtccctggggtacccacacttctgtccatctnnnnnnnnnnnnnnnnnnnnnnnnnnnnnnnnnnnnnnnnnnnnnnnnnnnnnnnnnnnnnnnnnnnnnnnnnnnnnnnnnnnnnnnnnnnnnnnnnnnnnnnnnnnnnnnnnnnnnnnnnnnnnnnnnnnnnnnnnnnnnnnnnnnnnnnnnnnnnnnnnnnnnnnnnnnnntaagcataggagcctttgtccccagggagttgtgtggctggccttacagcacggggnnnnnnnnnnnnnnnnnnnnnnnnnnnnnnnnnnnnnnnnnnnnnnnnnnnnnnnnnnnnnnnnnnnnnnnnnnnnnnnnnnnnnnnnnnnnnnnnnnnnnnnnnnnnnnnnnnnnnnnnnnnnnnnnnnnnnnnnnnnnnnnnnnnnnnnnnnnnnnnnnnnnnnnnnnnnnnnnnnnnnnnnnnnnnnnnnnnnnnnnnnnnnnnnnnnnnnnnnnnnnnnnnnnnnnnnnnnnnnnnnnnnnnnnnnnnnnnnnnnnnnnnnnnnnnnnnnnnnnnnnnnnnnnnnnctatcgcccctgtcactcggaaattaccagcgttctgagagctctgtgtcggagccaggagcacgggccaagtgtgttcttctcattctatcggtgccacagccaggccgcgggttgtgcagccgtgtggat

SEQ ID NO: 232146 - DNA, 206 bp, Homo Sapiens
ttggaaaccatttatcctttctgagtatttttttgaaaattaatttataccctataaaataatacttgttaactgcaatgaagacacttcatcttctctcctgccttattttgactataagtttttaggtcctgacactgacttccaatacatgcatttgcaaggagagtttccgccaccatccccgatcattaacgaccaaagtg

SEQ ID NO: 232147 - DNA, 187 bp, Homo Sapiens
ttggaaaccatttacccaattagagtatttgttagaaaatttgtttccaccctataaaataatactagcgcacgggaaagatgacaaattatcttctctcctgccttatttggactaacccctataccttctgcaaaatgaattacctataaatgcctttgcaaggagagcttcagctaacaccccc

SEQ ID NO: 232148 - DNA, 1004 bp, Homo Sapiens
  misc_feature (137)..(149): n is a, c, g, or t
  misc_feature (276)..(717): n is a, c, g, or t
aattgatgagcaatgcttcctttataatagccaactttgtacaaaaaagttggcacataaaacacttgatgtttgctctcagctcgaaaataggtacaaacgtcagtgtgaattgagatttccaggaaaagtagacnnnnnnnnnnnnngaactttgaacaacattttcccgtaagtattttcatatatttacatgtcaacttaagggaaaacacaactacttatcttgcagttttacgactgtatcacttaataaacattctatgccagaggagnnnnnnnnnnnnnnnnnnnnnnnnnnnnnnnnnnnnnnnnnnnnnnnnnnnnnnnnnnnnnnnnnnnnnnnnnnnnnnnnnnnnnnnnnnnnnnnnnnnnnnnnnnnnnnnnnnnnnnnnnnnnnnnnnnnnnnnnnnnnnnnnnnnnnnnnnnnnnnnnnnnnnnnnnnnnnnnnnnnnnnnnnnnnnnnnnnnnnnnnnnnnnnnnnnnnnnnnnnnnnnnnnnnnnnnnnnnnnnnnnnnnnnnnnnnnnnnnnnnnnnnnnnnnnnnnnnnnnnnnnnnnnnnnnnnnnnnnnnnnnnnnnnnnnnnnnnnnnnnnnnnnnnnnnnnnnnnnnnnnnnnnnnnnnnnnnnnnnnnnnnnnnnnnnnnnnnnnnnnnnnnnnnnnnnnnnnnnnnnnnnnnnnnnnnnnnnnnnnnnnnnnnnnnnnnnnnnnnnnnnngtcgtagaaatgcagttgagacacaggggaaaaagtatttctgttagtgggcaattgagaaggagagacttgtagcttttagtgctcacttcagaccattggcgccctgcatcttgtcttatctccagtcattgaggaaatagggctcagaacaattgtgctccggtgtattttgcgtcgtctttttagaagaaaactgcctagagagtgcggtggttgactaccacgccaagtgtgtgaccatgatagcagatttccgtctctgatctgctttttctttcagtttg

SEQ ID NO: 232149 - DNA, 272 bp, Homo Sapiens
ctgagatggaagcggaattccaagtccaccatccccatcgtgggcgttgttgctggcctggctgtgataacgattggggtcagggaagatgtggtgtgtattgtgttgaggaggaggaagagctctcgtggaaagggatggagctactgtcggggggcgtcttggtggaggctttggtggtctgatgggtgtctcacagcttgaaaagcctgaaactaccgtcttgaaagtgactgacatgctggatttcttcattcctcacgtttgtgact

SEQ ID NO: 232150 - DNA, 567 bp, Homo Sapiens
ttggagggatggtcgccttaaacgcatcatctgtatcattattcaccccatcatgaacaccaacgacgacgactcctgccgaataatcatcccccacaacaaggtcatcaggaagacatacaacttcgtgtggaggatcacctatgctgacaacgtggcggcccccggcgggtacataactattgctgccactactgtggagaccacggaccatgataaagaggtggagcaggctctggagctgttggagcacattgatgacaagtttgtggctatcattgacttgtttgatcaccttgttgatgattgtgataacaatgtgttgtgttcttgctcctactatgacgccacccactttgatacaacctgctacgacgacaaaaacatctactaacacctggttggtggggcctttgatttttataacatgaagcgcaaacaaaacaacgactttttagaagctgatcagtgattgtggtggcccccaccccctgctgctgcagcatgtgtcggttgttctccaggggtgcaccatcctctgcttcttccaccacgttcttatcatcc

SEQ ID NO: 232151 - DNA, 255 bp, Homo Sapiens
gggaagcccctcccgtcgggcagcgccgccttataagcgggttcccttcccgggggcggcagcggctggtcggcggcagctctgctggtgcgggggcggtgaaaccaggatctagctaccgctacccagcgcgccggcaagcgtctgaaacggacttcttcccgcactcctgagtgccgcagccctgcggttctccccctccagaccttataatccccacaccccgagcccctgccgtctcattcttttttccca

SEQ ID NO: 232152 - DNA, 127 bp, Homo Sapiens
caggcaccccagaccatttggccatttaatgacaagaattatctacatcttgtaggatgcaaatattgaacgtgcccttttttggctatttggaacccctgtctgccttgtattgggatcaagcggc

SEQ ID NO: 232153 - DNA, 319 bp, Homo Sapiens
ttggcaacagtccccccaccgattggctgtgctcttagacttgttaagtttttggcgcgcatgaaaggcccgatgatgtgcacgacattgcaggccactggtctccttcgttggatggacgggtgctgaaaaacatcccccggtgttgattatgactgtcctgcgttgttgcaccgccttcacaggccttcatctcagtgtgggtggacatcggcaccgttttgaagagattcactaacctccccctgccgagatccagcaggggggtaaagttcatcctgatgtcgacatactggttttatttttccctgatgtttgg

SEQ ID NO: 232154 - DNA, 760 bp, Homo Sapiens
  misc_feature (332)..(385): n is a, c, g, or t
  misc_feature (392)..(418): n is a, c, g, or t
ttgggtatatttgaaaagtgatatttaataagaagcctgtaaaaccctaagcttctctcccttattatttgaaaattattttaagacctgtagcccccacattttgatgttgttagatttatcaacattgtctgggtaatggtcctgttctatttagggtggtttttctgcttatggtctgtgctacttcttaatatacagtattaagagttttggttaactctgaactgcccgggttgattagagtgattccagacagatcgtgttttgaacttacatttttattttccaattttaatggattgaaaaacattatttaatatgtgttctgnnnnnnnnnnnnnnnnnnnnnnnnnnnnnnnnnnnnnnnnnnnnnnnnnnnnnnatccacnnnnnnnnnnnnnnnnnnnnnnnnnnngtgtgagctcctgcgcccagccgttcacaagtattgagacggctttgagatgaagaaaaaatgtcttaatatctatagctaaagttcagtgcctgtgctgtagattgtgattcgcatcatgtcagatttgtagtcataacagactgctgagactaacgtgttcactgagtacattgattctgtttgaggattcagacttgttaggacccagtcccctcagctcagtaagggggattgtataaataatcaaaagttgttaaaattcctcacctaaagagacttgtactcacattttttacgcctctaagaaatatgtctccaaagaacttgccaaagagattc

SEQ ID NO: 232155 - DNA, 403 bp, Homo Sapiens
  misc_feature (184)..(220): n is a, c, g, or t
ttggctttgaaatctttcgaagattcaaagtgcaaggcatccagcttttatccccgatttgcatcaaggggtaaagctcacgggagacctcatgtgaccgctgacgtgcataggatagggggatcctcccccgtcgtttgggcgtgtcaataataacttctgtaccatcgagcgagactatctnnnnnnnnnnnnnnnnnnnnnnnnnnnnnnnnnnnnnttttaccatttcctgatttcgccagtaaaaaagccgatctttccagtaaactgggtgacattcgacatcccttcacgacaaacgctttctatttcttggatgatagacgaagggctcattctgcatgggtgcgcctacttaccggagacattgacattatatatgcattgatcatttgatagc

SEQ ID NO: 232156 - DNA, 291 bp, Homo Sapiens
cggagggaacgcatgctgccaactaactgcggttggtgacccctcacactccctgccagttataattactgaagttagaaataattaataacttccttcgcatgaagaaataattaattataaatcacgaatgaatgaattcaatgaaaaacaagaagaagaaggataaatcatggatgaatgatctgagggggacccgtatgtcagaacgaaccttgaaataaatgattgatgacattcctgccatcctgtctccgtctgcgggcaccaatccctacgtcttcattcttt

SEQ ID NO: 232157 - DNA, 272 bp, Homo Sapiens
agtaatggggaataccggcccccaccaccatgcccgggaaaatttagggtttttaataaaggcggggatggtcaagaagacccgactgggcgcgaactcctggcctcagggaatctgcccgcttcgacctccccaaagggtgggattaccggggtgagccagcacttttggtttgaaactcccagaaatttttaaggaaagtcaagagttgactttaacgatcacactaaagcttacttcttgattattatgaaaaaaatacccgaattttt

SEQ ID NO: 232158 - DNA, 834 bp, Homo Sapiens
  misc_feature (335)..(348): n is a, c, g, or t
  misc_feature (375)..(447): n is a, c, g, or t
  misc_feature (506)..(563): n is a, c, g, or t
ttggattaactatagtcagcatgctgcatagtagatctctgaacttactctctgtccaactgaaggcttgtgccttttgaccaacatctcccctaccccttccacccactaacctctggtgaccaccattctactctgcttctgtgagtttcgtttttttagatttctcatgtaagtgacatcatgtggtgtttgtccttctgtggcttatttcacttaacgtaatgtcctcctggttcatccatgttgttgcaaatgacaggatttccttcttttttttaatggctgagtagtattccatggtgcatgtatatcacattttctttatccattcnnnnnnnnnnnnnngagatggaatctcgccatgtcgccccnnnnnnnnnnnnnnnnnnnnnnnnnnnnnnnnnnnnnnnnnnnnnnnnnnnnnnnnnnnnnnnnnnnnnnnnncaagaagtagggaccattattcatctagttttatagataaagtttaaaagcaaagtgcnnnnnnnnnnnnnnnnnnnnnnnnnnnnnnnnnnnnnnnnnnnnnnnnnnnnnnnnnnttgccacctctgaacgctcccaggagtgagcctctgttccccctaattctgcagtagcacctgccccctgccccgaacaatcttgtatctgggctgatccaagggcagttaccacagggtctctgggcagtgagtgaaaagggagggctggcagttgcaggggaggggacaggtgagacgtgtgaatggaggtggcccaagccctccatccctccctgcccacctaggccctctgctgagcacacaggccatgggggccagggcgccctcc

SEQ ID NO: 232159 - DNA, 922 bp, Homo Sapiens
  misc_feature (310)..(344): n is a, c, g, or t
  misc_feature (374)..(455): n is a, c, g, or t
  misc_feature (680)..(840): n is a, c, g, or t
ttgggttccatgtttgcttaaatgctatgtaaaataacttggcatattaattgactttgaatgtgaaaatcatatgctcttagaatatggatgccttagctcatttgaaaaatggaagaatacttgtttatcttgtttaagaaacattgaatatggtatttggaagatgatgccaactgatacttttctagcttgttagtttgtgaagttttgaaataaatgaaaaaatcaattgcaatatgttgtcaatttaatttagggcttgcaatctcttcaaaaagtttagtgaagttataggtaagctcctaannnnnnnnnnnnnnnnnnnnnnnnnnnnnnnnnnnagatggagtctctctctgttgcctaggctnnnnnnnnnnnnnnnnnnnnnnnnnnnnnnnnnnnnnnnnnnnnnnnnnnnnnnnnnnnnnnnnnnnnnnnnnnnnnnnnnntttctggttgaaacatttaatggataatattttaaatattaagagtgggcttcttaagcacattagatattgcttagattttcttaagcgcatagtgcaaatctgatgattcccattagattcatatgtttattcatttgatcattcaataaatatttgtttgccttgtactatcttctgtttctttagagtagtggttttcaactgggggccattttgttttcnnnnnnnnnnnnnnnnnnnnnnnnnnnnnnnnnnnnnnnnnnnnnnnnnnnnnnnnnnnnnnnnnnnnnnnnnnnnnnnnnnnnnnnnnnnnnnnnnnnnnnnnnnnnnnnnnnnnnnnnnnnnnnnnnnnnnnnnnnnnnnnnnnnnnnnnnnnnnnnnnctttgagagtttagttatttcccaagtatgcattgaagaaatagctttattcaaggaagttcatatggttttaaaaattata

SEQ ID NO: 232160 - DNA, 192 bp, Homo Sapiens
caactttgtacaaaaaactgagtctcgggaacaacctgcctgatttgtaccttttgcacatttccgaggtatttatatttttactgtgactaacaaggtgatgctgaattatttgctaaacacctaacgtcatggactgactctttttagccagtgtgattcatttgcatcaccccgttgaatgggaccctc

SEQ ID NO: 232161 - DNA, 479 bp, Homo Sapiens
  misc_feature (59)..(132): n is a, c, g, or t
  misc_feature (143)..(318): n is a, c, g, or t
  misc_feature (403)..(411): n is a, c, g, or t
  misc_feature (417)..(432): n is a, c, g, or t
gtcttaaaagggccaactttgtacaaaaaagttggcaactttgcccaagaaagttgggnnnnnnnnnnnnnnnnnnnnnnnnnnnnnnnnnnnnnnnnnnnnnnnnnnnnnnnnnnnnnnnnnnnnnnnnnnaaccttggacnnnnnnnnnnnnnnnnnnnnnnnnnnnnnnnnnnnnnnnnnnnnnnnnnnnnnnnnnnnnnnnnnnnnnnnnnnnnnnnnnnnnnnnnnnnnnnnnnnnnnnnnnnnnnnnnnnnnnnnnnnnnnnnnnnnnnnnnnnnnnnnnnnnnnnnnnnnnnnnnnnnnnnnnnnnnnnnntaaattcctcttcccgggggttaatttttttccaggggaaaaagaagaaaggggaaggggaagggcaccccataacttcagggcnnnnnnnnnaaaggnnnnnnnnnnnnnnnnctttccccacgcacccccaaataccgggggttttgaaatggggggaa

SEQ ID NO: 232162 - DNA, 497 bp, Homo Sapiens
  misc_feature (53)..(339): n is a, c, g, or t
cttagaaggggccactttgtacaaaaaagttggctaaaataaccttttaatgnnnnnnnnnnnnnnnnnnnnnnnnnnnnnnnnnnnnnnnnnnnnnnnnnnnnnnnnnnnnnnnnnnnnnnnnnnnnnnnnnnnnnnnnnnnnnnnnnnnnnnnnnnnnnnnnnnnnnnnnnnnnnnnnnnnnnnnnnnnnnnnnnnnnnnnnnnnnnnnnnnnnnnnnnnnnnnnnnnnnnnnnnnnnnnnnnnnnnnnnnnnnnnnnnnnnnnnnnnnnnnnnnnnnnnnnnnnnnnnnnnnnnnnnnnnnnnnnnnnnnnnnnnnnnnnnnnnnnnnnnnnnnnnttataaaaagagaaaaataactcttttgaacaaacagacaaattagctagtagtatggagatgtataccctctattacacacataaaaccgtaacaaaattcattgtggtgtattataattagttttgtgaatagaaaaataaagcacttatgtttaa

SEQ ID NO: 232163 - DNA, 168 bp, Homo Sapiens
attttaggtagctgatttctggtgacgatctgataccactacgatctaagttaacgcaagctaccgacccgttatacacaactatgaacgagtacatcgagcttcaacattttttatagcaatgcaacctatactccagttctcaaatcttttgtgctcttctttttt

SEQ ID NO: 232164 - DNA, 581 bp, Homo Sapiens
  misc_feature (54)..(74): n is a, c, g, or t
  misc_feature (89)..(149): n is a, c, g, or t
  misc_feature (153)..(333): n is a, c, g, or t
aaattgatgagcaatgcttgcttgaagggccaactttgtacaagaaagttgggnnnnnnnnnnnnnnnnnnnnngagacagtctagctnnnnnnnnnnnnnnnnnnnnnnnnnnnnnnnnnnnnnnnnnnnnnnnnnnnnnnnnnnnnngttnnnnnnnnnnnnnnnnnnnnnnnnnnnnnnnnnnnnnnnnnnnnnnnnnnnnnnnnnnnnnnnnnnnnnnnnnnnnnnnnnnnnnnnnnnnnnnnnnnnnnnnnnnnnnnnnnnnnnnnnnnnnnnnnnnnnnnnnnnnnnnnnnnnnnnnnnnnnnnnnnnnnnnnnnnnnnnnnnnnnngggggagccatgggcccagccttatttattttttactatgggaaaatatatgtaagatttacaattttaaccctttttttccaggattgggaaaaccctttatttctctattgagttagtggattgtaaatatttaaaagtgttcggttgagtggcattacatacattcacattgctgtgaaaccaagagccctatccggctttagaaatttttcatcttccgggctgaaactctgcggccattaact

SEQ ID NO: 232165 - DNA, 919 bp, Homo Sapiens
  misc_feature (178)..(232): n is a, c, g, or t
  misc_feature (234)..(386): n is a, c, g, or t
  misc_feature (390)..(421): n is a, c, g, or t
  misc_feature (768)..(821): n is a, c, g, or t
ttggcaaaggtattatgtgtagtgtcattaaactccttgccgctcaagagtggtgaatcaagtgtcaaacacatttattttgcataactctctaaacagtttacaccaaggactatcagtattttccatactatttgaagtagagtccttagcagttttgggtctaatcatattaagnnnnnnnnnnnnnnnnnnnnnnnnnnnnnnnnnnnnnnnnnnnnnnnnnnnnnnntnnnnnnnnnnnnnnnnnnnnnnnnnnnnnnnnnnnnnnnnnnnnnnnnnnnnnnnnnnnnnnnnnnnnnnnnnnnnnnnnnnnnnnnnnnnnnnnnnnnnnnnnnnnnnnnnnnnnnnnnnnnnnnnnnnnnnnnnnnnnnnnnnnnnnnnnnctcnnnnnnnnnnnnnnnnnnnnnnnnnnnnnnnngaaagggtgcagtgtgcacaggctgggacttctcagccttgtctatgtggaagttattgacattaaattacatatgtcatgcatccatgcatgttttctcttgcctatagctagtggaattttaagcaaatccacaaatatttattgtctattatatttaagatctatgtaatgagagagggtaggaagagacactttccaaggtggccaagtcataatgcatgagaaaaatcaacacacaaacaacctacagtaacagggcacgtaactagaatgtattgcatttccacgcaagagtaaagtagtcctgccatattttgcagtttattatttgatctttctctagnnnnnnnnnnnnnnnnnnnnnnnnnnnnnnnnnnnnnnnnnnnnnnnnnnnnnnccttttcaatttgaaaattgaaatggaaagaagacatcttttttaaatacaggtacttcttttgctcaactactttggagttgaattattgaatatta

SEQ ID NO: 232166 - DNA, 642 bp, Homo Sapiens
  misc_feature (85)..(521): n is a, c, g, or t
gtgtcagccactgctcctggcctgtgaagctgttttggaaggtgatttgctgcaagttttcaaaattaaaaatgcacaagcctannnnnnnnnnnnnnnnnnnnnnnnnnnnnnnnnnnnnnnnnnnnnnnnnnnnnnnnnnnnnnnnnnnnnnnnnnnnnnnnnnnnnnnnnnnnnnnnnnnnnnnnnnnnnnnnnnnnnnnnnnnnnnnnnnnnnnnnnnnnnnnnnnnnnnnnnnnnnnnnnnnnnnnnnnnnnnnnnnnnnnnnnnnnnnnnnnnnnnnnnnnnnnnnnnnnnnnnnnnnnnnnnnnnnnnnnnnnnnnnnnnnnnnnnnnnnnnnnnnnnnnnnnnnnnnnnnnnnnnnnnnnnnnnnnnnnnnnnnnnnnnnnnnnnnnnnnnnnnnnnnnnnnnnnnnnnnnnnnnnnnnnnnnnnnnnnnnnnnnnnnnnnnnnnnnnnnnnnnnnnnnnnnnnnnnnnnnnnnnnnnnnnnnnnnnnnnnnnnnnnnnnnnnnnnnnnnnnngtgtgaaccactgtgcccagaccttcattttgtttgtatacatctgtattcattgaatcttctacaaggtttatttattcatgtatgcctattgttccgggttatctattgttgcatgaaa

SEQ ID NO: 232167 - DNA, 327 bp, Homo Sapiens
ttggatgaaggacaccacgacctctatctctgaccccttgtttgtttttttggcttatactgtttttggaacatatttttggtcttcctgacccatttgtgttacttacctttggacgtggctcgataccacctcattattgcagggtcaggataacattctgtgtaccttggggtttatggcactactagaagctggttcctcgcctggcggattttcgtgttttgtcagctagattgactcgccgggacgttgcccatcggtatgaagaaagcggatggaaatatttccccctccttttcccccgtcgttatcaaattctgtgag

SEQ ID NO: 232168 - DNA, 697 bp, Homo Sapiens
ttgggtatatttgcccctttgggtgggttatttccatgagtgaattttatagatgattattattatgtttattcgtaacatcttatctgtgaagccctgcctttgttcttttctgaatgtctttcctcctcgatatgcatgagatttgtttcattgcatacttcctccagacttgcattttttgaagcttggatgatccctatagctggagatatttttgcacatttcattttgctcgtctcttgctgaagcccgggccatggctctgataattatcatattcagggagccatccgtgctctctctctcacatcttttatcactttccctcttaatggaaatatttatgcataatagatattctttctaacaaaataccgatgtgttgatttgactgaatacaccgtaggtctattatgcccttatattattactataaggtatggaacccattgccatggtgcttctatcggattgatattttaatggtgaattccctagcccatttactcactcacaccatctaaacttatgcacttttcatgatcatttgaatttcttcatttcctaattttattaattcatagtgtgtgcccaacaattgagccttttttcaattaaaaatacttgtgttttgcctttttaccaccatatttattgtcttgaataaaaaaataatctatccttcctaacgtta

SEQ ID NO: 232169 - DNA, 672 bp, Homo Sapiens
ttggaattctttgcccctttgggtgggttaattacatgggtgaattttatatgtgattattgttttgttttgttttgttcagattaactgcttatagccttagaaagccttttatgaatgtctttccacctagatgtgcattcaatttgtttcaatgcaatcttcctccggacttcctttttttgaagtttggatgttgcctctagctggagatatttttgctctgttcatcttgcccaaaaattgctgaagcacgggccaggtctctggtaattataatatggagggagacaactgagctctctctttctcaactttccatacttcccctcttactgcaaattttgatgcataatagatatgctttctaacaaaataccgaagtgttgatttgactgaatgtaccgttgatctattatgcccttatattattacattacggtacggaacccatagccacgtagtttctatcgggttgttaatgtaacggtggattcccttgtcattgtcctcactcacactatctaatatcatgtacttttcatgatcaaatgaatttcttctattcctacatttattaattttttcctgttcgctcaacaatatgagcatcttttcaattatataatacatgtgttttgcacattttacctccgaattttttcgtcatac

SEQ ID NO: 232170 - DNA, 388 bp, Homo Sapiens
ttggatttaactgttaatcgaaagacgaacaactatttggactttggaaaaaaaccttgaaccttgagtaaaaaatttaacattcataacccgcctaaagcctaccaccaattaccaattcgtaaaggctccacactcactacctaataaatcccaaatctataactgaactctgaactccccattggaccttgcaatcatcctacaccctaactaatgtttatagttataacatgaaaactttctcctctctctacccctgcgtcctatttcaaatttgaactgacaattgacaattaaatatctactatctaccatcaagtcattattacttactatgttcactgtccacccgcctgctcattgcgaaaggtgaaaagttataaaa

SEQ ID NO: 232171 - DNA, 598 bp, Homo Sapiens
  misc_feature (42)..(86): n is a, c, g, or t
  misc_feature (145)..(159): n is a, c, g, or t
  misc_feature (182)..(422): n is a, c, g, or t
ttggcacctggctaattttttgatggggactcttgggcttannnnnnnnnnnnnnnnnnnnnnnnnnnnnnnnnnnnnnnnnnnnnatgaaccactgcacccagtcaatatttttttaatgtagaagcctgatatgttatttgannnnnnnnnnnnnnngagacagagccttgctgtgtcannnnnnnnnnnnnnnnnnnnnnnnnnnnnnnnnnnnnnnnnnnnnnnnnnnnnnnnnnnnnnnnnnnnnnnnnnnnnnnnnnnnnnnnnnnnnnnnnnnnnnnnnnnnnnnnnnnnnnnnnnnnnnnnnnnnnnnnnnnnnnnnnnnnnnnnnnnnnnnnnnnnnnnnnnnnnnnnnnnnnnnnnnnnnnnnnnnnnnnnnnnnnnnnnnnnnnnnnnnnnnnnnnnnnnnnnnnnnnnnnataagccaccgcacccgtctgttatttgattttatttttaaccttttaaagtctattgatgttcccaacatatttttccttaataaaaaacacagtctacttttattacaatgtaattacatttgcctttttaattggtagtaataaaaagtggttactttttaataggatttgtc

SEQ ID NO: 232172 - DNA, 356 bp, Homo Sapiens
taacctttaatctacaaggaaggccaaattatacagcagaagggaattttcttatttttccacacagaagggttctaagggaaaaaaaccctaaaattattttcccaaatataataccctgccccaaaacatttcccatgattattcacaaaactaaacaaattaaatcacccagtcgggttaaaatataacatatagggaaaaaaagcaaaacccaacttatatttctttaaaaccctttttacataaatcccaatttggaagtctgccccaaaatcccgaaaaatggggaccttgatggtaatttaaaatattacgttattgaggcagaataagaaagtggaaaaccccaaaaa

SEQ ID NO: 232173 - DNA, 534 bp, Homo Sapiens
  misc_feature (176)..(206): n is a, c, g, or t
  misc_feature (230)..(379): n is a, c, g, or t
  misc_feature (409)..(469): n is a, c, g, or t
ttggaaagaggtattcattttctttgttagcctggtaacacaagtcataataacccggagacatacctagaatatatttaaagatgacaaaaccttggaaaacccaagcttgccatccaccattgaggatggatgcagaccaactgttagttgctctcataaacacatcagttacnnnnnnnnnnnnnnnnnnnnnnnnnnnnnnnggagatggagtctcgctttatccnnnnnnnnnnnnnnnnnnnnnnnnnnnnnnnnnnnnnnnnnnnnnnnnnnnnnnnnnnnnnnnnnnnnnnnnnnnnnnnnnnnnnnnnnnnnnnnnnnnnnnnnnnnnnnnnnnnnnnnnnnnnnnnnnnnnnnnnnnnnnnnnnnnnnnaaagtttcatcgtgttagctaggttggtcnnnnnnnnnnnnnnnnnnnnnnnnnnnnnnnnnnnnnnnnnnnnnnnnnnnnnnnnnnnnntgaaccaatgcacctacccatgttcgcttccttcatgagattaattactttactatgtttggtgg

SEQ ID NO: 232174 - DNA, 674 bp, Homo Sapiens
  misc_feature (199)..(521): n is a, c, g, or t
  misc_feature (573)..(592): n is a, c, g, or t
ttgggataatggactttgataacaaggtttaaactgttcattctattctgtttagattgttttaatgtttatattttgaataggtagttgccagctttaaaaaaatgctgcggaatgttaggcatctgttaaaaagaatgagacctatctttatatactaatatggaagacctaagatcttgaagatatgttaagtatnnnnnnnnnnnnnnnnnnnnnnnnnnnnnnnnnnnnnnnnnnnnnnnnnnnnnnnnnnnnnnnnnnnnnnnnnnnnnnnnnnnnnnnnnnnnnnnnnnnnnnnnnnnnnnnnnnnnnnnnnnnnnnnnnnnnnnnnnnnnnnnnnnnnnnnnnnnnnnnnnnnnnnnnnnnnnnnnnnnnnnnnnnnnnnnnnnnnnnnnnnnnnnnnnnnnnnnnnnnnnnnnnnnnnnnnnnnnnnnnnnnnnnnnnnnnnnnnnnnnnnnnnnnnnnnnnnnnnnnnnnnnnnnnnnnnnnnnnnnnnnnnnnnnnnnnnnnnnnnnnnngcaaggtgcacagtattgtgtatagtgtgcaatgacttatgaaagatacacnnnnnnnnnnnnnnnnnnnnatacacacacaacaaaggttcatttttaaacagatggtttgggacctacaaatatattttcttacagaagtaatgctatatg

SEQ ID NO: 232175 - DNA, 304 bp, Homo Sapiens
ttggaaataaattacttaaataaatggaagaattatgtgcgcccacccattgtatgtatctttctttcaccccacacaaaaacgaccgcctcactcccctaaccaatatatgtatacaaagaatggtgtatgaactattcgttcccctgcatgcaatccctacctaccagcccctccctcctgttagttactggctggtatccatcccactcacacccaagctggctactaacttcctacctaaattgattgattaacaaaaactcctccctcgattgatcgcgctggctgacctactccattc

SEQ ID NO: 232176 - DNA, 643 bp, Homo Sapiens
  misc_feature (180)..(197): n is a, c, g, or t
ttggccccgacgccaagaatacaatggctgcgttgcttatctgctgtaaccaacccacccctcctcagcataatacgatactgtatcgactcttatcaaattacaatcctatcccatctccccttcctttcccgaggggcgggcctgcaaccctgccttggaaatgttaagtgatttgannnnnnnnnnnnnnnnnnattccttaccgtcaaggccatttgctatgctagcattgaatttgaactgatttgcgatatgttcatttgttttgttttcgaaatgctctgctccaacttatcttatcttttcttttctttggagtgacttgaattgcaaatgaactatgttaaatagaataaatgaattgccagccatccaatcctaaaccgaaatgaactgagcatataatctattcacattatattatacactcttcttgtattgtattctgccaagcctccccgcctgcaattcgattaggatacgatttgtgtagcgtatctcttctcctcctattgcagacctgaactctatttttcttttcctatctaatccacaccgcataagacaatacacccaactctggtccggcacatcggattggtttcgtgtagagatgaagtttattataataactttatga

SEQ ID NO: 232177 - DNA, 505 bp, Homo Sapiens
  misc_feature (115)..(175): n is a, c, g, or t
cggcctcacaaacgcgcgcacacattcagaggccgctcgccttcctgcctggcttccttcctgtctgctccgcgcctgacaggcccctcgccgcagccaggggccgcccgcaccnnnnnnnnnnnnnnnnnnnnnnnnnnnnnnnnnnnnnnnnnnnnnnnnnnnnnnnnnnnnntcatgcccggcctgtccccgcgaggggcgggcaccgtgactcggctgggcccccagacgcgggcgatgtgaatatgtcagtgggctgtgcctgtcctggttgttcctcaaagtcattcaagctgttttttcccaaggagcccccgaacggcaacgcctttccccccttccatcccggcaccatgctggatagggatgtgggcccaactcccatgtatccgcctacacacctggagccaaagattgggaagaacacatcacatggcaaccaaactgactacaaaatatttgagcttaacaaacggcttcataactggacaaacgagtgtga

SEQ ID NO: 232178 - DNA, 912 bp, Homo Sapiens
  misc_feature (104)..(453): n is a, c, g, or t
  misc_feature (580)..(605): n is a, c, g, or t
  misc_feature (622)..(865): n is a, c, g, or t
ttggagataaaccaatcatggagtaaaatccattatattcacagtcctcagggttacatagagtgtgtatatccccaggggctggtgatcttggacattgttgnnnnnnnnnnnnnnnnnnnnnnnnnnnnnnnnnnnnnnnnnnnnnnnnnnnnnnnnnnnnnnnnnnnnnnnnnnnnnnnnnnnnnnnnnnnnnnnnnnnnnnnnnnnnnnnnnnnnnnnnnnnnnnnnnnnnnnnnnnnnnnnnnnnnnnnnnnnnnnnnnnnnnnnnnnnnnnnnnnnnnnnnnnnnnnnnnnnnnnnnnnnnnnnnnnnnnnnnnnnnnnnnnnnnnnnnnnnnnnnnnnnnnnnnnnnnnnnnnnnnnnnnnnnnnnnnnnnnnnnnnnnnnnnnnnnnnnnnnnnnnnnnnnnnnnnnnnnnnnnnnnnnnnnnnnnnnnnnnnnnnnnnnnnnnntgaaaacagagatcattttaaaactctgcctaccacaaagaccactctataaataatgggtgttgatctttacatacctgtatatctatatgaacttccaggaaatagacttgtctcattagctacnnnnnnnnnnnnnnnnnnnnnnnnnngagacagtttcgccctnnnnnnnnnnnnnnnnnnnnnnnnnnnnnnnnnnnnnnnnnnnnnnnnnnnnnnnnnnnnnnnnnnnnnnnnnnnnnnnnnnnnnnnnnnnnnnnnnnnnnnnnnnnnnnnnnnnnnnnnnnnnnnnnnnnnnnnnnnnnnnnnnnnnnnnnnnnnnnnnnnnnnnnnnnnnnnnnnnnnnnnnnnnnnnnnnnnnnnnnnnnnnnnnnnnnnnnnnnnnnnnnnnnnnnnnnnnnnnnnnnnntgagccaccacaccttgcctctacattttaaaaatataacactttac

SEQ ID NO: 232179 - DNA, 601 bp, Homo Sapiens
  misc_feature (118)..(199): n is a, c, g, or t
  misc_feature (253)..(261): n is a, c, g, or t
  misc_feature (339)..(349): n is a, c, g, or t
  misc_feature (372)..(395): n is a, c, g, or t
gtttggagtggatgatcatgaagatttctttgcagcacttgtgtgctacaggtctattcataaacacaaaaatgagtacctcaggccattgccaagccttacaaatacaagtatgttnnnnnnnnnnnnnnnnnnnnnnnnnnnnnnnnnnnnnnnnnnnnnnnnnnnnnnnnnnnnnnnnnnnnnnnnnnnnnnnnnnaacatctatatctgagttgttttggaattgaagttgcatgaaatataacttgcnnnnnnnnnaactttaatttctaaataggccttctgttcatatactgattgggaccacaaagtagaaatctattattctttgtttcnnnnnnnnnnnagacagagcgagacaccatcgcnnnnnnnnnnnnnnnnnnnnnnnntggctaaacagcccaggtttggtctgatatgttcagaaaaaagcaaaacagtcacctctcaccttttcttttcccgcagtgatgcagttgaatacaacaatggctgtaggtatgctgcagaaatatcattcaagtgaaacagaagggctttcctggccagacacagtggtcagtcctgcaatcccaacactttggttggctaaatg

SEQ ID NO: 232180 - DNA, 925 bp, Homo Sapiens
ttggggaagtgttgaggtccacacccaactcaggctctccatccctgaggggaagcacgtggctgtcccctttcggtggatttcaagcatccctggcgcaggtgcagcggccttgccctgggctcaccagcagcctttggggtcccagttggcaggcagccctgttccctgggggtctctgccggagctgctggtccctggagctaccccgtggtacggttcatctggaccagcctctgatgtggggaagaccaagcgagagcacactgcggagagtgtttcgagagccagcacacagtgtgcatttcccggttgctcccagcttattttgccacagacctacagagaccagacttcaagatgttcctgtggacaggaatttacacaaaaaaccagattaaattctcctgtgttttcttttggaaatgggatggaagtgaaaacaaaatgttgttctaccatatatcaagatgagggctgatattctgtccagagcttaagcccaaaagtcagatgtcctggcttaagctgctgaagccaccttggaccatgagtgatcttgagaatggaagccactgtctagatgttggaacaaagacaatggcctgggcctccctgatgacaccgcagagtcaccgtatgtgtcctggagtacttgctctctgcttctttttcatgagagataagtacatttttatcttctttaggccactgctatatttttcccgttaaacacagctatatccaatcctaactggttcaacctataaaatgtgattatttcttgttttaagataactatagctaccaattattttgcacttagtagctgccagacactgtactaagtgttttatgggtgtcaccttatctaatttgcacaacaagaatacttacaaggtaggtattattatctataatttac

SEQ ID NO: 232181 - DNA, 278 bp, Homo Sapiens
  misc_feature (155)..(168): n is a, c, g, or t
agctataaaaaaatacatatcaacacgttatgtaaaagagatggtatagaaaaagaatattgcatatatctgttatgcatagcagaggtctctcagaggtaaaacaaatataatagatagcgcgcgaggataacacgcgcactaaattcacacgnnnnnnnnnnnnnngccaagtgttttactttagatatcttttcaaaagggatttttcttcattttatccaatcaaaagcactcatgttaaagaaggcaataaagtgagtgtctttttgtttttc

SEQ ID NO: 232182 - DNA, 626 bp, Homo Sapiens
  misc_feature (71)..(173): n is a, c, g, or t
  misc_feature (204)..(317): n is a, c, g, or t
  misc_feature (353)..(526): n is a, c, g, or t
tatattgaaatttaatttccattacattctctgtggagcaacttttttgctttgtttcgttttgtttctgnnnnnnnnnnnnnnnnnnnnnnnnnnnnnnnnnnnnnnnnnnnnnnnnnnnnnnnnnnnnnnnnnnnnnnnnnnnnnnnnnnnnnnnnnnnnnnnnnnnnnnngggattacaggcgcccaccaccatgcccagnnnnnnnnnnnnnnnnnnnnnnnnnnnnnnnnnnnnnnnnnnnnnnnnnnnnnnnnnnnnnnnnnnnnnnnnnnnnnnnnnnnnnnnnnnnnnnnnnnnnnnnnnnnnnnnnnngcgtgagccactgcacctggcttctgtggagtaacnnnnnnnnnnnnnnnnnnnnnnnnnnnnnnnnnnnnnnnnnnnnnnnnnnnnnnnnnnnnnnnnnnnnnnnnnnnnnnnnnnnnnnnnnnnnnnnnnnnnnnnnnnnnnnnnnnnnnnnnnnnnnnnnnnnnnnnnnnnnnnnnnnnnnnnnnnnnnnnnnnnnnnnnnnnnnnagaagcaaagtaatatagtgtttaagaacagacttgagcgagactggctcgatgacaagttactcatctcttggggcccctgattgatctgtaaaatggg

SEQ ID NO: 232183 - DNA, 873 bp, Homo Sapiens
  misc_feature (210)..(311): n is a, c, g, or t
  misc_feature (313)..(340): n is a, c, g, or t
  misc_feature (353)..(655): n is a, c, g, or t
ttggatttctttgaccattcttttgtgagccttgggttagcagagttaaatacttaaataagaacataaaataagggaaagcttcacatttccacattcattattaaatactttttaaataggagaatgagtcagagtgaaccctagcaattatctcgttgttgttgaaatctagcccacctaccacattttcataattaaacacaggcnnnnnnnnnnnnnnnnnnnnnnnnnnnnnnnnnnnnnnnnnnnnnnnnnnnnnnnnnnnnnnnnnnnnnnnnnnnnnnnnnnnnnnnnnnnnnnnnnnnnnncnnnnnnnnnnnnnnnnnnnnnnnnnnnntatatattttcannnnnnnnnnnnnnnnnnnnnnnnnnnnnnnnnnnnnnnnnnnnnnnnnnnnnnnnnnnnnnnnnnnnnnnnnnnnnnnnnnnnnnnnnnnnnnnnnnnnnnnnnnnnnnnnnnnnnnnnnnnnnnnnnnnnnnnnnnnnnnnnnnnnnnnnnnnnnnnnnnnnnnnnnnnnnnnnnnnnnnnnnnnnnnnnnnnnnnnnnnnnnnnnnnnnnnnnnnnnnnnnnnnnnnnnnnnnnnnnnnnnnnnnnnnnnnnnnnnnnnnnnnnnnnnnnnnnnnnnnnnnnnnnnnnnnnnnnnnnnnnttttttttccttcatcttaatgtaggctctatcttaacagtttatcccataccttgacctttgtatccagaacaatttctatgcacaattcattgggatatgtgatagtaaatatttacatgtctttggacaatatgatatatataatattgtactgtcttaatttcagggctttattaataatagacattcaataatgatagattaataatttgttt

SEQ ID NO: 232184 - DNA, 298 bp, Homo Sapiens
ttgggtattgtgtatctttaatttacttggaaagtaaaaggccttgaaaattggaggcttattaaaatgatatatgtggaatggaaaagtattatgtgttcatatactgataatatattgacattataattatgtggatagttctagttttggttgaatatctaaaattctcttaaaatctaagatttttgcaaaatatttcgttatctttaaaattgggaaatgcatttaatgttaagtttcttttttaactattaatgtatttgtgtgttacagtgtttggatgcttctatttgta

SEQ ID NO: 232185 - DNA, 701 bp, Homo Sapiens
  misc_feature (45)..(438): n is a, c, g, or t
  misc_feature (494)..(573): n is a, c, g, or t
aactaagaccaccatgagcgatactgttacacaactattagactnnnnnnnnnnnnnnnnnnnnnnnnnnnnnnnnnnnnnnnnnnnnnnnnnnnnnnnnnnnnnnnnnnnnnnnnnnnnnnnnnnnnnnnnnnnnnnnnnnnnnnnnnnnnnnnnnnnnnnnnnnnnnnnnnnnnnnnnnnnnnnnnnnnnnnnnnnnnnnnnnnnnnnnnnnnnnnnnnnnnnnnnnnnnnnnnnnnnnnnnnnnnnnnnnnnnnnnnnnnnnnnnnnnnnnnnnnnnnnnnnnnnnnnnnnnnnnnnnnnnnnnnnnnnnnnnnnnnnnnnnnnnnnnnnnnnnnnnnnnnnnnnnnnnnnnnnnnnnnnnnnnnnnnnnnnnnnnnnnnnnnnnnnnnnnnnnnnnnnnnnnnnnnnnnnnnnnnnnnnnnnnnnnnnnnnnnntaaacacacattgtaccaatgttctgttcatggttttggtactgtactatagtaannnnnnnnnnnnnnnnnnnnnnnnnnnnnnnnnnnnnnnnnnnnnnnnnnnnnnnnnnnnnnnnnnnnnnnnnnnnnnnngagcttaaaaatgcaaatacaggctctctgtagggaaaaaggaagagttggtgggggtgggttggttagtggggggcactcagtttgtctatctccattatgtgggtctgggaaactttgggtatttt

SEQ ID NO: 232186 - DNA, 415 bp, Homo Sapiens
  misc_feature (43)..(133): n is a, c, g, or t
ggggagaaggacaagccggagcgcccgcggcccgcgcgatttnnnnnnnnnnnnnnnnnnnnnnnnnnnnnnnnnnnnnnnnnnnnnnnnnnnnnnnnnnnnnnnnnnnnnnnnnnnnnnnnnnnnnnnnnnntgaatcatcccggaatactccaacagccgcgggggtatagaggagcgctgaaacatggctgaattggccacgggctttctggaacaactcaagtcctgcatagtttggacttggacgtatctgtggtgtatgtggttcttcatcaatgcttatcctggtctacatcctgcgggtgccttttttaatcaacgacgaggtgatcacattgagcatgtttttgaacaccttaacgccgtagttctaagtggcccaaacagaaacttcctcactaatatctgggct

SEQ ID NO: 232187 - DNA, 220 bp, Homo Sapiens
  misc_feature (57)..(99): n is a, c, g, or t
ggcaggctgccggaatttttcctccccaaagaagaaaaggaaaaccctcccggagannnnnnnnnnnnnnnnnnnnnnnnnnnnnnnnnnnnnnnnnnncgcaatttttttaaaaagagggccgcgcccagaaaaaaattttggaagagagaagaaacactttgtgtgaaaaaagtttttactacaagggttttccctctgtggaggacccggcgcacat

SEQ ID NO: 232188 - DNA, 339 bp, Homo Sapiens
ttgggggcgaggaagagcacaaccggtgtaggaagcgctggaaggccttggaaaggaaggttaagaagatgggaaactgctcaacggactctggaggcctgtcatatttgatcgaaagataagatggaatgcgcttttaaaattatctcatgtaaccgacaagttaatgggtgctgcgaagaaggtctatgcaagcattgccctttgtatgtttgtgggtgctgcacgggcccacgacaatatggactatcatttcattcaagaaggcctgctgtctgccttgggctccctgaatccgaggatttgtctgatggctgccttccccagcgatgaaagtga

SEQ ID NO: 232189 - DNA, 511 bp, Homo Sapiens
  misc_feature (98)..(414): n is a, c, g, or t
ttggcttaggtgtggcatatcacaaggtatgatttctttgttcctaacaggatcaaaagattctgaaaagttgtagcaactataactataaaggtacnnnnnnnnnnnnnnnnnnnnnnnnnnnnnnnnnnnnnnnnnnnnnnnnnnnnnnnnnnnnnnnnnnnnnnnnnnnnnnnnnnnnnnnnnnnnnnnnnnnnnnnnnnnnnnnnnnnnnnnnnnnnnnnnnnnnnnnnnnnnnnnnnnnnnnnnnnnnnnnnnnnnnnnnnnnnnnnnnnnnnnnnnnnnnnnnnnnnnnnnnnnnnnnnnnnnnnnnnnnnnnnnnnnnnnnnnnnnnnnnnnnnnnnnnnnnnnnnnnnnnnnnnnnnnnnnnnnnnnnnnnnnnnnnnnnnnnnnnnnnnnnnnnnnnnnnnnnnntaattatcagtaagttataacattgccggccatttaagtagttacgtaattgagtatatgggaaaaatatactagttccatttccttaaatattatg

SEQ ID NO: 232190 - DNA, 875 bp, Homo Sapiens
  misc_feature (69)..(293): n is a, c, g, or t
  misc_feature (355)..(611): n is a, c, g, or t
ttggcttgctttcggtgcagattctgctattataattagctttctgcggggcaaggtggctcacgcctnnnnnnnnnnnnnnnnnnnnnnnnnnnnnnnnnnnnnnnnnnnnnnnnnnnnnnnnnnnnnnnnnnnnnnnnnnnnnnnnnnnnnnnnnnnnnnnnnnnnnnnnnnnnnnnnnnnnnnnnnnnnnnnnnnnnnnnnnnnnnnnnnnnnnnnnnnnnnnnnnnnnnnnnnnnnnnnnnnnnnnnnnnnnnnnnnnnnnnnnnnnnnnnnnnnnnnnnnnnnnnnnngaagaatagagattacaattagaatagaaataatggttattatccaggtctttaaagaaaannnnnnnnnnnnnnnnnnnnnnnnnnnnnnnnnnnnnnnnnnnnnnnnnnnnnnnnnnnnnnnnnnnnnnnnnnnnnnnnnnnnnnnnnnnnnnnnnnnnnnnnnnnnnnnnnnnnnnnnnnnnnnnnnnnnnnnnnnnnnnnnnnnnnnnnnnnnnnnnnnnnnnnnnnnnnnnnnnnnnnnnnnnnnnnnnnnnnnnnnnnnnnnnnnnnnnnnnnnnnnnnnnnnnnnnnnnnnnnnnnnnnnnnnnnnnnnnngtaatttttggatcagagcccctgggcatatatcactcatccttttaccctgaaagtgttttgttttaggaactgataattcttaaatgagtagcctcccactccagtgtacatactgttagctaggagaatgggtctggaggtggagaggacaggagagatacaaattagcatcgttattttggtggattctcagggctctgtgagcctttaaaaggagttacgggaaaatatttggaagtagagggcagctttcttacaaag

SEQ ID NO: 232191 - DNA, 165 bp, Homo Sapiens
ttggatcctcctgtccccagaccaaagaggatccatgtagtgcataattgtcccaactcaagtggcactgcctgtttaatctttacttggggaaaatgctgcctcgactggagtgcactatgcataggatcctgaatgagacgtaacttaaactgccttatagca

SEQ ID NO: 232192 - DNA, 446 bp, Homo Sapiens
ttgggtaggaagccagagacagcagggtgacttaattggaaaatatttcactcttaacaaatgaattccccactttaactctgcctaattcgtgtgccccctcctcctttaaaagattgatcttaatacagaaataagaaaggaatagaaggtaaaagagaatgctgggaactgaccggtgtgttgtgaaagaatggttaacataattccatgcattacctgacacatcaatcaccatgtatgcaccttctttacgccggaaaaaaatgcttgtaccctccctctataaagttattattgattcaaagaatgaccgcctggagcctgtctgccatcgtctgattgagctctaacctaacacgtacgttctactaagtacgttcagactgcctttcttgacttaattgatgtgggtttatttacggcttacagttaacccagacaga

SEQ ID NO: 232193 - DNA, 921 bp, Homo Sapiens
  misc_feature (252)..(442): n is a, c, g, or t
  misc_feature (464)..(706): n is a, c, g, or t
  misc_feature (741)..(859): n is a, c, g, or t
ttggtacaatttttatttctggtgggtttaatttttttaatgaaaaatgaatttcatatttcagaaattcttgtgtatttgtattttaaatgtatggctttttcttttttccttaaggcactcatggtgttgaagaacaaaggcattatatggttttatagtgccgtttaagattgagggaagggttgttactgttttaagttaaagttttaaggttgttaaggtatataagtagagtgtaaatattaatannnnnnnnnnnnnnnnnnnnnnnnnnnnnnnnnnnnnnnnnnnnnnnnnnnnnnnnnnnnnnnnnnnnnnnnnnnnnnnnnnnnnnnnnnnnnnnnnnnnnnnnnnnnnnnnnnnnnnnnnnnnnnnnnnnnnnnnnnnnnnnnnnnnnnnnnnnnnnnnnnnnnnnnnnnnnnnnnnnnnnnnnnnnnnnttctcttttgaggcagagtctnnnnnnnnnnnnnnnnnnnnnnnnnnnnnnnnnnnnnnnnnnnnnnnnnnnnnnnnnnnnnnnnnnnnnnnnnnnnnnnnnnnnnnnnnnnnnnnnnnnnnnnnnnnnnnnnnnnnnnnnnnnnnnnnnnnnnnnnnnnnnnnnnnnnnnnnnnnnnnnnnnnnnnnnnnnnnnnnnnnnnnnnnnnnnnnnnnnnnnnnnnnnnnnnnnnnnnnnnnnnnnnnnnnnnnnnnnnnnnnnnnntataggcatgaactgccgcacccagccttagaggnnnnnnnnnnnnnnnnnnnnnnnnnnnnnnnnnnnnnnnnnnnnnnnnnnnnnnnnnnnnnnnnnnnnnnnnnnnnnnnnnnnnnnnnnnnnnnnnnnnnnnnnnnnnnnnnnnnnnnnatggatactgagacatgactgtacctaaatgtgatgatttattttttgtgaaatggattttt

SEQ ID NO: 232194 - DNA, 484 bp, Homo Sapiens
  misc_feature (79)..(315): n is a, c, g, or t
  misc_feature (320)..(346): n is a, c, g, or t
  misc_feature (403)..(420): n is a, c, g, or t
ttggctcaaatacagctccaatatgaaaatacatatgcacaagattattcaatgcagcattatttatcattggaaaatnnnnnnnnnnnnnnnnnnnnnnnnnnnnnnnnnnnnnnnnnnnnnnnnnnnnnnnnnnnnnnnnnnnnnnnnnnnnnnnnnnnnnnnnnnnnnnnnnnnnnnnnnnnnnnnnnnnnnnnnnnnnnnnnnnnnnnnnnnnnnnnnnnnnnnnnnnnnnnnnnnnnnnnnnnnnnnnnnnnnnnnnnnnnnnnnnnnnnnnnnnnnnnnnnnnnnnnnnnnnnnnnnnnnnnnnnnnnngctcnnnnnnnnnnnnnnnnnnnnnnnnnnngattcaggtatctgtgaactgatagggagagatttccaggaggtattgttaaatggnnnnnnnnnnnnnnnnnntgtaatgatcatctagcatatactatgttttatgtaagaaagaaggggaaataagaaaaacata

SEQ ID NO: 232195 - DNA, 635 bp, Homo Sapiens
  misc_feature (93)..(122): n is a, c, g, or t
  misc_feature (125)..(181): n is a, c, g, or t
  misc_feature (221)..(539): n is a, c, g, or t
tctggcatcactattcttgcactttgggccattagtagtaagagttgacttaattagtaataagagttatttgaacagcctaggcaatgtggnnnnnnnnnnnnnnnnnnnnnnnnnnnnnntgnnnnnnnnnnnnnnnnnnnnnnnnnnnnnnnnnnnnnnnnnnnnnnnnnnnnnnnnngatcacttgagcccaggaggtagaggctatagtgagctgnnnnnnnnnnnnnnnnnnnnnnnnnnnnnnnnnnnnnnnnnnnnnnnnnnnnnnnnnnnnnnnnnnnnnnnnnnnnnnnnnnnnnnnnnnnnnnnnnnnnnnnnnnnnnnnnnnnnnnnnnnnnnnnnnnnnnnnnnnnnnnnnnnnnnnnnnnnnnnnnnnnnnnnnnnnnnnnnnnnnnnnnnnnnnnnnnnnnnnnnnnnnnnnnnnnnnnnnnnnnnnnnnnnnnnnnnnnnnnnnnnnnnnnnnnnnnnnnnnnnnnnnnnnnnnnnnnnnnnnnnnnnnnnnnnnnnnnnnnnnnnnnnnnnnnnnnnnnnnntatatgggaagttagtcacttatgtacatctcacacagtaagctaatgtcagggacaacagtagaacacgaattaaataagattcttcataaagaa

SEQ ID NO: 232196 - DNA, 896 bp, Homo Sapiens
  misc_feature (111)..(124): n is a, c, g, or t
  misc_feature (255)..(413): n is a, c, g, or t
  misc_feature (426)..(722): n is a, c, g, or t
tttgtacaaaaaagttggctccatattactagattaaggaagaaaagtcacatgatcatatgaatcattcagaaaaaggatttgacaaaattcagtgcccattcctggttnnnnnnnnnnnnnnctttcagaaaaatgataatggaggagatctttctcaacttgataaagaacatctacaaaagcccctacagccaatgtaacacataatagtaaaagactaattgcttttctccaatatcagggatattaggnnnnnnnnnnnnnnnnnnnnnnnnnnnnnnnnnnnnnnnnnnnnnnnnnnnnnnnnnnnnnnnnnnnnnnnnnnnnnnnnnnnnnnnnnnnnnnnnnnnnnnnnnnnnnnnnnnnnnnnnnnnnnnnnnnnnnnnnnnnnnnnnnnnnnnnnnnnnnnnaggaatctacaannnnnnnnnnnnnnnnnnnnnnnnnnnnnnnnnnnnnnnnnnnnnnnnnnnnnnnnnnnnnnnnnnnnnnnnnnnnnnnnnnnnnnnnnnnnnnnnnnnnnnnnnnnnnnnnnnnnnnnnnnnnnnnnnnnnnnnnnnnnnnnnnnnnnnnnnnnnnnnnnnnnnnnnnnnnnnnnnnnnnnnnnnnnnnnnnnnnnnnnnnnnnnnnnnnnnnnnnnnnnnnnnnnnnnnnnnnnnnnnnnnnnnnnnnnnnnnnnnnnnnnnnnnnnnnnnnnnnnnnnnnnnnnnnnnnnnnnncaaactagatctagtgagagttcagcaaggcctcaagctacaagacctatataccaaaaatcacttggcatttctatatactattaatgaccatatggaaacctaaatttaaaagatactaccccttaacaattgtttcacaaaaatgaattacctgggcataaattaaataaa

SEQ ID NO: 232197 - DNA, 607 bp, Homo Sapiens
  misc_feature (59)..(102): n is a, c, g, or t
  misc_feature (107)..(356): n is a, c, g, or t
ggtagtttatacccttccaacattttaaggaaggtaccattctatttggatgagttccnnnnnnnnnnnnnnnnnnnnnnnnnnnnnnnnnnnnnnnnnnnngagannnnnnnnnnnnnnnnnnnnnnnnnnnnnnnnnnnnnnnnnnnnnnnnnnnnnnnnnnnnnnnnnnnnnnnnnnnnnnnnnnnnnnnnnnnnnnnnnnnnnnnnnnnnnnnnnnnnnnnnnnnnnnnnnnnnnnnnnnnnnnnnnnnnnnnnnnnnnnnnnnnnnnnnnnnnnnnnnnnnnnnnnnnnnnnnnnnnnnnnnnnnnnnnnnnnnnnnnnnnnnnnnnnnnnnnnnnnnnnnnnnnnnnnnngtgtgagccaccgcgcccggcctacttatgtgttttagaaaaatctttaaaatgttaaaagatgacaggtaatttctagaccatatgaagtagcccagttgtcccaggattagtttattatgtgtatatcagccattattttacagagtcatctcacataaatccacacaaccttaaaggattaaaggatggtttctgtgcaactgaaacatatgcacagaatgacaatagtcgtgatactttctttattc

SEQ ID NO: 232198 - DNA, 792 bp, Homo Sapiens
  misc_feature (248)..(643): n is a, c, g, or t
gaaagcaccagataaggcaactgtgtgagtaatagaaaataatcttgattgtttaaagcaacaattataatttgggggatttttaaacctaaatagaagcaaaacatatgacactattagcatgtggggtggatgagagttaactgtcgtgtggttctgactctttatagtcacaggaatgatgactgaaaataggaaaagtggtgtgattcaaaggctcaatgaggagaagaaatggaataattctnnnnnnnnnnnnnnnnnnnnnnnnnnnnnnnnnnnnnnnnnnnnnnnnnnnnnnnnnnnnnnnnnnnnnnnnnnnnnnnnnnnnnnnnnnnnnnnnnnnnnnnnnnnnnnnnnnnnnnnnnnnnnnnnnnnnnnnnnnnnnnnnnnnnnnnnnnnnnnnnnnnnnnnnnnnnnnnnnnnnnnnnnnnnnnnnnnnnnnnnnnnnnnnnnnnnnnnnnnnnnnnnnnnnnnnnnnnnnnnnnnnnnnnnnnnnnnnnnnnnnnnnnnnnnnnnnnnnnnnnnnnnnnnnnnnnnnnnnnnnnnnnnnnnnnnnnnnnnnnnnnnnnnnnnnnnnnnnnnnnnnnnnnnnnnnnnnnnnnnnnnnnnnnnnnnnnnnnnnnnnnnnnnnnnnnnnnnnatacgtgatttaattttgaaagaaggcaagaatggggaataagaacaaaaagcataaaggacaaataaaaaacaatatgatagcctacaccagccacatcataattacattattaaaaatgaacaaaacacatagcttgtttttaaaaa

SEQ ID NO: 232199 - DNA, 966 bp, Homo Sapiens
  misc_feature (192)..(264): n is a, c, g, or t
  misc_feature (286)..(719): n is a, c, g, or t
tttgtacaaaaaagttggtaaatgtccatgatttccataatgatataaataaagaaataaatgtggtaaaagggacaaatctcccatgcagaacaattccaagtaattcatgtggatacgccaccttcaaagagatgagatggtgtggtctgcacacagtcacttccttcagaagagcacagtgtgaaaacnnnnnnnnnnnnnnnnnnnnnnnnnnnnnnnnnnnnnnnnnnnnnnnnnnnnnnnnnnnnnnnnnnnnnnnnngtggtaagtcatgttcatcgannnnnnnnnnnnnnnnnnnnnnnnnnnnnnnnnnnnnnnnnnnnnnnnnnnnnnnnnnnnnnnnnnnnnnnnnnnnnnnnnnnnnnnnnnnnnnnnnnnnnnnnnnnnnnnnnnnnnnnnnnnnnnnnnnnnnnnnnnnnnnnnnnnnnnnnnnnnnnnnnnnnnnnnnnnnnnnnnnnnnnnnnnnnnnnnnnnnnnnnnnnnnnnnnnnnnnnnnnnnnnnnnnnnnnnnnnnnnnnnnnnnnnnnnnnnnnnnnnnnnnnnnnnnnnnnnnnnnnnnnnnnnnnnnnnnnnnnnnnnnnnnnnnnnnnnnnnnnnnnnnnnnnnnnnnnnnnnnnnnnnnnnnnnnnnnnnnnnnnnnnnnnnnnnnnnnnnnnnnnnnnnnnnnnnnnnnnnnnnnnnnnnnnnnnnnnnnnnnnnnnnnnnnnnnnnnnttttaaaaagtacttctctttcctgtaataatgtaagacagattaggggagagctcatataacaaagtctagaatcaattgaagtggcatcataaagctaaattccagaaaaatgtgtaccatctggcttcgtggaccccaaatgtgctggcttagtgctaaagtggcagccaggaagggtttaaaatggtgttatcattatacatatttggcagcaaggaatttccattattagcagctgaaaaaa

SEQ ID NO: 232200 - DNA, 917 bp, Homo Sapiens
  misc_feature (163)..(189): n is a, c, g, or t
  misc_feature (206)..(255): n is a, c, g, or t
ttgggtttgctcaaatgaatatgcattctatcaaaaactaggatgccttttgcagcttattatttgagaatgttggaacctatattgtgaagaagtggattacctctcagagattaaaaaaaatccttaaataagagtagtcagtgttaagtcatttgtggannnnnnnnnnnnnnnnnnnnnnnnnnngagatggagtctcgctnnnnnnnnnnnnnnnnnnnnnnnnnnnnnnnnnnnnnnnnnnnnnnnnnntcagatttttaggaattacacattagtggagtagttagcagagcccatttttctgagaattaggctctaacttttagttgtaatttagataagttccgaaataagtttttaaacatttaagcttctttgcatgattttatccatttacgttattcaggataagcatctatttgtttatcaagtaatgttttctttcaactttgttttttgtggcagatgtttataaattcttctgtgggatcagagggcacgcctattacaaccagaaaactccaagtataacagcgaggatggatgaacaggctctattagggctaaatccaaatgctgattcagactttagacaaagggccctggcctattttgagcagttaaaaatttccccagatgcctggcaggtgtgtgcagaagctctagcccagaggacatacagtgatgatcatgtgaagtttttctgctttcaagtactggaacatcaagttaaatacaaatactcagaactaaaccactgttcacaacagctatttaggggagacgctcatatcatggctgcaagctcagatgctgaatccccacccagagaagacctttatacgaaaataaagccgcccaagtcttcgcccttgctttttgttacagagtatctcactaagttgcccaag

SEQ ID NO: 232201 - DNA, 920 bp, Homo Sapiens
  misc_feature (191)..(204): n is a, c, g, or t
  misc_feature (245)..(341): n is a, c, g, or t
  misc_feature (409)..(844): n is a, c, g, or t
ttggaaataatataaagtgggtgggggtagtgatagaatagtttttgtatgcacttgaagttaagttgttatcagcttaaaatattttgttataattgtaaaatgttttgtgttagccccatggtaaccacaaagaaaatacctttagaagatacaaaagaaaatgataaaggaatcaaagcatgtcactnnnnnnnnnnnnnntaaatgaaaacagaaaggaaaactgcaagagaggataagannnnnnnnnnnnnnnnnnnnnnnnnnnnnnnnnnnnnnnnnnnnnnnnnnnnnnnnnnnnnnnnnnnnnnnnnnnnnnnnnnnnnnnnnnnnnnnnntgaatgagttttaaaaataacatccaactatatgctgtctacaagagattcacttagatataaggggnnnnnnnnnnnnnnnnnnnnnnnnnnnnnnnnnnnnnnnnnnnnnnnnnnnnnnnnnnnnnnnnnnnnnnnnnnnnnnnnnnnnnnnnnnnnnnnnnnnnnnnnnnnnnnnnnnnnnnnnnnnnnnnnnnnnnnnnnnnnnnnnnnnnnnnnnnnnnnnnnnnnnnnnnnnnnnnnnnnnnnnnnnnnnnnnnnnnnnnnnnnnnnnnnnnnnnnnnnnnnnnnnnnnnnnnnnnnnnnnnnnnnnnnnnnnnnnnnnnnnnnnnnnnnnnnnnnnnnnnnnnnnnnnnnnnnnnnnnnnnnnnnnnnnnnnnnnnnnnnnnnnnnnnnnnnnnnnnnnnnnnnnnnnnnnnnnnnnnnnnnnnnnnnnnnnnnnnnnnnnnnnnnnnnnnnnnnnnnnnnnnnnnnnnnnnnnnnnnnnnnnnnnnnnnnnnnnnacatagggacattcttcaaaacagatcacaagttaggtcacaaaataagtcttaacaaatttaaggagattaaaat

SEQ ID NO: 232202 - DNA, 752 bp, Homo Sapiens
catttattaattcccatattttcggggggtcaggaatttaaaagtaccttaccggggtagttcgggctggggttctcggagggcagtcaaataatgggccaaagtttcattcacccaaaggcttgacgggaacggcgggatctacttccagggtggctcactctgggttggctagggcggcggtaacaaagtatcacagacgggtgggcttaaacaacaaaaatttatttcctcacagttcgggaggcaaaaagtgcaacaccaaggtatctgcgggttgtttcttctgaggcctctctcctgggcgtgtaaacagccatatcctcccaaggtctttatatgatcttctcggtgtgcagtgcgtggtccacatttcccccctcttttgtacggtggtacaaacatagctcactatagcctcacgagtaggtggaactgtaggcgtgtacacaacattgggctatttttaaaaaatttttggaaatgagtgggtcttgccatgttgccagcctcttctatgagaccaagtcaatcaaattgggcctactgaaagactcacctaacttattatctttttaaagacctatcctcgaatctgttcacacgtgaagtcttggggcttagacctccatataggagtttggggacccagtgaacccctacacttcttccacgggtggacattttgactgcggtggacagaagacactcatttgcctataccgaggctccctcttgggcgttttcaaagg

SEQ ID NO: 232203 - DNA, 717 bp, Homo Sapiens
  misc_feature (191)..(278): n is a, c, g, or t
  misc_feature (311)..(399): n is a, c, g, or t
  misc_feature (406)..(515): n is a, c, g, or t
  misc_feature (523)..(652): n is a, c, g, or t
actttgtacaaaaaagttgggtcaccctgcctttctacctgagggtgcatagtgacacggagcccatacagagtacgtctgtgtcactgggtggagcaaacagttgaatttagggctgctgagattggatacagcagggagggagtggtgtagcaaaggagccccagaaatctgtgtacgggtccccagannnnnnnnnnnnnnnnnnnnnnnnnnnnnnnnnnnnnnnnnnnnnnnnnnnnnnnnnnnnnnnnnnnnnnnnnnnnnnnnnnnnnnnntatgagttaaatacacacctatgctatgacctnnnnnnnnnnnnnnnnnnnnnnnnnnnnnnnnnnnnnnnnnnnnnnnnnnnnnnnnnnnnnnnnnnnnnnnnnnnnnnnnnnnnnnnnncccaagnnnnnnnnnnnnnnnnnnnnnnnnnnnnnnnnnnnnnnnnnnnnnnnnnnnnnnnnnnnnnnnnnnnnnnnnnnnnnnnnnnnnnnnnnnnnnnnnnnnnnnnnnnnnnnaagtctcnnnnnnnnnnnnnnnnnnnnnnnnnnnnnnnnnnnnnnnnnnnnnnnnnnnnnnnnnnnnnnnnnnnnnnnnnnnnnnnnnnnnnnnnnnnnnnnnnnnnnnnnnnnnnnnnnnnnnnnnnnnnnnnnnnttgtgggaatgggatgaagactgatttggaaagtggagaagaaagttaaactttctggggagtga

SEQ ID NO: 232204 - DNA, 523 bp, Homo Sapiens
  misc_feature (143)..(259): n is a, c, g, or t
  misc_feature (267)..(417): n is a, c, g, or t
ctattaagacaactttgtacaaaaaagttggacatttctttataaattgtaatttaatagattatctcagaaaaacctctctgaatgatgacccttccttaatactgggtgatgtgtgaatatttgtttgttggcagacaggnnnnnnnnnnnnnnnnnnnnnnnnnnnnnnnnnnnnnnnnnnnnnnnnnnnnnnnnnnnnnnnnnnnnnnnnnnnnnnnnnnnnnnnnnnnnnnnnnnnnnnnnnnnnnnnnnnnnngtatgcannnnnnnnnnnnnnnnnnnnnnnnnnnnnnnnnnnnnnnnnnnnnnnnnnnnnnnnnnnnnnnnnnnnnnnnnnnnnnnnnnnnnnnnnnnnnnnnnnnnnnnnnnnnnnnnnnnnnnnnnnnnnnnnnnnnnnnnnnnnnnnnnnnnnnncttgatgtgtgaatatttgagaggacataagcagaggttttggccataccgtattataccatatacatcagtaaatagctcatcttggaacctgttttgcagtttc

SEQ ID NO: 232205 - DNA, 237 bp, Homo Sapiens
  misc_feature (41)..(49): n is a, c, g, or t
ttggataattttttgcaaaggggtttcctccatttggaccnnnnnnnnncttccacccccatttctgtgtctaagaacctgctcaattccctcctggtgatgttcagcaacatcttttcttttgaggtggtctttaacgaccctgacaaggtgtaaggaagtggcgataatgaggctggccgggtgatagtggaagtgtgtgaacttactcacgtcaaagcctgtagaatcctgcct

SEQ ID NO: 232206 - DNA, 986 bp, Homo Sapiens
  misc_feature (332)..(344): n is a, c, g, or t
  misc_feature (506)..(520): n is a, c, g, or t
  misc_feature (532)..(783): n is a, c, g, or t
ttggaattaaaatccttgtaatggaaactaatagttgcagttttcataaaggtagcctggtgtggaggaaagcacccagcctctggtttcaatgtaacctggacccaaatcttagttgccattagcagctttagaaccatgagtagatgaatgtctctgaggcttaatttcttaatctctaaagtatctctaaagaggataattctaaatacctcacaggttcattgtgaggcttaatacataagattgtatatgtcctataaacaatgcaatgctgcatgctggtggccttagtagcagttaggtccattcctttctcatccctaattctnnnnnnnnnnnnncttcttgcccctgagctgcggggcctttaaggtagaaaaggtaggaaaaacctgggaaagttttgtttttcttcttaaacataaatttgtttttaaataaaaaaaatttatatattttaaatcatctagtctaagatgtcattaaacataagtttctttccnnnnnnnnnnnnnnnaatttgagacannnnnnnnnnnnnnnnnnnnnnnnnnnnnnnnnnnnnnnnnnnnnnnnnnnnnnnnnnnnnnnnnnnnnnnnnnnnnnnnnnnnnnnnnnnnnnnnnnnnnnnnnnnnnnnnnnnnnnnnnnnnnnnnnnnnnnnnnnnnnnnnnnnnnnnnnnnnnnnnnnnnnnnnnnnnnnnnnnnnnnnnnnnnnnnnnnnnnnnnnnnnnnnnnnnnnnnnnnnnnnnnnnnnnnnnnnnnnnnnnnnnnnnnnnnnggcgtgagccaccacgcccagcctacctttcattttcatatttggatctataaagctatctggaattgatttttgtgatggtgtgagatggaattcagctttgttttttccccacatagacattcaattgactgaatcactgcaatgctatcttttgacataaccaatgaccgtgtaatgtttggggtatggaactgggtttt

SEQ ID NO: 232207 - DNA, 255 bp, Homo Sapiens
ttggcggggggccgcccactcgaagagggtgggggagtcgggctacccactggttttccttccattacgaccccagaaccattgggcccacttcccatgctaccgcttccgtccccgcccgactcttgggcccgcgcctgagatgctggagacctatccccctctcctcccgtggccaagagtgcttgaagacacacggacaccatgtgctacaaccatatcaaaatgcttatggggcagctggacactctgggc

SEQ ID NO: 232208 - DNA, 110 bp, Homo Sapiens
actcccgttgtcccaggcttcccagagcgaacctgtgcggctccaaaaaacggcgcgtctagttttctgcgtccggaaggaccaatttcttctcgcggatccagtgttcc

SEQ ID NO: 232209 - DNA, 135 bp, Homo Sapiens
atatctggaatctgaagttgctatatctgaccaaaaggttcaaaagtacagtaattctgctcttggtcatggtaactgaactataaaagaactcaggtgcctcttcttagttgatgatttacctgattctctgaa

SEQ ID NO: 232210 - DNA, 640 bp, Homo Sapiens
  misc_feature (67)..(487): n is a, c, g, or t
  misc_feature (571)..(589): n is a, c, g, or t
caactttgtacaaaaaagttggctgcttcccagtattcctgtccttgtgatgtctccttccacatcnnnnnnnnnnnnnnnnnnnnnnnnnnnnnnnnnnnnnnnnnnnnnnnnnnnnnnnnnnnnnnnnnnnnnnnnnnnnnnnnnnnnnnnnnnnnnnnnnnnnnnnnnnnnnnnnnnnnnnnnnnnnnnnnnnnnnnnnnnnnnnnnnnnnnnnnnnnnnnnnnnnnnnnnnnnnnnnnnnnnnnnnnnnnnnnnnnnnnnnnnnnnnnnnnnnnnnnnnnnnnnnnnnnnnnnnnnnnnnnnnnnnnnnnnnnnnnnnnnnnnnnnnnnnnnnnnnnnnnnnnnnnnnnnnnnnnnnnnnnnnnnnnnnnnnnnnnnnnnnnnnnnnnnnnnnnnnnnnnnnnnnnnnnnnnnnnnnnnnnnnnnnnnnnnnnnnnnnnnnnnnnnnnnnnnnnnnnnnnnnnnnnnnnnnnnnnnnnnnnnngcaacatagtctcaaccttgaattttcttgcaaatgaccccatcctgaccataacctcaatattccctaagtgggcataagaannnnnnnnnnnnnnnnnnncagtagatgacttcgggcagtaaaaatgtgtccagtcacaaaaaaggcatg

SEQ ID NO: 232211 - DNA, 368 bp, Homo Sapiens
ggaacgggagcgtttgctccataacagatgtctccaggaaaaggacaagctgaaagaagattgggaaaaggcccaaaaggaggtggaataggaacaacgcaaatactatgaggatgagcgtacgataattgataacactgtggttccttttactgtttcttcaaggtcctctgaccagctgtttatctcttcctccatgactgaaggccgtgggactgaaattagatagacccgtgaaactgtcagaatgaaaaatttttctttaacatggaagaaatcattccagggagatgactgtgacttccttgctgattactaaggacttcgatcgattggatgaaaagggcgcccttactgtgggggccttg

SEQ ID NO: 232212 - DNA, 547 bp, Homo Sapiens
ttggaaaaaagacgcctgagaacagctgtggtgtgcggcgggacagagagcccggggcctgtggctgtgtgtgcgggggcggggggcgccgagagcacagagacacagtctatatagaaaaaagaatatgataatattgtacacacacacacgcgcgacactctcaacagacagacgacacgcacatataacagacatatttgtggtttagaaatgatattcgtgagacagatctgctatattttgcagacacacacagaatataggatattgagaacgtgttgtgatatgtttacagactatatatctatattttattttcataatattggtcttttcggggaaaactgtacatgtcacaagacacgataatatgtgtgtgtttttatatgtgtcacaaaagaatcttgtaatgatattttttcggggttttggagagcctgtgctcaaaacacatataccaaatctacatattgtgaaactgatgacagggccacaaagatatatattaaatgtaaaggaaaaatataaatatattgtaaacttg

SEQ ID NO: 232213 - DNA, 822 bp, Homo Sapiens
  misc_feature (73)..(494): n is a, c, g, or t
  misc_feature (536)..(574): n is a, c, g, or t
ttggcctaaaggatgagtagggactctcaggacaacccagggaaggatggagttgtattccagatagaggggnnnnnnnnnnnnnnnnnnnnnnnnnnnnnnnnnnnnnnnnnnnnnnnnnnnnnnnnnnnnnnnnnnnnnnnnnnnnnnnnnnnnnnnnnnnnnnnnnnnnnnnnnnnnnnnnnnnnnnnnnnnnnnnnnnnnnnnnnnnnnnnnnnnnnnnnnnnnnnnnnnnnnnnnnnnnnnnnnnnnnnnnnnnnnnnnnnnnnnnnnnnnnnnnnnnnnnnnnnnnnnnnnnnnnnnnnnnnnnnnnnnnnnnnnnnnnnnnnnnnnnnnnnnnnnnnnnnnnnnnnnnnnnnnnnnnnnnnnnnnnnnnnnnnnnnnnnnnnnnnnnnnnnnnnnnnnnnnnnnnnnnnnnnnnnnnnnnnnnnnnnnnnnnnnnnnnnnnnnnnnnnnnnnnnnnnnnnnnnnnnnnnnnnnnnnnnnnnnnnnnnagggggaagcacaagcaaagacagaaggaaaatacaacaggnnnnnnnnnnnnnnnnnnnnnnnnnnnnnnnnnnnnnnngcggggtctacaaagagtcactgtgaaccagggagtggggagtgctgagaatggacagaaaagattcatgtgcccagttgagaaatataatttgaggagtcacagaaagtattgttaagtgagagttgagatcgcatggccacgttcgtcgccagggtttctaactttggatggcatcttttcaccacgcaggactcaatggggaggaagcaggggtatgggttgagggattctgatgagactgtcac

SEQ ID NO: 232214 - DNA, 591 bp, Homo Sapiens
  misc_feature (88)..(382): n is a, c, g, or t
aattttttttctttaaatcatttaacccaaaggtaaagataaaagttctcggtatgtattgccaaactgcttttgaaatatctgtatnnnnnnnnnnnnnnnnnnnnnnnnnnnnnnnnnnnnnnnnnnnnnnnnnnnnnnnnnnnnnnnnnnnnnnnnnnnnnnnnnnnnnnnnnnnnnnnnnnnnnnnnnnnnnnnnnnnnnnnnnnnnnnnnnnnnnnnnnnnnnnnnnnnnnnnnnnnnnnnnnnnnnnnnnnnnnnnnnnnnnnnnnnnnnnnnnnnnnnnnnnnnnnnnnnnnnnnnnnnnnnnnnnnnnnnnnnnnnnnnnnnnnnnnnnnnnnnnnnnnnnnnnnnnnnnnnnnnnnnnnnnnnnnnnnnnnnnagtctatattttattgtaatataatactttttaaaacttttgctaattttataactgcctgataggttctttctgcccactgcacaaacaaaatagaccatggcattgcaataaagaaaaactttaactgacacgcccagccacatcacgtaggagacaaatttactactcaaacctgtctgcatgaaggctcagaggttagggatttt

SEQ ID NO: 232215 - DNA, 597 bp, Homo Sapiens
  misc_feature (61)..(216): n is a, c, g, or t
  misc_feature (292)..(440): n is a, c, g, or t
ttggactaaactctccaaaacgaaatactggctgaatgaattagaaaaaacaagacccaannnnnnnnnnnnnnnnnnnnnnnnnnnnnnnnnnnnnnnnnnnnnnnnnnnnnnnnnnnnnnnnnnnnnnnnnnnnnnnnnnnnnnnnnnnnnnnnnnnnnnnnnnnnnnnnnnnnnnnnnnnnnnnnnnnnnnnnnnnnnnnnnnnnnnnnnnnnctataaaaagagacaaggtcatatagtgataaaggagttaatgcagcaagatgatataacaattgtaaatacatannnnnnnnnnnnnnnnnnnnnnnnnnnnnnnnnnnnnnnnnnnnnnnnnnnnnnnnnnnnnnnnnnnnnnnnnnnnnnnnnnnnnnnnnnnnnnnnnnnnnnnnnnnnnnnnnnnnnnnnnnnnnnnnnnnnnnnnnnnnnnnnnnnnnacatcagacttaatcagcacctatagaccaaatggacctacctgatagatatttactgaacatttcatctaacagctgcagaataaatattcttctcatcagcacatgtatcattctccaagacagacaatatgttaggtcacaaaacaatttttta

SEQ ID NO: 232216 - DNA, 920 bp, Homo Sapiens
  misc_feature (106)..(132): n is a, c, g, or t
  misc_feature (143)..(207): n is a, c, g, or t
  misc_feature (227)..(522): n is a, c, g, or t
  misc_feature (602)..(706): n is a, c, g, or t
ttggctccatatgcacattggttgccgcatatatacatctgagtttgaaaagttcttctgagattacctaaaagtaacaccacagattccttccattgtaaatacnnnnnnnnnnnnnnnnnnnnnnnnnnngagacatggtnnnnnnnnnnnnnnnnnnnnnnnnnnnnnnnnnnnnnnnnnnnnnnnnnnnnnnnnnnnnnnnnngctcaagggatcttccttannnnnnnnnnnnnnnnnnnnnnnnnnnnnnnnnnnnnnnnnnnnnnnnnnnnnnnnnnnnnnnnnnnnnnnnnnnnnnnnnnnnnnnnnnnnnnnnnnnnnnnnnnnnnnnnnnnnnnnnnnnnnnnnnnnnnnnnnnnnnnnnnnnnnnnnnnnnnnnnnnnnnnnnnnnnnnnnnnnnnnnnnnnnnnnnnnnnnnnnnnnnnnnnnnnnnnnnnnnnnnnnnnnnnnnnnnnnnnnnnnnnnnnnnnnnnnnnnnnnnnnnnnnnnnnnnnnnnnnnnnnnnnnnnnnnnnnnaaaaggatctttccacctcagcctctctggtagctaggactacaggcacacagcactatgcccagctaataaaaaataannnnnnnnnnnnnnnnnnnnnnnnnnnnnnnnnnnnnnnnnnnnnnnnnnnnnnnnnnnnnnnnnnnnnnnnnnnnnnnnnnnnnnnnnnnnnnnnnnnnnnnnngtgtaagccaccgtgccctgcccatgataaatattttaattttgcctgataagtcataaaaagtttattcaacaccttaaatagatttctcaattttttaaaaatattaaacctttgaaatcgaaagtaatttttggatttcacccctttattgcaaagtttttgatgtctgtgggaaaaacccctgaattgcttgtgaaactctggatatgta

SEQ ID NO: 232217 - DNA, 260 bp, Homo Sapiens
ttggacacttccgaagttgcaatagatgaccgagaaagggtaaagaaatgtcaatatgagagctatgaatgtattggccgaacctaaagagcgagacaaggacctgatgaataagaacacaattgtataccatgacttctcctacattcttaccactatagaagaccttgaccgaaacaagaaccaagccctaaatattgcatggcaaaaggtgaaaaatgactttgggtcaattttttctactcttttgcctggtgcta

SEQ ID NO: 232218 - DNA, 649 bp, Homo Sapiens
  misc_feature (234)..(522): n is a, c, g, or t
  misc_feature (531)..(545): n is a, c, g, or t
  misc_feature (570)..(590): n is a, c, g, or t
ataaagcaaaacaatataaagatatatacaagtgagaaatcttgttcttgcccctaccctttataccccatcactctcacccctcacaaacacaggtgaccatctgtctttttctttatgcaaacataaacaaaaaaatatgtttttcactacccctgtctgtgtacacatacaaaagctagcatctatggatactgttctggatcttgcatttattgtttaacaatatagctnnnnnnnnnnnnnnnnnnnnnnnnnnnnnnnnnnnnnnnnnnnnnnnnnnnnnnnnnnnnnnnnnnnnnnnnnnnnnnnnnnnnnnnnnnnnnnnnnnnnnnnnnnnnnnnnnnnnnnnnnnnnnnnnnnnnnnnnnnnnnnnnnnnnnnnnnnnnnnnnnnnnnnnnnnnnnnnnnnnnnnnnnnnnnnnnnnnnnnnnnnnnnnnnnnnnnnnnnnnnnnnnnnnnnnnnnnnnnnnnnnnnnnnnnnnnnnnnnnnnnnnnnnnnnnnnnnnnnnnnnnnnnnnnnaacatttcnnnnnnnnnnnnnnntcccaaatgagaatgtagcaatgcnnnnnnnnnnnnnnnnnnnnnaaagaactttagggctgggattacaggcgtgcatcaccacacccagccaagacataaca

SEQ ID NO: 232219 - DNA, 868 bp, Homo Sapiens
  misc_feature (41)..(169): n is a, c, g, or t
  misc_feature (241)..(606): n is a, c, g, or t
ttggctacaacttctatatagctgggactacagccatgcannnnnnnnnnnnnnnnnnnnnnnnnnnnnnnnnnnnnnnnnnnnnnnnnnnnnnnnnnnnnnnnnnnnnnnnnnnnnnnnnnnnnnnnnnnnnnnnnnnnnnnnnnnnnnnnnnnnnnnnnnnnnnnnngtatgagctaccatgcctggcgttggttataagtggtgtgactatggaggccatctgtgtgttacaataagnnnnnnnnnnnnnnnnnnnnnnnnnnnnnnnnnnnnnnnnnnnnnnnnnnnnnnnnnnnnnnnnnnnnnnnnnnnnnnnnnnnnnnnnnnnnnnnnnnnnnnnnnnnnnnnnnnnnnnnnnnnnnnnnnnnnnnnnnnnnnnnnnnnnnnnnnnnnnnnnnnnnnnnnnnnnnnnnnnnnnnnnnnnnnnnnnnnnnnnnnnnnnnnnnnnnnnnnnnnnnnnnnnnnnnnnnnnnnnnnnnnnnnnnnnnnnnnnnnnnnnnnnnnnnnnnnnnnnnnnnnnnnnnnnnnnnnnnnnnnnnnnnnnnnnnnnnnnnnnnnnnnnnnnnnnnnnnnnnnnnnnnnnnnnnnnnnnnnnnnnnnnnnacaaggatgaagtgaagcatcctggatatcctctgcctgtaatccggtctgatgtgcggcacttcatgtccgagcttatccatttggttttggtctttggaaaagacaacgttagtcacttactagtggcagttgcatggagaagagggctcactaatgggggacagggtgatcatttggagtttgcaagctgtgaagacagatgttggctcttcacaattttggaaaggttcactagttaagtgtaggaccttatggggga

SEQ ID NO: 232220 - DNA, 141 bp, Homo Sapiens
tggtttagacttcaaaacttcaggacgatcttccaaaaaacctaagcataaggttactttagaaagcgttgtcaaatctagattcaatagcatcaccattggttctcaagacatcaccatcacaaaatcacctttctcttt

SEQ ID NO: 232221 - DNA, 511 bp, Homo Sapiens
ttggctcttgttttccgagcctgtttctacctccctgtctccgccctttttattctccttccgccccttcgcttatcctccatgcgtcgatcgggaaattcgccctctggtgtctctgctattttgatccgctggaagaaaggtggctgagcgacagcaaccccgccatctgccgcctacggccggccgtactttacgtcttcttctccccgccgccacgaaggagtgacatgacagtctatgctgtgaacctacaaaatgagctgcagtcagggtccttgcgcttgggcaaaagctgccccccggagacgcacatgggtgaagaggccgatgtgggtccctgagagaattcctcggacaccttctcgaatggcctttcccactgcacaaaactcaccgtctctgaagtacagcgcttctgggagtccaacactcctgcccacattgatatgagtgctgttctggttgctgtcactgaagtgattccctccccttgatggaaagagacaga

SEQ ID NO: 232222 - DNA, 1035 bp, Homo Sapiens
  misc_feature (41)..(50): n is a, c, g, or t
ttgggcccatatgacccgtaattgaaaaaagtcctccctgnnnnnnnnnntggcctctggggatacaaataaattttgcacaccactccgggatttggggatcctttgtagctcacataaagaaatttcgtgcgcagaaattataccatccaactagatctggagcctaattttagaaaaacattcaccttttttgtgctttaaacctgagtaattgggctagaaacaaaatacttcaagaaaagaaaattttccataaaaaccaaaataataactttgcttaaccctggtagggattcattggagcattaagggacacatatttttattaacctcttttggaccttcaaagttgaagtaaattttgtttcttgtggaatttaagtaaactgcagtgtttaacataataattgtttaaagaactagttgtcagtattaaataattcttgcattataaggaaaaaaccctctaaaagttaaaataatgcgtactgtgagaatattgtcacactgggaggtacttagttcaattaatttaaatttatatttgtggatattttaagaactgtagagctgcgtcaatatctagaaatttttattgagtgtaaaaaccctaacttaaaaaaaggaccgcttgtatgagttttcaaagacatttaatttctaaaagctcaaacttatcgctaatgctggttttataaagccaggatttgggactttcccaaaggcacttaaactgacgatgaaaagcataatttcttccagtaactgttcgaatatttcgatttgggggattgacaattttatccttaaacaaccccaaaaaatttagattaaattctttaaagggtttgaaaagaaatttttaaaaggaacattttttccctccttgattgtgaaattttcccaaattccccttcctttaattcccgtgctggagggggaaaattttccccgaaaagcctttttgtttaagggggggaaaaaaaggcccccaggatttttttaaagaaaccccccattttttaccccaaa

SEQ ID NO: 232223 - DNA, 367 bp, Homo Sapiens
  misc_feature (95)..(108): n is a, c, g, or t
  misc_feature (307)..(316): n is a, c, g, or t
ttgggaaggcagtctcctttcaaggcttttattattatttataaatgatgattggtcttcttaagattattaatttctttctacactgatgtgcnnnnnnnnnnnnnngaataattaacttcctctttactatgaagataattgatcattttctccgaccaccaaaaaaggacgttgctggtggttggactgacctcttcctgtggtgacgacgaagagctgcaaaaatattctttattattttctctcctactactggggtaataaggaatgtggttgaaattgctgattgaagaattgttgtccnnnnnnnnnnataccttgctgaattatttcctcttttattctactgatggataatatgatg

SEQ ID NO: 232224 - DNA, 841 bp, Homo Sapiens
ttgggttcccgcaaagtccctgtgaggtggttctggatggagaggctgaggcacagcagagaagtaacatgacatgctcagtcacaagtaaggggtagaaccaggtcttcctgaggaagtaatgaccttgagcagcaaaaccaaaggtgtgaactcaagaggatcccagagcaggctctgcagaaggcctctagaggggatggggaggggggtctgacccgggcctgcctgaagggagcccttgaggatgctgggctcacacagaagggcgttcaaggtggaaggaaccacatgcgcaagagccttagagtgggagccaggggcagtgccggggtcggggctaggcttggctggcacagggccctgtcaaccccactcacactcacctctgttgccttcgccctccgggcctccatttccccgacggacccgaggcttacacttctgccttgcctgccctctgggggcccggccttccttccagtcccccggcccctctgctcagccatagtggaagtgtgtctttgcagacaaactatgcttcaacaccttcttcaacttcgaggacatgcaggagatcaccaagcactttgtggtgtgtcacgtggatgcccctggacaacaggtgggggcgtcgcagtttcctcacgggtaccagttcccctccatggagcagctggctgccatgctccccagcgtggtgcagcattttggttcaagtatgtgattggcatcggagtgggcgccggagcctatgtgctggccaagtttgcactcatcttccccgacctggtggaggggcttggtgctggtgaacatcgacccccatggcaaggctgga

SEQ ID NO: 232225 - DNA, 180 bp, Homo Sapiens
  misc_feature (67)..(135): n is a, c, g, or t
ccatcagtgtcaccccctccgccaaggaaaggggcttgggggggcaaaaaaattcccactttttccnnnnnnnnnnnnnnnnnnnnnnnnnnnnnnnnnnnnnnnnnnnnnnnnnnnnnnnnnnnnnnnnnnnnnacccaattcccaacaatggggcgggggattccccctaatcccccc

SEQ ID NO: 232226 - DNA, 373 bp, Homo Sapiens
  misc_feature (188)..(207): n is a, c, g, or t
  misc_feature (271)..(306): n is a, c, g, or t
  misc_feature (323)..(333): n is a, c, g, or t
tacaaaaaagttgggatcttgggcttaagatacgggatgagtcttttgagatttgagggttggcattctggtattctgcgggggtgcctgagggcccctataagatttgaaaatgggttcaagcgaccggacagaatttttgtatttttgggggaactaggggtagagagattcatttgaggttcccnnnnnnnnnnnnnnnnnnnncccccaaaaaacccaacctaattccaatgggggcccgcggtgggcaaaattttttgtgaaaccnnnnnnnnnnnnnnnnnnnnnnnnnnnnnnnnnnnncgcgagaactctccccnnnnnnnnnnnccccaccttggggggggaagagacctctcagaggaaaaaa

SEQ ID NO: 232227 - DNA, 174 bp, Homo Sapiens
  misc_feature (74)..(82): n is a, c, g, or t
tttttctcccagagggtttctctcccccattgtgggggggagccctcttcccccaaaaacactataaaaccccnnnnnnnnntgtgagagggcgcgggtgttctcttctcgtgagagagggccccccggggggggcccaattagaacacccccccctgttttttcccgggggag

SEQ ID NO: 232228 - DNA, 466 bp, Homo Sapiens
  misc_feature (55)..(65): n is a, c, g, or t
  misc_feature (113)..(148): n is a, c, g, or t
aaaaaaaacaccccaaattcaaaattttttgggggggaaagttcccccaggattnnnnnnnnnnnggggggcagttttcccccaagaaggggaaactctccggtggggcaaannnnnnnnnnnnnnnnnnnnnnnnnnnnnnnnnnnnaggtgagggtggatgagaaaaccgggcaaaatgggcggggggccctttcagaccctacctttatattggccccccctttttaacctcgaacccccgggagaaacacgggcaagcttgtcttcaaagtgaggaacccttcgggcaaaaaccgcttgaagaacgcgggactccaccttgtggttcccttggacgacgaccggtatgaatccgaagaaagaacgtgacccctaccgcgttcagttttattaagacccaaaatgaggtcggagcggatatctcaagagaagaagaaatactcctttttgtggagctgagata

SEQ ID NO: 232229 - DNA, 678 bp, Homo Sapiens
atacgtgactcaacaaaggccgctggttccagtccttgacagaaaacggcactacctgtactgagagctggatgttaggcgaaggctgccttccttttctacgtgcaacaaaaacccctgtgtatctcggaatccttatatacctcctaaactcctcatctattatatatgccagaatcccatgctgacttttctaatgtgcatgtacccttacttatttttcctatgtacttttcaatttccttttgtggatttaaaaagctggcaggtaatgaaaccaacttcacaaggaccaaccaaatattctgtgggggatgtccacccacgaaactcatgatttcatcggctacgtctccctggataaggaagctggtaaaagcatctgatagaactgctcccttcatccttctagggagcattccatgaagtgcacggctgtctacttcacatggtttcctgacgatatgggtagaaaacatttccagtaaaaactttaatatgatgttatacagtgaaaattaaaatacataccattcgtctatgcgccactgtcatctgctaatttgtacaacatcttgtttcaatgacctgagaggcctacacaagtacgtagagtatccacagtatatcaattatgctgataatttaaaaataaacatatacatgaaaaaagacaca

SEQ ID NO: 232230 - DNA, 402 bp, Homo Sapiens
ttggactgtatctccacccatgacaggtttcagatcggccaaggaattacgtgctgcactcctgccctcaggcgatctgactgtgatgcctctaaaaatggaaaatgagagtcaatccaaacctgcgctgccagacagtactcctgcttcccctttgccaatagatgctccgtctcccccacaccccatttcaccctctgagaatccaacatatggtcctttggcccaaccaggcccctgtaatacctcatgccaggattcttgtgtaacaactatctcctcttccttacaggacaaaaacctaatgcttgttttggccccaaacctttcgaggatggctcttttaaaatgaagtatccccgtcgcaatgcccgtgcactttctaatttgttttttggtctt

SEQ ID NO: 232231 - DNA, 420 bp, Homo Sapiens
ttggatcccctcttatcatgggaaatgctccccacctatccgggccagttctctggccccgtttcccgcagtctcgagcttggccccgaggcagcttgaggagggtgagcggtcgaaatacctcgttcaacaacagctcacgtctgtttgctccaccgataaaaactataaaggatgcacgtcccaaaattgaggaacgaatcgaacttttcctgttctgaccagttaaaagggttttctctttctgtgagggacaattcgttccttattgtcactgtcatggccgaaactggtttgacaactctactcccaaaatatctatatgaagcagggttttcacacctggataggattggggttgctcctccaccaccactatctgccatgtcaattgctcggacagtagcggaagaaatgaaa

SEQ ID NO: 232232 - DNA, 268 bp, Homo Sapiens
  misc_feature (63)..(199): n is a, c, g, or t
tgtacaaagaagaaagctttcaaataaacaatctaacactgcatcttaaggaattagaaaaannnnnnnnnnnnnnnnnnnnnnnnnnnnnnnnnnnnnnnnnnnnnnnnnnnnnnnnnnnnnnnnnnnnnnnnnnnnnnnnnnnnnnnnnnnnnnnnnnnnnnnnnnnnnnnnnnnnnnnnnnnnnnnnnnnnnnnnncctttagctagattatgaaaaaaagaataaatgtcaaatcaataaaatcagagatcaaaaaggagaaat

SEQ ID NO: 232233 - DNA, 130 bp, Homo Sapiens
aggaattgttggttgtccaagatataatcttatttcaactttacatccacccacataaccctctaactccccttgtaactgggactgggtagtccaaagaggaacagctctttggacaccaagaaaaaac

SEQ ID NO: 232234 - DNA, 767 bp, Homo Sapiens
  misc_feature (114)..(308): n is a, c, g, or t
  misc_feature (391)..(638): n is a, c, g, or t
ttggagccaataataactaagaattggaacacttcctaagatccatttgacttgatgggatttggaacctaaatatacagagtaggaagtttctaatttggaagttaagctgtnnnnnnnnnnnnnnnnnnnnnnnnnnnnnnnnnnnnnnnnnnnnnnnnnnnnnnnnnnnnnnnnnnnnnnnnnnnnnnnnnnnnnnnnnnnnnnnnnnnnnnnnnnnnnnnnnnnnnnnnnnnnnnnnnnnnnnnnnnnnnnnnnnnnnnnnnnnnnnnnnnnnnnnnnnnnnnnnnnnnnnnnnnnnnnnnnnncactgagtaaaggagattttgcacagtccttccctgctcctggaatcagactggcacttacactatcagccctcctgcttatnnnnnnnnnnnnnnnnnnnnnnnnnnnnnnnnnnnnnnnnnnnnnnnnnnnnnnnnnnnnnnnnnnnnnnnnnnnnnnnnnnnnnnnnnnnnnnnnnnnnnnnnnnnnnnnnnnnnnnnnnnnnnnnnnnnnnnnnnnnnnnnnnnnnnnnnnnnnnnnnnnnnnnnnnnnnnnnnnnnnnnnnnnnnnnnnnnnnnnnnnnnnnnnnnnnnnnnnnnnnnnnnnnnnnnnnnnnnnnnnnnnnnnnngctatttatttttcattaatttaaattatgaaatactttaagcatacaaaaaaagagacatcctgaacctgtgatgggatgcactgagggcacagcatcgtttctgtggtattcttgccaacaatgtat

SEQ ID NO: 232235 - DNA, 871 bp, Homo Sapiens
  misc_feature (57)..(756): n is a, c, g, or t
ttggataagattttaaaagcaactgacagcttacacccattagaatggctactctcnnnnnnnnnnnnnnnnnnnnnnnnnnnnnnnnnnnnnnnnnnnnnnnnnnnnnnnnnnnnnnnnnnnnnnnnnnnnnnnnnnnnnnnnnnnnnnnnnnnnnnnnnnnnnnnnnnnnnnnnnnnnnnnnnnnnnnnnnnnnnnnnnnnnnnnnnnnnnnnnnnnnnnnnnnnnnnnnnnnnnnnnnnnnnnnnnnnnnnnnnnnnnnnnnnnnnnnnnnnnnnnnnnnnnnnnnnnnnnnnnnnnnnnnnnnnnnnnnnnnnnnnnnnnnnnnnnnnnnnnnnnnnnnnnnnnnnnnnnnnnnnnnnnnnnnnnnnnnnnnnnnnnnnnnnnnnnnnnnnnnnnnnnnnnnnnnnnnnnnnnnnnnnnnnnnnnnnnnnnnnnnnnnnnnnnnnnnnnnnnnnnnnnnnnnnnnnnnnnnnnnnnnnnnnnnnnnnnnnnnnnnnnnnnnnnnnnnnnnnnnnnnnnnnnnnnnnnnnnnnnnnnnnnnnnnnnnnnnnnnnnnnnnnnnnnnnnnnnnnnnnnnnnnnnnnnnnnnnnnnnnnnnnnnnnnnnnnnnnnnnnnnnnnnnnnnnnnnnnnnnnnnnnnnnnnnnnnnnnnnnnnnnnnnnnnnnnnnnnnnnnnnnnnnnnnnnnnnnnnnnnnnnnnnnnnnnnnnnnnnnnnnnnnnnnnnnnnnnnnnnnnnnnnnnnnnnnnnnnnncaagtaaaaataaagacaagaaattggagcatgattttgataaaaatacaaaacctcacagagaaggggaaaattgttaacataaatagagtcccaaagctccttcccattaatg

SEQ ID NO: 232236 - DNA, 901 bp, Homo Sapiens
  misc_feature (164)..(458): n is a, c, g, or t
ttgggatctactttgctcagaagagacaagggaaaactgggaaattgattttgtaccacaggtcacacatttgctttcatcatacaaggttatgctttttctctcaaatgagttgtacatattatgtagcatctatttacttctaaaaaattgaggaatggagnnnnnnnnnnnnnnnnnnnnnnnnnnnnnnnnnnnnnnnnnnnnnnnnnnnnnnnnnnnnnnnnnnnnnnnnnnnnnnnnnnnnnnnnnnnnnnnnnnnnnnnnnnnnnnnnnnnnnnnnnnnnnnnnnnnnnnnnnnnnnnnnnnnnnnnnnnnnnnnnnnnnnnnnnnnnnnnnnnnnnnnnnnnnnnnnnnnnnnnnnnnnnnnnnnnnnnnnnnnnnnnnnnnnnnnnnnnnnnnnnnnnnnnnnnnnnnnnnnnnnnnnnnnnnnnnnnnnnnnnnnnnnnnnnnnnnnnttgaggaatgaatgtgggaaagagaaagaacaagtaaaaggaattttcattttccagcccctaattgttctgtctttctcccagtgtctcctttcctcttgggccgggcactttgggctgccagtcggttcactgttgctatgtcccctgaactgatccagcagttcctacaggcaacagttagtggtcttcacgagacacagcccccatcagttcgaatttctgcagtgagagccatctggggttattgtgaccaactgaaagtctcagagagtacccacgtgctccagcccttcctctccagcatccttgatggcttaattcacctagcagcccagttcagctcagaggtcctcaacctggtgatggagaccctgtgcatcgtttgtacagtagaccccgaattcacagcaagcatggaaagcaaaatctgccccttcacc

SEQ ID NO: 232237 - DNA, 227 bp, Homo Sapiens
ttggcacttggtgtcctgcctgtgctgatgtgattactgctgttgtccgcactctcttttcatatctttgtacaggacagataagtgatcggtgtattggtcgagtgagactgagatgaaaagaaataagctagccaatggtctgtaatgcattttggttggactgggaacaaggaaaaatttcaaagatgcattttgagagttccaaaatcgcttttgttatctta

SEQ ID NO: 232238 - DNA, 171 bp, Homo Sapiens
agcttaaaatgcccactttgtacaaaaaagttggatggattcctctaaaaaaagccgatgagattatgactttctcgggtctgttaatggacaaatataaagcctcattctgcctgaaggttctcggaatcccccctctataaactgcgaagacgtgaaattctggcctcc

SEQ ID NO: 232239 - DNA, 860 bp, Homo Sapiens
  misc_feature (103)..(553): n is a, c, g, or t
ttggctccattgatccagttgttgtttctcaaaaactgtccagaggcagcactgtctagcagaccatcaaagatcaggtaggaagagtctgttctctaagtannnnnnnnnnnnnnnnnnnnnnnnnnnnnnnnnnnnnnnnnnnnnnnnnnnnnnnnnnnnnnnnnnnnnnnnnnnnnnnnnnnnnnnnnnnnnnnnnnnnnnnnnnnnnnnnnnnnnnnnnnnnnnnnnnnnnnnnnnnnnnnnnnnnnnnnnnnnnnnnnnnnnnnnnnnnnnnnnnnnnnnnnnnnnnnnnnnnnnnnnnnnnnnnnnnnnnnnnnnnnnnnnnnnnnnnnnnnnnnnnnnnnnnnnnnnnnnnnnnnnnnnnnnnnnnnnnnnnnnnnnnnnnnnnnnnnnnnnnnnnnnnnnnnnnnnnnnnnnnnnnnnnnnnnnnnnnnnnnnnnnnnnnnnnnnnnnnnnnnnnnnnnnnnnnnnnnnnnnnnnnnnnnnnnnnnnnnnnnnnnnnnnnnnnnnnnnnnnnnnnnnnnnnnnnnnnnnnnnnnnnnnnnnnnnntgctctaaggtacattgctgatttgtctggtgacttgctagattgactgcctgatgcctggggaaaatttcagcatataatcaatatcaagtcaggggtttttgttcagtctcacttttacccaagtccagcaactataagcaaaagtggacacctacgggaagctcaacgctgccgtgagaatgataaacagatgaaaggcattggggatgacttgactcaaggcagcagagaggacttctagagtacgcgaattgcatatcgtcacgcgaatagtattcagagtaaaaggactgttttcttgttg

SEQ ID NO: 232240 - DNA, 209 bp, Homo Sapiens
ttggatctctggctgctcattactctcatagtgtcattcgcatctagttctggacactgtgtgctttcctgtttggaggtttgtttcttgtttcctgccaagtcatgaacattttcttgatactccccgccctgatcatccccctcaagacggtcattccctaggcagcggagaatgctcctcttctctccagggcatggacctggcat

SEQ ID NO: 232241 - DNA, 363 bp, Homo Sapiens
  misc_feature (179)..(194): n is a, c, g, or t
  misc_feature (201)..(221): n is a, c, g, or t
ttggaactgaagcgcgcgtgcttgggtccggccggctgcctgccgtggaggaaggagccccccacccaccctcctgcctgcctgcttacttgaaggattgcttcgcctgctcggtcaccgattcaatcgactatttgattaacaaccagacccattccttgtgcgggctgaaggcaacnnnnnnnnnnnnnnnncaggccnnnnnnnnnnnnnnnnnnnnncgggcggcagcgagcgtcacgccgggccccgcaccaactccctcccagccggcaagcaactgcctgcggagtgcctcacagaccgattgaaccaactgcctgccccccttcgctggcttgattgaaaagaagaaacacaccc

SEQ ID NO: 232242 - DNA, 775 bp, Homo Sapiens
  misc_feature (58)..(72): n is a, c, g, or t
  misc_feature (74)..(264): n is a, c, g, or t
  misc_feature (269)..(291): n is a, c, g, or t
  misc_feature (297)..(682): n is a, c, g, or t
ttgggccagaagttcaagaccatccttggcaacatagcaagaccccactgtctctgcnnnnnnnnnnnnnnncnnnnnnnnnnnnnnnnnnnnnnnnnnnnnnnnnnnnnnnnnnnnnnnnnnnnnnnnnnnnnnnnnnnnnnnnnnnnnnnnnnnnnnnnnnnnnnnnnnnnnnnnnnnnnnnnnnnnnnnnnnnnnnnnnnnnnnnnnnnnnnnnnnnnnnnnnnnnnnnnnnnnnnnnnnnnnnnnnnnnnnnnnnnnnnnttttnnnnnnnnnnnnnnnnnnnnnnncaaggnnnnnnnnnnnnnnnnnnnnnnnnnnnnnnnnnnnnnnnnnnnnnnnnnnnnnnnnnnnnnnnnnnnnnnnnnnnnnnnnnnnnnnnnnnnnnnnnnnnnnnnnnnnnnnnnnnnnnnnnnnnnnnnnnnnnnnnnnnnnnnnnnnnnnnnnnnnnnnnnnnnnnnnnnnnnnnnnnnnnnnnnnnnnnnnnnnnnnnnnnnnnnnnnnnnnnnnnnnnnnnnnnnnnnnnnnnnnnnnnnnnnnnnnnnnnnnnnnnnnnnnnnnnnnnnnnnnnnnnnnnnnnnnnnnnnnnnnnnnnnnnnnnnnnnnnnnnnnnnnnnnnnnnnnnnnnnnnnnnnnnnnnnnnnnnnnnnnnnnnnnnnnnnnnnnnnnnnnnnnnnnnnngtgaaagagtttatataaacatggagaaatgttttgttcctttgttaagtgtgggactaaaaaagtctggaagaaaatacagtgtaattaaga

SEQ ID NO: 232243 - DNA, 144 bp, Homo Sapiens
ccatgtccgaggtcggaggtgggggagggaccccgatcctaactcacccatataccctgcttcatttgccgccccgagaggcccggattccaggatggagcgctgtcttttgcgccgtcattcttgcatctacactaccatttg

SEQ ID NO: 232244 - DNA, 223 bp, Homo Sapiens
  misc_feature (47)..(70): n is a, c, g, or t
  misc_feature (78)..(151): n is a, c, g, or t
  misc_feature (163)..(175): n is a, c, g, or t
cccccctttaaccccccttttaaaaaagggaaaacccccaaagggannnnnnnnnnnnnnnnnnnnnnnnaaaaaaannnnnnnnnnnnnnnnnnnnnnnnnnnnnnnnnnnnnnnnnnnnnnnnnnnnnnnnnnnnnnnnnnnnnnnnnngggggggtttgnnnnnnnnnnnnngcaaaattttgggaaaaaggggggtttccattttccccctggccccgg

SEQ ID NO: 232245 - DNA, 882 bp, Homo Sapiens
  misc_feature (242)..(363): n is a, c, g, or t
  misc_feature (366)..(384): n is a, c, g, or t
  misc_feature (392)..(436): n is a, c, g, or t
  misc_feature (439)..(451): n is a, c, g, or t
ttggagtgaatccctagattttcttaatagttgggcaacaagttcttgcatttagggatgttgcaacatagcccagttccgcaattgtacattttctattttttttcctaggttctctgctgtttaaaaagtatccctgtggtgagtgtattgatattgataacatttacatgacctttttattgattatttactgggggacctattacatacaggcagtgttttaaaggctttgcatatgnnnnnnnnnnnnnnnnnnnnnnnnnnnnnnnnnnnnnnnnnnnnnnnnnnnnnnnnnnnnnnnnnnnnnnnnnnnnnnnnnnnnnnnnnnnnnnnnnnnnnnnnnnnnnnnnnnnnnnnnnnacnnnnnnnnnnnnnnnnnnntgaagtcnnnnnnnnnnnnnnnnnnnnnnnnnnnnnnnnnnnnnnnnnnnnngcnnnnnnnnnnnnnctctaccagtcacttccctccaaagaggagtaaccactatcctgacttctaatgctccagattagtattgcttggttttgttcctatctaaaggagaaataaaacatatccttatatgtggcttcttcaacattgctttgtgagactcatccatattgtatgtatttgtggtttgctggttctcattgctgcattatcctatcccattgcatatataccataatttctctcttctaatgatcattcatcaaaggtcagcaagcagagaatggggtaacaacaaaagctcttctccagagctaaaatttcaaaatggtaacagcttgtggtgctgaatcacaccaggcaaggtgaggccctgccctgtgtcactgacttaactgatcattatttgtgcttttcagatgaatgaagttacttattctaccctg

SEQ ID NO: 232246 - DNA, 641 bp, Homo Sapiens
  misc_feature (193)..(486): n is a, c, g, or t
ttggaattcatactggaaaaaggccttagtggagtgaatgcaggaaagtcaccaaaactgtcacctcattcagcaccaaaaggttcacatcggaccaagaacctattaatatatgtaaatctaatgttgaaagagttcagatggaaatctgcgaggatttcctgctgggaactacattaaaaacatttatgtnnnnnnnnnnnnnnnnnnnnnnnnnnnnnnnnnnnnnnnnnnnnnnnnnnnnnnnnnnnnnnnnnnnnnnnnnnnnnnnnnnnnnnnnnnnnnnnnnnnnnnnnnnnnnnnnnnnnnnnnnnnnnnnnnnnnnnnnnnnnnnnnnnnnnnnnnnnnnnnnnnnnnnnnnnnnnnnnnnnnnnnnnnnnnnnnnnnnnnnnnnnnnnnnnnnnnnnnnnnnnnnnnnnnnnnnnnnnnnnnnnnnnnnnnnnnnnnnnnnnnnnnnnnnnnnnnnnnnnnnnnnnnnnnnnnnnnttataattgtggcaaattacaggtaacttaaaatctaccatcttaacccatatttaactgtactgttcagtagtgttaagtcattcgcattgttgtcaattaatatccagaagttttttcaacttaatgaaactaaaacattataccctttaaac

SEQ ID NO: 232247 - DNA, 794 bp, Homo Sapiens
  misc_feature (107)..(543): n is a, c, g, or t
  misc_feature (583)..(664): n is a, c, g, or t
atgagcccctgcatccagccagagtaggactataacaattgaaaaatattagtaatagtaaataccaagcgacttctgtagttctgtatttctgaattgttaggtannnnnnnnnnnnnnnnnnnnnnnnnnnnnnnnnnnnnnnnnnnnnnnnnnnnnnnnnnnnnnnnnnnnnnnnnnnnnnnnnnnnnnnnnnnnnnnnnnnnnnnnnnnnnnnnnnnnnnnnnnnnnnnnnnnnnnnnnnnnnnnnnnnnnnnnnnnnnnnnnnnnnnnnnnnnnnnnnnnnnnnnnnnnnnnnnnnnnnnnnnnnnnnnnnnnnnnnnnnnnnnnnnnnnnnnnnnnnnnnnnnnnnnnnnnnnnnnnnnnnnnnnnnnnnnnnnnnnnnnnnnnnnnnnnnnnnnnnnnnnnnnnnnnnnnnnnnnnnnnnnnnnnnnnnnnnnnnnnnnnnnnnnnnnnnnnnnnnnnnnnnnnnnnnnnnnnnnnnnnnnnnnnnnnnnnnnnnnnnnnnnnnnnnnnnnnnnnnnnnnnnnnnnnnnnnnnnnntttgcagattaagtaattacgctagtatgttgatggtggnnnnnnnnnnnnnnnnnnnnnnnnnnnnnnnnnnnnnnnnnnnnnnnnnnnnnnnnnnnnnnnnnnnnnnnnnnnnnnnnnntgggggtgctattgaagctcagcggggtgaatgccctgggtatccaccacattccactggcaaccgcacagtatgagggagaggaaaacaaatgggaagcacactggaaccggggagggaagtttcttcc

SEQ ID NO: 232248 - DNA, 388 bp, Homo Sapiens
  misc_feature (278)..(287): n is a, c, g, or t
ttggaaatttgtattctccctaaggagggtgctatgcattcctgcaagttgctttttgtggatcactgattgactggatgaatgttacacggctgctggtgttttctttccatgcctggtttctttttgctggatatggaaaacttgctggcattgttttatttaatgatggacaatgtctgctgcaagataatatgtacacaatgaaccattattaagaataaccttccattgctcgccttgtctgtaaacagactgaaaataatattcatacaaannnnnnnnnnactgaataatttcttcctgtttgtttagaacgaacaaacttgatccctacctcagccataagaacattatctgccaattctatcaatgtaagtcatttgat

SEQ ID NO: 232249 - DNA, 855 bp, Homo Sapiens
  misc_feature (123)..(135): n is a, c, g, or t
  misc_feature (137)..(398): n is a, c, g, or t
ttggggtaagggtagtgatcagtgctagcgatcatgattctaggtgacttttactgtgtaccgggtgctcacaaggctttatgtgcacagcctggtgaggctgataatactattgttccctcnnnnnnnnnnnnngnnnnnnnnnnnnnnnnnnnnnnnnnnnnnnnnnnnnnnnnnnnnnnnnnnnnnnnnnnnnnnnnnnnnnnnnnnnnnnnnnnnnnnnnnnnnnnnnnnnnnnnnnnnnnnnnnnnnnnnnnnnnnnnnnnnnnnnnnnnnnnnnnnnnnnnnnnnnnnnnnnnnnnnnnnnnnnnnnnnnnnnnnnnnnnnnnnnnnnnnnnnnnnnnnnnnnnnnnnnnnnnnnnnnnnnnnnnnnnnnnnnnnnnnnnnnnnnnnnnnnntgagccaccgtgcccggcctgttccctcttttatagatgaagagaccagcaaataactatttgcgcgataacaatatctcagaccgaggcatctgcaagctcattgaatgtgctcttcactgcgagcaattgcagaagttagctctattcaacaacaaattgactgacggctgtgcacactccatggctaagctccttgcatgcaggcagaacttcttggcattgaggctggggaataactacatcactgccgcgggagcccaagtgctggccgaggggctccgaggcaacacctccttgcagttcctgggattctggggcaacagagtgggtgacgagggggcccaggccctggctgaagccttgggtgatcaccagagcttgaggtggctcagcctggtggggaacaacattgggcagtgtgggtgcccaagccttggtcactgatgctggcaaa

SEQ ID NO: 232250 - DNA, 858 bp, Homo Sapiens
  misc_feature (117)..(547): n is a, c, g, or t
ttggcccaaactttaaggaaaaaaatggagttttgagtctgaaaactgaaaaaattaaatttgcctaaaaataggtcactgatgattaaataattttgtctgaagataaatcagtgnnnnnnnnnnnnnnnnnnnnnnnnnnnnnnnnnnnnnnnnnnnnnnnnnnnnnnnnnnnnnnnnnnnnnnnnnnnnnnnnnnnnnnnnnnnnnnnnnnnnnnnnnnnnnnnnnnnnnnnnnnnnnnnnnnnnnnnnnnnnnnnnnnnnnnnnnnnnnnnnnnnnnnnnnnnnnnnnnnnnnnnnnnnnnnnnnnnnnnnnnnnnnnnnnnnnnnnnnnnnnnnnnnnnnnnnnnnnnnnnnnnnnnnnnnnnnnnnnnnnnnnnnnnnnnnnnnnnnnnnnnnnnnnnnnnnnnnnnnnnnnnnnnnnnnnnnnnnnnnnnnnnnnnnnnnnnnnnnnnnnnnnnnnnnnnnnnnnnnnnnnnnnnnnnnnnnnnnnnnnnnnnnnnnnnnnnnnnnnnnnnnnnnnnnnnnnnnnnnnnnnnnnnnnnnntcactgtgagagagggctatcagttttgatgacagattgaaccattactctcatggccataaatctgtcataagataacttattaaggtatacaaataatctacttatacaaacgtatatatgtgtaaaggcaataatacaaaatctattttcataactataaaagacccaatcaaacaagtacttcccacactcaagtttttttcccctgtatttaaacatagtacagtttaatttgatcttatccaaaaagttgcattccagatttgatatacaagggcacagaaatgtagctgccaacttgacaaatg

SEQ ID NO: 232251 - DNA, 944 bp, Homo Sapiens
  misc_feature (575)..(616): n is a, c, g, or t
ttggcaggacacggcctcgcggacaccttccgcctcggggaatcggcagcataggcggcgcgaacggccgccgccgcctcggctcctctctcgagtccttcccgtcacctcgctgagagccggtcctggtcgcggggacatctctctccttcctccgaggctcgtgggaccaacggacggacgcagccagcgagggccggactgcgggacgcggccagagcagttgaacatcagatacccagagtgacatcaggttaaaaaaaagcctgcaatttggatcttttcctgactcggaagcaaggaaaatggacaattgataatcaaaggctaaatctcttctgggatccactgaatgccactagagggtctgctcgagagaattcctgattgaatgacaacggcgctaagaacagtaagtcatggttgggaagcagtaagggaagaatggagcccagatatcctaaattaaaatataaaaggctaacgttattaggcatgtacatctaaatttcaaagtaaaaggccaacatcccactacgcctcccgaatccagcacattccacctttccacctannnnnnnnnnnnnnnnnnnnnnnnnnnnnnnnnnnnnnnnnnccttccctctgaggcaattaatggacccaaactgacttttttatggaaccataatatagaaagaaatgcctgtgccgaaaatgtcaatgcacacaataatttatcagaaatcaatgctctattctatgtccccaagctcaacactaacattgtaacctcttaaatgtgccttgttgtctgcagcttgaattcctttgtggtttcacatacgttatttggatgaaggctgaactctcacacactggttattatagactgtgcagttgaattatagaatagagacgccctctgtctgatgagtcactatttttcctcttctgactcatag

SEQ ID NO: 232252 - DNA, 250 bp, Homo Sapiens
gtggcggatgcacgactcaaaccacccgtgtgaccctgtgaaaacctcggaaataccaaaaaattctggatggcaggaatgaaaagacttgggctgtgtcgatccacgagagccccccacctacctcagggaaagatgacatgcatggaactaggatgggtacccaccctgcccaaaaactcccaccggttatgtgcctggcctggctccccaaccgtgggatcgaaccgcctgggactggactaaatga

SEQ ID NO: 232253 - DNA, 842 bp, Homo Sapiens
ttggctcatgggctcacctactccaaagaaaatgaagttagcaggatccagccacgaggggtaaggatctgaggcaacactttagccagagaagaagaaagaaaggagagcaacggtccaaagtcagaactgaggtaatagttcagagtaacggcatgggccaccttcggactgcagtgggctacttggaagtaacagggacacccttggatgccctgggtcccaagtctgactggcaatgaagaaaatatggagggcaactcgggagtccagaggttacctctgcatctgagatctaggcacatggtgctatctatcctgataatacgacaggcctgcaaaaggaagatgaatatctggagccagggaaacaatatacctacaagtggtatgtagaagaacatcagggacctggccccaatgacagtaattgtgtgacaagaatttaccattcccatatagacactgcaagagatgtagcttcgggacttattggaccaatactgacttgtaaaagagggacactgaatggagacactgaaaaagatattgacaggtcttcttttctgatgttttctacaactgatgaaagcagaagctggtatagtgatgaaaatattcgtgcatttactgaatctggcaagattaatactagtgatccccgttttgaggagagcatgagcatgcaatcaataaatggatacatctatggaaatctgcccaatctcaccatgtgtgctgaagatagggtcaagtggtattttgttggcatgggtggcgtggctgacatacaccccgtctacctccgcggacaaactctgatctctcggaatcacagaaag

SEQ ID NO: 232254 - DNA, 534 bp, Homo Sapiens
ttgggttcctggtggcgtatggtgtcgaaagtccttacactcaaagtgctggacgtgtaatattttagattacaggattaatatattgaacaccttctggcttactatttgaagtctatatttccggcattttaagttcaatcggtctttaaatggaattatctaataggatgactgatatgctgaattgaacattttcatttttatagctgcctaattatggtagcctcgggaaatacaaatgcagaccactaattgcctcccattcttaatatgtgccccaggagattagcattttttgctcttcttgtctttgtattcttttttcttgattttaattactttctgaataacggaagggatcacaacatatcttttgtgcctagattgaacaatctccaatccacccttattgttttaaaataataacgtaatccacctattagcatatctccttgtgacataacttgtgtattagatatcagtgttaatgatatgtcttggccactatggaccagggagcttatttttctt

SEQ ID NO: 232255 - DNA, 174 bp, Homo Sapiens
ttggagccttccttcaagtgcgtgagtgaacaaacccgccctttgtcatcccccctgcagatgaaaacagccgatgtccaacttctttcctttgattttgaaaatgaccactttggaaatgtggatgagtgctcttctgactacctaattgtgcttcctgtgactggggccatc

SEQ ID NO: 232256 - DNA, 258 bp, Homo Sapiens
tctgtttcataatttccctgtccccacactcctattcgccttattccctcttaccacacaaatggtatgtttctccatttctctcactgatgaaactaaaacctttttcattctgagacgttgtggttgggtgaagggatgaaaagcagtgtttattctggtgagatccctttatgcactccctatttcaaccccactaattctatatttaaagcctttcgacatattatatttgaaatgttgaaaaactaactccaa

SEQ ID NO: 232257 - DNA, 862 bp, Homo Sapiens
  misc_feature (244)..(257): n is a, c, g, or t
  misc_feature (346)..(474): n is a, c, g, or t
ttggggattagacttcagtaaaacattactccagaaattctggcagtatcttcatccaccttgcttttctttactagtttactgattactggtgcaactctaatctctgattcagtccatctgcttttgtgcttcctaccactcccaactccctggatgtcctactggacattgaagagaatcgtaactgcacaaacttggaaattctgtatacccttgctctccagcttctactgggctttcnnnnnnnnnnnnnnggaggggagactgggtcttgctttgttgcccagcagttgcgatcatcgctcactgcagcctggaactcctgggttcaaatggcccttcnnnnnnnnnnnnnnnnnnnnnnnnnnnnnnnnnnnnnnnnnnnnnnnnnnnnnnnnnnnnnnnnnnnnnnnnnnnnnnnnnnnnnnnnnnnnnnnnnnnnnnnnnnnnnnnnnnnnnnnnnnnnnnnnngaatttataattccaccaccaaaacataatctctgttaatatttatagtttcctttgttttttgtttattacattatatttttatgtagctgggatcaaaatgtaaatatgcttttatatcctgcttttttcacttatgttattgtgagcattttcttcatattcttaaaattgttcataagcattaacttacactttgctttctactgcttcagatgtatgcaccatgcgccataaaaccatttcactgttgctggacaatgaaattgtttccaattttttactgttagaaataaggctagatgaacatctttatccttcaagttctgcccaaaacattctaatttcttattacagatttttctaggagtgggttaaagaataatga

SEQ ID NO: 232258 - DNA, 246 bp, Homo Sapiens
ctgagccacagtgtccaacctgtctaatttttggtgtctaagctttgtactgcttcaaatccagttggaatgtgggcttcctggggtctcaacactaattgagggctaagtggaggtcgaagacatgttgaaagccagaatgctatgcttcccctcacccccgacagaaaattgctcctgaagtgatcgccttcctgcataagctactaataagaatgttgataggtgtggtggggggctctgact

SEQ ID NO: 232259 - DNA, 840 bp, Homo Sapiens
  misc_feature (45)..(647): n is a, c, g, or t
ttggtgcttatgttaatactgagatatataagtatataagaaatnnnnnnnnnnnnnnnnnnnnnnnnnnnnnnnnnnnnnnnnnnnnnnnnnnnnnnnnnnnnnnnnnnnnnnnnnnnnnnnnnnnnnnnnnnnnnnnnnnnnnnnnnnnnnnnnnnnnnnnnnnnnnnnnnnnnnnnnnnnnnnnnnnnnnnnnnnnnnnnnnnnnnnnnnnnnnnnnnnnnnnnnnnnnnnnnnnnnnnnnnnnnnnnnnnnnnnnnnnnnnnnnnnnnnnnnnnnnnnnnnnnnnnnnnnnnnnnnnnnnnnnnnnnnnnnnnnnnnnnnnnnnnnnnnnnnnnnnnnnnnnnnnnnnnnnnnnnnnnnnnnnnnnnnnnnnnnnnnnnnnnnnnnnnnnnnnnnnnnnnnnnnnnnnnnnnnnnnnnnnnnnnnnnnnnnnnnnnnnnnnnnnnnnnnnnnnnnnnnnnnnnnnnnnnnnnnnnnnnnnnnnnnnnnnnnnnnnnnnnnnnnnnnnnnnnnnnnnnnnnnnnnnnnnnnnnnnnnnnnnnnnnnnnnnnnnnnnnnnnnnnnnnnnnnnnnnnnnnnnnnnnnnnnnnnnnnnnnnnnnnnnnnnnnnnnnnnnnnnnnnnnnnnnnnnnnnnnnnnnnnnncaaaagagataaatattcttatttgaaagcaaaatgaattatttttgtaagataaatatgactcctttaaaaatattttaactgtgctgacatctaaatcttgtcttattttctgtctgtagcctcattgagaacagaaattaaatgaatttagttgattcatgatctgtttttttaatactgactgaaaaga

SEQ ID NO: 232260 - DNA, 795 bp, Homo Sapiens
  misc_feature (62)..(211): n is a, c, g, or t
  misc_feature (365)..(430): n is a, c, g, or t
ttggtgagcattttatgaaacacttggcctggacaaaaaatacacggagattgttctagatnnnnnnnnnnnnnnnnnnnnnnnnnnnnnnnnnnnnnnnnnnnnnnnnnnnnnnnnnnnnnnnnnnnnnnnnnnnnnnnnnnnnnnnnnnnnnnnnnnnnnnnnnnnnnnnnnnnnnnnnnnnnnnnnnnnnnnnnnnnnnnnnnnnnnncttgggtataacagtgttttgtggctttgtagaaaaatgttttcattcttaatagattcatgctaaagcattaatgggctaagtgataaaaggtccacaactttcaagtgtttcagaaaaatagagaaaacagttgtgtcaaaatgttaacaannnnnnnnnnnnnnnnnnnnnnnnnnnnnnnnnnnnnnnnnnnnnnnnnnnnnnnnnnnnnnnnnntttgaaggcaatagagagagactctgtttcaaagaaataaaatgtaaagacaaatttctccttcctcttcaaatatgagaatcatcatagccctccctaactcctatattttttagattaatcaaactcagatttctcaaacattctagaacacaacttgatcttgcctcccaagattaacccttccagaactttttaactttgttaaagtgcctgtctttccatctttttaaaatagagcttatcaaagaatttctgtgaaagtttccctttgcttcctcaccggaatgatctgtgatcacattagattccatctttgaaaactactatctaagccatctttccattttaagatttctgaatac

SEQ ID NO: 232261 - DNA, 920 bp, Homo Sapiens
  misc_feature (109)..(281): n is a, c, g, or t
  misc_feature (350)..(427): n is a, c, g, or t
  misc_feature (443)..(525): n is a, c, g, or t
  misc_feature (601)..(704): n is a, c, g, or t
gagcaatgcttttttataatggccaactttgtacaaaaaagttgggaaaagatctccaaaatgtctctgaaggccatttttgtgaaaaacaaaaacatctccaaatgtnnnnnnnnnnnnnnnnnnnnnnnnnnnnnnnnnnnnnnnnnnnnnnnnnnnnnnnnnnnnnnnnnnnnnnnnnnnnnnnnnnnnnnnnnnnnnnnnnnnnnnnnnnnnnnnnnnnnnnnnnnnnnnnnnnnnnnnnnnnnnnnnnnnnnnnnnnnnnnnnnnnnnnnnnnnnncaggggacgggggacagggattgggtaaagtttccataaacttggaaaactgtcattctttacaaaatnnnnnnnnnnnnnnnnnnnnnnnnnnnnnnnnnnnnnnnnnnnnnnnnnnnnnnnnnnnnnnnnnnnnnnnnnnnnnngacatacagaagaatnnnnnnnnnnnnnnnnnnnnnnnnnnnnnnnnnnnnnnnnnnnnnnnnnnnnnnnnnnnnnnnnnnnnnnnnnnnnnnnnnnnttaatagaatatagaagtgaatatgaacaaacgataaacaccacagatcattttcagaaatataatggtgaaaatnnnnnnnnnnnnnnnnnnnnnnnnnnnnnnnnnnnnnnnnnnnnnnnnnnnnnnnnnnnnnnnnnnnnnnnnnnnnnnnnnnnnnnnnnnnnnnnnnnnnnnnnttactgggagctctcataagaaggtttctatttcctgggtgctggatacagggacactctgtgataaatcactcatttttgcatatatgctatatttcaattttttaaaaagtggtccttaaaagattatgatttagggtttaccaccttgcccctctccatcaattcaaatatttcttccagttcagatcccacaccttacatgaagcctttccc

SEQ ID NO: 232262 - DNA, 326 bp, Homo Sapiens
ttggtatttatctacttgtaagataaaaaccaacatgttctcatttttacactaaaccacacaggattgatgaatttgcttgaacaacgaaacttttaatacgcgtaactgacaaatcaaaattcaaagcaagtggtacatatatgtaggctttaattaacttattggtttgtcaatttaaacctgtttattttaaatattttaactatgtattgaatattaaacattactcttgtaagatttgaaaaactacattttaacatggaactctatagataggcactttttaaatcctgttgaaaagcaatgtttatttattttatttg

SEQ ID NO: 232263 - DNA, 1083 bp, Homo Sapiens
  misc_feature (83)..(107): n is a, c, g, or t
  misc_feature (337)..(369): n is a, c, g, or t
aaactaaaatttattggtatacaaaactccatttcaaaaataaaggggcacatctttcccccttccattgccccaagtaccgnnnnnnnnnnnnnnnnnnnnnnnnncatttggttttgaaaacattgcaaatacccaattaaattatttttgttaataaaaaataaaagggttcaaaggaacacaatcgggggaaagaaacaatttagggggaaggaactatggacatcaaaaaagggtcacaattttcaccatcgacccccataaataagtttttatttgctaattctatggttcacaaccccatggaggtcttaattccctccaaactgaagcnnnnnnnnnnnnnnnnnnnnnnnnnnnnnnnnnggcccctcccccacggatacatccccccctctgtaaaggaaactgacccatgccaacacttctacatgggaaaggggagcccccgggtgtgacgtctgactcctggcccttttcttctttcctctgagcttagtgctggtggaggctctggaagaggcactggggaggccaagggcctctcctactatgaaaatgacctgtaagagtggaaaatgtgtgaagcctcttaccaatactgctcgagggacctgccaggaatcaaacgccagctggagtctgtgctgaacctcaacatgaatgtcatgattggctggaccctgcgccaggctgacaacgcaaggatgaaagcaagcccaaaaagtctgtccgcatccgcggccagcgacaggaatcggcaatagaccacaacacctcgggatcaggcatatgacttgctaaaattaatttccatatgcaagattcgtagtttacaaaataaatctttaccctggtaacacccctttccagtaatcccgcaggatgttaaacttttctgagaccaccaaacattcttaacaagaaattaaagaaagaattctacaacccactcgctcaaaagccatcaggtcaaggcctgaagtttaaaggaaattacccactgttaaaaaaatttaccagcccaaacaaaagggaccccccccttcaggagggttcatcacacgttggggcgggggg

SEQ ID NO: 232264 - DNA, 837 bp, Homo Sapiens
  misc_feature (128)..(550): n is a, c, g, or t
ttggcaaaaaagctttattttgatttccttattctttattttattgttcaggtaagtagtctgtagtaagagcagtttagagattctgcagtgtgtttccaacaaccaccaattctctgattctaccnnnnnnnnnnnnnnnnnnnnnnnnnnnnnnnnnnnnnnnnnnnnnnnnnnnnnnnnnnnnnnnnnnnnnnnnnnnnnnnnnnnnnnnnnnnnnnnnnnnnnnnnnnnnnnnnnnnnnnnnnnnnnnnnnnnnnnnnnnnnnnnnnnnnnnnnnnnnnnnnnnnnnnnnnnnnnnnnnnnnnnnnnnnnnnnnnnnnnnnnnnnnnnnnnnnnnnnnnnnnnnnnnnnnnnnnnnnnnnnnnnnnnnnnnnnnnnnnnnnnnnnnnnnnnnnnnnnnnnnnnnnnnnnnnnnnnnnnnnnnnnnnnnnnnnnnnnnnnnnnnnnnnnnnnnnnnnnnnnnnnnnnnnnnnnnnnnnnnnnnnnnnnnnnnnnnnnnnnnnnnnnnnnnnnnnnnnnnnnnnnnnnnnnnnnnnnnnnnnnnnnncagtttttcagatttttgaattgaagttccatcacttaggcataattgattaaatcattgacttctggtgattgagtgtaatgtctgtctcccttcccctcctaggaggtcaggaagtgggactgaaatttccaatcctcttatcacttggttggttcctctggagaccagcccccattctgaagctagataggagccttgtcatcagtcacctcattagcataaactcattatagtcaaaagaatcttgttatgaataacaaaagacaaccctgtcactcacgaaa

SEQ ID NO: 232265 - DNA, 156 bp, Homo Sapiens
  misc_feature (81)..(95): n is a, c, g, or t
tccccagggaaaccaaaaaccttttccccccaaaagggattgggggcttagggggaaaggggaaaactagaaaactttttnnnnnnnnnnnnnnnttttgggaacccgggacagggcaaaaaatttttaaattggcccccaaaaactggttttcgg

SEQ ID NO: 232266 - DNA, 909 bp, Homo Sapiens
  misc_feature (211)..(277): n is a, c, g, or t
  misc_feature (445)..(493): n is a, c, g, or t
  misc_feature (687)..(711): n is a, c, g, or t
ttggctcaaaataattttaatatgtacattgcacaaaaatggacttcttatcatgttacaaatttattttaaaacatataggaggcaacaacaatatttcattgatgtgtactattttataattgttggctctaattttatttagtagagtcttacatctcctctctacatatttacatccggttgtattgtttttgtagtacctgttcannnnnnnnnnnnnnnnnnnnnnnnnnnnnnnnnnnnnnnnnnnnnnnnnnnnnnnnnnnnnnnnnnntaattgtgcttactgttttcaagcaaagacaaaaattcaagagaacttgtgagtataaaagacaacagtgcaaattctagaactgcacattattataaccaaaataaacaactcactacataggtttataacaaatcagatacaactaaagaaaagattaacacactnnnnnnnnnnnnnnnnnnnnnnnnnnnnnnnnnnnnnnnnnnnnnnnnngactggaaaatatagaagaaaggttaagagacctaaaggatatggtacgagatttctaaatacttgtaaatggaatctcagaagtagatgagcactaaagtggagcaccgcagtatttgaatagaaaatggctgggaactttgtaacactgataaataacttctatttacaaactcaagaaatcctgtgaactnnnnnnnnnnnnnnnnnnnnnnnnnctcatacctagacatatcactgtaatgctaataaaagcagaaacaaagataaaatcttgaaagcaaccagagtggggggaaaaagacaaattttcctaggaggtataattataaccagtagtagtagctgacttcttagaagaaacagtagccagcagaaggcaatgggaacaacatctttaatatctagaaagtaaa

SEQ ID NO: 232267 - DNA, 855 bp, Homo Sapiens
  misc_feature (87)..(587): n is a, c, g, or t
ctgtaaaagccaactttgtacaaaaaagttggcaagaatatacttgagaaagtgtttccaaaaaataaacataaaagtatgtgttannnnnnnnnnnnnnnnnnnnnnnnnnnnnnnnnnnnnnnnnnnnnnnnnnnnnnnnnnnnnnnnnnnnnnnnnnnnnnnnnnnnnnnnnnnnnnnnnnnnnnnnnnnnnnnnnnnnnnnnnnnnnnnnnnnnnnnnnnnnnnnnnnnnnnnnnnnnnnnnnnnnnnnnnnnnnnnnnnnnnnnnnnnnnnnnnnnnnnnnnnnnnnnnnnnnnnnnnnnnnnnnnnnnnnnnnnnnnnnnnnnnnnnnnnnnnnnnnnnnnnnnnnnnnnnnnnnnnnnnnnnnnnnnnnnnnnnnnnnnnnnnnnnnnnnnnnnnnnnnnnnnnnnnnnnnnnnnnnnnnnnnnnnnnnnnnnnnnnnnnnnnnnnnnnnnnnnnnnnnnnnnnnnnnnnnnnnnnnnnnnnnnnnnnnnnnnnnnnnnnnnnnnnnnnnnnnnnnnnnnnnnnnnnnnnnnnnnnnnnnnnnnnnnnnnnnnnnnnnnnnnnnnnnnnnnnnnnnnnnngttaacagatgtgagacccctttgccttgcttggaataatgtgcagatatacattgtgtgaatgacatctgatggcgccatcttgccctgtagatcattttagggacacctccagtatttcatgaaaattaaaatttcttctaatgatgaacaaaatgatactcagaagcaactttctgaagaacagaacactgggaatattacaagatgagattctgttcatgaagaaaagcagatagaagtgggctgaaaagaaaattgaattctg

SEQ ID NO: 232268 - DNA, 745 bp, Homo Sapiens
  misc_feature (66)..(213): n is a, c, g, or t
  misc_feature (229)..(493): n is a, c, g, or t
gagtgagtgacccagcctggccaacaattgtatatatttttttattttaaatggagtttcactctnnnnnnnnnnnnnnnnnnnnnnnnnnnnnnnnnnnnnnnnnnnnnnnnnnnnnnnnnnnnnnnnnnnnnnnnnnnnnnnnnnnnnnnnnnnnnnnnnnnnnnnnnnnnnnnnnnnnnnnnnnnnnnnnnnnnnnnnnnnnnnnnnnnntaagaagtatgtatcnnnnnnnnnnnnnnnnnnnnnnnnnnnnnnnnnnnnnnnnnnnnnnnnnnnnnnnnnnnnnnnnnnnnnnnnnnnnnnnnnnnnnnnnnnnnnnnnnnnnnnnnnnnnnnnnnnnnnnnnnnnnnnnnnnnnnnnnnnnnnnnnnnnnnnnnnnnnnnnnnnnnnnnnnnnnnnnnnnnnnnnnnnnnnnnnnnnnnnnnnnnnnnnnnnnnnnnnnnnnnnnnnnnnnnnnnnnnnnnnnnnnnnnnnnnnnnnnnnnnnnnnnaccctcttgctaaatctggcgaccttcagctaagcaagagcgggggccgcgtggacctggggaaggccagacggcgagtgtgcaccagccccagggctctgtcccagccccttctggaaagttccaggcctgttttgctccagagctgggatggcgtcaggcagtgagcagccacatgaaggcaggaggcatcgttagcgctgccctatcacgtcacccttgaaacccaggccctgcagcaggggaccccaa

SEQ ID NO: 232269 - DNA, 630 bp, Homo Sapiens
  misc_feature (78)..(169): n is a, c, g, or t
  misc_feature (173)..(190): n is a, c, g, or t
  misc_feature (252)..(260): n is a, c, g, or t
  misc_feature (361)..(553): n is a, c, g, or t
ttggctcaaccacaaaaataatcagaaggaaagagaggaacaaaggatatacaaaacaaccataaaacaatcagtaannnnnnnnnnnnnnnnnnnnnnnnnnnnnnnnnnnnnnnnnnnnnnnnnnnnnnnnnnnnnnnnnnnnnnnnnnnnnnnnnnnnnnnnnnnnctcnnnnnnnnnnnnnnnnnngcaagggccaactacatgctgctggcaagaaactcacctatagagctgatacacaaaggagnnnnnnnnntgtatcactatagaaaaccaccgaactgaaaactttttcagtaaataataaaagataaagaaagaaataaagaacatatcaaacaatcagaaaacaatcannnnnnnnnnnnnnnnnnnnnnnnnnnnnnnnnnnnnnnnnnnnnnnnnnnnnnnnnnnnnnnnnnnnnnnnnnnnnnnnnnnnnnnnnnnnnnnnnnnnnnnnnnnnnnnnnnnnnnnnnnnnnnnnnnnnnnnnnnnnnnnnnnnnnnnnnnnnnnnnnnnnnnnnnnnnnnnnnnnnnnnnnnnnnnnnntccatacaaacagaaaccaaagtgagcagcgtagctatctttatgtcagacaaaagggatttcaagttgaaaactgt

SEQ ID NO: 232270 - DNA, 538 bp, Homo Sapiens
  misc_feature (160)..(192): n is a, c, g, or t
  misc_feature (197)..(452): n is a, c, g, or t
ttggaactgatcatgtttcccttctctctttgactgctagcaagctcagagccaaatttgggcttatttctgttaacaggatcttacagaatgcttttatgttacagcttactcctggttatacccaatttcactactttcatttcccctttgtcctgannnnnnnnnnnnnnnnnnnnnnnnnnnnnnnnngagannnnnnnnnnnnnnnnnnnnnnnnnnnnnnnnnnnnnnnnnnnnnnnnnnnnnnnnnnnnnnnnnnnnnnnnnnnnnnnnnnnnnnnnnnnnnnnnnnnnnnnnnnnnnnnnnnnnnnnnnnnnnnnnnnnnnnnnnnnnnnnnnnnnnnnnnnnnnnnnnnnnnnnnnnnnnnnnnnnnnnnnnnnnnnnnnnnnnnnnnnnnnnnnnnnnnnnnnnnnnnnnnnnnnnnnnnnnnnnnnnnnnnnnnnnnnnnnatgagccacggtgcccagcccatttcttaaaactttcttcggtgtacgcctaaccttcctattcatttcaataaaaataaacctac

SEQ ID NO: 232271 - DNA, 280 bp, Homo Sapiens
ttggaacctcttcacgcttatgaagcctgactcagattctcactccgaaatgccagcaaccaaatgctccagtctgtgtgtacggaacgaccctcgcgcgaacaacttttggttggccatttggacatgtggaaatctgacttgggtcctgatgggtctgtttctctgtagatttagtgtgatggttgtgacaaagatcctgactgttcgaatgacatctctaattaagagcaattatgggtagccatgactttctttgggtctgggttcacatatccct

SEQ ID NO: 232272 - DNA, 280 bp, Homo Sapiens
ttggctgatagcgttccttcaccgctgtgccttcctctgcacaacctggcgattggataatcccgtagcgtaacttaggactcggctcgaccattggaggccgcgggcccgcccccgccggctaggtgaaggtgagtgtctcctccagtcgcaacggcccaacctgacctgccacctccgggcgtggggtgaaatctcttgattcctactctctgcacctggcacctccgtctgtctttgcgaatgttccccacgcccccccagtcctgtgcttcaagct

SEQ ID NO: 232273 - DNA, 687 bp, Homo Sapiens
  misc_feature (291)..(352): n is a, c, g, or t
ttggcatgtttgttatttgagccaaagcaaggaggccggaaaagagggagagagactggaatagttggtcggtgaagcaaccagaacacaaaatttaccaattaagttcgctgtcttatatgagtgtgtttcctgatgcccccaaacaattacaatagtgacctcaaatagtggctccttttcacaagttggcacagaaggtgaagaaggaagctccttctcctcctaaactcaaagccaaagcaaagtctttgaggtcaagaaggtagtgctgaaaggcatccgccactnnnnnnnnnnnnnnnnnnnnnnnnnnnnnnnnnnnnnnnnnnnnnnnnnnnnnnnnnnnnnngcactctctacatatcacacatacactctcagggaagcaatgaaaaattaccaaacagggaataacataagccaaaatttgcaagactcagcagaaacaagaaacacagatctacatcccccatgccttataacattggggtgcagaatactgcatatagaaaaatacatgtgagctatatagagaaaaacgttgagcaaagagtcagcaaccatcaaaaacaaccagaaagatctgaaaaataatagaataacaagaaatgaaaaatataatcattgcaattaaaatttcagtagataggttaaaagggtattacacataaatgaagagagagt

SEQ ID NO: 232274 - DNA, 222 bp, Homo Sapiens
  misc_feature (44)..(68): n is a, c, g, or t
ttggatttgtttaatgactccgcagatttgaaaatatattgtgnnnnnnnnnnnnnnnnnnnnnnnnnatacagacttagatctcactctagctcccaggctggagtgcatcaatatgatcatttctcagtgtaaccgcaaactcctgggctcaattaatcctccctcttcttcctcctgattaactgggactccgcctgcgtgccatgactcccgggtact

SEQ ID NO: 232275 - DNA, 914 bp, Homo Sapiens
  misc_feature (50)..(617): n is a, c, g, or t
  misc_feature (652)..(781): n is a, c, g, or t
ttggagcagatggacatcacaaggcatccaggtgtccagatgcaggtacnnnnnnnnnnnnnnnnnnnnnnnnnnnnnnnnnnnnnnnnnnnnnnnnnnnnnnnnnnnnnnnnnnnnnnnnnnnnnnnnnnnnnnnnnnnnnnnnnnnnnnnnnnnnnnnnnnnnnnnnnnnnnnnnnnnnnnnnnnnnnnnnnnnnnnnnnnnnnnnnnnnnnnnnnnnnnnnnnnnnnnnnnnnnnnnnnnnnnnnnnnnnnnnnnnnnnnnnnnnnnnnnnnnnnnnnnnnnnnnnnnnnnnnnnnnnnnnnnnnnnnnnnnnnnnnnnnnnnnnnnnnnnnnnnnnnnnnnnnnnnnnnnnnnnnnnnnnnnnnnnnnnnnnnnnnnnnnnnnnnnnnnnnnnnnnnnnnnnnnnnnnnnnnnnnnnnnnnnnnnnnnnnnnnnnnnnnnnnnnnnnnnnnnnnnnnnnnnnnnnnnnnnnnnnnnnnnnnnnnnnnnnnnnnnnnnnnnnnnnnnnnnnnnnnnnnnnnnnnnnnnnnnnnnnnnnnnnnnnnnnnnnnnnnnnnnnnnnnnnnnnnnnnnnnnnnnnnnnnnnnnnnnnnnnnnnnnnnnnnnnnnnnnnnaggttttttaagtattggagtacagtaaataaatnnnnnnnnnnnnnnnnnnnnnnnnnnnnnnnnnnnnnnnnnnnnnnnnnnnnnnnnnnnnnnnnnnnnnnnnnnnnnnnnnnnnnnnnnnnnnnnnnnnnnnnnnnnnnnnnnnnnnnnnnnnnnnnnnngtgcatgacaggtattctaactgcaaagatgtgtagacatagctgtgacattttcatctaaacccttccatacctccagggctttgtatggatcataaactttgttcccttctatgtattagacacttgtgtt

SEQ ID NO: 232276 - DNA, 271 bp, Homo Sapiens
cagaatgaataagtcatctctccattaatatccctttaggtgataacatcaaaagtcgcatactgataaacaaagtgaccccaatcactcccaagttttgttgcacatggtatttcattgtacccaccatatgatgctcattttaaatgttttctctatgagatggcctacttaaacaattcctggatggccaaatgttcttctacttcgaatatttttctaatggtcatatgaaatggaaactattgcttgatctgtttgaatctccaaa

SEQ ID NO: 232277 - DNA, 260 bp, Homo Sapiens
ttgggtattgactgttgattttagtatgttggtgattactaactgagtttgcttgctaagcctgtcacttatctatcattcttaactatccttaattcagcctaccttccaaaagagaacagaaaggcacctacactgtctgcatgctaatacttacaccctctgctcacaggccccccccttgggccttcattcccagcccgttcttactactttaatccatggctaattgtagcctgaaagatacttttgcgtgaaac

SEQ ID NO: 232278 - DNA, 765 bp, Homo Sapiens
  misc_feature (118)..(140): n is a, c, g, or t
  misc_feature (382)..(405): n is a, c, g, or t
ttgggtattaacaatgcttggctgaatgctagagcctggttcttataccaccctgactaatataattctgtgttaagcctttttgaggggagtctgtgtgcagtcagccattttagcnnnnnnnnnnnnnnnnnnnnnnncctctccttttcttttgcctcttgttcttcaatctcaaaaatgatcttgttctcttggaagactgagagctgtgtgaggttttctcagtcttgtcatagcctaggatggttagagtttcaatgttataaaaatggagacgaacactgttgttcggattccttttctggtctacaagtgtgaagggtttttaagcttaccagtagtgacactttaagctgcagcttggttttccctcctcccnnnnnnnnnnnnnnnnnnnnnnnnaatttaatgctgtaaagggtgacttgccatcgtgagagattggtacatgatgtgtaaattcagttcagcatatgtttcttcattatgaaaccactagcaatcccagctaaccatggagttatgggccagcaggagaaacactcacttcctgcagatttcacaaaactgcatcttactgacagtctccacccacaggtgacccacgtttcttctagccattcaggatgtagtatcactagtgattctgggagcagcagtctttctgatatctaccaggccacagaaagcgaggctggtgatatggacctgagtgggttgccagaaacagcagtggattccgaagacgacgacgatgaagaa

SEQ ID NO: 232279 - DNA, 917 bp, Homo Sapiens
  misc_feature (83)..(796): n is a, c, g, or t
ttgggtaaacaattgaatgagtgaatgaatgaatgaaaagaagaaacagttcttctccccagtaaattccaattgataaatgnnnnnnnnnnnnnnnnnnnnnnnnnnnnnnnnnnnnnnnnnnnnnnnnnnnnnnnnnnnnnnnnnnnnnnnnnnnnnnnnnnnnnnnnnnnnnnnnnnnnnnnnnnnnnnnnnnnnnnnnnnnnnnnnnnnnnnnnnnnnnnnnnnnnnnnnnnnnnnnnnnnnnnnnnnnnnnnnnnnnnnnnnnnnnnnnnnnnnnnnnnnnnnnnnnnnnnnnnnnnnnnnnnnnnnnnnnnnnnnnnnnnnnnnnnnnnnnnnnnnnnnnnnnnnnnnnnnnnnnnnnnnnnnnnnnnnnnnnnnnnnnnnnnnnnnnnnnnnnnnnnnnnnnnnnnnnnnnnnnnnnnnnnnnnnnnnnnnnnnnnnnnnnnnnnnnnnnnnnnnnnnnnnnnnnnnnnnnnnnnnnnnnnnnnnnnnnnnnnnnnnnnnnnnnnnnnnnnnnnnnnnnnnnnnnnnnnnnnnnnnnnnnnnnnnnnnnnnnnnnnnnnnnnnnnnnnnnnnnnnnnnnnnnnnnnnnnnnnnnnnnnnnnnnnnnnnnnnnnnnnnnnnnnnnnnnnnnnnnnnnnnnnnnnnnnnnnnnnnnnnnnnnnnnnnnnnnnnnnnnnnnnnnnnnnnnnnnnnnnnnnnnnnnnnnnnnnnnnnnnnnnnnnnnnnnnnnnnnnnnnnnnnnnnnnnnnnnnnnnnnnnnnnnnnnnnnnnnnnnnnnnnnnnnnnnnnntaacattttgctatgatattagacaccactggatatattaaaaggtgataagcacttttatttttacatgttgttatttataatattctgaaaattgcatcctaattataaaaaattttgg

SEQ ID NO: 232280 - DNA, 555 bp, Homo Sapiens
  misc_feature (85)..(353): n is a, c, g, or t
  misc_feature (361)..(406): n is a, c, g, or t
ttggatcttttagagataatgtagctatagtattgctgaatttgttggccataaagacacagcaaaagaattaaagtaggaacannnnnnnnnnnnnnnnnnnnnnnnnnnnnnnnnnnnnnnnnnnnnnnnnnnnnnnnnnnnnnnnnnnnnnnnnnnnnnnnnnnnnnnnnnnnnnnnnnnnnnnnnnnnnnnnnnnnnnnnnnnnnnnnnnnnnnnnnnnnnnnnnnnnnnnnnnnnnnnnnnnnnnnnnnnnnnnnnnnnnnnnnnnnnnnnnnnnnnnnnnnnnnnnnnnnnnnnnnnnnnnnnnnnnnnnnnnnnnnnnnnnnnnnnnnnnnnnnnnnnnnnnnnnnccacaccnnnnnnnnnnnnnnnnnnnnnnnnnnnnnnnnnnnnnnnnnnnnnntaaaaacaatatgaaaataaatgggaatttatcaatagtcttggtaaatgtaaactgatacctatgtttaaaagagattatcacattggattgtaaaaatctaactttatgttacttgtaagagctatgcctaaaatcaaaccacaagg

SEQ ID NO: 232281 - DNA, 465 bp, Homo Sapiens
  misc_feature (89)..(97): n is a, c, g, or t
acaaaaaagttggccccgactacgttttggttggggttgaggaagacgagaacagtcatactatctgagcgtgtgaatttgagccttcnnnnnnnnnaaatctagatctgcaactggatcccggttcctggcactgggacggtaatgtttatgtacgtgatcttggagacaatggcaccgaaatggaattggatttggcttttggcgactatggaccactcggaagggtgggggttgccacaacccgctttggttttgcttttgttgaatatcaccatcccccagatgatgctgacgcagtcctagatggaaaaggaatatgtgtatgtggcggccgagtggaactggaactggctaatggtgaaaaaagaaatcgaggcccagctccccctcgctcttggcgccctcgccctcaatatgattagaggaggacgactcctcctcctcgacccccatcaccgagaa

SEQ ID NO: 232282 - DNA, 424 bp, Homo Sapiens
  misc_feature (137)..(151): n is a, c, g, or t
  misc_feature (184)..(252): n is a, c, g, or t
  misc_feature (291)..(302): n is a, c, g, or t
aattaaaaagggattttttcaaacttgtttcccttttgggttttattaggtaacagggattttaaaattgattctttccccctaccccctacccatttatttttatcggggaaaaaaggcccccatgggtactgggnnnnnnnnnnnnnnntacagggccaaaaaagggaacccaaaatatgannnnnnnnnnnnnnnnnnnnnnnnnnnnnnnnnnnnnnnnnnnnnnnnnnnnnnnnnnnnnnnnnnnnnttgcccacaaaatttagaaatttttgggaggggttgggnnnnnnnnnnnngggaatcttttcccgggaattgaaaaaccatttaggaaattttaaaaccgggggaaaggcgggattcagggggtttcatatgtcaggaaaacataaatttttgacccagaaatattcaaaaa

SEQ ID NO: 232283 - DNA, 610 bp, Homo Sapiens
  misc_feature (186)..(433): n is a, c, g, or t
ttggtgattattctgggaagcagactagtcccataaaatgaaatggactctgccttgctgctaagtgtctgacttgagacatgctatcgagtttctcaaaatctcttccttgtgtaaaatgtggttgtcgatgattaccttacaggggtttttttaagactaaatgagatcgtgtacattaaatannnnnnnnnnnnnnnnnnnnnnnnnnnnnnnnnnnnnnnnnnnnnnnnnnnnnnnnnnnnnnnnnnnnnnnnnnnnnnnnnnnnnnnnnnnnnnnnnnnnnnnnnnnnnnnnnnnnnnnnnnnnnnnnnnnnnnnnnnnnnnnnnnnnnnnnnnnnnnnnnnnnnnnnnnnnnnnnnnnnnnnnnnnnnnnnnnnnnnnnnnnnnnnnnnnnnnnnnnnnnnnnnnnnnnnnnnnnnnnnnnnnnnnngtgtgagccaccgcacccggccaacatgcattatgtcttatcctctcaataacttaatgagatgtgtagtattatctccattttatagaaaagaaaataatctcagggagataaggtaatttgtccaaaggtgagttcccatctgtactgactctgatcatttactcttttttggac

SEQ ID NO: 232284 - DNA, 292 bp, Homo Sapiens
  misc_feature (50)..(58): n is a, c, g, or t
ttgggaatccagccttatctaccttccaaatcaatcttttttttctttcnnnnnnnnntgcttttgccttcccttcccttcctttccgccatatttcttcctcctttcttccctatcacccgtgtattctttgattgataaatgactgaccctccctgatggaaaaacagcatcatccgtaagctatcttacttgcctcatcctgcgagtttgatctacctgaaagatgagtaaaaatatatgtaatgaatatatacatatatgtattctatcaagaaaaaaatatttattt

SEQ ID NO: 232285 - DNA, 700 bp, Homo Sapiens
  misc_feature (125)..(427): n is a, c, g, or t
  misc_feature (507)..(585): n is a, c, g, or t
  misc_feature (628)..(644): n is a, c, g, or t
gtttaaagaaactaaacctctttgcatccctctaccttattcaagcagaatgtcttacattctagtaaatatgattgctaaagaactcaagttacctacatcatgataagtcattaaattgtttnnnnnnnnnnnnnnnnnnnnnnnnnnnnnnnnnnnnnnnnnnnnnnnnnnnnnnnnnnnnnnnnnnnnnnnnnnnnnnnnnnnnnnnnnnnnnnnnnnnnnnnnnnnnnnnnnnnnnnnnnnnnnnnnnnnnnnnnnnnnnnnnnnnnnnnnnnnnnnnnnnnnnnnnnnnnnnnnnnnnnnnnnnnnnnnnnnnnnnnnnnnnnnnnnnnnnnnnnnnnnnnnnnnnnnnnnnnnnnnnnnnnnnnnnnnnnnnnnnnnnnnnnnnnnnnnnnnnnnnnnnnnnnnnnnnnnnnnnnnnnnngaaaagagagcataaaacatatttcaaaggaaagcataacttagagtgagaatagagagcaggattaagtgtatgagccnnnnnnnnnnnnnnnnnnnnnnnnnnnnnnnnnnnnnnnnnnnnnnnnnnnnnnnnnnnnnnnnnnnnnnnnnnnnnnntttcaggacaccagcctgagcaaatgagaccctgtttttaacnnnnnnnnnnnnnnnnngccttagtcatttatatgacctccttagaattatagaaagttagctgggaggaaaa

SEQ ID NO: 232286 - DNA, 897 bp, Homo Sapiens
  misc_feature (755)..(770): n is a, c, g, or t
ttggcccttctattgactcagtctaatagatggaggcaaactagtaaaaaggtaagtagaatacaacttatacaggaatcttgataatatcgcctcatcctttttcatattttcccccatgtttttgctatgcacataagctaaactgaaataaatagatataagacattcttttagtacaccttcactgctgatgtttttgctgtaatttttctagactagtgaggtttcagaaaaagggactgagttttaatatcaaataagcaattttccttatatatatatttttggtcactttctccagcattgctgtctttttctctccagcctttggcccttcttatcaggatgaaaacgcttctgtttggtgtctgggccctgctggccttgatcctttgcccaggtgaggctattcgggaaagctttttaaaccagtatgtgtcctctgaccttatcaatgacagcaatgtcctattaagttacttaagctagatctctcagtcttttaccaaaccaatattcagttaatcctccagcacctattgatcctgccttgtaaatacttttcaaaactctcaccctcactccattgctatttctttacttcaggtgttcaagctgtcttgcagcagcagatgatgtatctgtctctctgccaccaccttttaaaataagttcttttttctaattatgaaattactatgtgctcaatgacaaaaataatttggaaaacacagaagagtacagtttcttgnnnnnnnnnnnnnnnnaacacacacacagactatctttaattccaccacccaaagataattaccgggtttgtgttttttagtgtatatatatgtagttattttatttaaatataatacctataaatactcttttataatgtgc

SEQ ID NO: 232287 - DNA, 700 bp, Homo Sapiens
aaagggatgaacccctggggccgggccgggggtttcaatttttctaattcctaccactttctatggagaattttactaatatcggtttttcccggctctcccaactgtattttagggtataaaaattttaatggtctggttcctggagagaaccaagttccattcctaaccagtcctggtcctcctgagcaggaaaacctcctaattattggcacttttccgaagaagaatggaaaggtgggccaaaacatcctggacgaacctattctagtggtgcggggggatattggagaggcaatggaaaatgggcacccaatggggagaatctcccttctcgaaccaataaatgggactgggctaacccggcgctcgtagaaatttactcctcaaggagtagtcttcctccttggtacttaaaaaagccatgctgaaaagcttagcagataaaccttaaaagaaagtgctaatcctgggctgctccctggggatatagatgcaaagtagagaacaaggctctctccacacttaaaaaaagaacatcccctctcgtggcacacaatgtgtcaaacggtggttcggacttcctcccatataactggtatttactatgaatgtggccagaacctgtataccacacccatagagtagggcctaccagagaacgggtgaggaaagtgtcgcccataactcactcctccca

SEQ ID NO: 232288 - DNA, 718 bp, Homo Sapiens
  misc_feature (49)..(100): n is a, c, g, or t
  misc_feature (138)..(330): n is a, c, g, or t
  misc_feature (364)..(493): n is a, c, g, or t
  misc_feature (541)..(574): n is a, c, g, or t
aagaaaattgggtttgaatctgactttgccacttcctgaacatgtcacnnnnnnnnnnnnnnnnnnnnnnnnnnnnnnnnnnnnnnnnnnnnnnnnnnnntctcctccccgtctcctttccccacccctgcccagcannnnnnnnnnnnnnnnnnnnnnnnnnnnnnnnnnnnnnnnnnnnnnnnnnnnnnnnnnnnnnnnnnnnnnnnnnnnnnnnnnnnnnnnnnnnnnnnnnnnnnnnnnnnnnnnnnnnnnnnnnnnnnnnnnnnnnnnnnnnnnnnnnnnnnnnnnnnnnnnnnnnnnnnnnnnnnnnnnnnnnnnnnnnnnnnntgccatcttgggaaaccttcctaacatctcgtannnnnnnnnnnnnnnnnnnnnnnnnnnnnnnnnnnnnnnnnnnnnnnnnnnnnnnnnnnnnnnnnnnnnnnnnnnnnnnnnnnnnnnnnnnnnnnnnnnnnnnnnnnnnnnnnnnnnnnnnnnnnnnnnnacgattacagtgataacaactgcaccactgggcaaaaatctgtagaannnnnnnnnnnnnnnnnnnnnnnnnnnnnnnnnngacctcagcatttccataagctccaggagtgcagagaaagtctatgtttgtactcaccattgtgtcattttccccatgcctaacatatatagggcatacaggaagtgcttaaaaagtgtatgttgtattagaatttcatacaca

SEQ ID NO: 232289 - DNA, 382 bp, Homo Sapiens
ttggggacctcctgctcaacaccatgaaacaactgtggttcttcctcctcctggtggatgctcccagatgggtcctgttgcatgtgcaactacaacattggggcgcaggcctgttgatgccttccgaaaacctgtccctcacctgcactgtctatggtgggtccttccttggttgctactgtaactggatccccgagcccccgcggaaggggctggagtggattggggaaatcactcatcgtggaaacaatccctacaacccgtccctcaagagtctgaatcaccatatcggtggacactgtccaagaaccaattctccctgacgctggactctatgaccctgcggacacggctgtgtattactgtgttatactgttttccc

SEQ ID NO: 232290 - DNA, 128 bp, Homo Sapiens
acaaaaaagttggcttctctgaggcatcccagaacctctcgtcccaggaggactgacgtctcctacctgcctgggctcaaagcacccactcattatatcatcaccatccgcggggaccctcaagactt

SEQ ID NO: 232291 - DNA, 639 bp, Homo Sapiens
caatgcttttctctataatgccaactttgtacaaaaaagttggctcagaaccccgatgatttgactgaaaactccaggcaccggctgacccctcgaaatggattgaaagccccaaatggcaaccacaaagaggatgctcaggtgcgccactgcccggcagcccccaacttcaaggactgcttctacgacttccccagcgaggtgcggaaccatgtcaattcccccccacaggacttcttctctatactggtgaatggggtggaattggggcctcctggccatcgaggctgtcggcttgaccaacctcactgggaccccgcgcacacctgcaccccccatccgctttacaaatcgccggctcgtgaacgggcatcctctacccacccctgaacgctgctgggtgtggacatggcctcctgacagtgacctttgatacgctcccggctctttcctgttgaacaaccgccaaaatgacatccacatccacccccaacaggaagcctccaacccagggtctgtggcgcatttcatgtcctgattaccctggacaactctgtcaagccccgggggagccagcttactgagcaccacctgctcacctggcgtgcagtgccacacactgagctcgtgccaccccag

SEQ ID NO: 232292 - DNA, 452 bp, Homo Sapiens
  misc_feature (72)..(360): n is a, c, g, or t
  misc_feature (362)..(410): n is a, c, g, or t
aattttgcaatttagagaactagaaaaaaaagacaaactaaactcaaagctagcagaaggaaagattagagnnnnnnnnnnnnnnnnnnnnnnnnnnnnnnnnnnnnnnnnnnnnnnnnnnnnnnnnnnnnnnnnnnnnnnnnnnnnnnnnnnnnnnnnnnnnnnnnnnnnnnnnnnnnnnnnnnnnnnnnnnnnnnnnnnnnnnnnnnnnnnnnnnnnnnnnnnnnnnnnnnnnnnnnnnnnnnnnnnnnnnnnnnnnnnnnnnnnnnnnnnnnnnnnnnnnnnnnnnnnnnnnnnnnnnnnnnnnnnnnnnnnnnnnnnnnnnnnnnnnnnnnnnnnnnnnnnnnnnnnnnnnnnnnntnnnnnnnnnnnnnnnnnnnnnnnnnnnnnnnnnnnnnnnnnnnnnnnnntaattgcagagaatgcataaaacaaattagctctctctaaaa

SEQ ID NO: 232293 - DNA, 143 bp, Homo Sapiens
gggaacgttccgaggctcttcggagaacaacaggtttacctacaggggagccaacaggctctccgggggagccaggggaaaggaaaatattgcccaggagagaagagaacacaggaaaaaggcgcgggagataatgtgtgaga

SEQ ID NO: 232294 - DNA, 875 bp, Homo Sapiens
  misc_feature (52)..(264): n is a, c, g, or t
  misc_feature (274)..(514): n is a, c, g, or t
  misc_feature (517)..(645): n is a, c, g, or t
tactgaaggaagccctcaagaagatggtgtggaacagagtgagaccctgtcnnnnnnnnnnnnnnnnnnnnnnnnnnnnnnnnnnnnnnnnnnnnnnnnnnnnnnnnnnnnnnnnnnnnnnnnnnnnnnnnnnnnnnnnnnnnnnnnnnnnnnnnnnnnnnnnnnnnnnnnnnnnnnnnnnnnnnnnnnnnnnnnnnnnnnnnnnnnnnnnnnnnnnnnnnnnnnnnnnnnnnnnnnnnnnnnnnnnnnnnnnnnnnnnnnnnntaagtaagtnnnnnnnnnnnnnnnnnnnnnnnnnnnnnnnnnnnnnnnnnnnnnnnnnnnnnnnnnnnnnnnnnnnnnnnnnnnnnnnnnnnnnnnnnnnnnnnnnnnnnnnnnnnnnnnnnnnnnnnnnnnnnnnnnnnnnnnnnnnnnnnnnnnnnnnnnnnnnnnnnnnnnnnnnnnnnnnnnnnnnnnnnnnnnnnnnnnnnnnnnnnnnnnnnnnnnnnnnnnnnnnnnnnnnnnnnnnnnnnnncgnnnnnnnnnnnnnnnnnnnnnnnnnnnnnnnnnnnnnnnnnnnnnnnnnnnnnnnnnnnnnnnnnnnnnnnnnnnnnnnnnnnnnnnnnnnnnnnnnnnnnnnnnnnnnnnnnnnnnnnnnnnnnnnnntttaaaaagggctggggcatttgagctgggtcccaacagtagacaagtagaaaaggcatggagagggcataccagtgggaggagctgtgtgcaaagcctggagatggaaaagcatgctggcaccagcttctgacaagcagtttagtatgaacggtatgcaggaaagagggaagagggcagaggggtgcgcacgagcacccgttagtgtccttaaatgaccagcatgggaa

SEQ ID NO: 232295 - DNA, 938 bp, Homo Sapiens
  misc_feature (254)..(270): n is a, c, g, or t
  misc_feature (404)..(475): n is a, c, g, or t
actttgtacaaaaaagttggcaaggattacatagtggagtgaaagtttgttccactaatctgaatgactgaaaggcttaattctcccttgaggtctgtgcaatctaaaattgaacctgctattggaaatgactttctgattggtggattgtgtgtctgtgggtagagtggaatgagatgatgatgatgtggacatatttaataagagatggaattaaaatgtttcttgcctactccctttcctcctcctcctcnnnnnnnnnnnnnnnnnccaacaaacaccacaagactagccactaagaggccagccatgtagtaccctttttctgaatagaaaaagtgcttgtgcaatagtaggatcatccttagtttaaccttggattataccaggactgaattataaannnnnnnnnnnnnnnnnnnnnnnnnnnnnnnnnnnnnnnnnnnnnnnnnnnnnnnnnnnnnnnnnnnnnnnngtaaacttaggcaacacggccatgagacatagcaaccaccattacagggaagagaaaaactaaaacatggataaaataaggagcattaattctaacaaagaactgttcaatagtataggatataactcttgtattagaaggatttaaaagaaccatgtaaattaagagctttcctatatattcccccaggacatgataaaacaagcttctggataaatgtgcccttcacaattgattgggatggggtagctgagaaaaattaaggtgtttaagcaaggtactacaccaaaactgaatgtgctccttctctgcctgacccaacacatctttgagtagagaaagtcatcaaatcatcttttttttcgtaaggcaagaaaataaaaacgagaaataaaatgaatcttgcctaagtcacaaagggcaagagaaaaaatgcaatgctagtacttgaggaccaaggagg

SEQ ID NO: 232296 - DNA, 744 bp, Homo Sapiens
  misc_feature (182)..(479): n is a, c, g, or t
  misc_feature (509)..(650): n is a, c, g, or t
ttggcatcatgatctgacatttattgatgatttatgactagtttctcttgctcctacttaattgtgaactatttgattcttattcatagtacttaatcactactcactaaatacctgaaattttctactgagtagtcaccaacttgtagtagtcactacaagaattagttgtagaaaaagtnnnnnnnnnnnnnnnnnnnnnnnnnnnnnnnnnnnnnnnnnnnnnnnnnnnnnnnnnnnnnnnnnnnnnnnnnnnnnnnnnnnnnnnnnnnnnnnnnnnnnnnnnnnnnnnnnnnnnnnnnnnnnnnnnnnnnnnnnnnnnnnnnnnnnnnnnnnnnnnnnnnnnnnnnnnnnnnnnnnnnnnnnnnnnnnnnnnnnnnnnnnnnnnnnnnnnnnnnnnnnnnnnnnnnnnnnnnnnnnnnnnnnnnnnnnnnnnnnnnnnnnnnnnnnnnnnnnnnnnnnnnnnnnnnnnnnnnnnntgaaaaagtagattgggccacacgccatgnnnnnnnnnnnnnnnnnnnnnnnnnnnnnnnnnnnnnnnnnnnnnnnnnnnnnnnnnnnnnnnnnnnnnnnnnnnnnnnnnnnnnnnnnnnnnnnnnnnnnnnnnnnnnnnnnnnnnnnnnnnnnnnnnnnnnnnnnnnnnngtaagaaaaagtagattgtaaaatgtgttagtctggggaggccctttagaatgaaggactgtgaagtgagatttagtgttattgctcctttctc

SEQ ID NO: 232297 - DNA, 474 bp, Homo Sapiens
  misc_feature (167)..(226): n is a, c, g, or t
ttggataccttttaactccacactacttgcttcccgattgctctattcctctcatccgaagagttcctctccatgtgtagataatattatatttgatatgagttgattgaaattgatgaatcaaatgttctgcgcgcggtctcttgcaaattaggaagattcttagnnnnnnnnnnnnnnnnnnnnnnnnnnnnnnnnnnnnnnnnnnnnnnnnnnnnnnnnnnnncctctttgatggggatgatgagaagactcttgcctctgctttcccccactctgaggctagataaatggtaacaaacgcgttttccctggggggctcaggtatggataattcattttgatggcttctatttttggccaaatgataattaaaccagtgccggaaactgttggaagatgacgtttgatttggggtgtgcaactcggataaaaagaatcctggtcagttctgaattccggtaataggtgtgg

SEQ ID NO: 232298 - DNA, 894 bp, Homo Sapiens
  misc_feature (194)..(438): n is a, c, g, or t
  misc_feature (550)..(561): n is a, c, g, or t
  misc_feature (634)..(652): n is a, c, g, or t
actttgtacaaaaaagttggcttatatacatctcttaaacaccactaatactacaagaaaatggccatttcactgcaccttcgcccacacaggtattataatttaacaagttattttctgtgtgataaatgaaagacctcctattattactttgtcacccattcttttttttctttgagacacagtctcgctcnnnnnnnnnnnnnnnnnnnnnnnnnnnnnnnnnnnnnnnnnnnnnnnnnnnnnnnnnnnnnnnnnnnnnnnnnnnnnnnnnnnnnnnnnnnnnnnnnnnnnnnnnnnnnnnnnnnnnnnnnnnnnnnnnnnnnnnnnnnnnnnnnnnnnnnnnnnnnnnnnnnnnnnnnnnnnnnnnnnnnnnnnnnnnnnnnnnnnnnnnnnnnnnnnnnnnnnnnnnnnnnnnnnnnnnnnnnnnnnnnnnnnatgagccactgtgcccggcctgtgtcggtctttatgccagtaccacattgtattgattactgtagctttgtgataatatattttgagatagagatgtgtcagtcctgcaagnnnnnnnnnnnncaagattgtttttgctattctgggttccttgaattttcatatgaattttaggaccagcttgtcagtttctccnnnnnnnnnnnnnnnnnnngccagctggaattaagaatctatagatcaatgtcagaagtgttgtcatcttaacaatatcaagtcttccaatccatgaacatgggatgtctttccatttgtttagggcttctttatttctttcaacaatgtcatgatcttcttggggaacctgaagcccagtagtgctccagtcctgtgggctgaccagcttgaccagctaagcctcttatcctggaggaagtcccaggactgggcttcttc

SEQ ID NO: 232299 - DNA, 679 bp, Homo Sapiens
  misc_feature (74)..(464): n is a, c, g, or t
  misc_feature (473)..(553): n is a, c, g, or t
gcaggaaaactgataatattcattcccctcttttcctaattgggcaaaacagttagaaattgcttttaactatnnnnnnnnnnnnnnnnnnnnnnnnnnnnnnnnnnnnnnnnnnnnnnnnnnnnnnnnnnnnnnnnnnnnnnnnnnnnnnnnnnnnnnnnnnnnnnnnnnnnnnnnnnnnnnnnnnnnnnnnnnnnnnnnnnnnnnnnnnnnnnnnnnnnnnnnnnnnnnnnnnnnnnnnnnnnnnnnnnnnnnnnnnnnnnnnnnnnnnnnnnnnnnnnnnnnnnnnnnnnnnnnnnnnnnnnnnnnnnnnnnnnnnnnnnnnnnnnnnnnnnnnnnnnnnnnnnnnnnnnnnnnnnnnnnnnnnnnnnnnnnnnnnnnnnnnnnnnnnnnnnnnnnnnnnnnnnnnnnnnnnnnnnnnnnnnnnnnnnnnnnnnnnnnnnnnnnnnnnnnnnnnnnnnnnntttaaaacnnnnnnnnnnnnnnnnnnnnnnnnnnnnnnnnnnnnnnnnnnnnnnnnnnnnnnnnnnnnnnnnnnnnnnnnnnnnnnnnngacacaagccggacgcaatggtgcacagctgtagccctaactacttgggaagctgaagtggggggattgcttgagtcctgaaatttgaatctagattggggcaaccaagagcgaaactctgtcctc

SEQ ID NO: 232300 - DNA, 210 bp, Homo Sapiens
tccaggaggattctgcatgaaccttctcaattcctcatggccggctttacaaatcccatccaaacttcctgaagactgtgaatcatcccctgaccccccacactgcggggcaaacaactggcttgccttccaccctctgttctccctccttggcattaattccctcccgggatgctgcttgtaccccccctcccctctctctttttcttg

SEQ ID NO: 232301 - DNA, 660 bp, Homo Sapiens
  misc_feature (301)..(309): n is a, c, g, or t
ttggcctaacaagtatgagttcctgtattgagtattgctttggattcttggcccccccctcatcggccagattaccctggcttacaaccgagttgcgtacaataatgtgaagggtcagtggctcgacgtgagttagcctctactgccctaggagctgactggaattgtctgagccctcggggcctcgcgtcgctccctggtcttatcctgcatgatttgaagagacttgtgtagggtggtaaaatcagacctttcattctctcactattgaaaccaagccctgattgatattgaatttccnnnnnnnnngttgaaattttctagattgggatctctaatattttatgttaagcccaacttttttataagttttctctttctgactgtacaaagcattaaatttatatttagtttagttggggaaaaatatagtttttatcagttcacttagacgtttatgtagtaactactcctggcttcaatgttagacctgacatatgtggagatgatttctctttggagccctgatttcatgatagatggaactgtggagaaagatcctgggtttcattggtggtgctcttttccccttgcttaaaattggcactttactgcatatggaatataatggtcactaatgactacagttggaaagagaat

SEQ ID NO: 232302 - DNA, 833 bp, Homo Sapiens
  misc_feature (130)..(155): n is a, c, g, or t
  misc_feature (384)..(566): n is a, c, g, or t
  misc_feature (574)..(618): n is a, c, g, or t
  misc_feature (669)..(706): n is a, c, g, or t
ttgggtcctgagaagttgtgcttgtcacagtaattgccagatggtctttgtatgtgacctgaattggtccctagaattagaagtgttgagagagaggagacatagctcctcaggggctaagcagatgtgnnnnnnnnnnnnnnnnnnnnnnnnnnaaaacttgctttttctcaagttttaaaaagtccagtttatgttaggaatgttgcatacactttctatagcatccatatatctctttgttacgtttattatacttgtaattacgtgttcaatgtctgacttctactttagatatatatataccacaaggtctttttgctatatcatcgtaccctaacatactgtttgatacctggtatatactcagaaatcaatttttannnnnnnnnnnnnnnnnnnnnnnnnnnnnnnnnnnnnnnnnnnnnnnnnnnnnnnnnnnnnnnnnnnnnnnnnnnnnnnnnnnnnnnnnnnnnnnnnnnnnnnnnnnnnnnnnnnnnnnnnnnnnnnnnnnnnnnnnnnnnnnnnnnnnnnnnnnnnnnnnnnnnnnnnnnnnnnnnnnnnnnaaattacnnnnnnnnnnnnnnnnnnnnnnnnnnnnnnnnnnnnnnnnnnnnngttgcagtgagctgagatcatgtcagggtgacagagcgagatcctgtctcnnnnnnnnnnnnnnnnnnnnnnnnnnnnnnnnnnnnnngaagttggaggtgagtaaggagaggaacgtgggggacagagtcctcaggactctggcttttactctgagtgagtcgaaaatcccattaaaggtttgaaagagaggaatgacctgatctgacatttta

SEQ ID NO: 232303 - DNA, 859 bp, Homo Sapiens
  misc_feature (157)..(416): n is a, c, g, or t
  misc_feature (450)..(482): n is a, c, g, or t
ttggcttttcatgtgctcattggccatttgtctgtcttccttaaatatctattcagatcctttgcccatttttaaattgggttgtctttttattgtgctgtaagagttctttatatattctggatacaagggctttatttatttatttagagacagnnnnnnnnnnnnnnnnnnnnnnnnnnnnnnnnnnnnnnnnnnnnnnnnnnnnnnnnnnnnnnnnnnnnnnnnnnnnnnnnnnnnnnnnnnnnnnnnnnnnnnnnnnnnnnnnnnnnnnnnnnnnnnnnnnnnnnnnnnnnnnnnnnnnnnnnnnnnnnnnnnnnnnnnnnnnnnnnnnnnnnnnnnnnnnnnnnnnnnnnnnnnnnnnnnnnnnnnnnnnnnnnnnnnnnnnnnnnnnnnnnnnnnnnnnnnnnnnnnnngaagtttaattgttattcttttcctgcccccgannnnnnnnnnnnnnnnnnnnnnnnnnnnnnnnnaagccttaggatggctaggaagcattttcagatggtataatgaacacctgtataactttcatctggaatcaacagttgctaatactttgccacatttgctttccatgtgtgtatgtctatacattttctggacaaaccatttgagagtcagttgcagacaaaatgaccctttgccattaaagacttcagtgtgcagcccctaagaagcaaggcattctcctgcataaccagaggactatcatcacccaatggaacttcatattatcattgtctactatgcagcccatatacacattttcacaattgtcccaatcataacatggcttaaaaaattcagaatccaatccaacatcagacattgcatttagcgttcatga

SEQ ID NO: 232304 - DNA, 124 bp, Homo Sapiens
gatgctactccggagcccggaaaggacccacgcgtgacacgggccccatacttcattcgagatgagtatctgaagataatcactgccagtgacaaatgggcgtgactactgctaccctcatttc

SEQ ID NO: 232305 - DNA, 570 bp, Homo Sapiens
  misc_feature (108)..(401): n is a, c, g, or t
ttggggtcacttaattatgacagtgtttgcgagtgttggagggtggttctgattcagtaggtctggggtagggcacagggacctgaaaatttagaaataggcaattannnnnnnnnnnnnnnnnnnnnnnnnnnnnnnnnnnnnnnnnnnnnnnnnnnnnnnnnnnnnnnnnnnnnnnnnnnnnnnnnnnnnnnnnnnnnnnnnnnnnnnnnnnnnnnnnnnnnnnnnnnnnnnnnnnnnnnnnnnnnnnnnnnnnnnnnnnnnnnnnnnnnnnnnnnnnnnnnnnnnnnnnnnnnnnnnnnnnnnnnnnnnnnnnnnnnnnnnnnnnnnnnnnnnnnnnnnnnnnnnnnnnnnnnnnnnnnnnnnnnnnnnnnnnnnnnnnnnnnnnnnnnnnnnnnnnngtttaattgtaaaaaatatatacataaaatttaccattttctcaagttttcagtgtatagttcagaggcattaagtacattcacattcttgtgcagccatcaccaccatccatctccagaacttttttcatcttacagacctcaagctgtgtccatgtaacaactctca

SEQ ID NO: 232306 - DNA, 410 bp, Homo Sapiens
ttggaaaggtgacttttataatgtggcgcctgctgactacctacaaataattctactaaaatcactggcgacttataaacttttaatgtagatataatgttgtaccaaaaagcaataaactattgaattgatttttcttaatccaaatttttttcttcgttgcctttatcataaaatgagaaaaaaactgtagtgtcgcctttctttttttaaggaagcttgatgaaaatttctcattttctgctgcgacttattcctgatctctcctctttctgctgcagtatgtcgtcttcattattatgaggacgtttgggaggaatatttcctcacaataaacagttgataaaaatgccgcatggtctattcttccttctccaccaatttgaatgtgggtattatgccgccaagaa

SEQ ID NO: 232307 - DNA, 957 bp, Homo Sapiens
  misc_feature (290)..(302): n is a, c, g, or t
ttgggagaaagggggtatttttcctgtgccccctgttatctctcacactctttgtggtgttctccaatgtgctcttctcgccgccacccccgccccctgtgaccacagccacagcacctctcaagcgtcttgtgatgtgtgttctccgggagggggagactggtgtggttgttgtgatgttgtgaggcggcactgtggtctctaccgtgtatgtgtcccatctctatatgtgtggcccgtgtgcgatggggtttttgagggaggcgccggctattgtgcaccacagatannnnnnnnnnnnngtgcggggctctgtgggctctctgtgacccccattgtgggtgtgcatctgtgcctctcactgtgtgtgatgtgtggtgctgttgagtgtgcgtgtgaccctatcctctcacctgtgctcttctgcgcacacgcgcaaggggcccccacatctcggggcgcacacatctctatctccaacgcggcgactgtggtgtctgctgctgtgtgtcttgtgcagaggagacacgattactatctcacggagtctaaccacagatattacacaatgtggagaggggagaggctctgatctaatctctctaccaccccctgtggccggcgcacatctcaggagactgtgtcattctcaccctccttggtggacaccacacccccttcctagcgagtactgtcgtcctctcatcttcccagaaacacaatgatgctcttctcctctccttgtgatgatgaacttgtggctctcttcgaaacttttaccctctctggccctgattatactatatgtctgtgtacacaaacaaaaataatccctggtctatctcctcttttccacctgagtctcagctcttccctttccttaattgtggtaaactatcatgttcacaccacctttattccctgatgatgtccttgttgaaaaaacccaaaattttg

SEQ ID NO: 232308 - DNA, 565 bp, Homo Sapiens
  misc_feature (216)..(492): n is a, c, g, or t
ttggatctgatatacctccctccttctgtgtctgacagtactaagggaatttcttaataatgaggttaagtgttcacatgtgcagacacttctcttgcctatactttggcagcttaaaatcctaggaattctcactttttctcttttccttttagatatatggcagacatgaggaatggcctgagttggagtttgcttcttaagaagtcctatcannnnnnnnnnnnnnnnnnnnnnnnnnnnnnnnnnnnnnnnnnnnnnnnnnnnnnnnnnnnnnnnnnnnnnnnnnnnnnnnnnnnnnnnnnnnnnnnnnnnnnnnnnnnnnnnnnnnnnnnnnnnnnnnnnnnnnnnnnnnnnnnnnnnnnnnnnnnnnnnnnnnnnnnnnnnnnnnnnnnnnnnnnnnnnnnnnnnnnnnnnnnnnnnnnnnnnnnnnnnnnnnnnnnnnnnnnnnnnnnnnnnnnnnnnnnnnnnnnnnnnnnnnnnnnnnnnnnnaacaataaacaaattaacgggaaaaagaccagtcttctggtgggactttaaattaaaaatgcatatgcacccc

SEQ ID NO: 232309 - DNA, 529 bp, Homo Sapiens
  misc_feature (62)..(79): n is a, c, g, or t
  misc_feature (82)..(98): n is a, c, g, or t
aaaaaggaggggggagattgaggggccatgtgacctccgatcccggggaccaaaactctctnnnnnnnnnnnnnnnnnngannnnnnnnnnnnnnnnncgccaccacacaacccgcaaattgtatttattttttataaaaaagggattttgcccggtgtccacaacagagttgtagatgcggggctcaagagatattgccatacaagtttccccatgtgcgggggttacaggggtgaacccccggtcccggcccactatatttcttttgccgaccctcctggttttattaagaaagagggttataaaccccctttctcacccaatactctgggagaaattaatatagaaagcgctcatcagtatgacacaggcggctcctattatgtaaacacgcaagggggcataaaatgaagtggggtcgaacctcgtgcaccccacaaaaactatgcaacctgggagctggaggaataccccggaaaaaagaaattggaaccgaactgcaccgagtccgagtgatgaaaaagggac

SEQ ID NO: 232310 - DNA, 214 bp, Homo Sapiens
ttgggtattagttaccctcttgccttaaacatatgacaccggggtataaaatcttattttcctcatcgctatgactaaagacagtgggacgtaaaccttttacctgaggctcaaatgtgactggcccatgtggtttgttttttatatggtttttggtgctgtttgtaggacccacatttaagaattgagatatctcacccaaatatccgaattc

SEQ ID NO: 232311 - DNA, 400 bp, Homo Sapiens
ttggctttccttgatttttttcttcctgtttaagagggaagtttatatttttgacagaaaatgtgtatgaaagcactgtaaaacataacataaaaaacccattatgatattggcaatcatatggttaacatttgaaggtgccgagcaacttgcttcccattgtacaacgggtgaggccacggtttttctggaccgggtcactgacaaattactttcgactgtggaatatatgtattctgtcacctatttgttttttaaactgcgtttttatatggtcaaaatcattcttaattttagagccaattggattttttctgctgttcaaaacttaccaccccctgatgtattatttgttattcatactaaaatttctgaatactaccagtttccttttcagtgc

SEQ ID NO: 232312 - DNA, 801 bp, Homo Sapiens
  misc_feature (44)..(99): n is a, c, g, or t
  misc_feature (124)..(229): n is a, c, g, or t
  misc_feature (232)..(272): n is a, c, g, or t
  misc_feature (276)..(336): n is a, c, g, or t
  misc_feature (379)..(536): n is a, c, g, or t
aatgttgagcacattacaatacattacatcagggtacattacannnnnnnnnnnnnnnnnnnnnnnnnnnnnnnnnnnnnnnnnnnnnnnnnnnnnnnngaagtaatatagggaatcctctgannnnnnnnnnnnnnnnnnnnnnnnnnnnnnnnnnnnnnnnnnnnnnnnnnnnnnnnnnnnnnnnnnnnnnnnnnnnnnnnnnnnnnnnnnnnnnnnnnnnnnnnnnagnnnnnnnnnnnnnnnnnnnnnnnnnnnnnnnnnnnnnnnnnacannnnnnnnnnnnnnnnnnnnnnnnnnnnnnnnnnnnnnnnnnnnnnnnnnnnnnnnnnnnnacacacgcttaagtgccacatcagccctgcaaaacttgcatannnnnnnnnnnnnnnnnnnnnnnnnnnnnnnnnnnnnnnnnnnnnnnnnnnnnnnnnnnnnnnnnnnnnnnnnnnnnnnnnnnnnnnnnnnnnnnnnnnnnnnnnnnnnnnnnnnnnnnnnnnnnnnnnnnnnnnnnnnnnnnnnnnnnnnnnnnnnntatacatcttaatactgttgccttgaggattaagtttcaactataaattttgcagagagaagtttacagttttacacattttttgaaaaaataggaataattaaaaatgaatgagttaagctttcaaaccaagaaagaagaaagataacgtgatacacctaagagaataatatgtaaggaagtaacggaacagaattaatgaattagaaattgatataacaaaagttctcatggctgatcaacgggaaaaggaaacacacatact

SEQ ID NO: 232313 - DNA, 215 bp, Homo Sapiens
  misc_feature (64)..(163): n is a, c, g, or t
cacaattggggccaggaatttaaaaccaaaaacccgggggttttttggggaagtggtgaacccnnnnnnnnnnnnnnnnnnnnnnnnnnnnnnnnnnnnnnnnnnnnnnnnnnnnnnnnnnnnnnnnnnnnnnnnnnnnnnnnnnnnnnnnnnnnnnnnnnnnttttgaaaggcccacctttacttgttttcaggggtggcctttttggggtttt

SEQ ID NO: 232314 - DNA, 174 bp, Homo Sapiens
ttggcattaataatggaaccaactgaataccaagtatcaatgtatattatttttatttaaacatcaataatggaatagctttgattctgaaaacttagttaggtgtgccacccagggggattctttctgttttgaggtaaatgttttcctctcttccccacctcccaccttttc

SEQ ID NO: 232315 - DNA, 890 bp, Homo Sapiens
  misc_feature (46)..(62): n is a, c, g, or t
  misc_feature (70)..(187): n is a, c, g, or t
  misc_feature (233)..(492): n is a, c, g, or t
  misc_feature (659)..(730): n is a, c, g, or t
ttgtacaaaaaagttgggtggttttttactttattctttttgttcnnnnnnnnnnnnnnnnngagacagnnnnnnnnnnnnnnnnnnnnnnnnnnnnnnnnnnnnnnnnnnnnnnnnnnnnnnnnnnnnnnnnnnnnnnnnnnnnnnnnnnnnnnnnnnnnnnnnnnnnnnnnnnnnnnnnnnnnnngtgcacaccaaaactcctggctaatttttgtattttttgtagagannnnnnnnnnnnnnnnnnnnnnnnnnnnnnnnnnnnnnnnnnnnnnnnnnnnnnnnnnnnnnnnnnnnnnnnnnnnnnnnnnnnnnnnnnnnnnnnnnnnnnnnnnnnnnnnnnnnnnnnnnnnnnnnnnnnnnnnnnnnnnnnnnnnnnnnnnnnnnnnnnnnnnnnnnnnnnnnnnnnnnnnnnnnnnnnnnnnnnnnnnnnnnnnnnnnnnnnnnnnnnnnnnnnnnnnnnnnnnnnnnnnnnnnnnnnnnnnnnnngagagagaatgatttgcgctagcacgttaacatgtgagcacactcagcagcctcaccatgtgatgccctgtaccaccttgggactttttgcacagtctaccagcaagaaggctcttaccaaatgcggccactcaaccttggacctttcaacctccataactgtaagnnnnnnnnnnnnnnnnnnnnnnnnnnnnnnnnnnnnnnnnnnnnnnnnnnnnnnnnnnnnnnnnnnnnnnnnctcttacattttacatccaggaacataacctacatcatttttgggttcaagacacatagctcataaggcacatcacaggagcaagctatcccctaaacaatactggagaatatgggacatgcatgggtacaaatacccagctctcacagctgccataaaa

SEQ ID NO: 232316 - DNA, 646 bp, Homo Sapiens
  misc_feature (80)..(202): n is a, c, g, or t
  misc_feature (311)..(368): n is a, c, g, or t
ttggctattggagtgaagtgattctatctagtatgtgagaatgacttaagttttgggggaccagggatggaatgctatgnnnnnnnnnnnnnnnnnnnnnnnnnnnnnnnnnnnnnnnnnnnnnnnnnnnnnnnnnnnnnnnnnnnnnnnnnnnnnnnnnnnnnnnnnnnnnnnnnnnnnnnnnnnnnnnnnnnnnnnnnnntgtaggggtcagtgagttcttgctgtcataggaacagactagtttcttgagagcaggttgttataaagcaaggacaccccttgggttttaccttttcacatgtgtcagnnnnnnnnnnnnnnnnnnnnnnnnnnnnnnnnnnnnnnnnnnnnnnnnnnnnnnnnnnaatgctggtgccatgcttctcatacttccatcctgcaaaactgtgagatggtaacctgtctgacttctttctaatgaagttgttgaggtttcctttgtggcctactacgagtttaggataagaaggggaatgtggagattgtgcctggtttactatttttatccagcctcctcaactttgtatgtattgaggattgatgtcttaaactacacttccaaagatgagggtgtttgcatttctgagtaccaaagggctgtacctggacctgccctgacccc

SEQ ID NO: 232317 - DNA, 302 bp, Homo Sapiens
ttggagttccacctgagatgaaattacacccttttgatatttcttgtaaaaagcttaaataatagcatgatggcatgaatgctcttcagtatatattggatgaaaaaaagaatatgaacatactgcttgtccatcctgatgacacaatgcaacctgtgtcctttgcatcgctagacctttgctcatcacacatatttgatcggaccgtcccgtaagactagcttctctcgttgaatctgtccttgatgaattcttaagagacattttgtgtaactgactttttgaacaatgatgaacttgac

SEQ ID NO: 232318 - DNA, 908 bp, Homo Sapiens
  misc_feature (258)..(565): n is a, c, g, or t
  misc_feature (567)..(748): n is a, c, g, or t
ttggcgccattctcctgcctcagccttactgcatccttttttaacatttttgaatattgagtgaggaaagggctcagggttcagtgtctctagaacctgggcaaactacaaatttggttttaccccgcaaaaagcaagtagtctgtcacacctccagcccactatggacaccagtcaagttttttgcctggttttctttgttttgcatacatgctcatcttctactctcagccatactgatgataagaatcatgaaannnnnnnnnnnnnnnnnnnnnnnnnnnnnnnnnnnnnnnnnnnnnnnnnnnnnnnnnnnnnnnnnnnnnnnnnnnnnnnnnnnnnnnnnnnnnnnnnnnnnnnnnnnnnnnnnnnnnnnnnnnnnnnnnnnnnnnnnnnnnnnnnnnnnnnnnnnnnnnnnnnnnnnnnnnnnnnnnnnnnnnnnnnnnnnnnnnnnnnnnnnnnnnnnnnnnnnnnnnnnnnnnnnnnnnnnnnnnnnnnnnnnnnnnnnnnnnnnnnnnnnnnnnnnnnnnnnnnnnnnnnnnnnnnnnnnnnnnnnnnnnnnnnngnnnnnnnnnnnnnnnnnnnnnnnnnnnnnnnnnnnnnnnnnnnnnnnnnnnnnnnnnnnnnnnnnnnnnnnnnnnnnnnnnnnnnnnnnnnnnnnnnnnnnnnnnnnnnnnnnnnnnnnnnnnnnnnnnnnnnnnnnnnnnnnnnnnnnnnnnnnnnnnnnnnnnnnnnnnnnnnnnnnnnnccttactgcatccttttttaacatttttgaatattgagtgaggaaagggctcagggttcagtgtctctagaacctgggcaaactacaaatttggttttaccccgcaaaaagcaagtagtctgtcacacctccagcccactatggacacagtcaagttttt

SEQ ID NO: 232319 - DNA, 924 bp, Homo Sapiens
  misc_feature (217)..(519): n is a, c, g, or t
ttggcttcatagatcaacttgcttattttataagtgaaaaaaaactgaagtctagagatgatgagacatgtctaaggtcataaatgttaaggaatagacacatttagaaccatattctttgacactctcccaaaggacagttaatcttatcagttcatgtaacagtaagaatctggaaatggtagcctctcacactgcaagaaaggaagtacttcannnnnnnnnnnnnnnnnnnnnnnnnnnnnnnnnnnnnnnnnnnnnnnnnnnnnnnnnnnnnnnnnnnnnnnnnnnnnnnnnnnnnnnnnnnnnnnnnnnnnnnnnnnnnnnnnnnnnnnnnnnnnnnnnnnnnnnnnnnnnnnnnnnnnnnnnnnnnnnnnnnnnnnnnnnnnnnnnnnnnnnnnnnnnnnnnnnnnnnnnnnnnnnnnnnnnnnnnnnnnnnnnnnnnnnnnnnnnnnnnnnnnnnnnnnnnnnnnnnnnnnnnnnnnnnnnnnnnnnnnnnnnnnnnnnnnnnnnnnnnnntgtaaaattttttaaaaagaaatggagaaaagcattcatgtcttaaccatgctttaattataaaggaggtatgtaaataattttttattgtgctgctacatattaatggaatatattggaaatttaatggttatcgatatcctcaacagaaagtaagtaaaagtcaggaatggggccaggcgtaagccaccatgaccagcctattgatttataatttaagagcatattataattgtcacattgctgattttctattgcagtatctttgctttgagcagaagataagcctacatttaagaaaacccaaaaaggtggtttgaatgtatattattattacatagtaggacacctacacttgataatgtatagatgttcaaggaaaaactattagtagtgtttttttgg

SEQ ID NO: 232320 - DNA, 362 bp, Homo Sapiens
  misc_feature (64)..(104): n is a, c, g, or t
  misc_feature (128)..(178): n is a, c, g, or t
  misc_feature (261)..(305): n is a, c, g, or t
ttgggttatgttttagcatgaaaagactgggattacaggcgtgtcctctgcacccggcccacannnnnnnnnnnnnnnnnnnnnnnnnnnnnnnnnnnnnnnnnggagacagagtctctctctttcannnnnnnnnnnnnnnnnnnnnnnnnnnnnnnnnnnnnnnnnnnnnnnnnnngtgggttcaagtgattctcaattctagtacctcagcctcccaagtatctaaaactaaaggcatgcgccaccacacttggatannnnnnnnnnnnnnnnnnnnnnnnnnnnnnnnnnnnnnnnnnnnngagatggagtcttgctctacactccaacatggactaaaagagagagactccctcacc

SEQ ID NO: 232321 - DNA, 202 bp, Homo Sapiens
  misc_feature (64)..(159): n is a, c, g, or t
ttggcaggaacaaaagcatgctatatttcaccttttattaagatttgccactatgtccttcagnnnnnnnnnnnnnnnnnnnnnnnnnnnnnnnnnnnnnnnnnnnnnnnnnnnnnnnnnnnnnnnnnnnnnnnnnnnnnnnnnnnnnnnnnnnnnnnntcaggtactttgcatacctggttaaaatatcaataggatgtga

SEQ ID NO: 232322 - DNA, 786 bp, Homo Sapiens
  misc_feature (74)..(507): n is a, c, g, or t
ttgggcgcagttgagcatcttttcatacacttactgaccattctactttatgctgtgaactgcctttaatttcnnnnnnnnnnnnnnnnnnnnnnnnnnnnnnnnnnnnnnnnnnnnnnnnnnnnnnnnnnnnnnnnnnnnnnnnnnnnnnnnnnnnnnnnnnnnnnnnnnnnnnnnnnnnnnnnnnnnnnnnnnnnnnnnnnnnnnnnnnnnnnnnnnnnnnnnnnnnnnnnnnnnnnnnnnnnnnnnnnnnnnnnnnnnnnnnnnnnnnnnnnnnnnnnnnnnnnnnnnnnnnnnnnnnnnnnnnnnnnnnnnnnnnnnnnnnnnnnnnnnnnnnnnnnnnnnnnnnnnnnnnnnnnnnnnnnnnnnnnnnnnnnnnnnnnnnnnnnnnnnnnnnnnnnnnnnnnnnnnnnnnnnnnnnnnnnnnnnnnnnnnnnnnnnnnnnnnnnnnnnnnnnnnnnnnnnnnnnnnnnnnnnnnnnnnnnnnnnnnnnnnnnnnnnnnnnnnattccctaggccgtacccacccgctgccttgctttacacggctttagatatttgccacacccatgtttcttctgctttatctatgatcaacctaaaagtttttaatgcttcctctggacatttaaagagaggtcctgagatccactgggcctcggtcacctgtcctgtatgcctgtcatcctgaggcactgcacgagcaccgcacaatgacagtccaaacagagaccagagctggggaggccaagtcagcccagacctgccagtaagaagctgagagtt

SEQ ID NO: 232323 - DNA, 748 bp, Homo Sapiens
  misc_feature (146)..(158): n is a, c, g, or t
  misc_feature (168)..(452): n is a, c, g, or t
  misc_feature (471)..(521): n is a, c, g, or t
gtgtgagctaccacacccggccagtttaatccttctgtaaataatttgtaggtggtttaagtgaaacgggggaaaataactcatttttttcctccacccagggttatctttcacttggatactattgtacatgatggctttcttcnnnnnnnnnnnnngagacggcannnnnnnnnnnnnnnnnnnnnnnnnnnnnnnnnnnnnnnnnnnnnnnnnnnnnnnnnnnnnnnnnnnnnnnnnnnnnnnnnnnnnnnnnnnnnnnnnnnnnnnnnnnnnnnnnnnnnnnnnnnnnnnnnnnnnnnnnnnnnnnnnnnnnnnnnnnnnnnnnnnnnnnnnnnnnnnnnnnnnnnnnnnnnnnnnnnnnnnnnnnnnnnnnnnnnnnnnnnnnnnnnnnnnnnnnnnnnnnnnnnnnnnnnnnnnnnnnnnnnnnnnnnnnnnnnnnnnnnnnnnnnaattcgattacataaaccnnnnnnnnnnnnnnnnnnnnnnnnnnnnnnnnnnnnnnnnnnnnnnnnnnnctttatgatgagtatgtaacagtctctaacatatagtatgaagttaaacaaactaagggtaaaaacagcatatatagcatttatttaagaaaacagaaaattacaggtttatctgcatatgtacagaatggcttgggtgggagacataagaaacctgatgtcgttggttgcctctgaaggaggtaagtgggtggctggggatgagactaggaaagaaatatttgacc

SEQ ID NO: 232324 - DNA, 760 bp, Homo Sapiens
ggccccctccatcccgagggcgggggcggcaaaataccccccggggaataactggaaaaatggtgtccctgggcgttgctgcggccgtgggcccccccctttctccgcggggcggaatgggcctccaaaatggtttgggtttctcttttcttggtgccagggaatttcctgcccttaacacttctcttccaaaaaatgggaacggcgagatgtccttcattcttgaaaaacggaatcctggagccgatacctccggtgatcttgaaaaaactgggcggggcctaaaattgggggagggaatggccccgcacatggggcggagaaagttccacacaaaaaaaggtaaaatttttctctcggctaaaagggattgcctttaaatttgaacctgacaatgttggtgttgtcctgtttggaaatgataaactaatttgggaagagaaatatttgaaaagaacggagcccttgttgacgtttcccttgtgaagagccgttggggcccggaatttataccctttggaagctattggaggaaaaggttccaattgttctcaaacgcctatgcggaattggtctgaaaacccccgtatctctctcttaatttctcttggcgggaacatgccaacacgcatataagctgtggaaagactgggtgccaattgtcctggtgcacgggaatcgatattgttgaccccacgcatcggaaaacctccttgtattgtgaccattcttaaccaaacatttcttgatgatctgatag

SEQ ID NO: 232325 - DNA, 373 bp, Homo Sapiens
  misc_feature (199)..(209): n is a, c, g, or t
ttggccccaacaaacatacgctatcgggccccgaccccgaaggtgttggttatcccttccagtaatacttctgcccctggcccaacccgacttcaactccattgcaggtgcaggcacactcgcgctaacgctaagctgattttgaatttgtacctgactaggcctaaaaatgaacatgcttatttttattccaattctnnnnnnnnnnnctcgttcccgttaaactgaaactgcgtatttgtatttcctcgcgcacgcatccgtatcccttctcattctaatacttatcctcttcaaactctccggaccaggaacatgaaccaaaactaatactaccaatccatacttatcaataataatggctatggctata

SEQ ID NO: 232326 - DNA, 890 bp, Homo Sapiens
  misc_feature (124)..(670): n is a, c, g, or t
ttggagaagagcaatctgtttggataagaaaaacctttactttacagcttccctttataatttgttacacaggaatagttaaatgcatttgtttgtttgttttttgagacagagtttcactctnnnnnnnnnnnnnnnnnnnnnnnnnnnnnnnnnnnnnnnnnnnnnnnnnnnnnnnnnnnnnnnnnnnnnnnnnnnnnnnnnnnnnnnnnnnnnnnnnnnnnnnnnnnnnnnnnnnnnnnnnnnnnnnnnnnnnnnnnnnnnnnnnnnnnnnnnnnnnnnnnnnnnnnnnnnnnnnnnnnnnnnnnnnnnnnnnnnnnnnnnnnnnnnnnnnnnnnnnnnnnnnnnnnnnnnnnnnnnnnnnnnnnnnnnnnnnnnnnnnnnnnnnnnnnnnnnnnnnnnnnnnnnnnnnnnnnnnnnnnnnnnnnnnnnnnnnnnnnnnnnnnnnnnnnnnnnnnnnnnnnnnnnnnnnnnnnnnnnnnnnnnnnnnnnnnnnnnnnnnnnnnnnnnnnnnnnnnnnnnnnnnnnnnnnnnnnnnnnnnnnnnnnnnnnnnnnnnnnnnnnnnnnnnnnnnnnnnnnnnnnnnnnnnnnnnnnnnnnnnnnnnnnnnnnnnnnnnnnnnnnnnnnnnnnnnnnnnnnnnnnnnnnnnnnnnnnnnnnnnnnnnnnnnagaggtgtgagccactgtgcccagcccatcaatgtgttttaaagctagctgtcagggttccacttaatttaaagctgggcagggagatgtgtaatgatttcaaagttaacacctgtttgttttctaaagggcatgccaagtcctgctgtatcaggaagtattctgtgctaaaatcagcgatggttcattgctctagtctctctcacccttctaggcagtg

SEQ ID NO: 232327 - DNA, 419 bp, Homo Sapiens
ttgggccgccgccgcacgcgctggcggactaagagtggctggcgaagcgagcggccggcgcgggcccctggcgggcgggcggtacagcttatttcctgatatacggacctgagaatgtcccggccagcacgaggtggccagttggcccccatggcatccctggtctaggctgataacctcctgtgccatgaatgaaaacctccacaacgagggcccgaagcccatggagagctgtggccaggaaagttttcttgccctgagctgccctaccgtctcggtgccccctgcagccccggcagccctggagtaggtggagaaagagggcgctggggcggctacagggccggggcctcagcccgggctctacagctaccttgcggatgacttgtttacctctgacatctttaaactggacctgc

SEQ ID NO: 232328 - DNA, 289 bp, Homo Sapiens
ttggatacctcgtctgtggctggagtttggtttaattttcgcattcttttcagaaacccctgccttgggatcagagtcctttggtgacaaatgcttgacacacttgtatcatatgtataatacagtgttttgggatttaatcattataataatggcctgcgtacaagcttttgttatttttttcttttcaatatcttgtaaaaacatcattcaaaattatcattataatggactttgctcacattcaggattgatttactcttaaacagatacttttgggaccatctaa

SEQ ID NO: 232329 - DNA, 344 bp, Homo Sapiens
  misc_feature (125)..(165): n is a, c, g, or t
gggggggtggtaccccggggaatttgtcccttttttaaaccaatttttttatatcaagaaaaaataacttttcaaaaagcatcccggaaattcccgtgggatggtttttggggggtttttccggnnnnnnnnnnnnnnnnnnnnnnnnnnnnnnnnnnnnnnnnntcgaaaaaacccaacccgggagggccataccccaggccggcccttttcccccacccaaaacccggtggaaaacccccccttttggggctagggccaaattcttttttacaaaaaatttaaaaatcccggtcattttcccgggaaaaattaacccttttcttttcgggaaagtcaaaaaa

SEQ ID NO: 232330 - DNA, 241 bp, Homo Sapiens
ttggccttaattggcgttcctctcatgctgaacggggtacctgttgcgggccgagagatcatgaccttccagtagggggaagaggagcttatttcttgctgaacttgaaacctaaggtccctggaagccttaatgcttcatttgccggtgcatatcctttctcccttgcctccttgattgaggggtcccgaatgtatgattcccaccggggtcgggcaagcccctcctgtgaccactccaa

SEQ ID NO: 232331 - DNA, 428 bp, Homo Sapiens
  misc_feature (328)..(349): n is a, c, g, or t
ttggatcccaccattctaggtacgccatcccaccgcttcatttcccctgttggatccattgatgctgtggacctaattctgtaagtgagttttcatgaattccccctcgctgcccaaagctgcggtcagccaagtggggctggccactgccaaaaacctaagatgcactcttggtttgcatgcacatcttgtgactggactggtgtcaggtctgcgcaccgttctctgattttccactctgtctacccagttcacagacaggagctaacctcacttcccggtgggtttgggatgtgcatgtctctgaacaaaattcctgttggaatgnnnnnnnnnnnnnnnnnnnnnnatcaagtatgtttgttaattttccacttgactccttttgcaaatttggaattgaaaagataatccttaaggaaatctga

SEQ ID NO: 232332 - DNA, 220 bp, Homo Sapiens
ttgggtagttatcctgatttgtcttgtggcccctataacctgactacgtattatttaccattggtcatggaacatgtttatttgcgccaggcttgcataatgtagaaattacggaataattaataaatctgattagatataattgactatttgttgccaagtccaccaggtgaaagtgagctcagtatccttaaacaacctgaatgaaggatgcgtgtgg

SEQ ID NO: 232333 - DNA, 911 bp, Homo Sapiens
  misc_feature (70)..(96): n is a, c, g, or t
  misc_feature (241)..(281): n is a, c, g, or t
  misc_feature (303)..(421): n is a, c, g, or t
  misc_feature (490)..(521): n is a, c, g, or t
  misc_feature (523)..(835): n is a, c, g, or t
ttggctgttacttaactgggacaaaatcttcatgatattctggtatattccttctctgcaactgaccaannnnnnnnnnnnnnnnnnnnnnnnnnnaaatactacattaattaccaaatattttatactttttgttgttttaattaagatatttcatttttttcctagctggtcattactggtatgtagaaatacattttattttggcctttacaattcctttcttatttctcactctgannnnnnnnnnnnnnnnnnnnnnnnnnnnnnnnnnnnnnnnnaagacaagagtcttgctctctnnnnnnnnnnnnnnnnnnnnnnnnnnnnnnnnnnnnnnnnnnnnnnnnnnnnnnnnnnnnnnnnnnnnnnnnnnnnnnnnnnnnnnnnnnnnnnnnnnnnnnnnnnnnnnnnnnnnnnncagcctacactgattgcttttcaaatattaaaccagccctgcattcctgaaatcataacgtgttatgcnnnnnnnnnnnnnnnnnnnnnnnnnnnnnnnnannnnnnnnnnnnnnnnnnnnnnnnnnnnnnnnnnnnnnnnnnnnnnnnnnnnnnnnnnnnnnnnnnnnnnnnnnnnnnnnnnnnnnnnnnnnnnnnnnnnnnnnnnnnnnnnnnnnnnnnnnnnnnnnnnnnnnnnnnnnnnnnnnnnnnnnnnnnnnnnnnnnnnnnnnnnnnnnnnnnnnnnnnnnnnnnnnnnnnnnnnnnnnnnnnnnnnnnnnnnnnnnnnnnnnnnnnnnnnnnnnnnnnnnnnnnnnnnnnnnnnnnnnnnnnnnnnnnnnnnnnnnnnnnnnnnnnnnnnnnnnnnnnnnnnnnngatttgctaacattttgttacagattttcatgtctctattcatgaaacacactggtctgtgattttttaaggtctt

SEQ ID NO: 232334 - DNA, 839 bp, Homo Sapiens
  misc_feature (53)..(354): n is a, c, g, or t
  misc_feature (366)..(652): n is a, c, g, or t
ttggctgctctcctcagtcatcctttgttaagggttaaaaccagggcacctgnnnnnnnnnnnnnnnnnnnnnnnnnnnnnnnnnnnnnnnnnnnnnnnnnnnnnnnnnnnnnnnnnnnnnnnnnnnnnnnnnnnnnnnnnnnnnnnnnnnnnnnnnnnnnnnnnnnnnnnnnnnnnnnnnnnnnnnnnnnnnnnnnnnnnnnnnnnnnnnnnnnnnnnnnnnnnnnnnnnnnnnnnnnnnnnnnnnnnnnnnnnnnnnnnnnnnnnnnnnnnnnnnnnnnnnnnnnnnnnnnnnnnnnnnnnnnnnnnnnnnnnnnnnnnnnnnnnnnnnnnnnnnnnnnnnnnnnnnnnnnnccagggcacctnnnnnnnnnnnnnnnnnnnnnnnnnnnnnnnnnnnnnnnnnnnnnnnnnnnnnnnnnnnnnnnnnnnnnnnnnnnnnnnnnnnnnnnnnnnnnnnnnnnnnnnnnnnnnnnnnnnnnnnnnnnnnnnnnnnnnnnnnnnnnnnnnnnnnnnnnnnnnnnnnnnnnnnnnnnnnnnnnnnnnnnnnnnnnnnnnnnnnnnnnnnnnnnnnnnnnnnnnnnnnnnnnnnnnnnnnnnnnnnnnnnnnnnnnnnnnnnnnnnnnnnnnnnnnnnnnnnnnnnnnnnnnnncaccagggcatctgtaagccactttgggagtcaaaagaatgtagggctgggttggactccttagaagaaagttaagttctgagtgtgggaggaagtgcctgcacgcccacttccacagagagcccctgtcactcctgctaccgaagactggcttgctgattcgggctctgcttccacagtgggggta

SEQ ID NO: 232335 - DNA, 340 bp, Homo Sapiens
aaaaagttggatatattaaccctagaaaatccctgtgggactgtgtttgccactttggcgtctaagagattactccggttagctcttggcttctgtggggtggggccttgataatttagaattggtgcctcctaaatcctgataaaggaatttttctttctctctctgccgtgctctgacgatgttgataccccggacctggggcacatggtagcccttatcttgaacagacttgaatagcaccttctccgtgcacatcaagtctccaaaatagcctcaatgatcatttttaccgatgaaactgatccctccgtttactttttttatggaattccccccc

SEQ ID NO: 232336 - DNA, 810 bp, Homo Sapiens
  misc_feature (121)..(427): n is a, c, g, or t
  misc_feature (447)..(559): n is a, c, g, or t
cattagcatttttcaaaatcttgaagtcaagaatgtatgtataggtagtgtcaaaataaaaaaatatagagatgaatctctaaatttgatgttttatttgggaagaaagaatatgctttcnnnnnnnnnnnnnnnnnnnnnnnnnnnnnnnnnnnnnnnnnnnnnnnnnnnnnnnnnnnnnnnnnnnnnnnnnnnnnnnnnnnnnnnnnnnnnnnnnnnnnnnnnnnnnnnnnnnnnnnnnnnnnnnnnnnnnnnnnnnnnnnnnnnnnnnnnnnnnnnnnnnnnnnnnnnnnnnnnnnnnnnnnnnnnnnnnnnnnnnnnnnnnnnnnnnnnnnnnnnnnnnnnnnnnnnnnnnnnnnnnnnnnnnnnnnnnnnnnnnnnnnnnnnnnnnnnnnnnnnnnnnnnnnnnnnnnnnnnnnnnnnnnnnggaatatgttttctgcagtnnnnnnnnnnnnnnnnnnnnnnnnnnnnnnnnnnnnnnnnnnnnnnnnnnnnnnnnnnnnnnnnnnnnnnnnnnnnnnnnnnnnnnnnnnnnnnnnnnnnnnnnnnnnnnnnnttagggggaaaaaacagaattaagaatatgctttctggctcccatcacatttgcatcagaggtcaatgtgtgtagactgcttctccaataacccagtagtttccaccttccctaaaggagcacgtgcaaaagttgcattacagcagcacttatgtcaccacaaactgcaagatcaagactaggaagcagatgattgataggctaatgagaaattggcatctgtacaatagaatattactgcttatttattg

SEQ ID NO: 232337 - DNA, 921 bp, Homo Sapiens
  misc_feature (519)..(560): n is a, c, g, or t
  misc_feature (572)..(615): n is a, c, g, or t
  misc_feature (848)..(857): n is a, c, g, or t
ttggatgatgctgtgttggcacaataaaggagtagctctgaacacagagggacttttttcgaaatagtgagatatatgaggactggaataatacaagaagttttcctggaggaaggatatatgggatttggagaggcagaggggagggagggctgggatatgatccctggtgtagacacagcatgagcaaaggcatggaggtggtgtggtagagagttgtcatgtgttccagggacaaggaggagactggcttagctggagtgaatgttggggatagtgaaagtttagatatggaggaagtgtacacgttcaccatcattttctagtttacacactgttgtcttttgcttactcctaatagtttttctaatacaccgtacttttccctgttttacctgactgtacctacacatttattcctttagattcagtttaggtttaactttttttcggaacacctttcctgattcactatgcccaaactccaccatttcctccagactctccatgttcccaatnnnnnnnnnnnnnnnnnnnnnnnnnnnnnnnnnnnnnnnnnnaatatcattcannnnnnnnnnnnnnnnnnnnnnnnnnnnnnnnnnnnnnnnnnnngccttatatcttgctttctatatcttcagtgtcagcacttagaaaatgtttgagtgactgactcgtgttcttaatatttctcgctttggggttaccatggtcattcctttacctagggaacaagacgtcaaatcaccatgtaacctgatacattatttagctaaaaactgcttcaatgaaatattgtttgcaacagtttttctacagaactaaaggtattataatgtataccnnnnnnnnnngctgctgtctgacccttagtctcagggactagaatgtaactccatcacggcagggaatttttta

SEQ ID NO: 232338 - DNA, 918 bp, Homo Sapiens
  misc_feature (60)..(126): n is a, c, g, or t
  misc_feature (131)..(186): n is a, c, g, or t
  misc_feature (190)..(564): n is a, c, g, or t
  misc_feature (568)..(674): n is a, c, g, or t
ttggtgtttccctccctgtatccatgtgttctcaatgttcaactcccacttatgggtgannnnnnnnnnnnnnnnnnnnnnnnnnnnnnnnnnnnnnnnnnnnnnnnnnnnnnnnnnnnnnnnnnngccannnnnnnnnnnnnnnnnnnnnnnnnnnnnnnnnnnnnnnnnnnnnnnnnnnnnnnnttannnnnnnnnnnnnnnnnnnnnnnnnnnnnnnnnnnnnnnnnnnnnnnnnnnnnnnnnnnnnnnnnnnnnnnnnnnnnnnnnnnnnnnnnnnnnnnnnnnnnnnnnnnnnnnnnnnnnnnnnnnnnnnnnnnnnnnnnnnnnnnnnnnnnnnnnnnnnnnnnnnnnnnnnnnnnnnnnnnnnnnnnnnnnnnnnnnnnnnnnnnnnnnnnnnnnnnnnnnnnnnnnnnnnnnnnnnnnnnnnnnnnnnnnnnnnnnnnnnnnnnnnnnnnnnnnnnnnnnnnnnnnnnnnnnnnnnnnnnnnnnnnnnnnnnnnnnnnnnnnnnnnnnnnnnnnnnnnnnnnnnnnnnnnnnnnnnnnnnnnnnnnnnnnnnnnnnaaannnnnnnnnnnnnnnnnnnnnnnnnnnnnnnnnnnnnnnnnnnnnnnnnnnnnnnnnnnnnnnnnnnnnnnnnnnnnnnnnnnnnnnnnnnnnnnnnnnnnnnnnnnaaaagaaattggtgttcaagtttgtcacaggtgacccttaaaagtcctcctaatggcttgtattactttgcctcttagcctacaggactttgaagaagaaaggaaataactaacccagcaaaccagaacctgatgttacaataattgtaatagttaacatgttaagcacttttcatatatttcctaatctaatcctacaccaaccctatgatactttactatttgtcttaaaaattgttcctga

SEQ ID NO: 232339 - DNA, 321 bp, Homo Sapiens
  misc_feature (118)..(249): n is a, c, g, or t
ttggattaaaattcgcctggggacacgcactcactctcacaggaactcttacacaaatgcctaaggaagtggttctcaaattgtaatccctaaactagtaacgaaacattacctgaannnnnnnnnnnnnnnnnnnnnnnnnnnnnnnnnnnnnnnnnnnnnnnnnnnnnnnnnnnnnnnnnnnnnnnnnnnnnnnnnnnnnnnnnnnnnnnnnnnnnnnnnnnnnnnnnnnnnnnnnnnnnnnnnnnngctagagcatatcctccagaaacttggcttacttggtctgggtaattatgggtgaacgttgttatcttttgt

SEQ ID NO: 232340 - DNA, 147 bp, Homo Sapiens
ttttgggaccttccccccagtttgggattcaaaagtggcaacccctggaattttttttaccccttttatcccttacaaaacccggccgggaacgggcctttttcccccccctaaaaaggagaaaggaaacccagggaaggaaaaaac

SEQ ID NO: 232341 - DNA, 764 bp, Homo Sapiens
  misc_feature (58)..(75): n is a, c, g, or t
  misc_feature (98)..(636): n is a, c, g, or t
atgagccactgtgtccagcctgtgctactatcttaaatgatagtgggctttggtttcnnnnnnnnnnnnnnnnnngaaatagagtttcgctcttgttnnnnnnnnnnnnnnnnnnnnnnnnnnnnnnnnnnnnnnnnnnnnnnnnnnnnnnnnnnnnnnnnnnnnnnnnnnnnnnnnnnnnnnnnnnnnnnnnnnnnnnnnnnnnnnnnnnnnnnnnnnnnnnnnnnnnnnnnnnnnnnnnnnnnnnnnnnnnnnnnnnnnnnnnnnnnnnnnnnnnnnnnnnnnnnnnnnnnnnnnnnnnnnnnnnnnnnnnnnnnnnnnnnnnnnnnnnnnnnnnnnnnnnnnnnnnnnnnnnnnnnnnnnnnnnnnnnnnnnnnnnnnnnnnnnnnnnnnnnnnnnnnnnnnnnnnnnnnnnnnnnnnnnnnnnnnnnnnnnnnnnnnnnnnnnnnnnnnnnnnnnnnnnnnnnnnnnnnnnnnnnnnnnnnnnnnnnnnnnnnnnnnnnnnnnnnnnnnnnnnnnnnnnnnnnnnnnnnnnnnnnnnnnnnnnnnnnnnnnnnnnnnnnnnnnnnnnnnnnnnnnnnnnnnnnnnnnnnnnnnnnnnnnnnnnnnnnnnnnnnnnnnnnnnnnnnnnnnnnntcagtcaccctgcctgctggctttggtttctttaagggtaaactgagggaatagtttttattttctgacatccttccttgcttttaaatttaattatgatggtcatattccccatttcagtttttttc

SEQ ID NO: 232342 - DNA, 547 bp, Homo Sapiens
  misc_feature (89)..(168): n is a, c, g, or t
  misc_feature (223)..(426): n is a, c, g, or t
ttggtgattttaaagaactgctcattttaaagaatgcttgatgctcgaaataacaaaacacaggaaacagcctaaaagttcgctagggnnnnnnnnnnnnnnnnnnnnnnnnnnnnnnnnnnnnnnnnnnnnnnnnnnnnnnnnnnnnnnnnnnnnnnnnnnnnnnnnctaacatagaaagatctccaagatagatgtttgggggaagagcaaagtgtagagnnnnnnnnnnnnnnnnnnnnnnnnnnnnnnnnnnnnnnnnnnnnnnnnnnnnnnnnnnnnnnnnnnnnnnnnnnnnnnnnnnnnnnnnnnnnnnnnnnnnnnnnnnnnnnnnnnnnnnnnnnnnnnnnnnnnnnnnnnnnnnnnnnnnnnnnnnnnnnnnnnnnnnnnnnnnnnnnnnnnnnnnnnnnnnnnnnnnnnnnnnnngtgtaatgtgtttgaaattttaaccatttgcgttttaaaaggtcatggggtgaaatatattagcttgaatatgcctggtgaatatgcatttttaagtccctgtaaagatacacaagaaact

SEQ ID NO: 232343 - DNA, 898 bp, Homo Sapiens
ttggcttctcaagtctgttctttgagcagaacattctcttccttatttttagtaaacctgtccaaatattttgtccttcatatctcagcttaaatataactaccgcagggaaatctttctcgagcctcagactaggctgaatgtctctcttactcattttttacaaaagtgtgaactgaaacttcagaggaaagatgactgagggaaagaatctggcatgacaaaggatgctactcaaaactggcaagaaaacaagaacgtgcaaatagcaaaataaaactaagctacctgaaaataattgaaacccaatcgctcttaaaacaggacctgctctctcttcctctctgagttcctatgtgatgcccataacttgacaggacaattccacggtttggctagaatctgacggaaacgtgtagcaaaatgtttagtggcttccacttgccacggttcagcagttttcatttttaaatggatattcatcttgttaaaatatttactttattgtgaaactacaggcagatttatctcacatagaagaagctataggtataacaggcatatggagttcattcaccaaggaagaatccagaagtttctcttcaagcatcagcatgtgtcatatcaaggcttcagaacgctttgctccacatggcaatgaaagtgtttaccaagtttgagttgtttgtgcccataaaatgcagtagaaatctgaactctgcctcattttcagagcatggctaccaactggcctctgtaggagcccatgtggttggaaagaaatactaaagttatttggacttgaaagcttctggaaaaggttttagctactccagagggtaagcagtttggcagataaggccattgaataagaggctctctgatgaaactctgtctg

SEQ ID NO: 232344 - DNA, 192 bp, Homo Sapiens
ccctcttgggcacactcccccggttcttgagggctcttttcacatctccaggatgcacaattattatggggggaaaaactttgaccgtaaaacaatgcaaaaaaattctctaccactttcttttccaaattcgtttttatcccttcctgtctgaaataaaattgtgagaaaaaagcgaataccacctatggg

SEQ ID NO: 232345 - DNA, 893 bp, Homo Sapiens
  misc_feature (258)..(385): n is a, c, g, or t
  misc_feature (457)..(838): n is a, c, g, or t
ttggcttttctttttaccaccaatggtatgtctattttgctttgggaactattgtgctagtgatgataatagctaggcattaagttaaattgtcttgtttgttcctcacatcaatgtgataagcgttgctctctctattcagtaaatgaagacaccaaaaaatcagagaagttcaacaacttgtccaggtcatgaggcaagccagaacttacctgggtaaggtccatatgagcccttggtcctcacagcattcttagnnnnnnnnnnnnnnnnnnnnnnnnnnnnnnnnnnnnnnnnnnnnnnnnnnnnnnnnnnnnnnnnnnnnnnnnnnnnnnnnnnnnnnnnnnnnnnnnnnnnnnnnnnnnnnnnnnnnnnnnnnnnnnnnagcttaacatttgggtattctgcctcccgtaggagaagatgggtgactgggtcattagtttggttgttctgnnnnnnnnnnnnnnnnnnnnnnnnnnnnnnnnnnnnnnnnnnnnnnnnnnnnnnnnnnnnnnnnnnnnnnnnnnnnnnnnnnnnnnnnnnnnnnnnnnnnnnnnnnnnnnnnnnnnnnnnnnnnnnnnnnnnnnnnnnnnnnnnnnnnnnnnnnnnnnnnnnnnnnnnnnnnnnnnnnnnnnnnnnnnnnnnnnnnnnnnnnnnnnnnnnnnnnnnnnnnnnnnnnnnnnnnnnnnnnnnnnnnnnnnnnnnnnnnnnnnnnnnnnnnnnnnnnnnnnnnnnnnnnnnnnnnnnnnnnnnnnnnnnnnnnnnnnnnnnnnnnnnnnnnnnnnnnnnnnnnnnnnnnnnnnnnnnnnnnnnnnnnnnnnnnnnnnnnnnnnnngtctccttgtctctctgtagtgttattttcttcatgccatgctattctgagctgc

SEQ ID NO: 232346 - DNA, 472 bp, Homo Sapiens
  misc_feature (292)..(334): n is a, c, g, or t
ttggccccgacgagtacgtgtccttcaaggacgatgatgaccccatcccccactacccgtagctggtgctcgtcatctcaccctacgacgaccccctccgtgtcgttgttctgagcgatccggaattaggattaaaacttaacccatcatttgcctttgcgatgaaggtgaatggaggaaaaagtgatattgatgtgcaggtgccctctggatctggagaggagtaggactggtctgagttggagctggatacatatgattatgctgttctcttcctccataatgataacgnnnnnnnnnnnnnnnnnnnnnnnnnnnnnnnnnnnnnnnnnnntggaatcccattgcaagtgggggatggggaaccaggagggaaggggaacctggcgttggcgtctgcctatggaatgggacggggaaggggcagtatccgtatggaattcgattttattattaccaccacacgaccagg

SEQ ID NO: 232347 - DNA, 808 bp, Homo Sapiens
  misc_feature (64)..(187): n is a, c, g, or t
  misc_feature (258)..(266): n is a, c, g, or t
gttcaagtgattcgggtgcctcaccctcctgagaagcgggaattacgggtgtaaaccactagcnnnnnnnnnnnnnnnnnnnnnnnnnnnnnnnnnnnnnnnnnnnnnnnnnnnnnnnnnnnnnnnnnnnnnnnnnnnnnnnnnnnnnnnnnnnnnnnnnnnnnnnnnnnnnnnnnnnnnnnnnnnngacccaccgggctctgccaaggtaaataattcttacggctttatcaagaactttaggtgaaagtggctttnnnnnnnnnccccaaatctgtgaatatgtggcatgaaaatgcagtgagttgggtgccactgacttgactctaccactaagcagtgttaccaccatcatttccacatcatcagtgcaaatgtcaatttgttttttcaggataaccaatggaattcaaaagcctattaccctttgagtattccatcacaactgtgtccgatgcccagattccatgtaaatttttctcgatagattccttgattcaatactgacaatagagtaaagcaggaacacagtcgtgtctaacgactgtcaggcaaagataattttgcagatgaaaaaaacccaaaaccgggtaacggcctatatatttattcccaaggtactgaccctggaatgtgacagtgccagaagggtcccagaatccaaagcaggatccaccaagttcccttaatagtctccacaccataaccttcttacaaagaaatgaaaaacttagaatctccgggaccttttcctttcagctgggaacgcaaaaacccgttttgccctaaaccctttggccctaaagtt

SEQ ID NO: 232348 - DNA, 262 bp, Homo Sapiens
ctagaagttcttaattttaacacagactatttagctctgcttgttgcattaattctttttgtatctggcttaagaaaattttgcctgctctaaggtcatgaagattttcacgtttttctcaaaaagccttattgtttgaacgattatattttgatctatagttcatctggaatagatttttctgtttggtggaagatgaggtcaaggtctccccttttttcccatatggatgtccagttgacccagcactgttattattatt

SEQ ID NO: 232349 - DNA, 886 bp, Homo Sapiens
  misc_feature (70)..(400): n is a, c, g, or t
  misc_feature (422)..(711): n is a, c, g, or t
  misc_feature (721)..(738): n is a, c, g, or t
ttggaaaattataaattaaaaagtttttaaagataaatatcactttacacctacccagaataataaaacnnnnnnnnnnnnnnnnnnnnnnnnnnnnnnnnnnnnnnnnnnnnnnnnnnnnnnnnnnnnnnnnnnnnnnnnnnnnnnnnnnnnnnnnnnnnnnnnnnnnnnnnnnnnnnnnnnnnnnnnnnnnnnnnnnnnnnnnnnnnnnnnnnnnnnnnnnnnnnnnnnnnnnnnnnnnnnnnnnnnnnnnnnnnnnnnnnnnnnnnnnnnnnnnnnnnnnnnnnnnnnnnnnnnnnnnnnnnnnnnnnnnnnnnnnnnnnnnnnnnnnnnnnnnnnnnnnnnnnnnnnnnnnnnnnnnnnnnnnnnnnnnnnnnnnnnnnnnnnnnnnnnnnnnnnntgtagaatactctgcattagtnnnnnnnnnnnnnnnnnnnnnnnnnnnnnnnnnnnnnnnnnnnnnnnnnnnnnnnnnnnnnnnnnnnnnnnnnnnnnnnnnnnnnnnnnnnnnnnnnnnnnnnnnnnnnnnnnnnnnnnnnnnnnnnnnnnnnnnnnnnnnnnnnnnnnnnnnnnnnnnnnnnnnnnnnnnnnnnnnnnnnnnnnnnnnnnnnnnnnnnnnnnnnnnnnnnnnnnnnnnnnnnnnnnnnnnnnnnnnnnnnnnnnnnnnnnnnnnnnnnnnnnnnnnnnnnnnnnnnnnnnnnnnnnnnntctcgtctcnnnnnnnnnnnnnnnnnngctcaataactagatggacatatgggcaagaaggaaaggtcttaaaaacaatgttgactgaaaaaatcaagtaacagaaagagctcaagaccatattaccattatgtaaattacaaacacattacacacaaaataatatatattttac

SEQ ID NO: 232350 - DNA, 407 bp, Homo Sapiens
  misc_feature (68)..(86): n is a, c, g, or t
ggggggggaaatgaaaacaaattttgggggggtaccactatcgcccttggaaacccaaaaaccacaannnnnnnnnnnnnnnnnnnataaaaaaatcctccccggaaaaggggcacctttttgtggggaaaaattgaagaatctctttaaaagaaaatagagggggctggttgtcccgtaaaatcctacaaaggactgggggtttgatttttacccctcggggaaaaaagagtccccgcgattgatagaccaccccaaaaaagggttgggaaatttaaaagattcgtggacctgcgcgccaggctcttaagtgttggagacagcccttttaggttctttccaccattggtgaaacagaacacacgagagcgctcttgaggttagagaaaaataaaaaggaagagaat

SEQ ID NO: 232351 - DNA, 244 bp, Homo Sapiens
  misc_feature (127)..(200): n is a, c, g, or t
gaggggggggtttcctcttttgccccggctgggctggaaatcccgggttcctgaaaaccccccgccctggccccccaaaaggccaggaataaagggttgggcccctggacccaacttaagttgttcnnnnnnnnnnnnnnnnnnnnnnnnnnnnnnnnnnnnnnnnnnnnnnnnnnnnnnnnnnnnnnnnnnnnnnnnnnttttttttgtacttaaatctcccaaaaccccattaaaaaaattt

SEQ ID NO: 232352 - DNA, 824 bp, Homo Sapiens
  misc_feature (416)..(442): n is a, c, g, or t
  misc_feature (463)..(726): n is a, c, g, or t
ttggctcatttggttacaagggacagaaaccagctcaagccagcttaagtaaaataagggaataatatcgttcccctaactccagcatccagaggtacagctgcaagtaggcgtccctggatcccagggttggatggttttcaggtctacccctgaagggctctgttaggaggagagaggtgcagagaagcacacgtccatgacctgtggccatgctggctttgccccaatcctgttgaggctctgtctctaaaatgacatgatggtcttgagaatgttgatttgtgcagaaccaacatgaagccctggcctcttcattctgagatcccattcgggagacagtgagtatcactgtggttatgggttccagtgtcagatggcccgtgtttcagtcccggttctgtatcgtcattccnnnnnnnnnnnnnnnnnnnnnnnnnnngttcttcttgagacggagttnnnnnnnnnnnnnnnnnnnnnnnnnnnnnnnnnnnnnnnnnnnnnnnnnnnnnnnnnnnnnnnnnnnnnnnnnnnnnnnnnnnnnnnnnnnnnnnnnnnnnnnnnnnnnnnnnnnnnnnnnnnnnnnnnnnnnnnnnnnnnnnnnnnnnnnnnnnnnnnnnnnnnnnnnnnnnnnnnnnnnnnnnnnnnnnnnnnnnnnnnnnnnnnnnnnnnnnnnnnnnnnnnnnnnnnnnnnnnnnnnnnnnnnnnnnnnnnnnnnnnnnntgagccactgcgcccggcctcatctcacatctttcttcctctgcagcacacgacacgccctagttggaaacaaagtcggagtttgtggattgggggaa

SEQ ID NO: 232353 - DNA, 875 bp, Homo Sapiens
  misc_feature (240)..(559): n is a, c, g, or t
  misc_feature (721)..(793): n is a, c, g, or t
  misc_feature (805)..(834): n is a, c, g, or t
ttgggctatatctgtaggaaaaagtcttcccccaaaaagccatccataaaattggaagaagtgaatgttacattagatatgcagatatcaagataagggcacagaaaaatgaaaaagcaaggaaacgtgacacctccaaaggttcacaataatttttccataacagataccccaaaaaaggaaatctatgaaatgcctaaaagataattccaagtaacgatatcaaagaaactcagtgannnnnnnnnnnnnnnnnnnnnnnnnnnnnnnnnnnnnnnnnnnnnnnnnnnnnnnnnnnnnnnnnnnnnnnnnnnnnnnnnnnnnnnnnnnnnnnnnnnnnnnnnnnnnnnnnnnnnnnnnnnnnnnnnnnnnnnnnnnnnnnnnnnnnnnnnnnnnnnnnnnnnnnnnnnnnnnnnnnnnnnnnnnnnnnnnnnnnnnnnnnnnnnnnnnnnnnnnnnnnnnnnnnnnnnnnnnnnnnnnnnnnnnnnnnnnnnnnnnnnnnnnnnnnnnnnnnnnnnnnnnnnnnnnnnnnnnnnnnnnnnnnnnnnnnnnnnnnnnnctcagtgagatataggaatacactgataaaaatacaaagagatcaagaaaagaagtcatgatctgaatgagaaattcagcaaaggctagatatcataagaaagaagcaaacagaaatcctggaagtgaagaaatcaaaagaggagaataaaaatatagttcnnnnnnnnnnnnnnnnnnnnnnnnnnnnnnnnnnnnnnnnnnnnnnnnnnnnnnnnnnnnnnnnnnnnnnnnnaaagccacaatnnnnnnnnnnnnnnnnnnnnnnnnnnnnnncctacataatatattgggcaccataaaccaactaaatactc

SEQ ID NO: 232354 - DNA, 310 bp, Homo Sapiens
ttggggcacttggagaagttgagttttgcatttttaaatatttgatggaggatggagatctggggttggaggacgggctgatcagggaatcagaatgaagagagatcaggagctttcactcatactggaatattaaatcctcatgacttgggtttagaaattttttaggttctcaagtagttgggggacctcgacagctctcctttgaaatgaggatgctgaatatgtcgattccatcgatatctcctgatacgaatttcgactctgatgactgaccgtctcctttacgaagaattatacgaaaagcaga

SEQ ID NO: 232355 - DNA, 166 bp, Homo Sapiens
caacctagttattttataaaacgatataaacacacattcaacagggatttcatggtggtggcttctaaagcaggtactggtttggttttccccccgaacacgggagaatatcattccaccatatctattttaaatcttaccgggcgcccccgcccatttaaaaaaa

SEQ ID NO: 232356 - DNA, 441 bp, Homo Sapiens
  misc_feature (82)..(135): n is a, c, g, or t
  misc_feature (144)..(395): n is a, c, g, or t
ttggtcttcccccaggacctgaggattttgcgtccggctccctcctcgcccaggacccccaagctcccagcacgcttctgannnnnnnnnnnnnnnnnnnnnnnnnnnnnnnnnnnnnnnnnnnnnnnnnnnnnngagagggannnnnnnnnnnnnnnnnnnnnnnnnnnnnnnnnnnnnnnnnnnnnnnnnnnnnnnnnnnnnnnnnnnnnnnnnnnnnnnnnnnnnnnnnnnnnnnnnnnnnnnnnnnnnnnnnnnnnnnnnnnnnnnnnnnnnnnnnnnnnnnnnnnnnnnnnnnnnnnnnnnnnnnnnnnnnnnnnnnnnnnnnnnnnnnnnnnnnnnnnnnnnnnnnnnnnnnnnnnnnnnnnnnnnnnnnnnnnnnnnnnnnnnnnnnngtgtgagccaccgcgccaggcctcagcccacttcttttgggtggca

SEQ ID NO: 232357 - DNA, 770 bp, Homo Sapiens
  misc_feature (338)..(346): n is a, c, g, or t
cagcccccaggaattctttatatattctggataccattcccttaacagataggggatttgtaaatactttctccccttctgtaggttgccttttctctctgttaataatattctttaatgcacaagagtttttaattttgacgaagtctaacttagctatcttttcttttgttgcctgtacttttgatataatatccagtaaatcattgccaaatccagtgtcatgaagttgttcctctgtgttttcttctaagaattttatagttttagctcttatgtttaggtctttcatccattttgagttaatttttgtgaatgatataataatccaacttcannnnnnnnngcaagtggatatccagttttcccagcaccatttgtggaaaagactgtcctctccccattgaatagtcttggcatccttgttgaaatcatttgactttctatgtgagggtttacttttgagttctctgttctatcccatttgtctgtatatttgtctttatgacagtactacactgttttgattactgtagctttgtagtaggtattgaaatcgggcctccaattttgtttttgtttttcaagattgttttggctaatctgggacctttgagatgggtttttctatttctgtggaaagtgtcattgggattttgataggagttgcactgaatctgtagatcgtttcggatcagcattgacatcttaacatattaagtctcccactccatgaacacaaatattttttcagtttgttcatgtctttt

SEQ ID NO: 232358 - DNA, 914 bp, Homo Sapiens
  misc_feature (97)..(172): n is a, c, g, or t
  misc_feature (193)..(341): n is a, c, g, or t
  misc_feature (344)..(661): n is a, c, g, or t
ttgggccatccttgctgccttaacttctggcattgctgttgtgccctccaggccatctgctgctgtctttggtcctccatttcttccttcctttacnnnnnnnnnnnnnnnnnnnnnnnnnnnnnnnnnnnnnnnnnnnnnnnnnnnnnnnnnnnnnnnnnnnnnnnnnnnncctcagtgagcatattattgnnnnnnnnnnnnnnnnnnnnnnnnnnnnnnnnnnnnnnnnnnnnnnnnnnnnnnnnnnnnnnnnnnnnnnnnnnnnnnnnnnnnnnnnnnnnnnnnnnnnnnnnnnnnnnnnnnnnnnnnnnnnnnnnnnnnnnnnnnnnnnnnnnnnngannnnnnnnnnnnnnnnnnnnnnnnnnnnnnnnnnnnnnnnnnnnnnnnnnnnnnnnnnnnnnnnnnnnnnnnnnnnnnnnnnnnnnnnnnnnnnnnnnnnnnnnnnnnnnnnnnnnnnnnnnnnnnnnnnnnnnnnnnnnnnnnnnnnnnnnnnnnnnnnnnnnnnnnnnnnnnnnnnnnnnnnnnnnnnnnnnnnnnnnnnnnnnnnnnnnnnnnnnnnnnnnnnnnnnnnnnnnnnnnnnnnnnnnnnnnnnnnnnnnnnnnnnnnnnnnnnnnnnnnnnnnnnnnnnnnnnnnnnnnnnnnnnnnnnnnnnnnnnataaatgcttatctgagcgcctagtatgtgcccagaattgaaggttgatttgaagatacatgcagtagatgttaggcgccattgtttattataacttaatcagcttttcaataccctctgtccctgttttgattggttttagcatgctgactttcacatatcaaagaatcctaggacagggtggaccccaggggtgcagacatggaagaaaaccaaaagcaaagcagaggtccagagattttaaattctgaaa

SEQ ID NO: 232359 - DNA, 877 bp, Homo Sapiens
ttggctaaaagctcttaggggtagcttcaggtacagctggctccaggtgttcatgagctgctctcaggaatgtggctccgaccttctcaggccctgctttcctctgtgctgttgtcattctcagccaggctcttgcctacagttgccactagtatttgaccagcatagcaaccccagtcaaaagaaatggcctctttccctagagtcccagcaaaagcctcaggaaatcctcattggcctatcaccgaaacaactactgtggccagagacctagaatatgcatgtttattcctgagtcacatggctgcgactcaagccacatggactaaaagtgggagggaggtctttctccagaagaaaacggcagtgacttagcgcaaagacctgagggaaggataaaggccaggcagagacaacagctgtcgtctgcagtgctggggagtcggcacccagggaccacacagagctctgagtagtaggggtgcgggtccctcgcaggggttcagcaggcgagcgatacactcagctgtttcactggaggacagggaaggagcttgtggcagacatggttggcaggagccctttgcaataacccaggtgagaatgtgagggctgaactcaatctatgacagtgggaaggaagctggtgccaaagacaacctccaggctgagggtggtgcggtcgccacctctgccctgctccctgctcctagtgtgccccttccaaccttcacgccccacgggagctcagctggtctcctggccaggcagggcctggcccacaccggggtctcaagaacatcgagactcccggcgctgttccaggactcttgagcagcaagggacatttcacaccaccttggcgcgactgcctgtc

SEQ ID NO: 232360 - DNA, 583 bp, Homo Sapiens
  misc_feature (70)..(79): n is a, c, g, or t
tgtacaaacaaagttgaagaaaaaacttaaattgatataattataattatattaatttaaattttgaatnnnnnnnnnnttacttattatggtaaaacacaaattatcagttcattatgattaaattatttaaatggtattatggacttgtattcaacggacagctttccaaaggttcttcgggtgatgttgccaatttattcaacggacagctttcaaatggttcttctcaaagggattcttcttatcaagcttattcgttattgtcttcatggcgttattaattcttaaaaagaattaaggaaagaaggtgcaagcttcttttttgtgtgacaaattaaaaaaatctacttattattataggttagtgtattattcttgaaatttatctgattcagaaacaatttaacaattcttatacttttctcttacaagtggttcggcttcttctggattttcagcttctatacttattaaagttgataaagtttcggtaatttctatggtatcaacttgaaaattgcttgtgtataaggaagcttgacattattattccccaaaaaataaggttattggggttttt

SEQ ID NO: 232361 - DNA, 436 bp, Homo Sapiens
acccagggcaagcaagccctcctggacctcctggtgcccctggcccttgctgggggggtggtggatccactgccattgctgggagtgaatgtgaaagagctggcgggtttgccccccattatggagatgaaccaatggatgtcttaatcaacaccgatgaaataatgaattccctcacttctgttagtggacggataaaaagcctcattaatcatgatggatcgctcacaaacccccctagaaactgcatagacataaaattctgtcatcctgaactcaatagtgaataaaactgggttgacccaaaccaacgatggaaattggatgcaagcaaggtatgcagtaatatggaaactggggaaacatgcataagtgcctgtcctttgaatgttcgtcggaaacactggtggacggattcaattgctgacaaaaaaca

SEQ ID NO: 232362 - DNA, 338 bp, Homo Sapiens
  misc_feature (86)..(185): n is a, c, g, or t
  misc_feature (194)..(280): n is a, c, g, or t
ttgtccccgacaataagatggagttgctctggttcacacacctctgacatgatcattgcccactgcggcttccacctcccgggttnnnnnnnnnnnnnnnnnnnnnnnnnnnnnnnnnnnnnnnnnnnnnnnnnnnnnnnnnnnnnnnnnnnnnnnnnnnnnnnnnnnnnnnnnnnnnnnnnnnntatatatannnnnnnnnnnnnnnnnnnnnnnnnnnnnnnnnnnnnnnnnnnnnnnnnnnnnnnnnnnnnnnnnnnnnnnnnnnnnnnnnnnnnnnaagtgtccaatttctgttaattaaaaaaattaaatttttaaaatttaatgggctgatt

SEQ ID NO: 232363 - DNA, 862 bp, Homo Sapiens
  misc_feature (294)..(352): n is a, c, g, or t
  misc_feature (607)..(663): n is a, c, g, or t
ttggcacaactgctggggtctgttctcgccgcccgcccggcagtcaggcagcgtcgccgccgtggtagcagcctcagccgtttctggagtctcgggcccacagtcaccgccgcttacctgcgcctcctcgagcctccggagtccccgtccgcccgcacaggccggttcgccgtctgcgtctcccccacgccgcctcgcctgccgccgcgctcgtccctccgggccgacatgagtggggaccacctccacaacgattcccagatcgaagcggatttccgattgaatggtgagtgnnnnnnnnnnnnnnnnnnnnnnnnnnnnnnnnnnnnnnnnnnnnnnnnnnnnnnnnnnnggtgccgggcagaggacagacatggcgtcccagagactaagtcccggctcctcgctcaccggccccattgttcccatcgggccgcctcttgaccccctttccggggaccccagctcctccagatcccggccctcccaagaggggacaacggagaccccgtgtcgtccgccaccgggcctcgggcggtctttccgggccgggattcctcccgggaaagtcgccttgtcgacggtcgggacttagtctctgcgccannnnnnnnnnnnnnnnnnnnnnnnnnnnnnnnnnnnnnnnnnnnnnnnnnnnnnnnnggctctttccttgagctgcccagaatgagctttctgcagagcaaagccgtataaatcacatacttcaccagagagggaaggctgggggactgaattattattttttaaactttattttgggggttattcccttttatgcttcatgtttgtttccttttctgctttccagattgaaagatttcctttaggcaactgttaa

SEQ ID NO: 232364 - DNA, 324 bp, Homo Sapiens
  misc_feature (79)..(91): n is a, c, g, or t
  misc_feature (114)..(164): n is a, c, g, or t
  misc_feature (166)..(251): n is a, c, g, or t
ttggatttaaaccctgttgggtgtctactataatccaagaaagccttgattttaccacaaacatgtaaattacaaagcnnnnnnnnnnnnngtttaaaacactgagacaaggtnnnnnnnnnnnnnnnnnnnnnnnnnnnnnnnnnnnnnnnnnnnnnnnnnnngnnnnnnnnnnnnnnnnnnnnnnnnnnnnnnnnnnnnnnnnnnnnnnnnnnnnnnnnnnnnnnnnnnnnnnnnnnnnnnnnnnnnnncatcacacttggattttcattggaaggtttttgggttggaaacataccaagcctgaagccaagtgggtggggg

SEQ ID NO: 232365 - DNA, 901 bp, Homo Sapiens
  misc_feature (208)..(482): n is a, c, g, or t
  misc_feature (609)..(631): n is a, c, g, or t
ttggagcaaatacactgtgggagagtcagcagtgttctccattttattttggtcactagagagactaggatctgaaagaatatgttcctgtttttatatttttcttcatatcattttgaaataaagtcaaaggcatcaattaagaaactgaaaatgttaaaaatgaatttacaaataacaccagatgctaaagattacacaaaagggnnnnnnnnnnnnnnnnnnnnnnnnnnnnnnnnnnnnnnnnnnnnnnnnnnnnnnnnnnnnnnnnnnnnnnnnnnnnnnnnnnnnnnnnnnnnnnnnnnnnnnnnnnnnnnnnnnnnnnnnnnnnnnnnnnnnnnnnnnnnnnnnnnnnnnnnnnnnnnnnnnnnnnnnnnnnnnnnnnnnnnnnnnnnnnnnnnnnnnnnnnnnnnnnnnnnnnnnnnnnnnnnnnnnnnnnnnnnnnnnnnnnnnnnnnnnnnnnnnnnnnnnnnnnnnnnnnnatctgaaatgaggcaaattaggggtggtaaaaagcaaactaggatattatatagaagctaagaaagggcttatgtgagccaaagggcttttgtgactctcaatgaagtaagagggcttctctctcannnnnnnnnnnnnnnnnnnnnnnaagccaattcaggacttcatgtgagagtgtgggtttgcaaggcagattctagaactgggtgtagttatgagtgtcatcctaaagatcaagatgaggcaagtccggggttccgggtaggattgtgagtctgtcgtaaatttgagtttgtatgtgttagttgtaaatcaggacttggctttgagatgaatccacctgggtcagctgggtttttgtgcacgagggacgtcagaagctttgtgtttgtgaggcaaactagggagttagtgtggg

SEQ ID NO: 232366 - DNA, 253 bp, Homo Sapiens
ccttataaaagccaactttgtacaaaaaagttggggaaaagaaagatcgccgttctggtaaagagctggaagatggccatggattcttgaactcgggtgatgctgacattgctgatgtggatcctggcccgcccatgtgtgttgagagcttcacctactaacaccctttggctcgctttgctgttgctgataataaacagacacttacggtgggtggcagcgaaacaaaagacaagaacgctactggagctgg

SEQ ID NO: 232367 - DNA, 372 bp, Homo Sapiens
tgcatgagccactgcacccgatctgtttattttcctttacctcttcaactgtttctcttctgtccagcctctgaaatgctaagttccccagggtttacttctaagcttacttctgtgtatgttctccctgagcagtttcactctcatggctttaaatactatctgtaagccagtgggactccagtgtatattgtttgagcccacatttctagtctaaatatctccaactccctgcttggcatttctgttgagacgttttactagcatctcaaatttaatacctgtgagactgaacttttgatttccaacctactcccctacaattacttcctcctttactgtccttctcagtaaatggcatttctgtccact

SEQ ID NO: 232368 - DNA, 236 bp, Homo Sapiens
  misc_feature (76)..(98): n is a, c, g, or t
cccccaaaaattgttttgggggccttgaattttaaaacaaatattctacccggcatattgcaaaggagggatggcnnnnnnnnnnnnnnnnnnnnnnncccttaagggaactgccttaaaaaggcaaacttcctatggcctgtcaggttatataaaacatacagacacacaacctttttgcttattaaaataaaaacttaatgggacaaaaatgttttccccttttttcaattttt

SEQ ID NO: 232369 - DNA, 290 bp, Homo Sapiens
  misc_feature (56)..(65): n is a, c, g, or t
ttggctaaccactgatctccaacttgggtaaataccttcgacctcttgtctcaagnnnnnnnnnntgaaacggtctgcattattttttctttgttgggtttctgttgataatttgttagattctggaagtttctctgtggtttcttaaatatatatttttttcccttcacatattacttttctgccagtattgttgttgcaggtttaattttgagaccccaatttagtgtccctaatttgccttatctgattggctaactggttttcttattatgaaacatacaattgac

SEQ ID NO: 232370 - DNA, 525 bp, Homo Sapiens
  misc_feature (43)..(159): n is a, c, g, or t
  misc_feature (231)..(313): n is a, c, g, or t
  misc_feature (365)..(434): n is a, c, g, or t
actgtggctacccctatctcttaaaaagcagaagaaaaaaccnnnnnnnnnnnnnnnnnnnnnnnnnnnnnnnnnnnnnnnnnnnnnnnnnnnnnnnnnnnnnnnnnnnnnnnnnnnnnnnnnnnnnnnnnnnnnnnnnnnnnnnnnnnnnnnnnnnnnggttatgcatgtatgctgggaggtgaacagacttaagatttctataacatgtactttgtgcccagatagagnnnnnnnnnnnnnnnnnnnnnnnnnnnnnnnnnnnnnnnnnnnnnnnnnnnnnnnnnnnnnnnnnnnnnnnnnnnnnnnnnnnaatatgacaataataccgatcatgtgggctattagaaggattttatgtgatnnnnnnnnnnnnnnnnnnnnnnnnnnnnnnnnnnnnnnnnnnnnnnnnnnnnnnnnnnnnnnnnnnnnnnaatctgaaatgctctaaaatccaaaactttttggacactgacatgacattcaaaggaaaagctcattggaacataagtataggcagatact

SEQ ID NO: 232371 - DNA, 936 bp, Homo Sapiens
  misc_feature (815)..(844): n is a, c, g, or t
ccgggagggccaatggaaatgttgaagatacgggagaggggatgatggcttgtaccaaggctccagagaagatgggaatgaatgagacggaaggccctgaagaaccagttgaccttggaaaagaaaacatcctctgagacaggagacaagaatatgtaagtttgcaaggtgagaaagggtggtttgaacatttttgaaacttgtttgttttaaatattgaattttttttcaggaattaagtttcttaaaagtccactagaagaggaatatactgattgttgatatctcaggtgtcaggaagtcccaaacatagattcatgtttgagacaaaattcatttggaggcaaaacctgaacatgaggctacacgtagtttttattgaccatgcttcctgtagaaatatcagtatgtttgactatagatgttgctccagaccctgcaagaaataatgcaataattgtgtatttgtatacaaagttaatttatgctacgtagatgaatcttaagaacataatgttgaccaaagaagccagacaaaaataacagtatgattccacatgggacacaaaggaaaagctagaaactgatttccacgcgtcaggctagtggtgaactcaaagacgagagagacgggcgtgtggtatggaaggtggaagagacacaggacggccagagtttttatttttagtcaaatggtgattccatggatgtttgcattctaattattcatgaatctgtatgtttcatgcactttttttctgcaggcctctgagcaacatcatgcactttattggtgttacgtatcgcaataaagnnnnnnnnnnnnnnnnnnnnnnnnnnnnnntttatgggctttgggagtctgatctatgtcggaactttgtgatcttgagcaaataattaacatcccttgaagtattgtgaaggttattgaag

SEQ ID NO: 232372 - DNA, 412 bp, Homo Sapiens
  misc_feature (86)..(110): n is a, c, g, or t
  misc_feature (130)..(364): n is a, c, g, or t
ttggctctgtagtcggggcacaactccattgttggatacatgtgatgtcaaaatcccccactccgtggcttgtcatttcactctcnnnnnnnnnnnnnnnnnnnnnnnnngagatggggccttgctctgnnnnnnnnnnnnnnnnnnnnnnnnnnnnnnnnnnnnnnnnnnnnnnnnnnnnnnnnnnnnnnnnnnnnnnnnnnnnnnnnnnnnnnnnnnnnnnnnnnnnnnnnnnnnnnnnnnnnnnnnnnnnnnnnnnnnnnnnnnnnnnnnnnnnnnnnnnnnnnnnnnnnnnnnnnnnnnnnnnnnnnnnnnnnnnnnnnnnnnnnnnnnnnnnnnnnnnnnnnnnnnnnnnnnnnnnnnnatggctgtaagccatgtcatttcactctcttaatggtgtcttttggtg

SEQ ID NO: 232373 - DNA, 994 bp, Homo Sapiens
gggggaaagaatgagaatctgtctccaaaaataaaatgaatccagggggtccaggagcccccgtgaaccagaaaagagtttgggacttccagtctaaaactgcgtttcacagttttccccttcgtaaaatggagtggctggatccccggaaagcgaacttggaccatggctggaggggaaacctcccaacttggctcctgattccacccggcctccccctccggattcatataacccccccaccctcagcctccttggggataaaacccagaatatgatatccctctggtggggattattgtgcggattgaataaaataaatcctgttaaggcataacaccgtgcttggcacaaaaatgttccttaaatattaactgctattattaaagcacatgctctaaaccagtaagccccctgaccatgtcccaaaagacttatggaaggaaaacaattgaattctcgtccagttggggcccaataattaacaatgcccagtactcttaatcggggctaaaaggcctggcaaaattggccctcacatacagtaccataaagcctttctctcttctctctactatacttatataattcccaatactgcatcactgaacttggctcaaccaatgttatcctcaatgaacataacccccgtcacaccatgtgccctaactcctgaggagaagtgatactctccccactaaagtttatcaaattgggattctgcgtcctacactggaacacctaatcgtggtggtgaactgcaaaccctggactacttaaaactctctcttgtctactataaaatggaaataaactatgaagtctcgcctactgcccaagattctggaagacccatcgggataaaatatcccaatgctggctctcaagtaaccctgcccgcttaataacataaaattaaatttaccaaccttcaaaaagaaaaaccctactgggctccgggctgaccaaatttaaaattcttcagggacacttt

SEQ ID NO: 232374 - DNA, 1003 bp, Homo Sapiens
  misc_feature (81)..(207): n is a, c, g, or t
  misc_feature (404)..(730): n is a, c, g, or t
  misc_feature (794)..(815): n is a, c, g, or t
  misc_feature (849)..(890): n is a, c, g, or t
actttgtacaaaaaagttggcatcatgtgacgatactgcaagaaggcacaatctatgagaaaacaggctctctttatatannnnnnnnnnnnnnnnnnnnnnnnnnnnnnnnnnnnnnnnnnnnnnnnnnnnnnnnnnnnnnnnnnnnnnnnnnnnnnnnnnnnnnnnnnnnnnnnnnnnnnnnnnnnnnnnnnnnnnnnnnnnnnnaagtatctttaatatcacaatgttatagctaatatttaataatataaggtggtgtataggaagcttgcaacagtaaatcaatttttgctccactcattatttttccatttttattgcatcatacacacaaacacacactgactataataacacctgagggctttctcctcaaagaaattcttacagaactttatctnnnnnnnnnnnnnnnnnnnnnnnnnnnnnnnnnnnnnnnnnnnnnnnnnnnnnnnnnnnnnnnnnnnnnnnnnnnnnnnnnnnnnnnnnnnnnnnnnnnnnnnnnnnnnnnnnnnnnnnnnnnnnnnnnnnnnnnnnnnnnnnnnnnnnnnnnnnnnnnnnnnnnnnnnnnnnnnnnnnnnnnnnnnnnnnnnnnnnnnnnnnnnnnnnnnnnnnnnnnnnnnnnnnnnnnnnnnnnnnnnnnnnnnnnnnnnnnnnnnnnnnnnnnnnnnnnnnnnnnnnnnnnnnnnnnnnnnnnnnnnnnnnnnnnnnnnnnnnnnnnnnnnnngaatgttatgtagttcaggacgtttgttgatgatgaattttctcaaatgttgctcaattcaagnnnnnnnnnnnnnnnnnnnnnngacaaattattttgccagatacaaaactcctaannnnnnnnnnnnnnnnnnnnnnnnnnnnnnnnnnnnnnnnnnttttctatcacttaaaatacattatttcaatgtcccatgtcttctatcgttttcaataggaaatcaaacaatagttgtaatgtgttgcttttttcctttaccttgtttccaaa

SEQ ID NO: 232375 - DNA, 728 bp, Homo Sapiens
  misc_feature (56)..(574): n is a, c, g, or t
cctgggaaattcgttgcaaaaagatcattgactaggcatgtagtcatcgttatctnnnnnnnnnnnnnnnnnnnnnnnnnnnnnnnnnnnnnnnnnnnnnnnnnnnnnnnnnnnnnnnnnnnnnnnnnnnnnnnnnnnnnnnnnnnnnnnnnnnnnnnnnnnnnnnnnnnnnnnnnnnnnnnnnnnnnnnnnnnnnnnnnnnnnnnnnnnnnnnnnnnnnnnnnnnnnnnnnnnnnnnnnnnnnnnnnnnnnnnnnnnnnnnnnnnnnnnnnnnnnnnnnnnnnnnnnnnnnnnnnnnnnnnnnnnnnnnnnnnnnnnnnnnnnnnnnnnnnnnnnnnnnnnnnnnnnnnnnnnnnnnnnnnnnnnnnnnnnnnnnnnnnnnnnnnnnnnnnnnnnnnnnnnnnnnnnnnnnnnnnnnnnnnnnnnnnnnnnnnnnnnnnnnnnnnnnnnnnnnnnnnnnnnnnnnnnnnnnnnnnnnnnnnnnnnnnnnnnnnnnnnnnnnnnnnnnnnnnnnnnnnnnnnnnnnnnnnnnnnnnnnnnnnnnnnnnnnnnnnnnnnnnnnnnnnnnnnnnnnccaaccaagtttctgctatcttcagagactcacctaacacataatgattcacataaacttatgataaaggtgtggaaaaagatattccgcaaatggacgctaaagcaagcagattagctgttcttatgtcagacgaaacaaactttaaagcaac

SEQ ID NO: 232376 - DNA, 288 bp, Homo Sapiens
  misc_feature (95)..(220): n is a, c, g, or t
ttggatctgaaacacctaaggaggatggagaaaagttctagatagtatctttgctggctaaagaagttaagacagcatctaagagaagttaaggnnnnnnnnnnnnnnnnnnnnnnnnnnnnnnnnnnnnnnnnnnnnnnnnnnnnnnnnnnnnnnnnnnnnnnnnnnnnnnnnnnnnnnnnnnnnnnnnnnnnnnnnnnnnnnnnnnnnnnnnnnnnnngagccaccacacctggcctttgttaaagggtttttaaatcttcactgactatggctggggttgggttg

SEQ ID NO: 232377 - DNA, 384 bp, Homo Sapiens
  misc_feature (109)..(336): n is a, c, g, or t
tcaacttaatttaccacatataaaagaagtgggagtaagagaaattttcagtcaacaacatgttgtacttataaaaattcaaaagaccacagaaagaatcttagaattnnnnnnnnnnnnnnnnnnnnnnnnnnnnnnnnnnnnnnnnnnnnnnnnnnnnnnnnnnnnnnnnnnnnnnnnnnnnnnnnnnnnnnnnnnnnnnnnnnnnnnnnnnnnnnnnnnnnnnnnnnnnnnnnnnnnnnnnnnnnnnnnnnnnnnnnnnnnnnnnnnnnnnnnnnnnnnnnnnnnnnnnnnnnnnnnnnnnnnnnnnnnnnnnnnnnnnnnnnnnnnnnnnnnccagggtgagaatcaaatcaagaactcaatcccttttacaatagctgc

SEQ ID NO: 232378 - DNA, 161 bp, Homo Sapiens
ttggccccaaccactagcaaattttaaatactcctatgcctgggcatgtttgaaatcgacacctggaaaactaaaacttgttttagttttaaatgctaaggaccagttactacccatacccctgaccctgagcaaacgccaaccccaatgtcaacgtccac

SEQ ID NO: 232379 - DNA, 223 bp, Homo Sapiens
aaacagttttttttagggcctaggccacggggtgactcatggcttggggtgggaattcccctttaagggtcaggaatttttgaaaaacccacccctggccccaactgtggtggaaaccccgcgggggggtgtgggttccgtgtggcccttttaattgcccccttttattcccggggagggttttgaaggccccaatattctctttgtgaaaactccccccgct

SEQ ID NO: 232380 - DNA, 956 bp, Homo Sapiens
  misc_feature (192)..(697): n is a, c, g, or t
ttggcaaagttacgtgctatcacgactcttattcagtgttgcagttgagaacctaaatagtgcagtaagacactctggcattaatattggaaaggaagaatttaaatggtcatgaaggaatagtcacaattgttaaatgtagagaattctatattctacttctagaatatccaaaagaataaactggaccgnnnnnnnnnnnnnnnnnnnnnnnnnnnnnnnnnnnnnnnnnnnnnnnnnnnnnnnnnnnnnnnnnnnnnnnnnnnnnnnnnnnnnnnnnnnnnnnnnnnnnnnnnnnnnnnnnnnnnnnnnnnnnnnnnnnnnnnnnnnnnnnnnnnnnnnnnnnnnnnnnnnnnnnnnnnnnnnnnnnnnnnnnnnnnnnnnnnnnnnnnnnnnnnnnnnnnnnnnnnnnnnnnnnnnnnnnnnnnnnnnnnnnnnnnnnnnnnnnnnnnnnnnnnnnnnnnnnnnnnnnnnnnnnnnnnnnnnnnnnnnnnnnnnnnnnnnnnnnnnnnnnnnnnnnnnnnnnnnnnnnnnnnnnnnnnnnnnnnnnnnnnnnnnnnnnnnnnnnnnnnnnnnnnnnnnnnnnnnnnnnnnnnnnnnnnnnnnnnnnnnnnnnnnnnnnnnnnnnnnnnnnnnnnnnnnnnnnnnnnnnnnnnnnnnnnnnnnnnnnnnnnnnnnnnnnnnnnnnnnnnnnnnnatattttaaaagacaattaggtttaataaaaataaatcaatagcattcctacataataacaatgagatatgaaagctaatggggaactattccatttgaataaaatgaaaataaagcatgcagaaacgaccctcacaaaaatgcgcaaagcttatattttattttaaagaatgtatctattctaagagacataaacaaatgcttcatagagatacatagatgaaagattaagatttctgtaattctttggaaataaatc

SEQ ID NO: 232381 - DNA, 376 bp, Homo Sapiens
ttggccggaagtagacgtggacccccacatcgtggccgtgcgcacccaggagaagatccagatcctcaccctcaactttgcctttgcctccttcatagaccaggtactgttcctggagaaccagatgctgatgctggagaggagctggatgctcctgcagaagacgaatacggctcgaatggacatggagttcatgttctacatctacatccttaaccttaagctggagctggagactctgggcaagcagaagctgaagctggaggttgagcttgtgcacgggctggggctggtggacgacttcaagaatgagtatgaggatgatatccatacgcatatggagatggaaattgactttgtcctcatcgatatggat

SEQ ID NO: 232382 - DNA, 531 bp, Homo Sapiens
  misc_feature (132)..(416): n is a, c, g, or t
  misc_feature (418)..(437): n is a, c, g, or t
acaaaaaagttggctttaccagttcattgattctacaaatatttattgtgttttctgaatctttattaatttatcaaatcagtctttattaaatgaacaaatgagttttagaacgggggaaaaaattgcatnnnnnnnnnnnnnnnnnnnnnnnnnnnnnnnnnnnnnnnnnnnnnnnnnnnnnnnnnnnnnnnnnnnnnnnnnnnnnnnnnnnnnnnnnnnnnnnnnnnnnnnnnnnnnnnnnnnnnnnnnnnnnnnnnnnnnnnnnnnnnnnnnnnnnnnnnnnnnnnnnnnnnnnnnnnnnnnnnnnnnnnnnnnnnnnnnnnnnnnnnnnnnnnnnnnnnnnnnnnnnnnnnnnnnnnnnnnnnnnnnnnnnnnnnnnnnnnnnnnnnnnnnnnnnnnnnnnnnnnnnnnnncnnnnnnnnnnnnnnnnnnnngaaagaaaagaaaagaaattgcacatgcacttactggaagatgaaatgtgtattttaaaaataaagagtccttgaatcttaaattcagctaatt

SEQ ID NO: 232383 - DNA, 933 bp, Homo Sapiens
  misc_feature (226)..(462): n is a, c, g, or t
  misc_feature (580)..(627): n is a, c, g, or t
  misc_feature (643)..(755): n is a, c, g, or t
  misc_feature (831)..(893): n is a, c, g, or t
tgtacaaactggctgtactggagtctggagtctccaaaatggtggtctgtaagagataggtaaataaactggacagactgaacatagccatttccaaataatgaaactttttccctctccactactacataaagcccttttgtgagcttcatattaacattgccctttgaagaaagcccaagttagtaatctttttagattgaccatctttttttcttctcaggtnnnnnnnnnnnnnnnnnnnnnnnnnnnnnnnnnnnnnnnnnnnnnnnnnnnnnnnnnnnnnnnnnnnnnnnnnnnnnnnnnnnnnnnnnnnnnnnnnnnnnnnnnnnnnnnnnnnnnnnnnnnnnnnnnnnnnnnnnnnnnnnnnnnnnnnnnnnnnnnnnnnnnnnnnnnnnnnnnnnnnnnnnnnnnnnnnnnnnnnnnnnnnnnnnnnnnnnnnnnnnnnnnnnnnnnnnnnnnatgcgtgtgaaccactgcacttggccactgccactgtcttttgatagtttactgaactgtcttttgcactgtcttttgatagtttactgaaataagtaggttgagaagaatccattcnnnnnnnnnnnnnnnnnnnnnnnnnnnnnnnnnnnnnnnnnnnnnnnnaaatgtagagcgtctnnnnnnnnnnnnnnnnnnnnnnnnnnnnnnnnnnnnnnnnnnnnnnnnnnnnnnnnnnnnnnnnnnnnnnnnnnnnnnnnnnnnnnnnnnnnnnnnnnnnnnnnnnnnnnnnngtgcatggcactgcactgcacctggctaattttgtttttttgtagaaatggggtcttgctttgttgctcagttggnnnnnnnnnnnnnnnnnnnnnnnnnnnnnnnnnnnnnnnnnnnnnnnnnnnnnnnnnnnnnnnatgagccaccgcccccagacctaaatcaattactaataaa

SEQ ID NO: 232384 - DNA, 773 bp, Homo Sapiens
  misc_feature (335)..(493): n is a, c, g, or t
  misc_feature (661)..(671): n is a, c, g, or t
accctctggtatagggcactaagggtttggaggtgagattttgtgcttgctacctgatagtttgcctcttctacacaaaccaaaactggggaggaggagatcaccaagcccccaagctgaagtatatctgttaaaaagaccttgtacctagtctgtcagtccaaagcttcatataacttcacaaagtgtaaagctcaatgttaatttaacaaactagttaatcaaatttcctatactcctggcaaacttatttctctggtttatcagacaggacagattcttaggtttccataggcatcacagctatggcctttgtcattaagagttaaaaatcnnnnnnnnnnnnnnnnnnnnnnnnnnnnnnnnnnnnnnnnnnnnnnnnnnnnnnnnnnnnnnnnnnnnnnnnnnnnnnnnnnnnnnnnnnnnnnnnnnnnnnnnnnnnnnnnnnnnnnnnnnnnnnnnnnnnnnnnnnnnnnnnnnnnnnnnnnnnnnntcagattactgcattgtttaataaggaaaaaagatttccatctaaaaagttaagagctttagtattcagaagattttagcttgttagtcctctggaaaacttacttaagtacaacctcaagataattttttacatgtagaagaaaaagattaagtcaaaagtacaagnnnnnnnnnnngtttggcatgtttgcatgccaaatatgaaatatttggaatatatttagaaaatgtgaaacaggacaaatgcatagtcatcctagagattatattattttaaa

SEQ ID NO: 232385 - DNA, 138 bp, Homo Sapiens
gcacaatgatgagcatgctttcttatatgcactttgtacagagtgggctcgctccagtgctagactacagcgtgagcacgtgcagctacatcttaaataatttaagaaatacggctccactagcaaagttgccaaaaa

SEQ ID NO: 232386 - DNA, 495 bp, Homo Sapiens
  misc_feature (126)..(135): n is a, c, g, or t
  misc_feature (146)..(290): n is a, c, g, or t
  misc_feature (337)..(405): n is a, c, g, or t
aaaaaaacctttccctttcagggggaattccttaaaaggggaaaaattaaggggttttttcctggtttcccccgggggaaaattggccccccaaaggacaccaaggggaaaaaacggggggggaannnnnnnnnnactggaaaaannnnnnnnnnnnnnnnnnnnnnnnnnnnnnnnnnnnnnnnnnnnnnnnnnnnnnnnnnnnnnnnnnnnnnnnnnnnnnnnnnnnnnnnnnnnnnnnnnnnnnnnnnnnnnnnnnnnnnnnnnnnnnnnnnnnnnnnnnnnnnnnnccccccttttttggggtttaaacaaaaaagggaggccttttggggcnnnnnnnnnnnnnnnnnnnnnnnnnnnnnnnnnnnnnnnnnnnnnnnnnnnnnnnnnnnnnnnnnnnnnccccggcctttaccttttcaaaacccccggggccaaaatgtccaaaaaaccctggggggtggaaaaaaattaacgggggaaatattttcc

SEQ ID NO: 232387 - DNA, 168 bp, Homo Sapiens
  misc_feature (97)..(115): n is a, c, g, or t
cccttttgaaagggacccgggccctggggcccaggcgggaaaacaggggccaacccccggggccctgcacccccggcctggggggttcaagcaattnnnnnnnnnnnnnnnnnnnataaggggggattacggggggccaccccccactaggctattttttgtattttt

SEQ ID NO: 232388 - DNA, 891 bp, Homo Sapiens
  misc_feature (217)..(366): n is a, c, g, or t
  misc_feature (418)..(528): n is a, c, g, or t
ttggctttacaaaagagagaggaaactaataaccagtacccccatctgaaaaagggctagtgccttggccaagcagtgtataaaaagaagaaatataagtagcttattagtgggtaaagagcatttggcttgaaaatgatttttaagatgcaaattagtaccatcatctggtttagtcatccaacaagaagaaataaatatgaaattccagcaatannnnnnnnnnnnnnnnnnnnnnnnnnnnnnnnnnnnnnnnnnnnnnnnnnnnnnnnnnnnnnnnnnnnnnnnnnnnnnnnnnnnnnnnnnnnnnnnnnnnnnnnnnnnnnnnnnnnnnnnnnnnnnnnnnnnnnnnnnnnnnnnnnnnnnttgtcttggtgcagctgggactacaagtgcacaccagtatgcccagctaatnnnnnnnnnnnnnnnnnnnnnnnnnnnnnnnnnnnnnnnnnnnnnnnnnnnnnnnnnnnnnnnnnnnnnnnnnnnnnnnnnnnnnnnnnnnnnnnnnnnnnnnnnnnnnnngtgtgagcatccagccagaaaatgatttgctttctagacccatatcacctctctccatctacatctctagtatttaaattcaacacaattctagatagctgaaacagcccaaaatatgtgtttagaatacttagagtttgttataaataaccctctgtttagaatttgcccagtgaaattctctaataatacttaaaactctttactaaagttgaattttccttttttttcattgaaatagcaaaggtagtaatctgtattggtcaaagaaacgagataattcctagatctctgttttagaccagtagacctaactgtgctttcttaacttggatgttacatgaaacttaaaaacaaacaaat

SEQ ID NO: 232389 - DNA, 916 bp, Homo Sapiens
  misc_feature (329)..(345): n is a, c, g, or t
  misc_feature (352)..(622): n is a, c, g, or t
ttggcttgtctcaataacagtttttaaataaagatctttggggaaaataatttatcaaatatagtcttgttgctaaacatatttttagagtttttcatagagtttattgtagaattagaaactacaatttggggttttttaaatgatgatcactttatgtagctttaagccattatggtcatgtaagcttctatagtggcatcattaaagaactgacccgttaaacaagacttatttcccagactgcagtctacttaaaatgccccctcatcttctagcttaagagaccacttccttaacaactactgtcattctctatgaattatgannnnnnnnnnnnnnnnngagacannnnnnnnnnnnnnnnnnnnnnnnnnnnnnnnnnnnnnnnnnnnnnnnnnnnnnnnnnnnnnnnnnnnnnnnnnnnnnnnnnnnnnnnnnnnnnnnnnnnnnnnnnnnnnnnnnnnnnnnnnnnnnnnnnnnnnnnnnnnnnnnnnnnnnnnnnnnnnnnnnnnnnnnnnnnnnnnnnnnnnnnnnnnnnnnnnnnnnnnnnnnnnnnnnnnnnnnnnnnnnnnnnnnnnnnnnnnnnnnnnnnnnnnnnnnnnnnnnnnnnnnnnnnnnnacccaagatcccatagttctattccaaagaaaagaaccctctcatgaaaaacagctttcctccctgttcctcactaactgttccctcgctgcctttctgcagatcattagtagaatcctggaccttctcattgacaaaagcagatttgttacttgttttactgtttaaatgagataccatatagaggtgctttagctgaatcctgggtacagagttggccttgaacaaacatgagtccttctcttgcctccaagaattcatcagtatttatcacataatcactgtcatttgctc

SEQ ID NO: 232390 - DNA, 695 bp, Homo Sapiens
  misc_feature (227)..(276): n is a, c, g, or t
  misc_feature (285)..(299): n is a, c, g, or t
  misc_feature (317)..(433): n is a, c, g, or t
  misc_feature (440)..(536): n is a, c, g, or t
ttggataaaatggaaagtaccactgagataagtttaataccagaataaatgcatattatactcgaatgcttacaatatgagaatatagcaacagcctgttttgccttaccaggacatcaagaatctgatcagtttcacaccttttactggcatatagtaatagaggatggaaagataaggtctcaaatactgtgatctggccaggcacagtggctcatatctgaatnnnnnnnnnnnnnnnnnnnnnnnnnnnnnnnnnnnnnnnnnnnnnnnnnnaagggatcnnnnnnnnnnnnnnngagacaaagttttgctgnnnnnnnnnnnnnnnnnnnnnnnnnnnnnnnnnnnnnnnnnnnnnnnnnnnnnnnnnnnnnnnnnnnnnnnnnnnnnnnnnnnnnnnnnnnnnnnnnnnnnnnnnnnnnnnnnnnnnaaggaannnnnnnnnnnnnnnnnnnnnnnnnnnnnnnnnnnnnnnnnnnnnnnnnnnnnnnnnnnnnnnnnnnnnnnnnnnnnnnnnnnnnnnnnnnnnnnnntgagccactgtgcccggccatgcgggactaactttctatcagagtcaccatcctgggaaaagttaggtttccgtcattcacacccacatctcctgctgccttgcaggaccccgtgcagatgggagaggcgtagtcaggaccagaaaccccccgcccact

SEQ ID NO: 232391 - DNA, 675 bp, Homo Sapiens
  misc_feature (96)..(148): n is a, c, g, or t
  misc_feature (224)..(350): n is a, c, g, or t
  misc_feature (418)..(447): n is a, c, g, or t
atgcttttttattttgccaactttttactaaaaagttggcagacggacaggcatacggacaggcaggcagacggacaggcagataggcatacggannnnnnnnnnnnnnnnnnnnnnnnnnnnnnnnnnnnnnnnnnnnnnnnnnnnntatggataggcagatggacagatggacaggcagacagacaggcagacagacaggctggtagactgatttgctgacnnnnnnnnnnnnnnnnnnnnnnnnnnnnnnnnnnnnnnnnnnnnnnnnnnnnnnnnnnnnnnnnnnnnnnnnnnnnnnnnnnnnnnnnnnnnnnnnnnnnnnnnnnnnnnnnnnnnnnnnnnnnnnntagtcatctgtgtgcaatcctcacaggagggcccctgggtgctgagggtgctgtgagtcctcacctgnnnnnnnnnnnnnnnnnnnnnnnnnnnnnngggtcgctgtggctggcaggggggcatgcctctgggcagctagctgcctctcacatctggttggggctgcacagctggggcaatgcagtcctggtgtgtgtgtacgctcctccgagggcagctgagtggcagagcagcagagcctggggcgtcctggccagtggtgtgtcctcccctgaagctgtctcctctgagtctcttggtcctaggtatatatagggagctgtg

SEQ ID NO: 232392 - DNA, 110 bp, Homo Sapiens
ctcaacttttcttgtacaaaagtggcattataagaaaagattgctttatcaaattgttgccaccgaacaagtcactatcagtccaaaataaaatctatattttgccatcc

SEQ ID NO: 232393 - DNA, 193 bp, Homo Sapiens
  misc_feature (52)..(110): n is a, c, g, or t
tttgtacaaaaaagttggcgctcgctcacccgccgccaccacacggagcagnnnnnnnnnnnnnnnnnnnnnnnnnnnnnnnnnnnnnnnnnnnnnnnnnnnnnnnnnnntcgcagccggtagcgcgccagcgccgtaggcgctcgctcggcagccgcggggccctaggccgtgccggggagggggcgagggc

SEQ ID NO: 232394 - DNA, 695 bp, Homo Sapiens
  misc_feature (332)..(383): n is a, c, g, or t
  misc_feature (491)..(500): n is a, c, g, or t
ttggattcaatgagatagatggaagaagtcaccattcctgcctttcctggagaaatcagactggaatattgaacagagattctcatatgactgcccaaacatatactctctatccagaaaatagtcgagtatggacctgagtaacaaaagcccttgagcagccaaaataagcagcaaatctcttttttaaggcccatgtacattactattaaacaaggctctgacatgttcattccattcattcttgtttaatatacatatattttaaatgaaacaaacttttaaactaaaataatacctatttatcctagggcaagcaagaagtcagagcnnnnnnnnnnnnnnnnnnnnnnnnnnnnnnnnnnnnnnnnnnnnnnnnnnnncacttattacatattggttgaacagacgaatgatagggttagtgaaggagggagacgattctagctgacgaattattcagatgttagtaacacccccaaatggagtcnnnnnnnnnngtggcactctcttagcattgtgtatatgttgatatagtgcttacaatgctgtaatacaattctttattttcatatttattgcttcccatagtattattcaagagaagtaccatgcagttttttagactcgtgttaagcacagtgcacagaatacgtagccacctacagaaagatgaaagatcaatgtatgtttga

SEQ ID NO: 232395 - DNA, 135 bp, Homo Sapiens
  misc_feature (62)..(88): n is a, c, g, or t
cattaaaaagcgactttgtacaaaaaagttgggcacaactttgcctcttataaaagttgggnnnnnnnnnnnnnnnnnnnnnnnnnnnaaacttgcaatgtttgtctttattttgttctttatattttcaaagtg

SEQ ID NO: 232396 - DNA, 892 bp, Homo Sapiens
  misc_feature (248)..(323): n is a, c, g, or t
ttggctgcaatattttacattcctaccagcaatgtacacatgtcaatttctctacctccttgcccacacttgctattttctttcttttcttatcccatcttagttggtgtccttttggtttgtatttctctaaccagtaatgatattaagcatcttttcatgtgcttattggccatttgtatgtctttatagaaatgtctattcaaattcattgcccctttttaaattagttatttatttatttattnnnnnnnnnnnnnnnnnnnnnnnnnnnnnnnnnnnnnnnnnnnnnnnnnnnnnnnnnnnnnnnnnnnnnnnnnnnnctgtcaagtaaggaagttgataaataagaaaaactagttatgtaaaatagcattaagttattaatttactttaaggagatgttattcactaattatttttaaacaaaaacgaacttcagttggaaactagaaattactaaaaactttgttcaacatattagtaaataatgccagctgtacatgaactgacaactatctgatttatatgttgctattctttctttattttaggtgtggaaattaaaagaacacacatattttgactggggctttgatcaaccaaatgctaaaaagccacataaagaagatccctaatagtcatttctcaacaattatatagtcaactgatgtaacaatggtactaatattgggacgcagactaaacagagaggatcttggggtgcgtgattccccagcaactaagcgaaaagtttttgaaatggaccccaaatctctgacaggtcatgagttttttgacttctcttcagatcatcccatgccgaaaacatactccagatatttaatgaatttcgtgatagccgcttattcacagatgttatcatttgtgt

SEQ ID NO: 232397 - DNA, 768 bp, Homo Sapiens
  misc_feature (696)..(708): n is a, c, g, or t
tgtacaaaagttggcgtgtacaagatagttgggttgcgggcggcacagagcaagcgaggcacgagagcaggccgaccatctaccgtgtgaagaaccaacttttgctttattgggcgttcacgggcaattgacccagaatttcttagggatagatacccccaaaactgtgtttttcaccaaaatatttggcccccaagaggggtggtcaacaaaaaaagaagaccttctcgcgctccccctttttccacttttaaaaagaaagttcccccctctgggggtcacaacacattttccagagataaaagaccaccattcctaagctcgaccctgtgttaagacacccacggcacggggattatccagttcggaacacaggtcatgttctttgaccagtctcttaaggaacttcttgtaagagaccccaaaccacgccacggtgaaactgcctaccagccccgaaagaccgccggttttaactgtgtttttaaagacaacaccaaagaccccgaaatctgaggaccgggtcagggaaaacaggaaaccaacgtgatactgaagctcgcaagtgtctctaaaatgtagaacaaaaatgtgtttatctccctgtgtacaattctctcaaagcgagggagggacagacccccgcttgtttatctcccacataatttctttatagagggcgctctctctctaagnnnnnnnnnnnnncacccgaaaaccaagagaccccacacccccactatctcccaggagcaaggggaaaagacc

SEQ ID NO: 232398 - DNA, 911 bp, Homo Sapiens
  misc_feature (48)..(150): n is a, c, g, or t
  misc_feature (202)..(507): n is a, c, g, or t
  misc_feature (510)..(522): n is a, c, g, or t
  misc_feature (674)..(845): n is a, c, g, or t
ttggcatagatcaaatttcaacatgaggttcagggaagcaaacatctnnnnnnnnnnnnnnnnnnnnnnnnnnnnnnnnnnnnnnnnnnnnnnnnnnnnnnnnnnnnnnnnnnnnnnnnnnnnnnnnnnnnnnnnnnnnnnnnnnnnnnnggaggtgtaatgattcaattgtggaatgaggaatgtgacaaaacaatgtgannnnnnnnnnnnnnnnnnnnnnnnnnnnnnnnnnnnnnnnnnnnnnnnnnnnnnnnnnnnnnnnnnnnnnnnnnnnnnnnnnnnnnnnnnnnnnnnnnnnnnnnnnnnnnnnnnnnnnnnnnnnnnnnnnnnnnnnnnnnnnnnnnnnnnnnnnnnnnnnnnnnnnnnnnnnnnnnnnnnnnnnnnnnnnnnnnnnnnnnnnnnnnnnnnnnnnnnnnnnnnnnnnnnnnnnnnnnnnnnnnnnnnnnnnnnnnnnnnnnnnnnnnnnnnnnnnnnnnnnnnnnnnnnnnnnnnnnnnnnnnnnnnggnnnnnnnnnnnnngtatgaaacaaccttactaaagaaggttgagggaatagtaactccaatagagtttgtgatactaaaggcaaagaactgtacatagctattatattctggttgataaaatagtttaccacaggggttggataaaaagtttgaatactcttatnnnnnnnnnnnnnnnnnnnnnnnnnnnnnnnnnnnnnnnnnnnnnnnnnnnnnnnnnnnnnnnnnnnnnnnnnnnnnnnnnnnnnnnnnnnnnnnnnnnnnnnnnnnnnnnnnnnnnnnnnnnnnnnnnnnnnnnnnnnnnnnnnnnnnnnnnnnnnnnnnnnnnnnnnnnngaaaaattggtaacaaaagaaatatttacagaaatgcgtatgtacacatactagtatacacacctg

SEQ ID NO: 232399 - DNA, 714 bp, Homo Sapiens
  misc_feature (205)..(481): n is a, c, g, or t
  misc_feature (487)..(529): n is a, c, g, or t
  misc_feature (614)..(623): n is a, c, g, or t
ttggagaagaataaacatatgtttaacccacacttaaagaatggggagcatgaaacccacacttaaagaatggggaaaatagagattgagatcgaggaagataaaatgagaggtggaagagaatgagggaggactggttttggttggctgcctccaaaaactcctctctttttctctactgcatcaaaatctttccagacactannnnnnnnnnnnnnnnnnnnnnnnnnnnnnnnnnnnnnnnnnnnnnnnnnnnnnnnnnnnnnnnnnnnnnnnnnnnnnnnnnnnnnnnnnnnnnnnnnnnnnnnnnnnnnnnnnnnnnnnnnnnnnnnnnnnnnnnnnnnnnnnnnnnnnnnnnnnnnnnnnnnnnnnnnnnnnnnnnnnnnnnnnnnnnnnnnnnnnnnnnnnnnnnnnnnnnnnnnnnnnnnnnnnnnnnnnnnnnnnnnnnnnnnnnnnnnnnnnnnnnnnnnnnnnnnnnnnnatctcnnnnnnnnnnnnnnnnnnnnnnnnnnnnnnnnnnnnnnnnnnnagaaaaggaagaaaggaaggatggacagacggactttaggtctagaagaactactaaagaaattttttaaacacccggccagcgnnnnnnnnnnaagtatataatttgaacataaaatagtgatctctttacaactgctctgactcacaaaaagccaaatacattatgataatgaaaggaaatca

SEQ ID NO: 232400 - DNA, 448 bp, Homo Sapiens
  misc_feature (75)..(170): n is a, c, g, or t
tgtacaaaaaagttgggttcctcttcccactaaaaaagggcacaaagcttgcgccctgaggggcggccggcacgnnnnnnnnnnnnnnnnnnnnnnnnnnnnnnnnnnnnnnnnnnnnnnnnnnnnnnnnnnnnnnnnnnnnnnnnnnnnnnnnnnnnnnnnnnnnnnnngcaccccggccccggtcccccgggccatgcatcctcagccccgagggcgcccgacgcgcaaccgaagaaatgaagctccgcaaaggtaccttcctgacgcagctggtcttctgcctgtgcaccatcctctcgctgtcctggtacacggcaataatctgctttaaaggcaacgttgtggacgtttaccagcgggagttcccggcgctgcgcaatcagatgcacgcacccgagcaggaaaacctcagacgatccaagtatctcatcatggtgctggacga

SEQ ID NO: 232401 - DNA, 739 bp, Homo Sapiens
  misc_feature (192)..(568): n is a, c, g, or t
tgtacaaataacttgtctagggttcaccactgacaatggggcaaagccaagattcaaaagctctcagttcagctctagagcctgagcactccatcactattgaatatcgcctctccaaaaaacattaaatatactcatcatcattcatcattcaatatcaaaaaatgtgaattaaaataacggtgaagtatnnnnnnnnnnnnnnnnnnnnnnnnnnnnnnnnnnnnnnnnnnnnnnnnnnnnnnnnnnnnnnnnnnnnnnnnnnnnnnnnnnnnnnnnnnnnnnnnnnnnnnnnnnnnnnnnnnnnnnnnnnnnnnnnnnnnnnnnnnnnnnnnnnnnnnnnnnnnnnnnnnnnnnnnnnnnnnnnnnnnnnnnnnnnnnnnnnnnnnnnnnnnnnnnnnnnnnnnnnnnnnnnnnnnnnnnnnnnnnnnnnnnnnnnnnnnnnnnnnnnnnnnnnnnnnnnnnnnnnnnnnnnnnnnnnnnnnnnnnnnnnnnnnnnnnnnnnnnnnnnnnnnnnnnnnnnnnnnnnnnnnnnnnnnnnnnnnnnnnnnnnnnnnnnnnnnnnnnntattatattgtacttttcagatgagcaaaaatgtaaacaattgttaatgttcatggttggcaagagtgtgaagtcatggggatccttgcatcacaagttcttaaaaactgcacatgccttgccctagtaattcactttatagaacttaatttaagaaaatagatgggcatg

SEQ ID NO: 232402 - DNA, 719 bp, Homo Sapiens
ttggaaactgggagagaaatatcttacgaaaaaggctagtgatagggaaggaattgactgatatacagctgttgtgaggatgaatgattctggagacaaactgaaacttgaccggactcatttatagacagaaattccatcccccggaaaaagaattctatctttatttggaggctacctaggaaatgaaggaaccctagaatccatccatgagaaaactttttcttctactatcgtccttgaatctggccctttattaggacggacagttaaaggaattcattatgaagacatttctttccttgcctgacttagattatttgttagctatacattaaaatcttacagcatccaattggtgttcgcccaggcattatgaaactcaactgtgtgagggtatattcttttgtatgaaacaaacaggtttttgaaaatattactgtatggttagttgttcggctaacctttgataaaaattaaattatgtctcatgaggtatcaaactatgtaattttgtccgtgttagttttgtttcctttgtaagttacttgatgagttaatatcttcattaaataatgatagtatatagtgtttgatctatgacagattataatcatgcaagtggaggaaatacttcatacactctatatattctttagtagagtaataaagatgaactctatctgtgagtgacttttatatgtcagactatatatata

SEQ ID NO: 232403 - DNA, 919 bp, Homo Sapiens
  misc_feature (224)..(596): n is a, c, g, or t
  misc_feature (612)..(657): n is a, c, g, or t
  misc_feature (813)..(824): n is a, c, g, or t
ttggctcacaccttagcctcccaagtagatgggattataggcgtgagccactgcacgcagcctatttttctatttctatctacaattgaaattcttttattgttttggtattaaacatgatgttgacatttgttttgagataaatacattgtattaagaaagtatttttctagtcttatttaataagaagtatatgttgaacttatgacattcatttgaacatnnnnnnnnnnnnnnnnnnnnnnnnnnnnnnnnnnnnnnnnnnnnnnnnnnnnnnnnnnnnnnnnnnnnnnnnnnnnnnnnnnnnnnnnnnnnnnnnnnnnnnnnnnnnnnnnnnnnnnnnnnnnnnnnnnnnnnnnnnnnnnnnnnnnnnnnnnnnnnnnnnnnnnnnnnnnnnnnnnnnnnnnnnnnnnnnnnnnnnnnnnnnnnnnnnnnnnnnnnnnnnnnnnnnnnnnnnnnnnnnnnnnnnnnnnnnnnnnnnnnnnnnnnnnnnnnnnnnnnnnnnnnnnnnnnnnnnnnnnnnnnnnnnnnnnnnnnnnnnnnnnnnnnnnnnnnnnnnnnnnnnnnnnnnnnnnnnnnnnnnnnnnnnnnnnnnnaaaatctaaagggctnnnnnnnnnnnnnnnnnnnnnnnnnnnnnnnnnnnnnnnnnnnnnngttgcccaaaatgaactatttctaaattctttgcaatatgtgaaaatagattgtgtttattcaaactagagggaaaagtacatcatgttttgttgaactgcaaagaaaattcacgaaatttttcctgatgactgtgaacattcacttaaaatacannnnnnnnnnnnacatctttaaaattatacatatagttactttcatttctggcaacatggtacacactccatatcctgggggggtggggaaaggccccataaaaaac

SEQ ID NO: 232404 - DNA, 878 bp, Homo Sapiens
  misc_feature (368)..(542): n is a, c, g, or t
ttggcttgatctaaaaagtattattacagatatttataattattaaatttattatgcaaaataatattggaaatttatcttttaaaatgggtgaggctgatggtttccctttttattcatttagttcatctattcattaatctgtattacctgaatgaaactttcagaacaattttactctttcttaaaaattgacacataacaattgtacatatttatggagggaaatttctttttaaacttttttgttagataccagtgctgacaaatcctggttacattctaaatagataaatatggaaatagttttgctatagtattatcatacaattctttttttatttgagacagaatctcactctgtctannnnnnnnnnnnnnnnnnnnnnnnnnnnnnnnnnnnnnnnnnnnnnnnnnnnnnnnnnnnnnnnnnnnnnnnnnnnnnnnnnnnnnnnnnnnnnnnnnnnnnnnnnnnnnnnnnnnnnnnnnnnnnnnnnnnnnnnnnnnnnnnnnnnnnnnnnnnnnnnnnnnnnnnnnnnnnnaaatgttttttttaaacaagaatctctcaggcatactgaaatgttgaagaggaaattatattaatatctgggacttgtttccaaatttggaattggggcagggtgtaaattgttggcaatatcaaagaaacgaggagttggaatgataattgtagaagctgcatgatagatacacattctttatacttctgtatatgttgaaattttttatcaaattataattgtgtataatgactaattatgctttcattgtctattctgtgtggttatgttacttgctgaaataatacataaagagtcttcaacttaaatgacttatcaagcataaatattaaa

SEQ ID NO: 232405 - DNA, 442 bp, Homo Sapiens
cacacaccgaacgccccacagacagccaaacattcattacccagcctgccatttctttctcaaagaatgtcaacaaacaatctttgctctgcctttgaacgatctctgaccgcccactcttctaattattcattctcaacaaaaaagagagtgaacacacctaacacacactcttcttctcccacctcactctccgaatgtacccacccctaaatcattcgctcgctctcaaaaagcatgtttttataaatctttttgtttgtcgctctctcgactgccttcctctctcgtcatacttagcctgtgccctccccttacccttacttatgcttacttacctgaaacattccaagagactgtaccttcctagctacagttatttaaccttgaatgcaataaagaaagtaacaaacataagtcaatatatatttttaactgtcac

SEQ ID NO: 232406 - DNA, 386 bp, Homo Sapiens
ttggcccccactgaggctccttgctctgcttctggggcggcgcttgctctgggtcccgggatccgatggggatagtgtgatgacacgaactccactctcctcacctgtcctgcttggactgccggcctcgatctcctgcccggctagtctaagcctcgtaccccatgatggaaaggactacttgagttggcttcgcctcaggccaggccagcctcccctactccaattttattttatttcaattcggttctctggggtcgcgtaccgaatcaatgccatgggggcggggacagatttcattttaaaaatcaactcggtggaatgtaaggatatgagggtttattacagtatggcatgtacagtattgaattcttttggtttgggga

SEQ ID NO: 232407 - DNA, 129 bp, Homo Sapiens
ttggatcgaaggaagtgatgggaaggatgcggatgagaagaatgagataagcgagagtgaagagaacaagactaaagagagcaatgatgagaataatatcatccctgccctggcagggggtggcgttac

SEQ ID NO: 232408 - DNA, 925 bp, Homo Sapiens
  misc_feature (111)..(171): n is a, c, g, or t
  misc_feature (173)..(671): n is a, c, g, or t
tacaaaaaagttggctcatcacagtcgttcagaggcagatcagagtctgtctggagagagagggtgggcaggggcaggagggacgggcgacagaggggcacatggcttcannnnnnnnnnnnnnnnnnnnnnnnnnnnnnnnnnnnnnnnnnnnnnnnnnnnnnnnnnnnntnnnnnnnnnnnnnnnnnnnnnnnnnnnnnnnnnnnnnnnnnnnnnnnnnnnnnnnnnnnnnnnnnnnnnnnnnnnnnnnnnnnnnnnnnnnnnnnnnnnnnnnnnnnnnnnnnnnnnnnnnnnnnnnnnnnnnnnnnnnnnnnnnnnnnnnnnnnnnnnnnnnnnnnnnnnnnnnnnnnnnnnnnnnnnnnnnnnnnnnnnnnnnnnnnnnnnnnnnnnnnnnnnnnnnnnnnnnnnnnnnnnnnnnnnnnnnnnnnnnnnnnnnnnnnnnnnnnnnnnnnnnnnnnnnnnnnnnnnnnnnnnnnnnnnnnnnnnnnnnnnnnnnnnnnnnnnnnnnnnnnnnnnnnnnnnnnnnnnnnnnnnnnnnnnnnnnnnnnnnnnnnnnnnnnnnnnnnnnnnnnnnnnnnnnnnnnnnnnnnnnnnnnnnnnnnnnnnnnnnnnnnnnnnnnnnnnnnnnnnnnnnnnnnnnnnnnnnnnnnnnnnnnnnnnnnnnnnnnnngaatatgggagattaaaatatcatcccactacaagttcatcccaacaaggggttctgtcggcggcagcacaaagctaccatgaaaacacctaattatgagaaatgagctcccagacccccctgcccgtcactccctgctcttatcaacttctgccccctccactcacacggacaactggtttacctgtctgtgtcgcccccaagccagccacccccagaaccatgctctgcccattgctgggctcagtaaaaac

SEQ ID NO: 232409 - DNA, 533 bp, Homo Sapiens
  misc_feature (214)..(292): n is a, c, g, or t
  misc_feature (305)..(422): n is a, c, g, or t
ttggaatgagagatacaaatgaaagttgaaagatagacaaaatatttggtaaagaggactggaagatgagaaaaaggaatattagtcatcaatctcagtctaaatgcatgtacatcttctagagacataaacttattaagttgatgaaaatatttttttcttcatgtgatcaaaaagcctatgcaatctcagtctagaagtcaaattgacaaannnnnnnnnnnnnnnnnnnnnnnnnnnnnnnnnnnnnnnnnnnnnnnnnnnnnnnnnnnnnnnnnnnnnnnnnnnnnnngagacacagtttnnnnnnnnnnnnnnnnnnnnnnnnnnnnnnnnnnnnnnnnnnnnnnnnnnnnnnnnnnnnnnnnnnnnnnnnnnnnnnnnnnnnnnnnnnnnnnnnnnnnnnnnnnnnnnnnnnnnnncttttgtggcgatttttgatgcccagagggattttgtgtgtgaatgtgtgatgtctgtttttaaaatgctttggaagctcttcctggtgctgagaacaactctttttcccc

SEQ ID NO: 232410 - DNA, 795 bp, Homo Sapiens
  misc_feature (65)..(399): n is a, c, g, or t
  misc_feature (405)..(425): n is a, c, g, or t
  misc_feature (439)..(565): n is a, c, g, or t
ttggctgtaaagccgttgtttgcaacctgctgagattttgccctaccttccaccactccctgcannnnnnnnnnnnnnnnnnnnnnnnnnnnnnnnnnnnnnnnnnnnnnnnnnnnnnnnnnnnnnnnnnnnnnnnnnnnnnnnnnnnnnnnnnnnnnnnnnnnnnnnnnnnnnnnnnnnnnnnnnnnnnnnnnnnnnnnnnnnnnnnnnnnnnnnnnnnnnnnnnnnnnnnnnnnnnnnnnnnnnnnnnnnnnnnnnnnnnnnnnnnnnnnnnnnnnnnnnnnnnnnnnnnnnnnnnnnnnnnnnnnnnnnnnnnnnnnnnnnnnnnnnnnnnnnnnnnnnnnnnnnnnnnnnnnnnnnnnnnnnnnnnnnnnnnnnnnnnnnnnnnnnnnnnnnnnnttaacnnnnnnnnnnnnnnnnnnnnncctgtggagggcannnnnnnnnnnnnnnnnnnnnnnnnnnnnnnnnnnnnnnnnnnnnnnnnnnnnnnnnnnnnnnnnnnnnnnnnnnnnnnnnnnnnnnnnnnnnnnnnnnnnnnnnnnnnnnnnnnnnnnnnnnnnnncactgtgaagaataagactttatttacccattcttaacctcgaaatccaaacctccatctcttgtatatctgtaatgttgttctttccccctcgcccccaagttatttaaaatcttgtttttgatgtagcttaatataaaggtgattatctttcatagcataggaattacatggtgtattgttattattatatgtattaataacatgtattattgttattaagaatttac

SEQ ID NO: 232411 - DNA, 368 bp, Homo Sapiens
ttggggtgagattggttttcttgggggtcctgattccatcccctcttccattctatgacccactccgtgggtccttcttctcatcttccccagttgttgccaagagagatccttttctggtgaacaatgggtgaatacactggacatggttaaagattttgtctttgacctggctcctgatcatgtccatcaacatcacactcctgaaccttgcatcaattccctttgctcaccctggtcttcctcctcctcctcctgcagtgaccatcggcctaggatggctgttggatgcttaaaagagatattgactgtgacttcatctgccctgatgtgaacgacttccagctctgtatgggccctgactgcag

SEQ ID NO: 232412 - DNA, 866 bp, Homo Sapiens
  misc_feature (312)..(427): n is a, c, g, or t
  misc_feature (442)..(616): n is a, c, g, or t
ttggggggttcctggcagcagcagcctgttatcccccagggctgggcagccaggtgtgccagccgtctgtctgtgcagagaaggtggctgccgggcgtgagtcgcagacgccagctgatggtgtatttatagcaacggcaggagtccgcggggcatacgtcagtggtaaagagggacgggcaggtgggggtccagctcccacagcagacaagagcccaccaggactggccagggagctgaacagagtgtcagggagaatgaggggcatgttgtgcagccgggaggcccaggatcacacccctctgctctggnnnnnnnnnnnnnnnnnnnnnnnnnnnnnnnnnnnnnnnnnnnnnnnnnnnnnnnnnnnnnnnnnnnnnnnnnnnnnnnnnnnnnnnnnnnnnnnnnnnnnnnnnnnnnnnnnnnngcatgaaaagcatgnnnnnnnnnnnnnnnnnnnnnnnnnnnnnnnnnnnnnnnnnnnnnnnnnnnnnnnnnnnnnnnnnnnnnnnnnnnnnnnnnnnnnnnnnnnnnnnnnnnnnnnnnnnnnnnnnnnnnnnnnnnnnnnnnnnnnnnnnnnnnnnnnnnnnnnnnnnnnnnnnnnnnnnnnnnnnnngtgtgagctctaccgtgcccggccaagtgcttggttctttctcgactcaatcctattttgttctacacaggtcggtctgcctccactcccccaaccccatgccccatttcacccattggcctctgaagcccagagatgggcaggggtttgtctgagaccacacagcaagagggcagcagaggaggacgggaacccagatctgcttccctcccaggctacaaccctgtagcccccaacccctgcaaacttg

SEQ ID NO: 232413 - DNA, 869 bp, Homo Sapiens
  misc_feature (110)..(419): n is a, c, g, or t
  misc_feature (512)..(600): n is a, c, g, or t
  misc_feature (612)..(689): n is a, c, g, or t
ttgggatttataggcgtcagccactgcgcctggctaaaaagctgttttcaaaatctgacaaagctacaccaagtgttcagtctatgatttcataattatcttaattaatnnnnnnnnnnnnnnnnnnnnnnnnnnnnnnnnnnnnnnnnnnnnnnnnnnnnnnnnnnnnnnnnnnnnnnnnnnnnnnnnnnnnnnnnnnnnnnnnnnnnnnnnnnnnnnnnnnnnnnnnnnnnnnnnnnnnnnnnnnnnnnnnnnnnnnnnnnnnnnnnnnnnnnnnnnnnnnnnnnnnnnnnnnnnnnnnnnnnnnnnnnnnnnnnnnnnnnnnnnnnnnnnnnnnnnnnnnnnnnnnnnnnnnnnnnnnnnnnnnnnnnnnnnnnnnnnnnnnnnnnnnnnnnnnnnnnnnnnnnnnnnnnnnnnnngtatctatagctgtgttcctatcacttccatcaccaatacggttgccctcaaaacctgaggaagggttgttgtactgatctcttactagaggnnnnnnnnnnnnnnnnnnnnnnnnnnnnnnnnnnnnnnnnnnnnnnnnnnnnnnnnnnnnnnnnnnnnnnnnnnnnnnnnnnnnnnnnnattcagctgtgnnnnnnnnnnnnnnnnnnnnnnnnnnnnnnnnnnnnnnnnnnnnnnnnnnnnnnnnnnnnnnnnnnnnnnnnnnnnnnaccgtatcaatataagctatgattgcaattataacattatttttattagaaccgtacttggcctttggcaagaactcaatattaggaattttaaatgtggtaggaaaagtccatagttgcaagcatgctcccaaatccttgagtaaaggtaggaagctcatttctagagaaggactttgc

SEQ ID NO: 232414 - DNA, 314 bp, Homo Sapiens
  misc_feature (88)..(105): n is a, c, g, or t
  misc_feature (203)..(272): n is a, c, g, or t
agcaaccagggattgtggtatgtaagctttgctcaatcaagagggtgtgatagtccctgattcccataaaagaatgcaactggcttgnnnnnnnnnnnnnnnnnngagacagggtcttgttctgtcactcctgctggagcatagtgagctatgatcaaactactgccctcttggctgggtgacagaacaagatcttttctctnnnnnnnnnnnnnnnnnnnnnnnnnnnnnnnnnnnnnnnnnnnnnnnnnnnnnnnnnnnnnnnnnnnnnncttataaaaaagggtaaaaatttaaaagactagccttatttt

SEQ ID NO: 232415 - DNA, 846 bp, Homo Sapiens
  misc_feature (157)..(509): n is a, c, g, or t
  misc_feature (522)..(585): n is a, c, g, or t
ttggctaactaacagtgctctttttactactgaagatagagtcattagtgtctttaaatccaatcagattagacactcaattctagaagccccagaaccaattactcctgataacaaaatcatctatgttaaccagggttctccaaagaaacagggnnnnnnnnnnnnnnnnnnnnnnnnnnnnnnnnnnnnnnnnnnnnnnnnnnnnnnnnnnnnnnnnnnnnnnnnnnnnnnnnnnnnnnnnnnnnnnnnnnnnnnnnnnnnnnnnnnnnnnnnnnnnnnnnnnnnnnnnnnnnnnnnnnnnnnnnnnnnnnnnnnnnnnnnnnnnnnnnnnnnnnnnnnnnnnnnnnnnnnnnnnnnnnnnnnnnnnnnnnnnnnnnnnnnnnnnnnnnnnnnnnnnnnnnnnnnnnnnnnnnnnnnnnnnnnnnnnnnnnnnnnnnnnnnnnnnnnnnnnnnnnnnnnnnnnnnnnnnnnnnnnnnnnnnnnnnnnnnnnnnnnnnnnnnnnnnntagggccagtagnnnnnnnnnnnnnnnnnnnnnnnnnnnnnnnnnnnnnnnnnnnnnnnnnnnnnnnnnnnnnnnntttattataaggaatgggctgatgtgattatggggactgagaagtcccggcagaagagctgatggtacatacattccagtttgagtaggaaggcctgagaagcaagtgagctgatagtgttggttccagtctgacagtgaaggtctgagaaccaggaaagccaatgatgtaagattcagtctgaatttaggcccaaaagcagaagacttctgtcacagtttgaagacaggaagagagaaaacattctttctcacttatatt

SEQ ID NO: 232416 - DNA, 468 bp, Homo Sapiens
ttggctctgtcttcacgtggaattcacagctggctatactatcttcaattcacactggagaattaatgaacatttgaagttctgtgaactgaccttcaagcctgttcatcgctttgagggaatattttacttctaatcctccaaaattgttactatggaacgtatgtgacaaggctttcttgtgttccaccctatgtggcaaactgtcacgtattccctatgggttgaactgtattgaatattatggaccacaaaagactttcatgtttaggtcatttgattttatgccatcctgtgtggggagaatcatccccatttgaaaactgagaacactcaggctcaccgagctggtgaccgccttgcttccataccaccctaaacctcatactgtcgatgactgttacccctgtcccgcttgtcttgtcaccttccgtcactgcccatcccttggctgccatcgcatacttc

SEQ ID NO: 232417 - DNA, 125 bp, Homo Sapiens
ttgcaacaaattgatgagcaatgcttaccatataaaaaagcccactttgtacaaaaaagttggcgcagcacccccgtgaaagggagaagtctgagtggcgctcgcggcggccgcgccagtcgcgt

SEQ ID NO: 232418 - DNA, 488 bp, Homo Sapiens
ttgggttgctgaccgggcatgggacgtcgggtcgcggcacctccggcctggtcgtgtctaatcgttctgtccggtcccaaatgagctaagcctagcctgcaccggacgggtgggctggaatgattgaattatctgatctggtgacccgtgccccatgcgctggggatctcacaagaaaggaacgaactgagctacgggccaacgagatggcagaccatgccttggctggactggatgacggatcccatcggaagctgcgggaggtcacatcagatctagcggaggggcagcgcatccgctcacccgtacgggaactgcaacgacatgaactggaacgagaagaggatgccctggcatcctttcgtttccgtgccgagcgacaggacaaaaaagagaattggctgccctctcagcaacgggaagctgagcagcgggctgccctggctgggctggcagggcgactggagtacatgagcgatgtagatgaa

SEQ ID NO: 232419 - DNA, 669 bp, Homo Sapiens
  misc_feature (60)..(386): n is a, c, g, or t
  misc_feature (388)..(406): n is a, c, g, or t
ttggcttgcattgtcagataacccccaaagaatacagcatagataaagaagtaaacgtannnnnnnnnnnnnnnnnnnnnnnnnnnnnnnnnnnnnnnnnnnnnnnnnnnnnnnnnnnnnnnnnnnnnnnnnnnnnnnnnnnnnnnnnnnnnnnnnnnnnnnnnnnnnnnnnnnnnnnnnnnnnnnnnnnnnnnnnnnnnnnnnnnnnnnnnnnnnnnnnnnnnnnnnnnnnnnnnnnnnnnnnnnnnnnnnnnnnnnnnnnnnnnnnnnnnnnnnnnnnnnnnnnnnnnnnnnnnnnnnnnnnnnnnnnnnnnnnnnnnnnnnnnnnnnnnnnnnnnnnnnnnnnnnnnnnnnnnnnnnnnnnnnnnnnnnnnnnnnnnnnnnnngnnnnnnnnnnnnnnnnnnntctcatcataaacctaaaataagttttggaatataaagggcttttagttatctgaaaaatgcacttaatgtggtaacatgttctcagacaatgctggataaaagtattttttaatatatgattatttggatagctttgtatattgtcagttgtacaaatacaattcatctaatatatagtattagtgtatgttaggtagtagtagataaaagtaatatacttttaagaaatgaataggcaaaatactttctagcctcaacagg

SEQ ID NO: 232420 - DNA, 485 bp, Homo Sapiens
  misc_feature (248)..(261): n is a, c, g, or t
tacaaaaaagttggatacttttatctttgttcaaaggtgaccaagttatagttcaatgtacacaacttgttgtcctgttaactcctgctgcctggtaactgcctggactgataggattcccttgtgcctaacaagcctatattttaccttttgataaaacaagtgatttcacttgttctttaaaaatatttgttccctattgagaatatcttatttaaaagtaaacctttttgaagttttcttacggnnnnnnnnnnnnnntataattctggttctaccctttctttttttcttttaaaatgcactatatacgcttccagaagggacttaacttatttctaatctcctaagttctatattgcctgcaaaatataaatttctatatgttgaaaatatttgagattgcatacatgttatcttgggaagatttagaatgaggattttcttaaactttaataacttgcccaacctctctcaaataggga

SEQ ID NO: 232421 - DNA, 690 bp, Homo Sapiens
  misc_feature (48)..(81): n is a, c, g, or t
  misc_feature (165)..(452): n is a, c, g, or t
cttttttataatggccaactttgtacaaaaaagttggggatactaagnnnnnnnnnnnnnnnnnnnnnnnnnnnnnnnnnnattagggaaagggcgatggacagaagattttgagaggtaaagagaagaaaggcatttgttgcaagaagtggtagattaggctgnnnnnnnnnnnnnnnnnnnnnnnnnnnnnnnnnnnnnnnnnnnnnnnnnnnnnnnnnnnnnnnnnnnnnnnnnnnnnnnnnnnnnnnnnnnnnnnnnnnnnnnnnnnnnnnnnnnnnnnnnnnnnnnnnnnnnnnnnnnnnnnnnnnnnnnnnnnnnnnnnnnnnnnnnnnnnnnnnnnnnnnnnnnnnnnnnnnnnnnnnnnnnnnnnnnnnnnnnnnnnnnnnnnnnnnnnnnnnnnnnnnnnnnnnnnnnnnnnnnnnnnnnnnnnnnnnnnnnnnnnnnnnnnncagtggtcgattatcaattgtatccaggattcagagatacattccagaactcttgagtcttaaattcccaacagctgatgtagtcttaggtccgtcggttatcgcatttaatacttacctaatgatcttcctaaagttgtcattgtttctggaccataggcctgtagatttttcctctatttcctatagttcctgtgataaaaatagaatgccttattaaagtaaaaaatatcttcta

SEQ ID NO: 232422 - DNA, 335 bp, Homo Sapiens
ttggcaatatgatgctgtaactattattttttggatgcctccccctcctcatctcatttttcttttttccatgctgtttttccagagggttgaataactactctgtgcattatttctgttgatattccttcccctcttcgctgcgagaacacctctgctgtcgccgattactctttactacgatgacatcaaaaaacgatggcctccgctgaatacttctccatctttgcttgatggtctttccatcatagctgccccctccccctcattaattatcttccacgtattatcttcgatgactactcttgtcttcctctctcatcttcttctgcttc

SEQ ID NO: 232423 - DNA, 750 bp, Homo Sapiens
  misc_feature (369)..(394): n is a, c, g, or t
  misc_feature (407)..(467): n is a, c, g, or t
  misc_feature (534)..(655): n is a, c, g, or t
atacggtgtctcctacagaattattttgaagattcagtggaatagttcatttaaagcacttaataccctgctgcctcacacatggtaactacttgagaaattgagctattatgatggtggtgctgaataaaatggcataaaatcagggataatggtggaatgacggtgataatgtgcaggttagaggggagaaaatcacttgaaaagaaagcgaaacatgttattaattttagaaaaatatttaagaattgtgatacttctttacttaaaaccctttaagcccttaagcccttggcattgctgtatctcagtgcttcctggatttgtcatttaggtactgctttcaccagttttgtcatatggtatacnnnnnnnnnnnnnnnnnnnnnnnnnnaaatggagtctgnnnnnnnnnnnnnnnnnnnnnnnnnnnnnnnnnnnnnnnnnnnnnnnnnnnnnnnnnnnnntgggtttaagtgattcttgtgcctcatcctcctgaatagctgggactacaggcattcaccaccacannnnnnnnnnnnnnnnnnnnnnnnnnnnnnnnnnnnnnnnnnnnnnnnnnnnnnnnnnnnnnnnnnnnnnnnnnnnnnnnnnnnnnnnnnnnnnnnnnnnnnnnnnnnnnnnnnnnnnnnnnatgagccaccatgcctggccccaaaatcaaattttaaaaaattgttttaaacataccaaaggtagctatccatgctatcctttctagctaaacat

SEQ ID NO: 232424 - DNA, 255 bp, Homo Sapiens
  misc_feature (48)..(59): n is a, c, g, or t
  misc_feature (95)..(199): n is a, c, g, or t
  misc_feature (202)..(212): n is a, c, g, or t
cctaacgtttggcatctctttttatatattcaaccacaatatgttgannnnnnnnnnnnccagtaaagtgaatgtctctttatttattttttttnnnnnnnnnnnnnnnnnnnnnnnnnnnnnnnnnnnnnnnnnnnnnnnnnnnnnnnnnnnnnnnnnnnnnnnnnnnnnnnnnnnnnnnnnnnnnnnnnnnnnnnnncgnnnnnnnnnnnccagaaaaagataaaatgtcttctaagcatgggcccccaactc

SEQ ID NO: 232425 - DNA, 631 bp, Homo Sapiens
  misc_feature (414)..(462): n is a, c, g, or t
tcgggggatgagggcaatgcgggctgaggcgcagaggccaagggggtgatgcacgcatgagctaaaacaagcccaggccacacagtgccttaaggcatgggtcaggggttggattatcccctgcagggacaacaggagcctcagggtctcaacatgtaggggctgtgcaaggcaggagggtcaggcagaggagaccaggaaggggcagccagagaggacagacttccagacttccagcaggggtgggcgtcctctgtatgcacatgacatggctggagggaaaggaccctgcagtgcagggaattatgggaagtgtggacagggcaccaaggcactgggaggccccggagagcggtacagaaagctgagctccaccacctgctgccatcgagcctcacggcttatgacttctgnnnnnnnnnnnnnnnnnnnnnnnnnnnnnnnnnnnnnnnnnnnnnnnnncacgtgaattatttttccattctccacctttctgatgatgctgttcatgtaaagtacatatagtagaaagctacacaaagccatgaaactggatggtgcatcctcccaccgatggccatggggggcatgagtgcagcccttcaagctgaatgaccactcgggtttcttc

SEQ ID NO: 232426 - DNA, 416 bp, Homo Sapiens
  misc_feature (47)..(358): n is a, c, g, or t
ttggctcctgagataatcttagtcatggttttacttattttatacannnnnnnnnnnnnnnnnnnnnnnnnnnnnnnnnnnnnnnnnnnnnnnnnnnnnnnnnnnnnnnnnnnnnnnnnnnnnnnnnnnnnnnnnnnnnnnnnnnnnnnnnnnnnnnnnnnnnnnnnnnnnnnnnnnnnnnnnnnnnnnnnnnnnnnnnnnnnnnnnnnnnnnnnnnnnnnnnnnnnnnnnnnnnnnnnnnnnnnnnnnnnnnnnnnnnnnnnnnnnnnnnnnnnnnnnnnnnnnnnnnnnnnnnnnnnnnnnnnnnnnnnnnnnnnnnnnnnnnnnnnnnnnnnnnnnnnnnnnnnnnnnnnnnnnncccacatttttcttctgcccccttttatgtaaaaactgtgtgcttctcaatatcccac

SEQ ID NO: 232427 - DNA, 168 bp, Homo Sapiens
ttggggagaaggcaagccggaaggagcgaaataaagaagtggtggaggatcaggagaacggggctgagaaggaagaacaagaaactggcgaggatggataggaggaatatgaaggggagaaataccatgaggaataagaagaataggatgatgaacggcccgcgctga

SEQ ID NO: 232428 - DNA, 386 bp, Homo Sapiens
ttgggccgttgtcgacggtgagacttctgaaaatataaattacttcttgtgaaaaaactgaaactttgttttaattttactatatcccatgaaaacgttaaaatggggatgcatgggctcttatcttggatggtccccaaagttttacattacgcttgtctgtctaatttttgatattttaagatgttttggggtttgatacgggcagaattggggagaaacagccctacaaatgtacatgcgatccctagaaaaaaattcgatgaaaatctgaccttgggcttccaaaacacaaagaataggaacaaaatgtagttccaatgtccccccctaaataaatgaaaactaggcaggtgagcagccaatctggcttttgggacagcaat

SEQ ID NO: 232429 - DNA, 113 bp, Homo Sapiens
attgatgagcaatgcttttcttattaagcccctttgtacaaaaaagttgggttttttattactttttctgaaagaaggaaagtaaaatgtacaagtttaataaaaaggggcct

SEQ ID NO: 232430 - DNA, 785 bp, Homo Sapiens
  misc_feature (327)..(356): n is a, c, g, or t
  misc_feature (362)..(419): n is a, c, g, or t
ttgggtctgctgtcatgtgctgagttgttctaagccagtgttggctgtttccttgttctgtctttccctttgttcttacatcatgtatgtctcatgtacttggttatcttggtggtgggatcatcttctgtggtcagaagatgcaaatgaatctggcctcagcattatgggttctgagtccctgaaaaatagcatcctaggacagtggtgcatgatgtcaagagttttattcaaatcatgacagaaacctcttctatttcagtagtatttttggggccagacaagtaagcacacatgatttctgtatcgtcttttctccttcattcnnnnnnnnnnnnnnnnnnnnnnnnnnnnnnagagannnnnnnnnnnnnnnnnnnnnnnnnnnnnnnnnnnnnnnnnnnnnnnnnnnnnnnnnngttttttataacccaaggcataactactactgtattaactcgttagatcattagggtataagaagtatacatttaattaattagtttacttccttgaatttcttttttaaagtacttgttctaaatggacataattacctttggttattctacatccttattactcttttttgagttggatcaaaaaatgagatgctaatatcgattattagagctaacgttgatatttagatcccttgataatcctgcttctttctgtcttcaagctaagaacaattactgtttcatactagaggaactctgatgtttatttatacctcaccttgttccagaaataatttaatgtagcttagacccagagtaagc

SEQ ID NO: 232431 - DNA, 368 bp, Homo Sapiens
ttgggtatattcttatccgaccttacttcagaatagactcgcataatgtgacttactactccggaaccctgtgtagattctgataatgatctatggtctgagctgtgaattttttggcttgttatggcctatcgtgtgatcacaccatatatttaggctaagatcatacgttaactaccaaccatatttcccctccgcgtgacccctgaggctatcccctgcgagctcttagtatgtatttgactctgaacactcctgcttcctgatatcaaataatctgatattgagccctgaaccctcttactcatctttcttttctgaggatgtggtccgagtgaatttgcatttttttactcatcactacacat

SEQ ID NO: 232432 - DNA, 378 bp, Homo Sapiens
ttggctttctattagctcttatcatcattactggtgctagcatccccatgccagagagttccccctctatatctccacgatcaaaagggacaagcatcaagcacgcagcaatgcagctcaaaacgcttaggggagtttgccccccacgggagagacctgtgattaacctttattgctacctgaaagtttaactaagctatactaaccccagggttggtcaatttcgtgccagccaccgcggtcacacgattaacccaagtcaatagaaaccggcgtaaagagtgttttagatcaccccctccccaataaagctaaaattcgactgagttgtggaaaactccccttgacacccaatacactactactgtgggtttaaca

SEQ ID NO: 232433 - DNA, 333 bp, Homo Sapiens
ttggggggaattttatattgctaaaatgatttggttaaaatgtctgccagttcttccttctggttattttgtgctgttggattgatgttgaatcttgccctttgaccctgagacctgggggtgatgcaagtttacggtgactatccttaatcagtgcttatgcttgttcttgcacatgaagagacccctttcctcccgtccattttttggacacagcagcaatttgtatggtttcaattcttactgtgatgcctgttcatctttaatgaaggcatagatccaaacgattatgatgttcgttctttgataattggttccccccatccgacttcc

SEQ ID NO: 232434 - DNA, 163 bp, Homo Sapiens
accctataatgccaactttgtacatacagttggcccagtgcgcttcgcttcctgaggcccactcacactacaccctcttcctttccaccccacctcacggagagacactggacatgcgcctgcgaggtgagctggacagatgagattctttccgtgcattaga

SEQ ID NO: 232435 - DNA, 536 bp, Homo Sapiens
ttggatacctaaaaagcccacatgtcctagactaccaaacctgccttaaaagttccgttggggcgacctcggaacataacccaacctcccagctttacatgctaccacttaaccctccaaatcgaactactatactcaattgatccaataacttgaacaactctttggttaccctaaaaaaaccttgtagatcctattctagattccatatcaacaatagggtttacgacctcaatgtttaataaagagttcaagatggtgccccccttattaaaagttcccttgttctaactgaaatcctcacgtgaattgatttcatatatgaccaaaccgaagaagtttcgatctacttcctattctgcactgtttcacctccgcataaacctgcggcctatttcaacaatgaactgacaattaacatgatattatctacaatcaacattaaactcattattaccctcaatgtcaacccgacacaggcatgctcataaggaaaggttaaaaaaagtaaaaggaactcggcaaatcttaccccg

SEQ ID NO: 232436 - DNA, 391 bp, Homo Sapiens
  misc_feature (74)..(312): n is a, c, g, or t
ttgggtctagttataggtctagaagcaaacagaggtgttgggggtggctcctgaggagaatcaacattatcttnnnnnnnnnnnnnnnnnnnnnnnnnnnnnnnnnnnnnnnnnnnnnnnnnnnnnnnnnnnnnnnnnnnnnnnnnnnnnnnnnnnnnnnnnnnnnnnnnnnnnnnnnnnnnnnnnnnnnnnnnnnnnnnnnnnnnnnnnnnnnnnnnnnnnnnnnnnnnnnnnnnnnnnnnnnnnnnnnnnnnnnnnnnnnnnnnnnnnnnnnnnnnnnnnnnnnnnnnnnnnnnnnnnnnnnnnnnnnnncagccttgtgtgtgatcttttctgtcttcccctagtttgcattttcaacattaaagtttactttttaattaaaagttta

SEQ ID NO: 232437 - DNA, 914 bp, Homo Sapiens
ttggaggactccgggttgtgaatttctgtgccccctggaacgtgctgtgtattgaggccgagccatgtgtgtgaagatgccgactagaaagatgcaccacattactgatacccgtggcctccggatttctttttctctgtgctccttatccttcagatcccatccttcccaattcggctgaacagatgacccggatcttgaacacattctcctatcccttctcccggggtaaacatcatctatttgacttggctgatacagattcctttttccacagcatctttaccaccacgattgtcaatgagatcttgaagagaacgacgtgtacaaaggccaagtacactttggctgtaggcgagggaagaatcaggactccgcccttctaagtaaaaggcggaaatgtgggattgatggcatcttcagactgctgggatttggtgtgtacgcggctgcatacctgctgcacaatggaaactagcacttagaaaacgtcaaattcaacgatggaaaactcctgtacgaagagtgggcactctatagagttttctataagtaccaccctctcgacctgctcccgaagtattctgcttagaatatcggcctgtacttcgcctggctggttatgtacacccaaatgctcatccctgcctgtttcctgggaatcattgtcttcctgtatactatgcgccaccatgcatgatactatccccatcatggagatgtgtgaccagagacacaagatcttcatgtgcccactttgcaactatatctgctactactgtaatatgagcttgatttgtattatggctcgctcctgctacctcttctacaaccccgaccacggtcttcttctctgtcttcatgggccctctaggctgccatcgtcatggagcactggaagcggaaacagatgc

SEQ ID NO: 232438 - DNA, 477 bp, Homo Sapiens
  misc_feature (47)..(313): n is a, c, g, or t
ttggctttcaaaaccttttttggtcttgggatccttctacactcaannnnnnnnnnnnnnnnnnnnnnnnnnnnnnnnnnnnnnnnnnnnnnnnnnnnnnnnnnnnnnnnnnnnnnnnnnnnnnnnnnnnnnnnnnnnnnnnnnnnnnnnnnnnnnnnnnnnnnnnnnnnnnnnnnnnnnnnnnnnnnnnnnnnnnnnnnnnnnnnnnnnnnnnnnnnnnnnnnnnnnnnnnnnnnnnnnnnnnnnnnnnnnnnnnnnnnnnnnnnnnnnnnnnnnnnnnnnnnnnnnnnnnnnnnnnnnnnnnnnnnnnnnnccctgattttttttaaattttatggaaaataactattttcaaaaaattaatgagaagagaggtatcgttttactttttgcaaatttctttatgtctggcttaatcaaagacaactggattctcatatctgattctgcagtcaatctgttaccatatgttgtttt

SEQ ID NO: 232439 - DNA, 319 bp, Homo Sapiens
  misc_feature (139)..(181): n is a, c, g, or t
ttggatcaaatacccttatattcagccaatctttatgtctctacccacgttgtacttgcctttccttttatccatgtggaatacctttcccctttacccatcctgaatagtaaaatcctacttattctctaaggctttnnnnnnnnnnnnnnnnnnnnnnnnnnnnnnnnnnnnnnnnnnnatgaaccaccgcgcctggccacggtgctaagaatttattagtgaataattcattggcaaatcctcgggagtgttttgaaaataaaattgacactttttgtccttcacttctaggaaacctggtgactattttttatat

SEQ ID NO: 232440 - DNA, 652 bp, Homo Sapiens
  misc_feature (98)..(407): n is a, c, g, or t
  misc_feature (411)..(555): n is a, c, g, or t
ttggcaccgcgcccggcttgtccataatttttttgttatgaaccatttcatttagaacccaacaatgtgtaaatatgtccaaagaataatgtttcccnnnnnnnnnnnnnnnnnnnnnnnnnnnnnnnnnnnnnnnnnnnnnnnnnnnnnnnnnnnnnnnnnnnnnnnnnnnnnnnnnnnnnnnnnnnnnnnnnnnnnnnnnnnnnnnnnnnnnnnnnnnnnnnnnnnnnnnnnnnnnnnnnnnnnnnnnnnnnnnnnnnnnnnnnnnnnnnnnnnnnnnnnnnnnnnnnnnnnnnnnnnnnnnnnnnnnnnnnnnnnnnnnnnnnnnnnnnnnnnnnnnnnnnnnnnnnnnnnnnnnnnnnnnnnnnnnnnnnnnnnnnnnnnnnnnnnnnnnnnnnnnnnnnnnntgtnnnnnnnnnnnnnnnnnnnnnnnnnnnnnnnnnnnnnnnnnnnnnnnnnnnnnnnnnnnnnnnnnnnnnnnnnnnnnnnnnnnnnnnnnnnnnnnnnnnnnnnnnnnnnnnnnnnnnnnnnnnnnnnnnnnnnnnnnnnnnnnnncagccaaattgttaggattttttaatgctttggtgatttgtggatccaggctcaggtcctttgttccttaccctcccaacttcccctctccttttta

SEQ ID NO: 232441 - DNA, 874 bp, Homo Sapiens
  misc_feature (235)..(687): n is a, c, g, or t
attccaatgtgcttggtgtatccttaatagtcatttgcttcccagtgaattgtttttctttccagaacctatgtcagaggaaatttactagaagttaccaaaagtgattatgtaaagaatactgtcatacaaagtctcttaaagtgaacattgaaaaatcagtccatataaaacactgatttaggtcttaggggctttcaaggaattaaacctagcccttactatcgagaacttnnnnnnnnnnnnnnnnnnnnnnnnnnnnnnnnnnnnnnnnnnnnnnnnnnnnnnnnnnnnnnnnnnnnnnnnnnnnnnnnnnnnnnnnnnnnnnnnnnnnnnnnnnnnnnnnnnnnnnnnnnnnnnnnnnnnnnnnnnnnnnnnnnnnnnnnnnnnnnnnnnnnnnnnnnnnnnnnnnnnnnnnnnnnnnnnnnnnnnnnnnnnnnnnnnnnnnnnnnnnnnnnnnnnnnnnnnnnnnnnnnnnnnnnnnnnnnnnnnnnnnnnnnnnnnnnnnnnnnnnnnnnnnnnnnnnnnnnnnnnnnnnnnnnnnnnnnnnnnnnnnnnnnnnnnnnnnnnnnnnnnnnnnnnnnnnnnnnnnnnnnnnnnnnnnnnnnnnnnnnnnnnnnnnnnnnnnnnnnnnnnnnnnnnnnnnnnnnnnnnnnnnnnnnnnnnnnnnnnnnnnnnnnnnnnnnncagtggccttgaaatctttatccaggtaaaaagcaatcgtaataataacgaaaaatgttctaatttgaaagtcacgcacaagtgcagtttgaaacctgattgttactaaatgaatttagtctatcctaaaagctatttctcatgtctacctgtgttatcagaagaacacagcattctagcatcctga

SEQ ID NO: 232442 - DNA, 862 bp, Homo Sapiens
  misc_feature (209)..(274): n is a, c, g, or t
ttggattattccttccttttaactggacccccgagagatccttagacataaaagagcttgagatgcattgaccctgtggtaggattactccttccattctaaaaaaaaggtgatcccgattagctgatgcctggggaagtatcctcctccgcagactacccaaacctccttggatgcccttaccttggcatgaattttatgggtttgtnnnnnnnnnnnnnnnnnnnnnnnnnnnnnnnnnnnnnnnnnnnnnnnnnnnnnnnnnnnnnnnnnnagatttcctgtcaaaacctctgacaaaacgtccattttgccgtgccctgctttctctgggcgattgataaagacgtgtcctccttcgtgcatcagttggaacaaaggtactattctgatgggggatactgaccatggaacaggctgcacatctgtgcgggcaggggatatatgaaacatatctgtaccgtcctctcatttttgctgtgaatcttaacctggtctgaaatctaaaatctattttaaaaaatcactgttcagagaaatgaaagaagattttgttaattccgattttgaataggataaaacactatcatccattaattctcagcttatgaatctctccatataggtaaagccaagacttttaaaccaagtgctgaattactctggtaatctaatggatctatattaacacaatagagataacaaaccaaatagctatctaccaaaaacctggttactttttaacatcttctgaatattttgagaagataaataggagcatgaatgaccccggtcttaaaatgaactatgttaacttcctagctatataaacctgggggccaagatacttaactcctctaaa

SEQ ID NO: 232443 - DNA, 134 bp, Homo Sapiens
actgatagtgacctgttcgttgcaacaattgatgagcaatgcttcctataatgccaacttgtacaaaagttggcacctcttccgtcggctgattgcggccgtatgcgcggctctgtggagtgcacctgacgttg

SEQ ID NO: 232444 - DNA, 863 bp, Homo Sapiens
  misc_feature (331)..(354): n is a, c, g, or t
  misc_feature (373)..(617): n is a, c, g, or t
ttggctcagcccagatggtgatcgggtggctgttggatatcgagcggatggcattaggatctacaaaatctcttcaggttcccagggggctcagggtcaggcactggatgtggcagtgtccgccctggcctggctaagccccaaggtattggtgagtggtgcagaagatgggtccttgcagggctgggcactcaaggaatgctcccttcagtccctctggctcctgtccagattccagaagcctgtgctaggactggccacttcccaggagctcttggcttctgcctcaggtactactagacagtgggcagggttaacaaattactgttcnnnnnnnnnnnnnnnnnnnnnnnnaagacagagcttcactctnnnnnnnnnnnnnnnnnnnnnnnnnnnnnnnnnnnnnnnnnnnnnnnnnnnnnnnnnnnnnnnnnnnnnnnnnnnnnnnnnnnnnnnnnnnnnnnnnnnnnnnnnnnnnnnnnnnnnnnnnnnnnnnnnnnnnnnnnnnnnnnnnnnnnnnnnnnnnnnnnnnnnnnnnnnnnnnnnnnnnnnnnnnnnnnnnnnnnnnnnnnnnnnnnnnnnnnnnnnnnnnnnnnnnnnnnnnnnnnnnnnnntgagccattgcgcctggcccacaaatcactgttccttttaaagacactaacacctttctccaagttgtatgtatatgtgtatgaaaatacacatgtgcgattttgttttacaactttcaaagtgcttttgaatgcaattatcttgcataatctgtttagactgtttccactcattccttcaccttcattctgggacctctaacctcccagtaatccctttgagtttctgccccgtgggagactttg

SEQ ID NO: 232445 - DNA, 926 bp, Homo Sapiens
  misc_feature (88)..(562): n is a, c, g, or t
ttggcaaaattacagaggcaccagcttctgaaaaagaaattgtggaagtaaaagaagaaaatattgaagatgccacagaaaagggagnnnnnnnnnnnnnnnnnnnnnnnnnnnnnnnnnnnnnnnnnnnnnnnnnnnnnnnnnnnnnnnnnnnnnnnnnnnnnnnnnnnnnnnnnnnnnnnnnnnnnnnnnnnnnnnnnnnnnnnnnnnnnnnnnnnnnnnnnnnnnnnnnnnnnnnnnnnnnnnnnnnnnnnnnnnnnnnnnnnnnnnnnnnnnnnnnnnnnnnnnnnnnnnnnnnnnnnnnnnnnnnnnnnnnnnnnnnnnnnnnnnnnnnnnnnnnnnnnnnnnnnnnnnnnnnnnnnnnnnnnnnnnnnnnnnnnnnnnnnnnnnnnnnnnnnnnnnnnnnnnnnnnnnnnnnnnnnnnnnnnnnnnnnnnnnnnnnnnnnnnnnnnnnnnnnnnnnnnnnnnnnnnnnnnnnnnnnnnnnnnnnnnnnnnnnnnnnnnnnnnnnnnnnnnnnnnnnnnnnnnnnnnnnnnnnnnnnnnnnnnnnnnnnnnnnnnnntgatggaaaaaaagaggagccacagagtattgtttaaaactgccctatgtagtttcataatttggtaacatgtaccttcatgttgtaaagttaatagagataaatatttttatcaaaaattttataaacacagcctttctttagcattgatttaatttcagaacatcttcatattgattattagccataaagtttctaacatgaaacatttatctataaattttgtgattatagtagtggaatacatagaaaaaaatatgctttcaactttgtgagtgaatttcgtgttgtgtaagttatatgtcaaatctttgaattttaattttactcttttatacatgtgataatttcataaagtgaggga

SEQ ID NO: 232446 - DNA, 439 bp, Homo Sapiens
ttggcggcattttccttgaaacctcagctccccgagagccaagtggatgaataatcttttgttcccgctgactccaaaacaagaaagatgacgcttccgtctcatctttcctcttcttgttgcacccatggaggccattggagcctaaacatgttttgcccaatactggctatgctggttccttctgtgtgactgcatgctactgtctagagcttgtctcaatgtttttacattttccttccccactgatctgccatctgctctgaaacccaccttgcttgttgcttcttgcccatgttggtcctctggcctttccctgtgacattctgaactatttctgtgtttatttctggccgactgtacagtcattggatgcaatggtttccttggatactgtcttagactaattaagattattgaagcaagactaaagatgtat

SEQ ID NO: 232447 - DNA, 740 bp, Homo Sapiens
  misc_feature (60)..(640): n is a, c, g, or t
ttggatctttatgagtttgacaatgttacgtggaaagacagactgaaataaatacgactnnnnnnnnnnnnnnnnnnnnnnnnnnnnnnnnnnnnnnnnnnnnnnnnnnnnnnnnnnnnnnnnnnnnnnnnnnnnnnnnnnnnnnnnnnnnnnnnnnnnnnnnnnnnnnnnnnnnnnnnnnnnnnnnnnnnnnnnnnnnnnnnnnnnnnnnnnnnnnnnnnnnnnnnnnnnnnnnnnnnnnnnnnnnnnnnnnnnnnnnnnnnnnnnnnnnnnnnnnnnnnnnnnnnnnnnnnnnnnnnnnnnnnnnnnnnnnnnnnnnnnnnnnnnnnnnnnnnnnnnnnnnnnnnnnnnnnnnnnnnnnnnnnnnnnnnnnnnnnnnnnnnnnnnnnnnnnnnnnnnnnnnnnnnnnnnnnnnnnnnnnnnnnnnnnnnnnnnnnnnnnnnnnnnnnnnnnnnnnnnnnnnnnnnnnnnnnnnnnnnnnnnnnnnnnnnnnnnnnnnnnnnnnnnnnnnnnnnnnnnnnnnnnnnnnnnnnnnnnnnnnnnnnnnnnnnnnnnnnnnnnnnnnnnnnnnnnnnnnnnnnnnnnnnnnnnnnnnnnnnnnnnnnnnnnnnnnnnnnnnnnnnnnnnnnnnnnnnnnnnntacactgattaaaatgctattgtaataatttggggggaaagcaataaaggtagtggaaataggtataggtagtggaagtaggtatatatataatctcagc

SEQ ID NO: 232448 - DNA, 443 bp, Homo Sapiens
  misc_feature (44)..(351): n is a, c, g, or t
ccttataaaagccaactttgtacaaaaaagttgggttttacatnnnnnnnnnnnnnnnnnnnnnnnnnnnnnnnnnnnnnnnnnnnnnnnnnnnnnnnnnnnnnnnnnnnnnnnnnnnnnnnnnnnnnnnnnnnnnnnnnnnnnnnnnnnnnnnnnnnnnnnnnnnnnnnnnnnnnnnnnnnnnnnnnnnnnnnnnnnnnnnnnnnnnnnnnnnnnnnnnnnnnnnnnnnnnnnnnnnnnnnnnnnnnnnnnnnnnnnnnnnnnnnnnnnnnnnnnnnnnnnnnnnnnnnnnnnnnnnnnnnnnnnnnnnnnnnnnnnnnnnnnnnnnnnnnnnnnnnnnnnnnnnnnnnnactggccattctatatgaactaatatatatttataatttttaatatttatacatggtatattttcccacaataaagatgaaaattaaagcaa

SEQ ID NO: 232449 - DNA, 265 bp, Homo Sapiens
  misc_feature (52)..(194): n is a, c, g, or t
gtacaaaaaagttggatttggaccccccgaaaccgggtttaccgagtcagannnnnnnnnnnnnnnnnnnnnnnnnnnnnnnnnnnnnnnnnnnnnnnnnnnnnnnnnnnnnnnnnnnnnnnnnnnnnnnnnnnnnnnnnnnnnnnnnnnnnnnnnnnnnnnnnnnnnnnnnnnnnnnnnnnnnnnnnnnnnnntcggtggggtccgggggagggggctgggaagaatagttcctgccccttaggcgtgttgtgggagtgcaatg

SEQ ID NO: 232450 - DNA, 753 bp, Homo Sapiens
  misc_feature (90)..(130): n is a, c, g, or t
  misc_feature (181)..(202): n is a, c, g, or t
  misc_feature (308)..(332): n is a, c, g, or t
  misc_feature (351)..(612): n is a, c, g, or t
ttggcccaaagtgctgggattatatgtgtgagcccctatgcctggccaagtctttttcttctcatttttattacacaaatagtaacgtcnnnnnnnnnnnnnnnnnnnnnnnnnnnnnnnnnnnnnnnnntcactcctaacaccataacctaccccatctacaatgatctctcccctcccnnnnnnnnnnnnnnnnnnnnnnattcatctgttgacatttttcttcatatggctctaattgtagtgtagccagttttaagttctgcctttttgttgttaacattgcagcttgtactactaatgtcaannnnnnnnnnnnnnnnnnnnnnnnngaaatggagttttgatctnnnnnnnnnnnnnnnnnnnnnnnnnnnnnnnnnnnnnnnnnnnnnnnnnnnnnnnnnnnnnnnnnnnnnnnnnnnnnnnnnnnnnnnnnnnnnnnnnnnnnnnnnnnnnnnnnnnnnnnnnnnnnnnnnnnnnnnnnnnnnnnnnnnnnnnnnnnnnnnnnnnnnnnnnnnnnnnnnnnnnnnnnnnnnnnnnnnnnnnnnnnnnnnnnnnnnnnnnnnnnnnnnnnnnnnnnnnnnnnnnnnnnnnnnnnnnnnnnnnnnnatcagccactgtgcctggcctactaatgccaatttttcatagttattatagttattgtcagtagtgggttttttaaaaatcaagttattatgacatatatggaggctcacaaagcggctgtgcagacattcaattgttatt

SEQ ID NO: 232451 - DNA, 257 bp, Homo Sapiens
  misc_feature (148)..(195): n is a, c, g, or t
taaattttaaaatatataaaattgactaaaagggtgtttgacacaaaataattactccaaaggtggcgggtccctctaaccctccccaaaaatttttattccaaccaaaattctcttaaattcccaatacggggagtcccctcccaannnnnnnnnnnnnnnnnnnnnnnnnnnnnnnnnnnnnnnnnnnnnnnncagtaaagggccggggaaaggaaaactgtgggggtgtaattgtttgaaccaaggccccttgc

SEQ ID NO: 232452 - DNA, 469 bp, Homo Sapiens
  misc_feature (87)..(368): n is a, c, g, or t
aaaaaagttggcccatgtgtccctaaaagcctgaagtcagtgagatgaaattcaacatcaagaatttgaagtaacttgtaaggaaannnnnnnnnnnnnnnnnnnnnnnnnnnnnnnnnnnnnnnnnnnnnnnnnnnnnnnnnnnnnnnnnnnnnnnnnnnnnnnnnnnnnnnnnnnnnnnnnnnnnnnnnnnnnnnnnnnnnnnnnnnnnnnnnnnnnnnnnnnnnnnnnnnnnnnnnnnnnnnnnnnnnnnnnnnnnnnnnnnnnnnnnnnnnnnnnnnnnnnnnnnnnnnnnnnnnnnnnnnnnnnnnnnnnnnnnnnnnnnnnnnnnnnnnnnnnnnnnnnnnnnnnnnnnnnnnnnnnnnnnnaaaagaaaaagaaaacattacataatttggctagagcataataatttgattttctggtttttgaaaatttgagttgcaataaaaggatatttcactgtgcg

SEQ ID NO: 232453 - DNA, 385 bp, Homo Sapiens
ttgggtggcctgttcccttttctaccagggtagcactggtcccataaaggaggagagatcagcctcctgtctcgtctggaagaccttcattctggggtctcagaggaatgatggattacttggggattctaatattgcaccttttttaccccatggcgacagcggacctgtcagtggctctcttggccctcctgaaaaggtactcccctgttccattctcaatattggacaaattccgcctcaaacttccaaagacttctcctttcatagtaaacttgacatttttcgggattggtttttggaaaatccaattggaactgataacggtgtatggactgctgtgtgagtactatcttggtcgcctgatgcttattgtaatttctga

SEQ ID NO: 232454 - DNA, 599 bp, Homo Sapiens
tatgaacaagcactccttggatcgaaaacccactgactgtccctccaaagaatcaatggaactggatggaccgtccttctggctgggtgtgagctaacaagatctaggcgcggttcctatgcgagtagaagcaaaggagtcttccatcttcctcctggccccacacctaccgacttcttgcttgcttcaatccccagccactcctcatctatctatcatgtatgttattccatggatgacatgagctggctgctcgtttcgtcacccttcgcatcagaacaaccaagtctggaacgacaataaactatgcaagcaggacctgctgcctgatcatcatctagtcagcagagcgtggaagtagcagcaagtagactcgaaactagataggatccctgcttctgtacttgacatacacctcccatcaaaagaatgcagtactttacgtacatggaatgaaataggttagggcaggggaaggagggatgaacctaccctcccaaccccacgctgggaactgacctgacgtacctgtttcctccccagccctttggccctgggctttgtcttaaccaatttttacctggacgggggggaaacca

SEQ ID NO: 232455 - DNA, 107 bp, Homo Sapiens
aggaacccaaacctggggggcctccccgccccgccctgcctggcctggctgtgaaccccggggggggaaacccggcccttttcccgggggcctggtcccccttttgt

SEQ ID NO: 232456 - DNA, 502 bp, Homo Sapiens
ttggtattaccataccttgtaagaactgtgttacacttattaccaaaatttgattttgaatattaacgtcacagtatgttttctgcgtttctgatggaattaatactttttcttgaatattcttcctgtagtgaaagagagaaagtgaggtgtcattgccgaaaggaccctgtaatatcctcttggtattttatagaaagtaaaatctttttttgattaaactgaccacttggtacctctgcgtcattaaattgtagttatgtttatttggaattctttcgataaagtgttaaaggaggataattattttatgtttatataactctgctgtcttatcaaaaaccatgtctatgattaataactttcgaggataattgtgaattgcagtttgttttatttccattggatgcttttgtgcctttattggagatgccgttgcttaatttagctgtactgcccttccacgcctgccttttccatcttaccctatgctcgcttacaa

SEQ ID NO: 232457 - DNA, 358 bp, Homo Sapiens
tttataaaatgggctgttacctaaccttcgaggatcacctctgtcagttgctctgaaaatttttctgactttccccctccccaaactgatgtatttgctctcccacatctctgcatccagcctttgtttcaactaatatttattccttttgtactgtgtatctgtatgactgaggcagtatagcaaaaaagttaagatgaggagctctcaagccaaactcccttggtgtgaatcttgaccacttactaactatagccttgaacatattatttgaccggtttgcctttcgttatccgcacttataaaaaaaggattagaacccttatctatatctaatggatgtcatgaagattaaatg

SEQ ID NO: 232458 - DNA, 274 bp, Homo Sapiens
  misc_feature (70)..(111): n is a, c, g, or t
  misc_feature (153)..(173): n is a, c, g, or t
ttggaaaaagagaggttcagagcgggagaccttcgagaacaggggcgtggggggcgtggcgggcccaggnnnnnnnnnnnnnnnnnnnnnnnnnnnnnnnnnnnnnnnnnnagttaagaggcccggggcgagatctctcctccccagcagtgnnnnnnnnnnnnnnnnnnnnntttggagagttatgtgtctgtgagaggtgcttaccctatcccccctgaaaacacaaagcaatactctttgttactgatatgcgcgggtgttcgtgttttgg

SEQ ID NO: 232459 - DNA, 308 bp, Homo Sapiens
ctattaaagacaactttgtacaaaaaagttggcatgaagtcactctttaaatttgcgtgagaagccatttgacttggtgtccccttcctaggtgctggtaacacagtctaatgccttccctaaaactgcccggaaacaatacttttgctgtgccttcatgtgatgcaatcagccaaaggccctatgctggaatggcaccatccttcacatcataactgcatcctctggaaaatattacacagtcatagacgaggagccctattgggggcagactgcccatttttattttgaagttcttgcgctaaatg

SEQ ID NO: 232460 - DNA, 931 bp, Homo Sapiens
  misc_feature (86)..(630): n is a, c, g, or t
ttgggtagaattcaatgattttttagcatattcagagttgtacaaccatcaccacaatcaactttaaaacatttacatcacaccannnnnnnnnnnnnnnnnnnnnnnnnnnnnnnnnnnnnnnnnnnnnnnnnnnnnnnnnnnnnnnnnnnnnnnnnnnnnnnnnnnnnnnnnnnnnnnnnnnnnnnnnnnnnnnnnnnnnnnnnnnnnnnnnnnnnnnnnnnnnnnnnnnnnnnnnnnnnnnnnnnnnnnnnnnnnnnnnnnnnnnnnnnnnnnnnnnnnnnnnnnnnnnnnnnnnnnnnnnnnnnnnnnnnnnnnnnnnnnnnnnnnnnnnnnnnnnnnnnnnnnnnnnnnnnnnnnnnnnnnnnnnnnnnnnnnnnnnnnnnnnnnnnnnnnnnnnnnnnnnnnnnnnnnnnnnnnnnnnnnnnnnnnnnnnnnnnnnnnnnnnnnnnnnnnnnnnnnnnnnnnnnnnnnnnnnnnnnnnnnnnnnnnnnnnnnnnnnnnnnnnnnnnnnnnnnnnnnnnnnnnnnnnnnnnnnnnnnnnnnnnnnnnnnnnnnnnnnnnnnnnnnnnnnnnnnnnnnnnnnnnnnnnnnnnnnnnnnnnnnnnnnnnnnnnnnnnnnnnnnnnnntaaataaataaatgcacacctccgaaaaggaaccccatatcccttacgtatgatgccccaatctctatattctcaccaactcaaagcaaccactaatctacttcctgcctccctggatttgcctgttctcagcgtttcagataaatggaatcatacaatatatagcctttgatgactggtttccttcactatgctgtgttcaagtttcatccgtgttgtcacataaattggtacttccttcctttttatggccaaataatttcccattgtatggacacacacattttgtttatccattcat

SEQ ID NO: 232461 - DNA, 499 bp, Homo Sapiens
  misc_feature (84)..(96): n is a, c, g, or t
  misc_feature (176)..(317): n is a, c, g, or t
ccttttaaaagccaaccttgtacaaaaaagttggcattctataaccatgattgacttgggcttctcaaaaagtcagtgtcatgnnnnnnnnnnnnnggggagagacttgtaagatacaatgaccaaatgcaatgtttgaatctttattgtattctggatatttaaaaagacaaaannnnnnnnnnnnnnnnnnnnnnnnnnnnnnnnnnnnnnnnnnnnnnnnnnnnnnnnnnnnnnnnnnnnnnnnnnnnnnnnnnnnnnnnnnnnnnnnnnnnnnnnnnnnnnnnnnnnnnnnnnnnnnnnnnnnnnnnnnnnnncagcctcatctctttgttctaaagatggtataaccacccccaaattttctttttatactattaatgaatcaatcaattcatatctatttattaaatttctaccgcttttaggccaaaaaaatgtaaaatcgttctctgccccacatagcttacaagccagctggagaaatatggtactcatt

SEQ ID NO: 232462 - DNA, 531 bp, Homo Sapiens
  misc_feature (165)..(459): n is a, c, g, or t
ttggcaaatttttgaacgtagggaactcactgataaatataattatacataaaccctagaccacatctctcgtgatattattagtatagattcctagaagtagagttgctatgtcaaaagtatgaagatttattttctattttcatctttaatcggattttcatnnnnnnnnnnnnnnnnnnnnnnnnnnnnnnnnnnnnnnnnnnnnnnnnnnnnnnnnnnnnnnnnnnnnnnnnnnnnnnnnnnnnnnnnnnnnnnnnnnnnnnnnnnnnnnnnnnnnnnnnnnnnnnnnnnnnnnnnnnnnnnnnnnnnnnnnnnnnnnnnnnnnnnnnnnnnnnnnnnnnnnnnnnnnnnnnnnnnnnnnnnnnnnnnnnnnnnnnnnnnnnnnnnnnnnnnnnnnnnnnnnnnnnnnnnnnnnnnnnnnnnnnnnnnnnnnnnnnnnnnnnnnnnnnnnnnnnntacatatatatatagctgcccattaaaacaaagttgcaccattttgccatctcacttcctggaagtacctac

SEQ ID NO: 232463 - DNA, 355 bp, Homo Sapiens
  misc_feature (46)..(297): n is a, c, g, or t
ttgggagaggaattggtaatctcaatgctttcaaagaacaagatgnnnnnnnnnnnnnnnnnnnnnnnnnnnnnnnnnnnnnnnnnnnnnnnnnnnnnnnnnnnnnnnnnnnnnnnnnnnnnnnnnnnnnnnnnnnnnnnnnnnnnnnnnnnnnnnnnnnnnnnnnnnnnnnnnnnnnnnnnnnnnnnnnnnnnnnnnnnnnnnnnnnnnnnnnnnnnnnnnnnnnnnnnnnnnnnnnnnnnnnnnnnnnnnnnnnnnnnnnnnnnnnnnnnnnnnnnnnnnnnnnnnnnnnnnnnncttggattacttataaatgtatattgtgaaatttagggcagcaactaaaaattttttt

SEQ ID NO: 232464 - DNA, 644 bp, Homo Sapiens
  misc_feature (130)..(138): n is a, c, g, or t
  misc_feature (275)..(301): n is a, c, g, or t
  misc_feature (322)..(600): n is a, c, g, or t
ttggtttagttttatatttattgagtacttgaatttggggcttaaattttaaacttattttctcaagctaactttttctaggaagaaaggttctgcaggctggaaaagtagggggaagataagagaaagnnnnnnnnntaagatgggatgtaccaatgaagaaaaatacgatgagagggtctatgaaaagtccagtttgtgaaagatagaaagtatatgaaaagaataagcaaatagattaataccatttaaaaacatttctgcagaaacttgcnnnnnnnnnnnnnnnnnnnnnnnnnnngagaaatttttggccagttgnnnnnnnnnnnnnnnnnnnnnnnnnnnnnnnnnnnnnnnnnnnnnnnnnnnnnnnnnnnnnnnnnnnnnnnnnnnnnnnnnnnnnnnnnnnnnnnnnnnnnnnnnnnnnnnnnnnnnnnnnnnnnnnnnnnnnnnnnnnnnnnnnnnnnnnnnnnnnnnnnnnnnnnnnnnnnnnnnnnnnnnnnnnnnnnnnnnnnnnnnnnnnnnnnnnnnnnnnnnnnnnnnnnnnnnnnnnnnnnnnnnnnnnnnnnnnnnnnnnnnnnnnnnnnnnnnnnnnnntgtgaaatctcctgaaatagaaacccagctttcctgttcaaata

SEQ ID NO: 232465 - DNA, 774 bp, Homo Sapiens
  misc_feature (281)..(304): n is a, c, g, or t
  misc_feature (363)..(394): n is a, c, g, or t
  misc_feature (404)..(722): n is a, c, g, or t
ttggcaaactggctgccagcacatcacactacgtatgtttgtgggttcatatgtgtccacgtgcagaatctgcccatttcctggatcatcctgggccatctggggaagcctttttaattttttcttttgcctcctgcctttcaagcttctcttttgattcttgtggcttgtagtccaacaagagtagaaggaaagagcttcaggaagtgaggagtttattaaaattcctttgaagcatttcaattcagtaagaggaactatcttttctgttagctaagacnnnnnnnnnnnnnnnnnnnnnnnngcaaataacaacaaccctcaaaaaaatataaatgtttttaggagatccattttagttcnnnnnnnnnnnnnnnnnnnnnnnnnnnnnnnngggaaggaannnnnnnnnnnnnnnnnnnnnnnnnnnnnnnnnnnnnnnnnnnnnnnnnnnnnnnnnnnnnnnnnnnnnnnnnnnnnnnnnnnnnnnnnnnnnnnnnnnnnnnnnnnnnnnnnnnnnnnnnnnnnnnnnnnnnnnnnnnnnnnnnnnnnnnnnnnnnnnnnnnnnnnnnnnnnnnnnnnnnnnnnnnnnnnnnnnnnnnnnnnnnnnnnnnnnnnnnnnnnnnnnnnnnnnnnnnnnnnnnnnnnnnnnnnnnnnnnnnnnnnnnnnnnnnnnnnnnnnnnnnnnnnnnnnnnnnnnnnnnnnnnnnnnnnnnnnnnnnaagaccctgtctccgaaacaaataaaaaatactgtaataaagtacttataaa

SEQ ID NO: 232466 - DNA, 103 bp, Homo Sapiens
cctgagggaatgtgaattaaagcttgtgaatgacttcttcttgggggccccccttgaggatttcattgaaaatgcccctctcttcctatataaatattttttt

SEQ ID NO: 232467 - DNA, 459 bp, Homo Sapiens
  misc_feature (330)..(384): n is a, c, g, or t
ttgggtctctcctgacgttccctatacaaagggcattattaaaaaaattttaatctcaatattctattgagttgactctggaccctttgtctggtgatgcatctaaccttttgagcctatatgtaccaaatgggagggattatttataataaaaagtataatgggctgtatgttcaaatatttttcctaaaaacgttgatggattgtggggtttgaaggagtattgccacttctttgtatgtctttgatttatctgtttactaggccattaactgttacttgaccttattcaattctgattcttttctaacccccacagcaaatgattannnnnnnnnnnnnnnnnnnnnnnnnnnnnnnnnnnnnnnnnnnnnnnnnnnnnnnctcttctcaagactgtgcacttacttatctggaataattggtggaccacccatcagccaattcataaagaaggaa

SEQ ID NO: 232468 - DNA, 294 bp, Homo Sapiens
  misc_feature (92)..(101): n is a, c, g, or t
ttggggtgatattacaagtgaaaaacattgtgcctggctgacataactgttcttgcgaatagttacctagttatattactctcagctgattnnnnnnnnnnttcttaaacacagggtcttgccatggtgccccaccatggttcccactcctgtgtccttgtgattctcccccgtccacccccccaaggggtgggatgacagaatgagcctgtgcaagaggaagatttttaaaatgtaatttaaaaactttttttcctgtatcgtgaaggcattagagtctgaactaacaccttt

SEQ ID NO: 232469 - DNA, 440 bp, Homo Sapiens
  misc_feature (83)..(129): n is a, c, g, or t
gaaaaggaatcttgctctgttacccggctggggcgcaggggggtggtctccccgcaacctccccctggcgggttcaagcgatnnnnnnnnnnnnnnnnnnnnnnnnnnnnnnnnnnnnnnnnnnnnnnnacatggctggctaatttttcaagggctttttactccccttggcattaaattttattctgcaaacttctaacttccattgttgtaaaagaaaagcccgaggaagggccgaaactccttttaaaatcatttgttttttttgcccggaaacttacaaaaatttccctttatcccggaaattgagggctttttacaggaaatttctaaaagggggcctttttttctcaatcccggctggaatttaatgaacccttttaaaaaacaaatcttttttaatcccaaaagacttttccccttcaccttctctctctctc

SEQ ID NO: 232470 - DNA, 346 bp, Homo Sapiens
ttggaaatcaagattggatggaatgaagacatgagttgggatgcgatgccatgactgttctgttctgaccccacgccaaactctactcttggttggcccttttgatgtcacgtattggagcaaaacagtaaggactttgttgccctgcccctgcatgcaatgaaccgaaacatgggatggacctgacctgcaatgacactctcatctggtctggttgacttaactgacctgaagattcaatccttgatctgaacatgataagattccactccccctaccctcttttcattttcatatcggctgctatgctgtccgtttactttccaaattgaattggagcatacca

SEQ ID NO: 232471 - DNA, 254 bp, Homo Sapiens
gggcccgccaataaagggccagctatatttttaacataacccaagtacataccccttcccaccgctataccccaaaaatctcagcccttgtactttttcctaatctcctacacctatcaaaagcccccccctggctaaaaggaatttgggggtttgggaaattttttaatccgggcaaaacctgtaataaaaacccaatgtccaaactcctcctatgcccccacccaagggcccttgagctggttcccattccc

SEQ ID NO: 232472 - DNA, 260 bp, Homo Sapiens
ttggcttgactatacctctcacgcacattttggatcggcatctagtctttccgcttcttgaatttctctctcaccaggatatatataatgaaaaggaattattgaaggtagattggaccttcttatagataaccccctgccccactttgctatggatgtattaacctttctttattctgatgattttcctcatgctttgaaacacaaaagatggtcagtgtttggccaactgacgcggcttcacgaataaacaaaatcaa

SEQ ID NO: 232473 - DNA, 887 bp, Homo Sapiens
ttgggtgtcttaacggtttccagcccattggtcgccgacctgctaactacaaaaccagcatgcgctgtctgtcctcccccgtggtgcgcagccctggagggagggacagggcggtgtggactcgtcctttcctaagcgatgccacatgctgattctgtgccaccccctcgccaagggagtccgcagaaggacttgaggggcaggtctaggctgggcgatgaggacggtgtgaccctgcgaagtgcacctcccttgctcaaatcggaggtgtctggtcctcactgcacagcccactgcacatctcggtgtcctctcacatacacaccagtggggggtttccagagcatcgcacctcttccagcccagggagccgcctgctctgctaaactctatgggaactgagacatccacctgctgcgtgacccacccgtgcgcaacttcagagctttcagggggtgatgcgggctgtggctccttcgtgaaaatgtcaccgtctgcagcgcctttcttgtgatatagaacttgacgggtgagagcgggtatttcttgggttactcaggatctgctaacagcagaggagaaaaccacaattcccaggcacaagaatctacctaaagacgatggtttagatattttacagttgaaatcaccagcctcatctcaactgagtcctgactgacgagtgtctcaaaaaagcagttggtgacctcatcctctcaggaacaggtggtgctccagctttgtggggatgactttcaaggtgcagagcacttgagccgcatttgaagtcattcatgttttacatctctgctttggatggaaagttgatcccccacagtcgttggggatgtaccttaatatactggggcttatcagttaaatttttc

SEQ ID NO: 232474 - DNA, 780 bp, Homo Sapiens
ttggatttcctcagaacaatatgggctgcttctccccgacagacactaatgaccatttttgttgaagatggtatggaggactgttgttgcgtttccccaagatacctctggcaggctggggacagtaatgaccctcttaagaatggagtgatgccttgcttcagagggatctcaccttgtgcccgttcggagtaaactattaatgctatcgaatctatgaggtttgtgcctatggctccattcctgtggtgcaacacgtgatgagtgctggcctgtgtgggaatatgtctgtgcgactgggtgatcccctgtctgtactctggtccatgggtgctccttttatctttatcaagaactggaaggaactccctgctgttttacacgtggccaaactattgttttacaacagagcctggatgtaccagaaccgctacttcaacgctatgaacacttccctacggatgttacaatggaatttgggccggcttataagtactatttttaatgtgccctggagtgcattatctatttgagacgctcttcctgaccttggtgtccgggctagagttcattcgtttcgagctggatctggatgccccttacctagacctgaccccctacatgcccgactactacaaacctcagtacctgctggactttgaagaccgcctatctatctcggtccacggctcagacagtctgtccctcaactcttacaactcccgtctcctcccccaacctgtgagtgcgatgacagggcgattgccccatctagtgagg

SEQ ID NO: 232475 - DNA, 422 bp, Homo Sapiens
ctccgtccactaatgaaacctcatcatgggaaacaagaatggctttctaaaggacatggggaatacagagaaatccctagtgaaagagacttttttcaagaagtctcggacagtgaatatgtggtttgccatttctacttagagtcctcatacgagtgtaatatactatacagacatctgggagtattgtccaataaacattcttttaccaaatttttgaatttgaatgtggaaaaagcacctttcgtttgtgatagactgcatatctagtcattcccacactagcactgctaaaagatgggaaaacaataaattatgttgttgggtttactgacctacgaaatacgcatgacttcccctcatacacttaataatgaaggttcgggtcttctgacattcctatttctttgatacttttaatt

SEQ ID NO: 232476 - DNA, 133 bp, Homo Sapiens
aactaaacccccaggggtatgttttgattgacctcaaggggacaggggggggaaaaaaatagtgattctgagaaaataccctttttctccattaggggtgtgctctttcctctcttatctttatattccaata

SEQ ID NO: 232477 - DNA, 421 bp, Homo Sapiens
tgtacaaatttctaggcggagtccgccccttcccgttccggttcccgttttgatggggtgggagggtggcggggagggtggagagcagctgagatggccactaatctggaccatgggagctctgcctggatggggcctatgctgccggccctgggggcacaccagtgaggcaacagctgacaagccacacaggtggggggtggggcagggattggcgaactgaatgtgggctctcaggggagcttttcttctaacttttcttctctagggcccctgtgtcccctcataagacaacatcgaatagaaaaaaccatggctgtagcatgggcttccctgcccccttgcctgcccctttcctctcctctttttccagcacagattccagaaaagagctgtgactgtggctgaatctgtggctcaa

SEQ ID NO: 232478 - DNA, 411 bp, Homo Sapiens
  misc_feature (71)..(360): n is a, c, g, or t
aattacaaaagacatgttgggtttttccccacagcacagaaataggaaacgataacaaattactatccccnnnnnnnnnnnnnnnnnnnnnnnnnnnnnnnnnnnnnnnnnnnnnnnnnnnnnnnnnnnnnnnnnnnnnnnnnnnnnnnnnnnnnnnnnnnnnnnnnnnnnnnnnnnnnnnnnnnnnnnnnnnnnnnnnnnnnnnnnnnnnnnnnnnnnnnnnnnnnnnnnnnnnnnnnnnnnnnnnnnnnnnnnnnnnnnnnnnnnnnnnnnnnnnnnnnnnnnnnnnnnnnnnnnnnnnnnnnnnnnnnnnnnnnnnnnnnnnnnnnnnnnnnnnnnnnnnnnnnnnnnnnnnnnnnnggtcaagaaaaaaacaaatacacgaagaaccatactttcttgtacaaaggg

SEQ ID NO: 232479 - DNA, 323 bp, Homo Sapiens
  misc_feature (42)..(107): n is a, c, g, or t
  misc_feature (109)..(180): n is a, c, g, or t
ccatataaaaaacaactttgtacaaaaaagttggcattgatnnnnnnnnnnnnnnnnnnnnnnnnnnnnnnnnnnnnnnnnnnnnnnnnnnnnnnnnnnnnnnnnnncnnnnnnnnnnnnnnnnnnnnnnnnnnnnnnnnnnnnnnnnnnnnnnnnnnnnnnnnnnnnnnnnnnnnnnnngtgggaatgtaaggcttattttcttggcacttggatattcaattgcttctttaccatttattgaaaagactgtccattctgcattgaattgcctttgtacctttgtcaaaaatcatttgtctctaaaaaaatcaggtttccag

SEQ ID NO: 232480 - DNA, 533 bp, Homo Sapiens
  misc_feature (143)..(435): n is a, c, g, or t
ttggggtttaaccccattgcataccttaattcatgcagtcatgccatgctattgggtgcattggtattttcctagtttgctgtcctacatatggatcttttgataaatctcatttggtgatggatgtttagtaagatgctagnnnnnnnnnnnnnnnnnnnnnnnnnnnnnnnnnnnnnnnnnnnnnnnnnnnnnnnnnnnnnnnnnnnnnnnnnnnnnnnnnnnnnnnnnnnnnnnnnnnnnnnnnnnnnnnnnnnnnnnnnnnnnnnnnnnnnnnnnnnnnnnnnnnnnnnnnnnnnnnnnnnnnnnnnnnnnnnnnnnnnnnnnnnnnnnnnnnnnnnnnnnnnnnnnnnnnnnnnnnnnnnnnnnnnnnnnnnnnnnnnnnnnnnnnnnnnnnnnnnnnnnnnnnnnnnnnnnnnnnnnnnnnnnnnnnnncatgcccggctgaggctaggattttaattatattccaatatttattagtctcttcgttattactcgcataaaccttctttttaggtattttcctccta

SEQ ID NO: 232481 - DNA, 551 bp, Homo Sapiens
  misc_feature (133)..(285): n is a, c, g, or t
  misc_feature (291)..(511): n is a, c, g, or t
ttggactgaataaatgaatgagagactgcttgtttgcaaggaatcaaactagactttgattggttgttcactccagtaaaaactcaaatgcctaccatacatgagtgtggagtagctggagtaaacatacttnnnnnnnnnnnnnnnnnnnnnnnnnnnnnnnnnnnnnnnnnnnnnnnnnnnnnnnnnnnnnnnnnnnnnnnnnnnnnnnnnnnnnnnnnnnnnnnnnnnnnnnnnnnnnnnnnnnnnnnnnnnnnnnnnnnnnnnnnnnnnnnnnnnnnnnnnactgtnnnnnnnnnnnnnnnnnnnnnnnnnnnnnnnnnnnnnnnnnnnnnnnnnnnnnnnnnnnnnnnnnnnnnnnnnnnnnnnnnnnnnnnnnnnnnnnnnnnnnnnnnnnnnnnnnnnnnnnnnnnnnnnnnnnnnnnnnnnnnnnnnnnnnnnnnnnnnnnnnnnnnnnnnnnnnnnnnnnnnnnnnnnnnnnnnnnnnnnnnnnnnnnnnnnnnnnnnnnnntgcactcctagacaacagagcaagaacccgtctcttaaat

SEQ ID NO: 232482 - DNA, 530 bp, Homo Sapiens
  misc_feature (54)..(98): n is a, c, g, or t
  misc_feature (106)..(402): n is a, c, g, or t
ttaaaactacctctattagtggatgacatgattttctaaaaaatcctaaagaannnnnnnnnnnnnnnnnnnnnnnnnnnnnnnnnnnnnnnnnnnnnttattagnnnnnnnnnnnnnnnnnnnnnnnnnnnnnnnnnnnnnnnnnnnnnnnnnnnnnnnnnnnnnnnnnnnnnnnnnnnnnnnnnnnnnnnnnnnnnnnnnnnnnnnnnnnnnnnnnnnnnnnnnnnnnnnnnnnnnnnnnnnnnnnnnnnnnnnnnnnnnnnnnnnnnnnnnnnnnnnnnnnnnnnnnnnnnnnnnnnnnnnnnnnnnnnnnnnnnnnnnnnnnnnnnnnnnnnnnnnnnnnnnnnnnnnnnnnnnnnnnnnnnnnnnnnnnnnnnnnnnnnnnnnnnnnnnnnnnnnnntgtcaaattccagctgcttttttgcagttgaccctaaaattcaagctgatcctaaaattcaagctgaccctaaaattcaaatgaaaatgaaagggacattggatagccaaaatattcttgagaaaaaa

SEQ ID NO: 232483 - DNA, 237 bp, Homo Sapiens
  misc_feature (46)..(104): n is a, c, g, or t
  misc_feature (128)..(138): n is a, c, g, or t
tttttgggggggtaacccctggcccaaaaaggggggggccttgggnnnnnnnnnnnnnnnnnnnnnnnnnnnnnnnnnnnnnnnnnnnnnnnnnnnnnnnnnnntttttaattgggacccctggggtnnnnnnnnnnnccccgggccccgggcctttcgccctttgggggaaacctccccggggaggttttctttttaaaaaaggggaaacctgtttcccgggaaaaaatttaaaga

SEQ ID NO: 232484 - DNA, 214 bp, Homo Sapiens
  misc_feature (77)..(89): n is a, c, g, or t
ggaccctgggatttataaaaaaacaacaaaccccccgggaaattttcaccgttgaaatcccccttccccaatttttnnnnnnnnnnnnngggggaagaaaaaagaaagggagacccggggggaacctttaggtaaaacccaaaattttaaagggcccaggggaccaaggggaaggaaaaatatttaaaattaagggttttcggacaaacacccc

SEQ ID NO: 232485 - DNA, 789 bp, Homo Sapiens
  misc_feature (94)..(149): n is a, c, g, or t
  misc_feature (154)..(405): n is a, c, g, or t
  misc_feature (407)..(426): n is a, c, g, or t
  misc_feature (429)..(724): n is a, c, g, or t
ttgggaaaggagcagatattaatgctccagataaacatcatattactcctcttctgtctgctgtctatgagggtcatgtttcctgtgtgaaatnnnnnnnnnnnnnnnnnnnnnnnnnnnnnnnnnnnnnnnnnnnnnnnnnnnnnnnncattnnnnnnnnnnnnnnnnnnnnnnnnnnnnnnnnnnnnnnnnnnnnnnnnnnnnnnnnnnnnnnnnnnnnnnnnnnnnnnnnnnnnnnnnnnnnnnnnnnnnnnnnnnnnnnnnnnnnnnnnnnnnnnnnnnnnnnnnnnnnnnnnnnnnnnnnnnnnnnnnnnnnnnnnnnnnnnnnnnnnnnnnnnnnnnnnnnnnnnnnnnnnnnnnnnnnnnnnnnnnnnnnnnnnnnnnnnnnnnnnnnnnnnnnnnnntnnnnnnnnnnnnnnnnnnnntcnnnnnnnnnnnnnnnnnnnnnnnnnnnnnnnnnnnnnnnnnnnnnnnnnnnnnnnnnnnnnnnnnnnnnnnnnnnnnnnnnnnnnnnnnnnnnnnnnnnnnnnnnnnnnnnnnnnnnnnnnnnnnnnnnnnnnnnnnnnnnnnnnnnnnnnnnnnnnnnnnnnnnnnnnnnnnnnnnnnnnnnnnnnnnnnnnnnnnnnnnnnnnnnnnnnnnnnnnnnnnnnnnnnnnnnnnnnnnnnnnnnnnnnnnnnnnnnnnnnnnnnnnnnnnnnnnnnnnnnnnnnnnnnnnnnnnnnntttgtcgtgtaaacagaccatgtaaacttacagcgtcaataaatacatttcagtactgtaaatgt

SEQ ID NO: 232486 - DNA, 252 bp, Homo Sapiens
  misc_feature (200)..(208): n is a, c, g, or t
cttgcctataaagcatttaccccccctgcccccaactccctccttttaaagaaaaaatttgaaatgtaaggttgtgtaaaatttgtttttaaactgaacggggcttttttttgtatacttaaccccctcccaaatgggcctttaaatagccctggcggggtggtattttcaaaagcccataacctgggcggggacagaannnnnnnnnaaaaatggcacaaaacttaaagcgggttctttttggggcccttc

SEQ ID NO: 232487 - DNA, 550 bp, Homo Sapiens
  misc_feature (51)..(232): n is a, c, g, or t
  misc_feature (240)..(360): n is a, c, g, or t
actttttgcatgctaatgcataattgggatataatgggcagtgaggatgannnnnnnnnnnnnnnnnnnnnnnnnnnnnnnnnnnnnnnnnnnnnnnnnnnnnnnnnnnnnnnnnnnnnnnnnnnnnnnnnnnnnnnnnnnnnnnnnnnnnnnnnnnnnnnnnnnnnnnnnnnnnnnnnnnnnnnnnnnnnnnnnnnnnnnnnnnnnnnnnnnnnnnnnnnnnnnnnnnnnnccgtcttnnnnnnnnnnnnnnnnnnnnnnnnnnnnnnnnnnnnnnnnnnnnnnnnnnnnnnnnnnnnnnnnnnnnnnnnnnnnnnnnnnnnnnnnnnnnnnnnnnnnnnnnnnnnnnnnnnnnnnnnnacaggtctcagcctcattttgcccagcccctatttaagacggatttgctgtggttcaatgcttctgacatattcctcatggtgaatgctggattttgcatgcccgaagtcctgcgccacactgtatgtttgccttttgcacgggctgtatggctatgactaatcatggaaccctgccttccaatgtaaat

SEQ ID NO: 232488 - DNA, 644 bp, Homo Sapiens
  misc_feature (97)..(395): n is a, c, g, or t
  misc_feature (401)..(426): n is a, c, g, or t
ttggtgaagaagccctgttctcctgcttccactgtctccagccaagaaaatgcacttcagattagaaaatgcaaaatagattaattcatatagaacnnnnnnnnnnnnnnnnnnnnnnnnnnnnnnnnnnnnnnnnnnnnnnnnnnnnnnnnnnnnnnnnnnnnnnnnnnnnnnnnnnnnnnnnnnnnnnnnnnnnnnnnnnnnnnnnnnnnnnnnnnnnnnnnnnnnnnnnnnnnnnnnnnnnnnnnnnnnnnnnnnnnnnnnnnnnnnnnnnnnnnnnnnnnnnnnnnnnnnnnnnnnnnnnnnnnnnnnnnnnnnnnnnnnnnnnnnnnnnnnnnnnnnnnnnnnnnnnnnnnnnnnnnnnnnnnnnnnnnnnnnnnnnnnnnnnnnnnnnntaatannnnnnnnnnnnnnnnnnnnnnnnnnaaccaatagttaagaaaaataaggggatagtaaaagccctaaactccttcaacagtcatggctataatagctgcaattgattatttatagggacttgatgtacattgtctctctatgagtttggtgttattagccttattttacttatgagtccacaaggaactgagaaattaagcatgctgggttctcagaactagagagattagaactcatgtctg

SEQ ID NO: 232489 - DNA, 607 bp, Homo Sapiens
tacttatagggaataattttgtgacctcagtgaaaatggactaaatgtctcatagtaagtcttttccatcgttgatgcctcattcaggttttctgtggccaccacataaccagatgaggtgctcctcagcttctcctggccaccttaggagagaattccaaagactaggataggacttcatcttttattctttttaaaatcgacattttaattagatcttatattgtttatgcgtcagtgaaaaggtaaaaaataacagaggcttaaaaggggcaaaaacctggtgaagttggtcctttttagtagtgatagaaactagatagttggtgttatagtttggttttataatgtttgctataagaagaggcagttgatatcatcgtaggttttatttatgtttatgggaggaaatgacaaagttccaggtaggtgtggtcctacttctataatgattcatgtgtgcaacaaaacaaatttagctatactttcccagactttcacttcatacccttaaatgaacaaaggacattcagatttttcatttccattgtggtaagacttatattccattgtggatgtatgtgggaaactttaaattgtgactttc

SEQ ID NO: 232490 - DNA, 146 bp, Homo Sapiens
ccgggtccagcttgtagcggctgctggcggtggggcttccagggctggccgagcgggcttcgggagccgcccgcggttatatggaagaggatggcaataagggcaagaagcctggaattgtctcgccatttaaactattattccta

SEQ ID NO: 232491 - DNA, 878 bp, Homo Sapiens
  misc_feature (77)..(300): n is a, c, g, or t
  misc_feature (495)..(509): n is a, c, g, or t
  misc_feature (535)..(613): n is a, c, g, or t
ttggctaaactataaaggcaagaagacacattatataccattgtcattttttcaaagcctttatttttgtgctatgnnnnnnnnnnnnnnnnnnnnnnnnnnnnnnnnnnnnnnnnnnnnnnnnnnnnnnnnnnnnnnnnnnnnnnnnnnnnnnnnnnnnnnnnnnnnnnnnnnnnnnnnnnnnnnnnnnnnnnnnnnnnnnnnnnnnnnnnnnnnnnnnnnnnnnnnnnnnnnnnnnnnnnnnnnnnnnnnnnnnnnnnnnnnnnnnnnnnnnnnnnnnnnnnnnnnnnnnnnnnnnnnatatctgatttcattcatacaacacctatttccatactttaaacaactcgtaaattgagaagtatcatctaatgtcataagaaagcactggggcataatttaattgatggtggtttttcttagtgcacataaaataatgttcttgttggcttcacagatttgatgaaatacagtattagccatgaaatctagacnnnnnnnnnnnnnnnaagaaacagtctcactctgttgctcnnnnnnnnnnnnnnnnnnnnnnnnnnnnnnnnnnnnnnnnnnnnnnnnnnnnnnnnnnnnnnnnnnnnnnnnnnnnnnngaaaaatattatgttctacttaccttgaaagaggaaagaaaggcttgaattgatcaataccagtttgaataagatacttatgtgaacaagcattctcaacattattattaaagtaaaactactcagtttacagaatggggatctgaaactacagccttttgctattaaacccaatacttgtgatctactttgtttgagcaaaacagcattatttgttatgttaatgatggttaatttccattttattggttttatgtttatttta

SEQ ID NO: 232492 - DNA, 614 bp, Homo Sapiens
ttgggcccggcgcccttcctccgcttgggttctctggcggccctgggaccagaccccgagctaccacattatcatagagatgaaaggctggggttggctgggggggcttctgggggccctgctgggaaccgcctgcgcgctcaggatccaggatctcccctgcggaccctgccgggctctgggggatgagctaaaatgggtcattgcgaaggtggaccgcctgagcatcattcaaatgggatatttccggatgactacggatgggaacatgtctgtggtggaggcgccttatgcccgctatgaggcccaccttccagacctgctggaggagatatgtgatcggatgatccagtagaccgaaccgattgatcctttcccccatctgagaatcacgtacgtgtaatgggccggaatggagaatccagggaactggacctaccagggatccgaatcccctcaaatcttacttctaccctcaactttgcctgtgaaaccattgcggatgaataccagtatgaactcattgaattcctttcccgagaggctgacaatgtcacgtgaccatctttgtaaaagccaacagatctttgtgactatgccctgcacatatcgca

SEQ ID NO: 232493 - DNA, 291 bp, Homo Sapiens
  misc_feature (96)..(251): n is a, c, g, or t
tttttctttccttagtacgggggtttagtgctgtaaattttccccagagtactgctttattggcttcacacaacttttgataatttcaatatactnnnnnnnnnnnnnnnnnnnnnnnnnnnnnnnnnnnnnnnnnnnnnnnnnnnnnnnnnnnnnnnnnnnnnnnnnnnnnnnnnnnnnnnnnnnnnnnnnnnnnnnnnnnnnnnnnnnnnnnnnnnnnnnnnnnnnnnnnnnnnnnnnnnnnnnnnnnntggtgtaatcagagaataaactttgtataatttgagtctt

SEQ ID NO: 232494 - DNA, 596 bp, Homo Sapiens
  misc_feature (85)..(149): n is a, c, g, or t
ttggaaagagggtgtctttccccgctcgcgtgtgtttcccaatcctgccgactgattatttatttgcttcatgaatgatctttcnnnnnnnnnnnnnnnnnnnnnnnnnnnnnnnnnnnnnnnnnnnnnnnnnnnnnnnnnnnnnnnnngtgtgtgtctgcttgtgactggccctccttcgaatgtaactgagcttgttcaatctacttttgaagaatgtggctggccttcccttccctctttctttcttcctgcatccctcccctgtccaaaacatccttacagactgaatgatacattcaatgactgtcttacttatgttgcgggtgattgactaaacaagctttctgtatgggtagggattgtattaatgatagaaaatgattcttgcctgaaaaccgatcgtgcatggatcggtctgttctttatttttttatttaagtatcaatgagcgtgacttaatccaacgaacggatgtcaataatgagtgaccaacatatcttttggtgactgaatgattgatttgtggggcggtctcatccctcgcatggactgtagtttggaatgacaggcatgtgtatgtatgaaacaaactc

SEQ ID NO: 232495 - DNA, 706 bp, Homo Sapiens
  misc_feature (54)..(418): n is a, c, g, or t
  misc_feature (422)..(525): n is a, c, g, or t
  misc_feature (538)..(547): n is a, c, g, or t
  misc_feature (586)..(637): n is a, c, g, or t
cctttataccttaaagcagtgtaagaacaagtgtcttcaattataggaaagagnnnnnnnnnnnnnnnnnnnnnnnnnnnnnnnnnnnnnnnnnnnnnnnnnnnnnnnnnnnnnnnnnnnnnnnnnnnnnnnnnnnnnnnnnnnnnnnnnnnnnnnnnnnnnnnnnnnnnnnnnnnnnnnnnnnnnnnnnnnnnnnnnnnnnnnnnnnnnnnnnnnnnnnnnnnnnnnnnnnnnnnnnnnnnnnnnnnnnnnnnnnnnnnnnnnnnnnnnnnnnnnnnnnnnnnnnnnnnnnnnnnnnnnnnnnnnnnnnnnnnnnnnnnnnnnnnnnnnnnnnnnnnnnnnnnnnnnnnnnnnnnnnnnnnnnnnnnnnnnnnnnnnnnnnnnnnnnnnnnnnnnnnnnnnnnnnnnnnnnnnnnnncagnnnnnnnnnnnnnnnnnnnnnnnnnnnnnnnnnnnnnnnnnnnnnnnnnnnnnnnnnnnnnnnnnnnnnnnnnnnnnnnnnnnnnnnnnnnnnnnnnnnnnnnntctccctctctgnnnnnnnnnnctctttctaactttttgtgacatggtctggctctgtcannnnnnnnnnnnnnnnnnnnnnnnnnnnnnnnnnnnnnnnnnnnnnnnnnnntgggatcaagtgatcaatcctcccacctcatcctaccaagtagtagggaccacaggtgtatgccaccca

SEQ ID NO: 232496 - DNA, 423 bp, Homo Sapiens
  misc_feature (101)..(120): n is a, c, g, or t
  misc_feature (143)..(194): n is a, c, g, or t
ttggatttctgttctatcttaccaagagggagtatggttagtatttgaaattgtttattattttaataagtggttataacttttgagtcagtggtttatgnnnnnnnnnnnnnnnnnnnngagacagggtctcgctctgtctnnnnnnnnnnnnnnnnnnnnnnnnnnnnnnnnnnnnnnnnnnnnnnnnnnnntgggctcaagcactctgcccacctcagcctcctgagtagctgggaccacaagcgcccaccacgtcagcttaatttttttgttttgtttcttgagacagaatcttgctctcttgcccaggttggtggtcttccctgttggcaatctcagctcactgcaacttctacctcttggattcaagcacttctccttgcctcaaccgcctctttagctgggattacaggtgcgtgc

SEQ ID NO: 232497 - DNA, 146 bp, Homo Sapiens
gcccaggggggtctcgaaaacctgatgttcaccgctgccccccgccttgggcccccaaaatggcgggattaaaggggggagcccccctggctgggccccaaaacggtttttttccccaatggcttttaattttattttcccggggg

SEQ ID NO: 232498 - DNA, 601 bp, Homo Sapiens
ttgggttgccgcgaccctaatcacccgccccgcttaacgcttccgtcataaataatgacgatgttgtgatttgtgggtcctctctccccgacccatcgtgccctgctgtcaattattttgcctgattgctgaccaatcccccttcccttcttcccctggggtgatcctggggacagcttggtccctggaagagagcttgctgactactaatatggatacgtggagagtttgactggggtaaatggccctgaggcacctgcctcatgcgaggcctcggtctcttattgtccctcctcctttcctggttttctcgatttctagtcctttcctttgggggctctttttttgccgactgtggcttttaccatccgtcaaatggatacatgatagcatcccttttgcctttctgttaatggttttcttgtgccaagtttggacagggatgggaaagacagcagtgtttgtcttggccacactgacttagctggagccaattactgggcacgtgtctgtgctggtgatgcgtcacactcgggacttggcttttggatcagcaaggactatgagcgcttctctcatacatgcccaatgtcaaggttgc

SEQ ID NO: 232499 - DNA, 278 bp, Homo Sapiens
acaaaaaagttggcccgggcccccttttacagcttccgtccccatgatcctgagggcttgcagtattgttgtttgaaagggggtgcctggacctcctgagatacccggaacttcaacgccagggactgagtgcatcccaggccaaactacatttccaggtgggaaaagggagcagagactgcataggccccgaagaccctctgccccttcagggattggaaacccgggcttccgacgatttcaaggtgactggggactgggaggagttcctggggctc

SEQ ID NO: 232500 - DNA, 822 bp, Homo Sapiens
  misc_feature (72)..(522): n is a, c, g, or t
  misc_feature (524)..(666): n is a, c, g, or t
ttggccataatcttgtgccacttctctagatgcagagaagactcgaaaaccagttaaagaacagtcagtggnnnnnnnnnnnnnnnnnnnnnnnnnnnnnnnnnnnnnnnnnnnnnnnnnnnnnnnnnnnnnnnnnnnnnnnnnnnnnnnnnnnnnnnnnnnnnnnnnnnnnnnnnnnnnnnnnnnnnnnnnnnnnnnnnnnnnnnnnnnnnnnnnnnnnnnnnnnnnnnnnnnnnnnnnnnnnnnnnnnnnnnnnnnnnnnnnnnnnnnnnnnnnnnnnnnnnnnnnnnnnnnnnnnnnnnnnnnnnnnnnnnnnnnnnnnnnnnnnnnnnnnnnnnnnnnnnnnnnnnnnnnnnnnnnnnnnnnnnnnnnnnnnnnnnnnnnnnnnnnnnnnnnnnnnnnnnnnnnnnnnnnnnnnnnnnnnnnnnnnnnnnnnnnnnnnnnnnnnnnnnnnnnnnnnnnnnnnnnnnnnnnnnnnnnnnnnnnnnnnnnnnnnnnnnnnnnnnnnnnnnnnnnnnnnnncnnnnnnnnnnnnnnnnnnnnnnnnnnnnnnnnnnnnnnnnnnnnnnnnnnnnnnnnnnnnnnnnnnnnnnnnnnnnnnnnnnnnnnnnnnnnnnnnnnnnnnnnnnnnnnnnnnnnnnnnnnnnnnnnnnnnnnnnnnnnnnngtttctaacaacaaaagatgaaatgcgctgatggtcagtgaggacagagggatgagagctcataagctgtcaggccctgggggctccagaggataactgaacagtagatcaacagggtccctgccctccaggagctcatactatgctgaaggagac

SEQ ID NO: 232501 - DNA, 299 bp, Homo Sapiens
  misc_feature (50)..(76): n is a, c, g, or t
  misc_feature (97)..(152): n is a, c, g, or t
  misc_feature (159)..(168): n is a, c, g, or t
actttgtacaaaaaagttgggccgcacaactttgtacaagaaagttgggnnnnnnnnnnnnnnnnnnnnnnnnnnngcctttgaaaaatatgacaannnnnnnnnnnnnnnnnnnnnnnnnnnnnnnnnnnnnnnnnnnnnnnnnnnnnnnnggttttnnnnnnnnnntccaaaaaatgaattttgcagcattttcccccagcagcacactggtaactctgacatcctgtatataatgtgttctggcaatgaagccctcaagtaccccagctgtcttatactccaacacaggacccccc

SEQ ID NO: 232502 - DNA, 865 bp, Homo Sapiens
  misc_feature (102)..(797): n is a, c, g, or t
ttggatcagatttagagactcaaaaacttcaaaattataatgtatatacttaaatttataaacttatatttacttctccgggaaaaggtctgctcaggttcnnnnnnnnnnnnnnnnnnnnnnnnnnnnnnnnnnnnnnnnnnnnnnnnnnnnnnnnnnnnnnnnnnnnnnnnnnnnnnnnnnnnnnnnnnnnnnnnnnnnnnnnnnnnnnnnnnnnnnnnnnnnnnnnnnnnnnnnnnnnnnnnnnnnnnnnnnnnnnnnnnnnnnnnnnnnnnnnnnnnnnnnnnnnnnnnnnnnnnnnnnnnnnnnnnnnnnnnnnnnnnnnnnnnnnnnnnnnnnnnnnnnnnnnnnnnnnnnnnnnnnnnnnnnnnnnnnnnnnnnnnnnnnnnnnnnnnnnnnnnnnnnnnnnnnnnnnnnnnnnnnnnnnnnnnnnnnnnnnnnnnnnnnnnnnnnnnnnnnnnnnnnnnnnnnnnnnnnnnnnnnnnnnnnnnnnnnnnnnnnnnnnnnnnnnnnnnnnnnnnnnnnnnnnnnnnnnnnnnnnnnnnnnnnnnnnnnnnnnnnnnnnnnnnnnnnnnnnnnnnnnnnnnnnnnnnnnnnnnnnnnnnnnnnnnnnnnnnnnnnnnnnnnnnnnnnnnnnnnnnnnnnnnnnnnnnnnnnnnnnnnnnnnnnnnnnnnnnnnnnnnnnnnnnnnnnnnnnnnnnnnnnnnnnnnnnnnnnnnnnnnnnnnnnnnnnnnnnnnnnnnnnnnnnnnnnnnnnnnnnnnnnnnnnnnnnnnnnnnnnnnnnnnnnnnnnnnnngatagcatgcttaggaactatttggacaattttccatatggctactaatttagaagtcaaaattccgg

SEQ ID NO: 232503 - DNA, 152 bp, Homo Sapiens
tgcccactaggccgtgtatgtgaggtcaaggctgaatcccgcaactgctgggcctcccttggtttctgtgtcatgcctgtgtgtgccaccctcaccacctttgattgggcccgtggtgctatcaactctcctggattcaataagatctcttc

SEQ ID NO: 232504 - DNA, 847 bp, Homo Sapiens
  misc_feature (281)..(372): n is a, c, g, or t
ttggcccaaaactgtcttattcccgcttctcatgctgagttcttatttgttttttcatattgttgcccattcccgtggctgtccatgctcaagactgataactagttttaagtatccttgattttatcttttagaaagaacctatccattttgccctgacccttccaattctgatctcatccctgtggtcgcatgcccttcaatcttatcttcgtgtctgatttttctttttcattcttaaaatcaggttcccctgccctttctcaattttctccttcacnnnnnnnnnnnnnnnnnnnnnnnnnnnnnnnnnnnnnnnnnnnnnnnnnnnnnnnnnnnnnnnnnnnnnnnnnnnnnnnnnnnnnnnnnnnnaagacatacatacagagttgcacagggctcccttgagagtaaccagagttctcttttctaccagtcacctcagctgaaggaaggactccggtgatgggtgttgctgggggagaggagaaaatttcatttaatggaaatatttgcttagctgttcttttctattatttcttcttcagggtcttttccccccaggtcaaggagccacaattggagttgattttatgattaagacagtggagattaatggtgaaaaagtaaagctacagatctgggacacagcaggtcaagagagatttcggtccattacccagagttactaccgaagcgccaatgccttgatcctcacctatgacattacctgtgaggaatccttccgttgccttcctgagtggctgcgggagatagaacaatatgccagcaacaagtcatcactgtgttagtgggcaacaagattgacctggctgaaaggagagag

SEQ ID NO: 232505 - DNA, 823 bp, Homo Sapiens
  misc_feature (148)..(272): n is a, c, g, or t
  misc_feature (296)..(348): n is a, c, g, or t
  misc_feature (358)..(672): n is a, c, g, or t
ttgggtgagacagcacatttatgaaggttgcatgaattgcccaagttaacatagctagttagtggcagaataggaatttgagctctaaagaccagggttttaaccacagcagtgcattgaatagtctcctcccaaacttcgtgtccannnnnnnnnnnnnnnnnnnnnnnnnnnnnnnnnnnnnnnnnnnnnnnnnnnnnnnnnnnnnnnnnnnnnnnnnnnnnnnnnnnnnnnnnnnnnnnnnnnnnnnnnnnnnnnnnnnnnnnnnnnnnggaaagggtctcactctgtcacannnnnnnnnnnnnnnnnnnnnnnnnnnnnnnnnnnnnnnnnnnnnnnnnnnnngcacgggtcnnnnnnnnnnnnnnnnnnnnnnnnnnnnnnnnnnnnnnnnnnnnnnnnnnnnnnnnnnnnnnnnnnnnnnnnnnnnnnnnnnnnnnnnnnnnnnnnnnnnnnnnnnnnnnnnnnnnnnnnnnnnnnnnnnnnnnnnnnnnnnnnnnnnnnnnnnnnnnnnnnnnnnnnnnnnnnnnnnnnnnnnnnnnnnnnnnnnnnnnnnnnnnnnnnnnnnnnnnnnnnnnnnnnnnnnnnnnnnnnnnnnnnnnnnnnnnnnnnnnnnnnnnnnnnnnnnnnnnnnnnnnnnnnnnnnnnnnnnnnnnnnnnnnnnnnnnntaacaaagactcctttgacctaattctggtcgcactcctctaagccctcaagggcctgacctttggtctccgcatctggcatgtgtagtctagttcagctgggatcagtttagtgaaaatcccccttcttgatatctctctcaatatctta

SEQ ID NO: 232506 - DNA, 569 bp, Homo Sapiens
  misc_feature (81)..(97): n is a, c, g, or t
  misc_feature (110)..(334): n is a, c, g, or t
ttggcttcagggtagcgtattctgaggcaacattaaccaaaggaaacttctttattatgaaaaatactttagaaagacacnnnnnnnnnnnnnnnnngaaacggaatttnnnnnnnnnnnnnnnnnnnnnnnnnnnnnnnnnnnnnnnnnnnnnnnnnnnnnnnnnnnnnnnnnnnnnnnnnnnnnnnnnnnnnnnnnnnnnnnnnnnnnnnnnnnnnnnnnnnnnnnnnnnnnnnnnnnnnnnnnnnnnnnnnnnnnnnnnnnnnnnnnnnnnnnnnnnnnnnnnnnnnnnnnnnnnnnnnnnnnnnnnnnnnnnnnnnnnnnnnnnnnnnnnactttgggaaactagctttgaggctagttcaagaccaacctgggcaacacggtgagaccctgtccctacaaaaaatgagagttggagtttttaactccaattgctatttttcatcaaatcaaggctggtaattaactgatatgtaccacaactattatatgtagctggccttatgtgttgttatatatttagaatattactcttgcatccagctgtttcttttgccaactgcttg

SEQ ID NO: 232507 - DNA, 645 bp, Homo Sapiens
  misc_feature (65)..(139): n is a, c, g, or t
  misc_feature (179)..(589): n is a, c, g, or t
gatggtcattatatgataaaaagattattcaacaagatgtaacaatcttaaatatgtatgcatgnnnnnnnnnnnnnnnnnnnnnnnnnnnnnnnnnnnnnnnnnnnnnnnnnnnnnnnnnnnnnnnnnnnnnnnnnnngaattcaatcactgagaaagaaaatcaacaaacacggcannnnnnnnnnnnnnnnnnnnnnnnnnnnnnnnnnnnnnnnnnnnnnnnnnnnnnnnnnnnnnnnnnnnnnnnnnnnnnnnnnnnnnnnnnnnnnnnnnnnnnnnnnnnnnnnnnnnnnnnnnnnnnnnnnnnnnnnnnnnnnnnnnnnnnnnnnnnnnnnnnnnnnnnnnnnnnnnnnnnnnnnnnnnnnnnnnnnnnnnnnnnnnnnnnnnnnnnnnnnnnnnnnnnnnnnnnnnnnnnnnnnnnnnnnnnnnnnnnnnnnnnnnnnnnnnnnnnnnnnnnnnnnnnnnnnnnnnnnnnnnnnnnnnnnnnnnnnnnnnnnnnnnnnnnnnnnnnnnnnnnnnnnnnnnnnnnnnnnnnnnnnnnnnnnnnnnnnnnnnnnnnnnnnnnnnnnnnnnnnnnnnnnnnnnntcaaaaatagagatcacaaattaacaaccctaatatcacaccttccagggaactag

SEQ ID NO: 232508 - DNA, 165 bp, Homo Sapiens
ttgatgagcaatgcttttccatttgccaattttgtacaaaaaagttggctttactgcctttgtttatcacttttcaacagttttttgatcaaccttttggtgttttctgtatatatgatgatgtcatccgccaccacagccaatttcatttcccaattttccttc

SEQ ID NO: 232509 - DNA, 975 bp, Homo Sapiens
  misc_feature (382)..(537): n is a, c, g, or t
  misc_feature (544)..(594): n is a, c, g, or t
  misc_feature (671)..(727): n is a, c, g, or t
ttggatagagagtaaaaggaagagcaggacaaaaatccctatctgttggtctttcatgtctctgttcttttcttcattcctcttcttttgtttaatctcactgatattaaaactccatcttgcagttgcagcaatagatttaaaagagcttttacatatacaaagttaagacattgttatttttgcttctagttcaacttggtatcataaaattagtatggggttgttttctattgatgttgagtagagaaactcagatttttttgaagccttgtgcagatatttaaaagtttattcttggacctttcctgagtagtacttttattcctactaggcctacaaaattatattctatactgttatttccttataatatttatgnnnnnnnnnnnnnnnnnnnnnnnnnnnnnnnnnnnnnnnnnnnnnnnnnnnnnnnnnnnnnnnnnnnnnnnnnnnnnnnnnnnnnnnnnnnnnnnnnnnnnnnnnnnnnnnnnnnnnnnnnnnnnnnnnnnnnnnnnnnnnnnnnnnnnnnnnnnncttatcnnnnnnnnnnnnnnnnnnnnnnnnnnnnnnnnnnnnnnnnnnnnnnnnnnngtgctgtagaataatttgcataataattatttgttctagagtttggaaggattatctttgagagtatcaagccctannnnnnnnnnnnnnnnnnnnnnnnnnnnnnnnnnnnnnnnnnnnnnnnnnnnnnnnncaggatttgtgtatatactcttgtcagcgttggaaaattgtatcttctagaaatgttctatcttatccaaattttaaactcatggctctgagtgttaggaaagtagtctcttcaaaaattaccctgcttctatgcttattatctccttgtcatgtattttaacatgcacatagatttcttccttctttattcttgattaggatagtgaaggtataatccatttattgatttaataaaggcttttaaat

SEQ ID NO: 232510 - DNA, 777 bp, Homo Sapiens
  misc_feature (98)..(343): n is a, c, g, or t
  misc_feature (346)..(358): n is a, c, g, or t
  misc_feature (369)..(609): n is a, c, g, or t
ttgggtaagtgatacctaaaggcataaacttgactgaactcaccaaggaagcagtggtatagaagaagaaaagaagagttccaggatctgggttctgnnnnnnnnnnnnnnnnnnnnnnnnnnnnnnnnnnnnnnnnnnnnnnnnnnnnnnnnnnnnnnnnnnnnnnnnnnnnnnnnnnnnnnnnnnnnnnnnnnnnnnnnnnnnnnnnnnnnnnnnnnnnnnnnnnnnnnnnnnnnnnnnnnnnnnnnnnnnnnnnnnnnnnnnnnnnnnnnnnnnnnnnnnnnnnnnnnnnnnnnnnnnnnnnnnnnnnnnnnnnnnnnnnnnnnnnnnnnnnnnnnnnnnagnnnnnnnnnnnnncactcccgagnnnnnnnnnnnnnnnnnnnnnnnnnnnnnnnnnnnnnnnnnnnnnnnnnnnnnnnnnnnnnnnnnnnnnnnnnnnnnnnnnnnnnnnnnnnnnnnnnnnnnnnnnnnnnnnnnnnnnnnnnnnnnnnnnnnnnnnnnnnnnnnnnnnnnnnnnnnnnnnnnnnnnnnnnnnnnnnnnnnnnnnnnnnnnnnnnnnnnnnnnnnnnnnnnnnnnnnnnnnnnnnnnnnnnnnnnnnnnnnnnctagggagcagagattgattcatttattggaacgagccctcactgtgcaccacacagccttctcggcactgggggctctgcaccgggaccccgcaaccttacggagtttacattctagaggggaagcggattgtaagcagggataaacccataaaaatatagagtgca

SEQ ID NO: 232511 - DNA, 366 bp, Homo Sapiens
  misc_feature (113)..(177): n is a, c, g, or t
  misc_feature (185)..(247): n is a, c, g, or t
ttggaaggactctgccttgaccatagaccagttaacaatttcatcctgggaaatgattaggggaaagactgctaagagaaaccgtaatccacttttttttgctctgtcgcccnnnnnnnnnnnnnnnnnnnnnnnnnnnnnnnnnnnnnnnnnnnnnnnnnnnnnnnnnnnnnnnnngggtgggnnnnnnnnnnnnnnnnnnnnnnnnnnnnnnnnnnnnnnnnnnnnnnnnnnnnnnnnnnnnnnnagggggagggttgttttccggacaaataaagagaaagacaaggatgctgttgtcaaatgaaaatttttaatagaactcttgttaaaataaaccctttttcttctgactcattacacaca

SEQ ID NO: 232512 - DNA, 304 bp, Homo Sapiens
ttggagtctttaacgctctcaattgcctcttctgatgtcaaagactggtgaacaaaaactggatgtgttaactgcccagaacaagactgcaaatcatctctcgtacttttgttttggggccctcggtttctctgaagatgctgacgctctgatacataaatgtatctcctgttctctcctaattgattttgacaacgacaaaccttgtttccccatgagaatggtgtcttgacccagacatctctcccattgctactgactaacgtttattcctgtcaaaaacaaacgagaactggataaagaa

SEQ ID NO: 232513 - DNA, 336 bp, Homo Sapiens
  misc_feature (184)..(245): n is a, c, g, or t
ttggcttgagtttgacccctgtgcccctgctgagtgggtgggatgattgagctgaatttgatcttttaattctgatgtgcaccctgttttttgttctaatgctattgtgtctgaaagctttcgagaagctgtaataacaggctgaggattgtttgtataggttgaactgctggtggaaggatgnnnnnnnnnnnnnnnnnnnnnnnnnnnnnnnnnnnnnnnnnnnnnnnnnnnnnnnnnnnnnntagtttgcaaccattccccggagagccggccgactgtttctgaaaaatggtttatgctggagctgttaaaaattacctctgaacaagaata

SEQ ID NO: 232514 - DNA, 239 bp, Homo Sapiens
  misc_feature (72)..(188): n is a, c, g, or t
ttggattacatatacatataacagagcaaacaccagaagatagaggataggcctagcagagtcttcctcttnnnnnnnnnnnnnnnnnnnnnnnnnnnnnnnnnnnnnnnnnnnnnnnnnnnnnnnnnnnnnnnnnnnnnnnnnnnnnnnnnnnnnnnnnnnnnnnnnnnnnnnnnnnnnnnnnnnnngtggacatttttgttagtaaggtctttgtagttgcaattaaggatcctgaa

SEQ ID NO: 232515 - DNA, 295 bp, Homo Sapiens
ttggccgcggtttaaccccagtccccggtcatttagggagtgtgatgtgggaacctacgggctctaaaaggggctcacattcccctcgtgtgttgacttgatatggtccattaagtcgatcttatcaacaaaaagaataatttttaaccgttttctttctgcggggtggatgtgatggctatgttagaccattcaagtgttcgggaacttctttaaatgatagaaatcttgttaactacaaatgtggattcaacttgaaaaataaattgcattaaatttttgctacattggggaa

SEQ ID NO: 232516 - DNA, 882 bp, Homo Sapiens
  misc_feature (384)..(441): n is a, c, g, or t
  misc_feature (523)..(539): n is a, c, g, or t
  misc_feature (541)..(637): n is a, c, g, or t
ttggctttggaagcatgaggccacgatgctgcatcttggctcttgtctgctggataacagtcttcctcctccagtgttcaaaaggaactacagacgctcctgttggctcaggactgtggctgtgccagccgacacccaggtgtgggaacaagatctacaacccttcagagcagtgctgttatgatgatgccatcttatccttaaaggagacccgccgctgtggctccacctgcaccttctggccctgctttgagctctgctgtcccgagtcttttggcccccagcagaagtttcttgtgaagttgagggttctgggtatgaagtctcagtgtcacttatctcccatctcccggagctgtaccagacaggatctcactttgtcannnnnnnnnnnnnnnnnnnnnnnnnnnnnnnnnnnnnnnnnnnnnnnnnnnnnnnnnntgggctcaagtgatcgtcctacctcggtctcctgagtagctgggactacatgcacatgccaccacatctggctaactttggnnnnnnnnnnnnnnnnngnnnnnnnnnnnnnnnnnnnnnnnnnnnnnnnnnnnnnnnnnnnnnnnnnnnnnnnnnnnnnnnnnnnnnnnnnnnnnnnnnnnnnnnnnnnnnnnnngagtgagccaccactatagtggtgcctggaactttctaagcgctgaaaaatgtacatgttccatcaaatatgtatcttgaaatgcaaataaattattttaaaaagggctacaagttggatatgaattaaaaataaacctaaggcttcttaagtttattttttaatttttaatttaaattgacaaattatagttgtatttatggggtacagcatgactgatgaattcaatgtgggaataattaaac

SEQ ID NO: 232517 - DNA, 307 bp, Homo Sapiens
cctccatggatggaatcagtaccctttctaagggcttgagggagtgaatttggtctgttttatcctttaggccatgtgaagatgcgtctgaagactccatctggatcaagtagtactgccttttacctgactggtaatctgactctttctgatcttggactttggcagacaaacaaaccgtcctatctatgtatgatattttccaaatccccccactgagcctgtatagaacctggaaggaagttttcttttttattacagccaatgtgtgaagaatgaaaataacttttttcaaccaaattatcta

SEQ ID NO: 232518 - DNA, 197 bp, Homo Sapiens
ttgggtttgcttacgcgcagacggggaagcggatcctacatgcccctggcccggacctgggtttgtcccacaagttatgtgaccccgtcgatacccttcgacaaatctcgtctcgacctcaacctgagactgatccgagagtatggcctctggaacaaacgtgaggtctggatggtcaaatttaccctggtcaatat

SEQ ID NO: 232519 - DNA, 250 bp, Homo Sapiens
  misc_feature (46)..(99): n is a, c, g, or t
ttggtacatgtactgctaacattttctcctagccggtgacttgtcnnnnnnnnnnnnnnnnnnnnnnnnnnnnnnnnnnnnnnnnnnnnnnnnnnnnnnctaaaatggactcgcactctatcgcccaagctggaatggaatgtcttgatcactgctcactgaaaccactgcctcccgggttcacgtgattgtcttgtctcaacctcccgattatcaggcattacaggcatgctccaccaatttccgatat

SEQ ID NO: 232520 - DNA, 100 bp, Homo Sapiens
ccctaaaaagccaactttgtacaaaaaagttgggggactacccccccattcaataacatgcctctcgaaaaggattacctttttcctgttccggaaagtt

SEQ ID NO: 232521 - DNA, 155 bp, Homo Sapiens
taacatgtcttcttgtcctaatttccaaccctttgactcgctaccctctgacatggggcctgctgtctttgtctgcgccacatgagacccctactcaaacatgccttaaacctccccctgaatggccccatcccatctaatctctcacttattcc

SEQ ID NO: 232522 - DNA, 935 bp, Homo Sapiens
  misc_feature (220)..(714): n is a, c, g, or t
ttggcttttttcaataaatccagcaaatgtttgttgggctaccccaggcctgactgttttcactgttaaagcttcaaatgagatattggtatgaggtttggggaagtaatttaacttctccaattctctgttttctcatctataaaattgtgtgtgtgtggggtagtgggcggcttatatccacctcaagggttgtgagggttaaaaagatggggctccnnnnnnnnnnnnnnnnnnnnnnnnnnnnnnnnnnnnnnnnnnnnnnnnnnnnnnnnnnnnnnnnnnnnnnnnnnnnnnnnnnnnnnnnnnnnnnnnnnnnnnnnnnnnnnnnnnnnnnnnnnnnnnnnnnnnnnnnnnnnnnnnnnnnnnnnnnnnnnnnnnnnnnnnnnnnnnnnnnnnnnnnnnnnnnnnnnnnnnnnnnnnnnnnnnnnnnnnnnnnnnnnnnnnnnnnnnnnnnnnnnnnnnnnnnnnnnnnnnnnnnnnnnnnnnnnnnnnnnnnnnnnnnnnnnnnnnnnnnnnnnnnnnnnnnnnnnnnnnnnnnnnnnnnnnnnnnnnnnnnnnnnnnnnnnnnnnnnnnnnnnnnnnnnnnnnnnnnnnnnnnnnnnnnnnnnnnnnnnnnnnnnnnnnnnnnnnnnnnnnnnnnnnnnnnnnnnnnnnnnnnnnnnnnnnnnnnnnnnnnnnnnnnnnnnnnnnnnnnnnnnnnnnnnnnnnnnngtaaagctgtttttgacatggcagatagataactgaaaaactccctgcataagagacaaaaatcatcctttaacatttgtagcccaaatcagcaaagatcaatatgtatgattttgctctgtgttggtgaagatatccttaaattatacttacccaagtggaaacggggtaagaatagtaatatgtgctacagtgctatttgttatagcaaaatgttagca

SEQ ID NO: 232523 - DNA, 327 bp, Homo Sapiens
  misc_feature (263)..(276): n is a, c, g, or t
ttgggtcctagatttcctactgcaatgggaagtatatggatagaattacactgctgatgactagttggagctttgtgatgagaggataggggtaatgaatcaaaaagtaaaagctttggtgatctctggttgtgcatctaatcgttcttcccttaaaggaagtgcttcatcttcaattgctccgatcctttggtttccttgctctagatgaggaataaaggaggaagagctgaaccctgattgtttgtaataactggcaaagnnnnnnnnnnnnnncctataccattccgatgtccatactctttgatgtgtgattgcaatctatgg

SEQ ID NO: 232524 - DNA, 103 bp, Homo Sapiens
ttggggaagctctaggaacccaggctttaagtcttttgcttatccattttcataataatgaattggttcctttccctccaccaaacaggaccatgaagtcatt

SEQ ID NO: 232525 - DNA, 839 bp, Homo Sapiens
  misc_feature (104)..(122): n is a, c, g, or t
  misc_feature (126)..(417): n is a, c, g, or t
  misc_feature (419)..(452): n is a, c, g, or t
ttggggaagccagaggaaccaaggctttgattcttttatttatccattttcataataatgagttggttcctttccctcctccagagaggaccaatgagtctttnnnnnnnnnnnnnnnnnnntagnnnnnnnnnnnnnnnnnnnnnnnnnnnnnnnnnnnnnnnnnnnnnnnnnnnnnnnnnnnnnnnnnnnnnnnnnnnnnnnnnnnnnnnnnnnnnnnnnnnnnnnnnnnnnnnnnnnnnnnnnnnnnnnnnnnnnnnnnnnnnnnnnnnnnnnnnnnnnnnnnnnnnnnnnnnnnnnnnnnnnnnnnnnnnnnnnnnnnnnnnnnnnnnnnnnnnnnnnnnnnnnnnnnnnnnnnnnnnnnnnnnnnnnnnnnnnnnnnnnnnnnnnnnnnnnnnnnnnnnnnnnnnnnnnnnncnnnnnnnnnnnnnnnnnnnnnnnnnnnnnnnnnnctcaacacaaggaaactatcttgatgattttgtgaatagtttatagtatatagggttaattttatggtatggcattattgaattagtcaaagattattcttttattataaagcactaagttatgtcttcttaaaccactttttgtttagaatactttctatgcttttgagtaaagatgaaattatatgtcttttttaattttttaaattgaatgatgttcaagggaaaagctacccagtttccatttgtgtgaaatttatgtatatttttggttttgtcttgtatatgagtaaataaacgtagtttctaccctttttctaccctttcccattgaagttacaggtttatctacaaaggggtgatggaaatactttgtgtaactatttt

SEQ ID NO: 232526 - DNA, 143 bp, Homo Sapiens
ttggcacactcaccttttacccaatgcgagctccgaacaactcacgactgtggaatctataggtgacctcctgttcgatatccataatgaatacccaagacctaagtctacccgccgcagaactgatcattctatttccccct

SEQ ID NO: 232527 - DNA, 212 bp, Homo Sapiens
ttggtgcggctaccctaaatcctgggactgactcgtgggacgaaacaatgtgcatcccgatccttcatggcgtcctgcccgcctgaccggtggtaactttgtgttacgaatcacatgaaagcttggaaccttatgaccttattcccttatttaacaggtgtaatgcagatacattggcatcccctcatctcagatgaagagctaatgtctca

SEQ ID NO: 232528 - DNA, 565 bp, Homo Sapiens
ttgggtgggatggatttatgaagacagcatcaaggaggtttgaagacgccgcatttggattggatgaattccagattctgcttgcttgctttttttcattgatatgcttatacgcgtactctttttacacaagatgtgtgggtatattattgttttatttcacatgatcttctcaggattctactttgttagatatctccatgtaagatctatctgaacatgttgctccaaatggatgtctaatcagaatgtgctgttaaaggaatttgcaaagaacatttttaaatgttaaatacatctaggtctaacttaaactcgccaatctcctgcactcttatcttgattttataaatgctcttgcaaaatttatgatttttctttcattatcggcctagactctgcggcataatgtggcatctggaattgaatggatatactgaaaatgataactctttagacttccctttgttatatgactttataggttatttattacacccttttacgttttacgaatggtaacggtgacggtcatagggcacgttttgaattttctaatactgtt

SEQ ID NO: 232529 - DNA, 401 bp, Homo Sapiens
ttgggtgcctcgccctttggccggacggataggttcgggaaatgttgggcgagatatgaaaacacttcaatgatccagatacattggaggcaaggaaaagttactgttgtaaccatccttttaacaggctgaagatacctttttcctattgattgttggatttgatgatcagctggatgtgaagaagaacactaagtaatgaattcatagttcattgccatcccctcaggaatacgaaaaaatacccaataaggctggaggaaacactgccattgatctcccgaactcttggttctaccctggacttcttcgtatctatggaccttgggcatatctgtttatgcctcttttgattgggctatctccaactcagaataagtatggatgggttaaaaatgatt

SEQ ID NO: 232530 - DNA, 219 bp, Homo Sapiens
ttggatatgaatctattgcagtgactgtcttgtaaaatccccctctaaaatgtaccctacaatcagcaaattcctaaaaatttctgcttccctttatcatcttgaatatgttttttcgtccacaccctgaagtctgcaatgtcatgacaggaccgggcaagttccgagcggtctacggaaacactcttgggaagcgggcctcctgccgcctggctccca

SEQ ID NO: 232531 - DNA, 358 bp, Homo Sapiens
ttggatcactgataccgttgtcagcaaatttcgtactcaaaatcatttctttgtctttgttggtgataccctcacagacattacaactgagcatataaaagctgcttttgcaccatttggaacaagtcatatgtccaagtggtaaaagactgttctcttagaaagtctaacgcatatggatttgtctccttttgcgtttttgggatgccccttgcgccattcaggggtgggtgggccctggcttggtggaagacaaagaatataaactgggcaaccataaagcctccccccctcagaatacttatgagtcaaatacccaatggctatcatatgatgacgttgtaaatctctcaactcc

SEQ ID NO: 232532 - DNA, 523 bp, Homo Sapiens
  misc_feature (126)..(162): n is a, c, g, or t
  misc_feature (190)..(213): n is a, c, g, or t
  misc_feature (220)..(467): n is a, c, g, or t
ctatgaagggccaactttgtacaaaaaagttggattgcaggcccgagccaccgcgcccagccaaattaaattttttatagagatgaggtcatgctgttatgttgcccaggttggcctcatgagatnnnnnnnnnnnnnnnnnnnnnnnnnnnnnnnnnnnnntgagacactgcacccaaaccccaccacnnnnnnnnnnnnnnnnnnnnnnnngagacannnnnnnnnnnnnnnnnnnnnnnnnnnnnnnnnnnnnnnnnnnnnnnnnnnnnnnnnnnnnnnnnnnnnnnnnnnnnnnnnnnnnnnnnnnnnnnnnnnnnnnnnnnnnnnnnnnnnnnnnnnnnnnnnnnnnnnnnnnnnnnnnnnnnnnnnnnnnnnnnnnnnnnnnnnnnnnnnnnnnnnnnnnnnnnnnnnnnnnnnnnnnnnnnnnnnnnnnnnnnnnnnnnnnnnnnnnnnnnnnnnnnnnnacaggagtgagccactgcgcctggctgatcccagcacttttcaaatgaagccgctc

SEQ ID NO: 232533 - DNA, 144 bp, Homo Sapiens
ttggcgaagccattctattagatcttaatgagattagacatgctgacatccccgttccaatgagttcaccctctaaatcccctgaatacagagggataagcatctgtcacccacccatgcagctcaaaacgcatagcctaacca

SEQ ID NO: 232534 - DNA, 896 bp, Homo Sapiens
  misc_feature (101)..(734): n is a, c, g, or t
ttggcctattcaaaatcctaacaagttattttgtgagtaccaactaactttctcccatgaattatgaactttcttaatggcatccagaaggctaaacttcnnnnnnnnnnnnnnnnnnnnnnnnnnnnnnnnnnnnnnnnnnnnnnnnnnnnnnnnnnnnnnnnnnnnnnnnnnnnnnnnnnnnnnnnnnnnnnnnnnnnnnnnnnnnnnnnnnnnnnnnnnnnnnnnnnnnnnnnnnnnnnnnnnnnnnnnnnnnnnnnnnnnnnnnnnnnnnnnnnnnnnnnnnnnnnnnnnnnnnnnnnnnnnnnnnnnnnnnnnnnnnnnnnnnnnnnnnnnnnnnnnnnnnnnnnnnnnnnnnnnnnnnnnnnnnnnnnnnnnnnnnnnnnnnnnnnnnnnnnnnnnnnnnnnnnnnnnnnnnnnnnnnnnnnnnnnnnnnnnnnnnnnnnnnnnnnnnnnnnnnnnnnnnnnnnnnnnnnnnnnnnnnnnnnnnnnnnnnnnnnnnnnnnnnnnnnnnnnnnnnnnnnnnnnnnnnnnnnnnnnnnnnnnnnnnnnnnnnnnnnnnnnnnnnnnnnnnnnnnnnnnnnnnnnnnnnnnnnnnnnnnnnnnnnnnnnnnnnnnnnnnnnnnnnnnnnnnnnnnnnnnnnnnnnnnnnnnnnnnnnnnnnnnnnnnnnnnnnnnnnnnnnnnnnnnnnnnnnnnnnnnnnnnnnnnnnnnnnnnnnnnnnnnnnnnnnnngcatggtcttcccatagaaggctgtttcatctacattgaaaatctgttgtgtagtgtagccacttcatcagtggtcttacctcagtcttgtggagaacttgctgcagcttctacaccagcacttgttgcttcaacttgcacttttatgttatggagatgatt

SEQ ID NO: 232535 - DNA, 141 bp, Homo Sapiens
acaaaaaagttgggagagtcgtgtttatctggttttatttatgagttttgtaagatcttgggggtactgctcttcggcagacttagtagggactgagtctacttggggtgtggcaacgctgctgtctgggaatgtcctctg

SEQ ID NO: 232536 - DNA, 323 bp, Homo Sapiens
ttggctccaacttactatcagatttcctcagccaaacgatttacccaaataaagaataggggatagaaattgaaacctggcgcaatagattgaaaagcgcaagggaaagatgagtattataaatcagcatataagattctggactaagacccatcccttctggataatgaattacctgtaataaattttgcaaggagagccaaagctaagacccccgaacccggacgagctacctaagaacagctaaaagagcacacccttttatgtgttgaaatattgggaagatttccatgtagaggcgacaaaactaccgagcctgacga

SEQ ID NO: 232537 - DNA, 578 bp, Homo Sapiens
ttggaaaatatatgaggtggcctgcgtcgtgatgcatgtgactgtggcaaaccccttgatagttatcattggatcacacacctgtaagcttcctcatggatgtttgaacatgaccaatctggattgtaccaattccaaattgggctcgcaggcttttaatcattgagatgattgtaaacttattctttatgcacaattggactggtttctggattgttatttgctggctgatctggagttataatgccccgttactggctttctccatgctttatcactctgaccaagtagctcgactcgtgccttgtacagggctggtcactgtcagccgggcaacatacagattactcaaagactatcctggtttcgtgtttacccctcgatctaggtatgatgctcccccagacttccctaatgatatcccctgaatcagccattttccggatgcttaccaacacggaaaaatcgcgggaccatgcttccaaatgaaagatgtggaacatggcaatgccaattttttaggctaagcatcatgaataaattaacaccctattatacctatttataattctttgggg

SEQ ID NO: 232538 - DNA, 440 bp, Homo Sapiens
  misc_feature (51)..(388): n is a, c, g, or t
tggaaggaaaaaaaacactgctaaaagtaaatactctccaaccctttagtnnnnnnnnnnnnnnnnnnnnnnnnnnnnnnnnnnnnnnnnnnnnnnnnnnnnnnnnnnnnnnnnnnnnnnnnnnnnnnnnnnnnnnnnnnnnnnnnnnnnnnnnnnnnnnnnnnnnnnnnnnnnnnnnnnnnnnnnnnnnnnnnnnnnnnnnnnnnnnnnnnnnnnnnnnnnnnnnnnnnnnnnnnnnnnnnnnnnnnnnnnnnnnnnnnnnnnnnnnnnnnnnnnnnnnnnnnnnnnnnnnnnnnnnnnnnnnnnnnnnnnnnnnnnnnnnnnnnnnnnnnnnnnnnnnnnnnnnnnnnnnnnnnnnnnnnnnnnnnnnnnnnnnnnnnnnnnnnnnggtgtttacttctgggagggatgtattttgtttatctctgggtgcataaaag

SEQ ID NO: 232539 - DNA, 331 bp, Homo Sapiens
tttgtacaaaaaagttggaatgaaatacttttattttgtttaatgtctggtcgcccgcgttcaccacgacgaatcttttcatgtggttaaactgccttttcggtttaagatattttaaaaaatttcaagggtaattggtgaaggagcaggaatttagcatggaaacgagacgggaaaatgggattagggaactataaatcctaaaatccaaacagtgggagagattcaggatgagcctgagtcacaaagaggatctctataaaaagatgttagaaccctgtctaaatatattaatcgctaaggttgaaggattaaccttggcctttgaaaa

SEQ ID NO: 232540 - DNA, 610 bp, Homo Sapiens
  misc_feature (174)..(236): n is a, c, g, or t
  misc_feature (272)..(400): n is a, c, g, or t
  misc_feature (555)..(564): n is a, c, g, or t
ccggggtggggagggctgtcctatcgctaattgacttggcagacatattaagatgaaacctatctaaatatttcaactcttacgttttttgattttagagatccaggtctcactatgttgcccaggctgggtcactgtggctattcacaggcacgattgtggggtatacatctnnnnnnnnnnnnnnnnnnnnnnnnnnnnnnnnnnnnnnnnnnnnnnnnnnnnnnnnnnnnnnncacacaccgccacacccagctaacttttttattatnnnnnnnnnnnnnnnnnnnnnnnnnnnnnnnnnnnnnnnnnnnnnnnnnnnnnnnnnnnnnnnnnnnnnnnnnnnnnnnnnnnnnnnnnnnnnnnnnnnnnnnnnnnnnnnnnnnnnnnnnnnnnnnnnccctacagatgaagagaaacttgcggacatgatgccccctacctgatttgcacaaaggcaccataggggctagtggtgaccctttgtacaactcctgagagtactgtacagaaatgtagattcttggggctaatcactgtggttttatatctttnnnnnnnnnngaagcttttgctttgagattatattctgaaattttgaagagatgat

SEQ ID NO: 232541 - DNA, 136 bp, Homo Sapiens
  misc_feature (55)..(76): n is a, c, g, or t
ctttaaaaggccctctttgtacaaaaaagttggctttgtacaaccctagtagggnnnnnnnnnnnnnnnnnnnnnnccggcgttcaaaatgtccaagcgaggacgtggtgggtcctctgctgcgaaattccggatt

SEQ ID NO: 232542 - DNA, 293 bp, Homo Sapiens
ttggtgattactgaagctttggctcctcttttaaagtctcaacgtgatgatgtgttaccttagttctttttcgggattgttttggatagatgaagccccttgcaattcgtcatgaatttgaggactggcttttcaatttctgcatccaattggaataagatttgcggagacttgggaaagtgttttaggtggtattgccatcttaacaatattaagtcttccaatccatgaacattggatgtctttacatgtatttacttctttaatttctttcaacaatgtcaaataatttt

SEQ ID NO: 232543 - DNA, 167 bp, Homo Sapiens
ttggaacatcatgagcaccccgtacattaccagaatgttgacgcaggcgttgatgattatatccccggtaactgagctaatgatttaatcctttgttttgcccttctgagaaccacgctggccttgaaaaatttttatcttgtcgtccacaaactgtattccgctga

SEQ ID NO: 232544 - DNA, 662 bp, Homo Sapiens
  misc_feature (73)..(103): n is a, c, g, or t
  misc_feature (168)..(177): n is a, c, g, or t
  misc_feature (328)..(343): n is a, c, g, or t
ttggagaaataagagcgctcttttagacccgtgactcacctcttttgtacgtggtggaacaaatttgccctcnnnnnnnnnnnnnnnnnnnnnnnnnnnnnnngatatggtctctctctctgtcccccacgggggagtgcaggggccatatctccgcatagtgcgcgnnnnnnnnnnggggctcacgcatctcccgcgcctcccccttcagagtagcagattaggggcgtgcccccccaccccgggctatttgtgtatttttaaaatttagggggttttccccgtgtgggtcgcgggggtctcaaactccccacctcgtgagatccgnnnnnnnnnnnnnnnnacagtgcggggattacgggcgtgagcccccacaccacacctctttttcttttttaataaacacggggtctccctatgttgcccactcggggcgtgatgtgctgggctcagggtatcctcgtgccgtgctctcccagagtgttgagattacgcgcacacgcctgtgtacacctcagattatatgtgtcatagcgctagtgagatctttatctcagactcttatgctctataacagcgagacaccccataatatatatcatatcttctctaaatatatttacacccaattatatgtgacgtgttactctcagatgtattgt

SEQ ID NO: 232545 - DNA, 253 bp, Homo Sapiens
ttgggttctggtgcctgcgcccgcgcctcctgctgctcctgccggtgagcactttaaaggctgcctggtgttccgtggccgcctggatcatcatactcatcttcaatttttccactacttggcccatggcacacatattgacttcgggaagcgtaattctgtcacaaatgtctgccctcacaatcctgttgacttcctggttacagataaaaacactgttcctggagaaaatgttcgatcttaaaatgaacta

SEQ ID NO: 232546 - DNA, 272 bp, Homo Sapiens
tttggattgggccagagctaaagccttgctgctgattggtttggggtgaaaaaccttattgtggggtcctccaaagggaactgacattggtgctttttgattgggtgcgatgcaatggggctggggcaatactggaaccaggaaatctgtttaatggtggtggccttttccgatgtcgagcggaagctccaactggtagcttgcgtattatgaaaaaatttttggacctcgaacacgacctgacaaaaacctacaaatgtagaagagaatca

SEQ ID NO: 232547 - DNA, 601 bp, Homo Sapiens
  misc_feature (175)..(453): n is a, c, g, or t
ttggctacctaatatccccatgtgcacttgtaccctctaaatccataataaaaaaattaaaaagtaaggaaattctgaatctgtatttagtcaaccatacttccaacaggtctattacattaagaggactggattcttaagccatgcatggtggtatcaataataattcatatgnnnnnnnnnnnnnnnnnnnnnnnnnnnnnnnnnnnnnnnnnnnnnnnnnnnnnnnnnnnnnnnnnnnnnnnnnnnnnnnnnnnnnnnnnnnnnnnnnnnnnnnnnnnnnnnnnnnnnnnnnnnnnnnnnnnnnnnnnnnnnnnnnnnnnnnnnnnnnnnnnnnnnnnnnnnnnnnnnnnnnnnnnnnnnnnnnnnnnnnnnnnnnnnnnnnnnnnnnnnnnnnnnnnnnnnnnnnnnnnnnnnnnnnnnnnnnnnnnnnnnnnnnnnnnnnnnnnnnnncccaaaataaataaattaatatgtattctttagtcactgatttcatgctactaatcaatccgaatggacttggagctaatgctaataaatggaataatggttatgcttgtctaggtactcaattgctatgacccgctttcatgagggt

SEQ ID NO: 232548 - DNA, 141 bp, Homo Sapiens
ctgttcgttagcaacaaattgaagaacaatgctttttcccaatgccaactttgtacaaaaaagttggctccgagttgttttaaccaattacaatcatgtcctgaatccccccactgttcagagacttcaagggacacctcc

SEQ ID NO: 232549 - DNA, 408 bp, Homo Sapiens
  misc_feature (63)..(101): n is a, c, g, or t
  misc_feature (103)..(301): n is a, c, g, or t
  misc_feature (303)..(355): n is a, c, g, or t
ttggccattgttaccacttctacttaacatattgaaggtcctacccaatgaaataaggcaacnnnnnnnnnnnnnnnnnnnnnnnnnnnnnnnnnnnnnnncnnnnnnnnnnnnnnnnnnnnnnnnnnnnnnnnnnnnnnnnnnnnnnnnnnnnnnnnnnnnnnnnnnnnnnnnnnnnnnnnnnnnnnnnnnnnnnnnnnnnnnnnnnnnnnnnnnnnnnnnnnnnnnnnnnnnnnnnnnnnnnnnnnnnnnnnnnnnnnnnnnnnnnnnnnnnnnnnnnnnnnnnnnnnnnnnnnnnnnntnnnnnnnnnnnnnnnnnnnnnnnnnnnnnnnnnnnnnnnnnnnnnnnnnnnnntaactactataactaataagagaatttagcaactcaatgttaattttaaaaac

SEQ ID NO: 232550 - DNA, 472 bp, Homo Sapiens
ttgggtacccgggcgtgctgctcggcaagggccagcacggaaccgggcttggtagagtgatgaggaccctcctgctggtgctgtggctggctggccatctaatctatctctgctttggcatcgacaaaacggacattgaaaaatttattgaggaggctgctgagatgggatggggctaggaaagtatgcctgggtcttggagacctgaaacctgggctgaacgtggtatccccttgatatctccttgtggaaatttgaaaggacccagtactatgtgactttcattgatgcccctatagatccaaagtttagttcactttcgattaccaggacattgcaggctgactgatctgtcttgattgttgctgctggtgttggtgaatttgaagctggtatcgctgagaatgggcatagacaacagcatgcgcttctgggttactgactgtgtgtaaattgcttaattgtacgtgtt

SEQ ID NO: 232551 - DNA, 532 bp, Homo Sapiens
  misc_feature (157)..(173): n is a, c, g, or t
ttggagatttctaccttcctccatctctggttcaccatcttttccccacatgctttttgcccgtttttatcttaaaagaaggatgaggatacaacaatgaatgctgtatcttccttatcttggtcttccagaaccctctggttggggaggggatcannnnnnnnnnnnnnnnnccctttggagtgtgctactttctagttggaaagatcctcattggattgggatacaactaaggtggacgagccccgcttcgcatggcaggaatcccacatctgatgggaatgacctcgctgacgctattgtgattgcaacgttttggaaatgttaaaactagtctgcacatacaaaggtgatggctatcactgagaaacacttgatttttgttgccaccatgaatggttcggggcctgactgtcatttcctaaatcctttcaaatgaaatttgattgtcgctttttaataggttttaagaacccctgatttcttttttgacaacccccatctatatattattccgatattaaaaacaatt

SEQ ID NO: 232552 - DNA, 440 bp, Homo Sapiens
  misc_feature (114)..(126): n is a, c, g, or t
ttggggatcaaatcctttcacctgttcccaacactcgtttttcgctggatggcttattgctttgatgagtttttctaaccgacctcccctacccgccttccttaaattatgaannnnnnnnnnnnngaagtgagggaatgactgctgaaaattatttatccaggtgcgatttgagggacttgcttgtgtaactcttgaaatatggctatttttaatggacataatttttacttttactcactattaaattggggttacccatatgaacactattcataggtgtttccattttcggctaaaaatcagtccttaaacaaaaaatgttaagatttcggaattacttaaggtcaaaggactgtaatgagatttttaaataaggggcaggggaaactgtctcattatgacgcttcctagcaaaatttaattaacctaatacaaaa

SEQ ID NO: 232553 - DNA, 488 bp, Homo Sapiens
  misc_feature (141)..(380): n is a, c, g, or t
acatcccaccccactcaacttattcagtgtattttccaagtaggggaaaaacatttcctgtccttcaactccatctactgtgagacagcttcattcaaaataaataaacacgaaaaaactgttatcatttacagagtactnnnnnnnnnnnnnnnnnnnnnnnnnnnnnnnnnnnnnnnnnnnnnnnnnnnnnnnnnnnnnnnnnnnnnnnnnnnnnnnnnnnnnnnnnnnnnnnnnnnnnnnnnnnnnnnnnnnnnnnnnnnnnnnnnnnnnnnnnnnnnnnnnnnnnnnnnnnnnnnnnnnnnnnnnnnnnnnnnnnnnnnnnnnnnnnnnnnnnnnnnnnnnnnnnnnnnnnnnnnnnnnnnnnnnnnnnnnnnnnntaatagtaataataatcatatttactgagtacttaacactctttcacttaaatagatatacctagaaggattcacagacaggatttccccagacctttaccttgtctc

SEQ ID NO: 232554 - DNA, 395 bp, Homo Sapiens
ttgggaccaatggcgatgagggtgtccgatggaaatggttgtgcagctccagacatgatcaccaccgtggaccgtgccccggctatctgtcacttcccttccagaggagcccagaacttcaaggctgcctaggtagtctgggaccgcctctctgaagtcagcaacatcatgatctaacgggaacggcatgattcagctcctttagttgctcttgtttaagggatgtgatcttgagtttcttggtcagcatctgggaccatttacctgtaagtattttgtcggtgtcttttggatgaagattttcttatattgttgttaatcatgaatgattcgcttctccattacattacacatttcctgtgattaatgtttcatagcatattcctgtttgtcgt

SEQ ID NO: 232555 - DNA, 369 bp, Homo Sapiens
cctaaaagaacaactttgtacaaaaaagttggataatgagtaacctatcttatatgccgcatcctgttattttgaccttcctgaaatgtgattacaattacatgtaatgtatatagccgtatatgtattctaattgtaaaaaccttgttattttgagacaggggaacactgactttcagaaggctaccgaaagaaccttagtgaaaggttctcagtctctgcaagtggaccctaagtatggtaagaacaattcatcaccgaatagctagtgatcctctcgatggaggcggcataggctccacatactactgagccaggcaggtcgggccctgggaaactcaacgtatatgggcaggccactttttttcc

SEQ ID NO: 232556 - DNA, 123 bp, Homo Sapiens
gacctgtgtttaaatttggctgtcccacagatcaaatcctcactgtgtctacatataggaaaggtgctgccgtgtgccaatgttcccaatgccggacttgaggaatacctctgttatatgttt

SEQ ID NO: 232557 - DNA, 214 bp, Homo Sapiens
ttggctaaatccctcgatacttttaaagatttgtaactaacttaacattaaaaaatgaaatattttttagtttaaagcttagtctgtacatttatccacacgaaagggctattctcaaaggaaggttcgtgcgacctaaagcacacttgtacgataagctgaaatggataccttatctttaaaccacatttcattgcctgtggatggaaaaacc

SEQ ID NO: 232558 - DNA, 913 bp, Homo Sapiens
tggagcaatgcttttttataatgccaactttgtacaaaaaagttggcagtttaccttccctatctacgatccatctacaagttgccttaccagtggtgctcccccttcctcagaatgctcatagggaaaggataaacaaagtaaaaggaacttcgcaaatcttacccttcctgtttttcaccatatgccctctagctgctctccatagaagaatcccgcctgcttcataacacatgtttaacgaactaggaagagatgccgggcaagctcagaacgcacacttgatctgaaataatgaatattaatgagtggatttacgagggttcaggggagtcttccttttaataccgagaattgacctatgaagatgacaattggtcctctgatgaattctgaagataatctcctagagctttgactttgaaatgtcatcatcttatatcaaactttctagttataatctacatcagtggcatatattgttgagggaagtgattttacaaagttaaacccaggtacttataaaaaagcgcagttagtctttcagaaggagacttttatgtgcctcaaatgtttaatatatgaatattgtggataaccacatggtattaatattttgcaatatattgtgtattggcctgatattttagtatatatacgaacatactgttgtattctgtaatcccaaatgaaaagaggaactttgcttttttcctgttttcttacctatcacctaccatatattacatgtcattcaatgaaatacttacttgttccagccacctcaaatcccttacggagacatagttcccttcttttttgggtaatgacggagcagcctcaccaattgtaggcatggtttgcatgggtattgagacatgggatgtgaaatacctaggagacatgtatggga

SEQ ID NO: 232559 - DNA, 248 bp, Homo Sapiens
ttgggtgtttgtcgcctgtcgtttgccagtcccaggacgtgccgaactcttaaatatgcccttgggtgataattataatgagacggatggacttgaataaagagtgaccccaagcacagaaactgaatccctgtggatttagattcaccctctttgtgaaacttgctctcttttcccccccgacctggtgaaagccaccttgtaaaatacagaagcatagctgacgaagcaatagaccatttccatac

SEQ ID NO: 232560 - DNA, 147 bp, Homo Sapiens
cctaaaagagaactttgtacaaaaaagttgggatggccgcgggacccctctttctaagtcggcttccagcacccttcaattgcatggcgaaaagcccactctagggcttttcctcctcggaaggcctgattccggggcgcgggcccc

SEQ ID NO: 232561 - DNA, 830 bp, Homo Sapiens
  misc_feature (174)..(190): n is a, c, g, or t
  misc_feature (203)..(315): n is a, c, g, or t
  misc_feature (323)..(449): n is a, c, g, or t
  misc_feature (490)..(755): n is a, c, g, or t
ttggattttaggcaaagatttctcaaatatcatacaaaaagcatgatccataaaagagccaattgataaactgtgcttcatcaaaacttaaaactgatgctattcaaaaaatattaacagaaagaaaactgaaggcacaatatatttgcaaagcatatatcttcttcctcttcnnnnnnnnnnnnnnnnngcaacagggtccnnnnnnnnnnnnnnnnnnnnnnnnnnnnnnnnnnnnnnnnnnnnnnnnnnnnnnnnnnnnnnnnnnnnnnnnnnnnnnnnnnnnnnnnnnnnnnnnnnnnnnnnnnnnnnnnngcacacannnnnnnnnnnnnnnnnnnnnnnnnnnnnnnnnnnnnnnnnnnnnnnnnnnnnnnnnnnnnnnnnnnnnnnnnnnnnnnnnnnnnnnnnnnnnnnnnnnnnnnnnnnnnnnnnnnnnnnnnnnnnnnacgcttgggccatggcacctggccacaaagcatatatttgnnnnnnnnnnnnnnnnnnnnnnnnnnnnnnnnnnnnnnnnnnnnnnnnnnnnnnnnnnnnnnnnnnnnnnnnnnnnnnnnnnnnnnnnnnnnnnnnnnnnnnnnnnnnnnnnnnnnnnnnnnnnnnnnnnnnnnnnnnnnnnnnnnnnnnnnnnnnnnnnnnnnnnnnnnnnnnnnnnnnnnnnnnnnnnnnnnnnnnnnnnnnnnnnnnnnnnnnnnnnnnnnnnnnnnnnnnnnnnnnnnnnnnnnnnnnnnnnnnnnnnnnnncatgagagagggggaaaaaaagcatatgtcatataagacgtgtgtacatgaatgttctcagctttacttgtaaca

SEQ ID NO: 232562 - DNA, 160 bp, Homo Sapiens
ttggtaggtttataacaccctacttcccctatcatataagatcttatcacctttcatgatccccccctcttaatccttttccttatctgcttccaagacgtgtatgcccttttcctaagactcccaacaaatctttctaatactaacatctcatacgctc

SEQ ID NO: 232563 - DNA, 444 bp, Homo Sapiens
atttggacaattttgctccgatcactttcctaacacttgccttctgtgtcatctgcccgaaatgcctgctttctggatttagatgtccaacttgtggctaaaaaattcatgaacactgtttttaaaagtaactactatgtgtgtggactggattaacttcaaacaactcttattgtttccaaattccactgatggtgataatggaatcgcatcactaccttctttgacaatgcatactatgcgacagtctgtttccaggatgcctgttaattctcaacacaaatattctacacctcattcctttttctttaacacctccaatccctcatcttaaggtttcctctcccagatggataggtcgacatcctgacataatgtattcatggtttacaccacactgccagtggatagctggatgattgaggatgcaattcgaagtcacat

SEQ ID NO: 232564 - DNA, 462 bp, Homo Sapiens
  misc_feature (42)..(289): n is a, c, g, or t
  misc_feature (337)..(417): n is a, c, g, or t
ttggggattctgggaagatggtgcaataggaagcaccaggannnnnnnnnnnnnnnnnnnnnnnnnnnnnnnnnnnnnnnnnnnnnnnnnnnnnnnnnnnnnnnnnnnnnnnnnnnnnnnnnnnnnnnnnnnnnnnnnnnnnnnnnnnnnnnnnnnnnnnnnnnnnnnnnnnnnnnnnnnnnnnnnnnnnnnnnnnnnnnnnnnnnnnnnnnnnnnnnnnnnnnnnnnnnnnnnnnnnnnnnnnnnnnnnnnnnnnnnnnnnnnnnnnnnnnnnnnnnnnnnnnnnnnncaaagtatatgtaagtcagcaatgaagaaaacgcaagattcgtacacnnnnnnnnnnnnnnnnnnnnnnnnnnnnnnnnnnnnnnnnnnnnnnnnnnnnnnnnnnnnnnnnnnnnnnnnnnnnnnnnntaccttaatgttgctaaaattttactactccaaagcaatctccac

SEQ ID NO: 232565 - DNA, 161 bp, Homo Sapiens
ttggcttcaataaacgataaaagaaagacacatgccctgaggaatgttcccatttaaccattacccaagtacaacgtcgggaccaattaccccccccggtccaacctgatgctgggtcccattgtaccgacaacgatgttgactaatgttgattccatttt

SEQ ID NO: 232566 - DNA, 866 bp, Homo Sapiens
  misc_feature (83)..(161): n is a, c, g, or t
  misc_feature (187)..(526): n is a, c, g, or t
ttggctttttgttgttttgtttttaaaacagggtcttcctctgtcagacagggtggagtacagtggtaatcactgcagccttnnnnnnnnnnnnnnnnnnnnnnnnnnnnnnnnnnnnnnnnnnnnnnnnnnnnnnnnnnnnnnnnnnnnnnnnnnnnnnncatttaaaaaaaatttttttgtgtgnnnnnnnnnnnnnnnnnnnnnnnnnnnnnnnnnnnnnnnnnnnnnnnnnnnnnnnnnnnnnnnnnnnnnnnnnnnnnnnnnnnnnnnnnnnnnnnnnnnnnnnnnnnnnnnnnnnnnnnnnnnnnnnnnnnnnnnnnnnnnnnnnnnnnnnnnnnnnnnnnnnnnnnnnnnnnnnnnnnnnnnnnnnnnnnnnnnnnnnnnnnnnnnnnnnnnnnnnnnnnnnnnnnnnnnnnnnnnnnnnnnnnnnnnnnnnnnnnnnnnnnnnnnnnnnnnnnnnnnnnnnnnnnnnnnnnnnnnnnnnnnnnnnnnnnnnnnnnnnnnnnnnnnnnnnnnnnnnnnncaggttctcaggtggtctgatgctgccggtcaagccacctcactttgaagaacactgttcagggcaatgtgagctcacaccccatgagcgcattaacaggtgcctgccccaaggtgtccagggcttgggtgggaagggtgagtggttccccctaaccagggaacttcatggaggaagttgggcccagcctggaagacaagccaggtctgtgtccgtggcccccgtgggctccatgtggaggggtggaatgtgcgggaaggtgcctcagcgcctggcccgggtctccgagcacgcagctgtcggtagaatggcattctgactttcaccctttcccagcatg

SEQ ID NO: 232567 - DNA, 136 bp, Homo Sapiens
acctatccatgtgaatcaagggaatcaacgatatctccattggcccctactttctgaacggcctgaacgatggaaatatcttatgaactctctaccccaagctacagccgggttccttcctctccatccatcgctc

SEQ ID NO: 232568 - DNA, 493 bp, Homo Sapiens
actttgtacaaaaaagttgggtaagacttttgctgtggctctcgactaaatatattgttgcattgacacttcattagcacatgggtaggggatggatgcacactacaaacatatttgtcgaccctgcaaaatctccactgaatggttattttggaggaaatacgtatgctaaacaaagtggatggatatggattaatatcatgttctttgattgattccttatttcctatatggtgtgtggcactgccttcttccccatttgcttttcatttattaccgtgtcttccgaacatttccttttggaattctgttggccgtttgttgcatctatcttttttgttggtcctcccttaaatctcgttggcaccatgctcggccgaattctgtcctgacttcccaaatttccttgttttgtcaatgttgtccctcgtcctctcccgtagaacaatgggttcatggagattgtggatattgtttgcctggttggaatttt

SEQ ID NO: 232569 - DNA, 479 bp, Homo Sapiens
  misc_feature (103)..(353): n is a, c, g, or t
  misc_feature (376)..(386): n is a, c, g, or t
ttggggagcatgtgggggttgtaccaggatttaaaagatacacggcaattttagaaattagcaagtctaaactatgatacctaaggatgcacacctgggtgannnnnnnnnnnnnnnnnnnnnnnnnnnnnnnnnnnnnnnnnnnnnnnnnnnnnnnnnnnnnnnnnnnnnnnnnnnnnnnnnnnnnnnnnnnnnnnnnnnnnnnnnnnnnnnnnnnnnnnnnnnnnnnnnnnnnnnnnnnnnnnnnnnnnnnnnnnnnnnnnnnnnnnnnnnnnnnnnnnnnnnnnnnnnnnnnnnnnnnnnnnnnnnnnnnnnnnnnnnnnnnnnnnnnnnnnnnnnnnnnnnnnnnnnnnaacaagagtgaaactctgtctcnnnnnnnnnnnttataaagaaatacacagaggtgattactataagtcaaagagttacttgttcagggggaaggagggagctacgattgagtcagggcatgtggt

SEQ ID NO: 232570 - DNA, 637 bp, Homo Sapiens
gtaccaagattaaaaagataaaagaatgttttttgcttcagtaaccctaaaatatctttgtcaactctcacatcatattctgatatggtatcttcaaaagactttgtgtggtggctcacatttttctatagtatgaggttagaacatttggtgggtggattgtctgattactcgacctcgatttgaaatagagattttcgtataaccctcatattgatttggctctctgctgccaatcccgtggtgatgttgaacccatgtatcattattcgggtttcgatcctagactttttctgaacctgcgagttacttttgtctggatgctttgtaagcgtacttaaaatctgtgttttaaaatccttttgacaatgtgagggttacgtgattattatcatgcttggaatttgctgaacttcttgaagtctaccgctatgattttttcatacgatgtgggaagactttggacgtttattacacattataattttctgactcattagctcttctctcccattgtacatttatagaccacttgatattgcacagtaaatttctgaccctctgcataatatttttgaaaaatcctttcttcccattcatcacacctattgattatccagataagtgaccctttttc

SEQ ID NO: 232571 - DNA, 829 bp, Homo Sapiens
  misc_feature (74)..(86): n is a, c, g, or t
  misc_feature (106)..(336): n is a, c, g, or t
  misc_feature (389)..(669): n is a, c, g, or t
  misc_feature (671)..(693): n is a, c, g, or t
ttgggaaaatgatactgacaaggaatacatctagatcagaaatactgatatcctaagtgagatcttgttttttnnnnnnnnnnnnngtttaagaaattgtcatatnnnnnnnnnnnnnnnnnnnnnnnnnnnnnnnnnnnnnnnnnnnnnnnnnnnnnnnnnnnnnnnnnnnnnnnnnnnnnnnnnnnnnnnnnnnnnnnnnnnnnnnnnnnnnnnnnnnnnnnnnnnnnnnnnnnnnnnnnnnnnnnnnnnnnnnnnnnnnnnnnnnnnnnnnnnnnnnnnnnnnnnnnnnnnnnnnnnnnnnnnnnnnnnnnnnnnnnnnnnnnnnnnnnnnnntaataattaataaagagctggcctaaccaagaggtcaaaaactcaagtgccannnnnnnnnnnnnnnnnnnnnnnnnnnnnnnnnnnnnnnnnnnnnnnnnnnnnnnnnnnnnnnnnnnnnnnnnnnnnnnnnnnnnnnnnnnnnnnnnnnnnnnnnnnnnnnnnnnnnnnnnnnnnnnnnnnnnnnnnnnnnnnnnnnnnnnnnnnnnnnnnnnnnnnnnnnnnnnnnnnnnnnnnnnnnnnnnnnnnnnnnnnnnnnnnnnnnnnnnnnnnnnnnnnnnnnnnnnnnnnnnnnnnnnnnnnnnnnnnnnnnnnnnnnnnnnnnnnnnnnnntnnnnnnnnnnnnnnnnnnnnnnnctcaagtgcctgcaacgccaagcaatatactgttcatgtgtaaaggggcagcttagattggcaaggttgggatttggggggcaagctgggcacactggagtgagcagggcctacttttattttaatactttaaagt

SEQ ID NO: 232572 - DNA, 210 bp, Homo Sapiens
ttggcgtgaccctcaccctatttaaccgggagctgcccaccatctccttccttgcggccctgccactgaactagggggtcaactggctgattaacaaagtcatccatgagccacggccctgtgtaggctctcacaccttactgcgcaccaactaccggatgccctccaaccattcccagtttatgtggttcttctcctcctattccttcc

SEQ ID NO: 232573 - DNA, 401 bp, Homo Sapiens
tgggtgcaacctcccctacgcatccgctaaggagaagttgccgacccgggtgctcgcccaaggcagaggcccgcgtcagcgttggttgggcgtgaactgggaggcataactgtgagcaccaagggaactggagagaccactgcggcacctccggccgccccggaccaaacacgaccagcggggctgctttaccaagggccgcgtcgcccggaggccgcccctgacagtacctcgcagccccgccgtccggcgctccctggccctctcccgcagccaggctgccaactcattcgggagcccggagcatgaacggctactttttccccctacctgtacatgggtggcccgatgtcacacctaccatgggcgcccctgctacgcacgaccaaatgcgcgcgctg

SEQ ID NO: 232574 - DNA, 137 bp, Homo Sapiens
ttggctcgcatggtcctggaaaattaatggaaaactttcataagatactacaagatggaaagattgttcagattccattctgtggggaaattaaatgtgaggactggatcacaaacaccactgacagggatcaggat

SEQ ID NO: 232575 - DNA, 396 bp, Homo Sapiens
ccatatcttgaagcccagcgttggatatggaatccaaagaaaaacaaagcccatgctgcccagtgccttccggaagttcctggtccacaccttcaaggaactagaagtgctgctgatgtgcaaccactcttaatgtgcctatatcactcccaatgtttcctctaagaaccacaaagccgacgctttggcaactgactaattggcctactaattcgcgcccccgatatggcctttcgcgcataaacaacatcaatttctgacacttacctccttttcgcctactcatgtgtacatctgctatagtggaggccggagcaggaacaggccgaacactctaccctcccttattagggaactactcccaccctggagcctccgtagacctaaccatcttct

SEQ ID NO: 232576 - DNA, 328 bp, Homo Sapiens
  misc_feature (63)..(109): n is a, c, g, or t
  misc_feature (170)..(181): n is a, c, g, or t
cctataaaaagccaactttgtacaaaaaagttggcgcacaactttctacaaaaaaagttgggnnnnnnnnnnnnnnnnnnnnnnnnnnnnnnnnnnnnnnnnnnnnnnnaaaaccaaaccactggaggggaaagggtttaagttacctttttgcctatgggcccctttgnnnnnnnnnnnntttcccaaggaaacccaggccaaattaaccccgggattgacggcttcctctttttattttaaatgaaaggggaaccccggttgtaaaccaaaaaaattgaaaaagaacactattgaaacttccctttttgccaaaaattaccaagtt

SEQ ID NO: 232577 - DNA, 725 bp, Homo Sapiens
  misc_feature (135)..(521): n is a, c, g, or t
acagaagcataatgtcggacagaaaaagcaagtttcaaaagactataaacatgatatcataattataaagttcaaaaaagctacactaagcaacataatatttagatatatgtacgtgttaaatatatttttaannnnnnnnnnnnnnnnnnnnnnnnnnnnnnnnnnnnnnnnnnnnnnnnnnnnnnnnnnnnnnnnnnnnnnnnnnnnnnnnnnnnnnnnnnnnnnnnnnnnnnnnnnnnnnnnnnnnnnnnnnnnnnnnnnnnnnnnnnnnnnnnnnnnnnnnnnnnnnnnnnnnnnnnnnnnnnnnnnnnnnnnnnnnnnnnnnnnnnnnnnnnnnnnnnnnnnnnnnnnnnnnnnnnnnnnnnnnnnnnnnnnnnnnnnnnnnnnnnnnnnnnnnnnnnnnnnnnnnnnnnnnnnnnnnnnnnnnnnnnnnnnnnnnnnnnnnnnnnnnnnnnnnnnnnnnnnnnnnnnnnnnnnnnnnnnnnnnnnnnnnnnnnnnnnnnnnnnnnnnnnnnnnnattttaaattgtggaaagaacacttactatgagatctaccctcttaacatatcttgaagtgtgcaattcaatattgttaattatgctgtacagtgttatacagcagatctctagcacttactcattttgcataactgaaattttatatctgttgattggcagctttttagaagaagagcaagggaatgattaaaatatgtattt

SEQ ID NO: 232578 - DNA, 121 bp, Homo Sapiens
tgagggaggcctgggctacaccctgctgggtgacgacgacctgaaggagaccggcttccaccttaccaccccaatgcttggggcgtctgccgcgggccccggcctcttcctctagttctga

SEQ ID NO: 232579 - DNA, 567 bp, Homo Sapiens
  misc_feature (416)..(444): n is a, c, g, or t
ttgggtttcatgttcccaatgaacccctcttcttcatatatagaaattttcggtaaggatatgatatttctgtttatcttcacgtctatttgtaataatgatatgctagatattttgtggacctgtgtcaaaactaacctgtggtccggcttgctcctattttactgaactgcgattggcgtgtgaagatgcagaccacccttctggtccctgagcgcttcgtattaacccagcctttggtctgccatgaatgccctgaatattactattggatgaagaactaacgctagataaatagaaaaaacctgatgtgaaagatggaacggaccacgccttaattgaatactgtgaacatcaatgggaggtttacccagttttttccttgctccaaatccaagttatccagcatccaatannnnnnnnnnnnnnnnnnnnnnnnnnnnncacttaacattgataaatagttgttacactgatagatgtgtaatttttcagtactcacttgaaaagacagaactatcttcttctgagagaggctatcatgttttcagcaacgaacctatcttc

SEQ ID NO: 232580 - DNA, 195 bp, Homo Sapiens
tttgtacaaaaaagttggtttattttcccccaaaaaaccctctaaatcctgttgtattttagctgttagtccaaagaggaacagctctttggacactaagaaaaaaccttgaaaagagagtaaaatattcaacacccataggaggcctagaagccgccagcaatgaaaaaggcgttcctgctcaacaaccaacta

SEQ ID NO: 232581 - DNA, 298 bp, Homo Sapiens
ttggctcttcgcttcccctgctggttctggggggggtgctccggggtcctgatcatgttaccctccatctgcttgcccaccatcaaggtatgaggatggtcgttgctctcgtcaaacccaatggatgaataccactaacggcttttgtttcctctggtgacttctgaaacagagcgatggagagattggaccgctggctgcactgttgaatttactgttaagataaatcatcctttcacagattgaaatgatcttcagaatggtgaactaggatccccagaatatctcaagggacttg

SEQ ID NO: 232582 - DNA, 532 bp, Homo Sapiens
  misc_feature (133)..(377): n is a, c, g, or t
acatttaaaaagcaactttgtacaaaaaagttgggtaattttttttccctaaaaagtttagagatttaggaggaaaaggtggtctttaataggctttctttttttcctggggtggggtgcagattcttcctcnnnnnnnnnnnnnnnnnnnnnnnnnnnnnnnnnnnnnnnnnnnnnnnnnnnnnnnnnnnnnnnnnnnnnnnnnnnnnnnnnnnnnnnnnnnnnnnnnnnnnnnnnnnnnnnnnnnnnnnnnnnnnnnnnnnnnnnnnnnnnnnnnnnnnnnnnnnnnnnnnnnnnnnnnnnnnnnnnnnnnnnnnnnnnnnnnnnnnnnnnnnnnnnnnnnnnnnnnnnnnnnnnnnnnnnnnnnnnnnnnnnnnactagccacagcacctggcctttaataggctttcttaacagaaaagtagacatcaaactttctaagttcataaccgggctctggtgcttaccagctagctgaccttaaacttaaactatctaaactttaatgttcttcctcatatgaaaaatggg

SEQ ID NO: 232583 - DNA, 286 bp, Homo Sapiens
  misc_feature (119)..(187): n is a, c, g, or t
ggccagagtctcccccccaaaaatagaaagcgcgtgtttgcgtccggttctgttggagtgcgttcggtgtgccgtgggtccgcgctgcttccacccaaattcccgttagatggcgtctnnnnnnnnnnnnnnnnnnnnnnnnnnnnnnnnnnnnnnnnnnnnnnnnnnnnnnnnnnnnnnnnnnnnnaagcaattctccctgcctcaccctgcttcatgaaaaagaggaccttaaaactgaaggagcaagattcctacatcacactgtttttgttaactgtgtgtg

SEQ ID NO: 232584 - DNA, 484 bp, Homo Sapiens
  misc_feature (238)..(252): n is a, c, g, or t
  misc_feature (274)..(334): n is a, c, g, or t
  misc_feature (349)..(422): n is a, c, g, or t
ctaaagacaactttgtacaaaaaagttggattcattgattgatgggcatttggattttttccactttttggctattatactgctgtgaacatttgtgtacaagtttttgttcagatgtaagtttttacttctcttgggtatatacctacagatggaattgctgggtcatgtgctaattatgtttaacctttgaggaactttctgcctgttttccaaagtggttgcatcattttgctgnnnnnnnnnnnnnnngagacagcgtctcagtttgtcnnnnnnnnnnnnnnnnnnnnnnnnnnnnnnnnnnnnnnnnnnnnnnnnnnnnnnnnnnnnnaggcgattctcatgnnnnnnnnnnnnnnnnnnnnnnnnnnnnnnnnnnnnnnnnnnnnnnnnnnnnnnnnnnnnnnnnnnnnnnnnnntgtgatcacaccacttaattcctcgaggcatttgtgtcccagttccctccatttcaaaacca

SEQ ID NO: 232585 - DNA, 194 bp, Homo Sapiens
  misc_feature (53)..(141): n is a, c, g, or t
aattgatgagcaatgcttttttctaaaaaaagaactttgtacaaaaaagttgnnnnnnnnnnnnnnnnnnnnnnnnnnnnnnnnnnnnnnnnnnnnnnnnnnnnnnnnnnnnnnnnnnnnnnnnnnnnnnnnnnnnnnnnngtgtgagccactgtgcccggccttgactaccatattttaaatttactggagga

SEQ ID NO: 232586 - DNA, 790 bp, Homo Sapiens
  misc_feature (333)..(391): n is a, c, g, or t
  misc_feature (401)..(733): n is a, c, g, or t
ttggctcaataaagagttttgtgaattgtccaggaacacatagctgataaggaatgctccttcagtttctctaaggcagcagtttttgaagcatggtcagtgaacccctaggaagggaccctagtgaccctttcattaggtccctgaaggcaaaactattttcataataattaagacattattttcctttttaactatgttgatgcttgcactgatggtgcaaaagcgataataggtaaaactgctggctccttatcatgaaccaaggcagtggaaccaaacttccactcattatattcttgttttgttttgtttttgagacagtctcactcnnnnnnnnnnnnnnnnnnnnnnnnnnnnnnnnnnnnnnnnnnnnnnnnnnnnnnnnnnngttcaagcannnnnnnnnnnnnnnnnnnnnnnnnnnnnnnnnnnnnnnnnnnnnnnnnnnnnnnnnnnnnnnnnnnnnnnnnnnnnnnnnnnnnnnnnnnnnnnnnnnnnnnnnnnnnnnnnnnnnnnnnnnnnnnnnnnnnnnnnnnnnnnnnnnnnnnnnnnnnnnnnnnnnnnnnnnnnnnnnnnnnnnnnnnnnnnnnnnnnnnnnnnnnnnnnnnnnnnnnnnnnnnnnnnnnnnnnnnnnnnnnnnnnnnnnnnnnnnnnnnnnnnnnnnnnnnnnnnnnnnnnnnnnnnnnnnnnnnnnnnnnnnnnnnnnnnnnnnnnnnnnnnnnnnnnnnnnatgcacactaccatgtgcccagctaattttttgtagagacgctgtcttaccatgttg

SEQ ID NO: 232587 - DNA, 831 bp, Homo Sapiens
  misc_feature (225)..(275): n is a, c, g, or t
  misc_feature (647)..(666): n is a, c, g, or t
  misc_feature (675)..(742): n is a, c, g, or t
ttggcaagaattggaaaagcaagaaagtacaagaaaggctttgagttctataagggggttaaaccagaaagcggcgggggcagggaacagtcaatctttgtgtgtgcacactgcgtgtgcagagagaagactcctcaggagaccaggacctggctgagtgtgtgcggggatgaagcgggtggaggggaactggggctggggaggaggtacgcgccgcggaggtgnnnnnnnnnnnnnnnnnnnnnnnnnnnnnnnnnnnnnnnnnnnnnnnnnnngtgacgccgcttcccgtctccaggcaacgtgggggccaaacaacacggccgggaggcggccgctgcctgccgggccctctcttctgggaccctggattttcggacactgagcgccatggccctgcctctgctgccgggcaacagcttcaaccgcaacgtgggaaaggagaagtttcacaaatcccaacattggggcttttgcaacaatgttatgatgttggtgagtgatgaaaagcctggaataggtggagaaccacttctggggcaaaagataaagcctaaatgtagcatatatcctaaaggagatggaagtgatgtaccatcatgggtagcctttgataaacagcttctctagaaattcagctgtaagannnnnnnnnnnnnnnnnnnngagctggannnnnnnnnnnnnnnnnnnnnnnnnnnnnnnnnnnnnnnnnnnnnnnnnnnnnnnnnnnnnnnnnnnnagttcatgccattctcctgccctcaccctcccgagtagtgggactacgggcaaccgccccccacacctggctaatttttggtattttta

SEQ ID NO: 232588 - DNA, 428 bp, Homo Sapiens
ttggagcaaaccccctaccctgttccaagccccggtggataccaactctggggtctcttggtgggagagtggggagcccgtattctgcagagtgctgcgcccccttctcccgagtccctacgtggaacttcgaccggatgccacccccggctcggctgggggatctcattatgttacgcttattgctcctgaactcctgggccgccctgtcctcccacctcttcctcccttttgctgggattacaggattctggggcgtcctttggcagatgattgtgccctgctgggtgacaaagtccaggaatgatattttcttgggctgtatttctctaccctgcagtttctcccgttcagccgaaacacactgacctgattaatgtgaccaactgggatggatataccctttctgatgaccttgtggttttttt

SEQ ID NO: 232589 - DNA, 433 bp, Homo Sapiens
  misc_feature (73)..(340): n is a, c, g, or t
ctgagaaaccaaaaataggacaaactgaaagaaatccatgccaaggtatattaaatttctgagaaacacaccnnnnnnnnnnnnnnnnnnnnnnnnnnnnnnnnnnnnnnnnnnnnnnnnnnnnnnnnnnnnnnnnnnnnnnnnnnnnnnnnnnnnnnnnnnnnnnnnnnnnnnnnnnnnnnnnnnnnnnnnnnnnnnnnnnnnnnnnnnnnnnnnnnnnnnnnnnnnnnnnnnnnnnnnnnnnnnnnnnnnnnnnnnnnnnnnnnnnnnnnnnnnnnnnnnnnnnnnnnnnnnnnnnnnnnnnnnnnnnnnnnnnnnnnnnnnnnnnnnnnnnnnnnnnattttcttcaaacagaaaggaaatgataaaataatcaattttgagcataaagaaaaagaaaaagcattgtaatgaacagaaatatgagtacaa

SEQ ID NO: 232590 - DNA, 808 bp, Homo Sapiens
  misc_feature (146)..(728): n is a, c, g, or t
catgtagaaattaatagcatttctacatgctaatagcaaactatcagaaaaagaaatcaagaaaacaattttatttactatagctacccaacataagatacctaagaataaacttaagtaacaaggtgaaagatgttgatattgannnnnnnnnnnnnnnnnnnnnnnnnnnnnnnnnnnnnnnnnnnnnnnnnnnnnnnnnnnnnnnnnnnnnnnnnnnnnnnnnnnnnnnnnnnnnnnnnnnnnnnnnnnnnnnnnnnnnnnnnnnnnnnnnnnnnnnnnnnnnnnnnnnnnnnnnnnnnnnnnnnnnnnnnnnnnnnnnnnnnnnnnnnnnnnnnnnnnnnnnnnnnnnnnnnnnnnnnnnnnnnnnnnnnnnnnnnnnnnnnnnnnnnnnnnnnnnnnnnnnnnnnnnnnnnnnnnnnnnnnnnnnnnnnnnnnnnnnnnnnnnnnnnnnnnnnnnnnnnnnnnnnnnnnnnnnnnnnnnnnnnnnnnnnnnnnnnnnnnnnnnnnnnnnnnnnnnnnnnnnnnnnnnnnnnnnnnnnnnnnnnnnnnnnnnnnnnnnnnnnnnnnnnnnnnnnnnnnnnnnnnnnnnnnnnnnnnnnnnnnnnnnnnnnnnnnnnnnnnnnnnnnnnnnnnnnnnnnnnnnnnnnnnnnnnnnnnnnnnnnnnnnnnnnnnnnnnnnnnnnnnnnnnnnnnnnnnnnnnnnnnnnnnnnnnnnnnnnnnnnnnaacatatgggaaatgctttataacactggtctatgcaagattttaaaataagacttgaaaacccaggcaacaaagcaaaa

SEQ ID NO: 232591 - DNA, 451 bp, Homo Sapiens
actttgtacaaaaaagttggagactaagaagattactttttcggatatctctgtgcgataagcacctttttactatctttgatacgctgatatctttgggttttgaaaggaaaaaaacccagcgaagttatcttcagggacacgtgtctcctactttatactttttgagggctgcaacttacgggtagtctaccatgtctactaatttctacaaaactttaactaccatgcattgctggatgccctacaaagctgagggtgaaaagggtgtttttctaaactttttgcctcttcttcagggaagatcataattacttttcctttcgtttgtttcctccctttgagataatctaatactcttaaatggtcccttgaaatattgattcttatttaggtaagcataactatgaattgaattaaacaatttataaccgctagacaatatttttta

SEQ ID NO: 232592 - DNA, 788 bp, Homo Sapiens
  misc_feature (45)..(332): n is a, c, g, or t
  misc_feature (337)..(356): n is a, c, g, or t
  misc_feature (478)..(486): n is a, c, g, or t
ttggctcaggtattcctttatagcagtgcaaacagattaacatannnnnnnnnnnnnnnnnnnnnnnnnnnnnnnnnnnnnnnnnnnnnnnnnnnnnnnnnnnnnnnnnnnnnnnnnnnnnnnnnnnnnnnnnnnnnnnnnnnnnnnnnnnnnnnnnnnnnnnnnnnnnnnnnnnnnnnnnnnnnnnnnnnnnnnnnnnnnnnnnnnnnnnnnnnnnnnnnnnnnnnnnnnnnnnnnnnnnnnnnnnnnnnnnnnnnnnnnnnnnnnnnnnnnnnnnnnnnnnnnnnnnnnnnnnnnnnnnnnnnnnnnnnnnnnnnnnnnnnnnnnnnnnncaccnnnnnnnnnnnnnnnnnnnnaaatttgtagtacctttattttagatctttaaaaacacttttaaatttcacacagcaaattttaaatcatataaggatgcatatttgaacttagtgaatttaatctgtgtgccttgaaaacnnnnnnnnnccctgcaaacttttaaaatgagagtacaatagtaaattatttaaaattaaactggggaaaaacacaggcacacttttctccattgtttactactctgatctagacctgggttaaatttctaaaatatataatacctttcatcattcttaagttctattatcaaataatggttagtgttatagaaagttattctccaaatacccaaagctaagattctaatttaaactattctctgttctttcatgggggaagcagatttgggtgccacccaagtattgactcacccatcaacaaccgctatg

SEQ ID NO: 232593 - DNA, 285 bp, Homo Sapiens
  misc_feature (82)..(90): n is a, c, g, or t
agagcccagagccagagcccggccggggccgccgccggaggacgcggcttcgagaagctgctggccccggcgcggccccccnnnnnnnnntgtgcggcccggtgtgctatgagcagtccaagcgcctctccttacattttacattgaaatggatgactgtttttatttgactggaaaaccgcaatttgacgtcttcgctcaaagatacacgcggatcggtcgaagatttttgtttgggccccgctttaaataaccgttctgtctttttggatatttcttcttgga

SEQ ID NO: 232594 - DNA, 876 bp, Homo Sapiens
ttgggctttaagtaattacccctcttcgtctgatagggataatcaaaggaatacaaaaatttcatatctctcccagcaaagtcccctctggaaaatgtgtataaaaaggtacgggctgtccagaaagtccttctgctaaatttccggatgaggagaccccattctaggtaatgtacttttctgatttttgtctatgaactattatttatattgtgcggtgggtagactctgcccatctccatccatggtaaggttactactccaatggacttgcatttcctttccccacactgtctttctcaagctatgactgacctgtggcccctattgggcttacctctgcaacacggccatttacccactctctactccctaaacccacaaagggcatccacctcctatcaacaaccagaagcccacgaaactgaaaacaaattgcccagagttaggctgactgaggttgtacagcttctcttccatctacactccacgatcctagttcttagatggctctgactcttttcaatgcgaggactctacgcccatagtatcttcatctcgtcatctgtcatcatattctctcacacggacagtcaggtaatttcataccaagagccccatagtctgtatcactcttcatgcctcataatgctctaataaccttctaatgcctggatatttcagcaaacttttagaaaggacaacaaccctctacccttaccctggcagtagaaaaactggtttctattttaaacatataaacaaccgtcttcggaaaaaatctctatttaaaattcttaaattagcctctaaatgcaagttgtaattgatacaattagaagtttacactgttgagtgtaaaaacaccctcaggca

SEQ ID NO: 232595 - DNA, 934 bp, Homo Sapiens
  misc_feature (219)..(260): n is a, c, g, or t
  misc_feature (492)..(533): n is a, c, g, or t
  misc_feature (556)..(652): n is a, c, g, or t
  misc_feature (667)..(785): n is a, c, g, or t
ttggattttgttgaggattttgtgtccatattcataagtgatattggtctgtagttttcttgtgatatatgtctggttttggtatctgggtgatgcctcataactgaagtggaaaatgtcacctctttgtctattttttttaatagtttgcaaataattggtattaatttgtcttcaaaagattggtaggattcagtggtgaagccatttgggcctgannnnnnnnnnnnnnnnnnnnnnnnnnnnnnnnnnnnnnnnnnatagttttttgttgttatatttaccaatcagtctcttgacttgttatccatctattcagattatctatttattctcaaattagttttggtagtttgtgtctcactaggaatttgtccatttcatctaaattataaaatttgttggtgtacagctatcattgtatccttttataatgctttttatttctgttgctcccctctttcatttctgattctggtgagtaatttgaannnnnnnnnnnnnnnnnnnnnnnnnnnnnnnnnnnnnnnnnngagacagagtcttactctgtcannnnnnnnnnnnnnnnnnnnnnnnnnnnnnnnnnnnnnnnnnnnnnnnnnnnnnnnnnnnnnnnnnnnnnnnnnnnnnnnnnnnnnnnnnnnnnnnngcatgcaccaccaannnnnnnnnnnnnnnnnnnnnnnnnnnnnnnnnnnnnnnnnnnnnnnnnnnnnnnnnnnnnnnnnnnnnnnnnnnnnnnnnnnnnnnnnnnnnnnnnnnnnnnnnnnnnnnnnnnnnnngtgtgaaccaccgcccccagccaagtcttctctctctttttttgcccaccgtggtcacctagctaaaagtttgtcaattttgttgatgttttcggagagccagtttttggtttcattaatttttctctattcattttctattctctatt

SEQ ID NO: 232596 - DNA, 486 bp, Homo Sapiens
ttggaaagtgaatggcttggatgaaggaatggatttcctgcctgtcaacaacgtccataaagaggaagaacatggcccggggcgctggctggtggtggctggcgtgctgattgatctcctcttgctcgtgctggggatgggtttcctgctgtgggatttgttttaccgggacgggcgtgtccggaaggactgccatggctggctgaggatcgataatgaaaaatatgtggatgcataccaaaaatccctctccattgactttgtaagcctgcccggcaaggtgagtgacggactgaatctgctgtatgtcggagtcactttcctgggcgcctaccaaaaagagtcagctgtgagtgacttccttcagggaagcgtcctcccctactaatgatcggacttaatcatccctcaccacctggtggaggaagcagaccgagtcctggccgaggaacgagtactcatgctgccccccccggcgcgctccct

SEQ ID NO: 232597 - DNA, 903 bp, Homo Sapiens
  misc_feature (57)..(152): n is a, c, g, or t
  misc_feature (165)..(177): n is a, c, g, or t
  misc_feature (196)..(445): n is a, c, g, or t
  misc_feature (646)..(743): n is a, c, g, or t
ccttttaaaagccaactttgtacaaaaaagttggtgaatgatgacattgctgtggannnnnnnnnnnnnnnnnnnnnnnnnnnnnnnnnnnnnnnnnnnnnnnnnnnnnnnnnnnnnnnnnnnnnnnnnnnnnnnnnnnnnnnnnnnnnnnntggattggatgannnnnnnnnnnnnaattgagatggagtcttgnnnnnnnnnnnnnnnnnnnnnnnnnnnnnnnnnnnnnnnnnnnnnnnnnnnnnnnnnnnnnnnnnnnnnnnnnnnnnnnnnnnnnnnnnnnnnnnnnnnnnnnnnnnnnnnnnnnnnnnnnnnnnnnnnnnnnnnnnnnnnnnnnnnnnnnnnnnnnnnnnnnnnnnnnnnnnnnnnnnnnnnnnnnnnnnnnnnnnnnnnnnnnnnnnnnnnnnnnnnnnnnnnnnnnnnnnnnnnnnnnnnnnnnnnntgaggcaccacaaccagcctggatgattcttaagggcccttctaggaccaaagttctgggaatttctagcttattctgccccctcatagcccttggcctatctatctttatccacatgcagaaacatctggcaaccccacatggctgagatgacctggtcctaggacacccttggacagaagactggcctacctagcagannnnnnnnnnnnnnnnnnnnnnnnnnnnnnnnnnnnnnnnnnnnnnnnnnnnnnnnnnnnnnnnnnnnnnnnnnnnnnnnnnnnnnnnnnnnnnnnnntctggtgaacaagaaatgtaataaaacacgtggcttgccattcaagagatgagtctgaccattcactttctgtgtgccagagaagagagatcatgggtatagaccagcccctggaaaggctgctttggtcaagctgaaaagcagctttgctcaaggaaat

SEQ ID NO: 232598 - DNA, 674 bp, Homo Sapiens
  misc_feature (487)..(510): n is a, c, g, or t
tgagccactgtgcctggctacattttactttttcttaagatggatgcttcaggttaactcaaaagagtaactgaggataggaggagaaaatagccttgaagaacgcatttctatatctttcttatattaggaggtaaatatagcaccctatttacattctaatcccaaagtttaattatatctctatatagtaagaaatagggctttaaaatcatggcttgttgaaagaatgggatgacagatttgggttggttgtcatttagtagtattgatatgtgacagaaagatgattaaagaagagtgataagccactgcatccagcctttgtttttcttaactgttaccctgaaacctgagccaaatcttcatcattcaccattcccttcacattttcaccctaactagtgcagacatcaacaaactactggcatgtaggccatatgcagcctatagcttgccttggtacagccacccagctaagaatgannnnnnnnnnnnnnnnnnnnnnnnaaaaacaaatattcaacaaaggctgtatgttacctgcaaaagcctaccacatttacatctggccctttaaagtttgctgagccctgatctcaagtatacctagaaatgaaattgctagctatgtgtgtcttctatctgctaaataataccaattcctttcccaa

SEQ ID NO: 232599 - DNA, 439 bp, Homo Sapiens
ttggcttccatatccctttgcgaaagcacttggtggaatccagaggactcatcatgatctcgttactccatatgttagaggtgctggtataaagaccccatgcactaacattccacacatcgcacaactcagggtgctgaggacctctcatgatcgttaataaacttcggtaaatgaattatttgtatataactttaaagcaggtacccttatgtttactcctactgacgttaaaagtacacttgatcctttgcctttgttacaagattctgaagacgtgaacgacgtatttcctcacgcattacttcctgcttttcattctcttcactagtgaaagcaagtgatcaattgctgccttctaaccatatgttacatccttttgtgttccgtgggcaatattttttggctctcctatggatcagtaattacattacaatgt

SEQ ID NO: 232600 - DNA, 276 bp, Homo Sapiens
aagtggaggaagaacgaaggcgcaggctgaatcgcttttaagatagatgatgttaaggtccaattaatctgctttcttgtgtcaccttggaggccacaggagcccaaacatggtatgtcaaactctggggatgctggtataacttgtgggactgcatgatactgtctaaattttgatgcattgaatctagaacttctgcgccctctgatcgcgcatcacctctgtaacttcccttgctcataaataaaatgtcccagttggacctccgcccttttt

SEQ ID NO: 232601 - DNA, 290 bp, Homo Sapiens
  misc_feature (55)..(92): n is a, c, g, or t
  misc_feature (116)..(193): n is a, c, g, or t
acttataaaagccaactttgtacaaaaaagttggctttgtacaacaaaattgggnnnnnnnnnnnnnnnnnnnnnnnnnnnnnnnnnnnnnncctttgaaatggattccctgtccnnnnnnnnnnnnnnnnnnnnnnnnnnnnnnnnnnnnnnnnnnnnnnnnnnnnnnnnnnnnnnnnnnnnnnnnnnnnnnttcctccccccttggcccctgaatgtgctgggattacgagcatgagcctctatgcctaaccattttttttccaatattaaaaaacctttttttcccc

SEQ ID NO: 232602 - DNA, 598 bp, Homo Sapiens
  misc_feature (90)..(101): n is a, c, g, or t
  misc_feature (103)..(395): n is a, c, g, or t
acggtgcctgaccagaagtaagacattttggatgtgtgaatgaagttctgattatgttctaaaggaattaccactagttttgtggtaccnnnnnnnnnnnngnnnnnnnnnnnnnnnnnnnnnnnnnnnnnnnnnnnnnnnnnnnnnnnnnnnnnnnnnnnnnnnnnnnnnnnnnnnnnnnnnnnnnnnnnnnnnnnnnnnnnnnnnnnnnnnnnnnnnnnnnnnnnnnnnnnnnnnnnnnnnnnnnnnnnnnnnnnnnnnnnnnnnnnnnnnnnnnnnnnnnnnnnnnnnnnnnnnnnnnnnnnnnnnnnnnnnnnnnnnnnnnnnnnnnnnnnnnnnnnnnnnnnnnnnnnnnnnnnnnnnnnnnnnnnnnnnnnnnnnnnnnnnnnnnnnnntgttttccatttctctccctctcacacctttcctgtctactgactttgtgatttagttaaaccaagccactaaaacccagccaaaattctactaccaataagaaatgtttagagttgatgttgatttaaatagctttagtgcagctgtgtcgtacttaaactcctgcaaatttccctccccccccagagatggtgtcttgctt

SEQ ID NO: 232603 - DNA, 846 bp, Homo Sapiens
  misc_feature (103)..(572): n is a, c, g, or t
ttggaagaaaacagctatctacatagaattttataccaaatgaaaacatcatataaaggcagaagtgaaatgaagatatttcagaaaaagcaaatcatagagnnnnnnnnnnnnnnnnnnnnnnnnnnnnnnnnnnnnnnnnnnnnnnnnnnnnnnnnnnnnnnnnnnnnnnnnnnnnnnnnnnnnnnnnnnnnnnnnnnnnnnnnnnnnnnnnnnnnnnnnnnnnnnnnnnnnnnnnnnnnnnnnnnnnnnnnnnnnnnnnnnnnnnnnnnnnnnnnnnnnnnnnnnnnnnnnnnnnnnnnnnnnnnnnnnnnnnnnnnnnnnnnnnnnnnnnnnnnnnnnnnnnnnnnnnnnnnnnnnnnnnnnnnnnnnnnnnnnnnnnnnnnnnnnnnnnnnnnnnnnnnnnnnnnnnnnnnnnnnnnnnnnnnnnnnnnnnnnnnnnnnnnnnnnnnnnnnnnnnnnnnnnnnnnnnnnnnnnnnnnnnnnnnnnnnnnnnnnnnnnnnnnnnnnnnnnnnnnnnnnnnnnnnnnnnnnnnnnnnnnnnnnnnnnnnnnnnnnnnnnnnnnnnnnnngaattaactgccagaaagcatacactaaaataaatactaaaaggatttcttcagcagagggaaagtggccctggacggaagtatgaagtacaggaaggaatgaagaacaataaaaagcctgcatatctgggtaaatctaaatagacaatgactgcatagaacaacaataataatgtcttctggagttctaaatagatgtggaattagaagaagtgataatgacagcacgaggcagaggaattaacgtgttctagggttgttgcagtatctaaaa

SEQ ID NO: 232604 - DNA, 899 bp, Homo Sapiens
  misc_feature (424)..(740): n is a, c, g, or t
ttggcccgtcctctcgcagtgtccactgctctcttacagcaactggagattgtggctgcattctctctcagattctgaagctccatacattgccgttttcagctgttcaagcttgcttgagcaaatttttgatcttagctgagtttggaagtcgatagacattggactgggtccaggatttgattggatctgataattaactggcttggatccagttagatgcctcgggtatctgactgggtcagatagaaaccgccagtaaatattttaataacaatactgcaggggtatgaactctggctttaagaaactcacaaggaattttatgttctataccctttgtttctttttcttgtgtgcttcggtcaggaaaaatcattagtcaagttaaggggatctgagagccaaatacaagattcaacgnnnnnnnnnnnnnnnnnnnnnnnnnnnnnnnnnnnnnnnnnnnnnnnnnnnnnnnnnnnnnnnnnnnnnnnnnnnnnnnnnnnnnnnnnnnnnnnnnnnnnnnnnnnnnnnnnnnnnnnnnnnnnnnnnnnnnnnnnnnnnnnnnnnnnnnnnnnnnnnnnnnnnnnnnnnnnnnnnnnnnnnnnnnnnnnnnnnnnnnnnnnnnnnnnnnnnnnnnnnnnnnnnnnnnnnnnnnnnnnnnnnnnnnnnnnnnnnnnnnnnnnnnnnnnnnnnnnnnnnnnnnnnnnnnnnnnnnnnnnnnnnnnnnnnnnnnnnnnaaataaagaaatccttaatttctgcggaactgagtgctctaccttctggctacacctacgtatacctgtatgaggtatagccctggaagcagcaacacttacagaaatggtgaaatcttactaaaggtaatctaaagttatggtggaacatcccaaatg

SEQ ID NO: 232605 - DNA, 187 bp, Homo Sapiens
ttggctgacctgccccatggcggttgggtagagcaagcgccctaagaaaggcggtgagcgggagacccgaagaagctgcttgatcccttttctattaaagattgtcatgatgtgaaacctcctggtatgttccctataagaaatgttgcaaatacgctcgtctccatgacccgatgaaccacaattg

SEQ ID NO: 232606 - DNA, 193 bp, Homo Sapiens
  misc_feature (64)..(98): n is a, c, g, or t
  misc_feature (117)..(150): n is a, c, g, or t
ttgggttatatccgtttaattttcttaaatctggaatagttcctcagtctctcattgtctttgnnnnnnnnnnnnnnnnnnnnnnnnnnnnnnnnnnngagacagagtttcacactnnnnnnnnnnnnnnnnnnnnnnnnnnnnnnnnnntaaaaccgcatacactgcctcatggattcaagggattctcctg

SEQ ID NO: 232607 - DNA, 511 bp, Homo Sapiens
ttgggtggttgaaaagagcctgtcggtagttctaaaaaacgttctgactggatgactcgtgctgtggttgcctcactgggaattgtacattttgtcgttggggcgccttgtctataccacagagcaaggggctctgctatgttatgtatttcagctttttactggtgtcgactcagccccccactggtcaaactcttcctgtctacttactgtcccatctgttaccccagatgacaaaaatggcagcgtttacccacagcctgcaggtggaaatgacttgcagtttttttccccagcctttcttgaaacagattttgatgcgcatggccacgatatgtgctgacatttttgaatgtattgaacttgggtgatcatggggtgtattaaataatgaataagcgaggctcccttgtggccatgctaattttctgaaggtgtacccgaaagtttttatatattttttgctaaaatgctggagaggggaaaggatgccgcacttcataaactggaa

SEQ ID NO: 232608 - DNA, 579 bp, Homo Sapiens
  misc_feature (251)..(523): n is a, c, g, or t
gataatcgcattacatacataatcaacaaaccacccctgggttgtttcccgtttttgtctattaacaataaagcctgctatgaacattctttttatgaaggatctttttttaacttgattttttcaatgtcttctatttatatccaaccggtatatatatcactcttacccactaatatcttcccccttttccccttttgtgcctattcgaaaatagtgtatcgcatttaaaaagacattgatctagattnnnnnnnnnnnnnnnnnnnnnnnnnnnnnnnnnnnnnnnnnnnnnnnnnnnnnnnnnnnnnnnnnnnnnnnnnnnnnnnnnnnnnnnnnnnnnnnnnnnnnnnnnnnnnnnnnnnnnnnnnnnnnnnnnnnnnnnnnnnnnnnnnnnnnnnnnnnnnnnnnnnnnnnnnnnnnnnnnnnnnnnnnnnnnnnnnnnnnnnnnnnnnnnnnnnnnnnnnnnnnnnnnnnnnnnnnnnnnnnnnnnnnnnnnnnnnnnnnnnnnnnnnnnnnnnnntctcaaacacaaaaaaacgaatacccattgacctacaaaatctactagggagtatc

SEQ ID NO: 232609 - DNA, 106 bp, Homo Sapiens
aaaaaagttgggacctacgccctcaagaacatgcctcacgcaaaggatctccttcatccctctccgaaagaagagaaaaggaaacacagaaaagaatcccctgctg

SEQ ID NO: 232610 - DNA, 722 bp, Homo Sapiens
  misc_feature (61)..(359): n is a, c, g, or t
  misc_feature (465)..(646): n is a, c, g, or t
ttggatatgactctatctggagacagtgatagtaggagatagttaagattaaatgagccannnnnnnnnnnnnnnnnnnnnnnnnnnnnnnnnnnnnnnnnnnnnnnnnnnnnnnnnnnnnnnnnnnnnnnnnnnnnnnnnnnnnnnnnnnnnnnnnnnnnnnnnnnnnnnnnnnnnnnnnnnnnnnnnnnnnnnnnnnnnnnnnnnnnnnnnnnnnnnnnnnnnnnnnnnnnnnnnnnnnnnnnnnnnnnnnnnnnnnnnnnnnnnnnnnnnnnnnnnnnnnnnnnnnnnnnnnnnnnnnnnnnnnnnnnnnnnnnnnnnnnnnnnnnnnnnnnnnnnnnnnnnnnnnnnnnnnnnnngattaaatgaatcataagaatggggccttaatctgatagaattgtggccttttaagaagaggaagaaagagaaaaagagaaacatctgtctctttctctctcttannnnnnnnnnnnnnnnnnnnnnnnnnnnnnnnnnnnnnnnnnnnnnnnnnnnnnnnnnnnnnnnnnnnnnnnnnnnnnnnnnnnnnnnnnnnnnnnnnnnnnnnnnnnnnnnnnnnnnnnnnnnnnnnnnnnnnnnnnnnnnnnnnnnnnnnnnnnnnnnnnnnnnnnnnnnnnnnnnnnnnctgtaggagcttagactctgggtcctgatacatatcggatcctgatgcttatcaaatccaggctcctttccttgaa

SEQ ID NO: 232611 - DNA, 836 bp, Homo Sapiens
  misc_feature (330)..(340): n is a, c, g, or t
ttggctgattatctgcatgtttcctagacaagtcttatttccctcactgaaagaggatattaatactcactgtgctcaaaggggttgttgtaagaatgaaataatatatttgaaatttcttaaagaagaattaagagacatttgaagcagcttgcctattgggagaagaatggcagaaggctttccaggcagaaggcagaagaatcttttcttgctgctctcctaggatctaccaaccagagattctaatgtgatacgtttggaatggagttatcgatctgcatttttaataggcattcctccagaatgacatggggaaatggaaggagnnnnnnnnnnncaatgctaaaaagcctagagatgaccacatatgaaacgaccatgtgtgtaaaggattgctggaaaataaatcaggcttgggtcccagctccaaaatgtctcattatctgtatttgaatatccccaaatttgaaaaattcaaaatctgaaacacttctgatcccaagcatttcaggctgggccccagcagagagcgagcggcaggaggacacttgagtggattctgcaaaaagccacacagctttcctctgatggatcaaaatgaaagaacgtcggtcctggcagtctttcagccacaaagctttgagaaatggggctaaatattaataataactgcttggattataatgaggaatcaatcaaaacacatactgttgatgaagatgccttgaacaccgtggatgctgtagaataaaggattatgactacagcaattcttgggctcccttctctgtttgtttaagggttacacaggctttgtttaatatctccgtgtc

SEQ ID NO: 232612 - DNA, 466 bp, Homo Sapiens
acttcctggtctacccaccttccccgtgggaggcagcctcagactccatctctctacttttccgtgccatgacagaatgcggtgtggttctacctgaacctagtagaatctatgaataagagaagccgaccttgtttaccctatgaacgtatgtgtgtttcagccatatccgccttctcaagagaacttctgggttaaaataccagatgaatttttttctttggtgtatatgacagacaaaattatttatgtatagaagattcctcctctccattctccactaatgcgacttatggtagccaagccccactcaatgttatcatggaaactgagtgaaacgtttgacctgaccactttgctttgtacttaggaattaaatattttttgaatttcagaaactgttgggatacactcgtcctttatgtaactaagtgggctgttcatatcccttacaggtcattttttg

SEQ ID NO: 232613 - DNA, 193 bp, Homo Sapiens
atttactattaaaataatacaccttgtactctgctgctaaacttgcctgtaatggcaatcttgttaccagttcattatctaaagaaaaagtattgtataaattcttcatgtaattccttacgataaactttttggtcactaataatacaacacaactcttgctagctgataaagggagtgtatgaaaaatcta

SEQ ID NO: 232614 - DNA, 540 bp, Homo Sapiens
  misc_feature (93)..(366): n is a, c, g, or t
  misc_feature (381)..(406): n is a, c, g, or t
tcaaaattcagtataacagaaaagatagaaatcagatttctagaaatgaatactataatgcttgacatgagaaatacatggccagccattgtnnnnnnnnnnnnnnnnnnnnnnnnnnnnnnnnnnnnnnnnnnnnnnnnnnnnnnnnnnnnnnnnnnnnnnnnnnnnnnnnnnnnnnnnnnnnnnnnnnnnnnnnnnnnnnnnnnnnnnnnnnnnnnnnnnnnnnnnnnnnnnnnnnnnnnnnnnnnnnnnnnnnnnnnnnnnnnnnnnnnnnnnnnnnnnnnnnnnnnnnnnnnnnnnnnnnnnnnnnnnnnnnnnnnnnnnnnnnnnnnnnnnnnnnnnnnnnnnnnnnnnnnnnnnnnnnnncccccacccctgccnnnnnnnnnnnnnnnnnnnnnnnnnngaataacacatagggcaacaactaatggcagtttaaacattgcagaagaaaaagattactgaacttagcatagtaatagaagccatccaaatgaaacagagaaaaaacatatgtgaaaaataagcaagcccttg

SEQ ID NO: 232615 - DNA, 457 bp, Homo Sapiens
cgataaaggccactttgtacaaaaaagttggattaaaagatctttaaagaaaattttgcggaatacacgtaggcatataacccctacctatataagcattaagtaaaattgtaacattttgaattggtctgggggaagtatcaccgaccttctctctgtatggtgttaataatttaattcctagtgtatctgctttttgttattgtttaaatatgaaagggaattggggacagcttggttttttgaacgggattatgagaatgatcctggatgtatgctaattttgaaatgcacttgatcgacaagattatcagtaatgatggacagcgaggcctgtgtattccttgtttggcttaaactgttagataggttggtgaatctgctggtatgttcttgcttatggagaaacctcttccaatacttcttggggcttttttcttttgttcagctccattat

SEQ ID NO: 232616 - DNA, 246 bp, Homo Sapiens
ttggatttctttcgcccattacccctaagcttgtgatgagttcattagtttaaagctactgtgctcccttactctttcccccccctcaactggtatgaccctgagggactagagtccttgtcccagcattctatttatccactcacatgataatttaggtttaagttctctttttatgctccaggagccaccaaatccttggatgttttaatcttaaaccctgataaataaaactttcccctaaat

SEQ ID NO: 232617 - DNA, 841 bp, Homo Sapiens
  misc_feature (180)..(454): n is a, c, g, or t
ttggccctctagtatccatgtcatatacacagggaacaggtggtgaattagtgaagatatgatggcaaatcccttccttgtacattaaggtccttatgggaggcactaatccctgatgtctcctcaggatgcaatgttgtttttgatttactatcttgatttggggagtggggatggggnnnnnnnnnnnnnnnnnnnnnnnnnnnnnnnnnnnnnnnnnnnnnnnnnnnnnnnnnnnnnnnnnnnnnnnnnnnnnnnnnnnnnnnnnnnnnnnnnnnnnnnnnnnnnnnnnnnnnnnnnnnnnnnnnnnnnnnnnnnnnnnnnnnnnnnnnnnnnnnnnnnnnnnnnnnnnnnnnnnnnnnnnnnnnnnnnnnnnnnnnnnnnnnnnnnnnnnnnnnnnnnnnnnnnnnnnnnnnnnnnnnnnnnnnnnnnnnnnnnnnnnnnnnnnnnnnnngtttctacctggcactttctgttttgagtaaaacttggtatcaaggttttgctcccaaaaccgttgctctgcagaaatctacagttcaaagagacgctttgaacactgttttcaaaactaaaatccaagaaaagtgtccgccctttgctcagcggcaggaaccaggctgagagggctcttctccactccagctgggaaggagggatctgggagccgcgtttgggaccccccccagcctggggcaccctgctggtgctgcgggtccctttagtctcggaggccccggggacggggaccaggggacctcgttcatttcagcacttcctggggccaccgcgcagggctgagcctcccacccacacagagcacttccagtggggtgcgggg

SEQ ID NO: 232618 - DNA, 415 bp, Homo Sapiens
ttggggcagaaatccccttccttgccccatgtcagtaacaaatgtcctcatgtggaagctctctcaaattgacctcatgggcccattctcaggacaagcccagacaaattgtacactttgaaatggtcacattttctatcatggattcgctggggataccacaattagcttctctgggagaggattctgatcgaacctcctgggagacagcaaaggaaataccagatcttaggggaggcaggatagaaggaaaaggtaaaggattttgcttcccttgggagggtgaaaatgtaaaccaggcttggcatgattctgttctgacagctgcttgtgttgcaggtggaactttcaaggttgacgtacctatggccaaatggctatcaatgaaaatatttgtattatgatgtttatccat

SEQ ID NO: 232619 - DNA, 235 bp, Homo Sapiens
aaagttggggtcaggtccaaaagaagaactggtccatatggaaagtttgggacaattcctccaactttttcttgtttgaaaacgcgagggctataaactcttcctggaaatgcctaccataatggcgtaccccgtcttttccactacatcaagatgaagatgaaaatgaccggggtaaaagcccccactccctaaatcctgccatggcgctgtataaaaatgtgatcaaggccct

SEQ ID NO: 232620 - DNA, 210 bp, Homo Sapiens
ttggactagacttgttacaaaggtttgccatctcacttgaaagaatactagtatatcgctcacacctcagatcctccctactatggctacaaggaataatactatcgctgttcattatgactactcacatacccctccgcacccactccctcttagccaatattgcgcctattgccgtactgatctttgacgcctgcgaagaatcggtgg

SEQ ID NO: 232621 - DNA, 480 bp, Homo Sapiens
  misc_feature (73)..(113): n is a, c, g, or t
  misc_feature (142)..(170): n is a, c, g, or t
gattgaaagttatattacatggtagtcatcttggtatagcagcttaaaataggaaggattgtgtttccattcnnnnnnnnnnnnnnnnnnnnnnnnnnnnnnnnnnnnnnnnngatactttgagacagagtcttggtctctnnnnnnnnnnnnnnnnnnnnnnnnnnnnnacttttggaggcagacaccccccactgggttccctggaatattgtgccacacgctccaaaacagatgggtctgaatagttctggcaaggagataaaaatgatttttactcttttaatttgggatggggagagcaggggatggtgggtgggaaaactgaattcagacctgcagtttcattccttccgtcaaacaaggtagatcctggaaatcccctaacggggataccccttcggcctgaaaatagggaagagacatgagaacttttttcatctggagaatattgcttggaccgggatgataaagaaaaat

SEQ ID NO: 232622 - DNA, 338 bp, Homo Sapiens
tatgcctttggacgttctcttttccattgtgccttttgaaagtcgtcttaacacacagcatccgcacttgaatctcaatgcagacagagaagtggtgagaagcaaccaaagtgaacccgccttcatttattccatcattcgttcatctgtcacacccttgtatggacctcaaggttgccgagatgaaggatgcacggatttcatctttgaggagttcaaaaccttcaggaaagaacacatggaacagacgtaccacatgaaggatatgtatatgctggagcaaaaggacaaataacatattccttgggcaccacgaagaaaaaccaccaatccatgga

SEQ ID NO: 232623 - DNA, 772 bp, Homo Sapiens
  misc_feature (101)..(115): n is a, c, g, or t
  misc_feature (177)..(217): n is a, c, g, or t
  misc_feature (295)..(544): n is a, c, g, or t
  misc_feature (611)..(672): n is a, c, g, or t
catttaagaggcaactttgtacaaaaaagttgggatcctcccacctttagcctcccaggtagttgggactacaggtgcgtgccactgtggctgagtaattnnnnnnnnnnnnnnntttaatagagatggggctttgccatgttgcccagcctggctcttgacctcttgggctcaggnnnnnnnnnnnnnnnnnnnnnnnnnnnnnnnnnnnnnnnnngcgtgaaccaccgcgcccagcctatgagtaggaattactttgtggtgctgttatacatgtgaaaaaggatttgcgagnnnnnnnnnnnnnnnnnnnnnnnnnnnnnnnnnnnnnnnnnnnnnnnnnnnnnnnnnnnnnnnnnnnnnnnnnnnnnnnnnnnnnnnnnnnnnnnnnnnnnnnnnnnnnnnnnnnnnnnnnnnnnnnnnnnnnnnnnnnnnnnnnnnnnnnnnnnnnnnnnnnnnnnnnnnnnnnnnnnnnnnnnnnnnnnnnnnnnnnnnnnnnnnnnnnnnnnnnnnnnnnnnnnnnnnnnnnnnnnnnnnnnnnnnntaatgaggctgggattacaggcatgggccaccgcgcctggcctggtttctctatttaaatctgaagnnnnnnnnnnnnnnnnnnnnnnnnnnnnnnnnnnnnnnnnnnnnnnnnnnnnnnnnnnnnnnagttataggtaaacattgggaaactccatagaataaatcactatttctacagaaaaatggcatagaagtcagtattggaatgtattaaattggctttctt

SEQ ID NO: 232624 - DNA, 676 bp, Homo Sapiens
  misc_feature (214)..(502): n is a, c, g, or t
tatttaagaagctgagtgaaacccaaagaagtccatgataggacagacttctgaaaactaaagacagaaaaaagcttgaaagcatcaagaaagaagtgaaatcttaactagagggaaaagtaactcagatgacagtggatttctctctggaaaccatggaggccagaaggaagtgagacaagttcttttagtgccagaagaactatcaacttgnnnnnnnnnnnnnnnnnnnnnnnnnnnnnnnnnnnnnnnnnnnnnnnnnnnnnnnnnnnnnnnnnnnnnnnnnnnnnnnnnnnnnnnnnnnnnnnnnnnnnnnnnnnnnnnnnnnnnnnnnnnnnnnnnnnnnnnnnnnnnnnnnnnnnnnnnnnnnnnnnnnnnnnnnnnnnnnnnnnnnnnnnnnnnnnnnnnnnnnnnnnnnnnnnnnnnnnnnnnnnnnnnnnnnnnnnnnnnnnnnnnnnnnnnnnnnnnnnnnnnnnnnnnnnnnnnnnnnnnnnnnnnnnnnactctgtcaactccaaattcctatttggtgaaatgatccttcaggattgatggggtaataaaaacattctcgggttgatagaaaactaaaagaatttggttgaatgagtctaccctatagaccttgaaaagaccacccctaaaggaagttcttgaaccagaaaggaaacatttc

SEQ ID NO: 232625 - DNA, 849 bp, Homo Sapiens
  misc_feature (94)..(405): n is a, c, g, or t
  misc_feature (411)..(722): n is a, c, g, or t
ttggggaagtcttaccctcttaggatttaaactggtttaactgatttcttatttaaaaactgggtaatagattttcccattaaaaacaggtttnnnnnnnnnnnnnnnnnnnnnnnnnnnnnnnnnnnnnnnnnnnnnnnnnnnnnnnnnnnnnnnnnnnnnnnnnnnnnnnnnnnnnnnnnnnnnnnnnnnnnnnnnnnnnnnnnnnnnnnnnnnnnnnnnnnnnnnnnnnnnnnnnnnnnnnnnnnnnnnnnnnnnnnnnnnnnnnnnnnnnnnnnnnnnnnnnnnnnnnnnnnnnnnnnnnnnnnnnnnnnnnnnnnnnnnnnnnnnnnnnnnnnnnnnnnnnnnnnnnnnnnnnnnnnnnnnnnnnnnnnnnnnnnnnnnnnnnnnnnnnnnnnnnnnnnngaacannnnnnnnnnnnnnnnnnnnnnnnnnnnnnnnnnnnnnnnnnnnnnnnnnnnnnnnnnnnnnnnnnnnnnnnnnnnnnnnnnnnnnnnnnnnnnnnnnnnnnnnnnnnnnnnnnnnnnnnnnnnnnnnnnnnnnnnnnnnnnnnnnnnnnnnnnnnnnnnnnnnnnnnnnnnnnnnnnnnnnnnnnnnnnnnnnnnnnnnnnnnnnnnnnnnnnnnnnnnnnnnnnnnnnnnnnnnnnnnnnnnnnnnnnnnnnnnnnnnnnnnnnnnnnnnnnnnnnnnnnnnnnnnnnnnnnnnnnnnnnnnnnnnnnnnccccacagttttttaaaatgatttttcatatcatagagagtgggaaggtaagcccacagtctttcttaagatttccaataaatgcaacagattagatccagaatatttaagaatgtctatacacagt

SEQ ID NO: 232626 - DNA, 832 bp, Homo Sapiens
  misc_feature (63)..(437): n is a, c, g, or t
  misc_feature (638)..(674): n is a, c, g, or t
ttggcaggatacacattcagtttgagtcaaacagattattgttctagagtattttcatagaannnnnnnnnnnnnnnnnnnnnnnnnnnnnnnnnnnnnnnnnnnnnnnnnnnnnnnnnnnnnnnnnnnnnnnnnnnnnnnnnnnnnnnnnnnnnnnnnnnnnnnnnnnnnnnnnnnnnnnnnnnnnnnnnnnnnnnnnnnnnnnnnnnnnnnnnnnnnnnnnnnnnnnnnnnnnnnnnnnnnnnnnnnnnnnnnnnnnnnnnnnnnnnnnnnnnnnnnnnnnnnnnnnnnnnnnnnnnnnnnnnnnnnnnnnnnnnnnnnnnnnnnnnnnnnnnnnnnnnnnnnnnnnnnnnnnnnnnnnnnnnnnnnnnnnnnnnnnnnnnnnnnnnnnnnnnnnnnnnnnnnnnnnnnnnnnnnnnnnnnnnnnnnnnnnnnnncaaaatttgctatatttctttggaggtttcttggagctcttccaaaacattttcttttgaggattctcctttgggtctttcaaacaccaagagcatattaaattccactctcctcctaccctaattgcaggacttaataaatcctttcttagcttcctccctgaggaaaagaacggggactcctttcccaggattcgtgcnnnnnnnnnnnnnnnnnnnnnnnnnnnnnnnnnnnnntggggcgctccttcttgcactctaggaatgggcgtggcaaaggcaagggtggatgagtgccctcaaatttactgaaatttgactttctaatttcacagtcagtgtgcacggctctcccactgagggtctttgactattttccactgctcccattttaa

SEQ ID NO: 232627 - DNA, 607 bp, Homo Sapiens
  misc_feature (298)..(341): n is a, c, g, or t
ctgttaaggccaactttgtacaaaaaagttggcttatatctgacctaattatttgattaattaacctagtttatattcatgcccaactcccttcccctctcccctacaatcttaaaaaaagcactgtatatttgggaaaaaagcctgaggtgaaaagtaagtccatataatttagatacccatactcagaagaagcatagccatttggaccatgaagttataattctctgttgataacttggcctaattacagcagtgcctaataggaaacaagcagcctcttggtaactgacctcannnnnnnnnnnnnnnnnnnnnnnnnnnnnnnnnnnnnnnnnnnngtttgagccaccatgcctggcctcaagtgaaattctttaggttttccataatctatttttcggtttagccttgagcaaaattttaaaactttataacaaagtgtatacctgataacataatccaatagaatacttactactaatatctataataaaaatcagaaagaaaaagcccacagtttaacaactttgtgtttacatacccacttaaatctaaacttgggattttattgggctcaaaatgttttataatagtgataagatca

SEQ ID NO: 232628 - DNA, 435 bp, Homo Sapiens
gcaataaaaggcaactttgtacaaaaaagttggccttaacccaccgctggcaattgtattgtgccacccctcatcacagtgatgagcctctgacagggatccctctgtttggacaccccgcgccggttcctctgcaaggacatggggatgacctgggcccagcaaaacttggtgcaatatgacgacaaagagcagatgcaggcctggctatgcaaggataatggggttggtgcgcgcaggttggcacggagaccttcccagaagatcctgcgagttggctgggccggcgcaaggtcgatgcggcgctttcttcccctgaggggcgattaactaagggggggaggacattgcgcgctggaaactcctccttagggtcggagtcccttcctggctacattgccctgcgtttccctggattcaaaccacctactcctc

SEQ ID NO: 232629 - DNA, 820 bp, Homo Sapiens
  misc_feature (127)..(136): n is a, c, g, or t
  misc_feature (207)..(232): n is a, c, g, or t
  misc_feature (243)..(388): n is a, c, g, or t
  misc_feature (419)..(467): n is a, c, g, or t
  misc_feature (483)..(657): n is a, c, g, or t
ttggataagctgagatagtacaacagattgaacacagatgcagataggaaagtccaactgtctttgataagcccagacattaaggagatttgcaaaattgtaaaacagtgccatgcttttcactaannnnnnnnnngctttggaaaaatattgttattggtcataaaaatgttatttatgtttaatgtgtaataggtttactattgnnnnnnnnnnnnnnnnnnnnnnnnnngagacagggtnnnnnnnnnnnnnnnnnnnnnnnnnnnnnnnnnnnnnnnnnnnnnnnnnnnnnnnnnnnnnnnnnnnnnnnnnnnnnnnnnnnnnnnnnnnnnnnnnnnnnnnnnnnnnnnnnnnnnnnnnnnnnnnnnnnnnnnnnnnnnnnnnnatttattttgagacaaggcttgttctatcannnnnnnnnnnnnnnnnnnnnnnnnnnnnnnnnnnnnnnnnnnnnnnnncagtggactcaaggcnnnnnnnnnnnnnnnnnnnnnnnnnnnnnnnnnnnnnnnnnnnnnnnnnnnnnnnnnnnnnnnnnnnnnnnnnnnnnnnnnnnnnnnnnnnnnnnnnnnnnnnnnnnnnnnnnnnnnnnnnnnnnnnnnnnnnnnnnnnnnnnnnnnnnnnnnnnnnnnnnnnnnnnnnnnnnnnatgaacaattgggcccagtggaattttttactttttgtagaaatgaagcctacctatgttgcccaagtcgtattattttaaaatatgttaatatctattttttcattttaattttcaaataaataaaatatcagtggatataacccacataaacaaaaaggtc

SEQ ID NO: 232630 - DNA, 102 bp, Homo Sapiens
tgggcctgcgcccgccacgccgccaggtctagggcagctgaggagcggtgcgaaaatgggcgaggacagagcagggcccgattgccatccccatcatcccgg

SEQ ID NO: 232631 - DNA, 454 bp, Homo Sapiens
ttgggatggagatccggcttcccttccctctctttggcaggaggaagacccattacgtctttggctaccccctcccagactatgactacctctataattagggtgacccgtatgcaatgaagatgatgtttgtggaccatgagtttgatgaaaaagtgacacattctctgactgtgaacatgctcctgcgagacggaaccattaacattgaaattgataatcactatgaaatcgcccctgaccaacatgacctgcactacccctatctggacgcatttggcgtccctgtgattgttgccaacaataaaaatcaggtacaacttcacgttcttgaggttgtggtccactacaccttcgagctcgtgctcctgcagcccgagccgctgctggtggtggtggccttctagttcttgttcttcaccgttatcgtctaggtgcagctggacttctccat

SEQ ID NO: 232632 - DNA, 915 bp, Homo Sapiens
  misc_feature (571)..(623): n is a, c, g, or t
ttggcccaatgatggaaacagtaatgcagcaagatccagcgtgtgcaaagtagaattcagtgtagccgtgtgagtctccagaaggcttacaggggagcagctaaagaggatggactcattttgcattctcagcatggtaagacacaaggatggtggctattccgaggaagaggacgtgaagacctgtgcccgggactcaggctatgacagcctctccaacaggctcagcatcttggaccggctcctccacacccaccccatatggctgcagctgagtctgagtgaggaggaggcagcagaggtcctgcaggcccagcctccggggatcttcctggttcataaatctaccaagatgcagaagaaagtcctctccctccgcctgccctgtgaatttggggccccactcaaggaatttgccataaaggaaagcacatacagtaagtggtcattggatgctcaggtcctgactgacagggccacggggctctgcagggagtggaaatggaaggagctctggttatgagatgggcagatatgggcctgagtcttggcactgaatgactaggcagannnnnnnnnnnnnnnnnnnnnnnnnnnnnnnnnnnnnnnnnnnnnnnnnnnnncctctgagatgttaatgagtcaaacaacctgaatataaagtgtgcagcctactgcatggcatatggtagggaactaatagaggttgacttcctctccccctacccagttaagtggaacatgaattcagttcccaggtttgccagtgactaagttgcaaggagactgtagcgagagagccctttcacgctaatcctaaatcctaaagcatgtgtctgcacttcttcgtgaataaataatccctgagcagacctgttccctccaggcaatcagtgttcagtcttctatgaaatg

SEQ ID NO: 232633 - DNA, 302 bp, Homo Sapiens
ttgggggaggtgaggattccaaaaacattttatttggaaatatactgtgtaacacttggcctcctgctacctgtgggttctcatcaagaatctccccaaggtagaattcaatcaaaactcaggtttgcttttggatgtttaaattacagtaatcccatttcctaaaccttttatctgtttttctcagcatactcaaagtacctggttgctgtgtcataaaatcatagatgcaattaggctcaggtgatctgtttgacgagagcacccaatgcagcctgcccggaataacatactggccgttc

SEQ ID NO: 232634 - DNA, 535 bp, Homo Sapiens
ttggggcagggctggcgctggccactccattctgtatttgtttgcaatcgaattgcatattggcccttttccacataattcttttgctcatcttggtttttataacgctactgcttagcctactgtctccgatcacctccctgcagaagcactggggaattaagctgctgggtgaaatcttgaggtcgtaagacggaattatcaccctgatattcactctgctacctactgaggcttcttctaattcatgaccttctccccaccggcctgctcttctttccctcatctatcacctgggtgcccgcagttgttgtgtcttgttcacaccggtgctcatgactgataccaccacgcctggctaatttttgtatttttaatacgaacaggattttaccatgtaaaccaggctgttctagaactcctgaccccaggtaacccaccacgtctggcctctgtgaaatatttagtacttgaaaactacaaataagattttttaaaaaattttatgttcactataaaattgatacacaaaatt

SEQ ID NO: 232635 - DNA, 286 bp, Homo Sapiens
ttgggaattaggtatctttgtgttctacatgatgcgtgcttagtggatataatgagggtggaccatggagtaatgaccctagggcactaagtattgctgggattggatcttcaaatttccatccctccaaccttatggtatgaagtgctaaagatatgggaaaaccatgggctgggaagctgctcttgcgctcgtcgtgtctgctgtttttttcccttggtgtgctatacgtaggccatatgttggcaccacctctcccccacgattagaaaggacgattaaagga

SEQ ID NO: 232636 - DNA, 223 bp, Homo Sapiens
  misc_feature (68)..(159): n is a, c, g, or t
aagaacaactttgtacaaaaaagttggatctctacaaaccccttaaaaaaattagctaggcatagtannnnnnnnnnnnnnnnnnnnnnnnnnnnnnnnnnnnnnnnnnnnnnnnnnnnnnnnnnnnnnnnnnnnnnnnnnnnnnnnnnnnnnnnnnnnattaaataaaatatcttcatatataaattaagctaattaaaaatatttttcccagtatttattt

SEQ ID NO: 232637 - DNA, 329 bp, Homo Sapiens
  misc_feature (195)..(283): n is a, c, g, or t
tgtacaaaaaagttggcacacagttagatgatctgcaaaccagtagagtttcttcctaattatgcgtatagttttttttatgtgatttaaaattgtttaagatatccaggcaacaacagcagtattcacatgtatccctgtcttattcggatctttaaagggaactttattttcgtaactcattatcattttttnnnnnnnnnnnnnnnnnnnnnnnnnnnnnnnnnnnnnnnnnnnnnnnnnnnnnnnnnnnnnnnnnnnnnnnnnnnnnnnnnnnnnnnnnttctggacagccagagcagcatctttagaccttgtctctttttttt

SEQ ID NO: 232638 - DNA, 299 bp, Homo Sapiens
  misc_feature (89)..(98): n is a, c, g, or t
tacaaaaaagttggatcaaaaacatccgaaaaaagcaattgtcaaggacttaatttgaaaatcatttgccaggacaaatagttatcaannnnnnnnnnctatcaactattctgttgtatttccaaaacattttttaaatgactttttaaagtatatttaaaccttaaccttatgaggttcaaattggaaaatctcttgtgatttatgcttggtcaagtagtacgtaccgatgtattaaaaatgtgtagtttttgcatgcccttgaacctaagtaggtacaaagaaactcccaaagtagg

SEQ ID NO: 232639 - DNA, 902 bp, Homo Sapiens
  misc_feature (94)..(633): n is a, c, g, or t
ttggctcatttattcattcattatgggcagatgattgcagtttttggctattacaaataagactgccaatacatttatattgaagaaaccactnnnnnnnnnnnnnnnnnnnnnnnnnnnnnnnnnnnnnnnnnnnnnnnnnnnnnnnnnnnnnnnnnnnnnnnnnnnnnnnnnnnnnnnnnnnnnnnnnnnnnnnnnnnnnnnnnnnnnnnnnnnnnnnnnnnnnnnnnnnnnnnnnnnnnnnnnnnnnnnnnnnnnnnnnnnnnnnnnnnnnnnnnnnnnnnnnnnnnnnnnnnnnnnnnnnnnnnnnnnnnnnnnnnnnnnnnnnnnnnnnnnnnnnnnnnnnnnnnnnnnnnnnnnnnnnnnnnnnnnnnnnnnnnnnnnnnnnnnnnnnnnnnnnnnnnnnnnnnnnnnnnnnnnnnnnnnnnnnnnnnnnnnnnnnnnnnnnnnnnnnnnnnnnnnnnnnnnnnnnnnnnnnnnnnnnnnnnnnnnnnnnnnnnnnnnnnnnnnnnnnnnnnnnnnnnnnnnnnnnnnnnnnnnnnnnnnnnnnnnnnnnnnnnnnnnnnnnnnnnnnnnnnnnnnnnnnnnnnnnnnnnnnnnnnnnnnnnnnnnnnnnnnnnnnnnnnnnnnnnngattttgaggtgtcttttagatacaaccaaaaatatataacaagtagtttttgttgtcagttgattgattataaggaagatgcttatcaactagcctggactgctaaatacaagaatttatttaattaaagagaagcttgaccatgtaaaaattgctgaaacactggaatagatcttataggaataagataaatgagatacagttccagctcgcaaagattataaaatttacgaagatggggtaaggggtttcggaaatatgaaaagta

SEQ ID NO: 232640 - DNA, 360 bp, Homo Sapiens
ttggcttttacctggggctttcctcgcggcactccataaagtagacttgattatttcctgattttatagatgaggccattcaggcttatagatttaaggaactgacctaacgtcccagcatggcaagggtgcaaagcaaggtttgaaccaggactgtgggactcccaagcctggattcttacctgtaactttcctgcctttctaatgacttggagcatttactgaaacgcagaatttcttaacagaataataaatgttttttttggccgatagcatgctggaagcatttggaggattggcacaccgctgtctagttttcgattagaccttaacgccccacaggaaccgacgttcttaatg

SEQ ID NO: 232641 - DNA, 875 bp, Homo Sapiens
  misc_feature (301)..(349): n is a, c, g, or t
  misc_feature (376)..(404): n is a, c, g, or t
  misc_feature (418)..(500): n is a, c, g, or t
ttggggaaggcacataacaaatgattagataaaagccatagatcctaggaatcccctaaatttgagacaaattatgacataggtttggtctttgtttttaaaaaatcataatgattcaacagcaaaatactttgaagaaggaacctggtggtatttcacttctgagatatcactaaaagaattgtgcgtaagtgaccaagtccctttggtggtcctccgaccttatctgtaaaatccaaaagtctgattagaataatgacaggatgtttgcagaaaagaatttgaatgtaaagtgtttagnnnnnnnnnnnnnnnnnnnnnnnnnnnnnnnnnnnnnnnnnnnnnnnnnacagtgaactgaaggaagagcagctcnnnnnnnnnnnnnnnnnnnnnnnnnnnnngggatggagtctcnnnnnnnnnnnnnnnnnnnnnnnnnnnnnnnnnnnnnnnnnnnnnnnnnnnnnnnnnnnnnnnnnnnnnnnnnnnnnnnnnnncagtctgtcttgtctagggtgtagtagacaatgatggtatttcatacattcggtagtcaaatcgttgaagtcttgtctaggctgtagtagacagtgatggtgtttcatacattcagtagtcaaatcactgaggacctgtcatgtgctaggtacagtgccgactgtcatggaaacgagatggaaatacgccgactatcatggaaacaagatggaaatagagctctctgctctcaaggagcttagagaggccgagacaatcatgcacacagttgttatcagttaggtcatgtccataatgtgtgcagatgaacgttcagtgggtgtgtagtagaaagaacccctaatgtatctatggaattaaaaatcttatttaga

SEQ ID NO: 232642 - DNA, 253 bp, Homo Sapiens
ttgggttccttattggaaccttccaggctggcataggcttagggtccattacgggtgttcaaggtccagaattcatgtcacctgattgcttggacacaactggacctcacatctccggccctgacaccagaaactaggcctccatctgccagtgtcttagtggaatctattttagcaaatgactcatcttaaaataatgcactatgtaatcaacaagaaaatgagagaacacccagtaggaaaatggcaaaag

SEQ ID NO: 232643 - DNA, 777 bp, Homo Sapiens
  misc_feature (45)..(210): n is a, c, g, or t
  misc_feature (427)..(726): n is a, c, g, or t
tgaactttctgtaagatagaccatgtgatagccaacaaaatgagnnnnnnnnnnnnnnnnnnnnnnnnnnnnnnnnnnnnnnnnnnnnnnnnnnnnnnnnnnnnnnnnnnnnnnnnnnnnnnnnnnnnnnnnnnnnnnnnnnnnnnnnnnnnnnnnnnnnnnnnnnnnnnnnnnnnnnnnnnnnnnnnnnnnnnnnnnnnnnnnnnnnnngtaacaattcctcaaactgaacgacaagagtgacccaacctgtcagcctctgggacacagcagaggcggtgctaagaggaaggttcacggccctgagcgcctccatcaaaaagtcggaaagagcacagacaatccacggtcacacctcaaggaactagagaaacaagaacaaacctagcagaagaaaggagatcagagcggaattaaatgaaattgnnnnnnnnnnnnnnnnnnnnnnnnnnnnnnnnnnnnnnnnnnnnnnnnnnnnnnnnnnnnnnnnnnnnnnnnnnnnnnnnnnnnnnnnnnnnnnnnnnnnnnnnnnnnnnnnnnnnnnnnnnnnnnnnnnnnnnnnnnnnnnnnnnnnnnnnnnnnnnnnnnnnnnnnnnnnnnnnnnnnnnnnnnnnnnnnnnnnnnnnnnnnnnnnnnnnnnnnnnnnnnnnnnnnnnnnnnnnnnnnnnnnnnnnnnnnnnnnnnnnnnnnnnnnnnnnnnnnnnnnnnnnnnnnnnnnnnnnnnnntagtaacaagcagggagattgaaatggtaattaaaaaattaccacaaaaaa

SEQ ID NO: 232644 - DNA, 276 bp, Homo Sapiens
ttggggaggagacccctgtaccactggaaccttgagcacccttggagccctcctcccgcttttcggacctgtgccaaactgtgagtgtgtcaaagcaaggactgtatgtgttctcttctttgttgcatactcagttccttgaccacagcggccagcgaacagcgatcaatccatgtgaatctgctgagtaaggaatcgaacgaacaaatccaatccatttcaaccaagtcctggtgatgtttctcctcccagccagctcctcctttcccgccttac

SEQ ID NO: 232645 - DNA, 889 bp, Homo Sapiens
  misc_feature (215)..(233): n is a, c, g, or t
  misc_feature (245)..(310): n is a, c, g, or t
  misc_feature (369)..(820): n is a, c, g, or t
ttggtattaacatggcttcaattgtttttttaatctattatcattatttttctttttattccctctcagagttgacttactaggtttgggcatttcaacaatcagcagaccttctttggtttaactaatctcatttaactccaaaatcatctctctcttaggactgctgacttggttatgcagtcaatgagatcacgagccactggttattggannnnnnnnnnnnnnnnnnnagacagagtttnnnnnnnnnnnnnnnnnnnnnnnnnnnnnnnnnnnnnnnnnnnnnnnnnnnnnnnnnnnnnnnnnngttcaagctattctcctgctcagcctcctgattagctgggattacaggcatgcgccacnnnnnnnnnnnnnnnnnnnnnnnnnnnnnnnnnnnnnnnnnnnnnnnnnnnnnnnnnnnnnnnnnnnnnnnnnnnnnnnnnnnnnnnnnnnnnnnnnnnnnnnnnnnnnnnnnnnnnnnnnnnnnnnnnnnnnnnnnnnnnnnnnnnnnnnnnnnnnnnnnnnnnnnnnnnnnnnnnnnnnnnnnnnnnnnnnnnnnnnnnnnnnnnnnnnnnnnnnnnnnnnnnnnnnnnnnnnnnnnnnnnnnnnnnnnnnnnnnnnnnnnnnnnnnnnnnnnnnnnnnnnnnnnnnnnnnnnnnnnnnnnnnnnnnnnnnnnnnnnnnnnnnnnnnnnnnnnnnnnnnnnnnnnnnnnnnnnnnnnnnnnnnnnnnnnnnnnnnnnnnnnnnnnnnnnnnnnnnnnnnnnnnnnnnnnnnnnnnnnnnnnnnnnnnnnnnnnnnnnnnnnnnnnnnnnnatttgatttttataagaaaattttactaatattttcagataaatttatgtcactgtcattcattacatt

SEQ ID NO: 232646 - DNA, 124 bp, Homo Sapiens
gcacatgcttaaaaacgcaagagtaatgctgaaaaaagggtttacatataaattctctggtcattgagcatttccaagtgaacaaagcacctagaatgcgcctccggacatacacagctcatgg

SEQ ID NO: 232647 - DNA, 574 bp, Homo Sapiens
  misc_feature (196)..(484): n is a, c, g, or t
ctacaaggggcaactttgtacaaaaaagttggtgattcgtaccgtatatagaaaaatatcttatgatgccttaacgttttgaacatatttcgtgacttttgactatggccatagtagatatagagaattaagctcaatccatcactatcctgagttactttagataatttttccctgataaaaaatcttgtttacnnnnnnnnnnnnnnnnnnnnnnnnnnnnnnnnnnnnnnnnnnnnnnnnnnnnnnnnnnnnnnnnnnnnnnnnnnnnnnnnnnnnnnnnnnnnnnnnnnnnnnnnnnnnnnnnnnnnnnnnnnnnnnnnnnnnnnnnnnnnnnnnnnnnnnnnnnnnnnnnnnnnnnnnnnnnnnnnnnnnnnnnnnnnnnnnnnnnnnnnnnnnnnnnnnnnnnnnnnnnnnnnnnnnnnnnnnnnnnnnnnnnnnnnnnnnnnnnnnnnnnnnnnnnnnnnnnnnnnnnnnnnnnnnncaaacaaaaagaaatcttgtttacttgtaaaaatatagactacctcctacttgccaccgttaagtgcaatttactggttgttgaaattac

SEQ ID NO: 232648 - DNA, 305 bp, Homo Sapiens
tgatgagcaatgctttctaaatgccaactttgtaccaaaaaagttggctaaaagcgccaaaacaaaggaaaattgtaccttatccagaaaagctgcttcggcaaggggttcaggataatgttaactttatattccggcaaaattatggtggtttacatatctttatgtacggcctttttttgtttcgggtaaactgaattataaagtgaaaaaacaaacttttgaccatacttatggtatttttataaaactttgaaaacaaaaggaaattcaggttttaaaattcggtccttttttaaatcttg

SEQ ID NO: 232649 - DNA, 124 bp, Homo Sapiens
ctaaaataaccaactttgtacaaaaaagttgggtggggaaggactttggagtagacgttggcatacatatcaaggactgtagctaccatggctccgcaggttccgccaaaacctctgatgcatg

SEQ ID NO: 232650 - DNA, 405 bp, Homo Sapiens
  misc_feature (45)..(184): n is a, c, g, or t
  misc_feature (342)..(360): n is a, c, g, or t
tgggatcattagttcttataaaaattctgacattttgagatacgnnnnnnnnnnnnnnnnnnnnnnnnnnnnnnnnnnnnnnnnnnnnnnnnnnnnnnnnnnnnnnnnnnnnnnnnnnnnnnnnnnnnnnnnnnnnnnnnnnnnnnnnnnnnnnnnnnnnnnnnnnnnnnnnnnnnnnnnnnnnccataggtcagattttggtcccgttttttagttctaaaaacttgagtttggttgggcacccagaatttatcaggctgtcagtcattcctccttttaatcaaactcaaatgcaattaatatgttgccatttaaagataatgagtttgtgagagagagannnnnnnnnnnnnnnnnnnctcgagactaagtccagcccgggtgaaagtgtgagacttcctctc

SEQ ID NO: 232651 - DNA, 413 bp, Homo Sapiens
  misc_feature (182)..(194): n is a, c, g, or t
ttgggtttttgtacgtgtggttttccttttattttccccccacccgacatcgtactttcttgttttgttttgttttacagtgctgttgcatgacttatgttccctgattaaaaaactgcgattaaacatggaataaattgtcattatatcaattaagctttttgaccatcatgtgttgggannnnnnnnnnnnnctttaacctctccacccttatgacaggctgcaaacatttcagattactcctgccatctggaccattggccatattatgagtaaacaccacacttttttacacgattctaaccctcttttgatttgccaaatgggaatcaaaacaaatctaaagcactcacatttaatagtcataaagccccttcgccatattcttcattaccaaatatgctgacttatt

SEQ ID NO: 232652 - DNA, 599 bp, Homo Sapiens
  misc_feature (313)..(324): n is a, c, g, or t
  misc_feature (542)..(559): n is a, c, g, or t
ttgggaaccaggcaagccccctgtgcgggtcggctatcaagataccaagcggccctcccggatgcctgagcgattcactggctcgcactccgggaacccacccactctgaccatccccgggacccacggtagggatgagggtgactgataatgacaggcgtgcgtgggccatactggggtatgcggcgtacggaccgagctgaccgtcctacgtcagccaaaggctggcccctcggtcagtctgttcgcgccctcctccgacgaacttcctgccaacaaggccagactggtgtgtctgtcacatgacttctannnnnnnnnnnngggactgtggccgggaaggaagatatataccccccccgggcgggagtggagacaaacaccccctccctccaaagcaaccacaagtacgcggccagcagccatctgagccagactgatgaccgatggaagtcccacccaagctagctctgcctggtcacgcatgaatggagcgacctggatggaacagaggccgctccctaatgttcgtaggtacgtannnnnnnnnnnnnnnnnngggagacaaaatctgcaggatcgctcggaagggatcggtc

SEQ ID NO: 232653 - DNA, 685 bp, Homo Sapiens
  misc_feature (289)..(606): n is a, c, g, or t
ttggctgccccaattttagaaacctaggaccatttatatcagtgccatcaggccaagctatagaaatgtgtttcgtgagtatcaaaaatattctggacaacactggatacttcctatccactgagtttactcaaatgacaattcttgtatatcctagagaccaacacatttaatgtagtggaggctatcttttatgaaatattgcattgaacaatatacagaattctcagaaatgcttacagtaagagtcaataacccttaaagctacctttaaggcctaataactctnnnnnnnnnnnnnnnnnnnnnnnnnnnnnnnnnnnnnnnnnnnnnnnnnnnnnnnnnnnnnnnnnnnnnnnnnnnnnnnnnnnnnnnnnnnnnnnnnnnnnnnnnnnnnnnnnnnnnnnnnnnnnnnnnnnnnnnnnnnnnnnnnnnnnnnnnnnnnnnnnnnnnnnnnnnnnnnnnnnnnnnnnnnnnnnnnnnnnnnnnnnnnnnnnnnnnnnnnnnnnnnnnnnnnnnnnnnnnnnnnnnnnnnnnnnnnnnnnnnnnnnnnnnnnnnnnnnnnnnnnnnnnnnnnnnnnnnnnnnnnnnnnnnnnnnnnnnnnngaatatgaattatataacccccaaatctaccaactaaaaaagaaacaatttcaacaatttcagattaccagaaactcac

SEQ ID NO: 232654 - DNA, 502 bp, Homo Sapiens
  misc_feature (177)..(219): n is a, c, g, or t
  misc_feature (237)..(299): n is a, c, g, or t
  misc_feature (364)..(435): n is a, c, g, or t
aagagcaactttgtacaaaaaagttggctagtatgtagccctaaaaaaattattctaccaaaaaagctgctccacttctaaattcagcacagttgcaggatacaaattcaacacccaaaaaaatcggttgggatttctctgcactaacagggaacaatcaaaaaaggaagttaaaannnnnnnnnnnnnnnnnnnnnnnnnnnnnnnnnnnnnnnnnnntaaaacatgtttacactnnnnnnnnnnnnnnnnnnnnnnnnnnnnnnnnnnnnnnnnnnnnnnnnnnnnnnnnnnnnnnncatagagtggaaaatgtaatattgttaaaatgttcatattattatacatgattcacacattcgannnnnnnnnnnnnnnnnnnnnnnnnnnnnnnnnnnnnnnnnnnnnnnnnnnnnnnnnnnnnnnnnnnnnnnntttataggaagtgaatggtgatttattcagcaattatttgaacacatattttgttccaggcatagat

SEQ ID NO: 232655 - DNA, 542 bp, Homo Sapiens
  misc_feature (163)..(438): n is a, c, g, or t
aaacttgggagagtctttcagtccaagtgcttggggtgaatttagtaaaacaatacatactatttttgcttgggcttaatttctttttaattgagctgcaagtttttcatgaggattaaaataatagctttttttgttgttgttgagatggagtttcattctnnnnnnnnnnnnnnnnnnnnnnnnnnnnnnnnnnnnnnnnnnnnnnnnnnnnnnnnnnnnnnnnnnnnnnnnnnnnnnnnnnnnnnnnnnnnnnnnnnnnnnnnnnnnnnnnnnnnnnnnnnnnnnnnnnnnnnnnnnnnnnnnnnnnnnnnnnnnnnnnnnnnnnnnnnnnnnnnnnnnnnnnnnnnnnnnnnnnnnnnnnnnnnnnnnnnnnnnnnnnnnnnnnnnnnnnnnnnnnnnnnnnnnnnnnnnnnnnnnnnnnnnnnnnnnnnnnnnccttaaaataatagcttttgtcacaactcttatgtaaacttaagttctttttgtttgtttgctttgaaatgaagttttattctgttgcccaggctggagggatc

SEQ ID NO: 232656 - DNA, 143 bp, Homo Sapiens
  misc_feature (44)..(54): n is a, c, g, or t
tttgatgggaaattgccatgaccacaggggtttggagttctgcnnnnnnnnnnncttcttctctatagggggactgggggtctcctcccaagatcacatttgagcgtctttctctcctactccatttagaaaaacaagtaaca

SEQ ID NO: 232657 - DNA, 572 bp, Homo Sapiens
  misc_feature (160)..(195): n is a, c, g, or t
  misc_feature (386)..(420): n is a, c, g, or t
aactttaaaagccaactttgtacaaaaaagttggctgtgatgtgacttgtaatgtctccagtttcatttctaattgagcttatttggattttctctcatcttttcttggttaatctatgtaatggtctgtcaattttattatcttgtcaaataacttgcnnnnnnnnnnnnnnnnnnnnnnnnnnnnnnnnnnnngaatctcattcacttctactctgacattttttatttattttgttctgctcactgtgggttcagtttgttcttgtttctctagttccttaaggtgtaacattgagttgtcaacttgagcacttgggtacttgattggcttcttaatttgtatactcatgtcctttgactctgggacaatcctttgcgataannnnnnnnnnnnnnnnnnnnnnnnnnnnnnnnnnngtcactcctattgatcagatgtggggcctcttggactgatcctcatcacatcttacctttctcattttcttacttcttcttgcctttgttctacaacattggttttattatattttacctactattagaatttcgggcccatatattttatt

SEQ ID NO: 232658 - DNA, 520 bp, Homo Sapiens
  misc_feature (170)..(402): n is a, c, g, or t
acctataaagccaactttgtacaaaaaagttggatagaataaaccctctgaaatcttgctagagaggtagacacccagatacaagaaatccagagaacacctgctggattctacacaaccccgaaaatcactagggcatataggcaccagattgtttaaggccagcactnnnnnnnnnnnnnnnnnnnnnnnnnnnnnnnnnnnnnnnnnnnnnnnnnnnnnnnnnnnnnnnnnnnnnnnnnnnnnnnnnnnnnnnnnnnnnnnnnnnnnnnnnnnnnnnnnnnnnnnnnnnnnnnnnnnnnnnnnnnnnnnnnnnnnnnnnnnnnnnnnnnnnnnnnnnnnnnnnnnnnnnnnnnnnnnnnnnnnnnnnnnnnnnnnnnnnnnnnnnnnnnnnnnnnnnnngggaatttgttaccattagaccaaccttacaagaaatctttaaggaagttctaaatgtggaaacaaaagaacaatacctgttaccacaacatcccacttaagtacctagcccatagac

SEQ ID NO: 232659 - DNA, 282 bp, Homo Sapiens
  misc_feature (106)..(201): n is a, c, g, or t
gagcaatgctttttctataatagacaactttgtacaaaaaagttggatttattctattcttgagagtttatcctaagaaatccaaaagcccaaaatctttgcaagnnnnnnnnnnnnnnnnnnnnnnnnnnnnnnnnnnnnnnnnnnnnnnnnnnnnnnnnnnnnnnnnnnnnnnnnnnnnnnnnnnnnnnnnnnnnnnnnatattaaatgcacatttaagactttctagaatctaaatataaatgttaagaatattaagattagctgaaggacaggtgcgg

SEQ ID NO: 232660 - DNA, 476 bp, Homo Sapiens
ttggtgaatttatatttttcgccataatatggagctgggaaatagaatcttcacaattagggaatggatattgccctctactgtggcgtgtgccaactgttggaattcactttattgtaatgttacccgtcctgagactcttaaattttgtttatgtttgtgttcctggtacgaaacaaactactgtgtgcttgtccgtatgagaaacaattctttcaactgggttttctacataaatgggaactgatgtgtgtatactgatttttaccttcaatgcaaaattgtttatttttgggtttcacaattgttcttctcttatataattcctgtgcctttttgctctcatgcgtgtaaaaacagatttacatcttacctgaaacatattttagtgtatgactttatattgactgacttgcttgatttttaacccttatataaaataacctttaatatctcttattggcaaacgtaaaaac

SEQ ID NO: 232661 - DNA, 529 bp, Homo Sapiens
  misc_feature (114)..(452): n is a, c, g, or t
ttggaaacaaggagaaatattattttttagtagtaacattgtgtccaatttccgcgttttaaaacaaaaattgaggcattatatgtcacaactgaaatggaaaagttgtgtttnnnnnnnnnnnnnnnnnnnnnnnnnnnnnnnnnnnnnnnnnnnnnnnnnnnnnnnnnnnnnnnnnnnnnnnnnnnnnnnnnnnnnnnnnnnnnnnnnnnnnnnnnnnnnnnnnnnnnnnnnnnnnnnnnnnnnnnnnnnnnnnnnnnnnnnnnnnnnnnnnnnnnnnnnnnnnnnnnnnnnnnnnnnnnnnnnnnnnnnnnnnnnnnnnnnnnnnnnnnnnnnnnnnnnnnnnnnnnnnnnnnnnnnnnnnnnnnnnnnnnnnnnnnnnnnnnnnnnnnnnnnnnnnnnnnnnnnnnnnnnnnnnnnnnnnnnnnnnnnnnnnnnnnnnnnnnnnnnnncactattctggaagctttgttttggcaacagattatatgacctgacctttcgtacctcatttaaactttacggctac

SEQ ID NO: 232662 - DNA, 498 bp, Homo Sapiens
ttggcaaggaatgccttaaaaaattcccggaccccggaggtcttgtgcggggggccggatgtgagccacgactagcccgacgtccatgtcgggtggatagtggacggcgtggacgtgcataatgcccagacaaagccgcgggaggaacagttcaacatggcattccgtgtgggaaacgtcctcaccgtcctgcaccattcctggctgaacggcaaggagtagaagtgcattgtctcaaatatccccctcctcaccccaactaagattattatctacttggcctatagagttttgctggtcagtaatgacttacactgcccccttctcgggaggagatgacctacttccaaagcagcctgagtacattgtacaaaattttataatacagataatcatctgtggtaagtttcaccaacgagaaaaaatagaaataatacattaaatgacattatttgtacgacctacacgggaccatttttaatatctccatgagtcttc

SEQ ID NO: 232663 - DNA, 307 bp, Homo Sapiens
  misc_feature (50)..(71): n is a, c, g, or t
cccgggagctgcctatcggcgccgggacaaaggcgcggctgtcttgttcnnnnnnnnnnnnnnnnnnnnnncacagccggggcgcattccgcgccccccgtcgcgattgatatgatgttttctcaattctggcattctggctccttttacctaccccagcaacttaaattctccttctcggacttctgttattgcttcaaagactcatttcaatttctgttttttcttttccatagcttcaagcttgaatgtgacccctctcctccagtgatatttcataaatgtcttcgtcactatttgatgtact

SEQ ID NO: 232664 - DNA, 422 bp, Homo Sapiens
acaaaaaagtggctccttccctccttaaaccgcccggcgcatctcctgccggagtgctggctccgggtcttatggatgcaatggatggtttgtgatgactctctccccgatctccttgctaatcttcatgaaaaagcaagtctctgcctcctgcaagaacagtaagaaccctgtggttcttgacggattgatgtatttggattgctacctgcataatggtcggcaatcttcccagcacctgatcaatttgggttctgatcgagcctccggggtccctgactcgttcattggggctgtatcatgcacaaattttaccctgaaaatcctcggaccggacgctgaggatgttgggctttatttctacctgttagctctacaacctcccaccttcactttccgccgagggaccaaactggaaatca

SEQ ID NO: 232665 - DNA, 112 bp, Homo Sapiens
tgtcccactcgagcacctgggggatacggccctggtctctgctgactccctgtattgctacggcccccagcgccgcatgaacccatacgtccccccgcacgccgccctgtgc

SEQ ID NO: 232666 - DNA, 1057 bp, Homo Sapiens
  misc_feature (54)..(327): n is a, c, g, or t
  misc_feature (331)..(664): n is a, c, g, or t
aattgatgagcaatgcttttctataaaagaccaactttgtacaaaaaagttggnnnnnnnnnnnnnnnnnnnnnnnnnnnnnnnnnnnnnnnnnnnnnnnnnnnnnnnnnnnnnnnnnnnnnnnnnnnnnnnnnnnnnnnnnnnnnnnnnnnnnnnnnnnnnnnnnnnnnnnnnnnnnnnnnnnnnnnnnnnnnnnnnnnnnnnnnnnnnnnnnnnnnnnnnnnnnnnnnnnnnnnnnnnnnnnnnnnnnnnnnnnnnnnnnnnnnnnnnnnnnnnnnnnnnnnnnnnnnnnnnnnnnnnnnnnnnnnnnnnnnnnnnnnnnnnnnnttgnnnnnnnnnnnnnnnnnnnnnnnnnnnnnnnnnnnnnnnnnnnnnnnnnnnnnnnnnnnnnnnnnnnnnnnnnnnnnnnnnnnnnnnnnnnnnnnnnnnnnnnnnnnnnnnnnnnnnnnnnnnnnnnnnnnnnnnnnnnnnnnnnnnnnnnnnnnnnnnnnnnnnnnnnnnnnnnnnnnnnnnnnnnnnnnnnnnnnnnnnnnnnnnnnnnnnnnnnnnnnnnnnnnnnnnnnnnnnnnnnnnnnnnnnnnnnnnnnnnnnnnnnnnnnnnnnnnnnnnnnnnnnnnnnnnnnnnnnnnnnnnnnnnnnnnnnnnnnnnnnnnnnnnnnnnnnnagaaataaattcatttctcaaattttcataatattgttacattgttttttaaatgttacaccttaaaatttgtgtcatattcgttctttcagaggtacctcttttttacttccctgagcagcagaggcagtacattctggttagggagttgaccttcttagaaaagaccttttagacatcagtgtatgagagtatgttctctgcgttaaaccaaataaaagttgctctaattgacaatatgaacatcccaggagtcattcagaattacaaacctctgggtaaaggtaaactaagttacctaaatagatactatgaacacccatgcctttggtaatgattttgtcctggctaatcatagcccttcccaaattctctaccacaatcccattcctt

SEQ ID NO: 232667 - DNA, 129 bp, Homo Sapiens
tggatttatgaggtcccattgcaaacaaacctcccgagcctggtgatagtgggttgtctatgatagaatcttagttcaacttaacatttgccccccgaacccgctaagtccccttgtaaatttaactgg

SEQ ID NO: 232668 - DNA, 861 bp, Homo Sapiens
  misc_feature (52)..(495): n is a, c, g, or t
aattgatgagcaatgctttttctataaagacaactttgtacaaaaaagttgnnnnnnnnnnnnnnnnnnnnnnnnnnnnnnnnnnnnnnnnnnnnnnnnnnnnnnnnnnnnnnnnnnnnnnnnnnnnnnnnnnnnnnnnnnnnnnnnnnnnnnnnnnnnnnnnnnnnnnnnnnnnnnnnnnnnnnnnnnnnnnnnnnnnnnnnnnnnnnnnnnnnnnnnnnnnnnnnnnnnnnnnnnnnnnnnnnnnnnnnnnnnnnnnnnnnnnnnnnnnnnnnnnnnnnnnnnnnnnnnnnnnnnnnnnnnnnnnnnnnnnnnnnnnnnnnnnnnnnnnnnnnnnnnnnnnnnnnnnnnnnnnnnnnnnnnnnnnnnnnnnnnnnnnnnnnnnnnnnnnnnnnnnnnnnnnnnnnnnnnnnnnnnnnnnnnnnnnnnnnnnnnnnnnnnnnnnnnnnnnnnnnnnnnnnnnnnnnnnnnnnnnnnnnnnnnnnnnnnnnnnnnaaagaatttttaaaatatatatgtgaagcaaaaactgttagagctaaaaaaagaagcatacaaatctacaattataatcagagacttcaacacccactgtattagtcaggcttctccagcaagacagaacaaataagatataaatatacatagacatgtgagatgaaatttattaggggaattggcccaagcagttatggaggctgagaagtcccatggcaggccatggcaagctggagaccctgggatgccaatagcagggctcattccacatcctaaagcctcagaaccagggaagctgctggtgtaactcttagtctgaggccaaaggcctgagatcctgagggcaaggggctgggtgaggag

SEQ ID NO: 232669 - DNA, 294 bp, Homo Sapiens
  misc_feature (51)..(242): n is a, c, g, or t
cttgaaagggccaactttgtacaaaaaagttggacagctatttctataaannnnnnnnnnnnnnnnnnnnnnnnnnnnnnnnnnnnnnnnnnnnnnnnnnnnnnnnnnnnnnnnnnnnnnnnnnnnnnnnnnnnnnnnnnnnnnnnnnnnnnnnnnnnnnnnnnnnnnnnnnnnnnnnnnnnnnnnnnnnnnnnnnnnnnnnnnnnnnnnnnnnnnnnnnnnnnnnnnnnnnnnnnnnnnnncttttgcttggcacctctccttcctgccatcttgagaaaaaggatgtgtttg

SEQ ID NO: 232670 - DNA, 223 bp, Homo Sapiens
ttggcccgcttgtccccaacgcctcgcaggaatgtggtgattctgtacgtgttaacaaactttggtgaaatattgcatgcatccctttccatgcgtgtgttctttcctcccaacaccgtggaaaacatctcgctcttgtgtgcgtgcagcctgaaagccatgatcatgtgccagtgctgcggtgcattctgtgctgaggactgtattgaacactcaaagctct

SEQ ID NO: 232671 - DNA, 141 bp, Homo Sapiens
tttgtcacacagctgagatatggcaagtcccgctgtaaacaggtggaaaaagcaccaaataaagtcaagtgtggccaccgcgcttgaaatcctggttgttgctggatgctcttttgcgattatgagatacctaatataagc

SEQ ID NO: 232672 - DNA, 607 bp, Homo Sapiens
  misc_feature (43)..(93): n is a, c, g, or t
  misc_feature (118)..(375): n is a, c, g, or t
ttggcgagtagctggcattgcagggtgtgccaccattcccagnnnnnnnnnnnnnnnnnnnnnnnnnnnnnnnnnnnnnnnnnnnnnnnnnnntgcttatttatttagacagtgtctnnnnnnnnnnnnnnnnnnnnnnnnnnnnnnnnnnnnnnnnnnnnnnnnnnnnnnnnnnnnnnnnnnnnnnnnnnnnnnnnnnnnnnnnnnnnnnnnnnnnnnnnnnnnnnnnnnnnnnnnnnnnnnnnnnnnnnnnnnnnnnnnnnnnnnnnnnnnnnnnnnnnnnnnnnnnnnnnnnnnnnnnnnnnnnnnnnnnnnnnnnnnnnnnnnnnnnnnnnnnnnnnnnnnnnnnnnnnnnnnnnnnnnnnnnnnnnnnnnatgagctgccactccgggctccctgtgaatgttttttgaatgagttgtatgtgcttaaccttaaacgcaacttttttttgagaatttgaattgggaagaaatcaaaataattattcttatatgttatactagctagtttctttgtgatttgcaattattttgaatatgttgtatttgaataaactaataaaccgaccggataatactgtgttgttttacctacattgtgtct

SEQ ID NO: 232673 - DNA, 315 bp, Homo Sapiens
  misc_feature (114)..(206): n is a, c, g, or t
  misc_feature (249)..(264): n is a, c, g, or t
ggcagggaaaaaaggttttattgttttttaaaagggttcggggtttggtttaaaaaccggggccccccctttaaaaacaaccgaaaatccccctttgtaaaaggggtttcaccnnnnnnnnnnnnnnnnnnnnnnnnnnnnnnnnnnnnnnnnnnnnnnnnnnnnnnnnnnnnnnnnnnnnnnnnnnnnnnnnnnnnnnnnnnnnngggggggaaaggtttcagggggctttatactccctcccccccnnnnnnnnnnnnnnnngggattttccccaaccccggcggggccggaaatggagggaaacgggccggg

SEQ ID NO: 232674 - DNA, 794 bp, Homo Sapiens
  misc_feature (206)..(259): n is a, c, g, or t
  misc_feature (310)..(673): n is a, c, g, or t
cgagggaagtgtgatgaggtttcctctagaatttgtcctaattgatctggtttctactgctctgagaggtaatatgatttggttgaagcttagtagactgaacaatctggaaatttggattgtggaccaatagaaatagtcataggattctaagtcattttttactggaaatctcaaactcaaataactgagacaaaatcaaacannnnnnnnnnnnnnnnnnnnnnnnnnnnnnnnnnnnnnnnnnnnnnnnnnnnnnactcctcttgtattagctgactttaaaactgttatgcttcttagatacagnnnnnnnnnnnnnnnnnnnnnnnnnnnnnnnnnnnnnnnnnnnnnnnnnnnnnnnnnnnnnnnnnnnnnnnnnnnnnnnnnnnnnnnnnnnnnnnnnnnnnnnnnnnnnnnnnnnnnnnnnnnnnnnnnnnnnnnnnnnnnnnnnnnnnnnnnnnnnnnnnnnnnnnnnnnnnnnnnnnnnnnnnnnnnnnnnnnnnnnnnnnnnnnnnnnnnnnnnnnnnnnnnnnnnnnnnnnnnnnnnnnnnnnnnnnnnnnnnnnnnnnnnnnnnnnnnnnnnnnnnnnnnnnnnnnnnnnnnnnnnnnnnnnnnnnnnnnnnnnnnnnnnnnnnnnnnnnnnnnnnnnnnnnnnnnnnnnnnnnnnnnntatatcaaaaacttttctaagaatagttggattatgcctcagacttcttaaatggtcatagtttattttccctcattacagtaaaggaaatctaaataaaaattgggaaatttaaataaaa

SEQ ID NO: 232675 - DNA, 161 bp, Homo Sapiens
aaaaaagttggaaaatgagcgtccttgaaaaactttttttgtgcttatggagtcgaaaaaagcatcttctccgagaaaagtcgcctactgaggggtggcgctggggaggaaacaatgggcgcccattgttgtcctaggatccaacggtgacgaccccaccc

SEQ ID NO: 232676 - DNA, 630 bp, Homo Sapiens
  misc_feature (105)..(539): n is a, c, g, or t
aacgggtagagaaagatacaccctgacaacactaatcaaaagaaagcagaattagctatgcttatgtcagacagaacagacttcagagcaaggaaagtgggaagnnnnnnnnnnnnnnnnnnnnnnnnnnnnnnnnnnnnnnnnnnnnnnnnnnnnnnnnnnnnnnnnnnnnnnnnnnnnnnnnnnnnnnnnnnnnnnnnnnnnnnnnnnnnnnnnnnnnnnnnnnnnnnnnnnnnnnnnnnnnnnnnnnnnnnnnnnnnnnnnnnnnnnnnnnnnnnnnnnnnnnnnnnnnnnnnnnnnnnnnnnnnnnnnnnnnnnnnnnnnnnnnnnnnnnnnnnnnnnnnnnnnnnnnnnnnnnnnnnnnnnnnnnnnnnnnnnnnnnnnnnnnnnnnnnnnnnnnnnnnnnnnnnnnnnnnnnnnnnnnnnnnnnnnnnnnnnnnnnnnnnnnnnnnnnnnnnnnnnnnnnnnnnnnnnnnnnnnnnnnnnnnnnnnnnnnnnnnnnnnnnnnnnnnnnnnnnnnnnnnnnnnnnnnnnnnnnntattaataacagaaaggtagttggaaaatcccaatatacttggagattgacaatacaatttatttgtttattcttccccagagaaattaaa

SEQ ID NO: 232677 - DNA, 128 bp, Homo Sapiens
  misc_feature (45)..(63): n is a, c, g, or t
taggcttaggaaaaaccctgaaaacccttattcattccaagtacnnnnnnnnnnnnnnnnnnnaacctcttaactcgcattgttatgcttacgatgataaacatatatcctctttttattgctttgtc

SEQ ID NO: 232678 - DNA, 587 bp, Homo Sapiens
  misc_feature (161)..(452): n is a, c, g, or t
  misc_feature (455)..(470): n is a, c, g, or t
acaaaaaagttgggcttttttggggttttgggaatttgtattttcctagcaaggaagttacacagtgctctgcattggctaacagatatgtatggggtctgcatgcctgtcactggtagaaacaggcaggctcttcacacagacaagggaatgtgtaagcnnnnnnnnnnnnnnnnnnnnnnnnnnnnnnnnnnnnnnnnnnnnnnnnnnnnnnnnnnnnnnnnnnnnnnnnnnnnnnnnnnnnnnnnnnnnnnnnnnnnnnnnnnnnnnnnnnnnnnnnnnnnnnnnnnnnnnnnnnnnnnnnnnnnnnnnnnnnnnnnnnnnnnnnnnnnnnnnnnnnnnnnnnnnnnnnnnnnnnnnnnnnnnnnnnnnnnnnnnnnnnnnnnnnnnnnnnnnnnnnnnnnnnnnnnnnnnnnnnnnnnnnnnnnnnnnnnnnnnnnnnnnnnnnnnnnggnnnnnnnnnnnnnnnngagatgctcattaaaatacataaaaatagggaggcagagaaacaccataaaaggtatagaataaaaggaatgcattcccacttagaagatttgatttttaaaaaatcacctactctg

SEQ ID NO: 232679 - DNA, 551 bp, Homo Sapiens
  misc_feature (82)..(115): n is a, c, g, or t
  misc_feature (144)..(154): n is a, c, g, or t
  misc_feature (249)..(358): n is a, c, g, or t
  misc_feature (415)..(428): n is a, c, g, or t
gaaaataaaaatttttattttgattgatttccccaaggaaagttcaataaaatgcccgtttttaaggggaaaaatttggttnnnnnnnnnnnnnnnnnnnnnnnnnnnnnnnnnnactttttcccggaaataggttaacccccnnnnnnnnnnnggaaaatttcccaacccccgggcaacttaaaccgcaaatctaaaagggccgccacttttaacccaaaaagggcccaaacccctggggacaccagnnnnnnnnnnnnnnnnnnnnnnnnnnnnnnnnnnnnnnnnnnnnnnnnnnnnnnnnnnnnnnnnnnnnnnnnnnnnnnnnnnnnnnnnnnnnnnnnnnnnnnnnnnnnnngggaacccaaaattttcctccaatgctttttaaaacccttctgtaaccaaacaaaannnnnnnnnnnnnnttatccaaaaaaatgttttatacaaataaatgtttctccattaaaaaagggacccaacctataggtataacataaagcccactgtcttttgtaaaaccatttatccccccgaaatttccattt

SEQ ID NO: 232680 - DNA, 146 bp, Homo Sapiens
agccccggagttcgggcggccggcctcccgtgtctgcgcagccccgcgtttgcttccggctggaaacaccgggccccgctctgcgccttgccatgtcggtgaacttggacaaactgctgcaccaggtcatgatcaaccagttcgtg

SEQ ID NO: 232681 - DNA, 595 bp, Homo Sapiens
  misc_feature (228)..(242): n is a, c, g, or t
  misc_feature (261)..(389): n is a, c, g, or t
tacaaaaaagttggcttcattacccctctagcagtgctgtgggctgagcattactgtctacctctggtcactctaggaccactggtgccagggccttattgctcacccctgtcacatgctatcttagtgtccctgggtctggacgacacaccgagcactgcagcccagaagtctcagactgttctagaatgctgtctcatttgctgaccgtttcttcttcttgttcgnnnnnnnnnnnnnnngagacagagtttcactctnnnnnnnnnnnnnnnnnnnnnnnnnnnnnnnnnnnnnnnnnnnnnnnnnnnnnnnnnnnnnnnnnnnnnnnnnnnnnnnnnnnnnnnnnnnnnnnnnnnnnnnnnnnnnnnnnnnnnnnnnnnnnnnnnctcctcttgctacctctttatactcacactgtcctcccaatatgacccatggtagccactgatcccattaccctaattttgttatttcaagaatgctattaaaatggaatcgtaaggtacgcaagctttgagatagggctttgttcactcagcaaattacccttaagatctatccaagttgttaggtgttctaaaatagtattaat

SEQ ID NO: 232682 - DNA, 550 bp, Homo Sapiens
  misc_feature (46)..(91): n is a, c, g, or t
  misc_feature (93)..(167): n is a, c, g, or t
  misc_feature (314)..(504): n is a, c, g, or t
ttggcttttttctgtgcatgctctccttaggtgatctcatccttcnnnnnnnnnnnnnnnnnnnnnnnnnnnnnnnnnnnnnnnnnnnnnngnnnnnnnnnnnnnnnnnnnnnnnnnnnnnnnnnnnnnnnnnnnnnnnnnnnnnnnnnnnnnnnnnnnnnnnnnnnctaaatggggcaatgtgtataaatcggcacttagtagataatcaatttatgtaatttactgtagctttcattcttgaatatatgtaaaaacatgtaaagacttatcaacattgcattgatttttcatataaagatattatctttatnnnnnnnnnnnnnnnnnnnnnnnnnnnnnnnnnnnnnnnnnnnnnnnnnnnnnnnnnnnnnnnnnnnnnnnnnnnnnnnnnnnnnnnnnnnnnnnnnnnnnnnnnnnnnnnnnnnnnnnnnnnnnnnnnnnnnnnnnnnnnnnnnnnnnnnnnnnnnnnnnnnnnnnnnnnnnnnnnnnnnnnnnnnnnnngttgaggctgctctgagacaaaatcacacccctatataccagcttg

SEQ ID NO: 232683 - DNA, 487 bp, Homo Sapiens
ttgggacacgatctacctttagacatgtttgttcctgcgaatgcgccgctgacatttctctctgtcccctgaaagaatgcttattttccaattaactgagtgcttatattcccaactgctgcgggatattttgcaaagggtaatagtgcgttagtccttgggactcctgacactgccacctttccctctcgggaacacctgatagaaaatccacatgttcggtattaccccccctgttcaaagaaccaaacggctgacgcaacaatgcctgtgagtgtcagcacctccgacagctcctgcacttttgatttctttcttatagttggacttgaacttcagagtatctggaatctgcatgatgggggaaatctccttatgttttggcaagcatccctcactcaaacagagacgacaggttttagacatcttctactatttgttggatgcgcatatactcttttttgcattcctgaggcatgtcctgccc

SEQ ID NO: 232684 - DNA, 347 bp, Homo Sapiens
ttggaaaaatattgctctttatccctgtcctttctaccgtatttttttaatctccaggttagatattgttcccaaataagaactatactcctaatataacattacactatcaaatactgagccataatagaagagcaaaactttcatgccttgttgatttattatcttgggatcttatagctcttcacaatttcttcttttgcctaaggcatgcatgtattttgcagatgagaaaattttagtcctgcttctgacttcgggctaacatcttttcaatgaaatcctgattgactgggcccaggaatacctttatgcgggcgtactgtgctatatattccagagatttc

SEQ ID NO: 232685 - DNA, 803 bp, Homo Sapiens
  misc_feature (64)..(115): n is a, c, g, or t
  misc_feature (163)..(309): n is a, c, g, or t
  misc_feature (330)..(434): n is a, c, g, or t
  misc_feature (457)..(562): n is a, c, g, or t
ttggcttcgttcctgacaggttcttgctatatttccctggctgatcttgaactcctggctttannnnnnnnnnnnnnnnnnnnnnnnnnnnnnnnnnnnnnnnnnnnnnnnnnnnaccttgcctggttcctgggcattttttaatggactgggttttaaaagnnnnnnnnnnnnnnnnnnnnnnnnnnnnnnnnnnnnnnnnnnnnnnnnnnnnnnnnnnnnnnnnnnnnnnnnnnnnnnnnnnnnnnnnnnnnnnnnnnnnnnnnnnnnnnnnnnnnnnnnnnnnnnnnnnnnnnnnnnnnnnnnnnngacagagttttactctgtccnnnnnnnnnnnnnnnnnnnnnnnnnnnnnnnnnnnnnnnnnnnnnnnnnnnnnnnnnnnnnnnnnnnnnnnnnnnnnnnnnnnnnnnnnnnnnnnnnnnnnnnnnatatgccaccacgcctggctaannnnnnnnnnnnnnnnnnnnnnnnnnnnnnnnnnnnnnnnnnnnnnnnnnnnnnnnnnnnnnnnnnnnnnnnnnnnnnnnnnnnnnnnnnnnnnnnnnnnnnnnnntgagccaccgtgcccggctttaaaagcgttgtatgggcagatagaaacttacagctacaaccataaactgttaatcattataagtaaatatttcgtaagaggtaatttttaggaaactttaagtgcaataaagattatttcacttttccacctaaagaaggcttccttgcctttagaagggagcttgtacattggacaaaacatacaaagctgtgtttgaagctggctgtgtggcattcta

SEQ ID NO: 232686 - DNA, 502 bp, Homo Sapiens
  misc_feature (65)..(82): n is a, c, g, or t
  misc_feature (84)..(156): n is a, c, g, or t
  misc_feature (224)..(348): n is a, c, g, or t
aactataaaagaaaactttgtacaaaaaagttggaaaaacctcaggtcagaactaggaaaagagnnnnnnnnnnnnnnnnnngnnnnnnnnnnnnnnnnnnnnnnnnnnnnnnnnnnnnnnnnnnnnnnnnnnnnnnnnnnnnnnnnnnnnnnnnntggggctcaagcgatcctcccacctcagcccccgaagtatctgggactataggtgtgtaccatcacannnnnnnnnnnnnnnnnnnnnnnnnnnnnnnnnnnnnnnnnnnnnnnnnnnnnnnnnnnnnnnnnnnnnnnnnnnnnnnnnnnnnnnnnnnnnnnnnnnnnnnnnnnnnnnnnnnnnnnnnnnnnaggcaccatgcccaggctagatgtgtcttatcccaatcctttggcaggcatgcagctccacaggcgatttcttcaagcagctgaagtgtttagccctcctgggttaagagccagataaggagaaatccctttcctaggtttggaatgtgttgtg

SEQ ID NO: 232687 - DNA, 553 bp, Homo Sapiens
  misc_feature (161)..(453): n is a, c, g, or t
aagccaactttgtacaaacatttggattggggattggtgcacttccagttgtacaaaggatagctgtattgtgttaggtgtaattatgaccttattattggcttcagttgaacattatgtgtgatttcaggagatgtggatgggttcaagttgacaaagtnnnnnnnnnnnnnnnnnnnnnnnnnnnnnnnnnnnnnnnnnnnnnnnnnnnnnnnnnnnnnnnnnnnnnnnnnnnnnnnnnnnnnnnnnnnnnnnnnnnnnnnnnnnnnnnnnnnnnnnnnnnnnnnnnnnnnnnnnnnnnnnnnnnnnnnnnnnnnnnnnnnnnnnnnnnnnnnnnnnnnnnnnnnnnnnnnnnnnnnnnnnnnnnnnnnnnnnnnnnnnnnnnnnnnnnnnnnnnnnnnnnnnnnnnnnnnnnnnnnnnnnnnnnnnnnnnnnnnnnnnnnnnnnnnnnnntatatcagtgatttgcaatgggctctggggccttcggccacagactgaaggctacaatattggcttccctccttttgaggtgttgggacttggactggct

SEQ ID NO: 232688 - DNA, 453 bp, Homo Sapiens
ttgggaatctgggaggcaaaggctagcaactgtccccccaggaataaccactcacggtgtgtcacgccgggaagacccactgcctgaccggcttcatgggcgtggacgtccctccccccaccgggccagtctggatccagggcgacgtattcctcggccgctactacccagtgtttgaccgagacaacaaccaggtgggcttcctccacgcagcctgcctccatttccttccgcatccgcccgcccgcccacaaacaaacgaaagacactcaccaagaggcacctggcccaccggcccctccctcacacacccacacactcacccgcccactgtcctgggtgcgctgcaagccagccggccaaccccgacttgcttttttgttcggtggttttcccccccctcggttcgtaaatactggctgcctgcctgtctctccctctgtttggtggggg

SEQ ID NO: 232689 - DNA, 681 bp, Homo Sapiens
  misc_feature (80)..(191): n is a, c, g, or t
  misc_feature (291)..(616): n is a, c, g, or t
attataagagccaactttgtacaaaaaagttggctcccaccttaccaaaaaatagaaaaagaacagcaaattaaattctnnnnnnnnnnnnnnnnnnnnnnnnnnnnnnnnnnnnnnnnnnnnnnnnnnnnnnnnnnnnnnnnnnnnnnnnnnnnnnnnnnnnnnnnnnnnnnnnnnnnnnnnnnnnnnnngcctttaacaagaaaaagaaatacagcagataaattaccaatatcagaaatgaaataagggacataactacagatcccatggacattaaaaggataatannnnnnnnnnnnnnnnnnnnnnnnnnnnnnnnnnnnnnnnnnnnnnnnnnnnnnnnnnnnnnnnnnnnnnnnnnnnnnnnnnnnnnnnnnnnnnnnnnnnnnnnnnnnnnnnnnnnnnnnnnnnnnnnnnnnnnnnnnnnnnnnnnnnnnnnnnnnnnnnnnnnnnnnnnnnnnnnnnnnnnnnnnnnnnnnnnnnnnnnnnnnnnnnnnnnnnnnnnnnnnnnnnnnnnnnnnnnnnnnnnnnnnnnnnnnnnnnnnnnnnnnnnnnnnnnnnnnnnnnnnnnnnnnnnnnnnnnnnnnnnnnnnnnnnnnnnnnnnnnnnnnnncatctctcatgaacacagatgcaataaccttcaacaaaatattagcaaattaaatccaacagtgt

SEQ ID NO: 232690 - DNA, 449 bp, Homo Sapiens
  misc_feature (46)..(383): n is a, c, g, or t
acttataaaggccaactttgtacaaaaaagttgggaatcaaattcnnnnnnnnnnnnnnnnnnnnnnnnnnnnnnnnnnnnnnnnnnnnnnnnnnnnnnnnnnnnnnnnnnnnnnnnnnnnnnnnnnnnnnnnnnnnnnnnnnnnnnnnnnnnnnnnnnnnnnnnnnnnnnnnnnnnnnnnnnnnnnnnnnnnnnnnnnnnnnnnnnnnnnnnnnnnnnnnnnnnnnnnnnnnnnnnnnnnnnnnnnnnnnnnnnnnnnnnnnnnnnnnnnnnnnnnnnnnnnnnnnnnnnnnnnnnnnnnnnnnnnnnnnnnnnnnnnnnnnnnnnnnnnnnnnnnnnnnnnnnnnnnnnnnnnnnnnnnnnnnnnnnnnnnnnnnnnnnnngttaagatttacggggaagagagggatgaataggcagaacacagagaacttttagacagtgaaact

SEQ ID NO: 232691 - DNA, 820 bp, Homo Sapiens
  misc_feature (368)..(381): n is a, c, g, or t
  misc_feature (413)..(467): n is a, c, g, or t
  misc_feature (568)..(631): n is a, c, g, or t
ttgggacaaactgggaaaattgctgtaacataggtaacaaagggctgatattctataaagagttcttgcaaatgaataagacaaagatgaatccaagtgggcaaaagatatgctgtaggcaatctgcaaaagtgatgcataaaaacaggttcaacattactagcaattagtggaataaaacttaaaacaacaatgcaaaaccatcgttctatcatattaacaaagatgacaaaaaatggtgtgacagtgcagggtgtggagaaaagttggtgtcaaagctgtgccatctttctgtgtatctttcatatcaaacaaacgccttcaacaatgagcacacctttcgacacgagttcccagactttatcctnnnnnnnnnnnnnntgacgtgcacacagatttagctacaagtaatnnnnnnnnnnnnnnnnnnnnnnnnnnnnnnnnnnnnnnnnnnnnnnnnnnnnnnnttatggtacatttgtataatagtatgccacttggtcattaaaaatgccatagaagtatatttttcataaacttatttctagctgctggttttacaggtggnnnnnnnnnnnnnnnnnnnnnnnnnnnnnnnnnnnnnnnnnnnnnnnnnnnnnnnnnnnnnnnntttaaaaccggcaattatatggtgaaaaggagagaagggcattagtaaattctgaagcactgaaattaaattgtaattgctcattaataaataaacatcattacatactaacatttaccttaaataaactagatttcatttttctactatgggaggaaagacctaaaatacaaattgactcgaattata

SEQ ID NO: 232692 - DNA, 133 bp, Homo Sapiens
gatcttcatgtcaccgccatgaaggtctgaccagtcctggtactcttgggaatttccaactgtctggtctctggccataatccgttgccttctgctccggctgacacgttgccagctactggtcctgctgatg

SEQ ID NO: 232693 - DNA, 330 bp, Homo Sapiens
  misc_feature (140)..(159): n is a, c, g, or t
aaaaagttggggcacagagtacctttaaaaaaggaaacatcataatcaccattctaactactgccatttattccgcaattatattctaacctgtgaccaacccttttaaccggtactaatagtgtttgcgccaactaccnnnnnnnnnnnnnnnnnnnnccctttgtgactggacccacgtatgacagtgctgcccagaccgggaactcctttaatctctgctttatttaaagtcctcttgttaaacctccaagctaattcatgttacctccaacgcttggattgtaaaacttaaatgtccgggcttttccttttacttttattttttac

SEQ ID NO: 232694 - DNA, 646 bp, Homo Sapiens
  misc_feature (257)..(320): n is a, c, g, or t
ttggaaagttggtattttttaatgcactgaaaaattggttataactacaaaatttgcttatcaatataactttcttattatttaataaaaaaggcattttttgtccacaggtgaggagattaaatcatcattgttgtcccccgttgttaaaaagagcatcttattaaattcttacttaaaatgtggcgaatattaaatttattacaaaataaatcatataaattatatttttaatagaacaactggtgagtgaagannnnnnnnnnnnnnnnnnnnnnnnnnnnnnnnnnnnnnnnnnnnnnnnnnnnnnnnnnnnnnnntaagggtgaatattctaggttgctacgtaatatgacctccgctgattctatatttggagtaatatgacttttctatattgataggtacaactcataaaaattactccctccttatataattattttattaactgaagtttattctactgcttttattcttagtcacctacctacccaccttcttattttctacgaaaaacttttggagaaaatggcagctgttggatgattacgtcttctgctattttgcatgctaacatatttactgcgttgtcagagtagttattcatcagaacatcataaacacctcctcttcagtgtcgttc

SEQ ID NO: 232695 - DNA, 203 bp, Homo Sapiens
aactataaaagcccactttgtacaaaaaagttggagcacagcagacctgggagcccaagaccgggtgaaaatgggggtgtgggggcatcctgagcaggactcatggaagaacccgcgcgtgaaaccggtgcttctggttcccttcccacatgtgaaattattctttacacatgattcttctgtggattaataaactactattc

SEQ ID NO: 232696 - DNA, 320 bp, Homo Sapiens
tgcccattgatgactatacaatacaatttgcttcctctctctcgttctcttctcattatgaaaatacaaatttgcgattctctaatggaaggcctccatcgccaaccgaatcacgcttttaccataatcttggacttcaaacctctggcattgttaatgtacaatatttgtttgttttatttacgatttaagatattcttaaataaattgcctttctttttacgtaaattttgcttgtgtaattaccaaacttgcacaaaccgaagaaatataccaagatgttgttgtgaattaagaataaatccatccgttggtggtta

SEQ ID NO: 232697 - DNA, 102 bp, Homo Sapiens
catttaaagaaggactttgtacaaaaaagttggcaagaagcaaacccttaaaaattattgtggaagaactgctggctgattctgaattcagaacatacaacc

SEQ ID NO: 232698 - DNA, 234 bp, Homo Sapiens
  misc_feature (131)..(164): n is a, c, g, or t
agaacaggctaattatgaattttattaaggtttattcagggtcagagcagaagaaacggttttaatttttgcttacccccaatgctggcaggtccaagctgtccaaccatgatccattcacatgctctggnnnnnnnnnnnnnnnnnnnnnnnnnnnnnnnnnnaagacaccattaacccaggggtgggtaacaacatatgcccaatgcacctcctcaggtgagaaccaaactc

SEQ ID NO: 232699 - DNA, 141 bp, Homo Sapiens
tccctttttttacatttcatacaacagaaaccacaaaagcaatactgtttccatttcccccgaaatgattaatattattaatatactaatgatgaggatcgatgatgataactctcgatttttcacgagatctttctttcc

SEQ ID NO: 232700 - DNA, 106 bp, Homo Sapiens
gagcatgctcttataaaaggccccctttgtacaaaaaagttggcagaactcccccccaaagtgcggcgtgagtcgcagccatgttcctggttaactcgttcttgaa

SEQ ID NO: 232701 - DNA, 788 bp, Homo Sapiens
  misc_feature (193)..(603): n is a, c, g, or t
ttgggttaatttttccaaaatttctaaattttctaaaatttcaccaccaaaagtttcttcaaaactacagatgtccagctacttatctggtatcaaacacatcataaatctgttaaatattgatgcttccagatcatttttcttgatgctcagaataacactgctgcatttccattaaattctcagcattaannnnnnnnnnnnnnnnnnnnnnnnnnnnnnnnnnnnnnnnnnnnnnnnnnnnnnnnnnnnnnnnnnnnnnnnnnnnnnnnnnnnnnnnnnnnnnnnnnnnnnnnnnnnnnnnnnnnnnnnnnnnnnnnnnnnnnnnnnnnnnnnnnnnnnnnnnnnnnnnnnnnnnnnnnnnnnnnnnnnnnnnnnnnnnnnnnnnnnnnnnnnnnnnnnnnnnnnnnnnnnnnnnnnnnnnnnnnnnnnnnnnnnnnnnnnnnnnnnnnnnnnnnnnnnnnnnnnnnnnnnnnnnnnnnnnnnnnnnnnnnnnnnnnnnnnnnnnnnnnnnnnnnnnnnnnnnnnnnnnnnnnnnnnnnnnnnnnnnnnnnnnnnnnnnnnnnnnnnnnnnnnnnnnnnnnnnnnnnnnnnnnnnnnnnngaattagtaactaatattttagctttgttttcaatatttataagtcagggcatttataatgttttaaatgcagataaacttaacaaaacaatcagaatttacccagttgtttttatcagtgaagcaggttattctaagtaagcaactgattgcacatctacaattactacatctctctatctgtc

SEQ ID NO: 232702 - DNA, 331 bp, Homo Sapiens
  misc_feature (63)..(167): n is a, c, g, or t
  misc_feature (204)..(219): n is a, c, g, or t
  misc_feature (241)..(262): n is a, c, g, or t
acttgggaccacaaagctcatgccaccatgctcagccaatttaaaaaattattttagagatgnnnnnnnnnnnnnnnnnnnnnnnnnnnnnnnnnnnnnnnnnnnnnnnnnnnnnnnnnnnnnnnnnnnnnnnnnnnnnnnnnnnnnnnnnnnnnnnnnnnnnnnnntggtttattctgttgtttttttccccgcttcacttcnnnnnnnnnnnnnnnngacagagcgagactccatctcnnnnnnnnnnnnnnnnnnnnnntgtattctgtttgccagtcctggaagcctttaagatttcagtattctttcctcttgggtgtgctaattg

SEQ ID NO: 232703 - DNA, 168 bp, Homo Sapiens
  misc_feature (64)..(101): n is a, c, g, or t
cctattaaaaaaaccactttgtacaaaaaagttgggcacaactttgccccaaaaaaagttgggnnnnnnnnnnnnnnnnnnnnnnnnnnnnnnnnnnnnnncagttgcaatcagttggctttctccaagcaaaaatcaaaatattgaatgtggcatgaattaaaaatg

SEQ ID NO: 232704 - DNA, 498 bp, Homo Sapiens
  misc_feature (41)..(137): n is a, c, g, or t
  misc_feature (151)..(343): n is a, c, g, or t
  misc_feature (345)..(404): n is a, c, g, or t
tgcaggaagagaagccaaggtggagtgatgtgatagaaacnnnnnnnnnnnnnnnnnnnnnnnnnnnnnnnnnnnnnnnnnnnnnnnnnnnnnnnnnnnnnnnnnnnnnnnnnnnnnnnnnnnnnnnnnnnnnnnnngataagttatcaannnnnnnnnnnnnnnnnnnnnnnnnnnnnnnnnnnnnnnnnnnnnnnnnnnnnnnnnnnnnnnnnnnnnnnnnnnnnnnnnnnnnnnnnnnnnnnnnnnnnnnnnnnnnnnnnnnnnnnnnnnnnnnnnnnnnnnnnnnnnnnnnnnnnnnnnnnnnnnnnnnnnnnnnnnnnnnnnnnnnnnnnnnnnnnnntnnnnnnnnnnnnnnnnnnnnnnnnnnnnnnnnnnnnnnnnnnnnnnnnnnnnnnnnnnnntctgtgtagaccactcacaagattaaccaagagaagaagagagaagatccaaataaactcaattagaaatgaaactggagatattcatccacca

SEQ ID NO: 232705 - DNA, 646 bp, Homo Sapiens
  misc_feature (219)..(248): n is a, c, g, or t
  misc_feature (261)..(400): n is a, c, g, or t
ttggcaaacatatgaccaacaaaaatacccacaccctctttcctttcctacctggtgctaattggaaagggtacctggtcagcgcatttatttcactttcagtcatgggggagtctaattatgtttgatttaaccaaataatacaaaattcctcagttcttgcttatggatttggacttcaaagcatcttgcctttacctctcagaagctgttctcacnnnnnnnnnnnnnnnnnnnnnnnnnnnnnngagatggagtctnnnnnnnnnnnnnnnnnnnnnnnnnnnnnnnnnnnnnnnnnnnnnnnnnnnnnnnnnnnnnnnnnnnnnnnnnnnnnnnnnnnnnnnnnnnnnnnnnnnnnnnnnnnnnnnnnnnnnnnnnnnnnnnnnnnnnnnnnnnngttactgttattgctgcagaaaagaccttgcttctccagtgaccataagggaagatggtaatacagaggcttggattggaggtagaagcaaagggagctagcagaataggagaattaggttgcctctttctggcctttggttggggcactctttaaaaaagtgccagatccaagagcccagggggctggctgtgagtgccctcatgtggatcagctatggtcagactgcttcacgcctgtgacctg

SEQ ID NO: 232706 - DNA, 337 bp, Homo Sapiens
  misc_feature (54)..(275): n is a, c, g, or t
aaaacaactttgtacaaaaaagttggctgctttatggcttaaagaaggagtttnnnnnnnnnnnnnnnnnnnnnnnnnnnnnnnnnnnnnnnnnnnnnnnnnnnnnnnnnnnnnnnnnnnnnnnnnnnnnnnnnnnnnnnnnnnnnnnnnnnnnnnnnnnnnnnnnnnnnnnnnnnnnnnnnnnnnnnnnnnnnnnnnnnnnnnnnnnnnnnnnnnnnnnnnnnnnnnnnnnnnnnnnnnnnnnnnnnnnnnnnnnnnnnnnnnnnnnnnnnnnntgacctccccaagtgttgggattacaggcatgaaccgttgcgcctgaccagggtgtgttttt

SEQ ID NO: 232707 - DNA, 698 bp, Homo Sapiens
  misc_feature (51)..(466): n is a, c, g, or t
ttgggaggaagactccctttctggggggggcgggaaagaaagaaatcagannnnnnnnnnnnnnnnnnnnnnnnnnnnnnnnnnnnnnnnnnnnnnnnnnnnnnnnnnnnnnnnnnnnnnnnnnnnnnnnnnnnnnnnnnnnnnnnnnnnnnnnnnnnnnnnnnnnnnnnnnnnnnnnnnnnnnnnnnnnnnnnnnnnnnnnnnnnnnnnnnnnnnnnnnnnnnnnnnnnnnnnnnnnnnnnnnnnnnnnnnnnnnnnnnnnnnnnnnnnnnnnnnnnnnnnnnnnnnnnnnnnnnnnnnnnnnnnnnnnnnnnnnnnnnnnnnnnnnnnnnnnnnnnnnnnnnnnnnnnnnnnnnnnnnnnnnnnnnnnnnnnnnnnnnnnnnnnnnnnnnnnnnnnnnnnnnnnnnnnnnnnnnnnnnnnnnnnnnnnnnnnnnnnnnnnnnnnnnnnnnnnnnnnnnnnnnnnaggagggaggaaggggaggcaggggcctgaatccaaaccagataagaagacccccagcaaaggggactgtggcactgagatggaaagccccttccctcccctcctgcaggaagtgagtgctgggagatgagggtctggcagagactctggagacacaggaatttcaaacatgcagccattctctcccctcaagatgtttgcagctgggtgtggtgtaatcccagcacttttg

SEQ ID NO: 232708 - DNA, 642 bp, Homo Sapiens
  misc_feature (176)..(205): n is a, c, g, or t
  misc_feature (239)..(272): n is a, c, g, or t
  misc_feature (317)..(344): n is a, c, g, or t
ggagacaggtagtgatgaagatgacccccctgctgctgataccaccgctgctgctgctgctgaaatgccgccccccgatggagaagatgacaactcacccctggtggaagaagactactctccggttgatggaggacgactctgttctttactcttctattcttcttataatatannnnnnnnnnnnnnnnnnnnnnnnnnnnnnattattataaagtctgttttgtgtgatgactacnnnnnnnnnnnnnnnnnnnnnnnnnnnnnnnnnngatgatgtggtaattcattaactaaagcagaacccctaatgctgnnnnnnnnnnnnnnnnnnnnnnnnnnnncacagggggggacatgcagtgtaatacgacgttagtaacatgttgtttttgtggtggtcagtggttatctgtcgtcccggatgcctcattagaacacctcttcttgttaaagtgttgttatcagcttcttcatgttgataaaaaaattcttcacttcttgttggatcatcttcttgaagatctcttccctcgcagttgacgattctgcttgtagtactcctcctcaaatatatgtactgaagcaacttgatggaaggatgatccctccggcggcttgtcttcacaaaagtattgttgg

SEQ ID NO: 232709 - DNA, 413 bp, Homo Sapiens
  misc_feature (102)..(163): n is a, c, g, or t
  misc_feature (180)..(299): n is a, c, g, or t
aactaaaaaaaccaactttgtacaaaaaagttgggacaaggtcttccctcaaaacacctaggttgaagtgcactgtggcatgatcatagcttactacagctnnnnnnnnnnnnnnnnnnnnnnnnnnnnnnnnnnnnnnnnnnnnnnnnnnnnnnnnnnnnnnacacaccaccatgcctnnnnnnnnnnnnnnnnnnnnnnnnnnnnnnnnnnnnnnnnnnnnnnnnnnnnnnnnnnnnnnnnnnnnnnnnnnnnnnnnnnnnnnnnnnnnnnnnnnnnnnnnnnnnnnnnnnnnnnnnatgtgccactgcgtccagcctgattatcttttaaatatcatatttttttatttgtatatcttatttagaggaaagctcacttaactctctcgtccttgcttttttttcaaaaaa

SEQ ID NO: 232710 - DNA, 437 bp, Homo Sapiens
  misc_feature (59)..(78): n is a, c, g, or t
  misc_feature (88)..(337): n is a, c, g, or t
ttggattaatcctttgctagaaacttaatagacaattgttacttttatgaaaattgtannnnnnnnnnnnnnnnnnnngagaggagannnnnnnnnnnnnnnnnnnnnnnnnnnnnnnnnnnnnnnnnnnnnnnnnnnnnnnnnnnnnnnnnnnnnnnnnnnnnnnnnnnnnnnnnnnnnnnnnnnnnnnnnnnnnnnnnnnnnnnnnnnnnnnnnnnnnnnnnnnnnnnnnnnnnnnnnnnnnnnnnnnnnnnnnnnnnnnnnnnnnnnnnnnnnnnnnnnnnnnnnnnnnnnnnnnnnnnnnnnnnnnnnnnnnnnnnnnnnnnnnnnnnnnnnncgcgtgagccagcggcgcccggccgaaaacttattctttaaatttatggaatctctgtttccctatcagaactactaacattttacatagccatatcttt

SEQ ID NO: 232711 - DNA, 460 bp, Homo Sapiens
  misc_feature (117)..(158): n is a, c, g, or t
  misc_feature (180)..(418): n is a, c, g, or t
ttggcaacattttaaccaacaagaaaatttttagtcagggcatattatattctgacagatgctgaatttgccacatgatttgaagatgaacatttcaagcattaggtaacaacattnnnnnnnnnnnnnnnnnnnnnnnnnnnnnnnnnnnnnnnnnngagatggagtttcactattatnnnnnnnnnnnnnnnnnnnnnnnnnnnnnnnnnnnnnnnnnnnnnnnnnnnnnnnnnnnnnnnnnnnnnnnnnnnnnnnnnnnnnnnnnnnnnnnnnnnnnnnnnnnnnnnnnnnnnnnnnnnnnnnnnnnnnnnnnnnnnnnnnnnnnnnnnnnnnnnnnnnnnnnnnnnnnnnnnnnnnnnnnnnnnnnnnnnnnnnnnnnnnnnnnnnnnnnnnnnnnnnnnnnnnnnnnnnnnnngtgtgagccaccgcgcctggcccaggtaacagcatttttcaa

SEQ ID NO: 232712 - DNA, 812 bp, Homo Sapiens
  misc_feature (329)..(343): n is a, c, g, or t
  misc_feature (349)..(443): n is a, c, g, or t
ttggccaacataggattttgtcaagcattttgatttttgccaactaattagatcaaaagtagcatcagtttgtagttttaattcacatttcttatattacgagggttattaagtatctttttatttatttaaaagccatgtgtatttccttttctgtgtcagttgtctgttactcatttttttcataggcttgttggtctttttcttatcaatttatattcgctcctttataaattcagatgatcagttaccttatatttgatacaagcagcaaagattttcccagtttgtcatttatctttgtccacaatgtttgagccatggagaannnnnnnnnnnnnnntcatgnnnnnnnnnnnnnnnnnnnnnnnnnnnnnnnnnnnnnnnnnnnnnnnnnnnnnnnnnnnnnnnnnnnnnnnnnnnnnnnnnnnnnnnnnnnnnnntatttggcatacacatctctgcagcccctcccattgtactaacaattttttttcctcatacaattaagaatatggcattcctctgttttttcccccaaattaggataaaccagtcaaacgaaagaagctgcagcatcagttctcacatgctttaaacttcaatataccacagcttttcacagaaaaatttatttggcttagcagtagagtaaccagttggtcctggtttgcctgggatgttcccagttttagcactgaagtcttaaatcctcagaaatccctgaatccccagcaaaccctgacaattggtcaccctacttagcagtcttaaaacaaatttctcataacttttcttagtgttgatccagc

SEQ ID NO: 232713 - DNA, 102 bp, Homo Sapiens
aaaaaagggggtttttcccaggcccccttggcccccaaaatttgggttaaaaaatcccaatttttccctaaaattttttgggggccagggggcccttttata

SEQ ID NO: 232714 - DNA, 134 bp, Homo Sapiens
ggaaactccgtctttaaataaataactaaaaaggagagggatacaggaaacattagtgcctgaaatccaagaaatgctttcgctgaggggctccctctttactaagccgagcctaggacaatgtgcgagtttgt

SEQ ID NO: 232715 - DNA, 835 bp, Homo Sapiens
  misc_feature (261)..(493): n is a, c, g, or t
  misc_feature (519)..(558): n is a, c, g, or t
  misc_feature (560)..(646): n is a, c, g, or t
cctttaaaagggcccactttgtacaaaaaagttggaaaagtttttcctataatggaagtgggagaaagttcaaggtctgcatttgttaccataaagtagatgttaaataatgctatggctgagtttttgaaaacaacagtaaacagtattagaaaggcaagagagttttcaaactctcaactcttgtcgtatttccttatttgtatattaatttaatctatattttcttaagcaagcctatagaatagcttttaaaaactnnnnnnnnnnnnnnnnnnnnnnnnnnnnnnnnnnnnnnnnnnnnnnnnnnnnnnnnnnnnnnnnnnnnnnnnnnnnnnnnnnnnnnnnnnnnnnnnnnnnnnnnnnnnnnnnnnnnnnnnnnnnnnnnnnnnnnnnnnnnnnnnnnnnnnnnnnnnnnnnnnnnnnnnnnnnnnnnnnnnnnnnnnnnnnnnnnnnnnnnnnnnnnnnnnnnnnnnnnnnnnnnnnnnnnnnngtgcacaccaccatacctggctaacnnnnnnnnnnnnnnnnnnnnnnnnnnnnnnnnnnnnnnnntnnnnnnnnnnnnnnnnnnnnnnnnnnnnnnnnnnnnnnnnnnnnnnnnnnnnnnnnnnnnnnnnnnnnnnnnnnnnnnnnnnnnnnngtgtgagccaccacacctggcctggatcatgcttagttgtagctcctcataatttgccagctgtagacaaaaaatcacaaaaatgaaccactttcaatatacctaatatgcaaatgacggacgaaaaccggacaaaggtcaattgaaaattctcccctcaaaaaggagaagcaccacacagctctcacc

SEQ ID NO: 232716 - DNA, 900 bp, Homo Sapiens
  misc_feature (226)..(511): n is a, c, g, or t
  misc_feature (514)..(527): n is a, c, g, or t
  misc_feature (531)..(822): n is a, c, g, or t
ttgggtttgttctcctgatattttaaattattccctaagttttatgaaggaaaatgatttaaaggaattaaattattaatattataaaattaatatttttcacaatgtatatcattactttatgtttattcactttctctggaattgaagtccacatttgaatggaattaaaataagactatcggtcttatggttttctggtttacagtgccaaatgttgatagannnnnnnnnnnnnnnnnnnnnnnnnnnnnnnnnnnnnnnnnnnnnnnnnnnnnnnnnnnnnnnnnnnnnnnnnnnnnnnnnnnnnnnnnnnnnnnnnnnnnnnnnnnnnnnnnnnnnnnnnnnnnnnnnnnnnnnnnnnnnnnnnnnnnnnnnnnnnnnnnnnnnnnnnnnnnnnnnnnnnnnnnnnnnnnnnnnnnnnnnnnnnnnnnnnnnnnnnnnnnnnnnnnnnnnnnnnnnnnnnnnnnnnnnnnnnnnnnnnnnnnnnnnnnnnnnnnnnnnnnnnnnnctnnnnnnnnnnnnnnctgnnnnnnnnnnnnnnnnnnnnnnnnnnnnnnnnnnnnnnnnnnnnnnnnnnnnnnnnnnnnnnnnnnnnnnnnnnnnnnnnnnnnnnnnnnnnnnnnnnnnnnnnnnnnnnnnnnnnnnnnnnnnnnnnnnnnnnnnnnnnnnnnnnnnnnnnnnnnnnnnnnnnnnnnnnnnnnnnnnnnnnnnnnnnnnnnnnnnnnnnnnnnnnnnnnnnnnnnnnnnnnnnnnnnnnnnnnnnnnnnnnnnnnnnnnnnnnnnnnnnnnnnnnnnnnnnnnnnnnnnnnnnnnnnnnnnacaaacaaatgttgatagaaccgtgtgctaaggtttgcttttcttttgcaaagaataacagattggacatgtacattg

SEQ ID NO: 232717 - DNA, 172 bp, Homo Sapiens
tttggacccatgtaaatgtgcaaactggggtcagtctgacaaggtctaattctgctcccatttcacaagaagatatgtgactcacgccgggtttgttcttcccctcacaaaaagaatctccttggtttgtacccagataagaattgctccagttttcaggttctttggtgaa

SEQ ID NO: 232718 - DNA, 384 bp, Homo Sapiens
  misc_feature (162)..(224): n is a, c, g, or t
actttgtacaaaaaagttggaggtcaggcgggtcggtctccagacggaggcggcagccagtcccgacctgcccgtccttgcagaaagaatgcctcactcttacttacgcctgacccaccctccctctggttgacgaagaaagagaagaaagagcggggccgnnnnnnnnnnnnnnnnnnnnnnnnnnnnnnnnnnnnnnnnnnnnnnnnnnnnnnnnnnnnnnnggcagcgagcgccctcctaccgatcgctcccgtccctaacgaaggttcgtgcttaccgacctgccctctccgcaccgattctttcctcgcctcccgccggccgacccatcccttactgaccacctaccggggggggacggacaacaaaccgacagagagg

SEQ ID NO: 232719 - DNA, 955 bp, Homo Sapiens
  misc_feature (274)..(300): n is a, c, g, or t
  misc_feature (318)..(432): n is a, c, g, or t
  misc_feature (591)..(653): n is a, c, g, or t
ttgggttacttttgccagatatccttgaactagattggtaaatgagaatcacagagaaaggttggtcaccagcagaacacagttaatccctgcctccacctgattgtgccgttcaaaaattattttctctacctgggatattcccccctgatctttgtgtggttagcaccttcttcactcatctcacatattacttcctcagagcagtttcctttcccagctactccatctgaaatcacacccctccatagcacagcacccagttgtatatatnnnnnnnnnnnnnnnnnnnnnnnnnnnatacatagaaacagagtnnnnnnnnnnnnnnnnnnnnnnnnnnnnnnnnnnnnnnnnnnnnnnnnnnnnnnnnnnnnnnnnnnnnnnnnnnnnnnnnnnnnnnnnnnnnnnnnnnnnnnnnnnnnnnnnnnngtgcatactaccatgcctggctagtaccccgttttcaataagcttctaaaactggtatttgtatattatttatcttatccccttggattgtaagcaccatgagtgaggactttgtcttgttctcgtctctctctctctatacacacgcacacgcacacnnnnnnnnnnnnnnnnnnnnnnnnnnnnnnnnnnnnnnnnnnnnnnnnnnnnnnnnnnnnnnntaatcatgtccagaactgtttaacaagagagttttaggggagatgatggcatatagttgaggcaacaagaaagaacatacactccgagcttgattaaatggattccttttaagatggtttttttggtaaaaatgtctcatggcaagctgccctggaatatctgatgtaatgatgtgttttcttaaactacattcacatcttaaaaatgtacatatcaaaatactgcaatctggttccaattacaatgaagtaaattgatgtttagttttgctaaagcttttaccattgaccagaaaagcttt

SEQ ID NO: 232720 - DNA, 568 bp, Homo Sapiens
  misc_feature (55)..(177): n is a, c, g, or t
  misc_feature (241)..(341): n is a, c, g, or t
gcgattaaagggccctttgtacaaaaaagttggctgcaacctcaccttaaaaaannnnnnnnnnnnnnnnnnnnnnnnnnnnnnnnnnnnnnnnnnnnnnnnnnnnnnnnnnnnnnnnnnnnnnnnnnnnnnnnnnnnnnnnnnnnnnnnnnnnnnnnnnnnnnnnnnnnnnnnnnngactgcagactctgatctcaaactgtgggctcaagttaagcctgtgctaatttataagctgtannnnnnnnnnnnnnnnnnnnnnnnnnnnnnnnnnnnnnnnnnnnnnnnnnnnnnnnnnnnnnnnnnnnnnnnnnnnnnnnnnnnnnnnnnnnnnnnnnnnnattattgtttttgaggtatgtcaaatgcttagcaaggagccaggctcatggaaagtgctccataaatactagccatccttggttatagtgctattgctgggagttcagtggaggcatcataaatgcaagaaaacataaaagtgcgtggctggggtgaccaattgtcctcgtttgcccaggatggagatggttcctaggacataggaccttcagtgctcattgaaaac

SEQ ID NO: 232721 - DNA, 247 bp, Homo Sapiens
ttgggtagtaatgtcctttaatgtcatttcttgtctacttttcattaacagaaatcatatctttgaaatggatatcttataaaaatctaagcattgcaaaataataagttgttgcgttgctatcgcacctggcctagcatacaattgaataataatgagatgatttgtttggtttgaaattatatattataatatgattcctatacattataataaaattaattttcttttctatcgtatccatttg

SEQ ID NO: 232722 - DNA, 106 bp, Homo Sapiens
gaggctgactattactgtcgtcaacagacagcagtgcttcttatcggcccttcagacctgggaccaaggtcaccgtcctatgtcagcccagggccgaccccactgt

SEQ ID NO: 232723 - DNA, 563 bp, Homo Sapiens
ctttgtacaaaaaagttggcctacattgggacagacatagatcaatgaatctgaagaggctactccgtatacagtcccaccctcaccctattctttacctttcccttcctcttgcccttgattattgcaaccctagcaccactccccctcctattcttgctcgagacgggatcagacaatcccctacgaatcacctcccattcccattaaaacaccttccacctttaccactcaatcaaagacgccctcggcttacttctcttccttctctccttaatgacattgacactaatctcactatacctccaacgcgaccccgacaattataccctaaccaacccctaaaacacccctccccctatcaagcccgaatgatattgacaattcgcctacgccaatctccgatccgtatccaacaatcaaggaggcgtccttgcccttttactatccatcctcatcctagcactaatccccatcctccttatatccaaataacaaagcaaaatatttctcccactaacacaaacactttcttgactccgacccgcagacccccacattct

SEQ ID NO: 232724 - DNA, 985 bp, Homo Sapiens
  misc_feature (121)..(225): n is a, c, g, or t
  misc_feature (244)..(374): n is a, c, g, or t
  misc_feature (468)..(529): n is a, c, g, or t
  misc_feature (533)..(775): n is a, c, g, or t
ttggaggatataaaatgagtgactcaagtttctcccttagaaatggtagtgggagtgtgtggagtaggaaaaagtaagcccaaagtaagtaatagaactgaaatagtccaggcatggtggnnnnnnnnnnnnnnnnnnnnnnnnnnnnnnnnnnnnnnnnnnnnnnnnnnnnnnnnnnnnnnnnnnnnnnnnnnnnnnnnnnnnnnnnnnnnnnnnnnnnnnnnnctgggactacaggcgcccnnnnnnnnnnnnnnnnnnnnnnnnnnnnnnnnnnnnnnnnnnnnnnnnnnnnnnnnnnnnnnnnnnnnnnnnnnnnnnnnnnnnnnnnnnnnnnnnnnnnnnnnnnnnnnnnnnnnnnnnnnnnnnnnnnntgagccactgcgcccggccagaagaacacttgttagaccaggttttatgagaccagcattacctgatgccaaagcttgacaaagatagagtggnnnnnnnnnnnnnnnnnnnnnnnnnnnnnnnnnnnnnnnnnnnnnnnnnnnnnnnnnnnnnnaaannnnnnnnnnnnnnnnnnnnnnnnnnnnnnnnnnnnnnnnnnnnnnnnnnnnnnnnnnnnnnnnnnnnnnnnnnnnnnnnnnnnnnnnnnnnnnnnnnnnnnnnnnnnnnnnnnnnnnnnnnnnnnnnnnnnnnnnnnnnnnnnnnnnnnnnnnnnnnnnnnnnnnnnnnnnnnnnnnnnnnnnnnnnnnnnnnnnnnnnnnnnnnnnnnnnnnnnnnnnnnnnnnnnnnnnnnnnnnnnnnnggctgtacattaacactttacagactagtgtccctaatacttagagataaaatctaatcaacatataaaaagcataatttattgtgtccaagagatgtttatcctaggatgcagcgagaatcagtgtcatttccctcattaaaccaaagaaaaaaacccctaatcctttccataaacaatggaaaaggcatttgacaaaatttggtaccc

SEQ ID NO: 232725 - DNA, 287 bp, Homo Sapiens
  misc_feature (71)..(94): n is a, c, g, or t
  misc_feature (117)..(142): n is a, c, g, or t
  misc_feature (156)..(247): n is a, c, g, or t
cttaaaatacccactttgtacaaaaaagttggcttgcctcctcctaagaaacctatgtggtttaacctcannnnnnnnnnnnnnnnnnnnnnnngaaatggagtttcactctgtccnnnnnnnnnnnnnnnnnnnnnnnnnnggggcttccccatnnnnnnnnnnnnnnnnnnnnnnnnnnnnnnnnnnnnnnnnnnnnnnnnnnnnnnnnnnnnnnnnnnnnnnnnnnnnnnnnnnnnnnnnnnnncggcatgaggcaccctgcccaacctatcctccttctctta

SEQ ID NO: 232726 - DNA, 916 bp, Homo Sapiens
  misc_feature (67)..(157): n is a, c, g, or t
  misc_feature (190)..(264): n is a, c, g, or t
  misc_feature (298)..(318): n is a, c, g, or t
  misc_feature (335)..(346): n is a, c, g, or t
  misc_feature (352)..(680): n is a, c, g, or t
ttggctaatgtaatcagggatacgcagctgtgttcactgttctctagtcctttcatgttgctagagnnnnnnnnnnnnnnnnnnnnnnnnnnnnnnnnnnnnnnnnnnnnnnnnnnnnnnnnnnnnnnnnnnnnnnnnnnnnnnnnnnnnnnnnnnngttgggcacagcagcaggtgcctataatccctnnnnnnnnnnnnnnnnnnnnnnnnnnnnnnnnnnnnnnnnnnnnnnnnnnnnnnnnnnnnnnnnnnnnnnnnnnnactagcctgggcaacagtgaggcaccacctcccnnnnnnnnnnnnnnnnnnnnntccagccccatttcttnnnnnnnnnnnngagacnnnnnnnnnnnnnnnnnnnnnnnnnnnnnnnnnnnnnnnnnnnnnnnnnnnnnnnnnnnnnnnnnnnnnnnnnnnnnnnnnnnnnnnnnnnnnnnnnnnnnnnnnnnnnnnnnnnnnnnnnnnnnnnnnnnnnnnnnnnnnnnnnnnnnnnnnnnnnnnnnnnnnnnnnnnnnnnnnnnnnnnnnnnnnnnnnnnnnnnnnnnnnnnnnnnnnnnnnnnnnnnnnnnnnnnnnnnnnnnnnnnnnnnnnnnnnnnnnnnnnnnnnnnnnnnnnnnnnnnnnnnnnnnnnnnnnnnnnnnnnnnnnnnnnnnnnnnnnnnnnnnnnnnnnggtgttatgacctgcttcagtgggggaaggtcagaggaaggtcagagagaacttcttgcacatgctgtctcaaattccttccgcttcatgcaatgtatatgtgggggctgttatggttagagtcataatagtctaggtcacggttgacagactttttctgtaagttagagagtaaatatgttaggcttatgagccatacgcaatatgccaagatgccatattttgggggtagtgtg

SEQ ID NO: 232727 - DNA, 628 bp, Homo Sapiens
  misc_feature (89)..(107): n is a, c, g, or t
  misc_feature (205)..(318): n is a, c, g, or t
ttggcttacctcatttaatcttcacagaattcatatagggtaatactgcatttttatcagtgcagcagttgagtaactgcctgaattcnnnnnnnnnnnnnnnnnnngagacaagttctttgctctgtcacctaggtgggaggggcacaatcatggcttattacagccttgacctcctgggctcaagttgatcctcctgtgtcannnnnnnnnnnnnnnnnnnnnnnnnnnnnnnnnnnnnnnnnnnnnnnnnnnnnnnnnnnnnnnnnnnnnnnnnnnnnnnnnnnnnnnnnnnnnnnnnnnnnnnnnnnnnnnnnntgagccaccacgcccggcccagtataacgattaaagtcaggaaaagtaaagtggacatcgccttctctaatcccgaatccagactcggcctgtcgcccccatgctccaattgttcctgtttctcctggtccgggatcccatgctgggtcttgtctctcgagccccttcgtctgtctgggacagtttcctgctttgttttctgtgctccgggcaccgagcagcatcccagcccgttattcttggaaggctactcgttccgtgtcgctgggtgctagttctggtcacctgtccaccccccacctccctggga

SEQ ID NO: 232728 - DNA, 494 bp, Homo Sapiens
  misc_feature (58)..(305): n is a, c, g, or t
  misc_feature (395)..(431): n is a, c, g, or t
ctttgtacaaaaaagttggcattattttagttatttatttgtttttagatggagtctnnnnnnnnnnnnnnnnnnnnnnnnnnnnnnnnnnnnnnnnnnnnnnnnnnnnnnnnnnnnnnnnnnnnnnnnnnnnnnnnnnnnnnnnnnnnnnnnnnnnnnnnnnnnnnnnnnnnnnnnnnnnnnnnnnnnnnnnnnnnnnnnnnnnnnnnnnnnnnnnnnnnnnnnnnnnnnnnnnnnnnnnnnnnnnnnnnnnnnnnnnnnnnnnnnnnnnnnnnnnnnnnnnnnnnnnnnnnnnnnnnnnnnnntgaaccaccacgcccggctgagactaacattattgaagtgtatcattgctgtttaatcgtgtatcattgctgtttaatctcaaatttgtnnnnnnnnnnnnnnnnnnnnnnnnnnnnnnnnnnnnntgtgccaccatgcctggcctccgatttgtctttttgaaacaaaattgcttaataaattgggcc

SEQ ID NO: 232729 - DNA, 737 bp, Homo Sapiens
  misc_feature (94)..(209): n is a, c, g, or t
  misc_feature (292)..(371): n is a, c, g, or t
ggttagtttttgccaccacaagaaaaaaagtacacatacaaaatcatatgtatttatgcttaaaattttatgtttttctcaagattataagacnnnnnnnnnnnnnnnnnnnnnnnnnnnnnnnnnnnnnnnnnnnnnnnnnnnnnnnnnnnnnnnnnnnnnnnnnnnnnnnnnnnnnnnnnnnnnnnnnnnnnnnnnnnnnnnnnnnnggattaaaaatgatgttgaagtgaatttacagatatagaaagatgttaaagatatatgtcattgattagaaaaaacaaaatannnnnnnnnnnnnnnnnnnnnnnnnnnnnnnnnnnnnnnnnnnnnnnnnnnnnnnnnnnnnnnnnnnnnnnnnnnnnnnntgtgtccggcctgaatttatttctttttgagaatctggctgtggttttttaaaaaagtgattcttaatgtaatgtcttcccatttatacttgggtgtctttaagctatcctgtacaaatgtggtgtctggagtgtgtggagggatacttggtaatctgttctgactttcttgggttgcaaatatatggtaaaggggccccagaatattctgtatgataggattctggggtggattctagaaggactcctcgagaatccactgctattgcgtgtcatgttttgagagaagatgtaagcttttatcagaatgttctctccaaactaattgctgtagtgcaggggtcagcatgtttttctgtaaagggc

SEQ ID NO: 232730 - DNA, 969 bp, Homo Sapiens
  misc_feature (239)..(832): n is a, c, g, or t
  misc_feature (846)..(891): n is a, c, g, or t
ttggctcttaaggagctcttaaatccctcttgtagggtagctgctgcttgcatttttgttctcgctcaagccacctttttcatcagctgttgtgccaatcttctgcctcagtagttattcagtggtcccccatttggttttatttattcacctctttcatccctatcctgcctcagtactgaaaagaagcactttgctcaatctaaggatggggtaaagaaaaggataatatcgtactnnnnnnnnnnnnnnnnnnnnnnnnnnnnnnnnnnnnnnnnnnnnnnnnnnnnnnnnnnnnnnnnnnnnnnnnnnnnnnnnnnnnnnnnnnnnnnnnnnnnnnnnnnnnnnnnnnnnnnnnnnnnnnnnnnnnnnnnnnnnnnnnnnnnnnnnnnnnnnnnnnnnnnnnnnnnnnnnnnnnnnnnnnnnnnnnnnnnnnnnnnnnnnnnnnnnnnnnnnnnnnnnnnnnnnnnnnnnnnnnnnnnnnnnnnnnnnnnnnnnnnnnnnnnnnnnnnnnnnnnnnnnnnnnnnnnnnnnnnnnnnnnnnnnnnnnnnnnnnnnnnnnnnnnnnnnnnnnnnnnnnnnnnnnnnnnnnnnnnnnnnnnnnnnnnnnnnnnnnnnnnnnnnnnnnnnnnnnnnnnnnnnnnnnnnnnnnnnnnnnnnnnnnnnnnnnnnnnnnnnnnnnnnnnnnnnnnnnnnnnnnnnnnnnnnnnnnnnnnnnnnnnnnnnnnnnnnnnnnnnnnnnnnnnnnnnnnnnnnnnnnnnnnnnnnnnnnnnnnnnnnnnnnnnnnnnnnnnnnnnnnnnnnnnnnnnnnnnnnnnnnnnnnnnnnnnnnccccaaaaaacccnnnnnnnnnnnnnnnnnnnnnnnnnnnnnnnnnnnnnnnnnnnnnntcgtaaagttgcaagctgtttctttatgaatggatagatatcatgtctattggtaatttctttacctgttaaagtagg

SEQ ID NO: 232731 - DNA, 153 bp, Homo Sapiens
ttggatgatacttcactttgaagcccttatcctcgaagaaggagggtagggggaattgactggtttgcttactcatattggcctgtaacctgatttcctctctcgttagtgaaattggactcatactttctgcaggcaagtcccttcttgggg

SEQ ID NO: 232732 - DNA, 814 bp, Homo Sapiens
  misc_feature (94)..(664): n is a, c, g, or t
ttggatttataatagcctgcaagaaattaaatacttaggtaaatctaacaaaatatgcatgagatttatatgaggaaaacgacaaaactgattnnnnnnnnnnnnnnnnnnnnnnnnnnnnnnnnnnnnnnnnnnnnnnnnnnnnnnnnnnnnnnnnnnnnnnnnnnnnnnnnnnnnnnnnnnnnnnnnnnnnnnnnnnnnnnnnnnnnnnnnnnnnnnnnnnnnnnnnnnnnnnnnnnnnnnnnnnnnnnnnnnnnnnnnnnnnnnnnnnnnnnnnnnnnnnnnnnnnnnnnnnnnnnnnnnnnnnnnnnnnnnnnnnnnnnnnnnnnnnnnnnnnnnnnnnnnnnnnnnnnnnnnnnnnnnnnnnnnnnnnnnnnnnnnnnnnnnnnnnnnnnnnnnnnnnnnnnnnnnnnnnnnnnnnnnnnnnnnnnnnnnnnnnnnnnnnnnnnnnnnnnnnnnnnnnnnnnnnnnnnnnnnnnnnnnnnnnnnnnnnnnnnnnnnnnnnnnnnnnnnnnnnnnnnnnnnnnnnnnnnnnnnnnnnnnnnnnnnnnnnnnnnnnnnnnnnnnnnnnnnnnnnnnnnnnnnnnnnnnnnnnnnnnnnnnnnnnnnnnnnnnnnnnnnnnnnnnnnnnnnnnnnnnnnnnnnnnnnnnnnnnnnnnnnnnnagaaaatctagatgacctcacgtttgatggtgatgttttagatataatacaaaaggcatggggcatgaaaaaaataattgataagctgcacttcataaaattaaacatttctgccctgtgaaaggacacttttaagtccatgaaaagagg

SEQ ID NO: 232733 - DNA, 227 bp, Homo Sapiens
ttggggcttttctcccccctaacgattagctggacatttcagtttgatctcctgcgaccagactgatttatctttctctctattacaacccactaagggattctgagcgggaacgaagggctgtaatcctgtgacccagaaagatgtgttcccaatactaaagtaaagttcatcttattgttgtttcccacttaaatcatcccccggccttttgtattttctcttta

SEQ ID NO: 232734 - DNA, 910 bp, Homo Sapiens
  misc_feature (351)..(633): n is a, c, g, or t
ttggcacaaagatcaagctagattttccaaagcttacctcttagactcaactcagctaattatcagctgatttggcagatcactgtaggaatcactaaaataactccttatgcaactttaaaaatctagcatagcattttaaatattatatgagatgttatagcttcataaatttcctattccatttactttcatcatacttgaaatcagatcactgaaaaacctatgcaaaacatattctaagtgctattttttggtgggtacagattcacaatgtcactttgtttgcatatcatattttattattattagagcaatggctttatctgaaacatgaaagataaacttttnnnnnnnnnnnnnnnnnnnnnnnnnnnnnnnnnnnnnnnnnnnnnnnnnnnnnnnnnnnnnnnnnnnnnnnnnnnnnnnnnnnnnnnnnnnnnnnnnnnnnnnnnnnnnnnnnnnnnnnnnnnnnnnnnnnnnnnnnnnnnnnnnnnnnnnnnnnnnnnnnnnnnnnnnnnnnnnnnnnnnnnnnnnnnnnnnnnnnnnnnnnnnnnnnnnnnnnnnnnnnnnnnnnnnnnnnnnnnnnnnnnnnnnnnnnnnnnnnnnnnnnnnnnnnnnnnnnnnnnnnnngataaacttttttgaatacaaataccatatcattccattccactgcatttatatcagggcaagggcacatggagagtcaacatagaaatactgtaaaggaccatcagtgtggatggtttcagtcactagattgtaccaggtcggggaggaaccacatgttcctctaataccctctgcagccctgagaccctcttctccatttaggcctcacacaatttaaggttggtaatggagccaggatagaattccattgcagtctcccagccccttgttcaac

SEQ ID NO: 232735 - DNA, 927 bp, Homo Sapiens
  misc_feature (397)..(847): n is a, c, g, or t
cataaaaaccaactttgtacaaaaaagttggctagagcattggaaaggtgtggccagagatgaggctaaacaagtatgttcgtgtcagttagtgaagggccttaaataacacattctctctgatcattcctagtctgatttttctcagtctcggcccttctcacatccctaacccacccccaattctcagataaaaattttcaggtttcctgctatgtcatgtgttgatatatgccagagatttggtcatacagttttaccttagtgctgaaagagaccagacttcatctggttaattattaggaggcagctgctggcacatactctagccattccagactttcatggagagagcttgatctcagtgttttggaaaaacaaaaagtaactccttccnnnnnnnnnnnnnnnnnnnnnnnnnnnnnnnnnnnnnnnnnnnnnnnnnnnnnnnnnnnnnnnnnnnnnnnnnnnnnnnnnnnnnnnnnnnnnnnnnnnnnnnnnnnnnnnnnnnnnnnnnnnnnnnnnnnnnnnnnnnnnnnnnnnnnnnnnnnnnnnnnnnnnnnnnnnnnnnnnnnnnnnnnnnnnnnnnnnnnnnnnnnnnnnnnnnnnnnnnnnnnnnnnnnnnnnnnnnnnnnnnnnnnnnnnnnnnnnnnnnnnnnnnnnnnnnnnnnnnnnnnnnnnnnnnnnnnnnnnnnnnnnnnnnnnnnnnnnnnnnnnnnnnnnnnnnnnnnnnnnnnnnnnnnnnnnnnnnnnnnnnnnnnnnnnnnnnnnnnnnnnnnnnnnnnnnnnnnnnnnnnnnnnnnnnnnnnnnnnnnnnnnnnnnnnnnnnnnnnnnnnnnnnnnnnnntaaatcgcagctatagcacataaactaatctcagaacaaaagttgcagaagggtatatacgttatattaaaataaaaaat

SEQ ID NO: 232736 - DNA, 942 bp, Homo Sapiens
  misc_feature (48)..(735): n is a, c, g, or t
ttgggtttataacatagttagataatttaactatggatttttttcccnnnnnnnnnnnnnnnnnnnnnnnnnnnnnnnnnnnnnnnnnnnnnnnnnnnnnnnnnnnnnnnnnnnnnnnnnnnnnnnnnnnnnnnnnnnnnnnnnnnnnnnnnnnnnnnnnnnnnnnnnnnnnnnnnnnnnnnnnnnnnnnnnnnnnnnnnnnnnnnnnnnnnnnnnnnnnnnnnnnnnnnnnnnnnnnnnnnnnnnnnnnnnnnnnnnnnnnnnnnnnnnnnnnnnnnnnnnnnnnnnnnnnnnnnnnnnnnnnnnnnnnnnnnnnnnnnnnnnnnnnnnnnnnnnnnnnnnnnnnnnnnnnnnnnnnnnnnnnnnnnnnnnnnnnnnnnnnnnnnnnnnnnnnnnnnnnnnnnnnnnnnnnnnnnnnnnnnnnnnnnnnnnnnnnnnnnnnnnnnnnnnnnnnnnnnnnnnnnnnnnnnnnnnnnnnnnnnnnnnnnnnnnnnnnnnnnnnnnnnnnnnnnnnnnnnnnnnnnnnnnnnnnnnnnnnnnnnnnnnnnnnnnnnnnnnnnnnnnnnnnnnnnnnnnnnnnnnnnnnnnnnnnnnnnnnnnnnnnnnnnnnnnnnnnnnnnnnnnnnnnnnnnnnnnnnnnnnnnnnnnnnnnnnnnnnnnnnnnnnnnnnnnnnnnnnnnnnnnnnnnnnnnnnnnnnnnnnnnnnnnnnnnnnnnnnnnnnnnnnnnnnnnnnngtgcgttgttttatgattccccaccttttgatgaattaacaaccgtcccctgatcctgatcatacaggataaagatgcctctaccgtctgcatctctgggctgttcttgtcacatctccatttgttttattaaaaccataaactcttgaataatttctacatcattttgaatgtaatcagaattctgaaattatcaaagggaaaaaa

SEQ ID NO: 232737 - DNA, 547 bp, Homo Sapiens
  misc_feature (100)..(115): n is a, c, g, or t
  misc_feature (128)..(386): n is a, c, g, or t
ttggttcaagttcctgtgacttaagtaaaatctttaataagctagctttaaaattttggtaaggtgatattagaacagtcttatgaattgtcggcatacnnnnnnnnnnnnnnnngagatggagtttnnnnnnnnnnnnnnnnnnnnnnnnnnnnnnnnnnnnnnnnnnnnnnnnnnnnnnnnnnnnnnnnnnnnnnnnnnnnnnnnnnnnnnnnnnnnnnnnnnnnnnnnnnnnnnnnnnnnnnnnnnnnnnnnnnnnnnnnnnnnnnnnnnnnnnnnnnnnnnnnnnnnnnnnnnnnnnnnnnnnnnnnnnnnnnnnnnnnnnnnnnnnnnnnnnnnnnnnnnnnnnnnnnnnnnnnnnnnnnnnnnnnnnnnnnnnnnnnnnnactgtgcccagccagcatacatttctatttgcatttattgatcaagaaatttcattcttatccctgccaaataataaatggtgccaacatttggcataaagctcattaaactataaacccagcccaacaccgaatgatcttggcttgggtaagttttcctg

SEQ ID NO: 232738 - DNA, 574 bp, Homo Sapiens
  misc_feature (100)..(140): n is a, c, g, or t
  misc_feature (162)..(408): n is a, c, g, or t
tgagccactgtgcccggccatactttttaatttctaaggactctttatgctctcagctgctccttatttttgtaatcttctgttcaagtttcttggatannnnnnnnnnnnnnnnnnnnnnnnnnnnnnnnnnnnnnnnngagacagagtcttgcctgtcannnnnnnnnnnnnnnnnnnnnnnnnnnnnnnnnnnnnnnnnnnnnnnnnnnnnnnnnnnnnnnnnnnnnnnnnnnnnnnnnnnnnnnnnnnnnnnnnnnnnnnnnnnnnnnnnnnnnnnnnnnnnnnnnnnnnnnnnnnnnnnnnnnnnnnnnnnnnnnnnnnnnnnnnnnnnnnnnnnnnnnnnnnnnnnnnnnnnnnnnnnnnnnnnnnnnnnnnnnnnnnnnnnnnnnnnnnnnnnnnnnnnnnacaatgcctggctgatactttaattggaggtttttgttttgtttcagttacgaaactttcttctgctccttgaactcttcttttgtactgttttggcctgtctttcgtgttagtgactttatgtaaaaatctggtgattctcagccttgattcaaatgtaagacaa

SEQ ID NO: 232739 - DNA, 812 bp, Homo Sapiens
  misc_feature (250)..(498): n is a, c, g, or t
  misc_feature (501)..(524): n is a, c, g, or t
acattaaaaagccaactttgtacaaaaaagttgggacttagccccattaaggaaagatcaacatgtctgtgaacctgaaatggaatcaaaagagtgaggtgatgagtgaggcttaaagccagggatcgtttagagtccaatgtaagtgctagtcgctgagtttcattcctaagtagtaagggaagtaaatgtacttcatggacaccatttatataaagcttttcagaatatccagttcactttaaaaatnnnnnnnnnnnnnnnnnnnnnnnnnnnnnnnnnnnnnnnnnnnnnnnnnnnnnnnnnnnnnnnnnnnnnnnnnnnnnnnnnnnnnnnnnnnnnnnnnnnnnnnnnnnnnnnnnnnnnnnnnnnnnnnnnnnnnnnnnnnnnnnnnnnnnnnnnnnnnnnnnnnnnnnnnnnnnnnnnnnnnnnnnnnnnnnnnnnnnnnnnnnnnnnnnnnnnnnnnnnnnnnnnnnnnnnnnnnnnnnnnnnnnnnnnctnnnnnnnnnnnnnnnnnnnnnnnnttagactttccaagggcagcgtggaagcagtgaccagcctgagtaggcacgcacacttcttggggatagcctcctccatagcattcttagaaggtttggtaatgaccagtttttctgagtaagaccctatctacattattctaattagtaaccacctttcatctgctaaggtaaattttcacttcagaatattcctcttaagaccatgcaataactcttactgtttgttggtggaaaacccatctcattattttactggttaagggtaaactgaagatgattagataa

SEQ ID NO: 232740 - DNA, 267 bp, Homo Sapiens
ttgggtcagttcgggtttggaggatgggagtgacggctctccagcgccttcgattggggttaatcgaggactgtcactggggcttctcccccaaagttgggcgcgctgcgtcctccgtccccagacatcgaaagtccgggctcacctgggagtgcagcctgagtgtggaacgcgcttccccaccgctggcggggtaaccgtaccctattgtcttcctcccagtccgctgcgctcccgagccttcctcaattctttgatgggggaggg

SEQ ID NO: 232741 - DNA, 387 bp, Homo Sapiens
  misc_feature (63)..(301): n is a, c, g, or t
  misc_feature (307)..(319): n is a, c, g, or t
cttataaggcccactttgtacaaaaaagttggggggtatcacctttgaaaagccagggtggtnnnnnnnnnnnnnnnnnnnnnnnnnnnnnnnnnnnnnnnnnnnnnnnnnnnnnnnnnnnnnnnnnnnnnnnnnnnnnnnnnnnnnnnnnnnnnnnnnnnnnnnnnnnnnnnnnnnnnnnnnnnnnnnnnnnnnnnnnnnnnnnnnnnnnnnnnnnnnnnnnnnnnnnnnnnnnnnnnnnnnnnnnnnnnnnnnnnnnnnnnnnnnnnnnnnnnnnnnnnnnnnnnnnnnnnnnnnnnnnctttcnnnnnnnnnnnnncaagatggaatcttgctcttttcttctaagcaggagtgcagtggcgcaatctcattttcactgcaccc

SEQ ID NO: 232742 - DNA, 928 bp, Homo Sapiens
  misc_feature (85)..(173): n is a, c, g, or t
  misc_feature (176)..(463): n is a, c, g, or t
ttggtttttgtggtatttaaattgggtaatttgagtaaagagaataatgcttggccttccaaagtgctaggattatgggggtgannnnnnnnnnnnnnnnnnnnnnnnnnnnnnnnnnnnnnnnnnnnnnnnnnnnnnnnnnnnnnnnnnnnnnnnnnnnnnnnnnnnnnnnntgnnnnnnnnnnnnnnnnnnnnnnnnnnnnnnnnnnnnnnnnnnnnnnnnnnnnnnnnnnnnnnnnnnnnnnnnnnnnnnnnnnnnnnnnnnnnnnnnnnnnnnnnnnnnnnnnnnnnnnnnnnnnnnnnnnnnnnnnnnnnnnnnnnnnnnnnnnnnnnnnnnnnnnnnnnnnnnnnnnnnnnnnnnnnnnnnnnnnnnnnnnnnnnnnnnnnnnnnnnnnnnnnnnnnnnnnnnnnnnnnnnnnnnnnnnnnnnnnnnnnnnnnnnnnnnnnnnnnnnnnnnnnnnnncaaacgcaaaagaaggggattgggacttggggtcctctatgtgagggaggagtcttggctcttgccttccattgctttccctcctcacagcacgctggcagcgaaggggaactctaccctccagaatctcagccaccagtttcaggctctgcaccccctgaggacctggaggatgctggacccccaacactggacccctctgggacctcaatcactgaagaaatcctggaactgctgaatcagcgaggccttcgagatccagggccgtccacccatgacattcccaagttccccggagactcccaggtgcctggcgacagcgaaaccctcacattccaagccctgcccagccgggactcttcagaagaggacgaggaggaagaggaaggctggagatggatgaacggggccttccccactccacgtcctgaaaggctcgaaagttccattgcagctgaaatgccc

SEQ ID NO: 232743 - DNA, 583 bp, Homo Sapiens
  misc_feature (187)..(277): n is a, c, g, or t
ttggctcctgtgtaaaacagggcccaccatagtgcctacatcttagggtttggggaagaccaaatgggttgatgtcagtcaaggggaactgtgaatgtgggaacctgtggcttctgtacccagaggtgggtgagcagatgtggagggggtgggtggctgtgctgaccccatgctgtccccgtgctgnnnnnnnnnnnnnnnnnnnnnnnnnnnnnnnnnnnnnnnnnnnnnnnnnnnnnnnnnnnnnnnnnnnnnnnnnnnnnnnnnnnnnnnnnnntgctgtccccgtatcctgtcctccagcggcactggcggctgaggctgaaggccctgaagtgggttcggtggaggatcagaggagacagcagggctactttgtgcgcctcggctccctgtcagcacggatccgccacctggcctacgagcactctgtggggaaactgaggcagagcaaacaccgtgcccaggacaccctggcccagctgcaggagacgctggagctgatagaccacatgcagtgtggggtgacccccaccgccccggcccgccctgggaaggtgcacgagctgtggggggaatgggg

SEQ ID NO: 232744 - DNA, 912 bp, Homo Sapiens
  misc_feature (90)..(135): n is a, c, g, or t
  misc_feature (356)..(765): n is a, c, g, or t
ttggagcagcatcatggctggaaaggaccagagtgagtgagagccagcatcgctgtttctgatccaccagtgacctgctacacagaaatnnnnnnnnnnnnnnnnnnnnnnnnnnnnnnnnnnnnnnnnnnnnnntaaaagggcacgcagtggcatggaaccacgctgacacctatcactgttaaacgaggccaggacacagtctgatctccatctccactttttgttgttgttaaatgaaacggaagagcatctccctgcagaagtaaaccacgcacagagccctaatgacatcattgcttcagcccctggatccagccaggcctgaagcaggataaccctggacttcccagtgnnnnnnnnnnnnnnnnnnnnnnnnnnnnnnnnnnnnnnnnnnnnnnnnnnnnnnnnnnnnnnnnnnnnnnnnnnnnnnnnnnnnnnnnnnnnnnnnnnnnnnnnnnnnnnnnnnnnnnnnnnnnnnnnnnnnnnnnnnnnnnnnnnnnnnnnnnnnnnnnnnnnnnnnnnnnnnnnnnnnnnnnnnnnnnnnnnnnnnnnnnnnnnnnnnnnnnnnnnnnnnnnnnnnnnnnnnnnnnnnnnnnnnnnnnnnnnnnnnnnnnnnnnnnnnnnnnnnnnnnnnnnnnnnnnnnnnnnnnnnnnnnnnnnnnnnnnnnnnnnnnnnnnnnnnnnnnnnnnnnnnnnnnnnnnnnnnnnnnnnnnnnnnnnnnnnnnnnnnnnnnnnnnnnnnnnnnnnnnnnnnnnnnnnnngtgtgtccttacaggcatttccgagattactttcatgtttggtgaattgctagaaacgactcatatggctcaacatacagtcatacctatggctaggatttatcacagcaaaccgatacaaagagaaatagtaaatggaaaaaatgc

SEQ ID NO: 232745 - DNA, 481 bp, Homo Sapiens
  misc_feature (57)..(143): n is a, c, g, or t
  misc_feature (251)..(277): n is a, c, g, or t
  misc_feature (307)..(383): n is a, c, g, or t
gagcaatgcttttcctttaaaagccaactttgtacaaaaaagttggttcaagttttnnnnnnnnnnnnnnnnnnnnnnnnnnnnnnnnnnnnnnnnnnnnnnnnnnnnnnnnnnnnnnnnnnnnnnnnnnnnnnnnnnnnnnncgacccacacaaataatgtcagctttggtaaagaagcaaagataatagagtggagaaaatatagtctttttaacaaatgatgttggaacaactgggcatccacatgcnnnnnnnnnnnnnnnnnnnnnnnnnnntgaacctggatatagatattatgccagtcnnnnnnnnnnnnnnnnnnnnnnnnnnnnnnnnnnnnnnnnnnnnnnnnnnnnnnnnnnnnnnnnnnnnnnnnnnnnnagaaaatctgtgtgaccttgggtatggtggtgacttttttatacaacacaaagtaatgatgcatgaaagaaataatttctaaacaaattattaaaatt

SEQ ID NO: 232746 - DNA, 147 bp, Homo Sapiens
ttggcgtgactcctctgcacgacgtgtcttctcaatttactttttggattaagcgattcctggccaaggaacaaaaactttatcctccgattcccctgtggattccgatgaaaactgaaaataaaatcaggtacaactccattatga

SEQ ID NO: 232747 - DNA, 714 bp, Homo Sapiens
  misc_feature (118)..(147): n is a, c, g, or t
cccataaggccaactttgtacaaaaaagttggtgcagaatgtgcgtaggaatgattgcttgcattgtatgactatctgatttattttttatgaaataatttggtttctttctatagannnnnnnnnnnnnnnnnnnnnnnnnnnnnnggtgtgtgtgcttttctggtaggtggtagatttatgttagaagcatgcctgtgcatcctattaaatcattcattatgtatacatatatatatctgaatgaaaaagtgtttgattaattaatagttaatcttatgggcatatgtgacttacattgatagatcatgtctgtttctttttgttggttgtgttgtttattgatggccacccatgcttgtctgacttattgattgagtacgactgatgaatttatgaccgactgggcccgacttagtacctcctatatcaagagacacatgcctgcctgctcctgggaggaaagaaataaagaatgcattgattgaaggaaccaacacctacctaaccgtacacaacttgaatccaacaggctagccctcccacatgatgcaccccccccaaaacatacatagaacgaacagaaaaaagagtaattacttgaatatgtatatggatgcatgcatgacctaccacagacttcactcatggatcgctctgggcgaattatttctaccgacagagaggaagtaaggaaagaaatagcttgtgctt

SEQ ID NO: 232748 - DNA, 777 bp, Homo Sapiens
  misc_feature (107)..(150): n is a, c, g, or t
  misc_feature (154)..(170): n is a, c, g, or t
  misc_feature (192)..(440): n is a, c, g, or t
  misc_feature (454)..(484): n is a, c, g, or t
ttggtatgaacattccttgaacatataccacttagtcatccagacctttaatatctaaagtagtagtagtagtgattggaaagagaaagttttcagtgatggtgcannnnnnnnnnnnnnnnnnnnnnnnnnnnnnnnnnnnnnnnnnnncggnnnnnnnnnnnnnnnnngaaatggagtttcgctcttttnnnnnnnnnnnnnnnnnnnnnnnnnnnnnnnnnnnnnnnnnnnnnnnnnnnnnnnnnnnnnnnnnnnnnnnnnnnnnnnnnnnnnnnnnnnnnnnnnnnnnnnnnnnnnnnnnnnnnnnnnnnnnnnnnnnnnnnnnnnnnnnnnnnnnnnnnnnnnnnnnnnnnnnnnnnnnnnnnnnnnnnnnnnnnnnnnnnnnnnnnnnnnnnnnnnnnnnnnnnnnnnnnnnnnnnnnnnnnnnnnnnnnnnnnactgcacccggccnnnnnnnnnnnnnnnnnnnnnnnnnnnnnnntttcaaactcatgggcaaattcaagttcagatggtgcacttttcattgattaatgttatagcaaatgtcagtttgttttcttcagtttctgctgatggttttaactggcacaaaaagtatttattcaaccttacaaaactgtgtaagttgtattgtgatacagtttattgacttgtacagtattgtcattacaacccattcgagtatgcatgaatctgaagcagaacacccatttaagactggtgctgtataatataattcctacagatgtgggtccagagaataaaaactga

SEQ ID NO: 232749 - DNA, 298 bp, Homo Sapiens
  misc_feature (78)..(143): n is a, c, g, or t
atataagggcaactttgtacaaaaaagttggcttatacgttcgcaccgctgtcctggtgataagacagcaagggtccnnnnnnnnnnnnnnnnnnnnnnnnnnnnnnnnnnnnnnnnnnnnnnnnnnnnnnnnnnnnnnnnnntggtcccgggtcactggaacccccgccccccggggtcaaggcattggcctggcccagcctccccaggagctggggataacggcgtatgccaccgcgcccgggtaatttttgcatttttagtagaaaagggggttccccctggtgggcgagctggg

SEQ ID NO: 232750 - DNA, 998 bp, Homo Sapiens
  misc_feature (272)..(365): n is a, c, g, or t
  misc_feature (373)..(512): n is a, c, g, or t
  misc_feature (533)..(654): n is a, c, g, or t
  misc_feature (663)..(783): n is a, c, g, or t
  misc_feature (810)..(948): n is a, c, g, or t
ttgggaattagagaaaataaatcatacaaatggcaaaaagaaacattgaattcttttataatctggaagctaagtaaaactactaaattatttcataagataaagaagcaataaaaaattaataaatttaattccacaaaataacaaatgtttgcatgagatataaccatattattgtgtgtattaaaagtagcataaaaatctaaactactataaggaaagtcaaaagatgaaggaccaactaatagaaaatatttgtaactccaagggcnnnnnnnnnnnnnnnnnnnnnnnnnnnnnnnnnnnnnnnnnnnnnnnnnnnnnnnnnnnnnnnnnnnnnnnnnnnnnnnnnnnnnnnnnnnnnnatggaaannnnnnnnnnnnnnnnnnnnnnnnnnnnnnnnnnnnnnnnnnnnnnnnnnnnnnnnnnnnnnnnnnnnnnnnnnnnnnnnnnnnnnnnnnnnnnnnnnnnnnnnnnnnnnnnnnnnnnnnnnnnnnnnnnnnnnnnnnnncagaaacaaagaaatgcaaannnnnnnnnnnnnnnnnnnnnnnnnnnnnnnnnnnnnnnnnnnnnnnnnnnnnnnnnnnnnnnnnnnnnnnnnnnnnnnnnnnnnnnnnnnnnnnnnnnnnnnnnnnnnnnnnnnnnnnnnntccctttannnnnnnnnnnnnnnnnnnnnnnnnnnnnnnnnnnnnnnnnnnnnnnnnnnnnnnnnnnnnnnnnnnnnnnnnnnnnnnnnnnnnnnnnnnnnnnnnnnnnnnnnnnnnnnnnnnnnnnnntttgcagctgcacctccacaaatatgnnnnnnnnnnnnnnnnnnnnnnnnnnnnnnnnnnnnnnnnnnnnnnnnnnnnnnnnnnnnnnnnnnnnnnnnnnnnnnnnnnnnnnnnnnnnnnnnnnnnnnnnnnnnnnnnnnnnnnnnnnnnnnnnnnnnnnnnnnnatctctatgagctggtgtggactgatatctaggctatattgttaaggaaa

SEQ ID NO: 232751 - DNA, 635 bp, Homo Sapiens
  misc_feature (116)..(207): n is a, c, g, or t
  misc_feature (248)..(266): n is a, c, g, or t
  misc_feature (295)..(535): n is a, c, g, or t
ttggcttatatttgattactttattgccattttgtatacatttaaagggagtagcttataacagaatatactggtgaagagggtgccctctgcagtcagactaccaggattcaaannnnnnnnnnnnnnnnnnnnnnnnnnnnnnnnnnnnnnnnnnnnnnnnnnnnnnnnnnnnnnnnnnnnnnnnnnnnnnnnnnnnnnnnnnnnaagattaaataatgacatattcttcctcttcttcttcttcnnnnnnnnnnnnnnnnnnngtttgtttaaacagagtttcactcttatnnnnnnnnnnnnnnnnnnnnnnnnnnnnnnnnnnnnnnnnnnnnnnnnnnnnnnnnnnnnnnnnnnnnnnnnnnnnnnnnnnnnnnnnnnnnnnnnnnnnnnnnnnnnnnnnnnnnnnnnnnnnnnnnnnnnnnnnnnnnnnnnnnnnnnnnnnnnnnnnnnnnnnnnnnnnnnnnnnnnnnnnnnnnnnnnnnnnnnnnnnnnnnnnnnnnnnnnnnnnnnnnnnnnnnnnnnnnnnnnnataagccaccatgccaggccaataatgacatattcttaaagcctggcatgtaagtgctcagtaagcgttagcaattgttgttgtttaaaaccttcctgta

SEQ ID NO: 232752 - DNA, 880 bp, Homo Sapiens
  misc_feature (228)..(498): n is a, c, g, or t
  misc_feature (552)..(722): n is a, c, g, or t
ttcaactcagcatcaccaacaaaaagatataattctagtaaaattattagactttaaagaaaattttggggggttctagagaaaaggaaccttgtgacttaaaggggaaagacaattagattattgtcagactcttcaatagtaaggattggtgcagaagaaaaaagaataacatgtttaaaatactccaggaaagaaagtgtgagccaaggatttataaccaggaannnnnnnnnnnnnnnnnnnnnnnnnnnnnnnnnnnnnnnnnnnnnnnnnnnnnnnnnnnnnnnnnnnnnnnnnnnnnnnnnnnnnnnnnnnnnnnnnnnnnnnnnnnnnnnnnnnnnnnnnnnnnnnnnnnnnnnnnnnnnnnnnnnnnnnnnnnnnnnnnnnnnnnnnnnnnnnnnnnnnnnnnnnnnnnnnnnnnnnnnnnnnnnnnnnnnnnnnnnnnnnnnnnnnnnnnnnnnnnnnnnnnnnnnnnnnnnnnnnnnnnnnnnnnnnctaggaaatgcagctgagcaggcccatggtcaccacgattgggggctgcaggannnnnnnnnnnnnnnnnnnnnnnnnnnnnnnnnnnnnnnnnnnnnnnnnnnnnnnnnnnnnnnnnnnnnnnnnnnnnnnnnnnnnnnnnnnnnnnnnnnnnnnnnnnnnnnnnnnnnnnnnnnnnnnnnnnnnnnnnnnnnnnnnnnnnnnnnnnnnnnnnnnnnnnnnnntaaaattagcttttgagtgtaaaggatatgaactattatcaatatgcaagaattcagggactattgtttctaggagcccttcctgagaaatctactagaggatacaagtcacacaactaaaatgactacgaagacttcagcataaatatatagttact

SEQ ID NO: 232753 - DNA, 829 bp, Homo Sapiens
  misc_feature (63)..(71): n is a, c, g, or t
  misc_feature (343)..(445): n is a, c, g, or t
  misc_feature (454)..(498): n is a, c, g, or t
  misc_feature (511)..(775): n is a, c, g, or t
ttggcagctatttcattactttgaggtacagcttctgtagaaaggcaaaataaatgcttgggnnnnnnnnngtttcctattctcctccaaaagtttgcctttttctaaagcctgtttttatggaaacacaaacatttgtaaaattgaaagactgatataatgaaactttgtttctgtcacctaacttacgtgattcatattctgcgttgtatcttctatactcctgcccctctccctttctactgggtagattattaactattaatttatatagtagttttcaaacatattggttaaagtttataatgtttttaaatctctgccttatcagtaattatatctnnnnnnnnnnnnnnnnnnnnnnnnnnnnnnnnnnnnnnnnnnnnnnnnnnnnnnnnnnnnnnnnnnnnnnnnnnnnnnnnnnnnnnnnnnnnnnnnnnnnnnncctataccnnnnnnnnnnnnnnnnnnnnnnnnnnnnnnnnnnnnnnnnnnnnngagacagagtctnnnnnnnnnnnnnnnnnnnnnnnnnnnnnnnnnnnnnnnnnnnnnnnnnnnnnnnnnnnnnnnnnnnnnnnnnnnnnnnnnnnnnnnnnnnnnnnnnnnnnnnnnnnnnnnnnnnnnnnnnnnnnnnnnnnnnnnnnnnnnnnnnnnnnnnnnnnnnnnnnnnnnnnnnnnnnnnnnnnnnnnnnnnnnnnnnnnnnnnnnnnnnnnnnnnnnnnnnnnnnnnnnnnnnnnnnnnnnnnnnnnnnnnnnnnnnnnnnnnnnnnnnacccgcgcccagcctgtatatccatattactgtttttccgttgtgccttttctc

SEQ ID NO: 232754 - DNA, 222 bp, Homo Sapiens
ttgggcggaggatctaaaccctttctctgagagggaccctggacccctcccgctggaagatgaatccaaagcctccggccatgtggtgaagagactttctgccacactagactgatgtggctcctactccctgcttgctttgacggggatctggatcaagacctatttgtgttcctcaggacacaacatcatcaaccacctcttcacagatgactgacaccc

SEQ ID NO: 232755 - DNA, 838 bp, Homo Sapiens
  misc_feature (98)..(148): n is a, c, g, or t
  misc_feature (177)..(656): n is a, c, g, or t
ttggctcatattctccatttgcttgcaatgtggataattcttaaggtctgacagcctatttaatactgctgtttgaatttatgtctaatatgctattnnnnnnnnnnnnnnnnnnnnnnnnnnnnnnnnnnnnnnnnnnnnnnnnnnngtatttcccccaagtaaaaaatacgctcnnnnnnnnnnnnnnnnnnnnnnnnnnnnnnnnnnnnnnnnnnnnnnnnnnnnnnnnnnnnnnnnnnnnnnnnnnnnnnnnnnnnnnnnnnnnnnnnnnnnnnnnnnnnnnnnnnnnnnnnnnnnnnnnnnnnnnnnnnnnnnnnnnnnnnnnnnnnnnnnnnnnnnnnnnnnnnnnnnnnnnnnnnnnnnnnnnnnnnnnnnnnnnnnnnnnnnnnnnnnnnnnnnnnnnnnnnnnnnnnnnnnnnnnnnnnnnnnnnnnnnnnnnnnnnnnnnnnnnnnnnnnnnnnnnnnnnnnnnnnnnnnnnnnnnnnnnnnnnnnnnnnnnnnnnnnnnnnnnnnnnnnnnnnnnnnnnnnnnnnnnnnnnnnnnnnnnnnnnnnnnnnnnnnnnnnnnnnnnnnnnnnnnnnnnnnnnnnnnnnnnnnnnnnnnnnnnnnnnnnnnnnnnnnnnnnnnnnnnnnnnnnnnnnnnnnnnnnnnnntagcatgtcaagggatcccagaatagaatatagactgtgataaatggatctaaccatattacaaatacatgatatatacactgataggattggaaaaagatgagttgatttttgtaacttcagaaaacgatgttttgactggacactgagaggctaaagaaaaaactatacataaacaatgt

SEQ ID NO: 232756 - DNA, 598 bp, Homo Sapiens
  misc_feature (48)..(73): n is a, c, g, or t
  misc_feature (96)..(335): n is a, c, g, or t
gccaactttgtacaaaaaagttggattggattttgctgctgcttaggnnnnnnnnnnnnnnnnnnnnnnnnnngaaacagagtcttgctttttcannnnnnnnnnnnnnnnnnnnnnnnnnnnnnnnnnnnnnnnnnnnnnnnnnnnnnnnnnnnnnnnnnnnnnnnnnnnnnnnnnnnnnnnnnnnnnnnnnnnnnnnnnnnnnnnnnnnnnnnnnnnnnnnnnnnnnnnnnnnnnnnnnnnnnnnnnnnnnnnnnnnnnnnnnnnnnnnnnnnnnnnnnnnnnnnnnnnnnnnnnnnnnnnnnnnnnnnnnnnnnnnnnnnnnnnnnnnnnnnatgagccaccatacccttcattcctttttatgactcaaaatattatttgaatatgccacattttgtttatcaattgatggacacttggatattcatactttttggccattatgaataatgtgactatgaatttgcatgtacaaattttggtataaacccatatttttctttgtcttaggtatacacctaggagtataccctctagtgtatttaaacattttacagagttcagtgcacatctcctcaatcctgagccctatgaa

SEQ ID NO: 232757 - DNA, 815 bp, Homo Sapiens
  misc_feature (74)..(128): n is a, c, g, or t
  misc_feature (153)..(207): n is a, c, g, or t
  misc_feature (217)..(394): n is a, c, g, or t
  misc_feature (459)..(547): n is a, c, g, or t
  misc_feature (647)..(699): n is a, c, g, or t
ttggattcaacattagagagttagtacttaataaaagcattataaatgcaattactgtcaaaactcagtataannnnnnnnnnnnnnnnnnnnnnnnnnnnnnnnnnnnnnnnnnnnnnnnnnnnnnnaaatgagactacgtaatactctctnnnnnnnnnnnnnnnnnnnnnnnnnnnnnnnnnnnnnnnnnnnnnnnnnnnnnnngttcaagcannnnnnnnnnnnnnnnnnnnnnnnnnnnnnnnnnnnnnnnnnnnnnnnnnnnnnnnnnnnnnnnnnnnnnnnnnnnnnnnnnnnnnnnnnnnnnnnnnnnnnnnnnnnnnnnnnnnnnnnnnnnnnnnnnnnnnnnnnnnnnnnnnnnnnnnnnnnnnnnnnnnnnnnnnnnnnnnnntgagccaccatgcccggccgagaatgtctgttttttagtcggaaggtgaacttcatgaatgatcnnnnnnnnnnnnnnnnnnnnnnnnnnnnnnnnnnnnnnnnnnnnnnnnnnnnnnnnnnnnnnnnnnnnnnnnnnnnnnnnnnnnnnnnngcatcaaaatagagaggtatactgctgtgtttgaatcacagctccatcatttactagttatgtgacttgggcaaataacctctctttttcagctgtatcnnnnnnnnnnnnnnnnnnnnnnnnnnnnnnnnnnnnnnnnnnnnnnnnnnnnnaatccaaagtatgtaaagctcttagcatattagtaaacttaatgaatgttagctctttttattgttatactgttttatgtttaggaaagtagaaatattttatctaggatgcttaa

SEQ ID NO: 232758 - DNA, 343 bp, Homo Sapiens
ttggctcaaccgcaatatgctggagggcggcggggagcggcgcggagccccggcggtcgcctccgcccctgcccccaccgcgcattaatttaaaaatgcagcctcagccgcggccggctctcggcgcgctgacttgaagcccgccaggggtcataagctggatttgttctcgcacaagaagggtgctggcgccaagattgataatggcggtaaggccaataacacggcggccgccgggggtaataatgtgaagaaggcggccttgcccatcgtccccaaagtgctcattggccccaagtgagcgtgtcggcctgtcttatctgcctgcgtgggcttttcggtg

SEQ ID NO: 232759 - DNA, 191 bp, Homo Sapiens
  misc_feature (76)..(115): n is a, c, g, or t
aaattagatgagcaatgctttactataatagacaactttgtacaaaaaagttggatcattttttttccttaaactnnnnnnnnnnnnnnnnnnnnnnnnnnnnnnnnnnnnnnnntacctccctcactcccctctctgctgggtctgtgcactggggagcccgatcccctccgcagctgggacactccgaa

SEQ ID NO: 232760 - DNA, 414 bp, Homo Sapiens
  misc_feature (63)..(132): n is a, c, g, or t
  misc_feature (138)..(169): n is a, c, g, or t
  misc_feature (239)..(359): n is a, c, g, or t
gtacaaaaaagttggggcctctcaaacctgctaaggattacaggcataagccaccgcgcctgnnnnnnnnnnnnnnnnnnnnnnnnnnnnnnnnnnnnnnnnnnnnnnnnnnnnnnnnnnnnnnnnnnnnnnctgacnnnnnnnnnnnnnnnnnnnnnnnnnnnnnnnnctctggaaaaccctatggtctactccagttcatgaagcctggacctgagtcaaagtgtgagatactggcnnnnnnnnnnnnnnnnnnnnnnnnnnnnnnnnnnnnnnnnnnnnnnnnnnnnnnnnnnnnnnnnnnnnnnnnnnnnnnnnnnnnnnnnnnnnnnnnnnnnnnnnnnnnnnnnnnnnnnnnntaatttaacacggaaaagaaagaaagtgggaggtattggtgttaagttcattctt

SEQ ID NO: 232761 - DNA, 645 bp, Homo Sapiens
  misc_feature (102)..(142): n is a, c, g, or t
  misc_feature (163)..(245): n is a, c, g, or t
  misc_feature (269)..(551): n is a, c, g, or t
cttatagaacaactttgtacaaaaaagttggataaacagtctgcctgattgttgggaaaatttgatgatgagctttatatcggctggtgttgctgaattaannnnnnnnnnnnnnnnnnnnnnnnnnnnnnnnnnnnnnnnnagacggaatttcactcttaannnnnnnnnnnnnnnnnnnnnnnnnnnnnnnnnnnnnnnnnnnnnnnnnnnnnnnnnnnnnnnnnnnnnnnnnnnnnnnnnnngagagaagaatagagtgatttagnnnnnnnnnnnnnnnnnnnnnnnnnnnnnnnnnnnnnnnnnnnnnnnnnnnnnnnnnnnnnnnnnnnnnnnnnnnnnnnnnnnnnnnnnnnnnnnnnnnnnnnnnnnnnnnnnnnnnnnnnnnnnnnnnnnnnnnnnnnnnnnnnnnnnnnnnnnnnnnnnnnnnnnnnnnnnnnnnnnnnnnnnnnnnnnnnnnnnnnnnnnnnnnnnnnnnnnnnnnnnnnnnnnnnnnnnnnnnnnnnnnnnnnnnnnnnnnnnnnnnnnnnnnnnnnnnnnnnnnnnnnttgggtaaaaatagaatgtataactttcagccactagaagggggagaacaatttaaaaaataaatttcttggccatggctcatccctgtagtct

SEQ ID NO: 232762 - DNA, 403 bp, Homo Sapiens
  misc_feature (72)..(314): n is a, c, g, or t
aaaagactttgtacaaaaaagttgggtgttcactagcaacctcaaacagacaccatggtgcacctgactccnnnnnnnnnnnnnnnnnnnnnnnnnnnnnnnnnnnnnnnnnnnnnnnnnnnnnnnnnnnnnnnnnnnnnnnnnnnnnnnnnnnnnnnnnnnnnnnnnnnnnnnnnnnnnnnnnnnnnnnnnnnnnnnnnnnnnnnnnnnnnnnnnnnnnnnnnnnnnnnnnnnnnnnnnnnnnnnnnnnnnnnnnnnnnnnnnnnnnnnnnnnnnnnnnnnnnnnnnnnnnnnnnnnnnnnnnnnnnnnnnnngacactgaatgagctgtttttgtttataagctgcacgtggatcctgagaacttctggctcccgccccaacgtgctggtctgtgtgctgg

SEQ ID NO: 232763 - DNA, 369 bp, Homo Sapiens
acttaaatagccaactttgtacaaaaaagttggcgcaaggccctcttaagggcacctgaaataaagacgacctatggagaaactgccgcctctgatctgggaaaatggtggctttgcgttcaccaaggaggacctcactaatttattctacctatcgctggcaaataacgtgccccctgccacccgtgctggtgccattacaccatgtgaagtcactgtgccagcccacaatactggtctggaccccgataatacctccattctccaggatttatgaatcatcactaaaatctcacttggcgccatttaaatcatgagtgatgctcagctgatcaagattggatacaatatgggaaccagtgaagccac

SEQ ID NO: 232764 - DNA, 648 bp, Homo Sapiens
  misc_feature (180)..(384): n is a, c, g, or t
actttataaaagccaactttgtacaaaaaagttggggtactttttttcagtaattcgtatattcatgttttgtttgcttaattcttaatctgaattaatggcttaaatccagtgtcttaatcatggaacagtgtagttaggaaaaatacttggaaaatcagtcttacagattgcagtctnnnnnnnnnnnnnnnnnnnnnnnnnnnnnnnnnnnnnnnnnnnnnnnnnnnnnnnnnnnnnnnnnnnnnnnnnnnnnnnnnnnnnnnnnnnnnnnnnnnnnnnnnnnnnnnnnnnnnnnnnnnnnnnnnnnnnnnnnnnnnnnnnnnnnnnnnnnnnnnnnnnnnnnnnnnnnnnnnnnnnnnnnnnnnnnnnnnnnnnnnnnnncgagccactgtgcccagcctattttttatttttatgggtacctattagatgtatatattaatggggtacataagatattttgatagagacatacaatgtgtaacaatcatgtcagggtaaatggagtatccgtcagctcaagcactgatgctttcttcatgtttcaaacaatccagttatactcttttatttatttttaaatgtataataaatttgtagtcactccattgtcctatcaaatattagattttattaaattccatc

SEQ ID NO: 232765 - DNA, 417 bp, Homo Sapiens
ttgggttccttttgctttctgattcttccttccccctgcctctgggtcacagaaagactcaaacctcacaactacccttgtgacattaaaagattattttaaaacactacatggcttcaaaatttcctggaaaatatttttctaaacttgttttgtggaaacctaattggagttcactttcctttccgtggagctcatgacatgtggacagcaccttcaatggtgatgaagaaaatgttgattcctgactctctcgctctcttgaagcctcctccactttgtccgtgggccagccatccaccatcacctccccccttttgggagccccgcctctgtttccattggctttggaaaataagttcttggtcactaaggatatggccctacataaattaattataaaattcttgcttgcag

SEQ ID NO: 232766 - DNA, 869 bp, Homo Sapiens
  misc_feature (106)..(674): n is a, c, g, or t
ggcagcttggtcgctcctctgatggtggggcgtgtgctgttctcgttattgtcaagtgtctgagttattctgcagtgaatgcttcttgtaaccttctaaaatcgannnnnnnnnnnnnnnnnnnnnnnnnnnnnnnnnnnnnnnnnnnnnnnnnnnnnnnnnnnnnnnnnnnnnnnnnnnnnnnnnnnnnnnnnnnnnnnnnnnnnnnnnnnnnnnnnnnnnnnnnnnnnnnnnnnnnnnnnnnnnnnnnnnnnnnnnnnnnnnnnnnnnnnnnnnnnnnnnnnnnnnnnnnnnnnnnnnnnnnnnnnnnnnnnnnnnnnnnnnnnnnnnnnnnnnnnnnnnnnnnnnnnnnnnnnnnnnnnnnnnnnnnnnnnnnnnnnnnnnnnnnnnnnnnnnnnnnnnnnnnnnnnnnnnnnnnnnnnnnnnnnnnnnnnnnnnnnnnnnnnnnnnnnnnnnnnnnnnnnnnnnnnnnnnnnnnnnnnnnnnnnnnnnnnnnnnnnnnnnnnnnnnnnnnnnnnnnnnnnnnnnnnnnnnnnnnnnnnnnnnnnnnnnnnnnnnnnnnnnnnnnnnnnnnnnnnnnnnnnnnnnnnnnnnnnnnnnnnnnnnnnnnnnnnnnnnnnnnnnnnnnnnnnnnnnnnnnnnnnnnnnnnnnnnnnnnnnnnnnnnnnnnnnnngtggattggcagggttgtgtttgggggtggacattcaaacaaacagtcctctgttacaagaactgaaaatagctagttaaaggggaagtactaccctgtttttctgcttaggaaagacagaaataagaaatgggatgtaactgcagtgaaaaatgggctacggtgccgaaagggttccaacgtctcaccgggtgg

SEQ ID NO: 232767 - DNA, 908 bp, Homo Sapiens
  misc_feature (50)..(237): n is a, c, g, or t
  misc_feature (348)..(678): n is a, c, g, or t
ttgggtaatctgtggtgacataatgagaataatatttgcttggggtaggnnnnnnnnnnnnnnnnnnnnnnnnnnnnnnnnnnnnnnnnnnnnnnnnnnnnnnnnnnnnnnnnnnnnnnnnnnnnnnnnnnnnnnnnnnnnnnnnnnnnnnnnnnnnnnnnnnnnnnnnnnnnnnnnnnnnnnnnnnnnnnnnnnnnnnnnnnnnnnnnnnnnnnnnnnnnnnnnnnnnnnnnnnnnagaaaaacacacaaaagaattgcaatcaaatactgaattttagcaaaaataattttataaaataagcgaattttacaaaaataaggcatattaaacttattgtgaaaagtnnnnnnnnnnnnnnnnnnnnnnnnnnnnnnnnnnnnnnnnnnnnnnnnnnnnnnnnnnnnnnnnnnnnnnnnnnnnnnnnnnnnnnnnnnnnnnnnnnnnnnnnnnnnnnnnnnnnnnnnnnnnnnnnnnnnnnnnnnnnnnnnnnnnnnnnnnnnnnnnnnnnnnnnnnnnnnnnnnnnnnnnnnnnnnnnnnnnnnnnnnnnnnnnnnnnnnnnnnnnnnnnnnnnnnnnnnnnnnnnnnnnnnnnnnnnnnnnnnnnnnnnnnnnnnnnnnnnnnnnnnnnnnnnnnnnnnnnnnnnnnnnnnnnnnnnnnnnnnnnnnnnnnnnnnntataagcacatatattcatgactgtgtatcacggatatatttcttacatggacagttgttttgggagagcaatttggaatatccagtactttatgactcagtagttcaacatccaagaaactttttctacatgcgcactcgaaacaactacaagaatgtttacaagagtattgttttaatggagaagaaaaagatggaaagaaaattaaatttccatttactagagaata

SEQ ID NO: 232768 - DNA, 435 bp, Homo Sapiens
  misc_feature (160)..(223): n is a, c, g, or t
ttggagtcatttacccgtcaaactgaatattaaagaatgtaaaggtccaagtaaaatgaaagtatgatttatgttgatgtgtaagttcaccgcacatcccactttttagcagaactcatggatgtgcagtttgagccaatgccattatgattacatagannnnnnnnnnnnnnnnnnnnnnnnnnnnnnnnnnnnnnnnnnnnnnnnnnnnnnnnnnnnnnnnctaatccaaaagaaaattgagcttattgcaaatggtctggttttagaaatatgtgtaattggaaaagggcttttgtttgagtgtgagtttgtgtgcctttttaacttgctgacctacccctatttgggagcgatggggagatatttacattccgaagtttgtatacttgagctattggactttactgatgtatatattaatacctcgtattc

SEQ ID NO: 232769 - DNA, 535 bp, Homo Sapiens
  misc_feature (95)..(134): n is a, c, g, or t
ttggatattttgttccttccatatcttatcgttaagttttgtattatcttaatctttggtttgcgatgtaatttgagtttgcctttgttctcccnnnnnnnnnnnnnnnnnnnnnnnnnnnnnnnnnnnnnnnntttttcatcatgtcggtgaccatctccttagtggagaacaaatccccatcttcctgtccggggcttttctttttttgggaaagttggaacctaaaccaggctctctctgctgtgcttcatcatcttagtccgcagacttttcaaatgtgggtttattctattgagggcgcggaacttatggcccacccactgtggaaaacctgtttaaggaattcttagcccgcgcgtgcgtgaatgggtgatgtgtgcctggaggccatgcttttgctgcaaatatgaggtctggccctttccttaatttcggcccatctcttcctttcctaaaaggaataattttaccaatctaatatcaatagaaagaatgctaatgaccagcttgctgttaataaatacatgggaaa

SEQ ID NO: 232770 - DNA, 286 bp, Homo Sapiens
ttggcttgcttatcacataaaaaaacccagcccatgacacctaaaaggggccctctcaaccctcctaaggagctcgggcctacccaggtgatttcacctccactccataacgctcctcatactaggcctactaaccaaggcactaggcatgtcctaatgaaggcgcggtgtaactaaagaaagcacataccagggccaccacgctccgcctgtctaaaaaggccttcaattccggaaaagaatatttattacctcagaattttttttcttccccagagttttctga

SEQ ID NO: 232771 - DNA, 216 bp, Homo Sapiens
ttggctttaagttgcactagctgctcgtgtgctgcccaaaaggaatcgcccgatgagggtactgcatctggcttttattaaatgggatacccgcggcgtttaggcctttcccgcattgcttctgttcccagatgtaattgtgggattattgacccgactttcaatccattataaaagtcatgaatgtctggaatcaacttagtgatcttcaccttg

SEQ ID NO: 232772 - DNA, 580 bp, Homo Sapiens
  misc_feature (59)..(479): n is a, c, g, or t
ttggtaattccccaacccttaagagtggaatacatgtaatgccttgctttccaacatgnnnnnnnnnnnnnnnnnnnnnnnnnnnnnnnnnnnnnnnnnnnnnnnnnnnnnnnnnnnnnnnnnnnnnnnnnnnnnnnnnnnnnnnnnnnnnnnnnnnnnnnnnnnnnnnnnnnnnnnnnnnnnnnnnnnnnnnnnnnnnnnnnnnnnnnnnnnnnnnnnnnnnnnnnnnnnnnnnnnnnnnnnnnnnnnnnnnnnnnnnnnnnnnnnnnnnnnnnnnnnnnnnnnnnnnnnnnnnnnnnnnnnnnnnnnnnnnnnnnnnnnnnnnnnnnnnnnnnnnnnnnnnnnnnnnnnnnnnnnnnnnnnnnnnnnnnnnnnnnnnnnnnnnnnnnnnnnnnnnnnnnnnnnnnnnnnnnnnnnnnnnnnnnnnnnnnnnnnnnnnnnnnnnnnnnnnnnnnnnnnnnnnnnnnnnnnnnnnnnnnaattaaaatttttaaaaattagctaagtgttgcacatgcctgtagtcctggctacttgggatgctgaagcaggaggattgcttgtgcccagccaggggttc

SEQ ID NO: 232773 - DNA, 595 bp, Homo Sapiens
tgtacaaagaaggcggacggaaaacggcacaaggtattaataaccataaaataaattagaatttggctaaaaaaccgaacaccttataccggaaaacaccacctaacccggccccaaggatccaccacctagaagggaatagtggaccggaatccaacgaccggcctccaaatggtcctccggtggaggcggccacctaatccaacggacggcctccaaatggtcctccccaaccggatccgcgtaaccaggctactccgcaatggcctccatggcggaataaatccttaaaagaaattacggaaagaagtggcgagctccttttttgtgtgacaaattaaaacctccaaccaatcctaatcggctgtggcctagtcctggaaaatccaccggctcccagaaccatttccccactcctataacctttccccctaccaggtcggtccggctcctccggaatttccggctccatacctaccaaacgtggaaaaggttccggaatttccaacggaacgacctggcgacgggctggggattaggagcctggactttaaaatcccccaaccatcaggttatggccgttttgagaggcctt

SEQ ID NO: 232774 - DNA, 646 bp, Homo Sapiens
aaaaaaaaccgggtccccctatgttgcccgggcgggtctcaaattgtgcccacacaatcctcccgcctcaagagatcccaaggtgctgggattataggcatgacccactgcccctggccttcttgctttttttaaggggtgcatagtaatctctgtgacaaatacctcataatttatttaaccagtcgccttttctattaatggaacttttccattaatggacatttaggttccaaatcttaaatacctccttatatacatgtataaatgtgtgactatgtcaaaggacaataaaattcgcgggtcaaaactatatatttttgataaatattgccaaatttgcctccaatcttttttttaagtcctgccctcttgaaacggtaaagcctccaagtcttaatttttattcccaaaaaagatgtaattggtaagcttaaaaagatgccattaaaatacaagctctctcgaattaatgaaaatagtgcgccagatgtggtggctctcacgtgttaatctatatcttgagaaatccagccgcgaggagtagtctacgcgcaagaattggggcccgtcctggacacaattgagacccctctctcaagataaaataaaaaacttagctgatttgatgccccaccctgtggcc

SEQ ID NO: 232775 - DNA, 585 bp, Homo Sapiens
  misc_feature (194)..(504): n is a, c, g, or t
ttggcaaagataaccatcacataattcagtagtaaacaacagtaacaacaatgacaacaaagcctatggttatgtctataatcttttggtgcaaaaccttcttgtcttgtctttttctgcttatcaccaccctctttcttattttcaccaatctggagatgcatatacaaaaacattttaaaatccactttttnnnnnnnnnnnnnnnnnnnnnnnnnnnnnnnnnnnnnnnnnnnnnnnnnnnnnnnnnnnnnnnnnnnnnnnnnnnnnnnnnnnnnnnnnnnnnnnnnnnnnnnnnnnnnnnnnnnnnnnnnnnnnnnnnnnnnnnnnnnnnnnnnnnnnnnnnnnnnnnnnnnnnnnnnnnnnnnnnnnnnnnnnnnnnnnnnnnnnnnnnnnnnnnnnnnnnnnnnnnnnnnnnnnnnnnnnnnnnnnnnnnnnnnnnnnnnnnnnnnnnnnnnnnnnnnnnnnnnnnnnnnnnnnnnnnnnnnnnnnnnnnnnnnnnnntccgcttcgtttctggtcatggtgtgtggatgcgggcggtgttgttggttctgtgacaatgcttttaaaactacaaaaaca

SEQ ID NO: 232776 - DNA, 664 bp, Homo Sapiens
  misc_feature (192)..(212): n is a, c, g, or t
  misc_feature (234)..(277): n is a, c, g, or t
  misc_feature (343)..(355): n is a, c, g, or t
  misc_feature (362)..(612): n is a, c, g, or t
ttggggattacatgtgtaagcctctgtgtccggcctctgtcttgttttctgccaagtcctcagggcctggatagggatcattgttggtttggtctgagttttttgtgttttaaaaaactgtggtaagatatacctaattgaagtttttattttttatggaggcataacatatctagaataaggtacacagannnnnnnnnnnnnnnnnnnnngaggtggagttttgctcatgtnnnnnnnnnnnnnnnnnnnnnnnnnnnnnnnnnnnnnnnnnnnncaaaacaaaacagttttccacatacacagcactattgtaaccactgcccaaatcaacttcattgannnnnnnnnnnnngaaacannnnnnnnnnnnnnnnnnnnnnnnnnnnnnnnnnnnnnnnnnnnnnnnnnnnnnnnnnnnnnnnnnnnnnnnnnnnnnnnnnnnnnnnnnnnnnnnnnnnnnnnnnnnnnnnnnnnnnnnnnnnnnnnnnnnnnnnnnnnnnnnnnnnnnnnnnnnnnnnnnnnnnnnnnnnnnnnnnnnnnnnnnnnnnnnnnnnnnnnnnnnnnnnnnnnnnnnnnnnnnnnnnnnnnnnnnnnnnnnnnnnnnnnnnngtgtgagctactgtgcctggcctggtttttcaattgaagtgggggaatgggg

SEQ ID NO: 232777 - DNA, 307 bp, Homo Sapiens
ttgggaccgcgtgacggccgctgatcgtgcccctgtgggggaggtcggcggcggaggagtatcccggagtccgaggctctgccgccgctcctgcggggccatgatccgcttctacttccggggttgcgggcagcccaaataacccgggcccggggggctggcgctgactgatggtgtggtgcgatgactgctatatcatggtgcattgccgccggtatctccccctgctggggccaagggccatgggtgactaccttggcgcaggaatgaccgctgatgaagacatcccctgtgcccttgcgcaccc

SEQ ID NO: 232778 - DNA, 565 bp, Homo Sapiens
  misc_feature (89)..(374): n is a, c, g, or t
  misc_feature (496)..(514): n is a, c, g, or t
ttgggttctttctcttcaagagtgtgtcttagctatttttttgccctttggtctttcatattccagagaatatattaaatatcccaagnnnnnnnnnnnnnnnnnnnnnnnnnnnnnnnnnnnnnnnnnnnnnnnnnnnnnnnnnnnnnnnnnnnnnnnnnnnnnnnnnnnnnnnnnnnnnnnnnnnnnnnnnnnnnnnnnnnnnnnnnnnnnnnnnnnnnnnnnnnnnnnnnnnnnnnnnnnnnnnnnnnnnnnnnnnnnnnnnnnnnnnnnnnnnnnnnnnnnnnnnnnnnnnnnnnnnnnnnnnnnnnnnnnnnnnnnnnnnnnnnnnnnnnnnnnnnnnnnnnnnnnnnnnnnnnnnnnnnnnnnnnnnncagaaatatccctctttatccttgatagtattttttaggcctttattagttttttcatgttacatcttttagattattttctttttaatctatctgtgactatatttaaagtcaattcttgnnnnnnnnnnnnnnnnnnngtgggtaacggggtctcactaagttgcccaagcagatctcaaactcctggg

SEQ ID NO: 232779 - DNA, 463 bp, Homo Sapiens
  misc_feature (70)..(205): n is a, c, g, or t
  misc_feature (210)..(405): n is a, c, g, or t
tgggttcaagcgattctctggccctagcctccctagtagctggggttgcaggtgcctgccaccacactgnnnnnnnnnnnnnnnnnnnnnnnnnnnnnnnnnnnnnnnnnnnnnnnnnnnnnnnnnnnnnnnnnnnnnnnnnnnnnnnnnnnnnnnnnnnnnnnnnnnnnnnnnnnnnnnnnnnnnnnnnnnnnnnnnnnnnnnngacannnnnnnnnnnnnnnnnnnnnnnnnnnnnnnnnnnnnnnnnnnnnnnnnnnnnnnnnnnnnnnnnnnnnnnnnnnnnnnnnnnnnnnnnnnnnnnnnnnnnnnnnnnnnnnnnnnnnnnnnnnnnnnnnnnnnnnnnnnnnnnnnnnnnnnnnnnnnnnnnnnnnnnnnnnnnnnnnnnnnnnnnnnnnnnnnnnntacctgagagcgtggttgaaaacacagattgctggggcttacaccaggagctccaggg

SEQ ID NO: 232780 - DNA, 519 bp, Homo Sapiens
ttgggtggaaagtctcccacttagtatttataattcattcacagaccgcacacttacttataaatccatccccctgcgggcgggccttacctccttcaacttatacccacccttaacaaataagtatgcacgctctttatgcatgcaatcaacagacgggtggtcatgcttgaccaaaccaaccttcgtttggccttccactatatattgattgtttattgaatgatcaatgttcgttcaaagaaggagtttgtctttgcttgccattctgtcagatttaattgacggagggtgacaaaaaaagaacgaactgattgtactcactctgtgtgtgtttttttgcttgctatctatccctaccagaaataactttcattacttataactataattaaatgtatggaaggaaaggaatgattacctaaatatatctccctaccgaacgagctcgattgatcctccccccccaacctactaaccagcaccgaccgcaagcgcgtgcccctgactgactggcta

SEQ ID NO: 232781 - DNA, 772 bp, Homo Sapiens
  misc_feature (57)..(231): n is a, c, g, or t
  misc_feature (236)..(516): n is a, c, g, or t
  misc_feature (559)..(666): n is a, c, g, or t
ttggaagatcttaacacaatttttagaaaatgatatgcaaatggtaaataagatgcnnnnnnnnnnnnnnnnnnnnnnnnnnnnnnnnnnnnnnnnnnnnnnnnnnnnnnnnnnnnnnnnnnnnnnnnnnnnnnnnnnnnnnnnnnnnnnnnnnnnnnnnnnnnnnnnnnnnnnnnnnnnnnnnnnnnnnnnnnnnnnnnnnnnnnnnnnnnnnnnnnnnnnnnnnnnnnnactgnnnnnnnnnnnnnnnnnnnnnnnnnnnnnnnnnnnnnnnnnnnnnnnnnnnnnnnnnnnnnnnnnnnnnnnnnnnnnnnnnnnnnnnnnnnnnnnnnnnnnnnnnnnnnnnnnnnnnnnnnnnnnnnnnnnnnnnnnnnnnnnnnnnnnnnnnnnnnnnnnnnnnnnnnnnnnnnnnnnnnnnnnnnnnnnnnnnnnnnnnnnnnnnnnnnnnnnnnnnnnnnnnnnnnnnnnnnnnnnnnnnnnnnnnnnnnnnnnnnnnnnnnnnnnnnnnnnnnnnnncagtctggcattatcttgtacatctgaatataacacaaggtcnnnnnnnnnnnnnnnnnnnnnnnnnnnnnnnnnnnnnnnnnnnnnnnnnnnnnnnnnnnnnnnnnnnnnnnnnnnnnnnnnnnnnnnnnnnnnnnnnnnnnnnnnnnntattcctgtcatgatcactgacaggaaagtttcaaaaacaagcaaaactaagtatctaagatgcctacagacgaggtaaaaatagtttctaaaacagctaatggaa

SEQ ID NO: 232782 - DNA, 1079 bp, Homo Sapiens
  misc_feature (298)..(330): n is a, c, g, or t
  misc_feature (885)..(906): n is a, c, g, or t
ttggcctttactaacatgagcacaaggtgagattttatctcctcagatgagatctcgagacagctgtgttctcctgtctcctacattgtgtggccgtgtgctactgtgttttgttgagattttataatgtgagctatagtggtatggggagatatatctccatgtgttgcgcatctctattgcgcatatcttatatgcgcagcacgagagatagtgtctcatactcctctctcattctcctgtgttgtgatactgacacagagagatctctctataggagatatgagagccccagacnnnnnnnnnnnnnnnnnnnnnnnnnnnnnnnnnaaccctgtgtatgggggtacacttttacactgcgttctcaatatattctcttactataataaggagtgggtatcatttacactatctcacgtataattataccccactatggctctccatataccccggtatatttacactagattatgtagtattctgctgtccctcacttatatgtagtactcacacccatattggctcgtgagatgtgtgagtatcataaaggtatcacatatatatgcgtcagatgtagaaacacttatatctctcgagatatataaaagattgaatatatataaacaacatcacgtatactctgagataaccgtagagatcacttctctgtgcgctatactcaagtgtcactagatgaccatacacactggcctgcgcttgtgcttagtaaataaggaattgacatatatatactctttttctataccagccttaaaatactacactggatattcctggtgatagaacgaagtgctctacaacgcgtggctgacgatgccctgtgtaaaataaataaataactgcgcttaaacttacacnnnnnnnnnnnnnnnnnnnnnnaagggctaaaaagaaattcttttcatccaaaaaattaaatcggggacctttcctttctggtaaagattccccattaaacctagggaaattggcgagtttattgttttacgctttttcatccggccggaaacttaaaaaattattcccgggctaaggtcttgtattgtaaaaga

SEQ ID NO: 232783 - DNA, 563 bp, Homo Sapiens
ttggttatctagagtgaaagtaaattaattcatccaacagatactcgtccggcaagttttcttttcttaaaaagcatgactgtgcgtgcccgcttgaatacataccaactgctagacaaagtattaacaaacaaaaatcatccatggctgacttacttcacccatggatggattttgactgaatctattgactgtcctgcatcaatgcatggcccgccaactcacacaccaccattaactcgtactgctggaccttcctttttaacaaaccgggagcgaactgacttccataaagttcctaccggtgtgcccccgccttttgacttacacagtgtctgacaaaaaacagggatgacttacaatgaacggtttgggatccataatgaacgaacagccactctctcatacatcaaacggggaggccaccttgtctccctgggagaggtcccttgtctgacgaacttttgattgatgactcagacaaattgaattgcttgaatagttaatcacgcaaattcattaaacattacttccttatattcactcagctagctaactcttac

SEQ ID NO: 232784 - DNA, 473 bp, Homo Sapiens
  misc_feature (257)..(320): n is a, c, g, or t
ttgtccccaacaacagaaagggagtgaagcggcccccacgcctgcaccccacgccgtcccccgccccggccgtggaggtggcccctgcctgatcttcctactctccttcctttgaagacaacctgaccctgctctccccgtgcctggaggtggagttgcagcggcagaaggaggcggagaagcgggagcggcacctggccctgcccgccaaggaccccgcccccgactccgagtccacattccaggacctgtgccannnnnnnnnnnnnnnnnnnnnnnnnnnnnnnnnnnnnnnnnnnnnnnnnnnnnnnnnnnnnnnngatgcctatgtctgtcccgcgcccgccgccctggccaacaaagagacgaagaaggagcagcagcgggagaaggcgaaggatgtgcagaggctgcgggtagacccggccgcgttgcccgcggtccggctccggcaccagtagctgttccggctg

SEQ ID NO: 232785 - DNA, 564 bp, Homo Sapiens
  misc_feature (47)..(340): n is a, c, g, or t
aaagaccaactttgtacaaaaaagttggctactttcagtattcaatnnnnnnnnnnnnnnnnnnnnnnnnnnnnnnnnnnnnnnnnnnnnnnnnnnnnnnnnnnnnnnnnnnnnnnnnnnnnnnnnnnnnnnnnnnnnnnnnnnnnnnnnnnnnnnnnnnnnnnnnnnnnnnnnnnnnnnnnnnnnnnnnnnnnnnnnnnnnnnnnnnnnnnnnnnnnnnnnnnnnnnnnnnnnnnnnnnnnnnnnnnnnnnnnnnnnnnnnnnnnnnnnnnnnnnnnnnnnnnnnnnnnnnnnnnnnnnnnnnnnnnnnnnnnnnnnnnnnnnnnnnnnnnnnnnnnnnttaattaataaataacacaaacttatttaacagtttactataaaataggctttgtgtcagatgattctgcccaactgtaagctgctggcagtgtaaatgttctgagcacgtgtaagccaggctaggtgtcttaaatgcattttcagtttcaacttagaattggtttatcaggacgtagccccttggtgttgaggggcatgtgtattaacagtctccttactgac

SEQ ID NO: 232786 - DNA, 543 bp, Homo Sapiens
gaaataaagccaactttgtacaaaaaagttggcgaaggctgctccctagaaatcaaaaatgatcgtggatggagggtagacaaaacccaaaccaaaccgtggggttaggagctcctttgtccttggttcatgttaaaaaataaaattcccctttccccttaatcttgaaattttaaattctccatttcccctttctgactgagagtagtaagtattacaaacttcaaacttcttatttaatacaaaatgctcactgcacatggaaaaggttcaaggttcattgaaaaatgaaaaatttcgatgttcaatgtacatacttcctacttccaatttcaaagtgattcgttattgtcgactgccaatggtaacagaccacttaccatttacacttgttgcatgtcgaaagatatttcaacaatagacaaaaaatgaaatgtgacatggctaattcttacttcttgctctgtgcagtggcctacgtcttatgattcatgatctgggaaccgccatccctgatcagggccttcggccttccagcaacct

SEQ ID NO: 232787 - DNA, 859 bp, Homo Sapiens
  misc_feature (105)..(306): n is a, c, g, or t
  misc_feature (366)..(522): n is a, c, g, or t
  misc_feature (525)..(626): n is a, c, g, or t
gtcctgagaaagcatccttcatagtgcaggcttagagaacgaaagcaacagtgaaagggacacaaaactccacctgaatgcttcttcctatttccccaactggannnnnnnnnnnnnnnnnnnnnnnnnnnnnnnnnnnnnnnnnnnnnnnnnnnnnnnnnnnnnnnnnnnnnnnnnnnnnnnnnnnnnnnnnnnnnnnnnnnnnnnnnnnnnnnnnnnnnnnnnnnnnnnnnnnnnnnnnnnnnnnnnnnnnnnnnnnnnnnnnnnnnnnnnnnnnnnnnnnnnnnnnnnnnnnnnnnnnnnnnngccaggaattcaagactatcccggacaacataatgagtcgtcatctctgcaaaaaatggnnnnnnnnnnnnnnnnnnnnnnnnnnnnnnnnnnnnnnnnnnnnnnnnnnnnnnnnnnnnnnnnnnnnnnnnnnnnnnnnnnnnnnnnnnnnnnnnnnnnnnnnnnnnnnnnnnnnnnnnnnnnnnnnnnnnnnnnnnnnnnnnnnnnnnnnnnnnnttnnnnnnnnnnnnnnnnnnnnnnnnnnnnnnnnnnnnnnnnnnnnnnnnnnnnnnnnnnnnnnnnnnnnnnnnnnnnnnnnnnnnnnnnnnnnnnnnnnnnnntaggcagcaactgtagccccacccgcttttcgggtagcattcctttgaagtagagatagttccctcatttggcagattagaattcttttcttattaaaataattttatatagttagaaaatcctgaaagtcttctccatccatctcttccctactctaccccattgttggcatgagcatcttttctttcagtgcttaaccttgttatggttttatcccattatatgagactta

SEQ ID NO: 232788 - DNA, 294 bp, Homo Sapiens
  misc_feature (128)..(251): n is a, c, g, or t
attataaaaagttgaaatcacctaagaggaccccgttactatttgaataagcatctttccacatttctttctaggcatttactaggtagacatttaattataaatttacatagtcttattataaactnnnnnnnnnnnnnnnnnnnnnnnnnnnnnnnnnnnnnnnnnnnnnnnnnnnnnnnnnnnnnnnnnnnnnnnnnnnnnnnnnnnnnnnnnnnnnnnnnnnnnnnnnnnnnnnnnnnnnnnnnnnncaggcacctatatgttcagcgttccaggtaggaaggaaacaga

SEQ ID NO: 232789 - DNA, 490 bp, Homo Sapiens
  misc_feature (250)..(313): n is a, c, g, or t
ggactccgactgctttatctctagagtcccagacctcgagctttctttttcatcccctgcatcggatcccgatcgtgcgcctgcctgtccgacgcagacgtagacaccaactccgacttcaccaccaaggacttagaggaaaagaaggaaattgtggatgaggcagaagatggaaaagacgcacctgctcccgggaatgcgaatgaggaagatggggatggggaggctgacgatgaggtagacgaagaannnnnnnnnnnnnnnnnnnnnnnnnnnnnnnnnnnnnnnnnnnnnnnnnnnnnnnnnnnnnnnnatgaagatgaagaagctgagtctgattcgggcaagggggcaccggaagatgatgatgatgacgatgtcgataccaataagcagaagaccaacaacgatgacgataccgcgacaaaggaaaagttaaactaaaacaaaaaaggccgccgtgacctagtcccactccacttcccgtctc

SEQ ID NO: 232790 - DNA, 580 bp, Homo Sapiens
  misc_feature (75)..(285): n is a, c, g, or t
  misc_feature (323)..(338): n is a, c, g, or t
cataaaagaggaactttgtacaaaaaagttggcactctgttgcccctttacaaggtgtccagtggcatgattgtnnnnnnnnnnnnnnnnnnnnnnnnnnnnnnnnnnnnnnnnnnnnnnnnnnnnnnnnnnnnnnnnnnnnnnnnnnnnnnnnnnnnnnnnnnnnnnnnnnnnnnnnnnnnnnnnnnnnnnnnnnnnnnnnnnnnnnnnnnnnnnnnnnnnnnnnnnnnnnnnnnnnnnnnnnnnnnnnnnnnnnnnnnnnnnnnnnnnnnnnnnnnnnnnnnnaatgagccacagcacctggtcgacttctctctctctcnnnnnnnnnnnnnnnnataagggcattaattccatcacaaggaccctaccctcgtgatctaatctaattctattacctctcaaaggccctatctccaaatactattatatttggggttaagatttcaacatatgaattgtatggaacataaacattcagtccataatattcaataaacttgcttttgtctatgctgagacaaaattataaagtaggattgcttaggccccattttatcatggtctcacggtaaccttg

SEQ ID NO: 232791 - DNA, 884 bp, Homo Sapiens
  misc_feature (44)..(252): n is a, c, g, or t
  misc_feature (292)..(559): n is a, c, g, or t
  misc_feature (563)..(594): n is a, c, g, or t
ttgggtaaagggtttgagaattatcatgcaaacaaaacaaaacnnnnnnnnnnnnnnnnnnnnnnnnnnnnnnnnnnnnnnnnnnnnnnnnnnnnnnnnnnnnnnnnnnnnnnnnnnnnnnnnnnnnnnnnnnnnnnnnnnnnnnnnnnnnnnnnnnnnnnnnnnnnnnnnnnnnnnnnnnnnnnnnnnnnnnnnnnnnnnnnnnnnnnnnnnnnnnnnnnnnnnnnnnnnnnnnnnnnnnnnnnnnnnnnnttgaactaacccagtcagacaaaaataaaaaagaatttannnnnnnnnnnnnnnnnnnnnnnnnnnnnnnnnnnnnnnnnnnnnnnnnnnnnnnnnnnnnnnnnnnnnnnnnnnnnnnnnnnnnnnnnnnnnnnnnnnnnnnnnnnnnnnnnnnnnnnnnnnnnnnnnnnnnnnnnnnnnnnnnnnnnnnnnnnnnnnnnnnnnnnnnnnnnnnnnnnnnnnnnnnnnnnnnnnnnnnnnnnnnnnnnnnnnnnnnnnnnnnnnnnnnnnnnnnnnnnnnnnnnnnnnnnnnnnnnnnnnnnnnnnnctcnnnnnnnnnnnnnnnnnnnnnnnnnnnnnnnnttacagaaaagcaataaaaaatgaaagcatttctgaaatgtcatattagaatatattatacatacattaaaaaaggtaatcattattttattaagaataatggtgtctggtttcatcaaaatagagtaaaacataaatttgttatgatatttttgaaaactatagaatattttaaaaccatctttattagaaagatgatatatggttaaaattatttttatgtggtatgtgtgtatgtgtagttagtatattttgaacttacaaaataaaaatctatctgcatgctaagg

SEQ ID NO: 232792 - DNA, 498 bp, Homo Sapiens
ttggaagaaaaaaccacctacttcctgccctgcttactgcccataggatggagaacgtcaagcaggggatggaacaaaaaacatccatcctgaagctaggtatccacactacgaacgaactgattgatctacgaagcatgctccttcggtagttggctcacttagatggcatccttcagaaaaacaatagatcgatctaaccagcctgacctaacacacacacccccttcattacccacacctgtgtgtgtactgtgtgtggacgggctggcttgcttgctactgactgttcattccgcatgcctgttgatcctcagtccacgctagataaagcatggatggataataaatatttgtccctcatgactgagctgaatgaaccgtctgtcccaccatgggtgggctccacctctgggcctgccaccccctgcctggcccacccacctctgcttgctgctcccgccaacaacctccctcctccctctcgtatgtctacca

SEQ ID NO: 232793 - DNA, 108 bp, Homo Sapiens
gctttagtccaatgctctttccagtaaatcaaaaatgcccaacttcatcaaaaatttccactctcaaaagggcaaggagcccgggggaaaggcagggccccgttccct

SEQ ID NO: 232794 - DNA, 923 bp, Homo Sapiens
  misc_feature (341)..(868): n is a, c, g, or t
caactttgtacaaaaaagttggcgaagttcttatttgcagaggaagcttttaggtactaggctttagagaaaagaggttgtaaaatgtttcttactagacttaaagtctgtattgatgttaatgctggagagatatcatgaggcctgtctgacccccacttcccatcatggcctgaaacagtctctcgggttaaattttaaaatagccgtggctaaggaggaagtacattcggatggttgaggggccttagaatttcatttttgtttacacattatatttgtatgtatttatggggtacatgggaaattttgttacctgcatagaatgtgtaattgttacnnnnnnnnnnnnnnnnnnnnnnnnnnnnnnnnnnnnnnnnnnnnnnnnnnnnnnnnnnnnnnnnnnnnnnnnnnnnnnnnnnnnnnnnnnnnnnnnnnnnnnnnnnnnnnnnnnnnnnnnnnnnnnnnnnnnnnnnnnnnnnnnnnnnnnnnnnnnnnnnnnnnnnnnnnnnnnnnnnnnnnnnnnnnnnnnnnnnnnnnnnnnnnnnnnnnnnnnnnnnnnnnnnnnnnnnnnnnnnnnnnnnnnnnnnnnnnnnnnnnnnnnnnnnnnnnnnnnnnnnnnnnnnnnnnnnnnnnnnnnnnnnnnnnnnnnnnnnnnnnnnnnnnnnnnnnnnnnnnnnnnnnnnnnnnnnnnnnnnnnnnnnnnnnnnnnnnnnnnnnnnnnnnnnnnnnnnnnnnnnnnnnnnnnnnnnnnnnnnnnnnnnnnnnnnnnnnnnnnnnnnnnnnnnnnnnnnnnnnnnnnnnnnnnnnnnnnnnnnnnnnnnnnnnnnnnnnnnnnnnnnnnnnnnnnnnnnnnnnnnnnnnnnnnaatgatcaagtcacgccatttggggtatatccatcatctgagtatttatcttttc

SEQ ID NO: 232795 - DNA, 502 bp, Homo Sapiens
ctaaagacaactttgtacaaaaaagttggatgtttctttttccccagctggccttggcttccattgtcgacctgcccccccggtaccgcattgggaggaaccccccatgctctgttgcttacaaaatgaacacccccctttggattccgcggcgccatctggttgcggatgcctcctaagattaacactggtatctgtgctggggtgacccggtggatatcatgtaaagcgtcaagaacttgaaccctggccctccaattattcttatcctgcatgcccactgggtggtcatgtcagggcagaactttatttacttttgcagcggttggttatggattaaatcataaggcctttttcttctttccccccttgctaagtgccggatcaaaattaaggatacggaatgcaagtcactttcttcgatatcttgattatttcatttttaagttcttctggtactgtgtctctctggatgttggataactgcttaaatcgtctaatt

SEQ ID NO: 232796 - DNA, 440 bp, Homo Sapiens
  misc_feature (44)..(380): n is a, c, g, or t
ttggcgactgaataacaggaaaccatgaatctaaacaggtattnnnnnnnnnnnnnnnnnnnnnnnnnnnnnnnnnnnnnnnnnnnnnnnnnnnnnnnnnnnnnnnnnnnnnnnnnnnnnnnnnnnnnnnnnnnnnnnnnnnnnnnnnnnnnnnnnnnnnnnnnnnnnnnnnnnnnnnnnnnnnnnnnnnnnnnnnnnnnnnnnnnnnnnnnnnnnnnnnnnnnnnnnnnnnnnnnnnnnnnnnnnnnnnnnnnnnnnnnnnnnnnnnnnnnnnnnnnnnnnnnnnnnnnnnnnnnnnnnnnnnnnnnnnnnnnnnnnnnnnnnnnnnnnnnnnnnnnnnnnnnnnnnnnnnnnnnnnnnnnnnnnnnnnnnnnnnnnnnagccctttctcatggtagaaggccaactaatatttaatggttggaatgacagagtcatac

SEQ ID NO: 232797 - DNA, 873 bp, Homo Sapiens
  misc_feature (254)..(568): n is a, c, g, or t
  misc_feature (587)..(609): n is a, c, g, or t
ttgggctcttcaattttttgctttagaaacctggggtgggtattaaaatttggggaaagggaagaagactgtcaacctaacatgaggttttagaatactgccaataaaggagtttttaatcatagtgcttttttacaactataggaataaagttagataaccaaagtgttagcaaacttacaaaattgctaacatttgtcagacactgacataacttttctgcatttcttgcaagctaacagctgaaccaacannnnnnnnnnnnnnnnnnnnnnnnnnnnnnnnnnnnnnnnnnnnnnnnnnnnnnnnnnnnnnnnnnnnnnnnnnnnnnnnnnnnnnnnnnnnnnnnnnnnnnnnnnnnnnnnnnnnnnnnnnnnnnnnnnnnnnnnnnnnnnnnnnnnnnnnnnnnnnnnnnnnnnnnnnnnnnnnnnnnnnnnnnnnnnnnnnnnnnnnnnnnnnnnnnnnnnnnnnnnnnnnnnnnnnnnnnnnnnnnnnnnnnnnnnnnnnnnnnnnnnnnnnnnnnnnnnnnnnnnnnnnnnnnnnnnnnnnnnnnnnnnnnnnnnnnnnnaaggcaagacccagtctcnnnnnnnnnnnnnnnnnnnnnnnttgaagcttaataaacagaaacgcaatacagctaaagagtaatcaacttgctccaaacttaatacagctcccagttctcaaatgaatccaaactcctaatacatatcaaaccaccatcaagtatgcgtttttttcccattctaaacttttattctcattactcattgactcatatactctactccagtacataaatgtccaacgatatgaatctagagtttactgtacatgtatatgtgtaaagctgcaatcttatcccttccc

SEQ ID NO: 232798 - DNA, 294 bp, Homo Sapiens
  misc_feature (60)..(179): n is a, c, g, or t
ctaataaaaaaagtgtttgtacaaaaaagttgggtatttttagtaccactacaaaagccnnnnnnnnnnnnnnnnnnnnnnnnnnnnnnnnnnnnnnnnnnnnnnnnnnnnnnnnnnnnnnnnnnnnnnnnnnnnnnnnnnnnnnnnnnnnnnnnnnnnnnnnnnnnnnnnnnnnnnnnatattaatgagtgtataatgaggtccttggtgaaacctacatcaaatccagcaccgtgttgggtccagtctgtcttagccagcttggtccacaccctggttatttagggtcctat

SEQ ID NO: 232799 - DNA, 115 bp, Homo Sapiens
cataaaaaaagtttgtacaaaaaagttgggtcatttactctacccttaatggatgcgttttcatcactgcgctaagctagcactgattttttacctgaataagcctagaaataaa

SEQ ID NO: 232800 - DNA, 148 bp, Homo Sapiens
catttatctggatttttatgagtttattaacattttcaagaagacagattatctacagaaaaatctgatatatgcatacgaaacaatggaccacagtgacttatctgtactggttccttcccctgctacccgattttgttagtgcatt

SEQ ID NO: 232801 - DNA, 214 bp, Homo Sapiens
gtacaaaaaagttggtgtaaggctgccacgttagactatgattcaacaaaagggagggtctattgttaatgtaggactcattgttggcttcaatggcaactctggacagtgagtttacactgccatcccagcaccattagttggattttcacgtgtgcttgctaagcctgtatgtattcagaaaagggcagtgaatgagtttgcaccagaattt

SEQ ID NO: 232802 - DNA, 141 bp, Homo Sapiens
attgatgagcaatgctttttcttatgacaactttgtacaaaaaattgggtgcgtggttgcccttcaacctattccccctatgcaccttcgaacagctgcccattttgtgccttcctgaagctattttttcctgccaacttg

SEQ ID NO: 232803 - DNA, 147 bp, Homo Sapiens
ttgggagaagaacaaaacgaacgaactggccatgttacttccccgcctcccggacccgaccccacaccagacgggaggggctgtgctccgggtccggtcccgccaaaccagaccaacccctgccctcactgctctgcccgaccggaa

SEQ ID NO: 232804 - DNA, 293 bp, Homo Sapiens
ttgggccttatttgacgcataagcggataactggagggattagctcttcgcttgtggatttctactggatgaaattcatggtactaaggactctgtatcaaaagcccttgcctggcactgctacggtgctcagaaaaacaggccccctatttcctctcttcacattgtggactgagacttagcattcttttggtggcccagactgaatctcctgctggttctggggttgcccaatgattatttcaaaaaaggggaggataccagatcctgctggaagagaagaaacaggcggc

SEQ ID NO: 232805 - DNA, 223 bp, Homo Sapiens
tacaaaaaagttggctcaggattctcaatatactcggaagaaaacgccgtgaaaagatctgggacttctcctgagcctattgtttgtttcccccgattgggagaaacgggaatgtccgtatgtcacctctttcctgctttgtgtgttttcctgtgggactgggtgtcttgtttatgctgggaagttcccttggtgtgacacctctggcttcttgggggctcac

SEQ ID NO: 232806 - DNA, 458 bp, Homo Sapiens
tacaaaaaagttggcttactacgggtagggatcgagctgcagattgccataggccaggaattttgtcccgggctcgtggtgggggcccttgcatttttaaactttgactttatgaatggcgaggccgcgcggacctgacccgacgacacctgatgaaacagcctgcgaactgggagacctgcttgatgaaggcgtgccatccgccttatcagtcttctttgtggacagcacaattcccccaagaaaatttatggctgcctctctccaaccagttgctgcatctcgagaaataaagcctcttttttcttctgtgtattgctgaggcgaacgcgacaacgggacactgacgaaagcacggcgggtccctggctaaggccccaccctccagacggcataaccccggccctaaaagaaaaaacccggttctgtttggggcccgaaggcttgccttttgaccc

SEQ ID NO: 232807 - DNA, 384 bp, Homo Sapiens
actttgtacaaaaaagttggcttgctgcaccctaaaaatcgtgctacagattgccgaaggccaggaattttgtcatgagcccgtggtgggggcccttgtatttttggctttgactttatgggctggcgaggcatcgtttgctgacccgacaacacctggagaaacagtttgcgaacctgccgaacagcttgatgaagctgtgccatcggccttatctgtcttatttgcggacagtacgattcccccaagaaaacttatggctgccgcactccaaccagcttctgaatctcgtgaaatgcagaatggattttcttctgtgtatgctccccggcaaacgcggcaacgaaatacccacggaggcacggcgggtccctgactaaggcc

SEQ ID NO: 232808 - DNA, 573 bp, Homo Sapiens
ctttgtacaaaaaagttggccctggacccctaccatgatttaagatctcacttctccccccacttctactgtcctgctggatcattgcctcttcactatggtcatcatgaataatgtggacaatgttcatttccccgactgggacgtcccttgtcattcactcttccttaaccattactgcgcccattgacatgattgtattggcctcctgcgaatggggtgggggactacccctgattattacaatctcatgtgggttaggttgacacttgacctataccctaaatctactccactgctagaagtactcgtcccagcttttatattgccaccagaggatgaactttaccaattccgctttgtgtatgacgatggtgtggtccggggagcaattattcctttcatcttcctgccattttttgaccaaatcatcctggttgtatttacttgtggcgaggtggtttcctccgaccacctaacaacccccctccgcatactaactacctgactgatggacctctgtatcatggtccacaagcgcaacttatacatggaagctgagttacgaaaaaa

SEQ ID NO: 232809 - DNA, 118 bp, Homo Sapiens
gaaatgatgtttgccattaaacccccgaggattagatgaactaagccttaattacctgtcgcgttacctgttactggtgggctgtccaattaatgaaattcgggctcaattcaaattc

SEQ ID NO: 232810 - DNA, 406 bp, Homo Sapiens
acataaaaaacaaactttgtacaaaaaagttggccaagacggaaccttgaaaacccattcgcgccttctctttggttctcgcctcggctaactttcacaagtggcgattttggatctttcctttctcgcctgtaactgtcttcatccccagtgactcgatcagtcctctcgcgacggtggccaaagacttgtgacttctgcttcttacctgactggaaacataccaacacttcacatggatccttccttgttctctgctggtgattccccatgggaggctccttctgcgctgttgcgtcggccaccccctggtcagcctcaatccactcatctgacaaggccaattttggctggttacacttctctgttgtaactaatccctgaggctgatccgaagcaacctgtt

SEQ ID NO: 232811 - DNA, 183 bp, Homo Sapiens
tttgtacaaaaaagttggctcggctttgaccctactgaagaaccatgacttgcagaatgtcccgtctggaacgcaacatatcagaccatcatcaacaccttccacaaatactctgtgaagctggggcacccctaccccctgaacctgggggaattcgaagagctggtgccaaaatatttgcaa

SEQ ID NO: 232812 - DNA, 295 bp, Homo Sapiens
  misc_feature (97)..(117): n is a, c, g, or t
ggcccaggcctctcccaagtccacacgagggaggtgatagcattgctttcatgtaaatcatgtaatgcgtcatttttgtaatcttcacattaatacnnnnnnnnnnnnnnnnnnnnngcatgatgagccttggtgccccccctttccccgtttttgcctcccacctttgaatgtttccccgatttggaacggactggatatgaaccgaggagtccaactccgccctgaccaccaaactagaaggggaataacccaactagcctgctgagtttctattttttcaaaataccaaggg

SEQ ID NO: 232813 - DNA, 689 bp, Homo Sapiens
  misc_feature (170)..(206): n is a, c, g, or t
aaaaaaattgttcgtgattctgaatgcactggaaatgtattgattgcgtctttatctttcacagtgacttacaaccctggctgcccctttgtgcttttcataatcacatgaacgctccctcatgttagaaaatgctggcaaccactcccttattttttggttgagagggnnnnnnnnnnnnnnnnnnnnnnnnnnnnnnnnnnnnngcccctcaccctggagtttggtatgtttctctccctcttaagcatggagatttggtacagcagaacccccctttgagaaagacaactgtgttcctctcaaatttaagcaactcctatttttattgtatattttttgaatgaaaatttttccctgtggaaactccctgttacttgatcccaggggacaaaatgtgttaaagctgctggtggtaacaggcttcttctttgtttcatctggtaaacttaactttgtggaatatgaagggataagactacaacgcttaatgacatagatactgggtcgatttgatggagttttacagtactggacttttgacgattgcattggtatcagtaggagacaatattttgaacctcccctttatcaaaatattcctgcacatattacatagcctaaagaacataagatttggtttctggttcaacttcaagaaaaaagccttgtatgcagtccctaaaaaa

SEQ ID NO: 232814 - DNA, 616 bp, Homo Sapiens
  misc_feature (196)..(227): n is a, c, g, or t
  misc_feature (246)..(360): n is a, c, g, or t
  misc_feature (377)..(488): n is a, c, g, or t
ccattaaaacaactttgtacaaaaaagttgggggtgaataagaactgcgacggagggagagtcacgtttacccaaccccaggcgctgctacataaatcagtttcttcataaccccagatgacacaaaagtcatcccagaccttaacccctaagctttggaagttgtgctttcagggagcctctgcttctggcctcnnnnnnnnnnnnnnnnnnnnnnnnnnnnnnnngagacagagcttcactctnnnnnnnnnnnnnnnnnnnnnnnnnnnnnnnnnnnnnnnnnnnnnnnnnnnnnnnnnnnnnnnnnnnnnnnnnnnnnnnnnnnnnnnnnnnnnnnnnnnnnnnnnnnnnnnnnnncaccatgcccagctaannnnnnnnnnnnnnnnnnnnnnnnnnnnnnnnnnnnnnnnnnnnnnnnnnnnnnnnnnnnnnnnnnnnnnnnnnnnnnnnnnnnnnnnnnnnnnnnnnnnnnnnnnnnnnnnataagccactgcgcctggcctcctctggtctctttctagagacagtgacctgcaaataggtctgctcctggctgcccctgcatcacagctcccccccacacccccacctcttttttctggatggggaa

SEQ ID NO: 232815 - DNA, 422 bp, Homo Sapiens
acaaaaaagttggatcataagggctatttaataaatactcttttccatctatgtaacccaacttgcacatttcagctgcctgtggtgaatgtgcctcctatatttctcttaagaggtacaatttgccttgctgtttcatgtgctccttcagatccggtttgttacggattagatggactctgaaatattatttcttgtggttattactcctttccaatgctctttcctcgcacttgatactcttaaggaaactaaggctctaaaagatcagagctgggctcagagtctctatcttcaaactccaagccatctcctctttccactgcaggaaactgcctcttttgtcagagaaatattagatttattgtgttaattaagtgacccctgtcatttgtttgactgtgttccaaacggaacaatga

SEQ ID NO: 232816 - DNA, 555 bp, Homo Sapiens
  misc_feature (120)..(133): n is a, c, g, or t
ttggtgcacacgacattcttcctttctcagttgctctggatctcgagtgcctagggggacatcgtgatgacccaatctccaccctccctggctgtgtctctggccaacatggccttgagnnnnnnnnnnnnnnaactcaccgttttatcaactgtgtgactttgaactactgatcttgtttccccctgatgagcccacattttcccatactgcacatttactggtactctacccgtgggtgtgaggtccctgaccgattccagctagagttttcaggaaaatatttcactctcacttgctacgatttgcgcgccgaaaattcatttctttctttattccatccctaattaaaccctcattccatttactgtgaaaggatttcagtccacatcaaccccactttcaaacataaccttcctggcagggatgagaacttggatcttagaattggcatcttgaagcccgctgttgtgtgcctgctgggaaggataaggcaaaacttgccctcctagaatgaaaaggggggatccccctttgatgtgctatgcctcacaa

SEQ ID NO: 232817 - DNA, 254 bp, Homo Sapiens
ttggtttgttgcctgaccccaaccaggtaggtactgaaagaaaacaatatatatatgtcatgcctacctaccagccatccgcatgggagggaggccgattgcttcacttatttttccctctctgtcttcagaacgatgcttggttcccgtttgtctactgcctgatctatctggcctgcccatgcactctgttcgctcgcttgcctctctctaatggctggcatggcatgtttgttttactgattacaaacaaa

SEQ ID NO: 232818 - DNA, 907 bp, Homo Sapiens
  misc_feature (55)..(734): n is a, c, g, or t
ttggctcttactcactgctgatggaaatgcaaaaacaacttgggaagacagttgnnnnnnnnnnnnnnnnnnnnnnnnnnnnnnnnnnnnnnnnnnnnnnnnnnnnnnnnnnnnnnnnnnnnnnnnnnnnnnnnnnnnnnnnnnnnnnnnnnnnnnnnnnnnnnnnnnnnnnnnnnnnnnnnnnnnnnnnnnnnnnnnnnnnnnnnnnnnnnnnnnnnnnnnnnnnnnnnnnnnnnnnnnnnnnnnnnnnnnnnnnnnnnnnnnnnnnnnnnnnnnnnnnnnnnnnnnnnnnnnnnnnnnnnnnnnnnnnnnnnnnnnnnnnnnnnnnnnnnnnnnnnnnnnnnnnnnnnnnnnnnnnnnnnnnnnnnnnnnnnnnnnnnnnnnnnnnnnnnnnnnnnnnnnnnnnnnnnnnnnnnnnnnnnnnnnnnnnnnnnnnnnnnnnnnnnnnnnnnnnnnnnnnnnnnnnnnnnnnnnnnnnnnnnnnnnnnnnnnnnnnnnnnnnnnnnnnnnnnnnnnnnnnnnnnnnnnnnnnnnnnnnnnnnnnnnnnnnnnnnnnnnnnnnnnnnnnnnnnnnnnnnnnnnnnnnnnnnnnnnnnnnnnnnnnnnnnnnnnnnnnnnnnnnnnnnnnnnnnnnnnnnnnnnnnnnnnnnnnnnnnnnnnnnnnnnnnnnnnnnnnnnnnnnnnnnnnnnnnnnnnnnnnnnnnnnnnnnnnnnnnnnnnnnnnnnnnnnnnnnattaatttttaaaaaagaattgctgaagaaagtttttcaaagtaaggaaataacagaatgaaacttggaagatgaggaatgaagaacagaatgggtaaacatttgggtaaatataataggctatccttgagtttaaaaatgtgagatggctgaaagcaaaattatattatctg

SEQ ID NO: 232819 - DNA, 404 bp, Homo Sapiens
ttggaatcgtggcgcggtacatataataccgcacgggaaggatgaaatattatatcctagcctaatataacatggactggaccctatcccttctgcttaatgaattgactaaaattaactttgcttggagaggcaagcctaagaccccacaccccaaaccagctaaccaacaacagataagctagcacagccgtctatgtagcgtaatagtgggaagatttaattgtagaggcgacgcacctaccgagcctggcgagaggaggttgggctgtataaaatcttatttcaactttaattttgctttgccaaccctcccaatccccttgccttgttaattgttatgccaaagaggaaaggatctttggactggacgaaaagaccttgtatagagaataaaaaattta

SEQ ID NO: 232820 - DNA, 906 bp, Homo Sapiens
  misc_feature (192)..(540): n is a, c, g, or t
  misc_feature (746)..(842): n is a, c, g, or t
ttggcttctcctcaaaataatgatttatgaactttcatgtgcatacctttgcccaccattatttgcaaatttatttcttaaaaatgaaaatacagcaaacacatatagagttcagaataactttataaatcactatatttgttatgcatcatatatcagatctttcatgtacatatataatatatacatgcnnnnnnnnnnnnnnnnnnnnnnnnnnnnnnnnnnnnnnnnnnnnnnnnnnnnnnnnnnnnnnnnnnnnnnnnnnnnnnnnnnnnnnnnnnnnnnnnnnnnnnnnnnnnnnnnnnnnnnnnnnnnnnnnnnnnnnnnnnnnnnnnnnnnnnnnnnnnnnnnnnnnnnnnnnnnnnnnnnnnnnnnnnnnnnnnnnnnnnnnnnnnnnnnnnnnnnnnnnnnnnnnnnnnnnnnnnnnnnnnnnnnnnnnnnnnnnnnnnnnnnnnnnnnnnnnnnnnnnnnnnnnnnnnnnnnnnnnnnnnnnnnnnnnnnnnnnnnnnnnnnnnnnnnnnnnnnnnnnnnnnnnnnnnncatgcctttagcattttattctttatttcacaaaatttgctaatgattgtatgttataaaaaacaaagtcactgtgaaaataatcctcatttaacagaattgataaaatcacagattagaaaacaagtttcaatatttttattgagaggacattgttgctaaaatagtatttttattttcaaaaaaagcaatgtcttaacctcttnnnnnnnnnnnnnnnnnnnnnnnnnnnnnnnnnnnnnnnnnnnnnnnnnnnnnnnnnnnnnnnnnnnnnnnnnnnnnnnnnnnnnnnnnnnnnnnnnttatatccgtatcatattttaaagggccagtctgggcaagatggtgtgaaaacaccttctccac

SEQ ID NO: 232821 - DNA, 208 bp, Homo Sapiens
  misc_feature (57)..(78): n is a, c, g, or t
  misc_feature (101)..(151): n is a, c, g, or t
caataaaaaactttgtacaaaaaagttggcgcacaactttgtacaagaaagttgggnnnnnnnnnnnnnnnnnnnnnngagaaaaagtcttgctctgtcgnnnnnnnnnnnnnnnnnnnnnnnnnnnnnnnnnnnnnnnnnnnnnnnnnnntggtgtctaagcaggagccatggaaaaggtgggaggtgttagttaagaatagcttga

SEQ ID NO: 232822 - DNA, 256 bp, Homo Sapiens
ttggctttgctatcatgcctaaagctctaaatataggtgaatgtgtgatgaatactccaattatttgtctctccatataattatcttggtacaacatttctcaaatgattattaacacatgaaggacaatctctaaacactaaaaagaagtattacaaattttgttactgtaatgctccccttgaatgagtttaagggagtttttatcttttggttttataatctatttctattttgctgtgcctgacattaagat

SEQ ID NO: 232823 - DNA, 785 bp, Homo Sapiens
  misc_feature (240)..(261): n is a, c, g, or t
  misc_feature (283)..(401): n is a, c, g, or t
  misc_feature (482)..(700): n is a, c, g, or t
caataaacaactttgtacaaaaaagttggtgaggttctgaagcagaaaacccaactaggctgggttcttggaagataatcctcaaggaaaagggaagaagatggaggaaacaaactagatgcaagagatttgttcttcaaattatattctttaaaggtcttagttattaaaagcttccaactatttaaattatgcaatggtcttttttgaagagaatattaaccttaagttctgttttgnnnnnnnnnnnnnnnnnnnnnngaaacagagtcttgctctgtcnnnnnnnnnnnnnnnnnnnnnnnnnnnnnnnnnnnnnnnnnnnnnnnnnnnnnnnnnnnnnnnnnnnnnnnnnnnnnnnnnnnnnnnnnnnnnnnnnnnnnnnnnnnnnnnnnnnnnnngaccactgcacccaactgtattatttttgtgtgtgataaggtctcactgtgtcaccctggcctggagtgcagtagccatgnnnnnnnnnnnnnnnnnnnnnnnnnnnnnnnnnnnnnnnnnnnnnnnnnnnnnnnnnnnnnnnnnnnnnnnnnnnnnnnnnnnnnnnnnnnnnnnnnnnnnnnnnnnnnnnnnnnnnnnnnnnnnnnnnnnnnnnnnnnnnnnnnnnnnnnnnnnnnnnnnnnnnnnnnnnnnnnnnnnnnnnnnnnnnnnnnnnnnnnnnnnnnnnnnnnnnnnnnnntaagccaccacgccttgctgaattagacaaactttcaaaatttgcttataaacaaatgtttattcaagtctgtggagtttggggg

SEQ ID NO: 232824 - DNA, 391 bp, Homo Sapiens
ccttttagccaactttgtacaaaaaagttggcttcaggtggccctgcttacttaggatctatggctaaacatcatcctgatttgatcttttgccgcaatcaggctggtgttgccctcattagactgtgtgaaaaatgtgatggttattgtgtgatttgtgactcctatattcctcgctgcactcttgtgcgcctatgtgatgaatgtaattaaagatcttaaccagggcgctgtgtgatctgtggacgatatgcggtctctgatgcttattactgtaaagaatgcaccatcaaggaaaaggacagaaatggctgcctttaaattgtcaatctggcgagctcatttacatacctcttctatgaacgcgtaaaatactgcttcttaaaaaggt

SEQ ID NO: 232825 - DNA, 610 bp, Homo Sapiens
  misc_feature (57)..(100): n is a, c, g, or t
  misc_feature (121)..(229): n is a, c, g, or t
  misc_feature (248)..(389): n is a, c, g, or t
ttggtttttctttcttttttgctgtgatagatgagagtttgtctcaattctccctcnnnnnnnnnnnnnnnnnnnnnnnnnnnnnnnnnnnnnnnnnnnngagagagaaagagagggtctnnnnnnnnnnnnnnnnnnnnnnnnnnnnnnnnnnnnnnnnnnnnnnnnnnnnnnnnnnnnnnnnnnnnnnnnnnnnnnnnnnnnnnnnnnnnnnnnnnnnnnnnnnnnntaggcgtgcatgaccacannnnnnnnnnnnnnnnnnnnnnnnnnnnnnnnnnnnnnnnnnnnnnnnnnnnnnnnnnnnnnnnnnnnnnnnnnnnnnnnnnnnnnnnnnnnnnnnnnnnnnnnnnnnnnnnnnnnnnnnnnnnnnnnnnnnnnnnnnnnnnctccctcttccttttctgattccgcctagcatattgatttcctttgttttagtttttcttttagttatctttgtaatttacagttaaacctttatttcttctttatgaactctaggcagtatctcttatccccctacttttacaagataagatggagagtgtagtatcctttctcatacttccctgtggagaaagccaagtatacttttaggggaataccc

SEQ ID NO: 232826 - DNA, 232 bp, Homo Sapiens
  misc_feature (58)..(142): n is a, c, g, or t
  misc_feature (149)..(158): n is a, c, g, or t
ctaaaaatttacccggggaaaaaggttaaccgtttttctccccgggaattatttcaannnnnnnnnnnnnnnnnnnnnnnnnnnnnnnnnnnnnnnnnnnnnnnnnnnnnnnnnnnnnnnnnnnnnnnnnnnnnnnnnnnnncctggtnnnnnnnnnntttttgctaggctttatcggaggtttgtttcgaaaaaaattttttttgggcatggtatgttggtttcaccttgt

SEQ ID NO: 232827 - DNA, 215 bp, Homo Sapiens
tgtacaaaatacttggttgttgaatgtggcctcgcccgttcctatcggggacacctaagatcctgccatactgggtgaccctgaatttctttctggcgcccatactctttgtccaacttaatacttcctctttggaggtggatatgactgggtctccaaattgtcttcacaatgcactggttgctgactctctttgccaattgcgtccctcatcc

SEQ ID NO: 232828 - DNA, 310 bp, Homo Sapiens
  misc_feature (232)..(243): n is a, c, g, or t
catcaatggcctgcggaagtgaccctttgcctgcattctctttaaaggtgtgggcctaatatggccggtagtgccgctgatcatacctcactgtgattcccccaatagggattaaaatatttttgacgattaagagttaccaaccatctttcccatacgaagtgattactcataatctcatagtactggtattactagtgaatgaagatgaatagaactgtgcctgtataannnnnnnnnnnnaacgttgtttcccatggaaaatacttccaccttccagcacaggactccattcaatacacatttcttg

SEQ ID NO: 232829 - DNA, 522 bp, Homo Sapiens
  misc_feature (58)..(337): n is a, c, g, or t
  misc_feature (355)..(474): n is a, c, g, or t
aactataaagccaactttgtacaaaaaagttggagacaccatggtgcacctgactccnnnnnnnnnnnnnnnnnnnnnnnnnnnnnnnnnnnnnnnnnnnnnnnnnnnnnnnnnnnnnnnnnnnnnnnnnnnnnnnnnnnnnnnnnnnnnnnnnnnnnnnnnnnnnnnnnnnnnnnnnnnnnnnnnnnnnnnnnnnnnnnnnnnnnnnnnnnnnnnnnnnnnnnnnnnnnnnnnnnnnnnnnnnnnnnnnnnnnnnnnnnnnnnnnnnnnnnnnnnnnnnnnnnnnnnnnnnnnnnnnnnnnnnnnnnnnnnnnnnnnnnnnnnnnnnnnnnnnnnngatcctgataacttcagnnnnnnnnnnnnnnnnnnnnnnnnnnnnnnnnnnnnnnnnnnnnnnnnnnnnnnnnnnnnnnnnnnnnnnnnnnnnnnnnnnnnnnnnnnnnnnnnnnnnnnnnnnnnnnnnnnnnnnnngtatcactaagctcgctttcttgctgtccaatttctattaaaggttcc

SEQ ID NO: 232830 - DNA, 521 bp, Homo Sapiens
aaaacaactttgtacaaaaaagttgggaggagatgaggcttattcgggggctgctggatgctttcttgacgacgacgacttttctggtgggccaactaatgacgttggatgacatcattgttgtctgccccctgttgtggctctatcagcttgttcaacagccttccttccgccccgtccttcccactacccaccggtggttcctctgctgcattaacccccccctcttgccggctgtcttggaggaaatgaagctgtgtaagaagatggccctttttgatgctaaattttttgaaaacacccctcctaaagacgacccaccacggaaaaaggatggttcgcgggaaaagaagcagaccccccctgatgagcggaaggagaaaaaagaggctgctgcccctgctcctgaggaggagatggatgaatgtgaggcggcgccggctgctgaccccgacgccgaggactcctttcctcacctgcccaatactacttttgtgttggatgattttcaccgctagtcc

SEQ ID NO: 232831 - DNA, 535 bp, Homo Sapiens
  misc_feature (113)..(398): n is a, c, g, or t
ttggggaaaattgcaggcacaacgacttgtctggaaaggaccttgttaagctgcctaccgtagggaagcccacatcctggtccaaattggtcaccatattagttatttctgtnnnnnnnnnnnnnnnnnnnnnnnnnnnnnnnnnnnnnnnnnnnnnnnnnnnnnnnnnnnnnnnnnnnnnnnnnnnnnnnnnnnnnnnnnnnnnnnnnnnnnnnnnnnnnnnnnnnnnnnnnnnnnnnnnnnnnnnnnnnnnnnnnnnnnnnnnnnnnnnnnnnnnnnnnnnnnnnnnnnnnnnnnnnnnnnnnnnnnnnnnnnnnnnnnnnnnnnnnnnnnnnnnnnnnnnnnnnnnnnnnnnnnnnnnnnnnnnnnnnnnnnnnnnnnnnnnnnnnnnnnnnnnntaaataaataacattagttatttctgatcccaggatgtcatgaggagcattaccaagttggaagaggaaacctgttcttgcttgttctgtgtaaagcccaaattgctttgctgacaattaccttttgctgtgtttct

SEQ ID NO: 232832 - DNA, 413 bp, Homo Sapiens
ttggataaaattggctcccttatgaggctggccttggattattggagttccattacctcacgggaggtcttgttgacccggaagtgcatgggaggataagctcccaaaaatccgtccggaaggggttcatatatgggcgcgccgcacggaagcagcgagacaccatcagctatgctaaaatccggacctgccccgttaccacattaatttatcctataaggatgccatacatcgcaccatggtagaagaaatcgcggggccgttccttctggaagacgcctccgtgtcgtccaagggcttacccagcccttaaaacatgtcctccgctcgtggctcccactccggctcgcgctcgggatcaccctccggatctcccgcctggtcccgcactgggtcccggataggatcctttg

SEQ ID NO: 232833 - DNA, 409 bp, Homo Sapiens
ttgggtcgtgtgtgcctgtggcttttttgtgtgcctatacattaaactgaatacatttttgcgacaggttcgctacatagcttcgacatgtgaagtgatatgtgtgaaaacccgctccacaagtccaacgtttatttaaaaatgcaaaacaattctatgtacccttcccctgggtgtgctgcttgcttcattgtttggagttcagtttgtgccacctctccctgagtggaaaacatctgcgttccaaatgatgggatttggctcccgtaacattgaggtgttgtgttttgatttggtgttctgggatcctcgtgccaatttgatcgggcatgttgaattgaccacggctatcttgggtgatctcttcctcttccggaacttctatattactccaatacagttggtacta

SEQ ID NO: 232834 - DNA, 262 bp, Homo Sapiens
  misc_feature (60)..(212): n is a, c, g, or t
ttggctgttagatatttttactaaagcttgaaggaataaacaattcctatcttatgcaannnnnnnnnnnnnnnnnnnnnnnnnnnnnnnnnnnnnnnnnnnnnnnnnnnnnnnnnnnnnnnnnnnnnnnnnnnnnnnnnnnnnnnnnnnnnnnnnnnnnnnnnnnnnnnnnnnnnnnnnnnnnnnnnnnnnnnnnnnnnnnnnnnnnnnnnttacaattcagcatgtacttcatattcatagccaagtaggatttatccca

SEQ ID NO: 232835 - DNA, 709 bp, Homo Sapiens
  misc_feature (184)..(373): n is a, c, g, or t
ttgggcacttaaagtcctactaacaataaaattgtttgttggtgatattacctatcagcacctggagttagattatctagtctagtaaataattgctattttagtttttatttatgtaaaactacaaaaatgttaaagacatttcttcccttcagctcttttctgtcatttctcaggactctannnnnnnnnnnnnnnnnnnnnnnnnnnnnnnnnnnnnnnnnnnnnnnnnnnnnnnnnnnnnnnnnnnnnnnnnnnnnnnnnnnnnnnnnnnnnnnnnnnnnnnnnnnnnnnnnnnnnnnnnnnnnnnnnnnnnnnnnnnnnnnnnnnnnnnnnnnnnnnnnnnnnnnnnnnnnnnnnnnnnnnnnnnnnngtcgggggagatgcaatatttagcatttcctcaaactttttttggccatgaaatccaccacccccctcctttttcagagcatttcatgaagttcacatttcaaataatacattttgaaaaacatttatcttgtctaattgaagctcaaagagatagagtcaatgacttttcaaagtcaggtagcagatagttttaaagctgcaagtactgataagtgtgagccattagttaattcgcatttataaagaagtggtctgtcacttttggcaaatgtcttgacatctgttgctctacagttgtcaactagaaaattagcatagagtttcacattattat

SEQ ID NO: 232836 - DNA, 359 bp, Homo Sapiens
ttggatatagatccctaatgttcggaaacaattttttttgacaaccaaaaaggatacttctcattgttttctgttccacctaatacaattcagtggcatttcgtttaatttttttataaaatctgctttcaaaaggtcccatgggtgctgccttctctgctatgtctgaaaatttaagatatttactatgagctatattctgtgaatccaagcccatcagccaagtagagattgtgctatgaataaaaacatcaactttctttctgaaatattctaacactaaattaaataagccttcgttattttacctacctctactggtcagaaagtttaattgtattcaataattcccaaaagac

SEQ ID NO: 232837 - DNA, 445 bp, Homo Sapiens
tgtacaaataactaggctcattggctaccataatgttatttcattgcaagtgagggggaggggtttgagtttgatcgttattgtatttcgtaagcggttgtttgattcaacaatgcaaccttgataactcgtaaatgccaaagaaatcttccctcggtgatgtccttttgattggcacatgctaccgactgccctaactcctgggcctgggtgtgtgggggtcaagcttgtctgtctctgcctccagcaacaggatttgatcgaactgatccgacagcgggagacagaggcggcgctggattttgcactatgttggccatgggaatgctatcaggaaagccgaaagtgcctcacagagatggaacgtactctggcactgctggccttatactgtcccaagaattcgccctacccagacctcctctctggtggcaatagcagaagg

SEQ ID NO: 232838 - DNA, 460 bp, Homo Sapiens
  misc_feature (49)..(326): n is a, c, g, or t
tttttttagaccctaaaaaaacactgtcttcacagagtttcattgcacnnnnnnnnnnnnnnnnnnnnnnnnnnnnnnnnnnnnnnnnnnnnnnnnnnnnnnnnnnnnnnnnnnnnnnnnnnnnnnnnnnnnnnnnnnnnnnnnnnnnnnnnnnnnnnnnnnnnnnnnnnnnnnnnnnnnnnnnnnnnnnnnnnnnnnnnnnnnnnnnnnnnnnnnnnnnnnnnnnnnnnnnnnnnnnnnnnnnnnnnnnnnnnnnnnnnnnnnnnnnnnnnnnnnnnnnnnnnnnnnnnnnnnnnnnnnnnnnnnnnnnnnnnnnnnnnnnnnnnagaagaagtttaagggttttatgcaccatcattattatagtaaagaatatgtgtctatatacatttataataaagaggtttatatttataaatgtttttataatggtgtccatcatttttcagcataaaggact

SEQ ID NO: 232839 - DNA, 680 bp, Homo Sapiens
aacattaagagcaactttgtacaaaaaagttggattcattcaacaaatatttcttgtaccaggcgctattgtatttggaagttttatgttaaacctgattctgtgatatgtcaaagatggacagggaaactaagtactgtgttaaaaatatggaaaccttgctaccaaagtaccccaagggagaagtgaacaaaaactgatgctgtagctatcaaaagagaaaggttaaaaaccagtggtgtaagcagagcagccctaactcctgaaagattagagttggcaaattgcaactgaaactggagaaaatatttaggcccataagagagacattcagtacccacaaaataattcagcaacattcatctttgtgagagagaggacatgggaataaatttcactggtatctgttgggttgacagaataactaatctaatttgaatctagaaattgaaagaataacaaaagtttgtagaagagcagtgccaggttagagaactttgacctgagctggaaagggctgaatttaaaaaataaagtgttgaggagataatctgttgtaactgcttacaggtcagttatttgccatttaatatactatatgccttccatacattatctaacttaattctgacaacaatcccaagaagtgctagtattatttctactttacagaagataaa

SEQ ID NO: 232840 - DNA, 280 bp, Homo Sapiens
ctcacctgcttctgcacggcctttgtggatttgtaatatcttgggtcaaatctatggtgcccgttaaggagcttgacccatcgtttcgagaaaatttctggaaatacctgaagatcgaaaacatttgaccttggaatacactaaatctcaccttaaatctggtctggttgctcaccggatgagcgacaataacccttggctcctttaaggaatcgggaattaaacttgcaatataggtccttacattcctctgcgcttcctgaaccaataagctgatgtt

SEQ ID NO: 232841 - DNA, 739 bp, Homo Sapiens
  misc_feature (107)..(199): n is a, c, g, or t
  misc_feature (274)..(645): n is a, c, g, or t
ttggctataaaacactaatgaaaaaattaaaagaagacctaagtaaattagaaagattagccatgttcatagattagaagactaaatatttttgtaattaattttcnnnnnnnnnnnnnnnnnnnnnnnnnnnnnnnnnnnnnnnnnnnnnnnnnnnnnnnnnnnnnnnnnnnnnnnnnnnnnnnnnnnnnnnnnnnnnagggcaaggagctacaatagctagtacaattgtgaaaaaggaaaacagcattggaggactcttgttatctgagtnnnnnnnnnnnnnnnnnnnnnnnnnnnnnnnnnnnnnnnnnnnnnnnnnnnnnnnnnnnnnnnnnnnnnnnnnnnnnnnnnnnnnnnnnnnnnnnnnnnnnnnnnnnnnnnnnnnnnnnnnnnnnnnnnnnnnnnnnnnnnnnnnnnnnnnnnnnnnnnnnnnnnnnnnnnnnnnnnnnnnnnnnnnnnnnnnnnnnnnnnnnnnnnnnnnnnnnnnnnnnnnnnnnnnnnnnnnnnnnnnnnnnnnnnnnnnnnnnnnnnnnnnnnnnnnnnnnnnnnnnnnnnnnnnnnnnnnnnnnnnnnnnnnnnnnnnnnnnnnnnnnnnnnnnnnnnnnnnnnnnnnnnnnnnnnnnnnnnnnnnnnnnnnnnnnnggcaaaatccataaaatgaaaaactggatacattggacttcatcaaaattaaacatttatactctttggaacacagtgttaagaaaatgaaaag

SEQ ID NO: 232842 - DNA, 780 bp, Homo Sapiens
  misc_feature (432)..(470): n is a, c, g, or t
ggccccctggagtactttgtgcctgatcttgtttttgggggaaacctgtcttgcctttcagccctttttcttcccgatctgaaccccttcctttggctcttgcccgggttttcccatttgactctgaaagaaggctgaaaaagcggacgaacttgctgacttaatggggacgtttggatgaaattttttcttgctttgtccagagggagacaggtaagccatatagaggaacccagacttaattttgctgcttcctttcttttccccctatatgacatctttttataaaaatcatagatgcctgattaaagtgacatctgggtgtcaggaaatcagatttttggatgtgcagtggtaatgaggtacgaacactaggttttataatggatatcaataaggactttctatgcagacttttgcactaaaataccnnnnnnnnnnnnnnnnnnnnnnnnnnnnnnnnnnnnnnnactgggcatcaacttcctcactcataacatagccatgaaaatacctgtctcacttggttactatgaggattaaatatgacatcctgtgtataacatctacttaattgctgcgcacagaaccggtgctttgtaaatataatctcaacctgatgatgcataccatgacatgtcatttactctgcaagtcgtcatcttgatctggaaactcttcatgctttgacatcgagtaccatataatctattaaccatggtaaaggtatagtatacagtgctttcttatctaaccttgtgcatataggaagcttatttt

SEQ ID NO: 232843 - DNA, 342 bp, Homo Sapiens
ttggctccttattacctgactttcttaacccaaccatttacccaaataaagtataggcgataaaaattgaaacctggcgcaataaatataatacctgaagggaaatatgataaattataaccaagcattgaaggcctgagagtaacgggggtaccttctgcctactgaattacctaaaaataactttgctgcgagagaatcctctgtgaaccccaattccttacaagctacctaacttttcctcacagagccctcacgactatgtagcaaattaatgggaacatttataagtacaggctacaatcccccgaagcgtggtgataacaggatgtccttcataaa

SEQ ID NO: 232844 - DNA, 187 bp, Homo Sapiens
ctaataaaaaactttgtacaaaaaagttgggttggttcattgcccataaaataacgttttaataacattcttgttcttttaagtccccccatgtattttacaacgcatacccacctcaccctaagcctcctatttattctataaacctctaaactagccgtttactcaatcctctgatcagggtgag

SEQ ID NO: 232845 - DNA, 403 bp, Homo Sapiens
  misc_feature (93)..(172): n is a, c, g, or t
  misc_feature (186)..(324): n is a, c, g, or t
cttataaaagggactttgtacaaaaaagttggctcagtcaaccatccctatataaacatagagcatctacttcgtgccgtcttgtcaacggannnnnnnnnnnnnnnnnnnnnnnnnnnnnnnnnnnnnnnnnnnnnnnnnnnnnnnnnnnnnnnnnnnnnnnnnnnnnnnngcttagtgatgtgnnnnnnnnnnnnnnnnnnnnnnnnnnnnnnnnnnnnnnnnnnnnnnnnnnnnnnnnnnnnnnnnnnnnnnnnnnnnnnnnnnnnnnnnnnnnnnnnnnnnnnnnnnnnnnnnnnnnnnnnnnnnnnnnnnnnnnnnnnnttgtgatttgttcctgccccaccttaacttatctattattctgcgaacttccttctcctccctcattaatcttcccccc

SEQ ID NO: 232846 - DNA, 146 bp, Homo Sapiens
tttcgacccatttttacaggactatttttcaatttaaaactttcaacatttgcatgggaatatgttcattccaagttgtaaagtacaacataacaggttatggccaaacatcctatttaatctcaactcaaatatggaggatagaa

SEQ ID NO: 232847 - DNA, 570 bp, Homo Sapiens
ttggataaatattattataacatttcccatctcttctctgagaatactaatatatcgctcacatctcatatcctccctactacgcctaaagagaataatactatctgtgttcattatctccactctcataaccctcaacacccactccctcatacccaatagtgtgcctagtgccataatactctttgccgcgtgaaaaacaggggtgggcctacccctactactctcactctccaacacatatggcctacactatgtatataacctaaacctactcaagtgcaaaaactactcctcccaacttatataataatacctgtgatgtgattttccaaaaaacatatattttaaatcaacacaaccccccacagcctaattaataacatcatccctctgctattttttaaccaaatcaacaacaacctatttatctgttccccaaccttttcctcagaccccataacaacccctctcctaatactaactacgagactcctacccctcacactcgtggcgagccaacgccacatatccagtgaaccactatcacgaaaaacactctacctctct

SEQ ID NO: 232848 - DNA, 254 bp, Homo Sapiens
  misc_feature (74)..(82): n is a, c, g, or t
  misc_feature (96)..(205): n is a, c, g, or t
ttgggacagagtgaaactccatctcaaagtgctaagattatggtatgagccattgcacccagccaaaagttagnnnnnnnnnaaagccaagccatnnnnnnnnnnnnnnnnnnnnnnnnnnnnnnnnnnnnnnnnnnnnnnnnnnnnnnnnnnnnnnnnnnnnnnnnnnnnnnnnnnnnnnnnnnnnnnnnnnnnnnnnnnnnnncaatgaaataaatgttaattttttaaaaaatattgaacatcggctgggt

SEQ ID NO: 232849 - DNA, 129 bp, Homo Sapiens
ggccagaacattttccttaaacgggaaaaattgcccacgagggagaatgggggaatatgatgaattttgcatttcattataggcggtagcaggccatccagtgaaatgtgcagctggccctaggaaata

SEQ ID NO: 232850 - DNA, 135 bp, Homo Sapiens
gccccccgcctcggcttgcggcagtctcgggtttctttccctacggaaagaataatattggacccttgaattctggaagttcattgaagattttgaacttctgaacttatttcatatttggacatggctactcaa

SEQ ID NO: 232851 - DNA, 220 bp, Homo Sapiens
cttttagccaactttgtacaaaaaagttggcatcgacccccccggcacctaccacggggacagcgacctgtagctggaacgcatccatctgtactacaatgatgccaccggctgcgctcacgtgccccgcgctgtgctcgtggatctggaacccggcgactattactccgtgcgctctgggcccttcaggcctatcttcccgtttcaccacttccttttc

SEQ ID NO: 232852 - DNA, 444 bp, Homo Sapiens
caactttgtacaaaaaagttggcttctacgctcctttttggaacaccccgcgatcggcccaatggcctccataaagaactccaaatgtcctgtaaggtaacctctagtaccctctgaggaacctctggtccccgggccttatacaacctctcctacacagtggacccatatccctcatattttccataagcttctctatagtgggcagctgtaactttcgttctggcctgtgcggcggctctcaagggatctgcggcatatgaagaatcatacccattctgtgcaaccactactgctgagcccccttgtcatgtacgtggaccccaacatttatttactgcgcacccaggacatggagcatatcaagaccatcaccaagaagtttgcctccttataaaacaacgtatagctcctggaccaacataacaagatgcaggaaaccaa

SEQ ID NO: 232853 - DNA, 677 bp, Homo Sapiens
ttggaaaaatacgctcttctgtggacctgtgcgagatcttttacactacacatctgttttttatatagtttttgctattagaactttgttttggagaaagcgcctccctaccccgctcttgtatatacacctctatattttgtccgtgttcatacttttggggagaaaaccccatagtgtttcttctctgtatacccccctgacattatccccagtgtgtataaaaatatattaagacccatatatttttgagagaaactttttacacctttttttagagaaacaatatccccacaacacactttttgaacaatctctcctcttttctcagatgatctttctctgtatactctgtggaacacccctatcctcttcaaagtggttgtgtactctgtgtattatacgctgttacacaattttactgactctctgcgtggcccccacgagagtgagaaaactgcgccctcatattttgtactcatatgtcacgagatataatatatatgtttaccctccttcacgcgcatgtcgtgcacaccgggccaatatctatatatgtgtatgtacgtgtgtatgtgtgtacacatatatttagagggatatttgtgcccagactccaagaggcctctattatacgagaaaaatcacgtggctctcaataataacagcgctcgtgt

SEQ ID NO: 232854 - DNA, 450 bp, Homo Sapiens
  misc_feature (84)..(223): n is a, c, g, or t
tgcccatatatgaagagacaatacagtttgcttcctctctctctttctcttcacattatgagaatacaacaaaaagatggccannnnnnnnnnnnnnnnnnnnnnnnnnnnnnnnnnnnnnnnnnnnnnnnnnnnnnnnnnnnnnnnnnnnnnnnnnnnnnnnnnnnnnnnnnnnnnnnnnnnnnnnnnnnnnnnnnnnnnnnnnnnnnnnnnnnnnnnnnnntgtcactgcctctaaaagtaaatacccagcttgttagaaccactgaccaatacgatgatgttgttattaatgcagaataaagccagccttcggttcttatctatctaagaaatgaatggaaatgtaagttgaaacttatttaagtatatctcgttaacgaaaaatttataccggtgtgagcagggtgtaggaaaatcacaagtgacagtgtgaaacaaagacagtgc

SEQ ID NO: 232855 - DNA, 298 bp, Homo Sapiens
caataaacaactttgtacaaaaaagttggaattctacgctattcgacaacgccagctttaccaagaagagatgttcgacaacttcgacttgttcgttgacatccagttcaagtaattcggggagactcttacacatataaagacccatttaaacagcttatgaaatgtttattcgttaactttgactttgatggggccctcaggtttcacatggaatgttattcactgcttgtaaaggacctcctcttgttggcttatcttgaagagttcattgaaaatgcccctctcctcattcttc

SEQ ID NO: 232856 - DNA, 846 bp, Homo Sapiens
  misc_feature (48)..(200): n is a, c, g, or t
  misc_feature (284)..(336): n is a, c, g, or t
  misc_feature (414)..(527): n is a, c, g, or t
  misc_feature (654)..(727): n is a, c, g, or t
cctaatagaaaactttgtacaaaaaagttgggaaatatattgaactannnnnnnnnnnnnnnnnnnnnnnnnnnnnnnnnnnnnnnnnnnnnnnnnnnnnnnnnnnnnnnnnnnnnnnnnnnnnnnnnnnnnnnnnnnnnnnnnnnnnnnnnnnnnnnnnnnnnnnnnnnnnnnnnnnnnnnnnnnnnnnnnnnnnnnnnatgataattggagtagaaatcaaagaaattaaataggggaaatgggtacagaaaatcagtgaacccaaaagttggttctgtgannnnnnnnnnnnnnnnnnnnnnnnnnnnnnnnnnnnnnnnnnnnnnnnnnnnnctggtatcagaagtgaaagagggaccatcactactgatccatggacctttattgtccattatccatgagtaataaagnnnnnnnnnnnnnnnnnnnnnnnnnnnnnnnnnnnnnnnnnnnnnnnnnnnnnnnnnnnnnnnnnnnnnnnnnnnnnnnnnnnnnnnnnnnnnnnnnnnnnnnnnnnnnnnnnngtctgtatctattaaagacgtttaatgaatgactaatgactgaaaacagaagcgccaagcacagatgggttcgctagtagattctacttaacatttgtggaagaaattataccagttatgtatagtnnnnnnnnnnnnnnnnnnnnnnnnnnnnnnnnnnnnnnnnnnnnnnnnnnnnnnnnnnnnnnnnnnnnnnnnnnatcaaatctgacaatgtataggaagaattatacaccatcaccaagtaggatttattccaggtatgcaagactggttcgatattagaaaagcaattactgtagcccatcacctcaatcag

SEQ ID NO: 232857 - DNA, 874 bp, Homo Sapiens
  misc_feature (73)..(98): n is a, c, g, or t
  misc_feature (123)..(502): n is a, c, g, or t
  misc_feature (504)..(628): n is a, c, g, or t
aagacaactttgtacaaaaaagttggccccctaccaacctactgtctcttttcagaagcataataagcagggnnnnnnnnnnnnnnnnnnnnnnnnnnaagaggtagggcctcactctgtcannnnnnnnnnnnnnnnnnnnnnnnnnnnnnnnnnnnnnnnnnnnnnnnnnnnnnnnnnnnnnnnnnnnnnnnnnnnnnnnnnnnnnnnnnnnnnnnnnnnnnnnnnnnnnnnnnnnnnnnnnnnnnnnnnnnnnnnnnnnnnnnnnnnnnnnnnnnnnnnnnnnnnnnnnnnnnnnnnnnnnnnnnnnnnnnnnnnnnnnnnnnnnnnnnnnnnnnnnnnnnnnnnnnnnnnnnnnnnnnnnnnnnnnnnnnnnnnnnnnnnnnnnnnnnnnnnnnnnnnnnnnnnnnnnnnnnnnnnnnnnnnnnnnnnnnnnnnnnnnnnnnnnnnnnnnnnnnnnnnnnnnnnnnnnnnnnnnnnnnnnnnnnnnnnnnnnnnnnnngnnnnnnnnnnnnnnnnnnnnnnnnnnnnnnnnnnnnnnnnnnnnnnnnnnnnnnnnnnnnnnnnnnnnnnnnnnnnnnnnnnnnnnnnnnnnnnnnnnnnnnnnnnnnnnnnnnnnnnnnnnnnnagtgtaagccaccgtgcccagtctagcatttcttattgtatactgcagcaaaaaattattgatcaccaccaccttctttcatctccaaggtccagtatgtcatcaatgtgagcgggatatttctaaaagctttctagcatctcttcttggtgcccaatgccatgaccccagtccagctgctaattaacttgtgcctgaatcactgtaagatatctagctggcctctcagattctaccttcctcccc

SEQ ID NO: 232858 - DNA, 257 bp, Homo Sapiens
gacattaaaggcgctttgtacaaaaaagttggatatactgaacctcatcaaactcaaatggactaatctatcaccctatacaatatctcatgttagtataaataatttgaagacaatctcatccacataaccctgcgtctgattactggttgtaactgacaaaaaccaacttcatatctaaattcgcccacaaaatccttattaccccctttgtcaattaaccgcaagcatgctcataaagaaaggtttggaaaagt

SEQ ID NO: 232859 - DNA, 303 bp, Homo Sapiens
agcattaaagggactttgtacaaaaaagttggctcttcttttctcccttaaaaaaatggaaaggtgtgttatggaaataataatacccgtaaataaactcactctttgggttatgtgaatttgtgcacgtgaatatgtacaaaatttatcacgattgtggttcatactatgtacctgcaatctgtaatgattactttcccagtatccagaccgacaatatcaccaaacatatacatgaaatccgccccctaacttgaactaatccttcttcctatagatgattccaagatcttaaaatgaata

SEQ ID NO: 232860 - DNA, 488 bp, Homo Sapiens
  misc_feature (368)..(376): n is a, c, g, or t
tgtacaaatgagttggatcttccttatgaacattgaccctccccactgggcgcctggttcttgtctcctattcctctggctacatcccagtttgagaagcaacaggcaaaaaagactgcctcccgcaagccctgccatttctgtgggctcccgtccctactggatcctgcccctgacttcctcctttccgccccaatgaacaaggaagtctcttttaagcacttgcttatgatgctgcaaccggcgctccacccacccacctctcatggaactaaagtggtgctgggcctggctgagaatacagagcaactgacctgtacgccttccaagacaaagaacaaaaaattccactggaaaaactcggcccnnnnnnnnnttatgggaaatcagggctccttcttgagaaaggtccatcacagctggctgatcgcgctgacgtttgcgagacctttgggacccatgaaactttcccctgataatcaagaatc

SEQ ID NO: 232861 - DNA, 254 bp, Homo Sapiens
ttggccccgactaatatttgaacaggccataaaattaagatcacgtatccaaatctgtatgcatttaatcagaaacaggaacagacagagactgatagaaaggaaacggactcttactcttaatctttatgaaattcttattcccatcctccccatcccctttgctcctcttcccatatctttattttcctttctgttactactatctccttcccctccctcctcttcttcccctcaccccccgcatacacgat

SEQ ID NO: 232862 - DNA, 173 bp, Homo Sapiens
cacagtagaggttaagccacctggccgggctctcacagttagcagaaggcagaggccaaattggaatccaaactgctcagcatctgtgctcctcagttccaagaagttaaagagtctaggaggcgagcttcgggggacccatccttgatcatcgatcgttgtcgcccctccgc

SEQ ID NO: 232863 - DNA, 129 bp, Homo Sapiens
gtcgactacaggtcattaatgccatgcacgtagttgattaaaagtgactggataagatgtgctttacagcattaagacggcccttcctcgtcaccaccatcacaaaaagcccctctcttctcacccaac

SEQ ID NO: 232864 - DNA, 388 bp, Homo Sapiens
  misc_feature (270)..(280): n is a, c, g, or t
ccaataaaaagctttgtacaaaaaagttggcaggctttttgcccttccagaacaatgcagcaagagaaactgtgtgtgaggggaagcggcctgtttcgctgtcggggtctctagttcttgcacgcctcctttaagagtcctgcactgggaggaactcctgcaattaacaagcttcccttcttggcaaaagggaagggggaaaacttacattttattcctggccattctggtttgcatgaattgcccccaacctcccttaatggccaaatnnnnnnnnnnnaaaaaattcctgggaaacccccatctcttttttttccttttcccctttgaaggaagagggaaaaatattgtgtataaaacaaaagttccctttttcccgagccaaacc

SEQ ID NO: 232865 - DNA, 441 bp, Homo Sapiens
  misc_feature (43)..(51): n is a, c, g, or t
  misc_feature (116)..(160): n is a, c, g, or t
  misc_feature (175)..(238): n is a, c, g, or t
  misc_feature (255)..(322): n is a, c, g, or t
ggagggggaaaattttttattcaatttgggaaggaaagttttnnnnnnnnntgttaaaaacccccttaaaaccctggtttgttcttttgacattttttccgccccaatttttattnnnnnnnnnnnnnnnnnnnnnnnnnnnnnnnnnnnnnnnnnnnnntaacccctatttgcnnnnnnnnnnnnnnnnnnnnnnnnnnnnnnnnnnnnnnnnnnnnnnnnnnnnnnnnnnnnnnnntcccccagttaacgggnnnnnnnnnnnnnnnnnnnnnnnnnnnnnnnnnnnnnnnnnnnnnnnnnnnnnnnnnnnnnnnnnnnncatgtcaacagtcatttaaaaattttgacctgacattttctaaaaaaagggattttccccaaaataaaaggaatctgttacctggggtaaaacttccaaaaaccaagtaggaagggggg

SEQ ID NO: 232866 - DNA, 488 bp, Homo Sapiens
  misc_feature (310)..(372): n is a, c, g, or t
ttgggtgttggtggggaatttgactgcgtggcccgtgtgtgcctcgagagtgtgtactcactagatcctctggaatttaatgcccgatcatatgggacaatatgtccgctcctgcatgcccatataagtctcttctgtttttcctgtaaagaatggcattggttttgaataccaaaatggtctagaactcctgtctatcttttaaccttccacctcatccaccacaagttctgggttacaggtgtgatgatttcttattggctatttttggtttttcatggaagacttttctaactattcagggatttcnnnnnnnnnnnnnnnnnnnnnnnnnnnnnnnnnnnnnnnnnnnnnnnnnnnnnnnnnnnnnnncattgactatgatattaaattgttctttgtttagcgaataaaaccaaatgattgttgtgtcgcgatcatatcacgttcatgcatggaatttaaactgccatataactatttgtatt

SEQ ID NO: 232867 - DNA, 966 bp, Homo Sapiens
  misc_feature (71)..(122): n is a, c, g, or t
  misc_feature (190)..(519): n is a, c, g, or t
  misc_feature (690)..(852): n is a, c, g, or t
ttggcgatatggtggttttgtgcatagtaatccaagggaaaactatagaaaatccaaaggcatgatttatnnnnnnnnnnnnnnnnnnnnnnnnnnnnnnnnnnnnnnnnnnnnnnnnnnnntggttatctttcaatatagtatcaatgaataaatcaaaaatgatgttaagaaaacaatttaattttcnnnnnnnnnnnnnnnnnnnnnnnnnnnnnnnnnnnnnnnnnnnnnnnnnnnnnnnnnnnnnnnnnnnnnnnnnnnnnnnnnnnnnnnnnnnnnnnnnnnnnnnnnnnnnnnnnnnnnnnnnnnnnnnnnnnnnnnnnnnnnnnnnnnnnnnnnnnnnnnnnnnnnnnnnnnnnnnnnnnnnnnnnnnnnnnnnnnnnnnnnnnnnnnnnnnnnnnnnnnnnnnnnnnnnnnnnnnnnnnnnnnnnnnnnnnnnnnnnnnnnnnnnnnnnnnnnnnnnnnnnnnnnnnnnnnnnnnnnnnnnnnnnnnnnnnnnnnnnnnnnnnnnnnnnnttgacagcatcagaaagagtaaaataccaatataattgagggtccagaaatattgatcacatttatcatcaactgacttttgaaaatagtgctaagacaattcaatgggggcaaaatagtctttttcattaaatgatgcttggaaacatggatatccacatgcaaaataannnnnnnnnnnnnnnnnnnnnnnnnnnnnnnnnnnnnnnnnnnnnnnnnnnnnnnnnnnnnnnnnnnnnnnnnnnnnnnnnnnnnnnnnnnnnnnnnnnnnnnnnnnnnnnnnnnnnnnnnnnnnnnnnnnnnnnnnnnnnnnnnnnnnnnnnnnnnnnnnnnacacaagcaccaaagaagaaattaggtaaattaaaattaaaaacattttgtgtttctaaggacaatatcaagaagcaaaatacaacccacagaatgagataattttttttaaaa

SEQ ID NO: 232868 - DNA, 514 bp, Homo Sapiens
  misc_feature (41)..(68): n is a, c, g, or t
tacaaaaaagttgggtccaaccacccccccggcccggcaannnnnnnnnnnnnnnnnnnnnnnnnnnnccccttactgaagctgcactccggtttttggctggtgtgtgtttcgccggtttggaaagaccaaactatgaacctaatcctctctaccatgaaaatgctgtgctaccgaaatgttctgctgtactggacagttgtatttcttcttctccccgtgaaatggaaagttgatctcttcactcttctgcccagcctgtcctgaaaaaaatgctaagcaaaaaacattgcatagctgtacttgattccattcctgggcaggaagagagtgacccgcgttacaatataaacatatgctatgtaaagtacaatgtgaagagaataaatcataccgcaagtgaaaaggaaaaattcaatacaggagaatctacttcccatacagttgctgatatgactagacgtgaaaatggcctgcccaatgaaagtttaatttccattcctcataccgatgg

SEQ ID NO: 232869 - DNA, 138 bp, Homo Sapiens
ctgttgaaaagccaactttgtacaaaaaagttgggttaaatgcttttaaaaaggggattctcccaggcactaaactagttaagccgggagtataactagttcaaatagacgatgactctcagaaagtgggtctctgga

SEQ ID NO: 232870 - DNA, 765 bp, Homo Sapiens
  misc_feature (362)..(518): n is a, c, g, or t
ttggccattctttccctctttgtttataatgctgcctttttaatatacatatgactctatttgtgatctctctatctctgttttgaaagacccatattataaggcttgattatttgtaggactgctctctccattttcttcttcaaattattgtagctattcttagccttttgctcttccacataaatactaagatcagtttgtctagttacatacacactcatataggcataccatatggacacaaatcaatataagatattagtaaaaattgcatagcatccatagatgtatttagagagaattcagaggtgaggaaactgaaattcaagcaaagtgaataatttgctcaagtatgtctnnnnnnnnnnnnnnnnnnnnnnnnnnnnnnnnnnnnnnnnnnnnnnnnnnnnnnnnnnnnnnnnnnnnnnnnnnnnnnnnnnnnnnnnnnnnnnnnnnnnnnnnnnnnnnnnnnnnnnnnnnnnnnnnnnnnnnnnnnnnnnnnnnnnnnnnnnnnngaataataatgtaaatgaaaatgaattatgtttttctttccattcttccacataaacccccaagtagaattgaaaaacagcagtaaaagccaccttaaacttacactttttgtaaatttgtaaattgcttgttcctggatgggcaggtagtgtgttggcatcatcctggcagcattgttgtcttttactccttggcacaatagaacatccattgtgaccctgtgtgactagtgatatgtaacttttg

SEQ ID NO: 232871 - DNA, 803 bp, Homo Sapiens
ttggcagaatactcacctcagctgactagctcctattcatccttcatggcttagtgtaagtgctgcttcctcagagaggccttccctgcaacctcatctaaatcaggttccctcttggccttcccctttgtgatagtacccatcacagttgtaataataattacgcaaatgattttttctttaatgtgcttctccctttctagacagtgaacccatgaagccatgttgttcaccactggatttttggtgctagcacagtccctgatgctcaagcgtttcgttattcaaggaataaatgaagacacagcactagtccctaggaccttgactcaggccccaccctcccagagccacagtctggaggagatagcctcacagaaagctgttatactggagtgggatacatttctgtaatttacagtgttcattgttcacctctaatttctgttcttaaagacagaactcatcaagggacttcagacttccaagttattttcagaaaggaatgaggtagaaataagtgtcagtacagttaacaagtccaaggagaaggcttactctgtaagtgttggctccaagcagagctgctccctgaacgtggctccccggccagctcaaccacaaccctgtggcctggtgtggcagtccctggcaggccaacaaagccacagccttctcagagcccagtcccatgaagtcacacacagaggagcatgctctggaggctcccagaacaagccagggacctaagtgaagacactcccaagaccagcacccatgccgcctgtcctgccctctctgaa

SEQ ID NO: 232872 - DNA, 481 bp, Homo Sapiens
ttggcattttctgacatgacagagatttgactcaatatttgtagagcttgcgtagaatggattacatggtagtgatgcactggtagaaatgcgtttttaagttaattgactcaaaattcatctcaggatgaaatcttttatgtcctttttattgtagccatatctgaatttacttttataaagatggttttagaaagctttgtctaaaaatttgggcctaaggaagtggtacttctattttcattgtcacaggggtaaacatatttattagggacacatctctgagaagggttttatatatatttttccaaattcggggacaacacatttttatatattgttacaaaggggggagctcctttttcccccccgggggagaaaacctgtgaacacccgggttcacccctctaaagaaaaaattttttggcacaaccccttttttttatatgtggggcgtaaaaggggggattttttaaaaaaa

SEQ ID NO: 232873 - DNA, 379 bp, Homo Sapiens
ttgggattggaacatggtcaggtcagcaacgccacctcaattcccttgccttttctagatttgagaaaactgtgttctgtaggggtagaagacatggctacgttctggtctgggatacgcagtgcaacaaatgggatgggttttatagggaagtgaatcaaagcagcgcagctcaccttacatcagacaaccccaccccttcaaaacacaaaaagaaactcaattcgaaatgacttgctccttcagtggatttccagcgtaatggtgctgtggtcctctttcaagactagaataccttaatctcgacctgagctgtggatgggataatcaaggtatgggatttacatttaaattgtactgcttatcgaccacaacccat

SEQ ID NO: 232874 - DNA, 900 bp, Homo Sapiens
  misc_feature (88)..(254): n is a, c, g, or t
  misc_feature (258)..(558): n is a, c, g, or t
ttgggataaattaaccaagtggaaatctggactatatccatagctcaaatttggtcctctccacacactttcataaaacatttctggnnnnnnnnnnnnnnnnnnnnnnnnnnnnnnnnnnnnnnnnnnnnnnnnnnnnnnnnnnnnnnnnnnnnnnnnnnnnnnnnnnnnnnnnnnnnnnnnnnnnnnnnnnnnnnnnnnnnnnnnnnnnnnnnnnnnnnnnnnnnnnnnnnnnnnnnnnnnnnnnnnnnnnntttnnnnnnnnnnnnnnnnnnnnnnnnnnnnnnnnnnnnnnnnnnnnnnnnnnnnnnnnnnnnnnnnnnnnnnnnnnnnnnnnnnnnnnnnnnnnnnnnnnnnnnnnnnnnnnnnnnnnnnnnnnnnnnnnnnnnnnnnnnnnnnnnnnnnnnnnnnnnnnnnnnnnnnnnnnnnnnnnnnnnnnnnnnnnnnnnnnnnnnnnnnnnnnnnnnnnnnnnnnnnnnnnnnnnnnnnnnnnnnnnnnnnnnnnnnnnnnnnnnnnnnnnnnnnnnnnnnnnnnnnnnnnnnnnnnnnnnnnnnnnngaggtaaatttaaggccaagattgatgtggaagtgaaaaggattttggagagagggaaaaggtagaagttcacaaatgccaattttgtatttctcgccttctgggatctacaccaatttagaaatagccccaagactaggatagggtaaggaaaagattgtattagcttcattacccccatagatagggtaccctagagttcctgaattgggaaaaatgcctgggatctgtaaccaaaactggacctcctactacagtccctcaattctagaccttggaagtgcacttaaggagggttaggtctgtacggtagacacttagccagccagagacatcacaccc

SEQ ID NO: 232875 - DNA, 544 bp, Homo Sapiens
  misc_feature (98)..(122): n is a, c, g, or t
  misc_feature (195)..(489): n is a, c, g, or t
ttggagaaatataaagttctaatgtaaagaaatgtaaggttaccttaagagatcagaatgtgttctttagcaagacttgattacaactgaagtttgtnnnnnnnnnnnnnnnnnnnnnnnnnggtatatttacaaaaacacttctaacctcttgtaaggtaccttaagaacgtgccaatcagaaagggggttagnnnnnnnnnnnnnnnnnnnnnnnnnnnnnnnnnnnnnnnnnnnnnnnnnnnnnnnnnnnnnnnnnnnnnnnnnnnnnnnnnnnnnnnnnnnnnnnnnnnnnnnnnnnnnnnnnnnnnnnnnnnnnnnnnnnnnnnnnnnnnnnnnnnnnnnnnnnnnnnnnnnnnnnnnnnnnnnnnnnnnnnnnnnnnnnnnnnnnnnnnnnnnnnnnnnnnnnnnnnnnnnnnnnnnnnnnnnnnnnnnnnnnnnnnnnnnnnnnnnnnnnnnnnnnnnnnnnnnnnnnnnnnnnnnnnnnnngaaaagagattgatcaacaatagaaaatgaaaggtcaaaggaaaacctttgggct

SEQ ID NO: 232876 - DNA, 100 bp, Homo Sapiens
ggaaattactcagggccgaaattaatacaccacccgaggggaagttccattatgccatctgattgaactgagaataaaaacccatcttcacgaagtttcc

SEQ ID NO: 232877 - DNA, 987 bp, Homo Sapiens
  misc_feature (57)..(926): n is a, c, g, or t
tcccctatagtgagtcgtattacatggtcatagccgtttcctggcagctctggcccnnnnnnnnnnnnnnnnnnnnnnnnnnnnnnnnnnnnnnnnnnnnnnnnnnnnnnnnnnnnnnnnnnnnnnnnnnnnnnnnnnnnnnnnnnnnnnnnnnnnnnnnnnnnnnnnnnnnnnnnnnnnnnnnnnnnnnnnnnnnnnnnnnnnnnnnnnnnnnnnnnnnnnnnnnnnnnnnnnnnnnnnnnnnnnnnnnnnnnnnnnnnnnnnnnnnnnnnnnnnnnnnnnnnnnnnnnnnnnnnnnnnnnnnnnnnnnnnnnnnnnnnnnnnnnnnnnnnnnnnnnnnnnnnnnnnnnnnnnnnnnnnnnnnnnnnnnnnnnnnnnnnnnnnnnnnnnnnnnnnnnnnnnnnnnnnnnnnnnnnnnnnnnnnnnnnnnnnnnnnnnnnnnnnnnnnnnnnnnnnnnnnnnnnnnnnnnnnnnnnnnnnnnnnnnnnnnnnnnnnnnnnnnnnnnnnnnnnnnnnnnnnnnnnnnnnnnnnnnnnnnnnnnnnnnnnnnnnnnnnnnnnnnnnnnnnnnnnnnnnnnnnnnnnnnnnnnnnnnnnnnnnnnnnnnnnnnnnnnnnnnnnnnnnnnnnnnnnnnnnnnnnnnnnnnnnnnnnnnnnnnnnnnnnnnnnnnnnnnnnnnnnnnnnnnnnnnnnnnnnnnnnnnnnnnnnnnnnnnnnnnnnnnnnnnnnnnnnnnnnnnnnnnnnnnnnnnnnnnnnnnnnnnnnnnnnnnnnnnnnnnnnnnnnnnnnnnnnnnnnnnnnnnnnnnnnnnnnnnnnnnnnnnnnnnnnnnnnnnnnnnnnnnnnnnnnnnnnnnnnnnnnnnnnnnnnnnnnnnnnnnnnnnnnnnnnnnnnnnnnnnnnnnnnnnnnnnnnnnnnnnnnnnnnnngatcttttctccatcactgatagggagtggtaaaataactccatcaatgatagaggtgtca

SEQ ID NO: 232878 - DNA, 601 bp, Homo Sapiens
  misc_feature (100)..(523): n is a, c, g, or t
gacaacaaggaaaacttagttgtgtttctgtacactagcactaaacagtcaaaaggaaaattaagaaagaaaacaatttcatttacaaggcataaacatnnnnnnnnnnnnnnnnnnnnnnnnnnnnnnnnnnnnnnnnnnnnnnnnnnnnnnnnnnnnnnnnnnnnnnnnnnnnnnnnnnnnnnnnnnnnnnnnnnnnnnnnnnnnnnnnnnnnnnnnnnnnnnnnnnnnnnnnnnnnnnnnnnnnnnnnnnnnnnnnnnnnnnnnnnnnnnnnnnnnnnnnnnnnnnnnnnnnnnnnnnnnnnnnnnnnnnnnnnnnnnnnnnnnnnnnnnnnnnnnnnnnnnnnnnnnnnnnnnnnnnnnnnnnnnnnnnnnnnnnnnnnnnnnnnnnnnnnnnnnnnnnnnnnnnnnnnnnnnnnnnnnnnnnnnnnnnnnnnnnnnnnnnnnnnnnnnnnnnnnnnnnnnnnnnnnnnnnnnnnnnnnnnnnnnnnnnnnnnnnnnnnnnnnnnnnnnnnnnnnnnnnatgcacaactgtatggtgaaactgacttttgacagaggtgccaagaatacataatgaggaaacggtagtgttttcaac

SEQ ID NO: 232879 - DNA, 800 bp, Homo Sapiens
  misc_feature (139)..(448): n is a, c, g, or t
  misc_feature (451)..(723): n is a, c, g, or t
aaataatccaataaaattttaatagggagctgaacaaagtgcagtaggaaggcttcacagagaacctgacattttagcttctagaaggaagaggaaagattgaccaagggaaagcaaagttcccaaaatgggcttaagnnnnnnnnnnnnnnnnnnnnnnnnnnnnnnnnnnnnnnnnnnnnnnnnnnnnnnnnnnnnnnnnnnnnnnnnnnnnnnnnnnnnnnnnnnnnnnnnnnnnnnnnnnnnnnnnnnnnnnnnnnnnnnnnnnnnnnnnnnnnnnnnnnnnnnnnnnnnnnnnnnnnnnnnnnnnnnnnnnnnnnnnnnnnnnnnnnnnnnnnnnnnnnnnnnnnnnnnnnnnnnnnnnnnnnnnnnnnnnnnnnnnnnnnnnnnnnnnnnnnnnnnnnnnnnnnnnnnnnnnnnnnnnnnnnnnnnnnnnnnnnnnnnnnnntannnnnnnnnnnnnnnnnnnnnnnnnnnnnnnnnnnnnnnnnnnnnnnnnnnnnnnnnnnnnnnnnnnnnnnnnnnnnnnnnnnnnnnnnnnnnnnnnnnnnnnnnnnnnnnnnnnnnnnnnnnnnnnnnnnnnnnnnnnnnnnnnnnnnnnnnnnnnnnnnnnnnnnnnnnnnnnnnnnnnnnnnnnnnnnnnnnnnnnnnnnnnnnnnnnnnnnnnnnnnnnnnnnnnnnnnnnnnnnnnnnnnnnnnnnnnnnnnnnnnnnnnnnnnnnnngtctcaataaataaataaataataaagaccacagttgaaattcactggggtaggagagactttgacagtccaatgga

SEQ ID NO: 232880 - DNA, 529 bp, Homo Sapiens
  misc_feature (186)..(194): n is a, c, g, or t
ccccgtttttaaaaaccatttaatgatatgaagtaatgtccataaccccccgttaagtaaaaaccaaaatacaagggtccacgggccgtttaataccatttaaaaaaaacctacataccggggcattttaaaaatccggaaataaaatttaccgggggtggttccgggggggcaggatggttcccnnnnnnnnnccctcaacccttacggaatttccaaatctcctcaattagtgtaaggccttttaaaccccaaaaccacaaaacccatgattacttttaaaagccaccataccaccttacaaaattttatttacttttaaaagccaccataccaccttacaaaattttaattaccccacctctccccatgtattttatcattaataatccaaaagagataaggaaaaagattgtgtgagtgcccatcttttgtcccagcccccaaaatacaaatggtaatgaaagacagattggctgtgtaatccaacccaccatacaaccaatggaaagatgccacctgtggtgtt

SEQ ID NO: 232881 - DNA, 660 bp, Homo Sapiens
  misc_feature (169)..(211): n is a, c, g, or t
ttggctatattgatcattatacccaatcactttgtattttttctgtcatcagtgtcatatgtctttctggtttccgggtgtgatctttgtgtctcctttttgcctttcgcattctgattttcttgttggaagacgggtctagtttctaattgacaaattttttgttccnnnnnnnnnnnnnnnnnnnnnnnnnnnnnnnnnnnnnnnnnnnaaatgagatgcaagaaagaagaccaaatcccattcctgcaccccgctcccatatccaaataccacataccatatgagactaaactccaaacacaaggaaaatagaaaaaacttgtattgttacctgattcacttgcctattgccgtgtggcttttggatctaaaaattttacattcttaatccgcaatctgccatttcccattttccatcttaaaaatccacctgtgtctgctgaatgcgtatggatgagctcactgtggcttttgattctgtacccggggctagccctgttggccctgagaggaaaggaggaagcatgaagaatttagtgattagctggcctgtgtcacagtgacctgacatctaaccaccttccggctttaagtcctctctcatcacttggaatttcgaacttcttacttctccggtgacaggagaaacagaaaacg

SEQ ID NO: 232882 - DNA, 125 bp, Homo Sapiens
  misc_feature (71)..(85): n is a, c, g, or t
aagattttaggcgggtttcccagggggcccccaaaacctttgtggggggggtgtttaacagggctcccaannnnnnnnnnnnnnnaaaataacacaggggaaaacctccccctggccggggggcc

SEQ ID NO: 232883 - DNA, 820 bp, Homo Sapiens
  misc_feature (196)..(689): n is a, c, g, or t
ctgtaacatctgataatgctgtgaagaaaaataaagtaggtcaatgatatggagactgatggagtgagggagggtagaattttgttttaagtttggtgggcaatctctggagggatttgagaagggattgatatgatctgatcatgctgactgctgaatggagaatagagaatatctatgtgggcaaaaatgtcgnnnnnnnnnnnnnnnnnnnnnnnnnnnnnnnnnnnnnnnnnnnnnnnnnnnnnnnnnnnnnnnnnnnnnnnnnnnnnnnnnnnnnnnnnnnnnnnnnnnnnnnnnnnnnnnnnnnnnnnnnnnnnnnnnnnnnnnnnnnnnnnnnnnnnnnnnnnnnnnnnnnnnnnnnnnnnnnnnnnnnnnnnnnnnnnnnnnnnnnnnnnnnnnnnnnnnnnnnnnnnnnnnnnnnnnnnnnnnnnnnnnnnnnnnnnnnnnnnnnnnnnnnnnnnnnnnnnnnnnnnnnnnnnnnnnnnnnnnnnnnnnnnnnnnnnnnnnnnnnnnnnnnnnnnnnnnnnnnnnnnnnnnnnnnnnnnnnnnnnnnnnnnnnnnnnnnnnnnnnnnnnnnnnnnnnnnnnnnnnnnnnnnnnnnnnnnnnnnnnnnnnnnnnnnnnnnnnnnnnnnnnnnnnnnnnnnnnnnnnnnnnnnnnnnnnnnnnnnnnnnnnnnnnnnnnnnnaagttagaactttaaataattaatctggtaggaaaacgattttatgttatgcaaggtgacaattcaaacttcagaatgatctttacactctactaggagatgtgttattaatattatagctggtttctctc

SEQ ID NO: 232884 - DNA, 455 bp, Homo Sapiens
  misc_feature (46)..(161): n is a, c, g, or t
  misc_feature (250)..(368): n is a, c, g, or t
caggctgtaaagggcaggagggacgaataacagaggggtacaaaannnnnnnnnnnnnnnnnnnnnnnnnnnnnnnnnnnnnnnnnnnnnnnnnnnnnnnnnnnnnnnnnnnnnnnnnnnnnnnnnnnnnnnnnnnnnnnnnnnnnnnnnnnnnnnnnnnntcaactatatttccaaaaagccacaaggacaaggaatgttacttatactctagcagtagcataaaaactgaaatacttgaaaaatacannnnnnnnnnnnnnnnnnnnnnnnnnnnnnnnnnnnnnnnnnnnnnnnnnnnnnnnnnnnnnnnnnnnnnnnnnnnnnnnnnnnnnnnnnnnnnnnnnnnnnnnnnnnnnnnnnnnnnntaccatgtaaattcttcccaaattgtatagattcaaaacaatacagtcaaaatcccagaagtctttttgttattgaaattgacaagc

SEQ ID NO: 232885 - DNA, 660 bp, Homo Sapiens
  misc_feature (41)..(564): n is a, c, g, or t
  misc_feature (569)..(588): n is a, c, g, or t
ttggaccaagtagaatccctttatcccagggatgtgaggannnnnnnnnnnnnnnnnnnnnnnnnnnnnnnnnnnnnnnnnnnnnnnnnnnnnnnnnnnnnnnnnnnnnnnnnnnnnnnnnnnnnnnnnnnnnnnnnnnnnnnnnnnnnnnnnnnnnnnnnnnnnnnnnnnnnnnnnnnnnnnnnnnnnnnnnnnnnnnnnnnnnnnnnnnnnnnnnnnnnnnnnnnnnnnnnnnnnnnnnnnnnnnnnnnnnnnnnnnnnnnnnnnnnnnnnnnnnnnnnnnnnnnnnnnnnnnnnnnnnnnnnnnnnnnnnnnnnnnnnnnnnnnnnnnnnnnnnnnnnnnnnnnnnnnnnnnnnnnnnnnnnnnnnnnnnnnnnnnnnnnnnnnnnnnnnnnnnnnnnnnnnnnnnnnnnnnnnnnnnnnnnnnnnnnnnnnnnnnnnnnnnnnnnnnnnnnnnnnnnnnnnnnnnnnnnnnnnnnnnnnnnnnnnnnnnnnnnnnnnnnnnnnnnnnnnnnnnnnnnnnnnnnnnnnnnnnnnnnnnnnnnnnnnnnnnnnnnnnnnnnntctgnnnnnnnnnnnnnnnnnnnntctcatttacaatagtcacacataaaattaaaagcattggaattaatgtaaccaaagaagtgaaagatctct

SEQ ID NO: 232886 - DNA, 788 bp, Homo Sapiens
  misc_feature (130)..(437): n is a, c, g, or t
  misc_feature (477)..(728): n is a, c, g, or t
ttggccacaatatttaaattttaggaaagactggatagaaatataaaataagatactagtagtcctgctctgacttttctaaaacaagtttatattactttatttaaaaatgtttatgagagtgcctttnnnnnnnnnnnnnnnnnnnnnnnnnnnnnnnnnnnnnnnnnnnnnnnnnnnnnnnnnnnnnnnnnnnnnnnnnnnnnnnnnnnnnnnnnnnnnnnnnnnnnnnnnnnnnnnnnnnnnnnnnnnnnnnnnnnnnnnnnnnnnnnnnnnnnnnnnnnnnnnnnnnnnnnnnnnnnnnnnnnnnnnnnnnnnnnnnnnnnnnnnnnnnnnnnnnnnnnnnnnnnnnnnnnnnnnnnnnnnnnnnnnnnnnnnnnnnnnnnnnnnnnnnnnnnnnnnnnnnnnnnnnnnnnnnnnnnnnnnnnnnnnnnnnngggatttataaaacatatatgcaactcattaagaactttnnnnnnnnnnnnnnnnnnnnnnnnnnnnnnnnnnnnnnnnnnnnnnnnnnnnnnnnnnnnnnnnnnnnnnnnnnnnnnnnnnnnnnnnnnnnnnnnnnnnnnnnnnnnnnnnnnnnnnnnnnnnnnnnnnnnnnnnnnnnnnnnnnnnnnnnnnnnnnnnnnnnnnnnnnnnnnnnnnnnnnnnnnnnnnnnnnnnnnnnnnnnnnnnnnnnnnnnnnnnnnnnnnnnnnnnnnnnnnnnnnnnnnnnnnnnatgaaggaaggagaaacagtgattcattttgttttgataaaatctgggccttcaaatgat

SEQ ID NO: 232887 - DNA, 608 bp, Homo Sapiens
gcccggccgggcgccgtccacccgagggagcccgcgccctgcgactgcccgaccctccacccgccccacgagccgggcaccggtgccagaagccctgctgaatcaactgagaagagagctgcggagcaatcaccatgagtatctcagctcttggaggccacaccaaagggaagcctctgccaccaggcgaggaggagcgcaataacgttctcaagcagatgaaagtgcgaaccacgctgaagggggacaagagctggattaccaagcaggatgaatcggagggtcgcaccatagagctgccctcaggccggagtcgcgccacatccttttcatcagctggggaggttccgaagcctaggcctccgagcacaagggctcccactggctacatcatccggggagtgttcaccaagcccatagacagctcttcccagccccagcagcagttccccaaggccaacgggactccaaaaagtgctgccagtctggtgagaacagctaacgctggtcctccccgcccctcctcctctggctacaagatgaccactgaggattacaagaagctggcaccctacaatatcacgcgcagctctacatcttgggacacc

SEQ ID NO: 232888 - DNA, 289 bp, Homo Sapiens
attgggcctttcttctcggggctggcttcctttagcactggcggccttcactgcgtctccgcctcccccaaccctccttcaaccctgaccactttgctgtgattgtccttggactgtactgtgtgcatgcacgtggcgctgcatttgttgtgtggtgatggtggccttttatgttgatgcggacactggcccagctgggggcggttcctggcccgcgctagaaccggccttcttccctgcccggcctggagccccctcttccctgctttaaagacctaaacatcttaca

SEQ ID NO: 232889 - DNA, 335 bp, Homo Sapiens
  misc_feature (111)..(120): n is a, c, g, or t
ttggaatccaatcccttcccttcccgtgtggtgtgggtgcgggggccccgatctgggttcggttccccgtctcgtctgggctggggcccgaaatcgagggtggggtgggannnnnnnnnngggtcgggtcaccttcggaccagactaaaatgataacctcggtgtggggaatggcgctttgctttcatatgatggatttgatgaaagaatcgactcctcccggttcggtttcaaatcggtattctattgcggtgcttgccgtgcctcctgatctgaaaatgaattgaaaagaagatgaggagatgaccttgcattggaccaagccaaaatccaat

SEQ ID NO: 232890 - DNA, 812 bp, Homo Sapiens
ttggatttggtcttatttcttcgttatctcgacctgaaatatgcttttggaaactgttggaacgtggcaattcttaatctggcacttccctaataggtgggaaaaactttatgggaatagttctttgtaatgtttcgaaataacaatgtccttctctattactttagcaaatttgtacattcacaaaaggcattttgtctacgagaccagaaggctggttaactgccagaaaatgtacctcccgggcctgcatgccgtcgttaacccgcacggcattggtgctctcctgtcatagtctacagcttacttgtgtttaaataaccttctttatatgtggggttttaattaccattccatgactgcctgactattaatgaacaaaaaattgctttggaagattttctgccctgtagacagtaagttaataagagaagtaccggaagactgaatctccttttggaattatgtatcatctctcacttgttcaattatttccacactgttcaactccatggtatctttcagttgtgtgacttcttccaatgtaattttaaatgaaattaacttagatggattcattacgttcctggccctgtagactcgtgtaaaattatttaaaattctttcattcttttctgccgcttactatactactggagtgcaacaaatattttaaagcccccttttcttctttattttcattacttgtacattgatttcatgtcaacacatttaaagattcattcatgttgcacagtggcttacatgaacgtgaaactgtgatataagttttctttcatactcataataac

SEQ ID NO: 232891 - DNA, 357 bp, Homo Sapiens
  misc_feature (151)..(172): n is a, c, g, or t
ttggatcggattctgcggccgcggctgacgctctagtgttcaacgccagaaccctgctattatcaaaaacctgctggaggggaataaaggcgcggctcgatggattgctggttggttggttggttgctctgcggggaggtgggtgtatagnnnnnnnnnnnnnnnnnnnnnnatttttccccatgagtccattcacattgcctgttcccaaagacacaatattcttccatggttgtaatttttctacttcctggcaaacacccatttaatgttagtttaaatacaatgttgccccggcaaattttgctgtaatgccgaaaactatttttaatggggataaacatcagggttcagacc

SEQ ID NO: 232892 - DNA, 904 bp, Homo Sapiens
  misc_feature (159)..(608): n is a, c, g, or t
  misc_feature (662)..(860): n is a, c, g, or t
ttggggaacactctccaggatacattatatgttaggacactaagtatgattttaaatatatatatattttaaattggattcatatcacatatcttctcagaccacaatagcataaaactataaataaataagaggagcattcaaaactgtataaataannnnnnnnnnnnnnnnnnnnnnnnnnnnnnnnnnnnnnnnnnnnnnnnnnnnnnnnnnnnnnnnnnnnnnnnnnnnnnnnnnnnnnnnnnnnnnnnnnnnnnnnnnnnnnnnnnnnnnnnnnnnnnnnnnnnnnnnnnnnnnnnnnnnnnnnnnnnnnnnnnnnnnnnnnnnnnnnnnnnnnnnnnnnnnnnnnnnnnnnnnnnnnnnnnnnnnnnnnnnnnnnnnnnnnnnnnnnnnnnnnnnnnnnnnnnnnnnnnnnnnnnnnnnnnnnnnnnnnnnnnnnnnnnnnnnnnnnnnnnnnnnnnnnnnnnnnnnnnnnnnnnnnnnnnnnnnnnnnnnnnnnnnnnnnnnnnnnnnnnnnnnnnnnnnnnnnnnnnnnnnnnnnnnnnnnnnnnnnnnnnnnnnnnnnnnnnnnnnnnnnnnnnnnnnnnnnnnnnnnnnnnnnnnnntgaaatacaaaaatcaaaactcttcagtctgatcaataaattgattacagttannnnnnnnnnnnnnnnnnnnnnnnnnnnnnnnnnnnnnnnnnnnnnnnnnnnnnnnnnnnnnnnnnnnnnnnnnnnnnnnnnnnnnnnnnnnnnnnnnnnnnnnnnnnnnnnnnnnnnnnnnnnnnnnnnnnnnnnnnnnnnnnnnnnnnnnnnnnnnnnnnnnnnnnnnnnnnnnnnnnnnnnnnnnnnnnnnnnnnncatggattgtgagaattaacaaaattaaaatgaccatactaccc

SEQ ID NO: 232893 - DNA, 348 bp, Homo Sapiens
  misc_feature (58)..(228): n is a, c, g, or t
acaaaaaagttgggatggacatatttgatggaaaaagatggaaatagtagacattttnnnnnnnnnnnnnnnnnnnnnnnnnnnnnnnnnnnnnnnnnnnnnnnnnnnnnnnnnnnnnnnnnnnnnnnnnnnnnnnnnnnnnnnnnnnnnnnnnnnnnnnnnnnnnnnnnnnnnnnnnnnnnnnnnnnnnnnnnnnnnnnnnnnnnnnnnnnnnnnnnnnnnnnnnnnaaataatacaatcattatctcattacattgtttttaagcctgtgagttaaatatttgcatctccatttttactcagggaaaaactgaagttaagagaagttgattaacttgcttacccaa

SEQ ID NO: 232894 - DNA, 900 bp, Homo Sapiens
  misc_feature (174)..(194): n is a, c, g, or t
  misc_feature (342)..(350): n is a, c, g, or t
  misc_feature (406)..(425): n is a, c, g, or t
  misc_feature (448)..(528): n is a, c, g, or t
  misc_feature (565)..(686): n is a, c, g, or t
ttggctttaaaggaaagttttcattgtgagattaaggcttaacagcccatgaggtcatatacacatgaacgtatctattccatttaaagcaatacacactctggcttctgattaaaaatagccaggaggagagtctctgaatctactgtgattctggagtctgcccaatttggnnnnnnnnnnnnnnnnnnnnngtcaggaggaccaatttgccagggaaactcatagaaaagaattacaaagagatcacaaaaactggacatattcttttgactaattagaccacttatggctgggattacaggcatgagccaccacacccggcctctgctttgttttttnnnnnnnnngaaatgcaagagagggagggaggcagcctcctgaccataaaagctgatttcttgannnnnnnnnnnnnnnnnnnngaaatggagtcttgctctgtctnnnnnnnnnnnnnnnnnnnnnnnnnnnnnnnnnnnnnnnnnnnnnnnnnnnnnnnnnnnnnnnnnnnnnnnnnnnnnnnnngctgagtagctaggattactggcacccaccacaaggnnnnnnnnnnnnnnnnnnnnnnnnnnnnnnnnnnnnnnnnnnnnnnnnnnnnnnnnnnnnnnnnnnnnnnnnnnnnnnnnnnnnnnnnnnnnnnnnnnnnnnnnnnnnnnnnnnnnnnnnnnatgagccatcgtgcttggccttctttgattcttgaatacggggttttgaggtgaaagcatttcatgaaaacttaagttcatacacaagagcatcatgaatattcttaaagaggtatctgtgctttttttgttaccacaaaatattacttcttatgaaatgtttacactaggtgaggaaaagttcattatttacctttaaaccgttcctaatttt

SEQ ID NO: 232895 - DNA, 997 bp, Homo Sapiens
  misc_feature (108)..(941): n is a, c, g, or t
ttggcctgatttcaaaacttaaactacaaagctacagtaatcaaaactggtactggcataaagacacatagacagattagagagcccagaaatccttgtaattcaatnnnnnnnnnnnnnnnnnnnnnnnnnnnnnnnnnnnnnnnnnnnnnnnnnnnnnnnnnnnnnnnnnnnnnnnnnnnnnnnnnnnnnnnnnnnnnnnnnnnnnnnnnnnnnnnnnnnnnnnnnnnnnnnnnnnnnnnnnnnnnnnnnnnnnnnnnnnnnnnnnnnnnnnnnnnnnnnnnnnnnnnnnnnnnnnnnnnnnnnnnnnnnnnnnnnnnnnnnnnnnnnnnnnnnnnnnnnnnnnnnnnnnnnnnnnnnnnnnnnnnnnnnnnnnnnnnnnnnnnnnnnnnnnnnnnnnnnnnnnnnnnnnnnnnnnnnnnnnnnnnnnnnnnnnnnnnnnnnnnnnnnnnnnnnnnnnnnnnnnnnnnnnnnnnnnnnnnnnnnnnnnnnnnnnnnnnnnnnnnnnnnnnnnnnnnnnnnnnnnnnnnnnnnnnnnnnnnnnnnnnnnnnnnnnnnnnnnnnnnnnnnnnnnnnnnnnnnnnnnnnnnnnnnnnnnnnnnnnnnnnnnnnnnnnnnnnnnnnnnnnnnnnnnnnnnnnnnnnnnnnnnnnnnnnnnnnnnnnnnnnnnnnnnnnnnnnnnnnnnnnnnnnnnnnnnnnnnnnnnnnnnnnnnnnnnnnnnnnnnnnnnnnnnnnnnnnnnnnnnnnnnnnnnnnnnnnnnnnnnnnnnnnnnnnnnnnnnnnnnnnnnnnnnnnnnnnnnnnnnnnnnnnnnnnnnnnnnnnnnnnnnnnnnnnnnnnnnnnnnnnnnnnnnnnnnnnnnnnnnnnnnnnnnnnnnnnnnnnnnnnnnnnnnnnnnnnnnnnnnnnnnnnnnnnnnnnnnnnnnnnnnnnnnnnnnnnntatgtacataaattctgattttttattgtgattatgtataaattttattgtgatta

SEQ ID NO: 232896 - DNA, 793 bp, Homo Sapiens
  misc_feature (47)..(103): n is a, c, g, or t
  misc_feature (119)..(138): n is a, c, g, or t
  misc_feature (457)..(510): n is a, c, g, or t
  misc_feature (512)..(727): n is a, c, g, or t
atgagcaatgctttccttataatagccaactttgtacaaaaaagttnnnnnnnnnnnnnnnnnnnnnnnnnnnnnnnnnnnnnnnnnnnnnnnnnnnnnnnnngtgagaccctgtctcnnnnnnnnnnnnnnnnnnnntagtcacaattgacctctgacctcaatttcaaccccatctgattttctgacctcaactttagcattcagctggccattcaactcaactgtcccatctgttgacttccccatctttggtcctatctgacccatgaccttattcatgacccctcatctgactctctgaccccaacccttgaccctcagttctgagtaactgactccaacttttatgtttgactgtccagcttgactatgacaactgtgtcctttctttctatataactgtgaccctaaccattgaccccaatggtgacctgaccccagtctgaccctgacnnnnnnnnnnnnnnnnnnnnnnnnnnnnnnnnnnnnnnnnnnnnnnnnnnnnnngnnnnnnnnnnnnnnnnnnnnnnnnnnnnnnnnnnnnnnnnnnnnnnnnnnnnnnnnnnnnnnnnnnnnnnnnnnnnnnnnnnnnnnnnnnnnnnnnnnnnnnnnnnnnnnnnnnnnnnnnnnnnnnnnnnnnnnnnnnnnnnnnnnnnnnnnnnnnnnnnnnnnnnnnnnnnnnnnnnnnnnnnnnnnnnnnnnnnnnnnnnnnnnnnnnnnnnnntgactttaatcctgacccaatttgattccttagtgccaccctgtgaatctctttgtgacctcctga

SEQ ID NO: 232897 - DNA, 877 bp, Homo Sapiens
  misc_feature (153)..(268): n is a, c, g, or t
  misc_feature (413)..(743): n is a, c, g, or t
ttggctataacataagagagtatctttatgacactggagttgacaaaaatttcttgagcaagactaaataagcattaactataaagaaaaagtctgctaagttggactacattaaaattaagaactttgtattaagaaagtcatgattaagannnnnnnnnnnnnnnnnnnnnnnnnnnnnnnnnnnnnnnnnnnnnnnnnnnnnnnnnnnnnnnnnnnnnnnnnnnnnnnnnnnnnnnnnnnnnnnnnnnnnnnnnnnnnnnnnnnngagccaattaagcatcagaaaatgtcttcatcaaaggcatgcaacttaaaatgacaatgggatactatgacacacagaccagtctggtcaaaataaaaaatacagataatgccaagtgacagcaaggatatggaacaactagaannnnnnnnnnnnnnnnnnnnnnnnnnnnnnnnnnnnnnnnnnnnnnnnnnnnnnnnnnnnnnnnnnnnnnnnnnnnnnnnnnnnnnnnnnnnnnnnnnnnnnnnnnnnnnnnnnnnnnnnnnnnnnnnnnnnnnnnnnnnnnnnnnnnnnnnnnnnnnnnnnnnnnnnnnnnnnnnnnnnnnnnnnnnnnnnnnnnnnnnnnnnnnnnnnnnnnnnnnnnnnnnnnnnnnnnnnnnnnnnnnnnnnnnnnnnnnnnnnnnnnnnnnnnnnnnnnnnnnnnnnnnnnnnnnnnnnnnnnnnnnnnnnnnnnnnnnnnnnnnnnnnnnnnnnncaaaccaaaaaatacacatgttctatgaatccatatatgcaaagttcacaatagtgatagtagctactcttttgggaaggagtgaggaaaggactgagagagtattgcagaggggctctgggtgtttgtaattt

SEQ ID NO: 232898 - DNA, 925 bp, Homo Sapiens
  misc_feature (119)..(401): n is a, c, g, or t
  misc_feature (403)..(440): n is a, c, g, or t
  misc_feature (650)..(884): n is a, c, g, or t
actttgtacaaaaaagttggatacattgtagaataggctaaatcaaaccaattaacatgtgtattacctccatatctatcattttattttgtggtaagaatatttaaaatgtactcttnnnnnnnnnnnnnnnnnnnnnnnnnnnnnnnnnnnnnnnnnnnnnnnnnnnnnnnnnnnnnnnnnnnnnnnnnnnnnnnnnnnnnnnnnnnnnnnnnnnnnnnnnnnnnnnnnnnnnnnnnnnnnnnnnnnnnnnnnnnnnnnnnnnnnnnnnnnnnnnnnnnnnnnnnnnnnnnnnnnnnnnnnnnnnnnnnnnnnnnnnnnnnnnnnnnnnnnnnnnnnnnnnnnnnnnnnnnnnnnnnnnnnnnnnnnnnnnnnnnnnnnnnnnnnnnnnnnnnnnnnnngnnnnnnnnnnnnnnnnnnnnnnnnnnnnnnnnnnnnnngtactctcagccattttcaagcacgcaatcattcttattaactatagtcagcatgttgtacacctggaatttattagcatctgtcatggatgacagaagtttaatttagttattttccaactaaataaccattttctccagcatcgtttattatattgctatccttttcttcctaaactggaatgtcatttatatcacattttccattannnnnnnnnnnnnnnnnnnnnnnnnnnnnnnnnnnnnnnnnnnnnnnnnnnnnnnnnnnnnnnnnnnnnnnnnnnnnnnnnnnnnnnnnnnnnnnnnnnnnnnnnnnnnnnnnnnnnnnnnnnnnnnnnnnnnnnnnnnnnnnnnnnnnnnnnnnnnnnnnnnnnnnnnnnnnnnnnnnnnnnnnnnnnnnnnnnnnnnnnnnnnnnnnnnnnnnnnnnnnnnnnnnnnnnnnnntgttgaaaactttagttgtgtgtacttaagaccctttggga

SEQ ID NO: 232899 - DNA, 859 bp, Homo Sapiens
  misc_feature (262)..(436): n is a, c, g, or t
  misc_feature (458)..(512): n is a, c, g, or t
  misc_feature (516)..(558): n is a, c, g, or t
  misc_feature (579)..(697): n is a, c, g, or t
ttggatctagagcaagttattgactgtacaggtatttgagctccaccagaattccctagaggaaagaaagtgtgttcctcattgaacataatggaaatagtaagacgttcaggcagtctggtctgcagcattcgaatgtttcttgcatctcaaacttcttaagactgtgattcccatgtctgttttcagcgacttctcttcgtggtctttcccaaaagtaaagtagctagttggctgtgcttctgttgcccgcccgcctgcnnnnnnnnnnnnnnnnnnnnnnnnnnnnnnnnnnnnnnnnnnnnnnnnnnnnnnnnnnnnnnnnnnnnnnnnnnnnnnnnnnnnnnnnnnnnnnnnnnnnnnnnnnnnnnnnnnnnnnnnnnnnnnnnnnnnnnnnnnnnnnnnnnnnnnnnnnnnnnnnnnnnnnnnnnnnnnnggagacagtctcactctgtcannnnnnnnnnnnnnnnnnnnnnnnnnnnnnnnnnnnnnnnnnnnnnnnnnnnnnngttnnnnnnnnnnnnnnnnnnnnnnnnnnnnnnnnnnnnnnnnnnncagcattcaccaccacactcnnnnnnnnnnnnnnnnnnnnnnnnnnnnnnnnnnnnnnnnnnnnnnnnnnnnnnnnnnnnnnnnnnnnnnnnnnnnnnnnnnnnnnnnnnnnnnnnnnnnnnnnnnnnnnnnnnnnnnnggtgaaccaccacacccggccatgtgcataacatcatttattttcttgaagcactttatgtaagtataacccatttaaattcttaatttcacgggcttttgggatcacattttccattaaagcccattacttaatgatttgagcgcatgcttacttaaattc

SEQ ID NO: 232900 - DNA, 191 bp, Homo Sapiens
aaaaaagttggggctgatttccttcttcaacgaggggctgccgagccatagcccaaagactggggcctacaaaggaggtccagaccagctgctgacttcctgagagaaaacttctcaggtgctgccctgaagaacactcagcctgacaactggttggaaatggatattcggcgtagcccacactatgaaga

SEQ ID NO: 232901 - DNA, 775 bp, Homo Sapiens
  misc_feature (602)..(634): n is a, c, g, or t
gtgtgaatcaccgtgcctgggcacatttttctatttctaacaaatggacatgaaatcccctaaaactcctcccctacagtgggttctcctttaattttttactatgggaattctccaacatatacaacagtagagaaaatactataataaaccctcatatatacttattatccagctctcataattatcaacgtatggcgattctctgtctcgtctgtaatcctcccaacatgctgaattatttataagccaattccagaatacaacatcatttcatctcaaaatacttcagtacctatctgtaaagagaaagagatcttttcttttttattgttacccctacaatcatctaatataacagggtgttttccaaatttaaaattatctccccaatgggcttcataataactttttacaaggttggttttgcatgaaacaggatctaaacaggatctataactatggtccaatttaatatgttcattcaagtctgttccaacctgattggtgcatgatccatgaactcacgccaccccccgcctgttggggtaacagaattcctctgcctcgcccccccaagaagggtggataatagggtggtnnnnnnnnnnnnnnnnnnnnnnnnnnnnnnnnngcgggtttcaccctgtgggtgaggggtgttttaaatattgtagaatttagtaatacacccacctggcctcccccaaattgctggggaaataacaggccgtcggacacccaccccccagcacctcaaaattcctctttttta

SEQ ID NO: 232902 - DNA, 832 bp, Homo Sapiens
  misc_feature (104)..(468): n is a, c, g, or t
aaaatcctgggcttaagtgatccaaccacctcagctagctaggactacagacacacaggtaccatcgtgaccagctaatttttttaaaaaaactttttatggannnnnnnnnnnnnnnnnnnnnnnnnnnnnnnnnnnnnnnnnnnnnnnnnnnnnnnnnnnnnnnnnnnnnnnnnnnnnnnnnnnnnnnnnnnnnnnnnnnnnnnnnnnnnnnnnnnnnnnnnnnnnnnnnnnnnnnnnnnnnnnnnnnnnnnnnnnnnnnnnnnnnnnnnnnnnnnnnnnnnnnnnnnnnnnnnnnnnnnnnnnnnnnnnnnnnnnnnnnnnnnnnnnnnnnnnnnnnnnnnnnnnnnnnnnnnnnnnnnnnnnnnnnnnnnnnnnnnnnnnnnnnnnnnnnnnnnnnnnnnnnnnnnnnnnnnnnnnnnnnnnnnnnnnnnnnnnnnnnnnnnnnnnnnnnnnnnnnnnnnnnnngcgtgagtcaccatgcccggccctatattcagtatttttctacagaatcattcataaaatgtttttggtggcttctttagcttataacctatattaaaacctttcacaggatatttttctccctgatctctgagggggaaagatattactatttctataaagtataccttaagttgggggttagagatagattgagatgaaagtattgttctcttatgaccatttaaaataaaatattaaccacaattaaatcattcatttagtcttaggtaattcttctttttttgatcttgtgttagcagcctacttacacagaattgactggttttgtacaacataatcatgaaattcatgacccattccc

SEQ ID NO: 232903 - DNA, 459 bp, Homo Sapiens
  misc_feature (84)..(402): n is a, c, g, or t
ttggcttcttactcctctgttcttttagatttgcttgccatatgtgttattatttaggtaactacccaataaaggaagtaatcnnnnnnnnnnnnnnnnnnnnnnnnnnnnnnnnnnnnnnnnnnnnnnnnnnnnnnnnnnnnnnnnnnnnnnnnnnnnnnnnnnnnnnnnnnnnnnnnnnnnnnnnnnnnnnnnnnnnnnnnnnnnnnnnnnnnnnnnnnnnnnnnnnnnnnnnnnnnnnnnnnnnnnnnnnnnnnnnnnnnnnnnnnnnnnnnnnnnnnnnnnnnnnnnnnnnnnnnnnnnnnnnnnnnnnnnnnnnnnnnnnnnnnnnnnnnnnnnnnnnnnnnnnnnnnnnnnnnnnnnnnnnnnnnnnnnnnnnnnnnnnnnnnnnnnnnnnnnnnngtaaccttttattaaagttaaaaacggtatgtacgtatgtttgtgagtgaaaacagc

SEQ ID NO: 232904 - DNA, 865 bp, Homo Sapiens
  misc_feature (230)..(704): n is a, c, g, or t
ttgggaaaattattccgatcaaagacagtaaaattttttatggcttttgatattccttaagggctatcaaagggaggctttttacagagaactaaggaagagaaggaggttgttaaagagacttgagatcagaaaaagatcaagaacaacttgaatctcaaagtatgaatttgaagtattttgctgagcaaacatttgaatgcctgtatgtacgtaatcctctatcactnnnnnnnnnnnnnnnnnnnnnnnnnnnnnnnnnnnnnnnnnnnnnnnnnnnnnnnnnnnnnnnnnnnnnnnnnnnnnnnnnnnnnnnnnnnnnnnnnnnnnnnnnnnnnnnnnnnnnnnnnnnnnnnnnnnnnnnnnnnnnnnnnnnnnnnnnnnnnnnnnnnnnnnnnnnnnnnnnnnnnnnnnnnnnnnnnnnnnnnnnnnnnnnnnnnnnnnnnnnnnnnnnnnnnnnnnnnnnnnnnnnnnnnnnnnnnnnnnnnnnnnnnnnnnnnnnnnnnnnnnnnnnnnnnnnnnnnnnnnnnnnnnnnnnnnnnnnnnnnnnnnnnnnnnnnnnnnnnnnnnnnnnnnnnnnnnnnnnnnnnnnnnnnnnnnnnnnnnnnnnnnnnnnnnnnnnnnnnnnnnnnnnnnnnnnnnnnnnnnnnnnnnnnnnnnnnnnnnnnnnnnnnnnnnnnnnnnnnnnnnnnnnnnnnnnnnnntccctatgggattacagtcatagaaagtatacttgttctaccctggaggagatatatcttagctagcaaggagaaatgcagatggaactagctggaacttgtagagaccaagtccgaatcacgtgcctgggaatgcagattgttaaactggcagagaagaa

SEQ ID NO: 232905 - DNA, 756 bp, Homo Sapiens
  misc_feature (341)..(388): n is a, c, g, or t
aaaccaactttgtacaaaaaagttggctagaatcttacttgaagtcttatattcatcaacagcagttttctctgattttgtgccctcagaaagggagccaaaatagattggttagagtatctaaatctaaaagtactctaacattttaaaagtttttaacaatatggatttttctgagacagtattattaattttacagaattaacttgggaaataagtttctatctataataaatctaaatatattatcactctttttcctgattattcttgccttttttcccctcaaagtaaaatttctcattttttatatgaatggtttttccatacttaactctttnnnnnnnnnnnnnnnnnnnnnnnnnnnnnnnnnnnnnnnnnnnnnnnntgagccactgtgcctggacctctcacctattcttcctgctaggactttgtcatattttttgagtgggctttggaaacaaatcctggcattgtaccatttatctgtaaatattttactgtgaatctctaaacaaaaatcacaatactattatcacacaaaaatagtcataatttttaatatcatcaaatattccatcaggattcatatttctcaaatattcttttaagagtaagtttgactcagagtccatttaaattagtttatatgtctcttaattctctttcagtagattgtcctgtgtctcctgattcttgaccttttgagtaacagagctagcatgctacagcatagttcatactgatccattc

SEQ ID NO: 232906 - DNA, 380 bp, Homo Sapiens
ttggaaccaaaaaagggagaggaaccgccacgggaaaacccccagaaccaggacaggagattgatacgggacgtggcaagcgcgaatcctgtgccccccgtgcagtcggcccacccgcgcccagggagggctcgccggaggagcgccccgagacgtcccgggccgccgctgacaagcagcacaggtatgtggagagatctctgcagtggcaatctgctgcacaagcataccctgtggatgacagccggaggcgcgcaactccccatgagcctgaacggctttcgccaacgagtgaggatgatcaaacatgggggaaaggacctggcccatacagagggaataaggggagccaggacgacggggctccgggggaagccatg

SEQ ID NO: 232907 - DNA, 755 bp, Homo Sapiens
  misc_feature (49)..(57): n is a, c, g, or t
  misc_feature (73)..(124): n is a, c, g, or t
gcaattcttcctgtatgaataaatccaccaacttttgttggaggatggnnnnnnnnnttactatacggggggnnnnnnnnnnnnnnnnnnnnnnnnnnnnnnnnnnnnnnnnnnnnnnnnnnnntaaaaaaagtaggttacagaaggggaataatctagcgggccagtctgtattacaacctattttttcaaccttctttttccatcgcttgcacctaatacaaccaacaaaaacaaataaaagaacgatccttttattatttgacggacgtgttttgtctgtcattaaatattagagcaagctgtatgtctcacccaaagtactatttatctaactagtctgtcgagagaaaagagtgtaaacagtccgacctttttttaatacccagactgatttctaactcatccatctaagattcatccattaagttataccttcatgcggggaagaatatgatatagaacgctgcaaatatctctcacatctctgtgcattgagtaaataacacagctggataatactacgcccgatcaagtcaaagctggaataatacatacgtagactgaaaacataccggcttgcgattcgcctggaccagacggactgtccatcatacttcaacaacaagccggccccaaccacccaaccaaagtaaaaaatgagttgcctttattaaatacgactagattagctgcccagactactatacataaaggaggtagtattaagagggtactccccgccaggggaaagc

SEQ ID NO: 232908 - DNA, 355 bp, Homo Sapiens
  misc_feature (43)..(222): n is a, c, g, or t
ccataaagaggactttgtacaaaaaagttggcctgagttcaannnnnnnnnnnnnnnnnnnnnnnnnnnnnnnnnnnnnnnnnnnnnnnnnnnnnnnnnnnnnnnnnnnnnnnnnnnnnnnnnnnnnnnnnnnnnnnnnnnnnnnnnnnnnnnnnnnnnnnnnnnnnnnnnnnnnnnnnnnnnnnnnnnnnnnnnnnnnnnnnnnnnnnnnnnnnnnnnnnntgagccactgcgcctggccttatttgtgcatctttaagaagaaataaaaaatgcataatcttttaccatgatatgacttgacaactactcccatcctgatacataagcaaactgttttagtacattgttatta

SEQ ID NO: 232909 - DNA, 814 bp, Homo Sapiens
  misc_feature (54)..(487): n is a, c, g, or t
gagcaatgcttttcctataaaagaggaactttgtacaaaaaagttgggaagaannnnnnnnnnnnnnnnnnnnnnnnnnnnnnnnnnnnnnnnnnnnnnnnnnnnnnnnnnnnnnnnnnnnnnnnnnnnnnnnnnnnnnnnnnnnnnnnnnnnnnnnnnnnnnnnnnnnnnnnnnnnnnnnnnnnnnnnnnnnnnnnnnnnnnnnnnnnnnnnnnnnnnnnnnnnnnnnnnnnnnnnnnnnnnnnnnnnnnnnnnnnnnnnnnnnnnnnnnnnnnnnnnnnnnnnnnnnnnnnnnnnnnnnnnnnnnnnnnnnnnnnnnnnnnnnnnnnnnnnnnnnnnnnnnnnnnnnnnnnnnnnnnnnnnnnnnnnnnnnnnnnnnnnnnnnnnnnnnnnnnnnnnnnnnnnnnnnnnnnnnnnnnnnnnnnnnnnnnnnnnnnnnnnnnnnnnnnnnnnnnnnnnnnnnnnnnnnnnnnnnnnnnnnnnnnnntcaaaaatgcagtcaccctcctcttttgtaccttcaaccatttaacgggttcttcctctttaggatatgaataagctctggcctcccatccaaacaaaacaggacaaaatacaaaccccccgtgggctcccttgctgctgccatcccatgttttttttcttcccttcacagctaagactcctaaaagttagaaaataagtaattttgaaatcgttcactgtacaaaagtaagaaattaggggtaagcagaaagaaagaaaatctttaacatttaatgtaatcacctagaagataatcatcacagtatttcacatttatagaatttta

SEQ ID NO: 232910 - DNA, 918 bp, Homo Sapiens
  misc_feature (315)..(324): n is a, c, g, or t
  misc_feature (337)..(374): n is a, c, g, or t
  misc_feature (376)..(386): n is a, c, g, or t
  misc_feature (570)..(638): n is a, c, g, or t
  misc_feature (757)..(781): n is a, c, g, or t
gccaactttgtacaaaaaagttgggaaagtattacaatgaatcgcaaacattaaattaatcaatttcttgacctacattgtaatcaaaatagtacagttgactattgaacaacacagggattggggcactgacttcctgcacgtcaaaaatctgcatataacatatgatacccccaaaacctagcctactgttgactagaatccttactaataacagtagactaacatattttgcatgttatgtgtatcatatactgtgttacaataatgtaagttagaaaaaagaaaatattactaagaaaatcataagagaannnnnnnnnngagatggagtttnnnnnnnnnnnnnnnnnnnnnnnnnnnnnnnnnnnnnngnnnnnnnnnnngaaaggcctcctctgaccaccctattaaaaatacattctctccatttactctctgtgcactgccttatattgtgtgtaagcactgattatcacctcatatatgtttttgtttagtgacgtttgtctcctcactggagtgtaatctccaggagtggaggaatgttatctatttgcttctgtctcnnnnnnnnnnnnnnnnnnnnnnnnnnnnnnnnnnnnnnnnnnnnnnnnnnnnnnnnnnnnnnnnnnnnnggaaatctgtcttccatggaggtaactaataggtggtgaacaaatcagcataaataagggatattgcaaaatattttttgtcttctaatgaattcctaacctaattctaatttctcttnnnnnnnnnnnnnnnnnnnnnnnnnttgcatgtgtttgcctgtctgtacaagttgacccatatcttggggaacctatagtgtcatagttgtaaccaactgaataacatgctttgtttatgactttctttgagcatttgtagcagagcatattcattcgggga

SEQ ID NO: 232911 - DNA, 287 bp, Homo Sapiens
aacttatgatagccaactttgtacaaaaaagttggtgcaaaatggcgggtgaaaggtttgaaaatccagatactaaatacaaaaaacccgaagcccaaaacgttgatgctggatgcaaggtgaaaaagggtaaccgctaacctcaaaaccccaaaaccgggaagccccattgccgccgcaaccctgtccttgtcccatgaattagcaggtgttccggatttgccatgtattccgtaatggccatgggcaatatgaagtactcagccgctaaatcctaggttgaaagt

SEQ ID NO: 232912 - DNA, 403 bp, Homo Sapiens
  misc_feature (198)..(257): n is a, c, g, or t
ttggatttactctatactccagcaatatctccctacagattagtaagatgaatgtgtccacagttaggtgtatacctgtttttaaagaaaaaagatgtctgttagttacactgctatgacctcaattccagagtattaatggaacattctttcaagagatgttcacttggactaaccgaagtttgaaaccgcttatgnnnnnnnnnnnnnnnnnnnnnnnnnnnnnnnnnnnnnnnnnnnnnnnnnnnnnnnnnnnntcctccgggtccagaatccttcccttccacaataacccccctcgtgttcaccaagtctcctcagaaaaagaacaattaatttccccctcggggggagggaaaaaggggggaaatttttccccccaaaattttggttccttttgggg

SEQ ID NO: 232913 - DNA, 740 bp, Homo Sapiens
  misc_feature (167)..(470): n is a, c, g, or t
  misc_feature (475)..(598): n is a, c, g, or t
ttggcaaatttcttagcataaagttgatagtaatcatatctttttctttcttctgtatctgtagttatgtctctttttatttctaatattatttctttaagctttctctctctttcttgattaatcctgccagacgtttgtccattagtcttttcaagaaatgactnnnnnnnnnnnnnnnnnnnnnnnnnnnnnnnnnnnnnnnnnnnnnnnnnnnnnnnnnnnnnnnnnnnnnnnnnnnnnnnnnnnnnnnnnnnnnnnnnnnnnnnnnnnnnnnnnnnnnnnnnnnnnnnnnnnnnnnnnnnnnnnnnnnnnnnnnnnnnnnnnnnnnnnnnnnnnnnnnnnnnnnnnnnnnnnnnnnnnnnnnnnnnnnnnnnnnnnnnnnnnnnnnnnnnnnnnnnnnnnnnnnnnnnnnnnnnnnnnnnnnnnnnnnnnnnnnnnnnnnnnnnnnnnnnnnnnnnnnnnnnnnnttgtnnnnnnnnnnnnnnnnnnnnnnnnnnnnnnnnnnnnnnnnnnnnnnnnnnnnnnnnnnnnnnnnnnnnnnnnnnnnnnnnnnnnnnnnnnnnnnnnnnnnnnnnnnnnnnnnnnnnnnnnnnnncctttcccctgatggctttaggttggagtcttggcttgtcattctttcatgttctctaatacagtataagctgttgtttctaaatgcctctaaagtgcccacttttgctgaatcttaccacttttggagtattttgtgttgg

SEQ ID NO: 232914 - DNA, 248 bp, Homo Sapiens
  misc_feature (55)..(161): n is a, c, g, or t
ccataataaccaactttgtacaaaaaagttgggtctaataaatcccataaataannnnnnnnnnnnnnnnnnnnnnnnnnnnnnnnnnnnnnnnnnnnnnnnnnnnnnnnnnnnnnnnnnnnnnnnnnnnnnnnnnnnnnnnnnnnnnnnnnnnnnnnnnngaaaaaagatgtttgtgatcttggagaaaaatattaatacatctggctacataaaaataaatactggtatggaaaaataatgccatt

SEQ ID NO: 232915 - DNA, 226 bp, Homo Sapiens
  misc_feature (125)..(133): n is a, c, g, or t
ttggggaggtaaggctacgatcccaactctaggccggcctggcgtggccgaggccaggcctggaccctagcttatggcctgcaggggacgccggacccgaagccaagctatttctcttcactggnnnnnnnnntgtgaggtggagacgaggcgggccgctccgacacaaaacgactggcccgccactccaaccaaataaaatatacgatggaaaggaaaaagaaaa

SEQ ID NO: 232916 - DNA, 395 bp, Homo Sapiens
  misc_feature (42)..(306): n is a, c, g, or t
acaaaaaagttggctgacttttttcctttttaggcggggggnnnnnnnnnnnnnnnnnnnnnnnnnnnnnnnnnnnnnnnnnnnnnnnnnnnnnnnnnnnnnnnnnnnnnnnnnnnnnnnnnnnnnnnnnnnnnnnnnnnnnnnnnnnnnnnnnnnnnnnnnnnnnnnnnnnnnnnnnnnnnnnnnnnnnnnnnnnnnnnnnnnnnnnnnnnnnnnnnnnnnnnnnnnnnnnnnnnnnnnnnnnnnnnnnnnnnnnnnnnnnnnnnnnnnnnnnnnnnnnnnnnnnnnnnnnnnnnnnnnnnnnnnaccgagcccggcctgttatttatttctggacagtgccatcaataatatctctcaattatgtgttcttccactttctcctgttatttcct

SEQ ID NO: 232917 - DNA, 609 bp, Homo Sapiens
  misc_feature (139)..(512): n is a, c, g, or t
actttataaaagccaactttgtacaaaaaagttggcaggaggttccgttattaagataataagggagggaccagagacaggcaaagcccaatgcaaagaaatccaaaaaatgatacaagaagtgaggggagaaatattnnnnnnnnnnnnnnnnnnnnnnnnnnnnnnnnnnnnnnnnnnnnnnnnnnnnnnnnnnnnnnnnnnnnnnnnnnnnnnnnnnnnnnnnnnnnnnnnnnnnnnnnnnnnnnnnnnnnnnnnnnnnnnnnnnnnnnnnnnnnnnnnnnnnnnnnnnnnnnnnnnnnnnnnnnnnnnnnnnnnnnnnnnnnnnnnnnnnnnnnnnnnnnnnnnnnnnnnnnnnnnnnnnnnnnnnnnnnnnnnnnnnnnnnnnnnnnnnnnnnnnnnnnnnnnnnnnnnnnnnnnnnnnnnnnnnnnnnnnnnnnnnnnnnnnnnnnnnnnnnnnnnnnnnnnnnnnnnnnnnnnnnnnnnnnnnnnnnnnnnnnnnnnnnnnnnnncctgggaaattcatcgcaaaaagatctttgcctaggcacattgtcatcaggttatccaaagtcaagacaaaggaaagaatcttataagctgtgagac

SEQ ID NO: 232918 - DNA, 667 bp, Homo Sapiens
  misc_feature (308)..(357): n is a, c, g, or t
  misc_feature (367)..(618): n is a, c, g, or t
acaaattgatgagcaatgctgctttaagaaggccaactttgtacaaaaaagttggagaaatactcttaaaaagtaatctgaaggagttttatcagattactgatgtaaagtaaagcctactgatttatttggggagttggattgaacatctttgtgctgtcaatttaaaatgttattatatgggaaaaccttcttgcttgaccagtttccataaacttctaagagtgtgggaaagttttcactaatttttgtagaaacttacagtggtaagaaaatattagtattttcaaaatgctaggcaccattcnnnnnnnnnnnnnnnnnnnnnnnnnnnnnnnnnnnnnnnnnnnnnnnnnnagactgggannnnnnnnnnnnnnnnnnnnnnnnnnnnnnnnnnnnnnnnnnnnnnnnnnnnnnnnnnnnnnnnnnnnnnnnnnnnnnnnnnnnnnnnnnnnnnnnnnnnnnnnnnnnnnnnnnnnnnnnnnnnnnnnnnnnnnnnnnnnnnnnnnnnnnnnnnnnnnnnnnnnnnnnnnnnnnnnnnnnnnnnnnnnnnnnnnnnnnnnnnnnnnnnnnnnnnnnnnnnnnnnnnnnnnnnnnnnnnnnnnnnnnnnnnnnataagccaccacacccggcccattcattctttagggttatattaataaa

SEQ ID NO: 232919 - DNA, 491 bp, Homo Sapiens
  misc_feature (86)..(123): n is a, c, g, or t
  misc_feature (131)..(401): n is a, c, g, or t
cttttaaaagccaactttgtacaaaaaagttggcacaaacattcctaccatagcatgaatagacaatggaatagaatggaaagtgnnnnnnnnnnnnnnnnnnnnnnnnnnnnnnnnnnnnnnagatggannnnnnnnnnnnnnnnnnnnnnnnnnnnnnnnnnnnnnnnnnnnnnnnnnnnnnnnnnnnnnnnnnnnnnnnnnnnnnnnnnnnnnnnnnnnnnnnnnnnnnnnnnnnnnnnnnnnnnnnnnnnnnnnnnnnnnnnnnnnnnnnnnnnnnnnnnnnnnnnnnnnnnnnnnnnnnnnnnnnnnnnnnnnnnnnnnnnnnnnnnnnnnnnnnnnnnnnnnnnnnnnnnnnnnnnnnnnnnnnnnnnnnnnnnnnnnnnnnnnnnnnnnnnnnnctagaatggaaagttttatatacacgcacacacatggccacacacaaaacatatttgtatgtatatgatactttggtataatacatacaa

SEQ ID NO: 232920 - DNA, 595 bp, Homo Sapiens
  misc_feature (92)..(240): n is a, c, g, or t
  misc_feature (297)..(541): n is a, c, g, or t
actttaaaaagccaactttgtacaaaaaagttggctggagtttccaatctctcacacttgtccgcactgagcttccagcaattcatcagttnnnnnnnnnnnnnnnnnnnnnnnnnnnnnnnnnnnnnnnnnnnnnnnnnnnnnnnnnnnnnnnnnnnnnnnnnnnnnnnnnnnnnnnnnnnnnnnnnnnnnnnnnnnnnnnnnnnnnnnnnnnnnnnnnnnnnnnnnnnnnnnnnnnnncaatttatcttgtaagcagacaatataaacttatggtataaataaatacagtaccannnnnnnnnnnnnnnnnnnnnnnnnnnnnnnnnnnnnnnnnnnnnnnnnnnnnnnnnnnnnnnnnnnnnnnnnnnnnnnnnnnnnnnnnnnnnnnnnnnnnnnnnnnnnnnnnnnnnnnnnnnnnnnnnnnnnnnnnnnnnnnnnnnnnnnnnnnnnnnnnnnnnnnnnnnnnnnnnnnnnnnnnnnnnnnnnnnnnnnnnnnnnnnnnnnnnnnnnnnnnnnnnnnnnnnnnnnnnnnnnnnnntgtatctcactgtactcaccactctgcttaagaaatagacataacttatattta

SEQ ID NO: 232921 - DNA, 239 bp, Homo Sapiens
  misc_feature (130)..(150): n is a, c, g, or t
gcatagggaacaaataaacaaaaaaatgacacccaaattcattttctgtaaatggtacttaggtaggcccgcccccaaaaaccaaaatgactgcgtaataaacaaggttataattggattataatgtgannnnnnnnnnnnnnnnnnnnnaaagccggcgggtctgcccaggtgtccccttgtccccctcctgtcccccctgtcaaaaggaaaattaagaggaggaggggagggtgggg

SEQ ID NO: 232922 - DNA, 870 bp, Homo Sapiens
  misc_feature (69)..(173): n is a, c, g, or t
  misc_feature (189)..(486): n is a, c, g, or t
  misc_feature (735)..(764): n is a, c, g, or t
ttggctcccaagtctgggtctcttcagtaaacattattaatttgttcctttaaccataaacatctagannnnnnnnnnnnnnnnnnnnnnnnnnnnnnnnnnnnnnnnnnnnnnnnnnnnnnnnnnnnnnnnnnnnnnnnnnnnnnnnnnnnnnnnnnnnnnnnnnnnnnnnngcaggattaaaagatnnnnnnnnnnnnnnnnnnnnnnnnnnnnnnnnnnnnnnnnnnnnnnnnnnnnnnnnnnnnnnnnnnnnnnnnnnnnnnnnnnnnnnnnnnnnnnnnnnnnnnnnnnnnnnnnnnnnnnnnnnnnnnnnnnnnnnnnnnnnnnnnnnnnnnnnnnnnnnnnnnnnnnnnnnnnnnnnnnnnnnnnnnnnnnnnnnnnnnnnnnnnnnnnnnnnnnnnnnnnnnnnnnnnnnnnnnnnnnnnnnnnnnnnnnnnnnnnnnnnnnnnnnnnnnnnnnnnnnnnnnnnnnnnnnnnnnnnnngaagactgcaagtaatctgtattcaaaacaaaaataaatgcagataatacaataatacagaagagtataaaatgcaaagtgaaaggtcttcctaaccagtttcaatcactagtggcaatcctgtcaacaatacctggttttatttcttcaaaggagaggcattaattttataaaacatacttttattttctgaaattttcacatctttcccttcttttacaacccatggtgtcctctttcttgtattcnnnnnnnnnnnnnnnnnnnnnnnnnnnnnnaaaagatgcatgaacagtaagcattctgatcctaacatctaaacatgtctacagtgtgccctcacacttacctattagttggctgggtatattcaggttgaaaatc

SEQ ID NO: 232923 - DNA, 105 bp, Homo Sapiens
agggctctgctcaacgggactttgctggcctggcgtctggtctgctcggagaggataagccgacgcttcggtcccggcactgaagcgacgcctcccctccccaat

SEQ ID NO: 232924 - DNA, 142 bp, Homo Sapiens
tgtacaaaagttgggtctttaggctggaaagcagcatcactctgacagagggcagttgtgaagccacagagtgccttgacacaagattacataatcagacgacactcatctgctgctgtccatgactgtcactatgttccga

SEQ ID NO: 232925 - DNA, 665 bp, Homo Sapiens
  misc_feature (45)..(583): n is a, c, g, or t
ccttaataccaatattatcatcaatcaataagtggtagcttttcnnnnnnnnnnnnnnnnnnnnnnnnnnnnnnnnnnnnnnnnnnnnnnnnnnnnnnnnnnnnnnnnnnnnnnnnnnnnnnnnnnnnnnnnnnnnnnnnnnnnnnnnnnnnnnnnnnnnnnnnnnnnnnnnnnnnnnnnnnnnnnnnnnnnnnnnnnnnnnnnnnnnnnnnnnnnnnnnnnnnnnnnnnnnnnnnnnnnnnnnnnnnnnnnnnnnnnnnnnnnnnnnnnnnnnnnnnnnnnnnnnnnnnnnnnnnnnnnnnnnnnnnnnnnnnnnnnnnnnnnnnnnnnnnnnnnnnnnnnnnnnnnnnnnnnnnnnnnnnnnnnnnnnnnnnnnnnnnnnnnnnnnnnnnnnnnnnnnnnnnnnnnnnnnnnnnnnnnnnnnnnnnnnnnnnnnnnnnnnnnnnnnnnnnnnnnnnnnnnnnnnnnnnnnnnnnnnnnnnnnnnnnnnnnnnnnnnnnnnnnnnnnnnnnnnnnnnnnnnnnnnnnnnnnnnnnnnnnnnnnnnnnnnnnnnnnnnnnnnnnnnnnnnnnnnnnnnnnnnnaataaatggcagctttttatctttttctacccaggaataggaactgaaaatatagatcaagacaccaggaaataaaaatttt

SEQ ID NO: 232926 - DNA, 322 bp, Homo Sapiens
ttggggcaagtggcatattcactcccttggttttaccttcagctcggacaaaagaagtacccaagcatctagtctggaactgacagagatcgggcagaaaatgttccaaaggctggcacaccccagctgcggtgccattcactgcaaggttgaacacccccatgggccctggatgaactgtcgggaaagggctcctttgaatgcaaatgcgtcatgcattaatgtagacctaatagcgagaaagtcataggatattgctctacccttgaaacctttcataaatattaaaacatttgtactaaattcttttcttcaggagtcc

SEQ ID NO: 232927 - DNA, 660 bp, Homo Sapiens
  misc_feature (160)..(581): n is a, c, g, or t
ttgggtatagaaaatctttgggaaaattgaaaaaggggaaatgatttctaacttgttctgtgaggacagcactacttgatgacaaaaatcaggcaaagatattacaagaaaagaaaactccagatgcatctgtctcataaacacaggtgcaatatttgannnnnnnnnnnnnnnnnnnnnnnnnnnnnnnnnnnnnnnnnnnnnnnnnnnnnnnnnnnnnnnnnnnnnnnnnnnnnnnnnnnnnnnnnnnnnnnnnnnnnnnnnnnnnnnnnnnnnnnnnnnnnnnnnnnnnnnnnnnnnnnnnnnnnnnnnnnnnnnnnnnnnnnnnnnnnnnnnnnnnnnnnnnnnnnnnnnnnnnnnnnnnnnnnnnnnnnnnnnnnnnnnnnnnnnnnnnnnnnnnnnnnnnnnnnnnnnnnnnnnnnnnnnnnnnnnnnnnnnnnnnnnnnnnnnnnnnnnnnnnnnnnnnnnnnnnnnnnnnnnnnnnnnnnnnnnnnnnnnnnnnnnnnnnnnnnnnnnnnnnnnnnnnnnnnnnnnnnnnnnnnnnnnnnnnnnnnnnnnnnnnnnnnnnnnnnnnnnnnnnncattttagagtagaaaggaagaagtaaaactatcttttcacagatgatattgttgactatgtcaaaaagcctaaggaaa

SEQ ID NO: 232928 - DNA, 366 bp, Homo Sapiens
  misc_feature (75)..(123): n is a, c, g, or t
  misc_feature (126)..(144): n is a, c, g, or t
  misc_feature (146)..(292): n is a, c, g, or t
  misc_feature (294)..(311): n is a, c, g, or t
ttgtccccgacgacaagcgggcagggagtggggcacacacctataatccctgcgcttcgagagaccaaggcagannnnnnnnnnnnnnnnnnnnnnnnnnnnnnnnnnnnnnnnnnnnnnnnnatnnnnnnnnnnnnnnnnnnncnnnnnnnnnnnnnnnnnnnnnnnnnnnnnnnnnnnnnnnnnnnnnnnnnnnnnnnnnnnnnnnnnnnnnnnnnnnnnnnnnnnnnnnnnnnnnnnnnnnnnnnnnnnnnnnnnnnnnnnnnnnnnnnnnnnnnnnnnnnnnnnnnnntnnnnnnnnnnnnnnnnnncaataactccaagaagccgggagacagaggaatcacatgaaagaatggtgctaca

SEQ ID NO: 232929 - DNA, 145 bp, Homo Sapiens
gatcttttctccatcactgatagggagtggtaaataacctccatcaatgatagagtgtcaacaacatgaccaaaatcccttaacgtgagttacgcgtattaatttggcgtggcgctcactggcccgctttccagtccggaaaccc

SEQ ID NO: 232930 - DNA, 733 bp, Homo Sapiens
  misc_feature (71)..(116): n is a, c, g, or t
  misc_feature (165)..(194): n is a, c, g, or t
  misc_feature (246)..(581): n is a, c, g, or t
ttggctttgcttaaccttcagttttgaaagatagttttactagacatgagattcttagttgaggggtttgnnnnnnnnnnnnnnnnnnnnnnnnnnnnnnnnnnnnnnnnnnnnnncagcactttgaatacattatcgatcccattgccttctggactccattgnnnnnnnnnnnnnnnnnnnnnnnnnnnnnngagatggagtttcactccagcctgggcaacaagagcaaaactcagtctcagnnnnnnnnnnnnnnnnnnnnnnnnnnnnnnnnnnnnnnnnnnnnnnnnnnnnnnnnnnnnnnnnnnnnnnnnnnnnnnnnnnnnnnnnnnnnnnnnnnnnnnnnnnnnnnnnnnnnnnnnnnnnnnnnnnnnnnnnnnnnnnnnnnnnnnnnnnnnnnnnnnnnnnnnnnnnnnnnnnnnnnnnnnnnnnnnnnnnnnnnnnnnnnnnnnnnnnnnnnnnnnnnnnnnnnnnnnnnnnnnnnnnnnnnnnnnnnnnnnnnnnnnnnnnnnnnnnnnnnnnnnnnnnnnnnnnnnnnnnnnnnnnnnnnnnnnnnnnnnnnnnnnnnnnnnnnnnnngaccacatgagaaaaaagtcaagaactagactattttaagttttgtgagaagagatgaatatagaaccaacaactacagacttctcactctttccaaattttggtttccacatgtgtaaactatggacattaatcttggattaggtggtaac

SEQ ID NO: 232931 - DNA, 257 bp, Homo Sapiens
ctttgtacaaaaaagttgggtattaataaccgattactttacaggcttaaaaaggctgtgaacatttttgatagtgaatcgtgaccctaacggatagatttgtgtgattgcattattgcatgtaaaagatcaccgatttttgtaacgccaacagaattggtaagttggcctatcttcctaacttcctcattgtaatgatgatcttggtggagaagaatgagtcgttcttggaatacctatgtgcaacccctacccat

SEQ ID NO: 232932 - DNA, 487 bp, Homo Sapiens
  misc_feature (133)..(149): n is a, c, g, or t
  misc_feature (428)..(439): n is a, c, g, or t
cgtttaaagggccaactttgtacaaatgagtgtgcacgtttcaacagttaaagaacgttgccggtttttccatgtcatacaaaaaaagtcctggctgttttcttccgaactggcctgccctgcattcccgtcnnnnnnnnnnnnnnnnnaagaaaatagaactggaatttcagcctgtttaattcctctaagtacagttatcccatgttaaaaaatggtttttcccatttgcattctttttattgtgaatttcaaaagggtcaaaaaatttatttgttctggtggatattggaaacccttgtgtaacaaaaaaactacctttttgtgctttttcccccatttcactcccttaaccaaaagtttttctaaaattacccccccgggccgggtttgccaacaaaatttagtgtgcgcgcgaaaatattttnnnnnnnnnnnnctttttataatttttttcctctccgtacccccccggaaaaaaatagcc

SEQ ID NO: 232933 - DNA, 638 bp, Homo Sapiens
  misc_feature (187)..(495): n is a, c, g, or t
  misc_feature (497)..(550): n is a, c, g, or t
ttggtgagcacaacacacttatcagtcctggaaaaagataaaagtaaacaatgattgaggactcgttatacagtaagcactataataggtacaggcaggggaaacagttacagagaacagacacctccaggtttcaagaggatggcaactgactgggagattttcctttcctctggataagaaggtnnnnnnnnnnnnnnnnnnnnnnnnnnnnnnnnnnnnnnnnnnnnnnnnnnnnnnnnnnnnnnnnnnnnnnnnnnnnnnnnnnnnnnnnnnnnnnnnnnnnnnnnnnnnnnnnnnnnnnnnnnnnnnnnnnnnnnnnnnnnnnnnnnnnnnnnnnnnnnnnnnnnnnnnnnnnnnnnnnnnnnnnnnnnnnnnnnnnnnnnnnnnnnnnnnnnnnnnnnnnnnnnnnnnnnnnnnnnnnnnnnnnnnnnnnnnnnnnnnnnnnnnnnnnnnnnnnnnnnnnnnnnnnnnnnnnnnnnnnnnnnnnnnnnncnnnnnnnnnnnnnnnnnnnnnnnnnnnnnnnnnnnnnnnnnnnnnnnnnnnnnnatcaaagtgtttaatcatatgggaaactccattggaaaaacagattccacaaagaaaggaatttcctggctttggtggatgtggcagg

SEQ ID NO: 232934 - DNA, 563 bp, Homo Sapiens
ttggacaaaacaaaccttttaccatgcttttttgattattgaattacgaagaacgaccaaattccaaaatgtcacatgtcttggtggtggtcggtggctgctcccttgccccttgcctttatctattgaatatgtgtttgcttgaaggatcaacgaacagctccttccccatttgccttgacttatgatatgtgggtgtgagatatcacccataacccggaacattttctcttttattgtgttctgcggcctcttcccccttgattcttctttcagatgtactatggactttttgccttttgtgctgagtgtttatcatttctggctaatggggaacagggaacggagagaaaaaagataggaaatcagaatggcgaacggccaacggcccatggcctgtagtccgttctcaagaccaactactaacggtggtggatggagaagacaaaagactgcacctatttcctgctttctttcctctatacggaactcggtaggctgaacgatgatcctgctctcaggacttaagatcttgtgccttgcgccttactcctcagcagtga

SEQ ID NO: 232935 - DNA, 888 bp, Homo Sapiens
  misc_feature (41)..(116): n is a, c, g, or t
  misc_feature (417)..(506): n is a, c, g, or t
  misc_feature (514)..(824): n is a, c, g, or t
ttggagacaacaaattactctctagttctggggctggggcnnnnnnnnnnnnnnnnnnnnnnnnnnnnnnnnnnnnnnnnnnnnnnnnnnnnnnnnnnnnnnnnnnnnnnnnnnnntgaagcctttataagaaaaatgaaaagccaaagaagcaactcaggccaagggcttatatacgttttaaacaaagaaagctaaattgtggggaaatgataaaacaaaggaaaagagtttaagcttctagaggcagtaatttgtgggaaagtgactagaaaatacacagggaaatctaatggaagataaggaagattttagtagttttgtttgtaccgatccatttcagtattgacccccagtctccagtgataagaatgttctcttcctaaaacagggagagcctctttcacatggaaaatnnnnnnnnnnnnnnnnnnnnnnnnnnnnnnnnnnnnnnnnnnnnnnnnnnnnnnnnnnnnnnnnnnnnnnnnnnnnnnnnnnnnnnnnnncattctgnnnnnnnnnnnnnnnnnnnnnnnnnnnnnnnnnnnnnnnnnnnnnnnnnnnnnnnnnnnnnnnnnnnnnnnnnnnnnnnnnnnnnnnnnnnnnnnnnnnnnnnnnnnnnnnnnnnnnnnnnnnnnnnnnnnnnnnnnnnnnnnnnnnnnnnnnnnnnnnnnnnnnnnnnnnnnnnnnnnnnnnnnnnnnnnnnnnnnnnnnnnnnnnnnnnnnnnnnnnnnnnnnnnnnnnnnnnnnnnnnnnnnnnnnnnnnnnnnnnnnnnnnnnnnnnnnnnnnnnnnnnnnnnnnnnnnnnnnnnnnnnnnnnnnnncaacatgcccaagtagcatattttggggtagcatattttgaattccttcatttcccccatctga

SEQ ID NO: 232936 - DNA, 682 bp, Homo Sapiens
ttggacccgaccatgacttgccaacctgcggctgatctgatcttttgattcggttgagtacattagggctcggctctgtcctatcctattgtcttgtcttttaatgcctggcctggacttcactattcttattgatgggatggaacctatctgatgtgataagatgaaaaaaccgggaggacaagagcatggttaattgaactgaccacacagacgaaatgacctcaatcccatttggtttggcacacttctgttccgtgctgtatagtctaatcattacatgactgctgagatgagtggcgctgttctgttggttatgtctaaacgtgatgtgataacattacggactagagaatggaatgtcaaaaaagatgttctgtttatcaggagggtatggtatgcaaggataggatttcaccccctcataataattggattggtttcccatcccaacccaactcctctaatcggatccgctcctccaattaagtttggtgtgttgtaaaacaccatctgattagactcttctcagacggcatcgcgccatccagactagatatctgagccgaaccctctcctcatcgcagagcggactgcactgcaatttgatttcattcctatcgttacgctaatctaatataagacacattccactctgccttgtcctgcactgctctgttca

SEQ ID NO: 232937 - DNA, 656 bp, Homo Sapiens
  misc_feature (136)..(183): n is a, c, g, or t
  misc_feature (203)..(305): n is a, c, g, or t
  misc_feature (402)..(410): n is a, c, g, or t
  misc_feature (513)..(540): n is a, c, g, or t
  misc_feature (571)..(581): n is a, c, g, or t
ttggctcaaccaaatatgagtacacaaaattatcaaactcacaaggaaataagcaatacataaagaccctcaaagacagtattagatattaaaattgtcacatgcagaatgcaactatatgatatgttttaagggnnnnnnnnnnnnnnnnnnnnnnnnnnnnnnnnnnnnnnnnnnnnnnnntaacccaaggtagattttgnnnnnnnnnnnnnnnnnnnnnnnnnnnnnnnnnnnnnnnnnnnnnnnnnnnnnnnnnnnnnnnnnnnnnnnnnnnnnnnnnnnnnnnnnnnnnnnnnnnnnnnccccccaagtgtcccaatgtgttggggccaggggggggaaactccctgggggcccaagctttgtttttcaaatttaaactttttgtgattatttctnnnnnnnnntctcgatataaccgggggcccaagggtgtgagaacgcgccccccccggggtttgcgcttttaggggggtcccctaagtgggggcgaaaaataaatgatgaaannnnnnnnnnnnnnnnnnnnnnnnnnnntcggagagagagtgttttttctctccccccnnnnnnnnnnnaaaaagtgtgggaaacacctctctttgttgttgttcacacacactctccctcccaaaagtgctgtgtgtgtgtat

SEQ ID NO: 232938 - DNA, 477 bp, Homo Sapiens
ttataaacgtaggaaaagttctatatttttaaattaatttttatttcgctagtctgaagaaaatgtcttaatggtccattacatataaccgttcactccgaaacttcaattttcacggttttttcgacctggtatttactccctttctctctaatgttcccctcccggagggacttgcttaatcgatcgacaaccatctcaatgttcttctacctttgttgagtcttaatcttttacaagatattgttaccgtagatttatgaaacctaatatataaaaagagaacaaatctgcgatgcttgtttttgtgtgagtatttgcctgctcttttcattaaaaactgctagaatatcatgcttgtctgcctcctactaaatgaacagtctgacatgtaattgacgatgcacctctactgaatactcctacatcatcatatatttcccttgatctgtgtttattgcttctattaatggaaat

SEQ ID NO: 232939 - DNA, 451 bp, Homo Sapiens
ttggccacgacaacgccccggctcctggtcctgttcttatattgaaaggtggtggtggggcttggcctggggctgttgcttgggactggctcacacaaaaaccgtatctgtttccactgacactgttcgcgttcacgctgactctgatgattgagattgatagttcaagtccaagtcaaaactataaatttctaaaactgaatatttaccatgatgaatatgactgtgactgggatttggttttggaatctgattaaaagggaacggttttactttaacaacaatacccgtttttgctgtctcaggagtctgattcgggaatttgaattgggagagtgataatgcttaaccatctatagttactgatgcgaatgggaaatcttgatcctgatacaggtcaatgggcctggccctctcgttcatggcatttaccttatgccgatgacgatga

SEQ ID NO: 232940 - DNA, 483 bp, Homo Sapiens
  misc_feature (82)..(223): n is a, c, g, or t
  misc_feature (248)..(348): n is a, c, g, or t
ttggagaaattatacgggggaaaaactcccccttctctttttgagataaaaatgtagttgaaggcaatggtggagagaaaannnnnnnnnnnnnnnnnnnnnnnnnnnnnnnnnnnnnnnnnnnnnnnnnnnnnnnnnnnnnnnnnnnnnnnnnnnnnnnnnnnnnnnnnnnnnnnnnnnnnnnnnnnnnnnnnnnnnnnnnnnnnnnnnnnnnnnnnnnnnngaattataggcataaacctccacannnnnnnnnnnnnnnnnnnnnnnnnnnnnnnnnnnnnnnnnnnnnnnnnnnnnnnnnnnnnnnnnnnnnnnnnnnnnnnnnnnnnnnnnnnnnnnnnnnnnttttatgtgctcacattacaggcgtgagccaccacacctggcctcatttcatcttctaaagtactctcgctaaaattctagtgagtcttgctttccattctcttgtaattcaccccccgtctggaaagccacaaa

SEQ ID NO: 232941 - DNA, 899 bp, Homo Sapiens
  misc_feature (91)..(482): n is a, c, g, or t
tttgtacaaaaaagttggcccaaattcaccagaagagagagtcttttatcatgctgctctcccggtagtatgataagaatctcaggcctgnnnnnnnnnnnnnnnnnnnnnnnnnnnnnnnnnnnnnnnnnnnnnnnnnnnnnnnnnnnnnnnnnnnnnnnnnnnnnnnnnnnnnnnnnnnnnnnnnnnnnnnnnnnnnnnnnnnnnnnnnnnnnnnnnnnnnnnnnnnnnnnnnnnnnnnnnnnnnnnnnnnnnnnnnnnnnnnnnnnnnnnnnnnnnnnnnnnnnnnnnnnnnnnnnnnnnnnnnnnnnnnnnnnnnnnnnnnnnnnnnnnnnnnnnnnnnnnnnnnnnnnnnnnnnnnnnnnnnnnnnnnnnnnnnnnnnnnnnnnnnnnnnnnnnnnnnnnnnnnnnnnnnnnnnnnnnnnnnnnnnnnnnnnnnnnnnnnnnnnnnnnnnnnnnnnnnnnnnnnnnnnnnnnnnnnngtctcaacaggcctgttctcattggcccacatagggttcacctgctcatctccaagcactggggccaaaggtgtggcagatgctgattgaccagccagggcccaccactggcgtcgaggggaggtgcctgcaaaccacagggctgagagaggaaaagggtggctccctgcagggaattcagggaattattaggcaggggaaacagacgccagaaaaaccaccgccattctctacagccggtctcctcccttccccgcagtgtacgtaggcctggccacagtggctgccgccacctggtggtttgtgtatgacgccgagggacctcacatccacttctaccagctggtgagcaagggctgggccagggagcctgttgaacttacagctcgagttgttgggagttccaggggagatggg

SEQ ID NO: 232942 - DNA, 922 bp, Homo Sapiens
  misc_feature (313)..(810): n is a, c, g, or t
ttggataaataaataaaagggactgacttgaagtgggggttatagccttagatggggaggtgagggattataaaggggttatttgagccaaaacctgaaggatgggaaggagatcagccatagggagggtcagaggagcaccatccttggggatggtagtgggaattcccaagggtagagtcccagaggcaggaacaggaatttgtgtgtttatagaaaggagagaaagcaagtatagttacatgggaggagagacgacagcagagctggatcatataggatatctaggctgtattaaggagtttggattttnnnnnnnnnnnnnnnnnnnnnnnnnnnnnnnnnnnnnnnnnnnnnnnnnnnnnnnnnnnnnnnnnnnnnnnnnnnnnnnnnnnnnnnnnnnnnnnnnnnnnnnnnnnnnnnnnnnnnnnnnnnnnnnnnnnnnnnnnnnnnnnnnnnnnnnnnnnnnnnnnnnnnnnnnnnnnnnnnnnnnnnnnnnnnnnnnnnnnnnnnnnnnnnnnnnnnnnnnnnnnnnnnnnnnnnnnnnnnnnnnnnnnnnnnnnnnnnnnnnnnnnnnnnnnnnnnnnnnnnnnnnnnnnnnnnnnnnnnnnnnnnnnnnnnnnnnnnnnnnnnnnnnnnnnnnnnnnnnnnnnnnnnnnnnnnnnnnnnnnnnnnnnnnnnnnnnnnnnnnnnnnnnnnnnnnnnnnnnnnnnnnnnnnnnnnnnnnnnnnnnnnnnnnnnnnnnnnnnnnnnnnnnnnnnnnnnnnnnnnnnnnnnnnnnnnnnnnnnnnnnnnnnnnnnnnnnnnnnngggaagaaaatttggattttattctagctgtaattgaagcgattagatgggtaaaagaaaggatcaacaatgagataccttgttagctgccacatatatttagatggcccca

SEQ ID NO: 232943 - DNA, 154 bp, Homo Sapiens
cccgaaatccccctcctgacttgacagttaccccggggtttacagtgggtcccaccccacagtggggttccgggactgggtatcccccccaaccccggccggaatttggaagaaaaatgggggcacacccggagtgtatcttaatcccttctcc

SEQ ID NO: 232944 - DNA, 135 bp, Homo Sapiens
attgatgagcatgcttacgtagccactttgtacagaagtcggtctctgttctagatctttggcagacgtctagtcctagtcagtacgacatagtacgagtagagtagcgtctccctgatgtctgatgtgtctgga

SEQ ID NO: 232945 - DNA, 457 bp, Homo Sapiens
  misc_feature (378)..(416): n is a, c, g, or t
ttgggaccttcctgctgtcgcgtttgcactcgctgctcagctctgggcgcatcagctcagctgcgacctgcgaggaaaaaaaatacttatttctgcccatacatcactgagcgagcaaaaatttaattttaacctgaggaaatccggcacttccggcggggctgaggggcacccaatggtgccaattttggagggtgtctggagaaaaggggttaacccagggggtttaaaggggagaacgacaccggccggggcgccctctctgtgttataaaaagaccccggggggagaaattttctccgcgccccccggggagaaaaaacacggggaaagagagtttgtttccccggcttttttgtgcattattataacaaacannnnnnnnnnnnnnnnnnnnnnnnnnnnnnnnnnnnnnnaagcccctcaaaaaaggggcgcgcgcggtgggtcccccccc

SEQ ID NO: 232946 - DNA, 583 bp, Homo Sapiens
  misc_feature (440)..(476): n is a, c, g, or t
ttgggtaagtttctattgctatctcatggctaaggttccaagctattgagtcttcatttatgtgtgtgtatacatgtctagatgtctttatttgcatgtacacttactgttatatgttatgtctaccaaattggcttataagtaaaagagcactcataagtaagtctaagcaattttcaagttcatgtgacttaagtatactttactaaacagctagcttaaataatggtggataaaatataatgcttctaatatagatcatttgctgatttaagttgcttgtaatatttaaagcagttaacagtggaacactaggtgactgctctcatcatcgaatcccttaaatgcgagtgcaatcccaaatcagaaattgtttaaaggtcaccaattccgttccatacaatattttgatcccaaggcccaaaaggtatgtttcttgnnnnnnnnnnnnnnnnnnnnnnnnnnnnnnnnnnnnnttgtgtaatttaaaatttaaaggtgttcttaaaaaagtgtaaagtttttaaccccaaaaaaatagagagattgtgggataaaaattttttaaaggtgttttttgtat

SEQ ID NO: 232947 - DNA, 642 bp, Homo Sapiens
ttggatgactttcctaaaaagatataatttgcatcatcttaacctacattttgctaattattaacatcatccctctacgattttttaaccatatccacaacctacgattcaactgttcccatggcatttccgaccaccccctaacaacccccctcctaattgtaactacctgactcctacccctcacaatcatggcaagccaacgccatgtatccagtgaaccacttccacgaaaaaaactctacctctctatactaatctccctacatttctccttaattataacattcgaagccacgtgcgaacccctattttatatcttcttcgaaaccatcttatccccaccttggctatcatcacccgatgaggcatcctcccaaaacgcatgaacttaagcacatacatcctattctactacctatcatgctcccttcccctactcttcgccctcatttattctcacaacaccctaggctcactaaacattctactactcactctcactgcccaggaacgatcaaagtcctgagccaattacttactacgaatagcttactcaatagcttttataacatagatacctctttacggactctacttatgactccctaaagcccatgtagaaccgcccatcgctgggtc

SEQ ID NO: 232948 - DNA, 326 bp, Homo Sapiens
ctttgtacaaaaaagttgtccggcaactaagactgaaacaagcggccgctccccgaccttctccttcttgtctcaacctccacggaagcaagaagaaagcacaagccctaccctgcgctcccgggatgactcttacagcttccactaaacaacccctccccactctttctttttctttaaccgccggaagaggaggacctggacaaggactccaggatggcggtggcgaagtaagggtcaggggccccgagccgtacacgtcccgttgcagttgcagaggacgctgagtctctgctgattccgagcggagatggagctgtctcggg

SEQ ID NO: 232949 - DNA, 366 bp, Homo Sapiens
  misc_feature (49)..(162): n is a, c, g, or t
  misc_feature (187)..(306): n is a, c, g, or t
gtaatgggaagttttcttgtctgttttttgtcttttttgagacagggcnnnnnnnnnnnnnnnnnnnnnnnnnnnnnnnnnnnnnnnnnnnnnnnnnnnnnnnnnnnnnnnnnnnnnnnnnnnnnnnnnnnnnnnnnnnnnnnnnnnnnnnnnnnnnnnnnngcatatgccagcacacccagctaannnnnnnnnnnnnnnnnnnnnnnnnnnnnnnnnnnnnnnnnnnnnnnnnnnnnnnnnnnnnnnnnnnnnnnnnnnnnnnnnnnnnnnnnnnnnnnnnnnnnnnnnnnnnnnnnnnnnnnntgaggcactgcttccggctgacactgtttcttaaaacgttgtcatcatccctgaaacaaa

SEQ ID NO: 232950 - DNA, 516 bp, Homo Sapiens
  misc_feature (95)..(263): n is a, c, g, or t
  misc_feature (309)..(404): n is a, c, g, or t
ttggaatattccccaatggagtactagctcatggtgacgggcaggcagcttgactaatgagtcctcggcgtggccggcgcagctctccaatcgcnnnnnnnnnnnnnnnnnnnnnnnnnnnnnnnnnnnnnnnnnnnnnnnnnnnnnnnnnnnnnnnnnnnnnnnnnnnnnnnnnnnnnnnnnnnnnnnnnnnnnnnnnnnnnnnnnnnnnnnnnnnnnnnnnnnnnnnnnnnnnnnnnnnnnnnnnnnnnnnnnnnnnnnnnaacggcctggagtctgaggaactggagcctgaggagctgctgctgnnnnnnnnnnnnnnnnnnnnnnnnnnnnnnnnnnnnnnnnnnnnnnnnnnnnnnnnnnnnnnnnnnnnnnnnnnnnnnnnnnnnnnnnnnnnnnnncagccaagaggaggaggaagagccgggactggtcgagggtgacacgggggacggcgccattgaggacccggagctggaagcgatcaaagctcaagtcctggagatggaggaa

SEQ ID NO: 232951 - DNA, 888 bp, Homo Sapiens
  misc_feature (441)..(450): n is a, c, g, or t
ttggctgtattcattgctttgtgagaattaaactaggttaaagctaagtcagtgacacatgcggctattgaaataattttaccatttaagaaaactaccaaatccccagagtttgtaggcagctggcagaaaataaaagtgttcctgtacttgcccttgatctccctaattgtgtaatctcttacatcattatttttccagctaccacacctatatgttgtgactgcacagggtaaaaaagtcttaatctctctaatgttaactcttgatcagttgccatagccatctatgagattgtatctgggctttgaacagaatgtttaattgcattttattagagttgtgtgctattgatagaggataagagagggccaggtaagcttgatggtgtatgtattgattgtcttaacctccctgagctctagatttaacttttagtcnnnnnnnnnnggacagcttcacattttctaggaatctcaaattctatatggagtttgaatcttctccaaattagaaggagaaaatctgtaatagtcaatgtatatcagttaaactcttcagaatatgtgagatgataataatgaccatttattgagttctataggccaggaactaaatgctttacagtacagagatactatgttagattgtctacttttgggaggaggggcaggagaaggggagattttcttatgaggaaaaactccaagattacatccctgttatctttcctccaaatagtttctgataataagttatttgattaaaaattgttttaattagaatttcatggctttttacaaactgttactgacactccacatgtttgtttttgtacgagctgactaacgctttggaacagaaaccagatgatgcacaatattattg

SEQ ID NO: 232952 - DNA, 223 bp, Homo Sapiens
  misc_feature (56)..(65): n is a, c, g, or t
  misc_feature (81)..(91): n is a, c, g, or t
  misc_feature (104)..(116): n is a, c, g, or t
  misc_feature (148)..(157): n is a, c, g, or t
tcctattttttaaataaaaaatacggcgagagacacaccttttgtctcttgttagnnnnnnnnnnataggagggcgaccannnnnnnnnnnaccatacaaggannnnnnnnnnnnncaaaaaaagaaggagagccccctctactctannnnnnnnnnctcggaggggagcgcgatgttatgtattattattctcattttgtctcctggggggcggggagagga

SEQ ID NO: 232953 - DNA, 102 bp, Homo Sapiens
atcatcgttaagccttccttgtaaaaagttgggcattataagaaaagcattgctttatcaaatttagttgcacggacaaggtcactattcagtcaaaaataa

SEQ ID NO: 232954 - DNA, 371 bp, Homo Sapiens
  misc_feature (47)..(60): n is a, c, g, or t
  misc_feature (97)..(166): n is a, c, g, or t
  misc_feature (183)..(191): n is a, c, g, or t
  misc_feature (211)..(268): n is a, c, g, or t
ccccttcccggggcaaaaaaactgtctttccctttgctccccctatnnnnnnnnnnnnnnggccaaaccccccgggcccccctttaaggggggaatnnnnnnnnnnnnnnnnnnnnnnnnnnnnnnnnnnnnnnnnnnnnnnnnnnnnnnnnnnnnnnnnnnnnnntttccctttaacttccnnnnnnnnnttttagggggaaaacaaaannnnnnnnnnnnnnnnnnnnnnnnnnnnnnnnnnnnnnnnnnnnnnnnnnnnnnnnnnaaaaaaccacctttgaagggaaaaccatggccgggttcccaattggcccaaaaggccccctggaaaaaagagtcccgggatttttccccccaatttgctttgg

SEQ ID NO: 232955 - DNA, 406 bp, Homo Sapiens
ttggagtgcagcagccaaaatattttgttgctcccctcaaaaggaagattttttgaaaaattatcttcttatggaaatggggccccgagaacacatgaatggtgatggcacaaagaaaacctgtggttgtgctgcgggaggacgtgttttttttcttatcagcactggatgtttggtgatgttgttactcctcccacccgattttttattggttttttattaattaaagcatgttgtttctgccgcgacgactaaaatgctgcaccctgctggaggaagcccccaaggctgatccaccccgcccctccgccctgacgcccccctaagccggactaccctgtggcgccctttccccccctccccacccggaggatggtggaggaacaaaaaatgctgcccacaaaaa

SEQ ID NO: 232956 - DNA, 478 bp, Homo Sapiens
cccaaaaacccacaatgatattgatatcattatcctaaatttcattttgcgagctggaatactacgtaatactgtaaaactcctcatatcaactcactaggaatcacctacctacatggtattaatgaactgtatctacccgacagccttcaaaatgttcttcgggtgatgctgccaacttaatcaatagacatccttcccaatgttcttctcaactgactagttcctatccagcctactgcctattgtatggcgtttccccgcaatcataaataaaaatactgactcttagtgcgagcctctttttcgtgctcaaatcagctacatcgaacgattgatctagaccagggtgaacatcctgacaacccttagcatggaaataaatttaccaactcttatacgttctcttaccatcttctcggcatacctaggatgtgtctcctctatctttagggccatcgatttcgtctcagtaatt

SEQ ID NO: 232957 - DNA, 160 bp, Homo Sapiens
  misc_feature (41)..(92): n is a, c, g, or t
actataaaggaacaactttgtacaaaaaagttggctctcannnnnnnnnnnnnnnnnnnnnnnnnnnnnnnnnnnnnnnnnnnnnnnnnnnntgggctgaagtgatcctcccaccctagcctcctgagtcattgggacaataagtgtgcaccaccacacc

SEQ ID NO: 232958 - DNA, 882 bp, Homo Sapiens
  misc_feature (166)..(200): n is a, c, g, or t
  misc_feature (443)..(462): n is a, c, g, or t
gcatgaaccactgcatcctgcttggatgtgtgtttcttaaaagtaaagaggaagcttcagtttgaccccatagtgtttgaagtgcaatttttagtccaaaaaatattctttctggtttctcagtaggaagcctacaaattactatgtaatttcaccatctctactnnnnnnnnnnnnnnnnnnnnnnnnnnnnnnnnnnnctatatattcctttttaagtataatagaccctaaatgaatttatatttacaaactaaattcagttttggtaatcttggtgagtgaacttttgattcaattttgtaaaatttaacctgattaatagtcaatgaagccccacttttacagttttatatctagattttaattgttctgctaatgttgcagttacttcatgtttatcatgatctaacctgtcttcatttcagatttactccatgagnnnnnnnnnnnnnnnnnnnnctttctttgcagcctcgtttggaccaagctaaccattcatgtgaaaattcagaattggcagatttggataagttgaggtataggcattgccttacaacacttacagtcccaagaagatgtataggatttgcaaggaggcgaattggcagaggtggaaaggtcataatggaccgaatatccacagaacatgacccagtcctgaaacagatagaccctgaaatgctgaatagtttttcaagctcttcccaaactatagacttttcttctaatttctctcggaccaatgcttccagtaaacattgtgaaaatagactgtctctttctgaaatattaagcaatatcagatcatgtcgactacagtgtttccaggcaaggctactaatttacaggacgtgatagtgaagatcgtacctcagaaaa

SEQ ID NO: 232959 - DNA, 165 bp, Homo Sapiens
tttaaaaggggggttttttggggggcccggtgaaaccccccaaaaacaccccctctccaaaatggttctctccggggggggagaggcgccccccatttttttcccacacacacaacccctctccaaaatgtgtttttctcccccacaagagaaaatctttttttt

SEQ ID NO: 232960 - DNA, 604 bp, Homo Sapiens
  misc_feature (102)..(142): n is a, c, g, or t
  misc_feature (149)..(404): n is a, c, g, or t
gtaaagggaactttgtacaaaaaagttggtttatgtatttcgtgaaagaaccccttgtgtgatgcatggtttgcaaatacttgcttccattatctgggtggnnnnnnnnnnnnnnnnnnnnnnnnnnnnnnnnnnnnnnnnngacgcannnnnnnnnnnnnnnnnnnnnnnnnnnnnnnnnnnnnnnnnnnnnnnnnnnnnnnnnnnnnnnnnnnnnnnnnnnnnnnnnnnnnnnnnnnnnnnnnnnnnnnnnnnnnnnnnnnnnnnnnnnnnnnnnnnnnnnnnnnnnnnnnnnnnnnnnnnnnnnnnnnnnnnnnnnnnnnnnnnnnnnnnnnnnnnnnnnnnnnnnnnnnnnnnnnnnnnnnnnnnnnnnnnnnnnnnnnnnnnnnnnnnnnnnnnnnnnntgagccactgagcccggcctggaaacctaactttattttttagtgttgtatttgtatatatacttttaacagccctgagttttaataaagttcttttaaaaaatgtatcttatatttcagaaatataccctaaggaatgtgattagttgggtggcatgttgtttagtttttacaattgaaggattgtcattcctttgtac

SEQ ID NO: 232961 - DNA, 373 bp, Homo Sapiens
ttggcttgttactattccttagaatgcaaatgcccatgtcttgtcattgactaatggatttggatttttctttttcttttgatattggctcctgtaattgtggatacttacacttactaccaatactaccacgaaggtcaaggtcttcttgttcttgtctatctggatcatgggtgaaacggaatcaatatgataggattgatgatgacgatgacaaaatcgtcaccccaacagataactaaatcttttcgctttctggagacggacactgcccttacgcttacctcctagtccctcggccactcgaaattgagataaaggaaaatgaaagtgaatcttaatcttcattttaatacttatgcttaaatgtaaa

SEQ ID NO: 232962 - DNA, 695 bp, Homo Sapiens
  misc_feature (68)..(339): n is a, c, g, or t
aagggctactttgtacaaaaaagttggagataattcacccccattacagtattttcagtatttaaagnnnnnnnnnnnnnnnnnnnnnnnnnnnnnnnnnnnnnnnnnnnnnnnnnnnnnnnnnnnnnnnnnnnnnnnnnnnnnnnnnnnnnnnnnnnnnnnnnnnnnnnnnnnnnnnnnnnnnnnnnnnnnnnnnnnnnnnnnnnnnnnnnnnnnnnnnnnnnnnnnnnnnnnnnnnnnnnnnnnnnnnnnnnnnnnnnnnnnnnnnnnnnnnnnnnnnnnnnnnnnnnnnnnnnnnnnnnnnnnnnnnnnnnnnnnnnnnnnnnnnnnnnnnnnnnngactgctcaaatctcaagagaaggtgagagaattggtgaattttattgtcctgcacatgccctaattaacaagggtgactttgttaatttgtgctctgtgtcctaggctgctgaatgtggcatggaccactcccttgcagttgtatgtaatgttcactctctgcttagagaatctgagctttttaattgtgcctgccagaggctcatcccttcagctcaaggtcagcgagatattttggctcacacccagatgtcccactttcttagctggctgtgtgcaagctgtctgtctgctgctgtgttgcactgtctctaagccaccaaagtcagtgttaccttgttccccaaccttttca

SEQ ID NO: 232963 - DNA, 769 bp, Homo Sapiens
  misc_feature (162)..(180): n is a, c, g, or t
  misc_feature (202)..(258): n is a, c, g, or t
  misc_feature (333)..(694): n is a, c, g, or t
ttggtcaaagtgtgggtggggttccactctgttctagtggagtggccacagtgctaattaacaaaatatgctttgagttgaatatataaagtttctactttactcaccctgcagaataccccactatgtatgtttattcttcagagggaacattaatcttgnnnnnnnnnnnnnnnnnnngagacgaagtcttgctgtgtgnnnnnnnnnnnnnnnnnnnnnnnnnnnnnnnnnnnnnnnnnnnnnnnnnnnnnnnnngttcgggcgattcttgtgcctcggcctcttgagtagttgagattacaagtgtgtacaggtgtgcaccaccgcatnnnnnnnnnnnnnnnnnnnnnnnnnnnnnnnnnnnnnnnnnnnnnnnnnnnnnnnnnnnnnnnnnnnnnnnnnnnnnnnnnnnnnnnnnnnnnnnnnnnnnnnnnnnnnnnnnnnnnnnnnnnnnnnnnnnnnnnnnnnnnnnnnnnnnnnnnnnnnnnnnnnnnnnnnnnnnnnnnnnnnnnnnnnnnnnnnnnnnnnnnnnnnnnnnnnnnnnnnnnnnnnnnnnnnnnnnnnnnnnnnnnnnnnnnnnnnnnnnnnnnnnnnnnnnnnnnnnnnnnnnnnnnnnnnnnnnnnnnnnnnnnnnnnnnnnnnnnnnnnnnnnnnnnnnnnnnnnnnnnnnnnnnnnnnnnnnnnnnnnnnntatattatatatatggaaataaacaataattaggaaataagaatttcttatttgtgcttagaatacacagtgaag

SEQ ID NO: 232964 - DNA, 233 bp, Homo Sapiens
  misc_feature (42)..(156): n is a, c, g, or t
  misc_feature (159)..(176): n is a, c, g, or t
aagttgatttttttgggttctttaaaaaacccccttttgccnnnnnnnnnnnnnnnnnnnnnnnnnnnnnnnnnnnnnnnnnnnnnnnnnnnnnnnnnnnnnnnnnnnnnnnnnnnnnnnnnnnnnnnnnnnnnnnnnnnnnnnnnnnnnnnnnnnggnnnnnnnnnnnnnnnnnntttttggaattttttgttattaaaaaggggattttttgggcccaatttttttccccc

SEQ ID NO: 232965 - DNA, 390 bp, Homo Sapiens
  misc_feature (52)..(73): n is a, c, g, or t
  misc_feature (96)..(148): n is a, c, g, or t
  misc_feature (158)..(346): n is a, c, g, or t
ttggctctgattgagaaggttaagatttttcagggttgattgatttattacnnnnnnnnnnnnnnnnnnnnnngagacggaatctcactctgttgnnnnnnnnnnnnnnnnnnnnnnnnnnnnnnnnnnnnnnnnnnnnnnnnnnnnnagttcaagcnnnnnnnnnnnnnnnnnnnnnnnnnnnnnnnnnnnnnnnnnnnnnnnnnnnnnnnnnnnnnnnnnnnnnnnnnnnnnnnnnnnnnnnnnnnnnnnnnnnnnnnnnnnnnnnnnnnnnnnnnnnnnnnnnnnnnnnnnnnnnnnnnnnnnnnnnnnnnnnnnnnnnnnnnnnnnnnnnnnnnnnnnnnnnacagctcaaaatgttttaatatatgtgtacattgtggaatggat

SEQ ID NO: 232966 - DNA, 676 bp, Homo Sapiens
  misc_feature (169)..(186): n is a, c, g, or t
  misc_feature (199)..(368): n is a, c, g, or t
  misc_feature (377)..(635): n is a, c, g, or t
ttgggttctttatataaataaatgtttctttgtgtcactatttcttcatccacttaaatatttgctcagctcctgtaggtcacacactatcttgtgatcctgggaataccaccagttcctgcctatcaggaactcacagtctactgcaaagtttctcagcctctacacnnnnnnnnnnnnnnnnnngagagggagtctnnnnnnnnnnnnnnnnnnnnnnnnnnnnnnnnnnnnnnnnnnnnnnnnnnnnnnnnnnnnnnnnnnnnnnnnnnnnnnnnnnnnnnnnnnnnnnnnnnnnnnnnnnnnnnnnnnnnnnnnnnnnnnnnnnnnnnnnnnnnnnnnnnnnnnnnnnnnnnnnnnnnnnnnnngaaatggannnnnnnnnnnnnnnnnnnnnnnnnnnnnnnnnnnnnnnnnnnnnnnnnnnnnnnnnnnnnnnnnnnnnnnnnnnnnnnnnnnnnnnnnnnnnnnnnnnnnnnnnnnnnnnnnnnnnnnnnnnnnnnnnnnnnnnnnnnnnnnnnnnnnnnnnnnnnnnnnnnnnnnnnnnnnnnnnnnnnnnnnnnnnnnnnnnnnnnnnnnnnnnnnnnnnnnnnnnnnnnnnnnnnnnnnnnnnnnnnnnnnnnnnnnnnnnnnnnacctctcctggcccacctctatactactgacgtggaagcga

SEQ ID NO: 232967 - DNA, 359 bp, Homo Sapiens
  misc_feature (41)..(127): n is a, c, g, or t
  misc_feature (202)..(284): n is a, c, g, or t
taaaactttttcgggtttctttttacacgggaaacacccannnnnnnnnnnnnnnnnnnnnnnnnnnnnnnnnnnnnnnnnnnnnnnnnnnnnnnnnnnnnnnnnnnnnnnnnnnnnnnnnnnnnnngaattgaggccccctttgccaaagggggaaccccaaccccccaggccccttttggccttttaaaagggggctagnnnnnnnnnnnnnnnnnnnnnnnnnnnnnnnnnnnnnnnnnnnnnnnnnnnnnnnnnnnnnnnnnnnnnnnnnnnnnnnnnnnccgggaacccccaaacctattttaaaccccatttaaatttttaaaaaactttgaaatccacccggggtttccaaa

SEQ ID NO: 232968 - DNA, 815 bp, Homo Sapiens
  misc_feature (92)..(696): n is a, c, g, or t
ttaaccaatgaggttaaagagctctacaaggacaattataaaacactgatgaataggtcacacacacacaaaacggaaagtcatctcatgtnnnnnnnnnnnnnnnnnnnnnnnnnnnnnnnnnnnnnnnnnnnnnnnnnnnnnnnnnnnnnnnnnnnnnnnnnnnnnnnnnnnnnnnnnnnnnnnnnnnnnnnnnnnnnnnnnnnnnnnnnnnnnnnnnnnnnnnnnnnnnnnnnnnnnnnnnnnnnnnnnnnnnnnnnnnnnnnnnnnnnnnnnnnnnnnnnnnnnnnnnnnnnnnnnnnnnnnnnnnnnnnnnnnnnnnnnnnnnnnnnnnnnnnnnnnnnnnnnnnnnnnnnnnnnnnnnnnnnnnnnnnnnnnnnnnnnnnnnnnnnnnnnnnnnnnnnnnnnnnnnnnnnnnnnnnnnnnnnnnnnnnnnnnnnnnnnnnnnnnnnnnnnnnnnnnnnnnnnnnnnnnnnnnnnnnnnnnnnnnnnnnnnnnnnnnnnnnnnnnnnnnnnnnnnnnnnnnnnnnnnnnnnnnnnnnnnnnnnnnnnnnnnnnnnnnnnnnnnnnnnnnnnnnnnnnnnnnnnnnnnnnnnnnnnnnnnnnnnnnnnnnnnnnnnnnnnnnnnnnnnnnnnnnnnnnnnnnnnnnnnnnnnnnnnnnnnnnnnnnnnnnnnnnnnnnnnnnnnnnnnnnnntcagtgaactgattttcaacaaaggtgccaagaacattaactgggggaaagagcagtgaatggtgctgggaaactggaaatacattttgaggatacgcagaaaaatgaaactagaaccc

SEQ ID NO: 232969 - DNA, 955 bp, Homo Sapiens
  misc_feature (396)..(597): n is a, c, g, or t
  misc_feature (609)..(903): n is a, c, g, or t
ttggacatactattgtctcagtgtactctgagtgctgagtgaagacagaccttgagacagccataaaaagatagaaatttaatccataaatgcaattagttcaaagtaggtttttgtatggcatgcttaaagatttggaggcaggaactactgaaagtttttaagcaggaatccatatgttccacttttcccaaacagctcctaattatttatggtgtgcccctttcactcctaatggtaattcagtttagataataaattatgtaatcagtcaccttctgaaacaacagtacagcaaaagagatggctgtggttgagccatttagaatacaagtaataagaaaaaaataaaggaaccactccacaagttttggggtggaaacagagaaggaatannnnnnnnnnnnnnnnnnnnnnnnnnnnnnnnnnnnnnnnnnnnnnnnnnnnnnnnnnnnnnnnnnnnnnnnnnnnnnnnnnnnnnnnnnnnnnnnnnnnnnnnnnnnnnnnnnnnnnnnnnnnnnnnnnnnnnnnnnnnnnnnnnnnnnnnnnnnnnnnnnnnnnnnnnnnnnnnnnnnnnnnnnnnnnnnnnnnnnnnnngtactctagagnnnnnnnnnnnnnnnnnnnnnnnnnnnnnnnnnnnnnnnnnnnnnnnnnnnnnnnnnnnnnnnnnnnnnnnnnnnnnnnnnnnnnnnnnnnnnnnnnnnnnnnnnnnnnnnnnnnnnnnnnnnnnnnnnnnnnnnnnnnnnnnnnnnnnnnnnnnnnnnnnnnnnnnnnnnnnnnnnnnnnnnnnnnnnnnnnnnnnnnnnnnnnnnnnnnnnnnnnnnnnnnnnnnnnnnnnnnnnnnnnnnnnnnnnnnnnnnnnnnnnnnnnnnnnnnnnnnnnnnnnnnnnnnnnnnnnnnttctagagagcagctagagacatctatattccaatataaaaatgtctagcta

SEQ ID NO: 232970 - DNA, 241 bp, Homo Sapiens
ttggcccagataaaaatattatatttacattttccatctcacttctacgaatacaactatatcgctcacacctcatatcatcccgactatgccgaaaaagaataatactgttcctgttcattactcctactctcataaccctccactccctctccctcttaaccgatattgtggctattgccatacttgcctttggcgcctgcgaagcgggcgtgggcctaccactactaatctcaatctc

SEQ ID NO: 232971 - DNA, 387 bp, Homo Sapiens
ggttataatcattccatgatatatgtatcaatatgtgaaattatattttgaatttccacatactacgtggaagagtttaactaaacatatctattctggaatctgtactacaaagattggagctattgatttctttacaaaatgctggctgttgcatgtctggaccctgatgctgcctctgagtcgaaatacgtccttccaaatgttcacctgtttcacaatcctccaatccgacctatgaaatagtgtcgcctttaattggagtatctaaagccaatgtcagggtaagatcttacttgcacttttttggaagggtttgccaaaacttctaacaatatgtaatttcttttgaaatttgcttcagtttcgtttttatctcaaactgtt

SEQ ID NO: 232972 - DNA, 651 bp, Homo Sapiens
  misc_feature (51)..(119): n is a, c, g, or t
  misc_feature (182)..(498): n is a, c, g, or t
gaaatatcttggttcttttatgaacatgtagtcagatctgctacagagagnnnnnnnnnnnnnnnnnnnnnnnnnnnnnnnnnnnnnnnnnnnnnnnnnnnnnnnnnnnnnnnnnnnnnttttgtaagttgtacaacttctgcatgtttcttaaaatgtgaagcaaaacaaaagtatggaannnnnnnnnnnnnnnnnnnnnnnnnnnnnnnnnnnnnnnnnnnnnnnnnnnnnnnnnnnnnnnnnnnnnnnnnnnnnnnnnnnnnnnnnnnnnnnnnnnnnnnnnnnnnnnnnnnnnnnnnnnnnnnnnnnnnnnnnnnnnnnnnnnnnnnnnnnnnnnnnnnnnnnnnnnnnnnnnnnnnnnnnnnnnnnnnnnnnnnnnnnnnnnnnnnnnnnnnnnnnnnnnnnnnnnnnnnnnnnnnnnnnnnnnnnnnnnnnnnnnnnnnnnnnnnnnnnnnnnnnnnnnnnnnnnnnnnnnnnnnnnnnnnnnnnnnnnnngtactatccaagtattctccataaggcattatcaatgtatcaatagcagaaagatcagcgagagaaagcaaactctgggggctattttgatctgatctatctatcattgcacaattttagaacattctcagttttctcacatacaatttttga

SEQ ID NO: 232973 - DNA, 693 bp, Homo Sapiens
  misc_feature (93)..(119): n is a, c, g, or t
  misc_feature (137)..(418): n is a, c, g, or t
  misc_feature (493)..(550): n is a, c, g, or t
ttggcgagtttctaaattatgtttgatatttgaagcaaaaattataacattgataaggttttagatgtatgtaaagaaaatatataaggcaannnnnnnnnnnnnnnnnnnnnnnnnnnagacgtagtctctgtcannnnnnnnnnnnnnnnnnnnnnnnnnnnnnnnnnnnnnnnnnnnnnnnnnnnnnnnnnnnnnnnnnnnnnnnnnnnnnnnnnnnnnnnnnnnnnnnnnnnnnnnnnnnnnnnnnnnnnnnnnnnnnnnnnnnnnnnnnnnnnnnnnnnnnnnnnnnnnnnnnnnnnnnnnnnnnnnnnnnnnnnnnnnnnnnnnnnnnnnnnnnnnnnnnnnnnnnnnnnnnnnnnnnnnnnnnnnnnnnnnnnnnnnnnnnnnnnnnnnnnnnnnnnnnnnnnnnnnnnnngaagataaagggaagtaaagggaggtaaggattctgtacttaattcagactaacaaaatgatgacaccagagggnnnnnnnnnnnnnnnnnnnnnnnnnnnnnnnnnnnnnnnnnnnnnnnnnnnnnnnnnncctagagcaaccgctaaaaagttatacaaagatatatactcagaacacactgttgataagtcaaaaatggaattctaaaaaaatgttcaaagaaactaactcacaggatgtcaggaaaaaagaaaacaggaatgaaagaacag

SEQ ID NO: 232974 - DNA, 388 bp, Homo Sapiens
  misc_feature (184)..(195): n is a, c, g, or t
ttggccccgatcagaattggacctgaccctttcctttcccattcttatccccatcatgtccatgtccagttagaatttaaatttctcattcagaaattaaaatctgagataaagatgaaatagacataaatggatccggatcatttctacttcatcttgttttgtggacgcggacacctgaccnnnnnnnnnnnnacagagacaaatacaattaagaagcagaaacagcctaccttattcttattctcatcgtcaatggcattggtattgtctcattccccaaacaggactcggaatcctttgggtcaaccaatccaattcacttattctttttcaggactatcacctgcacctgtcacagctggacaaggaccaccaactgtctatg

SEQ ID NO: 232975 - DNA, 220 bp, Homo Sapiens
gcagtgggctccgggcatctggctaacgaaggtgaccatcactctctgggtccatctcagggtggcaatcatagagactgactggaatgcatacttgggcaaagtagaaggcgtcatccatggtacatatgactatatccacctacaaggtgaaacagtacccattgtgtacccggctgttttcttgtaaaacattacggggttataaataacacccccc

SEQ ID NO: 232976 - DNA, 620 bp, Homo Sapiens
ttgggttttaacaggtgtggtaaggcatgcacacgtgagaatgactgttgtgaaggaagaagttatagtcgtgggtccctggaaactgggcagggcacacagggcgacatgagaaggaccagggatggccaggaggcaaaaagcgggagaggactgaatttggccagagcctttattttctctggaaggagaaggcaagcaggttggtattcagagtgaactccgattggaatattgaaaaattgtggcaagtcaggctggaaagtgggccttccttcccggcccgggccccccggttactttacaaggggaaatttatctggtagtaacgcgggaaaagaaaaggtaatggggaattgggtgtgtgttgtgttctcaaaagggcctgggggtgggcgcccaggggctccggcttgtaatccccccctttttaaacccaaaaaaccaaataccctaggtgagacacacccgggccacacaggggaacaccctctctctttttattgccaaaaatttccggggtgtgtgtgtggcccctgtgtcccccaatttcgagaggggagagggagagaaaccctcccccccagagggagagcgacaagaggccgacactctctctc

SEQ ID NO: 232977 - DNA, 265 bp, Homo Sapiens
ttggcccagaaaaagcttcctacgtaaggaaagaaattttatttctctcacatgaatgaatattgactgaaggaaaaattttggtagggtttctatcactcactcccttggaaggcccgcccaatacattcactgaatctttctgggctgtctttctagctctctcacgaatgaaagatatgttgtgtatgtctctctgctcactcatttatctaccatggaaggatctatctcctacaaaaatgaatatggatgatgaactaac

SEQ ID NO: 232978 - DNA, 913 bp, Homo Sapiens
  misc_feature (401)..(655): n is a, c, g, or t
cagtataaaacaactttgtacaaaaaagttggctgtctagtgtgtggctgtaaaatacgccatggaggcggagggacggtggctaacactttcgcccgccccgtgcacgcgatcgctggggagctggggtcgctgcgctcccggcctgcagttacctggtccagcgggatgcccaggagctcgctgagcgggtgcagagaatgaaagacggaagaaatgaagtagtggacaagcaaacatcaatgtggagacagattctcattttccccatttggtcttggctgcttaagaaaaggtgaaaagcaggagaagatgcttcccggtactgcaacgtagggcaaagtggagctgacaaatggaaagaatgtgaccttgggaatgagattcttgccttttctgannnnnnnnnnnnnnnnnnnnnnnnnnnnnnnnnnnnnnnnnnnnnnnnnnnnnnnnnnnnnnnnnnnnnnnnnnnnnnnnnnnnnnnnnnnnnnnnnnnnnnnnnnnnnnnnnnnnnnnnnnnnnnnnnnnnnnnnnnnnnnnnnnnnnnnnnnnnnnnnnnnnnnnnnnnnnnnnnnnnnnnnnnnnnnnnnnnnnnnnnnnnnnnnnnnnnnnnnnnnnnnnnnnnnnnnnnnnnnnnnnnnnnnnnnnnnnngtgggagcaaaggcatggcaggaggagagaactgcgtgtgtgaggaataaaaacaacatgttgcaattgaggaaggcgtgaatttatggggagaatacagagatgaagacttaaaacgaatggaagccaaggagatgaaatggaagactttggacagaacttctgggaaagctctttaaagcagtctactagactgggcaagcagacattcattctcctcttctgacttaggacatggtatttttagctccagcagcc

SEQ ID NO: 232979 - DNA, 472 bp, Homo Sapiens
  misc_feature (79)..(380): n is a, c, g, or t
caaacgaaagaaatgttaaaacttcattttacaatagcatcaaacatataaaaaatacttaggaacaaaagaggtccannnnnnnnnnnnnnnnnnnnnnnnnnnnnnnnnnnnnnnnnnnnnnnnnnnnnnnnnnnnnnnnnnnnnnnnnnnnnnnnnnnnnnnnnnnnnnnnnnnnnnnnnnnnnnnnnnnnnnnnnnnnnnnnnnnnnnnnnnnnnnnnnnnnnnnnnnnnnnnnnnnnnnnnnnnnnnnnnnnnnnnnnnnnnnnnnnnnnnnnnnnnnnnnnnnnnnnnnnnnnnnnnnnnnnnnnnnnnnnnnnnnnnnnnnnnnnnnnnnnnnnnnnnnnnnnnnnnnnnnnnnnnnnnnnnnnnnnnnnnnnggcaatattacctcagttgatctgtagatttcctgtctgatatctctgtcagagtaccagctgggtttgacaagatgaccctaaagtccata

SEQ ID NO: 232980 - DNA, 110 bp, Homo Sapiens
tggtgaagccttccaaaactgtccctcacctgtctgactctggtggctccttcaatagttattactggatctggatcatgcagcccccaggggggggtctggattggatt

SEQ ID NO: 232981 - DNA, 936 bp, Homo Sapiens
  misc_feature (278)..(324): n is a, c, g, or t
ttggaaagtaattttctttatttgcccccccagtattcattaataatttttttggaggatagaatgtagaacaataaatgggtgattcttcatggagattcttaatggagaatcttaatgttgttcaacaataattcttaaaatattacaccaacgtagtagaataatctgattgttgtcctcctgttggtgggcagacaagttgatgatgagccgccacgtcatcaatcaccacttgttgatgaagctaataatgacgaggagtgtagtcatgtcgnnnnnnnnnnnnnnnnnnnnnnnnnnnnnnnnnnnnnnnnnnnnnnngccgccattattcatatacttctgtcgtgatcagggggttcgctttttttactgattaatccgcagaataagatacgtactgtagttgatgatgaagtaaaagtcgtcgtaggatactatccacaaaaaagacgtctacaataattattggtgtttttgcaccattatgatcatcatactgcggtgccgacgtcattactcctcatgatgtcgagtcggccgtcattattgatggataatgctgagatcatcagctgcagaataatatcttacagaggagaactgctccattagtgcatattcttccttgctgttattctatcagctccattatgaagatccaagaagtagtataagatgtgacgtgtggtatatacttcgcagacaatacaagcatcgttgcaacaagtgacgactaccacaacttaataatatattcaccaccattatcgagtcgactagtaaaacagtgatagtgtacgacatgctgcatagagatgaagattaaagagataatgagtagtatgctgctattgtcactacaccgagattgtgagctgctgctgcttcatagttgtagtaaataattgtggagacatcgtcgcccactac

SEQ ID NO: 232982 - DNA, 265 bp, Homo Sapiens
  misc_feature (77)..(99): n is a, c, g, or t
  misc_feature (164)..(212): n is a, c, g, or t
gtccgaccgacagccttcccaatgttcctccggggtgatggttcttctcaaaacgggatcctccttatcccgccctnnnnnnnnnnnnnnnnnnnnnnnggtggcgaaccctttttcttatacccccaagtgtgctcactccccgaaaaatctctccgccctcnnnnnnnnnnnnnnnnnnnnnnnnnnnnnnnnnnnnnnnnnnnnnnnnngtttttcggcgtctctctccggagatttttccccccctcttattctttctaaa

SEQ ID NO: 232983 - DNA, 376 bp, Homo Sapiens
  misc_feature (43)..(52): n is a, c, g, or t
  misc_feature (98)..(136): n is a, c, g, or t
  misc_feature (197)..(212): n is a, c, g, or t
aaaatcctttaaaaatcccccaaaccaaggcggggaaaaaaannnnnnnnnnccaaccccccgggaaaagggtaaacgggggcaaaaggccgggtttnnnnnnnnnnnnnnnnnnnnnnnnnnnnnnnnnnnnnnnaagaatttaaatcccgaaccccccaatttttccctaaggtcaaaaaaaggccagggggggnnnnnnnnnnnnnnnnggaacttttcccggaaaaaatttgggcctttttcccaaattttttgcggccaaacctggaacggccaattcgaaatctctagagagacgcaaaaagcggtctccctactcccaaaacccctattacccggattcgggagggcaccccccccgagacctgtgtgg

SEQ ID NO: 232984 - DNA, 417 bp, Homo Sapiens
caatgcttttttctaatagaacaactttgtacaaaaaagttggacactacaattacttttatttactatctcccttcaataataactaatatatcactcctaccacctaccctacctagcatgccaggaatgaaaataactatctctgttcattatacccactcacacatccctcaccaccccctcttactcaacatatattgtgccgattgacttatcatactttgctgcctgccaaccgtgggtggacccctcccaattagtctcactatcaaacatggccggcacaaactacataaactaaacatactccatcgcatgctcaaactaatcctcccatcatttaacttactatgactggaattactatcaaaaaaataaataatttcaatccacccacccacaccctacttattt

SEQ ID NO: 232985 - DNA, 136 bp, Homo Sapiens
cctgttcgttgcacaattgatgagcatgcttctagcctctttgtacaaagttggatcatatttagaatgaagcctcatttacataaatattatactagcatttacatctcactctagatactagtatatcgctcac

SEQ ID NO: 232986 - DNA, 516 bp, Homo Sapiens
  misc_feature (236)..(261): n is a, c, g, or t
  misc_feature (289)..(297): n is a, c, g, or t
ttggctaggaaaaaaacctgattgattcattctaatgatagctccgctgttagggttggatttaactgcctgcattaaaagatctatgaccgaatattctcctgggtgcgcgccccacgaacgctattaaggttcgttgaattgtttgctatcattgccttccctctgatccttccatcatgctgttgacttccctcccaccattcatacggaatgggcggggtatgaaggaaggnnnnnnnnnnnnnnnnnnnnnnnnnngaatgactgacatttgatttttgtgagnnnnnnnnngaatggacggactgacggtctctggaactggatggaaacaaacttaatagacaattctatctattaattcctgccagggacggacattgcctgtaaataaaaaacttcctactaaacctgtggcagatgtatgttgagtaaaatttctgcccgcccttccctgcctgcatacgaaagaatctatgaacgaaccttgaactaactattttttattcaaac

SEQ ID NO: 232987 - DNA, 480 bp, Homo Sapiens
  misc_feature (358)..(366): n is a, c, g, or t
  misc_feature (417)..(426): n is a, c, g, or t
ttgggccttcttgtttcctgatagattgcaaattgtcaagggtgacggggacctctcacctctccccaaggcccatcgcctttggagtttaaacccgaaaccgcaagagccacgcacggccctgcctacgactgcgcactctgccccacactgccccgcactgtggctgatggtctatcggttaccgtctgctctcctctcggtgtcccgggtcattccttggatcccgaatgggtttgccctgtgctgagctgggtggcactggggggctacgagacacaacacacgtctgccgagttggaactgctcccgaagggtcaccggccccgacctgcgacatccaccggatgccccatgnnnnnnnnnacatggcacgaaccgcgccgtgtcccatgctgtcagggtcctcgaccgtgnnnnnnnnnngggctcattccttctgtatctgtgagcagttaacctgaggtcacacgtcaagct

SEQ ID NO: 232988 - DNA, 116 bp, Homo Sapiens
catatataaaggactttgtacaaaaatggagaaagggagtgatccctttaaaaaagggagaaacatggactctcttaactctttatggaagtctgccttgttttcaccgttgcccc

SEQ ID NO: 232989 - DNA, 236 bp, Homo Sapiens
acattatgccgactttgtacaaaaaagttggggaggaagatgcccccaagcaccgccgccctggcttgggccttcttttggttgctgctgcccttgcttggcgcggtttgcgccaaccgaccccgctcctgcttgctgctggactacctctgcgtgcgagagactcattcttttttcttaccgagcctgaaggaggggggcatttaactcacattaccgacgactaatgacccctg

SEQ ID NO: 232990 - DNA, 414 bp, Homo Sapiens
atattaaaagccaactttgtacaaaaaagttgggtcatgcattaaacattgatacttaacctttattgacctagatatgcacttaaccttataacaaacaatgttacacattatgcaacggtggttgtttgtgcttactgtcacaaataccaaaaccctatgaggtgtacctaccattatttccctcttacttttgatttttgccgttcctcctcatttcccaatttgcctgtgggctggctgctgtggcggaactaatctccttgcctaggtgtctgagctttaaaccattctgtatgtacttcacatattcaaaccacctttcatcactctgcacccccacactacttctgtttaataatcatatacaagggtccctaaacttagcagaaagaattgaggaaaaagtagaat

SEQ ID NO: 232991 - DNA, 225 bp, Homo Sapiens
ttggggaggaagaaaagcccaggaccgccgggccaggcccggccgcctcgcccctgcccgcgtcccttccctggataacataccccaccttacctgaactgagatggaacttgaaggaggcgatgcagatgctagaggacaggccaatcagaacagaacaggaaaatggaatgaaactaatctcctaacatattccatgcccagtccactgcagttgctttgcat

SEQ ID NO: 232992 - DNA, 437 bp, Homo Sapiens
accgaaccaaaaaacttaaatggaattaataaccataatattaatttaaatttggattaaaaaccgaacaacttataatggaaaacaccacatatcccgtccacaaggatccacttacttaaagggaataatggactggtatccaacgaacacctttccaattgtcctccggtggaggctgccactttatccaacggacacccttccaatggtccttctcaaccgaatcctccttatcagccctactccctatggtctccatggcctaattaatccttaaaagaaattagggaaagaagtggcaagctcctttttgtggtgacaaattaaaaccttcaactaatcctaatcgcctatgtcctaattctggaaattcttctgcttcagaaacaattccacacttctaatactttctcctaacaagtcgtccggctcct

SEQ ID NO: 232993 - DNA, 785 bp, Homo Sapiens
  misc_feature (125)..(559): n is a, c, g, or t
ttggctgactagccataggaacttaggcaaaacccttcccttactcaggcctaaatttcctaatctagaaaaataagcagagtagactagatgtttttttaaatcccttttagttttaagattcnnnnnnnnnnnnnnnnnnnnnnnnnnnnnnnnnnnnnnnnnnnnnnnnnnnnnnnnnnnnnnnnnnnnnnnnnnnnnnnnnnnnnnnnnnnnnnnnnnnnnnnnnnnnnnnnnnnnnnnnnnnnnnnnnnnnnnnnnnnnnnnnnnnnnnnnnnnnnnnnnnnnnnnnnnnnnnnnnnnnnnnnnnnnnnnnnnnnnnnnnnnnnnnnnnnnnnnnnnnnnnnnnnnnnnnnnnnnnnnnnnnnnnnnnnnnnnnnnnnnnnnnnnnnnnnnnnnnnnnnnnnnnnnnnnnnnnnnnnnnnnnnnnnnnnnnnnnnnnnnnnnnnnnnnnnnnnnnnnnnnnnnnnnnnnnnnnnnnnnnnnnnnnnnnnnnnnnnnnnnnnnnnnnnnnnnnnnnnnnnnnnnnnnnnnnnnnnnnnnnnnnnnnnnnnnnnnnaagattctataagtctgttaagtataaaatttctgtctaaaagcagaggctttatgagtacatcttttacacagaatttcttgtttcaatagaattctttgtttctaactcaaaaaagcactattgctctgggctatctgcctggatgtagaaataacctatccatataaaactgtttgtcagtgtgagggtcattgagataggatccaatccctttgctctctgc

SEQ ID NO: 232994 - DNA, 219 bp, Homo Sapiens
ttcacgacacatatcatctcattaatactccacttgttcgatggtataagagaacagtagtcgaccgacagccttccttgtttcttcgtgtgatgccgcttgaatattccaccaacacccgtccatctgttcatcacaatcgaaaccttcattgacagccacttcactgttgtactcaatgacatactaaatcattacaacaaaattggataaaatgtg

SEQ ID NO: 232995 - DNA, 435 bp, Homo Sapiens
  misc_feature (84)..(92): n is a, c, g, or t
tgtacaaataatatcactctgtatctccacacacacaatatcacggctctctcttttatgtgtgtaacccttactgcgtttttnnnnnnnnngtgttctcctccacaaaagacccgctcttttcaataccccgggacacctcccccctcccttcgagattctcctctttcccgcgctccgcgcacacaacaggggcttctctctgcggggttgcgcataccacaccggatatattgacctcatatgcgccgtgaacatgagatctgtgtctctgtcctgtgtctgtgtaatactccgtctcataatatctctctttttgatatatttcgggtacatatctctatatatattcataccccgcaaaaatcagcgcgcaaatacacatagtgatatggggtttttaataccccagatccacgcggcgtttaccccccc

SEQ ID NO: 232996 - DNA, 272 bp, Homo Sapiens
ttggttggttgcttccctcccgactgaatagggatccattgcggacgtcaggtctgcctgggtgagaacctgatccaaccgtgggacagccagaagccatggggggatcgaacgcaggcaaggtgcgcgcgaaagaacctaacaaagaagaaatagatgtggtcctgcatgctcgcgcatggagcctgcggccggtgttccttccgtctccccatacctctgaatcagtatgcccgccttccctggccgggcccgacaatgtgtgagaaaca

SEQ ID NO: 232997 - DNA, 410 bp, Homo Sapiens
caatgcttttttataatgccaactttttacaatggtgtaaaccttatgctgtttttcaccccccgttgttctcgtcaaaaaaacagttcattatttcaatccgggcgaccacctccatcccttcttgatgattttcttttttccgttcttcggcccgacgacgagcttctttcttctgggtggtgctgcttacaccagaggaaatgacgacatctatgccttgttgaactgatgactgtcgctgtcgtctgtcgtcgtagtactctgctgcttcacataccacctctttacgaactacgggtagtattaatatcataaaatattcttacgcagaaaacatcgcgccgctaatactcctactgtttggcggtttttaatccggatgatccacgcgtttattccccccctgc

SEQ ID NO: 232998 - DNA, 475 bp, Homo Sapiens
  misc_feature (168)..(209): n is a, c, g, or t
ttggcccccacaaacccacagcctccctgtccccgggatttgctctttcaccagaatctgaagaaataggtctaagggacacggattaatatttttactttttactcttactcattaaaaaacattccccttccccatgtgaatttgaattcttaggcggacgtgtannnnnnnnnnnnnnnnnnnnnnnnnnnnnnnnnnnnnnnnnngatcaaaatcctactcctatgtaacagaaatataaatgacaagtatctgtccctcctctttctcaggaccaagacattgtatgtttatgatacgaagataatgattgtgtttgtttacttaaattttaattatttccaaatcccaaagcctatgctaaaaccaaattccaatagacactgaccataacctaaaatgtgtgtgtgtgcgcgtgcgtgcgtgcgcctgcacatcaacttgaaactgaaacagaaaatgaaaatggaga

SEQ ID NO: 232999 - DNA, 819 bp, Homo Sapiens
  misc_feature (98)..(125): n is a, c, g, or t
  misc_feature (146)..(397): n is a, c, g, or t
  misc_feature (482)..(514): n is a, c, g, or t
  misc_feature (568)..(727): n is a, c, g, or t
ttggatttgttttttgtttgtgtggagtacctttctaagccctttgcttagtttttctatttgcaagtaactcagtacttgtatagattgatttagannnnnnnnnnnnnnnnnnnnnnnnnnnnaagagggagtcttgttccgtnnnnnnnnnnnnnnnnnnnnnnnnnnnnnnnnnnnnnnnnnnnnnnnnnnnnnnnnnnnnnnnnnnnnnnnnnnnnnnnnnnnnnnnnnnnnnnnnnnnnnnnnnnnnnnnnnnnnnnnnnnnnnnnnnnnnnnnnnnnnnnnnnnnnnnnnnnnnnnnnnnnnnnnnnnnnnnnnnnnnnnnnnnnnnnnnnnnnnnnnnnnnnnnnnnnnnnnnnnnnnnnnnnnnnnnnnnnnnnnnnnnnnnnnnnnntaaataaacctctccttaactgcgtgtgggaggctgataggtgaggaaacagaagtaggccagagtgaggtgttcgtcatggcannnnnnnnnnnnnnnnnnnnnnnnnnnnnnnnncccactttatgcataaggaaaaacagccatcaaaagagatagcctgtggcatgnnnnnnnnnnnnnnnnnnnnnnnnnnnnnnnnnnnnnnnnnnnnnnnnnnnnnnnnnnnnnnnnnnnnnnnnnnnnnnnnnnnnnnnnnnnnnnnnnnnnnnnnnnnnnnnnnnnnnnnnnnnnnnnnnnnnnnnnnnnnnnnnnnnnnnnnnnnnnnnnaatttaaagggggagagaagatagtgtcaggcttagattgggatctcactctgctccctgccctagcctcaccttcctcggaagccctctcc

SEQ ID NO: 233000 - DNA, 367 bp, Homo Sapiens
  misc_feature (45)..(67): n is a, c, g, or t
  misc_feature (96)..(324): n is a, c, g, or t
acaaaaaagttggcggccgcacaactttgtacaagaaagttgggnnnnnnnnnnnnnnnnnnnnnnngaaacggagtttcgctcttgttgctcttnnnnnnnnnnnnnnnnnnnnnnnnnnnnnnnnnnnnnnnnnnnnnnnnnnnnnnnnnnnnnnnnnnnnnnnnnnnnnnnnnnnnnnnnnnnnnnnnnnnnnnnnnnnnnnnnnnnnnnnnnnnnnnnnnnnnnnnnnnnnnnnnnnnnnnnnnnnnnnnnnnnnnnnnnnnnnnnnnnnnnnnnnnnnnnnnnnnnnnnnnnnnnnnnnnnnnnnnnnnnnnnnnnnnnaaaggtgtgagccaccacccccggccaattcattctactcttt

SEQ ID NO: 233001 - DNA, 624 bp, Homo Sapiens
  misc_feature (74)..(168): n is a, c, g, or t
tacaaaaaagttggaaatttttagtgaaacaaaattgcttttgactgttgcctgtcgtgtgactttatttgggnnnnnnnnnnnnnnnnnnnnnnnnnnnnnnnnnnnnnnnnnnnnnnnnnnnnnnnnnnnnnnnnnnnnnnnnnnnnnnnnnnnnnnnnnnnnnnntactactaataatgacggtggtacatactcctactatcattcttgttgcttcctgattatctactaataaaactgtgagttttttctactaagtgttatccttgatgctactcatcaaaatttgatttgttatgtgatgatgcagcacctataaatatgtgtagtatatatactgttttaatgatgtttataattacttttttcaccggaggagaaaattattatgctcctcggtagaaatgctgctgaagcaccagaaggaagtattctttttaaaaacagtgaagaaaagctactacaaaaaccacctgatgcaaatcatctacaacgactgagaaaactgctggcttgccgtcctcatggtttattggacgaggtcgtcacaaatggtgaggatgattacttcaaaagatggcggaagatgatgttgttattatggcggattactacttaata

SEQ ID NO: 233002 - DNA, 867 bp, Homo Sapiens
  misc_feature (127)..(220): n is a, c, g, or t
  misc_feature (265)..(682): n is a, c, g, or t
acaaaaaagttggctctgtcacccctttgggctcatctttctcagtcattctttcctggtgttcaagcatgcttttttttagagagagagggggcctcattctgtcactcaggctacagtgcagtgnnnnnnnnnnnnnnnnnnnnnnnnnnnnnnnnnnnnnnnnnnnnnnnnnnnnnnnnnnnnnnnnnnnnnnnnnnnnnnnnnnnnnnnnnnnnnnatgagccaccatgcccagccctcagtcatgcttaatttaggtgcnnnnnnnnnnnnnnnnnnnnnnnnnnnnnnnnnnnnnnnnnnnnnnnnnnnnnnnnnnnnnnnnnnnnnnnnnnnnnnnnnnnnnnnnnnnnnnnnnnnnnnnnnnnnnnnnnnnnnnnnnnnnnnnnnnnnnnnnnnnnnnnnnnnnnnnnnnnnnnnnnnnnnnnnnnnnnnnnnnnnnnnnnnnnnnnnnnnnnnnnnnnnnnnnnnnnnnnnnnnnnnnnnnnnnnnnnnnnnnnnnnnnnnnnnnnnnnnnnnnnnnnnnnnnnnnnnnnnnnnnnnnnnnnnnnnnnnnnnnnnnnnnnnnnnnnnnnnnnnnnnnnnnnnnnnnnnnnnnnnnnnnnnnnnnnnnnnnnnnnnnnnnnnnnnnnnnnnnnnnnnnnnnnnnnnnnnnnnnnnnnnnnnnnnnnnnnnnnnnggtacatgagcaaaaatgaagttaagttgtctataattcttgaagtaaggtaagaatccattctacaacatcatactacacataatatgacatattagacttcacactgtaagcaatgatgaacctttgaagatcttttatggatagaagtatatgataaaactgtggtttggctactggaaaac

SEQ ID NO: 233003 - DNA, 392 bp, Homo Sapiens
  misc_feature (57)..(80): n is a, c, g, or t
  misc_feature (91)..(211): n is a, c, g, or t
tacaaaaaagttggctggtccttttctcttcctgctctgtgctctccctgggcagcnnnnnnnnnnnnnnnnnnnnnnnnctgaaaaagannnnnnnnnnnnnnnnnnnnnnnnnnnnnnnnnnnnnnnnnnnnnnnnnnnnnnnnnnnnnnnnnnnnnnnnnnnnnnnnnnnnnnnnnnnnnnnnnnnnnnnnnnnnnnnnnnnnnnnnncttattgcccccctgcccatttcctgtggaaatcctaaaaagcttcgccaaaacaagatgcgggaaaaaggcctccagctagtgagcatgatccgggtaaagacggggcctgcgatgaggtagggctgaactggtctgggaaaggaaatgctgcaggtggttaataatttcaatgaatctt

SEQ ID NO: 233004 - DNA, 594 bp, Homo Sapiens
ttggcttttacaaacatacatcacgctgattaattttatttactcaccccaccctccatccttgcttgctaaactttccctcacaaaaactacagttctggcaagggaccgagttcctacagtcactcttgctcagggatataatgcgctaacctccatggccaacattgcgggttatttagctgttgtccgacctacaaatcattttggacgtttttttactggtcagatcaatcctgctggaaaaattcctccctccaacattcagatagatggtgggggggttgctgggcttgcttgcttctgcgcgcccaactcaatggatgcatttgttcgaggatttatttcacaatctacatctttggaacgattaatttctcttgcttctggctcctcccttgtggacggacttgaatctggtgagggacggagaggatatacatgcgagatatccgtccagttaattgattctgactggaatgtctttgctcgctcatgcatggaggtaggcatacttctctacccaccccttactcattccaggaaaactccctccttatttatttaataaatgaatgattcagtcaatgaagg

SEQ ID NO: 233005 - DNA, 626 bp, Homo Sapiens
  misc_feature (52)..(82): n is a, c, g, or t
  misc_feature (104)..(342): n is a, c, g, or t
  misc_feature (371)..(386): n is a, c, g, or t
  misc_feature (423)..(447): n is a, c, g, or t
  misc_feature (455)..(579): n is a, c, g, or t
acaaaaaagttggattacagatgtgagccaccatacccagccttagataaannnnnnnnnnnnnnnnnnnnnnnnnnnnnnnagacagagcctcactctttcannnnnnnnnnnnnnnnnnnnnnnnnnnnnnnnnnnnnnnnnnnnnnnnnnnnnnnnnnnnnnnnnnnnnnnnnnnnnnnnnnnnnnnnnnnnnnnnnnnnnnnnnnnnnnnnnnnnnnnnnnnnnnnnnnnnnnnnnnnnnnnnnnnnnnnnnnnnnnnnnnnnnnnnnnnnnnnnnnnnnnnnnnnnnnnnnnnnnnnnnnnnnnnnnnnnnnnnnnnnnnnnnnnnnnnnnnnnnnnatgggccactgcacccagccagataccannnnnnnnnnnnnnnngaaacagtcttgctgcactccagccacacctggctannnnnnnnnnnnnnnnnnnnnnnnngagatgannnnnnnnnnnnnnnnnnnnnnnnnnnnnnnnnnnnnnnnnnnnnnnnnnnnnnnnnnnnnnnnnnnnnnnnnnnnnnnnnnnnnnnnnnnnnnnnnnnnnnnnnnnnnnnnnnnnnnnnnnnnnaatattcctggaggacttgttttgaaactgtttctcgttaggaaacc

SEQ ID NO: 233006 - DNA, 339 bp, Homo Sapiens
ttgggtgtaagtaaccctcaccgatgatgatgatactcatactttctatttcactctggctggagtcggacttttggaggaatcggacttcaatgatcttgatcttcacaattgcttattgttagcgcaagctcggactggaacatttgaatttgattcatttggcccattggtttcgctttctattcctccttctctatctcaaggtttgtgtatggcttttgatgatgatcatgatcatcacattcattttaatgatatagccagtgggtgtgcgtcctgttgctggggaccgctacccctggcacaaaaattttgcttctgcgtctttgatgttga

SEQ ID NO: 233007 - DNA, 920 bp, Homo Sapiens
  misc_feature (49)..(868): n is a, c, g, or t
gagcaatgcttttcttattatggccaactttgtacaaatatcatcatgnnnnnnnnnnnnnnnnnnnnnnnnnnnnnnnnnnnnnnnnnnnnnnnnnnnnnnnnnnnnnnnnnnnnnnnnnnnnnnnnnnnnnnnnnnnnnnnnnnnnnnnnnnnnnnnnnnnnnnnnnnnnnnnnnnnnnnnnnnnnnnnnnnnnnnnnnnnnnnnnnnnnnnnnnnnnnnnnnnnnnnnnnnnnnnnnnnnnnnnnnnnnnnnnnnnnnnnnnnnnnnnnnnnnnnnnnnnnnnnnnnnnnnnnnnnnnnnnnnnnnnnnnnnnnnnnnnnnnnnnnnnnnnnnnnnnnnnnnnnnnnnnnnnnnnnnnnnnnnnnnnnnnnnnnnnnnnnnnnnnnnnnnnnnnnnnnnnnnnnnnnnnnnnnnnnnnnnnnnnnnnnnnnnnnnnnnnnnnnnnnnnnnnnnnnnnnnnnnnnnnnnnnnnnnnnnnnnnnnnnnnnnnnnnnnnnnnnnnnnnnnnnnnnnnnnnnnnnnnnnnnnnnnnnnnnnnnnnnnnnnnnnnnnnnnnnnnnnnnnnnnnnnnnnnnnnnnnnnnnnnnnnnnnnnnnnnnnnnnnnnnnnnnnnnnnnnnnnnnnnnnnnnnnnnnnnnnnnnnnnnnnnnnnnnnnnnnnnnnnnnnnnnnnnnnnnnnnnnnnnnnnnnnnnnnnnnnnnnnnnnnnnnnnnnnnnnnnnnnnnnnnnnnnnnnnnnnnnnnnnnnnnnnnnnnnnnnnnnnnnnnnnnnnnnnnnnnnnnnnnnnnnnnnnnnnnnnnnnnnnnnnnnnnnnnnnnnnnnnnnnnnnnnnnnnnnnnnnnnnnnnnnnnnnnnnnnnnnnnnngatcttttctccatcactgataagggagtggtaaaataacctccatcaatga

SEQ ID NO: 233008 - DNA, 110 bp, Homo Sapiens
aatcttactattttcccataaaaaaatcactggatattatgaatgttaattaaactaaattttgtgtaaatacaactgggcaacagacaacctcagaaatccatgaaaaa

SEQ ID NO: 233009 - DNA, 553 bp, Homo Sapiens
tctcaccccctcatcccgccccacctggccccacctgcactcacgcacacacccgcaaacacctccagaatcctctacaaactacttctcactcttcctaactcccaccaccatccattacgctgccttcagctcccaccccttctggcacctattgtgtaacctcatgaaaatccatgaaaacccctccgtaccctggcactctgacagctgaattatgggaaaataaggtggccccacgagccgtgctgaatgatatctattgaaatttctgtcacattagtcccccttagcccccttcagtcactgcatggaatagccccttatcatcccttggatcagctcctatctcctacggagccaaaaatggccaagaatgtgcactaaaaattactcctgattggattcgatttggtgctccttgctgctctggacatgaatgtgaattagttccagtgctttccggagcatctgcagacatcttacgagaacctacctaaccccggcgaaagcagccacaagcaggacctatcaagacctataaacttccaga

SEQ ID NO: 233010 - DNA, 434 bp, Homo Sapiens
aaaaagttggtgaaattctatgctttggctaccccctcaattcccagacgagggcgctgaataccttctgctctcacactgctatcgagagatacatcagactggataatatctatcgcaaatcaatttccttgactctgggttcattgtgtgggggcaagaggctatctcgtatcgtcggaatgatgtcttcctgaatgtgctctaaagtgtgaacctgctcaagtccctctgcgggcaagtgctcattgcccatgtgtccggacgggtggagatgaatttgctcctgagtggcatgcctgaataaactgttgccatgattgacttaattgttattgaccccctcgtttaaggctgggctgaagaaccattcaaaatcggatttgaatcggttgccattgatgactggtccttccaccagtgggtgcgactca

SEQ ID NO: 233011 - DNA, 784 bp, Homo Sapiens
ggccggtaaaaccggcttaaaatgggccggtttcctttccctagggggcttggggtggcctggtaacccggtcccccaggggcttggggctccggaccctatgttccttatccgccaggcggtaaggaaccggccctggagaatgattccttccggttatggctcccggacccccgaggccctcccgaagaggttatccccaccaggccgaaggtgtggatatcagttaccttctccttggggtgagattgcctttggcaaccaaaagggaaaggatgccctagaaaaccggtccaggtattgaccccaaaaccttggttggactgaattccagctagctaaaggattcctcacctcactgaaggagaagactgaaattaggaaggaggtcctggtgatttcttccgagggaatcccccaggcttaggttggactggtttcagggttggaggtttatagcctctggtgtgatcctggataccgccaactggtttccaattcccagaagttatcctccctcccccttggacctcactgttgttgtaccactttggttttcccggtagttaattgctacttgtgcgctgacctccctggactagatcctgggattagatggaattattgttggaaaccaaacctttgaaggtggcctcctgttatccgatgctgccagggcctggagcatccgaatggtgttaagtccctcctactgtatcaagggccgaatggtgcctccttgctccttaggaagggtttcccaaccccggggccggagcccaaa

SEQ ID NO: 233012 - DNA, 770 bp, Homo Sapiens
ttggggcttcccagaaccgcgacccagccgccctctgagtcgccgccgccctgtatcgatctgatcccaccgggggcgccgcccggggtttgttgggcaaaaggctattgcaggaactgatgacactgatgatgactggagattctgacatttctgccttccctgaatcactccaccttttcaaatgtctatgtatcctccatggaccattgggaacaccctgtgactacctgaagcacaacctctcgctatacttccccagggcctacccttacactgcgcccactaagaaattcctcacgccctgctatcaccccaacgtggacttttattataacatatgcctgctcatcctgacttaatcttattcagccctgtatgatgttgatgcattctgctctcccatgaaggcttctatgataaccgtgtattgataccctgttgaagtgtcttgctgcccaactctgaagaaaccccatagcttttcgaagtacctgcattaagccaacactaagtgagtgatcgaccggaagccctgatccatgatgcttctcctgtccttgtgttgtctttttaatttttccttaaatggtctggcctattggtgatttatgtataggactcgttaacatgatctgcctgatttgtgttttattctttcctcttacatttccctgtggttgaacccgtgtatattaatgaaatgcatctttagtcctgattcacacacttgttttgagtttaacatcctttcattttatatttaaatt

SEQ ID NO: 233013 - DNA, 515 bp, Homo Sapiens
  misc_feature (42)..(356): n is a, c, g, or t
ttggcaaatggatgttcttggaaaaggattgctgcctgtggnnnnnnnnnnnnnnnnnnnnnnnnnnnnnnnnnnnnnnnnnnnnnnnnnnnnnnnnnnnnnnnnnnnnnnnnnnnnnnnnnnnnnnnnnnnnnnnnnnnnnnnnnnnnnnnnnnnnnnnnnnnnnnnnnnnnnnnnnnnnnnnnnnnnnnnnnnnnnnnnnnnnnnnnnnnnnnnnnnnnnnnnnnnnnnnnnnnnnnnnnnnnnnnnnnnnnnnnnnnnnnnnnnnnnnnnnnnnnnnnnnnnnnnnnnnnnnnnnnnnnnnnnnnnnnnnnnnnnnnnnnnnnnnnnnnnnnnnnnnnnnnnnnnnnnnnnnngacttagactcaaagacagctggaagaagaggagcacattttcaagttttaatctccatgacttcacaaagacaggagagtctcaaaaccccatctctggaggctcaacttggcaccttcagtcacagataaaagtcgtgggtttaaaaccctggctgg

SEQ ID NO: 233014 - DNA, 432 bp, Homo Sapiens
ctttaaagggcttctttgtacaaaaaagttggagaagagaagactaaaaaggatcctgctgtggcggaaaaccttattaaaaagcgaaggaatttctcagagcagatgatcatccgcctgataaaaaagattgccccccagatgcttctaaaggcggggaggaagattatcaatgaaaaagcaaagcactatcaccaggaatataagcagatgaacagaactgatgttctaatggtgaggatgacggcaaaagctggcggcttctatgtacctgctgaacccaacttggtgtttgtcgtcataatcataggaatcaatggagtgagccccccggttcgaaaggagttgcagcttcttctccttcgtcaaatcttctatggaggctttgtgaagatcctcaaggattctattaacatgctgatgattgtagag

SEQ ID NO: 233015 - DNA, 906 bp, Homo Sapiens
  misc_feature (62)..(135): n is a, c, g, or t
  misc_feature (319)..(862): n is a, c, g, or t
ttggatatttacaaaccttgttttaattattgctaatgaatgacaccctttgcacatggacnnnnnnnnnnnnnnnnnnnnnnnnnnnnnnnnnnnnnnnnnnnnnnnnnnnnnnnnnnnnnnnnnnnnnnnnnnctttcttcctcccctcctcctgactcaaaacagtctggatttggtctctaccatgtcactgaaactgcttctaagagtagtaccaggaactgctaacttatccttaacttactggaaatctctgctgcctttagcactgtagactacaccctccttgaaattatctttttccataatactactnnnnnnnnnnnnnnnnnnnnnnnnnnnnnnnnnnnnnnnnnnnnnnnnnnnnnnnnnnnnnnnnnnnnnnnnnnnnnnnnnnnnnnnnnnnnnnnnnnnnnnnnnnnnnnnnnnnnnnnnnnnnnnnnnnnnnnnnnnnnnnnnnnnnnnnnnnnnnnnnnnnnnnnnnnnnnnnnnnnnnnnnnnnnnnnnnnnnnnnnnnnnnnnnnnnnnnnnnnnnnnnnnnnnnnnnnnnnnnnnnnnnnnnnnnnnnnnnnnnnnnnnnnnnnnnnnnnnnnnnnnnnnnnnnnnnnnnnnnnnnnnnnnnnnnnnnnnnnnnnnnnnnnnnnnnnnnnnnnnnnnnnnnnnnnnnnnnnnnnnnnnnnnnnnnnnnnnnnnnnnnnnnnnnnnnnnnnnnnnnnnnnnnnnnnnnnnnnnnnnnnnnnnnnnnnnnnnnnnnnnnnnnnnnnnnnnnnnnnnnnnnnnnnnnnnnnnnnnnnnnnnnnnnnnnnnnnnnnnnnnnnnnnnnnnnnnnnnnnnnnnnnnnnnnnnnnnnnnnnnnnnnctactctttgctaaacggttcctcctccttaggtgctgttctgg

SEQ ID NO: 233016 - DNA, 544 bp, Homo Sapiens
cgttgcacaattgatgagcatgcttttctataaagcccctttgtacaaaaaagttggaaatatgggcccaccaatggcctggcttgggaccttgggcccaagtggcctttaactggtccgttaaaagttaaccactccgtcctcctaaccggaaaatgggggtgaaataaccgaacccacctcctaagggtggtggggagaatttccgaagccggggaggccggaaagcgcctaacccagtggccggcacttaagcgccaagttaaagggcgtggataccaactggtgggggcggggtggaaccggccccttggtgggtgggggaatggccaaggcttggacctgaatggctaattgaactggatccggtggtggcctggttggccgctaccggccgtccctcctgggccggcgggaccgggaaggaagggggaacgggaataagaaagaagggaaccaaccgaaaccggccggaactcccaaaactttgggggctttggggggccaacctggctggctccctccgggggtaatttcctcctaa

SEQ ID NO: 233017 - DNA, 660 bp, Homo Sapiens
  misc_feature (213)..(226): n is a, c, g, or t
ccctgctaaggggctttgtacaaaaaagttggaccagaataggttcaattaataatgcactgcccactggtccgtttcctttctgccattgccgcttactttgctgggaagcgaaaccaacttgaccagacccttaacctgttccatatcatattgaaatcccctggagtggatgccacgccttggcttgaatagcagaaaaatcacatcggnnnnnnnnnnnnnngtcacgttgttatatttctattccaacctaaccaaaattaaactaagctgagggaagtgagaggggagacgagacttacattgattcgtgccctgccagctttaatttttctctttttcttactttaccttttgaactgatatgggtgggttgaatgtaaagttaatttctatactctgaacacaataattttcctttttgataagaccttttgtattgtgatggttgatggcaatttcagtactttgaatacatctaatatagattagctctgaccagataaaaattcaaggctttgggtccggtcatggaggtgcgattgtaacgtttcctttcggaagttaacatgacatgaatcgtcatcacatattatatatgtgaagagattatacatctttactatattcaattccatgtattatataaaaaagaaa

SEQ ID NO: 233018 - DNA, 277 bp, Homo Sapiens
tccgttcaaaatttgtacaaaaaagttggctacgagtaatgtgtacccccaatcctgatcatgaaaaaactaaatatcaaatccaaacccagggacatgaacatgcaaccttcttcttcctctgggtgctagtgggtgacgtcgaactccattatctatgttcccgtcccctatcccaacctgatactgcccctatcaaaataaatgtttctggaccaaggggtaagacattaattgagttcgaattcaattttcattatctgcaattgaaaatgat

SEQ ID NO: 233019 - DNA, 112 bp, Homo Sapiens
ccccaatgccaactttgtacaaaaaagttggatgactcgaggccaagagcctgagaccaaaatggccataatgggagtccctgtgctttaatttttcatcataactgtgctg

SEQ ID NO: 233020 - DNA, 563 bp, Homo Sapiens
cccccttataaagcgcgactttgtacaaaaaagttgggtcctctgcattctattgaaagaagatgaaaggagaacactcctgggaatgggccaccatgaccctgtatccgtgtctcctgctggtcacgctgatttcctgctgctaccatgctgatgccgagttctgcccacctcttgatactgagctggactacttcttcttcattaaggaacctctgtacagttaagtcttgccaaatttgatgcccctccggaagctgtagcatgcaagtttggaatgaggataatgttagaggcaatgtcccttcacaaacgaaaatgcattgttaaattcatgtggaatatattttgcattggttaagtgtgtgccttttccctttcatcctgtgtttccgctgcctttcatggatgacccgtgcttccctgcctaccgttaacgtgtcaaacatttgtataaccctatcacttgcccatgttcattacagttagtctcccatccctagacaactaattgctttctgtgatgacaaattcattttggctgatgacttattcgctacgaa

SEQ ID NO: 233021 - DNA, 883 bp, Homo Sapiens
  misc_feature (264)..(289): n is a, c, g, or t
  misc_feature (310)..(573): n is a, c, g, or t
tggagaaaagaaagcatttaaaaaagctgggcagtggcagagcatgtatatcacccctccacaccatgttttgagtagctcttggtttatgtcgacaacctaattagtttgttagtaagtactaccaccatctaagtgtggtcagaagaatgggaaattccccaggtttgcaggtgactggtgctgttaattttttctgtccccaacaacatgtatatatatttttaaatttaaccctgatccttagagcacccaacaactttnnnnnnnnnnnnnnnnnnnnnnnnnnttgagatggagtttcactctnnnnnnnnnnnnnnnnnnnnnnnnnnnnnnnnnnnnnnnnnnnnnnnnnnnnnnnnnnnnnnnnnnnnnnnnnnnnnnnnnnnnnnnnnnnnnnnnnnnnnnnnnnnnnnnnnnnnnnnnnnnnnnnnnnnnnnnnnnnnnnnnnnnnnnnnnnnnnnnnnnnnnnnnnnnnnnnnnnnnnnnnnnnnnnnnnnnnnnnnnnnnnnnnnnnnnnnnnnnnnnnnnnnnnnnnnnnnnnnnnnnnnnnnnnnnnnnnnnnnnnnncaattacatttatttttcaactagattataaactcctagatcacaaagggattctaacagtcacattacttagcacaattctttgaaaaacagtggtactgaataaaaacatttaaatgatgtaaagaaggatcgtccagtcctagggcaatttagaaaacatggaatgtactctaaggctgatatgattttcctgggacaactctgtgagggagacacaggtcccaagcaaatccctagaaatatttaattttaactccattttccaggtagaaaaactgactcgaggggtgaattctaaaaaactttc

SEQ ID NO: 233022 - DNA, 138 bp, Homo Sapiens
ttgggtaattccacctcaccctgatgatatttggtcctgctatctgtcgttgtgaacttgccttttcctttctcacctctactcccatgatctcacctttgattttaatgtgaactgtcaatcataaagtattaattg

SEQ ID NO: 233023 - DNA, 321 bp, Homo Sapiens
attgggcacgagtactctctaaatcggataaagctttcgaagctgttaaggaactacacatctgccgctggtcttgagatggtttctctccattattctgctttgatattttctttaatttttctatatctcatgatcatattggagaccatatatgattttgcgtactgcttctttgtggattgcttctcaagcttggatgataatcgatctgtatgattgagcccattgatgaatactgtgtcttttttccttaggatttgaggggaaaactttcatgtcagtcaccattttatgactggaacttccttacgatgaata

SEQ ID NO: 233024 - DNA, 429 bp, Homo Sapiens
tacaaaaaagttgtgacccgagaatgaagaattacttccctccctctggctggagattgatacctgaatcactccctcgttcttcctgctttctttcctcacttccttctccctccctccgtatgctccctcctgtgggtggtggctggatccttctcatacgtatgtcgcctgcctgtgcttgcacgcacgccgtcgggcgcgctctctctgacatactcattcactctctttctttctggctttctgtccacataatatctttcttcaatgtgaatgaccccacccccccgcctgcctgcctgatgctccatctcaactcacagggaggaaacaaacatactttgcgggctgcacttccgtctgccccctgggtagttaaggaaaggaaccaaccctggatggaatggaagggatggcttttaattt

SEQ ID NO: 233025 - DNA, 903 bp, Homo Sapiens
  misc_feature (141)..(604): n is a, c, g, or t
  misc_feature (612)..(847): n is a, c, g, or t
ttggggctgttagtcgccgcgtgagtttccctctatctagattaaacctgcgtttcggagtcccctgctcctccgtacccgatgtccgggggtagaaccctggaagaagaggaagaggaaggcaaaggagtcagggatggnnnnnnnnnnnnnnnnnnnnnnnnnnnnnnnnnnnnnnnnnnnnnnnnnnnnnnnnnnnnnnnnnnnnnnnnnnnnnnnnnnnnnnnnnnnnnnnnnnnnnnnnnnnnnnnnnnnnnnnnnnnnnnnnnnnnnnnnnnnnnnnnnnnnnnnnnnnnnnnnnnnnnnnnnnnnnnnnnnnnnnnnnnnnnnnnnnnnnnnnnnnnnnnnnnnnnnnnnnnnnnnnnnnnnnnnnnnnnnnnnnnnnnnnnnnnnnnnnnnnnnnnnnnnnnnnnnnnnnnnnnnnnnnnnnnnnnnnnnnnnnnnnnnnnnnnnnnnnnnnnnnnnnnnnnnnnnnnnnnnnnnnnnnnnnnnnnnnnnnnnnnnnnnnnnnnnnnnnnnnnnnnnnnnnnnnnnnnnnnnnnnnnnnnnnnnnnnnnnnnnnnnnnnnnnnnnnnnnnnnnnnnnnnnnnnnnnnnnnnnnnnncagccctnnnnnnnnnnnnnnnnnnnnnnnnnnnnnnnnnnnnnnnnnnnnnnnnnnnnnnnnnnnnnnnnnnnnnnnnnnnnnnnnnnnnnnnnnnnnnnnnnnnnnnnnnnnnnnnnnnnnnnnnnnnnnnnnnnnnnnnnnnnnnnnnnnnnnnnnnnnnnnnnnnnnnnnnnnnnnnnnnnnnnnnnnnnnnnnnnnnnnnnnnnnnnnnnnnnnnnnnnnnnnnnnnnnnnnnnnnnnatgagccactgtgctcagccaaactcatagccacttttatctttgttttctctttt

SEQ ID NO: 233026 - DNA, 237 bp, Homo Sapiens
ttggagatgttgttgcggaccctggtcttcatttctctgttgctctggatctctgggaccggcggggacgtcctgctgactcagtctccggactccctgcctgtgtctctgggcgagagggccatctgccactggttggcccggcggactgttttagttggcccccgaataagaattactgatcttggtactggcatcaggtggggcatgctcctagaatggtcctttttggggctt

SEQ ID NO: 233027 - DNA, 121 bp, Homo Sapiens
gaaagtcctgtaaaatcattagttggggcttgagctaaagactggcagtcgtttttacctttttttaaagcaaaaccaaagaaattaaaaaccaagtacccttatcccctttaaaagaaaa

SEQ ID NO: 233028 - DNA, 817 bp, Homo Sapiens
tgtacaaatgacctggcccgacgtccacaccctgaggtctgcggagagcttcggctgtcgaatgtgaaccccttttcagagacctaccccaccctcctagaactcctgaaggaaaagatctgttgagaggattctgatgaaacaatgcaacgccacggaacactgctgagtctcttggcggatttaaaatctgagaaagacatgctgctgttactgctgcaagacaggattcgagggctgaggctccttcatcgcttgcaatgtgaaaagggaccctgcgataaagtctctgagctttctagatctctggactgcatgctggggcatttgcctgtctctattcgatctttttaagctgagaaccgtctgctgtgcttgctgattgtaaatctggatccccacgagaatgaccttagagggtagctggaggccgtcatggagaagctgaaagagttgatgcatgccccacagcgatacaaactgagcttgaagaaggccatccgagctcagaaggatcgattctagaagacctaggattatgctgagcagctagcttgatgctttctgacttcggtctttatggatctgaagctttatccgctctgtagtcctggaagagccgctacaacctagttgctcctctgatctgagacctatgagctggaacttattgtcctgaatgaccttcaacattatcttgtgatcccctgacttctcctggaggagatcatgcgggaagaccgggatagcctggtgatagactatcccgtcgtactgctgagtattccgcattcacgctggataatgagaggctgaa

SEQ ID NO: 233029 - DNA, 696 bp, Homo Sapiens
ttgggggagaaatagcatcattgatgtgctcatggaaaggatgcatccccatctgtcttaggctaagattacatggttgataagaatcgcaatgaatgaaagatgaaaaatcaataacatggatggatgatttcatgatggttttgccatctttattaaatatttgctggccccctggccttacccaccccccattgaattctaccctcccgttataatgtagcgtccaacgactatgtggcgcaagtctcgaccattgatgaagaaaatgtgcggctccccaaagatcttgtgcccctagcccttgagatatttttccccggtacttttttcccacaatgtctactctgcatatatctcctcccgatattccgggtcttgatcctctttcccatgaaacataaacccctatcaaatttcttatatcacttttctttgtcaggaagaccagtaggaaatactcccttgactctgaaggattttgagtttatgaattctacaccctctgccagccgggccccggctgcgaaaatgctgtttttttctgcgcttctatctgtgggattccctgctcttatctggctagatgctcatacgcttcgtgtttctaaaatatgatataagactatgccacatccacttttgagactcttgtcggtagtttagactctgcttacctgggagcacacttttccc

SEQ ID NO: 233030 - DNA, 957 bp, Homo Sapiens
  misc_feature (96)..(470): n is a, c, g, or t
  misc_feature (476)..(658): n is a, c, g, or t
ttggtttttaaatcttgggatgagatcatgctggatttatggtgagtgctgaatccaatcataagtatccatgtaagagagaaaaagagaaatgannnnnnnnnnnnnnnnnnnnnnnnnnnnnnnnnnnnnnnnnnnnnnnnnnnnnnnnnnnnnnnnnnnnnnnnnnnnnnnnnnnnnnnnnnnnnnnnnnnnnnnnnnnnnnnnnnnnnnnnnnnnnnnnnnnnnnnnnnnnnnnnnnnnnnnnnnnnnnnnnnnnnnnnnnnnnnnnnnnnnnnnnnnnnnnnnnnnnnnnnnnnnnnnnnnnnnnnnnnnnnnnnnnnnnnnnnnnnnnnnnnnnnnnnnnnnnnnnnnnnnnnnnnnnnnnnnnnnnnnnnnnnnnnnnnnnnnnnnnnnnnnnnnnnnnnnnnnnnnnnnnnnnnnnnnnnnnnnnnnnnnnnnnnnnnnnnnnnnnnnnnnnnnnnnnnnnntgtaannnnnnnnnnnnnnnnnnnnnnnnnnnnnnnnnnnnnnnnnnnnnnnnnnnnnnnnnnnnnnnnnnnnnnnnnnnnnnnnnnnnnnnnnnnnnnnnnnnnnnnnnnnnnnnnnnnnnnnnnnnnnnnnnnnnnnnnnnnnnnnnnnnnnnnnnnnnnnnnnnnnnnnnnnnnnnnnnnnnnnnataccatgatagcatagaacaaagatttgacattagtaataaacaccaatacttttaaaatcaactttatttttaccaaatgttattttatttaaaatgttccactttaaggttttgtaaaataataaaatattatcatagcattagctgtctgccacttgaaagagtcattagtttattccaaaggacattcaccatcttgtactttgtgtacaaattctaatgcaaagctacagtcaaccatgcactgctgtttaggaatgttactttgtcattaataccgtcagttgactatggaa

SEQ ID NO: 233031 - DNA, 273 bp, Homo Sapiens
ctggagggcagaaggcacgtctgggcctctaggaatgtggcaacgtgactgggtgggggaggctggaggacaagggcccccactgctgacgccacatgggctgtgacaggactctagggtggctggtgggcagacacctacattgggatggataagatggatggagacaggggctgcctgtcagagagagatcaaagagaggggcgggaggacacatggttcaacctgggtctacatgcactgctgctacgtgctcacctgtgaagtggcccc

SEQ ID NO: 233032 - DNA, 1000 bp, Homo Sapiens
tccagcctttttaaagattttcctcacaaccgatggttggaatacagtatgctccacagatagacttcttgtacctttccaaagtaaaatcatttgaaaccctccctccccatatataaaaaaatatatccttccagcatcatttgaccgaagtataaagcaacctggttggcctccatgcatccgatggcatcttccaagagtgaaaactccacgcagacatagccatagtcgtaacctggggacagcatttaaatacagacgggagtggtgttagtgccttgcaaacacaaaagacacacttaaatcccctgtttctgaaccccttaaacacaagccctcccaactaacccctccctcccctacactaggtaaagttgctaccccaaatagaaaaaagtattgaagaaaagtctcgatgtttctggactttgagattcattccaaaacagccttttctattaaccaagaagatcctttgccctctttagcactggtgatctggtgaaggtaccccagaattgggtaatcccacagagagttcacgtggggacccgaaacattttaaccacaggctaaatcttctggaaaaacaaagtcgacaagagcaagaaagtatctggaaaaaaaaaaaaaaaaggtatcccgagagaagaaaaaaaggcaattatccccaggctatgctaatagtcaccacttttcaagcagaaaccaccttcaaagacagaagtgctgacagactgaggcaactattctgtttggataccacaggaggcttctggttggcaggggacagaccatttcaggtctcctctttttttccttgtttcaactcaagtcataaaccagctaaaatctttataaaaggaagaaggtgtaaaagcataaataagtacaaataactatgtccaaaattgtgcttatgcacaaagactggtggtggggcaagctgggagaaagacagcagttgttagcaatcaatacatgtttaagaactgta

SEQ ID NO: 233033 - DNA, 500 bp, Homo Sapiens
  misc_feature (66)..(66): n is a, c, g, or t
agggttagcttgtcccatgcccttgtggcctgtcagagtcagcttctaacagcttagacccctggntaaggcatatccccagcccacaagggacagatagcaccattactgatctgacccctgtgaacacacaactctgatgccccctcatcgggcctcaactttcagtgcaaaggaccattgtcaggcacagtgaattaaggctttggtattggtgccagagtgccacgatcagatcctagttctgccgtgtcctgccaagctgtgtgatcttgggcaaggaatcctcacctcactgagccttggtttctacttccataaagtgggtttaataacacgttaatcctcacagagttgttgagaggattaagtgagcccatgtttattaggtgcttcttaataaattatcctaaagattattatcaatacattaatattattatctgcaacagtggttgagtagttcagaactggagaacataaattcttgattagccaaa

SEQ ID NO: 233034 - DNA, 432 bp, Homo Sapiens
agcacccacgcccgcctgcaagctcccgggcgcccccggcctctcctgctcggcggaacgaggataacccagtagagccggacccaggggtagatcgttggccggagacaggatatgtgaagaaacttcagagaagggacaatacgttctattactacaacaaacagagggaatgtgatgacaaagaagtccacaaagtgaaaatttatgcttactagcctgtcttctttgtattacttgtcaattatattttaagtattcatcatttccttctacatcatgtgtttgtcatttgatgaaataattcaagatgcagtctgcagtttaatgttttgtgaaacacaaaagccatgagaattggtatctgctaatcaccttgtcctgttctaagaactggctgcagatgcattaaagttgtactttcttggaaaa

SEQ ID NO: 233035 - DNA, 452 bp, Homo Sapiens
atctgcttgattgcatggaaaagaacatggagagaaaaaatttccagaaataccatagatagatttagtagcgtaaaagggatctgaaaacattctaaatgcacaggtaggaattagcacaaataaataagctgaccaagagttaagttctcagccgctcttatcttgactcttaaccaggatctgttttgatatttaatctatgtatgtatgtatgtacctagtaattcatactctgtatccagcaaggtgttcagaggacctatgatgagaagggtctaaacactaactctgttatagaaagccagatggaggaaatagcagatagtctgaccaacaacattgtttgctgtcctggcgaagttgaattctgagagtcttagctgccaggaaagccaggaaagatcttgagagaaccagtgtatctgcaatacagtctttttctgattaaa

SEQ ID NO: 233036 - DNA, 481 bp, Homo Sapiens
ctgatttgtataggatgcacagacaaaatatagatgcctaccataacccagatgcaagaacatatgaagataaaagggctgttgtatctctagacccaaatttagccacttcaaatgctgagaacctagaagatgctgcaaataaaagctcaggtcatatgcaaacacagagctctccttttgctcggggaaatgtatttggtgagcctccaactgaacttcagattaaacagcaagaattatacaagaattttcttcgtttccagattgaggaaaagaaacaaagagaggaagcagagcgagagagactgagaattgcagaagaaaaagaagaaagacggcttgcagaacagagggcacgaattcagcaggagtatgaagaggaacaggaaaagaaaagagagaaagaggaggagcaaaggctaaaaaatgaagagcatattcggttagctgaagaaagacaaaaagaagcagaaagaaa

SEQ ID NO: 233037 - DNA, 479 bp, Homo Sapiens
gaggctgcagtgagccatgatcatgacactgcactccagcctgggcaacagagtgagactccatctcaaaaaaaaaaaaaaaaaagagaaaaaaaattgcattggccaacttggaggcttcagtgttattttgccaagaagaatgttcacttttgtcatctaattttacactgctccttcagcaaactgactttatggagagataaccctgtttacctttagaaagaaggaagttgtggattcctcagtcttactcccattactattggtcattcaacagcccatcttcccagaaggaaagatgtaacctgacttttgcgccagaataagaacaacaaacggaagaaaaaaactgagttttatagtagaagtttgtagttgaatgagcatgtagctcaaaatgaagttaaccacttaaacttgtcatatgggggaccaaaatttcttataataaaaagaactatatctgaaaataaaaa

SEQ ID NO: 233038 - DNA, 576 bp, Homo Sapiens
gctaagcagaggtcctatccaacctggtttaatgaacataaagttattatcagcataaaacttgagtcctgaaacaacttactgtcttcagggtcttcaaataatgggtttaaaaacagataactgttttgttctttacagctatttaaatctttcccccaaatacagagtactaacatttgtttggttcatgaggttttattttagaaaaatagctaaagctattagctaatgatttgaaaactgcagtacgtttgctcatttccagtcttctgtcaccttacattctccatggtttctcaaaaattcccaacagttgttaatagaaagcatttgcaacctccagcagctctctaggatacagaagtgtgggtctaacaaccttgaaatcatttaaggtgacaataattttttttttttttacttttcatttttgcaatttcatgtcattttattttggtccagccatatctccttgtaggagaaaaaaaaactgagttattctgttcttcctgattgtcaatccattacactactttatccattcctttttgccctcaggtttaaaaaagaaaa

SEQ ID NO: 233039 - DNA, 367 bp, Homo Sapiens
ggccgtattggcttttcttatactctagaacatacgacgacaaagaagattttgatgaagttcaaattagagtcagcgtgctcatcagaaagaaagcgcagccaacacgtttaggaacagaaacggattatgttgaagacaaacaatccattgcgtttgtgttcagtaacccaagcatcaaaggaacttgtggctggggagaaggcttgactatttgaaatctcaggactcctctgtccaggagctcccagactcccgtggagtggaagcctgggggctcgctgaagaagtcacgtgactggaacgtgcttaatgcttggctgtctggtaaggaaaataaagtggtgcattttgaataaaaataaaa

SEQ ID NO: 233040 - DNA, 687 bp, Homo Sapiens
  misc_feature (31)..(31): n is a, c, g, or t
  misc_feature (155)..(155): n is a, c, g, or t
aacccctggctaccccagacccagaaggcgnctctgcccgcaggtgacatggtcctggcccagtgccccagcagagctcttggccccgctgctgcgcccacactctcgccagagtccccagccggctcgccagccatgatgctgcagccgggccngcagctctacgacgtgatggacgcggtcccagcgcggcgctggaaggagttcgtgcgcacgctggggctgcgcgaggcagagatcgaagccgtggaggtggagatcggccgcttccgagaccagcagtacgagatgctcaagcgctggcgccagcagcagcccgcgggcctcggagccgtttacgcggccctggagcgcatggggctggacggctgcgtggaagacttgcgcagccgcctgcagcgcggcccgtgacacggcgcccacttgccacctaggcgctctggtggcccttgcagaagccctaagtacggttacttatgcgtgtagacattttatgtcacttattaagccgctggcacggccctgcgtagcagcaccagccggccccacccctgctcgcccctatcgctccagccaaggcgaagaagcacgaacgaatgtcgagagggggtgaagacatttctcaacttctcggccggagtttggctgagatcgcggtattaaatctgtgaaagaaaacaaaacaaa

SEQ ID NO: 233041 - DNA, 545 bp, Homo Sapiens
agagttaccgctatggcaactggtatgcgcgacagcacggctcttaccttctttctggctacagctatggctgtgcagtggatggaaatggaaaggactgtttttctgcgcatgagacccctgaacacacagctggaactctggttatgcctaagtgaccccctgtgccatctgcctgccatcatgctgggtgtcccctgttgggaagctgctgagtgaaattaaagatggaaaccacacctctagctgaaaaccaagatgaagacccactagaagtgacgtctcagtatgttgcccaggctgatctcaaactcccagatttaagcaattcactggtctcagcttcccaaagtgttggggttacagatccacatcttcatttgaatattgaggaatcaaaccaagagtttatggtgaaaagtgaagaactctacgactccctcatgaattgccactggcagcctctggacacagttcactccgaaatcccagatgagaccccgaagtgaagcaaggtgttcattaaactccgcaattatcataaa

SEQ ID NO: 233042 - DNA, 461 bp, Homo Sapiens
gttaaaaaggaactgcttgttcactctgggacacttagccttctgcttattagtccttttgctgtgttcttaccaggttgagggacacttctttccataaatgcagacactgaagctggaatctggaacatgtgttttcagtatttagagatctgcagagtggacacatactggcacatcacaagcatgattgttatggtctcaaaagtgtgggaggatctcccaatcccaagagttttgagagcagcctgggtgacatagtgagaccttgtctctatgaaaaaactttaaaaaataaaaattagggcatgatggtgcacgcctgtggtccccattactcgggaggctgaagcgggaggataatttgagccaggaggtcaaggctgcaatgaactataatcacacctctgcactgcagcctaggtggcagggtgagatgctgtctcaaaaacaggaaaaaa

SEQ ID NO: 233043 - DNA, 454 bp, Homo Sapiens
ttttacatttacatagctctgtaaaccactgcccagatcaagatctagaacatttccagcatagtatgtctgtttttaatttacatcatatttattatgcagcttgtggggcaaattcactgctttgtgggtttactctgataagaatattaatcagtgtgcatttgaagaaatttaaattattttgaaatagtagaaacatcatcagaaggaatcttatttttggaattacatgggagcaaatagttttcatattgtgcccacaaacaattccttcttgctaatagaccttcttgtagcatgaggtaggagctctagctcttctgctggtagtccttcctggaggggttagtaagtttaataataatatatatctttgtaatgtgtggtgttttggttaaaacttttttttgccccaaaaattgttttgaaggaataagatggatttgtgaaa

SEQ ID NO: 233044 - DNA, 552 bp, Homo Sapiens
atagaacatttcttagtatattcgccatggagtaacctcttaaaaaatctgataaacaattttggcatttattcacctttctcccaagtggaattacaaacatttgaacttgatggactttcataattatctgatactagccatataaccttgaagaagcttctaagcctctctgtgcctcagtttctgcatctgtaaagatgataaccccaccttataggggaaatgcaaagattaaatgtgtcactgcacgtgagacaggtacatgcggagcactcagtgcttgttgattcttacgatgttacgttcaccattatggatattattcaaactgagactgtctgtgacaattactgttcagagttgtacagttgatttaggcagcaagtcttctggttcttaatccagtggtgtttttgtgcaattcagaagacatgtatgttgttcccagtaatgacttggtgtgtttgctgaggtagttcggtaggactgctagagctagccatgaaagcataatatattttcacagagttgagctcagttttcttctag

SEQ ID NO: 233045 - DNA, 443 bp, Homo Sapiens
tgttaaaattcagagtccttccatatcagataagcatcaactattcaatagtttatgctgaagagtacaggggaccaagagaccacccaaatgggttcatgagcccatcatgccacttctttgttggatcactttgggcacctcactaaatttttctgagctaggtcctctgcaccttgcttgtctatcatcaaagggtcactgtgagactataataatataagaggaaagaaatcgtgattattaaggcatatactgaaccacatacctccattggcaacattaaacttcactccaaactctccccctggtcctccagggcagtggctggctgttagaatgattccaccagctgccttgatcttcctgataatgcaggagaccgcaggtgttgacaagatgccattctgtccaataatcagtcgtccaatctaaaccacgca

SEQ ID NO: 233046 - DNA, 515 bp, Homo Sapiens
atccagggaacagtaggtccaggctggatgctggtatgatgggaactgcccttttcacctgccagggagttcctaaagctgatcttcctggggttctgaaggttgcgacctaggttaatgagaccaaattctaggaaccactgcccaggccaaccaccgccagtgctgcagagatcaaagaaatccacagccacaggaaaaggagcttctttggacatgcccagctccaaactgtcccagggggaactggcacagcccttacatagcccaccccctcttggcctcaccgtggcctggaaattggccagagggtccacatcctgcccaaaccactctcctctcgtcccaaggcaaaggtgatgccctgaggcctagggctggataaagcccagctctggatgctgctaacccactctgctgccccaccccatcctccaatttttatactaggctctttgccattgtgacgtcccatgacatagtctgatgcacgataaaacaattatttctttaaa

SEQ ID NO: 233047 - DNA, 536 bp, Homo Sapiens
tggatcatcttttcttatatattacgcaggaaacactgtgaagtaagcaaagttggaatgcccaagtgaaagaccatttgaatatttacaagtagatttcagacaggaatactacagggtggtcacaggataacaaattctaggcagcagatttacatgacttgaggctgtgggctgttaagacgctgaaaaaccagggtgtggaccaagctggctaaggctgagtggacccaacgtggtgctggattggatggaggttttacctaggccctcattatatgctcattaacatactaaatcacacacccgccagtgccatgacagttctgagaccagtgtttgatgtaaaaatggcaccacagttccaagaaatctccacctttacccaggaattttcgtgaacattccactccttggttaaagaaacccatcaagatgaaaccccagaacccattattctctcttgggtatgcccaagctcccctttcttgagagtgtactttttgctttgcaataaatctcttctttcactaaaa

SEQ ID NO: 233048 - DNA, 532 bp, Homo Sapiens
agttataattttggtaagtggttctcctttgcccacaccttaccaggacaaaaggagcttactctacccaggcaattaagcaatctcccaccaccaccaagctcaaatgttttcatcatagactagggttcatttttatttccttccctggagctttgtaattctttcagcgtaaacattgttgaggttcaacagtccttattgctgagtaggactcgattgtatgaatatactataatttgttaatctgttttcctgttagtgaacattttattggtttctagtttttggcaagtgtgagtaaagctgctatgaacatttgcacacaaatattgtgacttctgggcatgtagtggtatcttgtggtttcagtctgcatttctctgactaatgaacacgttctcgtgtttattggccattaatatgtctttgagtgtgtatttttaaattaggttcgtttttattaccaagttataggaactctatgtattttgaataaaattccttgtcagttattttgcaaataaaaaaa

SEQ ID NO: 233049 - DNA, 519 bp, Homo Sapiens
  misc_feature (457)..(458): n is a, c, g, or t
  misc_feature (460)..(507): n is a, c, g, or t
tccggggtcaagaaaagcatggaaagacaatatatgatgtacccagggaccagaaagaaaatttctttgcatcttagaaatggtagacattcattgtgactaaagagcttctatgcttccttgtttccatgccaacatgctgagcatgctcacaaagaaggctcgtccattcctcctgtgttttagtatttggcccagaggtttcctaaatggttgccttgaaatcactgtggtccaaatgtaattcttacacactcaaattatcactgtctgtagcacacttgtgcacctgtcttacattctctgttgctcccccccacactcttgctcagtctgtcacctgttcagtctgcttactcactcaattgttacccttttgctgttgtcgtgtttacagtttgcattttgaatgattagttgggattaccaaacattttttaaaaagatattatcaatnnannnnnnnnnnnnnnnnnnnnnnnnnnnnnnnnnnnnnnnnnnnnnnnnagttggcggccg

SEQ ID NO: 233050 - DNA, 211 bp, Homo Sapiens
gaatataaaaaatgaaggcaattccttgtctgttctgaaaaatgctaaatgttttttcctttccctgagactatgaatttgaccatgtttagagatgaagaactaggcgtgatgtagttccagcgctttgggaggccggggtgagaggatctcttgggcgcgggagtttgagaccagtctgggtgacggggagagactttgtttctacaaa

SEQ ID NO: 233051 - DNA, 467 bp, Homo Sapiens
agagacccggtaccgaaagtgagcggggcaggcacctagtcacatgggtaatgggcaggggtcggtcactggctttggctccagggccagagcagtctgacttagtgttgagctccaagcatggaacactggagttggttcattttgaccagcaagcctctaaatgggtgccttgattacccaccgcaaggagagggcagttgcctttttatgacatgttaattccagccaggtgagtcaccaggtagctctcatcctcctgccaggctcccctgcctgtcggtttggcattgtcagataatgtgatcattcattgaagtgacatttgagttccaaaccagttttctcctttaaccatttcaccctcaggagtgattctcctttgtttggcattgtcagggaatgtgatgatccattcaaatgacttttgagttccaaatagtgtttctactttaacttcctaaatg

SEQ ID NO: 233052 - DNA, 283 bp, Homo Sapiens
gaaccaaggcgaagagatttgcctgaggttgactatacatacaaatattgagcatttcctcctggtctccgtgataaacaaaggttttgatattgttcggcgagatggaaagaaaatatcaaggagtgagctgaagccactgcccttgagaaccctctcgaggagtctggcctcatgaagatgccagaataaacggcagatatatcctgaatgaatgtgagatttttaccctgtgaatttcctgtgaggagtgtaagaagaaaaagaggaaagataagaagag

SEQ ID NO: 233053 - DNA, 498 bp, Homo Sapiens; identical to SEQ ID NO: 100475

SEQ ID NO: 233054 - DNA, 543 bp, Homo Sapiens; identical to SEQ ID NO: 100490

SEQ ID NO: 233055 - DNA, 530 bp, Homo Sapiens
catgcccagccaatgtaactggtttctaagagtttagccacagtagcttctagagataggaaattagatttagtgggtgggaagaggccctgatgctggtctttccagagcttatagttgctaacacttttctttgtaaagaagtttaccttttgactggaaccagatggcactgagaaaaagaatgagaaccaccttattcttctgaaaaagactttcttctcatccagtaatttgggctaaaaaatggaaagatgttgatgacttgaagtgatgcaagaatggacaagtcagggaagtcattgggaacatggatgaggttgtaagcattggtacagtgtcctgtttcctgacttttttgagagaaatgtctacttttcctgttttctcttggggacttttgaccctagagtagccctggtgttatattttagatatcccaagctatatcagactttacctgaatatactggagttacttattatcccccattctataccccaataaactcagtttggggcttcttaaa

SEQ ID NO: 233056 - DNA, 525 bp, Homo Sapiens
  misc_feature (30)..(30): n is a, c, g, or t
aaagatatatatcgtatacacttattaganagtattatatgattttgaatttagctgtttgatattgttggaattactgaaatgttcacatacagtcacatgagatgaaaaagaatatatatctatctgattttgtaactacaaagatgaattgccagtatatgttgcaagtgggttagatgcctttttttttaagaaggaaaactgttccaaatgtattttatatgaaaacattctttattccatcttttgaaatttggaataagacaaagttttcatgcttaaaaatcacagaatctactgaaggtatgctattattcctcgagtatttatgcaagctgtctgcatgatatcctgacactattctattaattgaacttgaatcgagcatttgtatctatcataggagtgaagtaatttattggccattgataagtggtttggctgcaatgtagaaactacagtatgaagtgttttatgtctgcattgtcttaataataaaaacaagaggtatttatagaaaaa

SEQ ID NO: 233057 - DNA, 450 bp, Homo Sapiens
aaaattttgtaaatcaaattcagaggcaaaaacatattttagaatcatacagtttgcacacgacaagtaggtaataactgtctctaaaaatgttttctccttagtccgcaatgagctaagattcagaatagtgtcaacagcatgctcctatatgaagttgttttttttaaagcacatttgtttatgacaagcctacattctcagtgaatatggcatttagtatttcttttgaaaacaaacttaagcatcatgagccaaagttgcactttgactcccaactacggtagcattatggacatctcacaatgtcaagggtttctgttatgtattagtaaagtatagattattggggcctacataatttaaaagaaatgtaaattaatattaaaagcttgtaaaaatatgtatatctttactatttctcaataaatacctttgcaattgttaaaa

SEQ ID NO: 233058 - DNA, 462 bp, Homo Sapiens
gcatgcgggtcccgcacactgcacccatttcctggatgtcccctgcaggcgcgggaggccatccgggcctgttggctgcggccccctttcaaccaggcctggctcagcccactgcgtggaaggtcaccggccactccccgaggagatgggatccccgggatgcaggcccacagtgcggggctgcacccatgatgcggagctggcctccaaccctgcgggccgcgccaggcaccaactcagtgtttgtcagtgtttgtttttccaagaaatggttcaaattgctgctcagatttttaaatttactgtagctgccagtgtacacgtgtggaccccattttatttttacaccaatttggtgaaaatgctgctttcctcagcctccccacaattaaactgcacatggtctctaaaaaaataaaaataaataaataaataaataaataaaaagtatcttttaaaaaa

SEQ ID NO: 233059 - DNA, 552 bp, Homo Sapiens
gtcattcagagataagtctggtgtgattgaagccaaatcattccagttgagtaaaaataataaaaagtttggaatatacaaacaatttcaaaaagaaaggtgcaaacctctttagagtagggtcaacttaagaattccttttatttctaaaatgactggcttagaggcagcagcacttggtaaaagttttaatgtattggataaaaaaaaagttatcattacttgatagagcatatgtgtgtgtctgaagaaagatttacatagccttacacttctctctactgaatatcatacgttacttttcttaaatgtgtctagtcatatatgtgtgatatgtataaaggccagttccctccaggagcaatgacagtctttattcggagctttaaggtagttatgtaggccgggcatggtggcacatgcctgtaatcccggctactcatgaggctgaggcagaggaatcgcttgggcctgggaggcagaggtttcagtgagccaagattgcactactgcactccagcctggtgacagagtgagactccgtctcaaaaa

SEQ ID NO: 233060 - DNA, 509 bp, Homo Sapiens
catcagtggtcacctagacagcgacgatgataggtaggtgggcttcgtggggtggtggggcgtggggttcaggttccccgcccagcacccggggtagctgtaagaaagtgcctggtaggcatccttcccccaggttgaacttggagaggacctcttagagaaacctggcctgggcatagccactgcacacagttgatttcggacccactccctctctgtggagagggctgggtgggactccctggctcagaactgtcaggtcacagacttttttagagtctgaagggagtcattgttgtcagattccagagctcttgcagatttagagatcatctggccaacccaggaacccactggcaaatgcatgctctagacagaatagcaaatcaggccggggcacagtggctcccgcctgtactcatagtgctttgggaggcccaggcaggaaaattgcttgaggccaggagttcaagaccaagccctggcaatgtagcgagacctcatctcta

SEQ ID NO: 233061 - DNA, 473 bp, Homo Sapiens
acccctcttagtggtcctcctgtgtttaattaaccaaataagtgtattcagtagattactctttaatcggctgaatattctcgatgtcaacagtatgagcaacagaaaataaaaacttggaattcagtgacagctttttatgtaactgcctcagttttcttagggtaatcaagccaaagagaaaatcagagatgccaaggatagagtggttgagagaggcccatattgaaataggcacacgattgtcaccatttctccctttacaagctgtataatcagtaagctgattctttttatacttcaaattatatgaacttgacctcatatttggctgcaaataccctgatgattctcaaatctaatgctacatcttagcttattccctcgagctccagacaatgtgtctaaccaaatgtttgcatttgaatgtcccacaggcatttaaatttagcttgtttaaaatcattttctga

SEQ ID NO: 233062 - DNA, 569 bp, Homo Sapiens
ctactgcctgtccaagctcactacttttcaagaggccaatccctgggtaaatcttagtgaatagcagtcgactgtgttatttatctgtgccccatgctggaggtgcagactcggtgagaccagcagagcagctgaggttagactcagtggaaaatccagaagtgcagatgtggatccaaattgggctgaaaaaatctcatgagatcaggctttcttggacttcctgcttttagcctaagcactatgttcaacataaacgaactttcggtattttgaaacttccgtttctgatctcagaacctggaagtaaagagctgttgtgaacatttccacaaattttgtcatggttattctggaggcagagttgaaccctgtaattacggagctttgggactcactacacccacagtggcctgcctggattgcagtatgggagaggggaaggcattttggtggagagtccaggctttggagacaggcaggaccctgttcaaattctagctctgccatttccggccatgtgactggacctgtcagagtctcagtttcctcatcagttagattaaaaa

SEQ ID NO: 233063 - DNA, 682 bp, Homo Sapiens
  misc_feature (36)..(36): n is a, c, g, or t
  misc_feature (169)..(169): n is a, c, g, or t
gacaccgtgttttactgcttgagtgataccaggtanaaataagcccacacctcaggctgggggcagcatcaagcgcagaaggccatgttggccaaggagctccaggccctcatgggtaatatgaaccttgagggcggtgtgaaccacgagaacggcatgaacccgatgncggcatgatcccgagggcggcggtggaaaccaggagcctcggcagcagccgcagcccccgccggaggagccggcccaggcggccatggagggtccgcagcccgagaacatgcagccacgaactcggcgcacgaagttcacgctgttgcaggtggaggagctggaaagtgttttccgacacactcaataccctgatgtgcccacaagaagggaacttgccgaaaacttaggtgtgactgaagacaaagtgcgggtttggtttaagaataaaagggccagatgtaggcgacatcagagagaattaatgctcgccaatgaactacgtgctgacccagacgactgtgtctacatcgtcgtggactagccctagaatgccatccttcttcaggagctagtttggatatgggtttttctggtgccactgacacctgggctgcccatgccgctcaggctacccttatctcctctgcacttatgttatcaataaagaggcaaattctcaaaaaaaaaaaaa

SEQ ID NO: 233064 - DNA, 540 bp, Homo Sapiens
tctatcagtagctttcagaattcaagtaattttaatgaaataacactaaatgttcaagtattaaaagtagtggtaacagttaacagctattgagtgtttactatgtcctcagaactatgccaagaactttatatatacttgatctcacataaaaaacaaataaggtagtaatttgtcttccttacctgtttgccttttcaactagaagcctattgttctacattcaagaaagtgaaagtggctacacctcttagagaacatttctttaatgatacatcagtgagtatcttttatgggtaataatctacctaattttaactaagataccaggtatgataagaaagagacctttcagttaactgaagctaagctcatcctgtcttccttacattgctaatatctgacttacaatttactaatatttgtaaggtgtcatttaagtaggtgtggaagcattagcctagattttgactagttctttggtgtcttctgcagctcatagaggcactataatcacaacccccacccgcgcccctcgca

SEQ ID NO: 233065 - DNA, 475 bp, Homo Sapiens
ctgttccctcctcctgttttcacatccgtcgggcttccagaaacttaaagccgttagtgtttcatgcaagagagagcatctgtgatccacggagaggcccctgggcagtgtggttcagtgggaagcacacaggactccctccccagtgctcccaggatcagctctttccctaaagagcaaacctggttatctcgcaatgacctagctaacacaaatgcaacatcagccggggcagcctgcccccttcactctttgcccaccatcagctgtttggcagtatccatatacgcctttaccagtatttatttaatctttttgtttaattcactctaaacaaactcacttcttaaaaatttctctgccttataagaaataatagccatgaaatcactggtttgatgtacggtttatttatttattccaataaacactcattcaatataaaattcaaataaattcaaaactaattaaaaaa

SEQ ID NO: 233066 - DNA, 705 bp, Homo Sapiens
  misc_feature (169)..(169): n is a, c, g, or t
cggaagagatacgctgatagttcatcgtccactgcccatttcccagtccccagaagatgagagtaatgataggagaagcagaaggtattcagtgtcggagagaagttttggatctagaacgacgaaaagattatcaactctacaaagtgccccccagcagcagacctcntcgtctccacctccacctctgctgactccaccgccaccactgcagccagcctccagtatctctgaccacacaccttggcttatgcctccaacaatccccttagcatcaccatttttgcctgcttccactgctcctatgcaagggaagcgaaaatctattttgcgagaaccgacatttaggtggacttctttaaagcattctaggtcagagccacaatacttttcctcagcaaagtatgccaaagaaggtcttattcgcaaaccaatatttgataatttccgaccccctccactaactcccgaggactttggctttgcatctggtttttctgcatctggtaccgctgcttcagcccgattgttttcgccactccattctggaacaaggtttgatatgcacaaaaggagccctcttctgagagctccaagatttactccaagtgaggctcactctagaatatttgagtctgtaaccttgcctagtaatcgaacttctgctggaacatcttcttcaggagtatccaataaaaaaaaaaa

SEQ ID NO: 233067 - DNA, 457 bp, Homo Sapiens
cgcgccgggaaactgggaaggctggtgagcgagaaggcaaggtaaggtctctgatttacgggggcatgccagttaatcctcctgaatgaggaagaaatgaaaggaagaggagcttgagagtcccttggctttgtcttctgagatgaggcttttaaaatgaaccaggagtctggctggccagttttgcaaacttcttgttcagaagaaccccttagaggcagctgaacatatagggcacattttcaaaagctgggaaagacagacccctttcacctatccctagagaaagatggtatggagcaaggcaggaggagttaaaaccagcttcctggcccagagaggtggcttacacctgtaatcccaacactttgggaagccagggcatgaggattgtttgagcccaggagtttgtaacttgtgaccatcctgggcaacatagtgagaccctgtctctaca

SEQ ID NO: 233068 - DNA, 500 bp, Homo Sapiens
aattctcccataattctactctgctcaactcaattgaaattactatcctcaagggtttgtgactcaactggaattactattgtaaagcagtggataagatggaatgagaagctcagtcctatagataagttatcatgcaatttactatcccaggcaagagatcagtggggctttgaataaggcctaggaggagaccgaaaaggggcggccactgagagatatggagactatagaacaggtcagactgtggtaaagggaaggcgatagggggattctaaggggctctgaggtttctggaatggctaacagcctgaatactggtgtcattaagcatgtaggaatacggtgggaagatcatatggttaaggacatgtcaactttgaggtacccagggggatatctgtgtgaagatgtctgtaaggctgctggaaatttaaaagtggaatctaggagtgagttggaatttaggaatatagatttggaaaccacagatacatgaa

SEQ ID NO: 233069 - DNA, 401 bp, Homo Sapiens
  misc_feature (4)..(4): n is a, c, g, or t
  misc_feature (31)..(31): n is a, c, g, or t
  misc_feature (37)..(37): n is a, c, g, or t
  misc_feature (48)..(48): n is a, c, g, or t
  misc_feature (59)..(59): n is a, c, g, or t
  misc_feature (68)..(68): n is a, c, g, or t
  misc_feature (82)..(82): n is a, c, g, or t
  misc_feature (111)..(111): n is a, c, g, or t
  misc_feature (143)..(143): n is a, c, g, or t
ctcncctatagggaaatttggccccccgagncccaanaattcggcacnaggggcgggcnccctgtagnccccagctaccttnggagacctgaggcgggagaatagcttgancccgggaggtggaggttgcagtgtgctgagancgcgccactgccctccagtagagtgagattccgtctcaaaaaaaaaaaaaaaaaagaagaaatggagatacaaacttactacctacctccttacaacctaccctcacagtattactgtgaataaaagtgtgtgtagcactgggaacactattcacagagcactcatgaatgtttgttctttgttattagttactagagaggcaaatgtctgccagggctgaataatatgtgtgaattggtgattgtcgcacatatcta

SEQ ID NO: 233070 - DNA, 438 bp, Homo Sapiens
  misc_feature (77)..(77): n is a, c, g, or t
  misc_feature (92)..(92): n is a, c, g, or t
gcaactggcccacttttaaaaggcccaaagtcccaaacaaaggtctttaaagaatttggtaacaccaatggcaactncacccagatgggttnaaggccaacactgcaatgggaaaggtgacaactgctcagtagaaggcagacatcatgtaaacagtcgtactagctgttttcttgtgtctgagtctatgcctagaaggggtttactttttccacaaaaggggaaacatactatgatacccctgaatatacatcctagaactcactgcttaaagaacacatagaaaaaaacaaggtcatgcaaccatccctaggaagttaccaaaattcattcttagttcccatctgggggcaaccctgatgagatactgcaagggaagaaaagaagattaaaggtaaacaggcgtagttcaatatcaacactttaggcaaatctttc

SEQ ID NO: 233071 - DNA, 662 bp, Homo Sapiens
cacaccacttgagtctagatacacccatcatggtcatctatcatcaagagaatttggaattttgagccagcactttctttctgatgatgcttgttgaacggtccactttctttgatgagtggatgacaagcaatgtctgatgcctttttgtgaccagactgttttcctctctctttccctaatgtgccataaggcctcagaatgaatgagaattgtttctggtaacaatgtagctttgagggatcagttcttaacttttcagggtctacctaactgagcctagatatggaccatttatggatgacaacaatttttttttttgtaaatgacaagaaattcttatgcagccttttacctaagaaattttctgtcagtgccttatcttatgaagaaacagaacctctctagctaatgtgtggtttctccttccctgcccccacccctaggctcacctctgcagtcttttaccccagttctcccatttgaataccataccttgctggaaacagtgtgtaaaatgactgaagtgatgatgcccgaagatgaaatagatgccaagttagatggacattgaagcaacactcagcgttgcctagcgttaaaggcactgcagagaaatgaggtgcagaggtggcccctctgagtatttatttgactcaggt

SEQ ID NO: 233072 - DNA, 390 bp, Homo Sapiens
  misc_feature (13)..(13): n is a, c, g, or t
  misc_feature (78)..(78): n is a, c, g, or t
ctgtgtgatgtcnccctgggtgccagcacccactctggaaaccccccattttaaattcaccaagaataagaggttggnggcgggttgccacactgtcccctttctgcatgggaggaagggggctcgagaactgagtcagccacacaaaacgaggatggacagaactcctgagtagcgagggtgctgccgggcgcgaggaggagggggaagacgaggaagacgaggaggaggaatagggagcaccacatgacagaggggctgcctcagaccacaaagcgcttcctcatcctttcctcgccctttgaatcgccggcaacgtgactctgcgagcagcgggcagacgccaggtctccctcgcaggcgggaaaggggctccaaggcgggtgctgc

SEQ ID NO: 233073 - DNA, 457 bp, Homo Sapiens
gacagctctatgcccacactcacattacagctgatgtgaaagagattctgggaatcccaatgttccccaggaattctgatatccaaacattcccataactttttttttttcaggcgcagtctcactctgtcgcccgggctggagtgctgtgagctgtccgtggtgctgaattcactgtgacgtcactcctgtctctctttgctttcttctgactgacatttattcagccttctctacaggaatctcttatgttcccccacatgcaggtggtttttcagtaggctcctgaagagtgatctcaactttccaggaagaaaagagggcaaagggaacaatgtgaaaagaagcagaaaatcataaaagaccatgtgtttgataaacaaccagattgtttctggttgcctgccactataaaaactacatgagagcatactcatacatgttcctgtaatcctca

SEQ ID NO: 233074 - DNA, 438 bp, Homo Sapiens
  misc_feature (65)..(65): n is a, c, g, or t
  misc_feature (113)..(113): n is a, c, g, or t
aacccttgcatcctccatatgggggtgggaattggactgcaagctatgcccaagtccttaatttnggttaccataacttttatttcaaattcagaaatgaaaaataaaaatanggtacaaatcaagcattaacctaataatggagcacagctggccctggctcttgggaaacttcctacaaaaacgaggattcttgtatggaaatcgttctgaatctttttcctgtaatggagtgactcttaacacaagagatgactattgcgaaaatctctctggcatatttaggtttggagcatgtggttgtgcttgaacaagtttctgttttatattttacaaatgcctaacaattcagacaactacagaaacaccttagttatctgaattccagacttccggctcccacgagcaaccggaataccaattacagaattagggaac

SEQ ID NO: 233075 - DNA, 880 bp, Homo Sapiens
gtcgagaccttgacccggccaattcaccgccttttcccccccgaataagacccggatttttttttttttttttgagacaggtctcactctgtcatttagattggagtccagtgcacatgacagctcactgcaaccttgacctcctgggctcaagcgcccatcattgaccgaaatgtcattatgcagtgtgtaagtgtacatctgccaaatcaaatagtggttgaggtcaggaatcagaatatcagctctctcatggaagcattggtcaaaaggcaacaaattctctctgtctagttctcttttaaagcaaattgccgtaagcatagtttgacctgttttggttatcagtgtctaaaaacataattttacctgttttaggaaatgtattggctcacataactaaaaaaatctaagggcaactcatggccaaattggggctcaaaagatgtgttcccttccatgtgttgcttaattcttaggcttcacatggaagtaagatggctatagctgctgcagccatcaaacttcaagttcaagtacattaaggttcaagtacaacatatgtcttaatccgttttctgttgctataacaatatacctaagactgggtaatttataaaggaaagaggtttattaggctcacagttctagagactaggacgttcaagatcaggcagctgcatctggtgagggcctcctgccacattatactgtggcagaaaagtggacgggcaagcaaaagagaccaacgcaaaaggcagccttgctttataacaacccactctcatgggaactaatccagaactgagagaacaagaactcactgcaagagtaaggcattcatccctcttaaccatctaatcatctcttaaaggcacca

SEQ ID NO: 233076 - DNA, 553 bp, Homo Sapiens
tagagttttgggagaacagttcttcacaataaggcaatggttttgagaggccaggcaaataatctttctcaccgtagaacaaaaagttacaaaaggcataatcggaaatagagactacatacttgagtttatggggtttgtgttgtttgaaggttcaatgcttgcatgtgtttatttatttcaagagggaaagtggtctgtactgctttcatccttgccactgtcttgcttttattttttactctcccactgagcaagcgtctgtggtcctatggtatcaaccagtatctttatagcaataatttctttaattcccttttctctctctttccaattatttaaccagttacttccacctggacatacgataggaaattcaaactcaaaatatgaaaattgatcttaataactctcccttcatatcttttcacctatttccagtccttatcatagttgataaaaacctcagactcatccagaaagctatatgatgcacctagtaaaaaaaacaaagatattcaaactgcttgggttcaaatggtatacaattgcc

SEQ ID NO: 233077 - DNA, 780 bp, Homo Sapiens
ctgcctcttaattcacagggcccagaaggtgacgggccatcttggttttcttctggatgtgctctttggttcttcagaagactgtgacaagttctggcccaggattcgctcactgaccctcaatgtcctctttggcatgcgtttctgtactgttctccatgtgtcggcatgtctctacctctaagccagtgtttttcaactatgttttatccagactccttctccacaatgatgaatccacagttggttatctgctactgcccattagctaaaatcattttgctgcttgactttatggagtttgtattatgaaatcagtgggtattttgaatgtgttctttctaactacatgcatctctccactcaactccaccccatcccatcccaccttgaaaatcactgctctgaaccagtgttctccaccttgtcctccacagatctcataggaaatgttcaacaattctgtgaaaggtcacaggacccaattggagaaatcatatgaaaagcatagttggtcttggtgtcatatggatcagaggcacaagtgcagaggctgtggtcatgcggaacactctgttatttaagatggctatccagataatcctgaacactgtgtatttattttatttagactaccagcaaagattaaagcatgaaatgtaaaacatctgataaaacttacaggccccctacaccaagagtgtatctgtgaaagagctcctacactttgaaaacttaagaatcccttatcatgaagtttgctacttcctaggttgtaag

SEQ ID NO: 233078 - DNA, 801 bp, Homo Sapiens
aaaggggactaaaagaggaaaaaagaaggaagtaaagggagagaattgtcccagatctggttaaaagtttcaaaatttaaaaaggacccattaaattatgggaaaatggctatagagtgtgagcctccgttgaccatatgctcaaagaccgtactctgccacctgccttccaggtagctattctagaaactcagtcctttgtggaaacccaactaccttttaaaagtctctttccagattccaaaaggacaagagatcagagagtcacatatacacctcttgttttattttcttgctttcacgggtattattgccaagaaaatcgtagggaaaaactttaaacttttcttttcagttgatccctttgacatcacctctcatgtttaaaatcaggaaaacacacccctaaaatttgcactctcttccgttttgaaaaagaaaacccacacacaaatgcacactattaccgtctttcaccctgcgctatatttccaaagtgtattataatccagatattgccccatctcaaacatgttaagtcagactgtgctgaaagactttccagggacggtcaacagggtatatgttcagtggctgccctgaaatcctggtggggatgaggatcacgcttcatcatcaaggggatgcccatcccctgataagctcccagtccttttggaagatttctttgaatgttaattgcattttcagttttgctcatttcccaccccaatgttttgtctgcaacatcgcttacactggattctttctatttttattcatatcacttaggatggtagt

SEQ ID NO: 233079 - DNA, 986 bp, Homo Sapiens
cccgggttggatgcccccctgtacataatttcccgctccaacaggcctgcgaacctgccctggcaagaagccatagtagaacataaccagcgcggaaggacatattgcgcaacataagcaccggagagttcaactaataaccagaatagggcaattacttcaaggtcttccgacaatatacccctctacaggaaagaagaggatttaatagtgaagagggcacattaccaaacctaaagaggctgtagtaccttaacgtgaatcaaagtgtgtatggtacacattgtgtactagaggaaaactctgaagcagtgctcaagctttgttcaacattagggcacttatattggaaaagtgtcttgcagatataataaatgtggaaaaacactttttcaaaaactacatcagaaaacaccagagtttatactgaagaatatttttgaagatgcactaaaaatgaaaaaatatttaatccaaattagggctatgtaaatatcagaatttataatagaaatatataaggaactgacactgcagatatactaagtcaagagttctgagtatagaaaataatctaaaactaaagttgatagaaaaagtatttgtatataaatttaagaggagtaaaagattttttgcagagtaataactacattctaagtatactttatttcttgaaaaaattacagactttgaaagcaaatgatgtaattcaacactcattttctggtgtttcttcattcttattcacttgtgaaagcatgtgataattgttgcatcaaaggtatgagagattcttttccattaggtgggcatttatgatcttttctatggacaagtaaggacattagaatgtaagatgcatgatgaaaaagtggagaggttctttgtggttaacttatactcttgagtgatatatgaggtaggtgttaagagtattgttcttttgcattatgagaaaactagtagtaattacttagatatta

SEQ ID NO: 233080 - DNA, 1000 bp, Homo Sapiens
ccggttgcgcggttttaggacgatcgcggcatgtctatcctcgatactccgtagcagaagcgcattttttgcgtggttcccagaaaggtgctgttgtgttagtcggtctcgatcgtggaagtccattgctgagacctggtcgtcagggtgcttgaggatagagagttgatggtctttgctctccataagcgttttcagcggtagtattttattgggttgtatcaacgtgcgtctccggcaaccaggagttcgtcggtctgtgcggagagtattctgccgccccggtggctgtgaggagctgcaggccacgttgcgaagagtcccttccgagagagagcgagatgacgacagtgaaagattcatggtgtagcggacgactgcatgactgaagaatatcgttgacttggactctctgagttcgtgtatgtagtttgatgtattgtattttttgagacagagatttcactgcttgttgcccaggctggagtgcagtggcacaatctcagctcacctgcaacctgccacctcctgggttcaagcgattcctccggcgctcagcctcccgagtagctgggattacaggcgcccgccaccaagcccagctaatgtgttctattttttttttagtagagacagggtttcaccatgttgcccaggctggtctcaaactcctgacctcaggtgatccacccacctcggcctcccaaagtgctgggattacaggcatgagccactgcgcccggcctgtactctgattctggataagctagagcaagcctgattatataagtccaattaggtgagcatacgcttgtcttccttttaaagattaagtaattttatttttccccatttttcttacccgattttgaatgctctacgaaggctctttaaaatactcaggactatgggtgagtagtgtttaattttccccatttttttatatgactttgtctttattcctatacaagcaatatttgaaagttttaattattaatca

SEQ ID NO: 233081 - DNA, 938 bp, Homo Sapiens
ggtcccggcgagcgaagcgagttcgagagggtaaagtggaggtctcgcccgccgcgcggacccccgcggagggtccgaaagcggcgaagaggataaccgaccagctaagcaggcctgccgaccccgacccagttaggctccaggcacaccttgccccaggaccagctccaccagtctcccaatctgcgtatctaccgcacactgtgaaagcaattccctctgtctggacactcgtcctggacaactcctgaaccctcagctttgagtccggcgtgatctctgggagccatctgtgagccttttcccggcctgggttaaagtagcaactcaatacgtagctgatgtttactgagagacagtgtagtgtcatggctaggagcacagaccctgcagtttgtcctccaggattcaaatcctagctctaccgtttactagctgtgcatccttgggaaagttactttacttctcagtgcctccatctccccatcggtaaaaatgaggatgatgatgtacccgcttcataacgttgttggggggttaaattaagttgataaatgttgaagtggtatggtcagagctacgtaagtggtataaattgttgttattctacactattctacatttacgtaatctattattacagcatattctgattgtcatcattgttattatttatcaggtgctttgtaccaggcagcttgccttacatatgttatctcggttaatcttcacagcaactctctgaggttagagagtcaaaccccatttttaaaaaatagcttggggttcagtttacatattataaaatttgcccactttaagtgtactattcaatgaattttcagtaaatttacagaattgtgcatccatcagccacaatccagttgtaaaacattgccatcgctgagtggtgtggctaacacttgttatcccagcac

SEQ ID NO: 233082 - DNA, 1000 bp, Homo Sapiens
  misc_feature (1)..(1): n is a, c, g, or t
nccctgagcgacaattgggagattcccctgcactcctttgcatctcctttctgcctctctcttacgttgccttcagtctcaagcacacgtagctaactccccacagcacaattagcttacgatagaaacatcgcagcaaccagagctaatctcgtggccattcaacgccctcattacagttaaagcccctaatccacttgttagcaatcaagcttacgctaagacctaccccctctgatggtagtggcgcgagaccggaattttaagactctttaaaggaagtccgaccttcagctctgcaggaaagattagcaatcagtaaaaccttgggaatgaatggccacctagagaagtttattcttgctctctgttatttctgctactggattctagatcttgttaatatggtaattcaggttttgtcaggaattgatccacacttttgagtaacctggccgccatttaaaaagctgttacattgttttcctcctgatctttaaatgtgacttgattgctaggatatcagacacctgtttggaaatatcttttagcgtgacagaaaactccaggtgatatgaaatttaacaaagttaaagggattaagtcattaagtttacagcttcggaagaggtcggtttaaactagacgaccttgaagacctttcccaatcatataagcgtatctttaagtacctgggttttgtttttgttttgagacaggtgagacagggtctctgtcgcccaggctggagtgcagtggcacgatcgatcagtgctccctgcggcctccacctccctggctcgggtgatcctcctgcttcaaccccctcttcccccaccaccactacagtagctcggactacaggtgtgcaccattacgcccgactaatttttttgtatttttagtagagaccagattttgccacattgcccaggctggtctccaactactagacccaagcgatcttgcccacctcggcctcccaaagttgctggaattg

SEQ ID NO: 233083 - DNA, 749 bp, Homo Sapiens
ggatacacgcatgagccacagtgcccggccaagtattttctatacttcagatcatatctactgaatgatttggtgacagaaatttgcattgcttttacctattggctttcagtaacaatggtataataattatgggtatgaaaatgactcttcatatgaccacatatgtgaaagtatatatatgtgctgcattctattttactagtctcctttttttttttacctttatacttgtagcaaattgttttaattctgtagctttgtaatatgttttaaaatcagaaactataatgcttccaacattgttcctttttttgaagattgttaggtactttattgtctcttgagattccatatactttaggggttgctgtttttatgtcttcaaaaatgcaatgagaaattgagaaaacattgcattaaatcttgtagattacattgagcagtatagacatcttcccaatatttcaacttttgaacaaaagcatgctaaagaatgtggtttaatttactatatatttgtaaacttgttagcttttaatattgttttatattgtcattccatttttgttatagaaagtaatccataaaatttcagttcgaaatactttttaagactcttttgacttatttggtggtctgtcaagaagaaagttgtataagctattgataagggtgtgtactcttaatgttgttgagttttgtatacctatgttaggaatatttgttttatactggccttcaggtcc

SEQ ID NO: 233084 - DNA, 999 bp, Homo Sapiens
tgtgcaattggccggaaggaacaccttttacagtggccacaattagcaatttccggggccccaatcaggagccggtgaccggggtatttaaccagttccctgtctcactggcccaaaattctcgcattggttttcccgggctgtctcagtttggggaaattagaccagaaggggtcctgcaaaaatgtgagtcaagttcgtaagcatcatagaaattcctgtctaatataagatgtactgctttaaacacaactccagagccctccccaagctcccctcccaagctcctgaatgacccggtttctgagggagggaaattgctacttggattgagagtagctggaatgtaagtgaccccaggctttgcctcagggcctttagcctatgtcccccccacataaagagagcttctcagagcctgactgaagagctgacgttttgctttttcatatgccaattaaacccggtctaaatccaaatgcttctccagccatccaggagtggctgtccttttcagtcttgtcttttatataggtagctgagggggaagatttagaagccttgcactcactaaatagattaaacagagcaggcttgtttgttgaattgctccaaagtccaacagacacacactgagcaggtgttttacactcacattccctttttgccccttaaatagaaagtgcaggtaaaggtttatacaacaagaaagcacattgaaaataatttgatactctaacaatccattaacatgtgtaggggttacggtgaggatcactgtgttgtattcagaaaaacggggagagggatgcttaattggccctggcgcttgctattttttttctcatttcttcacaataggaccgtctttggcagcagcaaaatgtatttcagtatggcagtctttcctctcttacattattggtaagattatactaacaaaatgtttccccttgtacaattatgctgtgtttttaatacaccgagcgctgtggtgtt

SEQ ID NO: 233085 - DNA, 326 bp, Homo Sapiens
  misc_feature (9)..(9): n is a, c, g, or t
  misc_feature (77)..(77): n is a, c, g, or t
  misc_feature (79)..(80): n is a, c, g, or t
  misc_feature (104)..(104): n is a, c, g, or t
ttagggtanttaaattgccatgggattttggaaataagatagtgtaaccccagttaacggtttgcctttatatccananncccactgtttttaggtttaagaantttgccttgaaatgtcaaacccttaggccttgacttggggtctgttacaaaaatattttgtgggggagaaatcatagcttttgtctttgaggttcatcagttatagttacccctgggggcctgggatgggaaggagacctattttcactgtgcaccctgttggactgttgaaattatttaaccaatatgtgtatatttccatatcaatattttaaaatttat

SEQ ID NO: 233086 - DNA, 355 bp, Homo Sapiens
  misc_feature (121)..(121): n is a, c, g, or t
tcatgctagcagggggcaacaccaaaaatcctgatactccttccttctcctactgggcagccaagcggtacctggtgcagaaagacggggacacaaacggagagaagagaacaaagtcacntccacatagttatctgacctccgagaacacctccctctcctgctgttcccatggcacttgtcatgttgaaggcagcgagggacgtcttatttaactttgtcttttctgtactcagccccatgacctgaccacagacggcattcgtttttcatgtttcttaaatgtattcagatttcagctaaattcacactctgaacgtttttttctctgcttataaaagtaatccatgcagaa

SEQ ID NO: 233087 - DNA, 378 bp, Homo Sapiens
  misc_feature (50)..(50): n is a, c, g, or t
  misc_feature (67)..(67): n is a, c, g, or t
  misc_feature (78)..(78): n is a, c, g, or t
  misc_feature (117)..(117): n is a, c, g, or t
  misc_feature (136)..(136): n is a, c, g, or t
  misc_feature (144)..(144): n is a, c, g, or t
  misc_feature (190)..(190): n is a, c, g, or t
  misc_feature (217)..(217): n is a, c, g, or t
  misc_feature (228)..(228): n is a, c, g, or t
  misc_feature (231)..(231): n is a, c, g, or t
  misc_feature (237)..(237): n is a, c, g, or t
  misc_feature (255)..(255): n is a, c, g, or t
  misc_feature (258)..(258): n is a, c, g, or t
  misc_feature (294)..(294): n is a, c, g, or t
  misc_feature (333)..(333): n is a, c, g, or t
ccaagaagactttgagaaccccctctttggcacccagtgttcctgaaaantgcccacgatgtgtagntctttatttantcattgtgcctctgtgtgtggtgggccctttcagtctgnaaatcccatttccttcagntcctaggnaatttcatctgtatctttgaaaatgtccttccctatatgtttttantctaaaatgactattagttatagtagntctattttggnccncctggntcaattctctgtaatttnagnaaatttcttctatgttttatctttttaaaaatattncatggctaggtgcagtagctcatgcctataatacccacnctttgggaggctgaggcaggtggattgcttgagctgaggagttcg

SEQ ID NO: 233088 - DNA, 245 bp, Homo Sapiens
cactttccagagtgctttccagagtagcgagtataaaaattctggcacctctaattagtgtaaggtatttttgacaaagttagtgacacttcaatggagggacagacataataaatcacactgcccaaagtccagaataacataaaagtggcacgtaagttatgactttaataagaaaaaactgaattcactcttaattgaagccatgttctgtagcatccttaattgaatctcatttaaaacat

SEQ ID NO: 233089 - DNA, 608 bp, Homo Sapiens
  misc_feature (127)..(127): n is a, c, g, or t
atgttaatgtaaatatgttccatcgttaccatccacggaataattaaaaatctccaaattgcactgtaaccagggagatataagaatctggtcttaggtgtggggagtactcttccattaataaacnaaaggcctactgtattattaactaagagaaagtataatgtgaatcatgttaacattctaaaataacagaaagttaggaccatactagcaatgtgaactgtgcctgtttgaaaagaaaatttaaatactcaggcactaagcattagcctacctgaaactctaggatgaagtctagtgctgtattctttcttagaaaatagcaacacagagtaatagtaaataaacccaggtattcaccagttaaaactgtgaattgaagtgtctcagtagtagatatttatcatgaagaggttgatgccaagtgacaagaatagtttatcataagattgatgctcaaaatatggcagcctcatcagaaagactattattattctctaagtttaatagttgtgatcagtttaggaagcaaaattatccccacaaatgtgaggatgccaggaagcagaacaatagagtatcatgtcaacattatctcttttacc

SEQ ID NO: 233090 - DNA, 414 bp, Homo Sapiens
  misc_feature (17)..(17): n is a, c, g, or t
  misc_feature (49)..(49): n is a, c, g, or t
  misc_feature (60)..(60): n is a, c, g, or t
  misc_feature (75)..(75): n is a, c, g, or t
  misc_feature (97)..(97): n is a, c, g, or t
  misc_feature (103)..(103): n is a, c, g, or t
  misc_feature (111)..(111): n is a, c, g, or t
  misc_feature (120)..(120): n is a, c, g, or t
gggaaaccccggccctnacggaacctccccggggcctttaccggccctnccaggagggtncccccctcaacccanaccgtataccccaagcctcccntccggncattccangtaaatatntgtaagctttttcctcccttcaaaggaaacctaacatttctcttccctctgcattgtgtgagagagttttagacagtcttcatttaaaaacatgaaaaatgatgttagccttgttttcatttctagcagccttacattgtgtatattttctttctcattcccaaaattctaatctgcattactacccattcaatgccatttacctcaaaatgttgaatgctcctttatctttgttatctggtttctaatccttatcacaactgaaatttctgttttaggtgttattactgactt

SEQ ID NO: 233091 - DNA, 310 bp, Homo Sapiens
  misc_feature (44)..(44): n is a, c, g, or t
  misc_feature (224)..(224): n is a, c, g, or t
ccttagctcaagctctcttaaattccttatggcagaatgaaaanaacttcattagggcctacctgagaagaaaacaaaaacaagaaaaagtgtggacatcattatccacttgtcctggctgccttgcccccttctaaccatttcatgcccattctagtgtgggcttctgagtgctcatttggtttttcatatagtttttaaatcagttgttactgtcaagatgnaaacatatcacagatgttagtagcgcagtgctgagtgcttcttaaacagtattaacttacatgcttgatgaccatgtgttcttgat

SEQ ID NO: 233092 - DNA, 423 bp, Homo Sapiens
  misc_feature (28)..(28): n is a, c, g, or t
  misc_feature (39)..(39): n is a, c, g, or t
  misc_feature (113)..(113): n is a, c, g, or t
  misc_feature (115)..(115): n is a, c, g, or t
  misc_feature (136)..(136): n is a, c, g, or t
  misc_feature (182)..(182): n is a, c, g, or t
  misc_feature (300)..(300): n is a, c, g, or t
  misc_feature (326)..(326): n is a, c, g, or t
  misc_feature (407)..(408): n is a, c, g, or t
  misc_feature (414)..(415): n is a, c, g, or t
aaaggcctggtcctcccaacccccgggnctcaagtgganccctccctgcccttggccctccccaaagtgggaggattacaagtgttatcccacccatgcctggacaggaatantnttaaataatgaaacccaagtnccctttcgctttgtaagttaatgcatgtattgatggtgagtagagnacaatgacacaatctctagagagacataggtgttcggcctggctcaatcactagccttatagtctcacagggaaatatgaacttcatcaaaatagctaattattaccacatcatgganctttatggtcattttcaaatagacanaattacaaagttcaatatataaatccattggcctaatatcccattttataggattaactatttttcaaggagtcatgattnnagatanncaaattct

SEQ ID NO: 233093 - DNA, 337 bp, Homo Sapiens
taccccattttatctgaaggctgcccaatttgagatgagtaatcccagcaatctccttttcttcctgccttgtcccttctctcctgtttcctctctttttgcctttgttaatgcaaaattaaaatggagactgggcctgaaaactcctgagcaaacaaagctacccaggccttagaaatagccttatcattgcttaaactgcaaatataagtgaaactcaagttggattgtaactaaaaataggtaatacttaacttggatcatttctggtaaatgtttatgttagacagaaataagatttaaccctagccaatcgtaagcagccttcagataaata

SEQ ID NO: 233094 - DNA, 450 bp, Homo Sapiens
  misc_feature (54)..(54): n is a, c, g, or t
gagacacttgctcccccttctctcgttccttagccatccccctaggaacttgcnacaccccaggtctctcgacttctggacctgcttccttacccatgccgtcttaagcagtcaggagtcgctgcccgggttcgagtcctagttaaattacttagtgctgagaccttggggtaggtaaacttttccaagcccaggtttatctcagtttcaaaatagggttaatcgtctttatctggcaggtcaggtgggatgtctcacaggtaagcaccagatgccatttgaaaggcttgaagcaaagtcaataaagcattcatgggaaaatacaactggaggcaccactagattttcgtatacattaggttcccacggggaggaccgaagagagaagaaagaagtggaaagggaggagcgtgcaggagagacaggagaagagaataactaaacaaagac

SEQ ID NO: 233095 - DNA, 375 bp, Homo Sapiens
  misc_feature (23)..(23): n is a, c, g, or t
  misc_feature (29)..(29): n is a, c, g, or t
  misc_feature (43)..(43): n is a, c, g, or t
  misc_feature (59)..(59): n is a, c, g, or t
ctgaatgcagtggcgcaaatctnaagctnactgcaaacctccnacctcatgggttcaangggattctggtgccctcagccctccccaagtagctggaattacaggcatgtacccatcacaccccagcctaattttttaatatttttaagtagagatagggtttcgcctatgttggcccaggctggtcttgaactcgtcctcaagtgaaccacctgcctcagcctcccaaagtgctgggattacaggcgtgagccactgcgcctgcaaaagtcctaattttactaaatctaaactcaagtacatgccattctactcttctgtgtgctgacgtgggaagtgtgcacaatgcctgttgctgcaaacccaactctctgt

SEQ ID NO: 233096 - DNA, 647 bp, Homo Sapiens
  misc_feature (4)..(4): n is a, c, g, or t
  misc_feature (107)..(107): n is a, c, g, or t
  misc_feature (112)..(112): n is a, c, g, or t
cganaggaatgagagaccccgcaagaggcatgctcgtgtgggtaggtcatcacgtcggaaagggttatctttttttatagtcaaggtctcactttgtcacctaggcntgtcntgcaactcctggcttcaagcaatcctttcatctcagcctcccaaaatgttgggattgcaggtgtgagccaatgtgcccagccaaaaataaaatttaaaaaaaaataatgtaggtagtttctcatagtaacgtaaagaatatgtaacctgtgttttcctgaaagttgagggaaagctgaggcagctaatgggctcatacaaaggtttggaagacccattctgactacctaaaggagagtcagcattctgaccattctgattgtgcttatagaagagtcagaacttgtgaagaaagaagccttaaaatccaaggtagtaatcatcctgggaaatatttcaggaaataacttaaggtttgtattttcccctaaaattgttagaagaaaagaaatgaagatctacatatatgctcttttagagctgagaatagcttctataaagcagaattttagacttttctccccaaaggaaaataggcatatttattgtaattattctatcacagtcaacttgtgttaacatatcgttaattcttc

SEQ ID NO: 233097 - DNA, 588 bp, Homo Sapiens
  misc_feature (22)..(24): n is a, c, g, or t
ccacgggaaggactcaggaagnnncccactggggaagggtgagactccatctaaaaaatataatatagatggcaacccctggtctaagataagagataacacatcaggtggtcaggttgaggtttggggcttggtagcagttgccccagtcatgagatgactcacttaacccgtctcctttaagtgagctggtctggaaggcttcctttccttgtcccatcctggggtcaataaaactgaatgttgcatattctagcacttgtctagttttttgttccatagaaggcagtttagggtatatcatggagagaatagactttagagtgttatacaacatgtgaatcctggttggttccttccctgcttgatttttgtgcctggttctgccttttactagctatgagacttattaggataagttacccctctaaacctcaacctgattatctgtaaaaatggggatctccacagggtatgttcacagagcaggcatacctagtgggtgctcaattaagtattaattttccttccttgcctatggtcctatgacctgccttcaacatgctgggaaatttaaggcaagaggag

SEQ ID NO: 233098 - DNA, 618 bp, Homo Sapiens
  misc_feature (10)..(10): n is a, c, g, or t
  misc_feature (12)..(12): n is a, c, g, or t
  misc_feature (15)..(15): n is a, c, g, or t
  misc_feature (97)..(97): n is a, c, g, or t
ggccaggaantnttntgagatggagtcttggtctgtcgcccaggctgaagtgcaatggtgcagtctcagctcactgaaacctctgcctcccgggtcnaagtgattctcttgcctcagcctaccgagtagctgggattacaggggcctaccaccatgcctggctaatgtttgtatttttagtagagatggggcttcaccatgttggccatgctggtctcgaagtgctgacctcgtgatctgtccgcctcggcctcccaaagtgctgggattataggcgtgagccactgctcccggccacaatctacaactggatttgtgctttgcaatttacgctttcgaacatgcaggaatgtagtttgggcatttgtctggaacttcggattctcgggactccagggtggccaaggcgcggaggtgactcaatgacattgaccggcctggatgcacgtgggttgctgagccgatgctgggaaggtacggggtttgcccggtgcaggccgccggaactcacgcacgcccctgtctctctcactcctggggtcggctctggccggtggcctccagctcagctagcggccggacgcgcagcccgccgactagccctccaggtcctagcgc

SEQ ID NO: 233099 - DNA, 743 bp, Homo Sapiens
gagccgcccagcaaataattgaccaaagaaaggggtggggaaccccaattataatcggttggccagaagcacaggtaaaacagcctggagcttgcaattggtgtggcaagttgggggcagtcttgtgggcagagccctcaccctgtgggatctgacactatctccgagtacacaatgttggaattgaattgggtaagaggacacccacctggtgacctctctccagaattgactgcctggctgtgtggggagaaactccccacaaatgtgtcattctctatattacacagcagctacgacagaaagaaagcaaaaaatgaaaaagaaaccaaaaaggatgattacaaagatagctctcaggcgaaggatacgcatcaactcaaaaatggttacctccttccttgaaggtaagaaaaaataacataaaaaataaaaaaggttacttctggggagttagactggggggaaaaaagacacttgttttttacactcaatactttttactctttgatttctattctatgagcatatgtaacttttataatatgtttatttctcagtccacagggagaactttgccctgtaatgaaagaaaccaaattaacccatttcatgacccagtcatggttctactttggatgctcccaagctgggaggcaatgaaatgcttcccagtaacagggaactacaagctactaaaacgtgatctagatacacaaaatacacaacataaacaaaagaag

SEQ ID NO: 233100 - DNA, 722 bp, Homo Sapiens
agccagagacgagtacatgaaaattgctttaaggacatgtttggatcctaagttaaagaaacaatcagattgtgaaataagactttctaactagagtcacctaaaaaaatgaaaggttaatctatcaaatcatgagcgcttcaatgatatggatgactagctgtgaggggtaagcaaaatagaagtttagatcaaaagcaatgtggtaaaagtgggtttggagtcaaacttggatctgattcccaactccaacatatagtgtctgttatttacccccaatgtgtcattttaacctctaaacctcagctttcttgtctatgaggacaacacttaccccacagaatcattgtagtaattaatgctaatgcatgacccagcacagatgttgaaaacagaagagccttattattatatactcactcctatttaaagatccaatgattcaatgattaaaaacaataacatgattggtttggcagaataataccaaacataaaaagtaatacatctggaccaagcacagtggctcatgcctgtaatcctagcccttggaaggccgaggtaggagaaatgcttgagcccaggagttcaagaccagcctggactttgtttctacaaaacaattaaaaattagctgggcatggtggcacacacctgtagtcccagctaatttttttttttttgtagagctgggatctcactatgttgcccaaggtggtctc

SEQ ID NO: 233101 - DNA, 692 bp, Homo Sapiens
  misc_feature (239)..(239): n is a, c, g, or t
  misc_feature (267)..(267): n is a, c, g, or t
  misc_feature (286)..(286): n is a, c, g, or t
  misc_feature (336)..(336): n is a, c, g, or t
ccctatagtggagttgacaataacactgggccaggagggaatacccccttgggcagtcaggggtggggtcaactaagaagacattagaaaatagtaaagcatgtgggctaaccatttatgctagtgtccatttttggaatgttagcatgtgaagtcttaatatcctgctcaggtcatgcccaaggtctgattttcacaatcaacaaatttgcaacttctggcataaatgggttaatacntaggtgatgagttgataggtgcaggaanccaccatggcacatgttantctatgtaagaaacctgcacatcgtacacatgtaccctggactttaaaanatttaaaatatatatgtatatatatttaatatggaattttaaaaattactaatgagttcttttatctgagtaattttgcatcaacatgcttttattatggaagagaagattcagtgagtacaaaattgcagatacatgtgtcagaagatccctgaatataataaggcttagtattctgtgtcataattgcctgtttgtattcctctctggtctttaaacttcattagggcaaggatcaactccatcttactaaccatttgattccctatgtattacacgatatatgaccaataataagccttcaataaatacttgtaaaataaagaatgttatgtaatatgtcaaaaaaaaaaaaa

SEQ ID NO: 233102 - DNA, 677 bp, Homo Sapiens
tttttttttttttttggaaaacagcaaaaaaatttttatataatctacggtttcttttaaaatagtctaaaatctaacatacagtaggcatgatctgatacaaatacaaaagaaaattaaatttatttagaaaatagtttctcagtaagatcttcaccttctaaagacttccataaaaatatgtaatacttaaataattactaatagacctttcccaaaacactgcattgtaacaaatataaagttggacttaactaaaatggtagttatgagtgttagaatgataccagatacaactaaatatatgcatattatgataaataatagcatagcattaagagaagaatgccaaagaagggatagtatcttcaagttttctctacacatcattctagaagagcagaaaatgatgacaacctaagccatgtcaatttaaataaaattactttagctaagaagcagaaaatgtgatcaaagaaaagctaatcaatcttaagccacttcaatcgtttcaaaatatactaaaaattataaatttgaaggctaatctttccaaggccgaatggctataataccaggggaatttggcaactattgccctatagaattatgacgtcactgaggcagttttttgttattagaagcttggattaaccgagatttaaataaattaaact

SEQ ID NO: 233103 - DNA, 435 bp, Homo Sapiens
  misc_feature (5)..(5): n is a, c, g, or t
  misc_feature (14)..(14): n is a, c, g, or t
  misc_feature (118)..(118): n is a, c, g, or t
  misc_feature (132)..(132): n is a, c, g, or t
actgnaaggccganttaagtggggtaaaggcccgggttttcccccagtccacggacgttgctaaaaacgaacggcccagtgcccaagctaaaaattaacccctccactaaagggaatnaagcttgcggccgncttaattaaaagtaatatcacattttttaaagttccatgtcttaggacattataatcaattttactcttcatgaaaaaactgttacataaagaaatgcactctaaaaccacaacagtgaagtacctttctcgcctagtaagttgggggaaggagaaaacagcactaatacccaatctaaaagaatacagtgaaacagtactagtaatactatccttttgagaagcaatttaaccacatttcaagattaaaaaactctcatatcctttgactcaaaaatcatacctgggaacctaccttaagga

SEQ ID NO: 233104 - DNA, 801 bp, Homo Sapiens
tgtgtaagagaaaaatgtgctaatgtgccagtgactgtaaaactgcaacatggcatttattaatcttgaagaaaagtacatgtactatttttcagtataaatataatgaacatgtcagaactatttcttaaaaacctttttattacttttgcgtgaatttatttaacaaagatgttttgtcttttgtgtaaggaaggttctagaggctagatgtttaattgtaaatatgtgaggaaactcaatgcagaattcaggataaaaattttaaaagcacaggtatttgggaattgaaatgttaagatacccagaacaacattaaatcaatgagtgaacttgtgacagtggtagcatttcaaatttcaaaagacttatcctgtgtgtgtgtgtgtgtgtgtatatatatatatatatatataaatatatatatataaaatattcagcagcaccaagttttataactattgtttgtttgactttattaatactagaatatgtagtctcagccttaattttacatttacattattttgtaattttttattactatttttaaggggttaaagagaacatacattctcacattagtgtactttctggtagaaagttgctgcaaaaacatttgaaatgtatattaacctaatgtatgtcatatatatgtctttgtgtaagttcaagactattgatctgtgaagttattttgtaaggacatacatttggtaagtaagtttgtgtcccaggaaatgtatgtgtttttaaaccctttctaaatatgcaggccattaataaataagattgtttctt

SEQ ID NO: 233105 - DNA, 708 bp, Homo Sapiens
  misc_feature (47)..(47): n is a, c, g, or t
  misc_feature (125)..(125): n is a, c, g, or t
ccccattaattgtaggtagctcactcattagccaccccggcttttcnctttaagttccgggttcgtatgttgtgtgaaattgtgaccggataccattttcacacagaaccacctatgcccatgantacgccaagctcgaatttacccctcactaaagggaccaaaagctggagctcccccgcggtggcggccgctctagaactagtggatccccggggctgcaggaattcggcacgaggttttgagagccaattcagttataatgaatggttttaatttactttatattaaagggtgctgataaataatgttcaattagcattctttgggttctgagttaaatgctatgaaactcttatggtattggagaacataaccaataattttcaggggactaaattaaatattcaatatgtttaaaaatgagggccaggtgcagtggctcacacctgtaagaccaaaatgggaggactgcttgggcctaggagttcaagaccagcttgggcaacatagcaagactgccttgacaaaaatttaaaaattagctaggcgtggtgatccatgggtgcctgtagtccaagctactcaggatgctgaggcaggaggatcaaggctgcagtgagctatggtcacgccattgcactccagcctgggcaacagggtaagaacctatctctaaaataaataaataataaaaaataccaaaaa

SEQ ID NO: 233106 - DNA, 693 bp, Homo Sapiens
  misc_feature (81)..(81): n is a, c, g, or t
  misc_feature (119)..(119): n is a, c, g, or t
ttataacaaccttccggtcttgggggaccctatcctgggtccttacgcctcagagccctgcctcaagttccttgttgtagnctcttcccccagctaagcatctgctttagggtgttagnccacataaagtacgtcatcccaacagattcctggggcaagaagaaggcctgggagtcagctttccatctggcctgggcttagcatctgaggggcttttcaccttccctgtgaaggttggagaagagggggccccagaaccttgccagggagtctgaggtgcaaggagtggaaagcgggagggacactggtcaggatgatggagtcctgttaccaaatagacccagaaagtagggctgcccactccttctcagggatcagcaagtggaatgtgcttttctggggaaataggacgaaagggccgggcgcagtggctcacacctgtaatcccagcactttgggaggccaaggcaggcggatcacctgaggtcaggagttcgataccagcctgggcaacctggtgaaacccagtctttacaaaatacaaaaattagccgggcatggtggcacatgcctgtaatcccagctactccagaggctgaggccggagaattgcttgagcctgggaggcgcaagttgcagtgagccgagattgcaccactgcactccagcctgggtgacggaataagactcggt

SEQ ID NO: 233107 - DNA, 696 bp, Homo Sapiens
  misc_feature (100)..(100): n is a, c, g, or t
aggcaaatatcccataaatccatttgcctctctttctcctaaactcttggctccaccaactcccaacaaggcctcctgcacacacaataggagtcagaanggaggaggcaggactgtgctacacaaggaagactgggattataggcatgcaccaccatgcctggctactttttgtagagaaaaaaatttaaaaaggtctcactatgtggcccagagtgttcttgaattcctggcctcaagcaatcttcctgcctcagtttcccaaagcactgagattacaggcatgagccaccatgcccagccaaaactttacttttttacacttgcttttctggaatcaggatctaaacatattgcatgcggttgatatattaagcctgttttattttttattttttcttctttcttaagcctctttattatagttccccctacattttggttcacatgccactgttatgttgaagaaactgggtcctttgtcttctggataccgttttacaaacatacttgttttcatttaataaatggctaaatttctttctatgtcaataattatacacatcattattttaaatcaccacatcccattgtgtggatagactatcatttataaagcaaattgcagtattttgagtgtttggatagtttacagagttttgctctaataataaagttgcaatgacaacccttgtt

SEQ ID NO: 233108 - DNA, 565 bp, Homo Sapiens
ttgttgacttcttgtcagacacagtgcatgaagaacttggtggcttcatcacacaggatccgccctggaacatgaagagaaaggtccgcttcaaagtatgtacaaaagctgtgacgggcagtaacgcaaggcagtgctgcaggcaggccgcaggcagtgtctgaggatggccatagttggggatttctgatgaagaagcgagccgtaaaaatccaccccatgtgagaagtgaggagggcactcccatggggtctgaggttgaagagtttgaagattgggtgcagtggctcacgcctgtggtcccagcactttgggaggctgaggaggttggattaattgagcccagaaatttgagaccagcctgggcaacatggtgcgaccctgtctctattaaatttttttttttaaattagccagatgtggtgttgtagacctctggttccagctactcgggaggccaaggtaggaggatcacttgaacttgggaggttgaggctgcactgacccatgattgtgccactgcactccagcctgggtgacaagagtgaaaccttgtcttttcaat

SEQ ID NO: 233109 - DNA, 692 bp, Homo Sapiens
  misc_feature (182)..(182): n is a, c, g, or t
tgtaggtcttgggcccccatactagacttcctgaatcaaagtttctgaatgtatgcctagggaacatgatttaaagcaccctgtattggcattcttatgtatgctgaggtcgacggaccactgccatgatcatggaaatctcatccacatcaatttttgcctcttaaaaaagcgtgtacgtntatgggacaagaatgtcatgtcatctgtgtagctccccctgaacctgatctttgttgcagtgtggagtttgctacacatgcttggctgcatggggccctggattatccacaggaacttgattctagaaataccaaagcactgttgtttcacagcagcccgacgagtaggccctgcatggaatgaggcttttgctatgtcttcctgcatggtcacctctagtcatttgagagcttccattgcatgcagatcacacatagtaggagatgccatcaatttatcaattatttcaagcacactttaaattcatcttcctcctgtctacttgagaattgctaatgttatattattccctgaccccaaggaaaatgagaaaatgggttgctatcatttccctatctatagaagccaaagccctgtctttatttttcaagtaaaagtgctctaaagaatttctgtgtcaacttgagatccttttcacaaagccaagaggcattttacttttttgagag

SEQ ID NO: 233110 - DNA, 762 bp, Homo Sapiens
ccctcaagtgcttatttgggccaataaaccgatccagaagaaaggcattgatttcttaaatgcataaggacttaaaaatcgaccagaaacaccttggcgcgtccttcaccaaaggcccctggctgtgcgagctcgcgtcattcacttcatggagacacagtacgtggattagcaccattccgcctccacttgaaaactcaggctggcacctacattaaagagtttgtacatggagacttcgggagaaccaagccaaacattgggtccctgatgaatgtgactgcagacattctggagctggatgttgagtctgtagatgttgactggccacctgctctggatgactagctttcaaatttggagacaaagagtatggttttcctggcatgatgtggacatccatggagcacatgccgtaaaatggctgtttacccaccataacggtgtcttgaaaactatttggatcatgttgatctatataattgttaatttgttgtaacatctcaggatctatatatgtgtatattttgtgttaaattgttccaaggatgtcttaggatttttctcattccctctttcacccccacaaaccaaactatgaataatgaaataattctccttaattctttcatttagagaggtgcacaaacaggacacattctctgttaacctaagaagctgtaatttcagcaagatttccctccacaagagatataccacctttaaaatcataatctaatttttgtaaattatctgaataaa

SEQ ID NO: 233111 - DNA, 745 bp, Homo Sapiens
  misc_feature (137)..(137): n is a, c, g, or t
aaggcctggggcgcgcaaaccaacttgcgaggttcccggtttggaaaggtaactcgcttggacacctttccagctcaaatctttaaaaaccaaccaggagctcaaccagtgggagttatggcccctgctcaggcctnacagcacgttaacttggcccaggtatccttcttcccacaaggccgcacccgattgttgaaagggaaagcctctccaagaactggaggtgatcaggcatcatgagaggagaacaatgcggtggaggaagtagaagaagaagacagggaaggagagatctcctctaaggggcaggcggctccctttctgcaacttgttctcttccacatctgtgtttcctccttctgtcctttgccctacctaataccacttggctaacgaaaaccttaattcatgattttttacaaatgaagtggagaagaaggtaaaaaactgtggaaggaaaaagattaacctttcttgggcccctactttgttcaaggtccatactggaggctttgtataagaggcagctagaaatcatgggaagagaatcagagggctaggtcagtcatatcacctctctgagctttcaatttttaatgtctaatatgagccttaaaaggttgttatgaggatgggcacggagcctcatgcctataatcccagccctttgggaggctgaggcaggaggatctcttgagtgccaggaattcaagacaagcctgggcaacatggtgaggccttgtct

SEQ ID NO: 233112 - DNA, 809 bp, Homo Sapiens
cttgtttaatcctgcccgtgtttcccaagccacccttttctaggaagagtggccttctggttcaggtcatagatgccatccggtgaccctagactcctttttaattctttgccaccaagtaattgaaatgttgtggatttaggacatgtcgtgtgctttgcattttcatgtgaccatggtgaaattatgcacacattctatcattgtatttcacaaagtattttttgaatgctgctgtgcatgaggcatggtgttagatggcagattgacagaaatgactaatacaggtatttggcctcaaggagtttacagtttcataggagaaagaaaaacaaaactagcaattctggtaagcagtatgtgttttggagagcacttaacttcatcagagagcatggttgaaggtgtatctgtgtgtatgagaaggtgttggtgataattagaaggcttccctaaagaggtcactcctggggttgagccataaagatcaagtagatacaagtgggcatgaagctagtattttgctgccagtcatttctgtagttaggttgcctatgtggttggagcatgtatgtattgttacaggtgtagtctgcttggcttccctaagagaatgccccagtcctggccagaatatacatgtcttttttagggtttgcaccaaggggaatagagagtgtctggctcagtacaaatctgtttccgttactccattatccagaaagccactgaaatggcattagcctacacttaatgggtggtagtgttttcacacattgcttctcaaaggaggagtatgtgaatgttta

SEQ ID NO: 233113 - DNA, 739 bp, Homo Sapiens
cagggctctgtttacatctatacatttgaaaatgaaatttttagcctaaagtttaattctcaagtccttttacaatcagtgtgtctcctgaactagcacacaggctgtagaaacagtcttagaaatcattgaaagatttgattatgaaagaatagcaaaattattttcttgacatataaaaagttggtttaatgcctttatttctctttaaggaccagaaccaggaatactatatcgaaaaattagtctgtggatttaacactgacttagcatatagcttaaagttgctcttttggtttttaacttcctccatacataagcttcaaggacaataagatgttaaaaaggaggaaataattatttttattttgacactgtgacagttttggtaactaggatcctagggagggaaatgtttgcctgttgaacttctttctgttatgagaggatttagttaggtcattaagatgttgatcacacagcttcaatcacaatatgccaagtataacctggtttcgttagaggtgtctacagtccagatgttcttcgtaataaaagcaaagtttttgaacctctgagtccaaagcaggctggttggcataatatgtaatttgaaaaataaaatcttatcttgcagcactatcagtatgttgaatttattatgtatattatttctaatatccgaaactaaatacttgattttttaatatgtgtgtttattttatgatattgctattaa

SEQ ID NO: 233114 - DNA, 746 bp, Homo Sapiens
ccttgtgattggcctcacataaaaaaaattcaaatttgtagtgaaccacaaacacatgtaaatgttatgctaaaccaaaagtatttacttctgataattaagtgtatgtagcaagatccagtcttttaagtccactttgtatgtacagaacaaatccctaccaagctaatcccaacccactaaattgatttaatgatcactgagggttgtcttaccatggtttcaaaacatttagaaggcactactcatgagttgccccatttcagcatatgatccccacttttgctggtctaagaatcatttatcagtcccactcagttatcatatcaaccagatttgttagtgactttaaaaaaacgttaatttgttacttcagcaagtagaagatggatatttttgatgcccagagtgttgtcttccccgtccagggtatctcattctgatcaaaccgaattggccatccatactgagaagtggctattgatatatttatattgagaaatgaatatgtgtttatactttctcccccagatattagagaaactgaagtgggaaacacctttgtagctaccagattatgtattctcttttggaaaagcctcatggaaaacactgctgtgctgtcttccagcttccaggtttcacgaaggcacatctctcaactagtaatatgttctgttttcagaacacacttcagtacatttgattagttcagcatttcccgctgtttgttggggtactaatag

SEQ ID NO: 233115 - DNA, 795 bp, Homo Sapiens
ctctttctctccctctttcttctccccgctctcgattaccgcctctttcttcttgtctatccaccttccccccctccgtcgtctaccgccgtgcccactcatccttcccctcctcctttcgtttcctctttccctctctctcttgtatctctctgtctcctcctctcgcccctcctaccctctcttccccgcccctctttcctctccctcttccttttctctttttgtgtccgcttcttctcgctcttctgtctcgccatcctctccgcacgcttgtcgccgctcctctcgcctcgcgtccctggtgtgcctcaacactcctctacgacactttgtctctcatctctcgctctcctgtgtagcagcgttgctgctgtctgcgctcccctgcgggtgctctttgctctcgtttttttttgtttttgttttttgtttgttttttttttttttttttttttttttttttttttttttgtaacatgaagatcactttattttcaaggagtaaggggaatggtaatggggtagatttaacagcaaatgaaccactgcacaaaactgaaaggatttctcctatgacatttagtttcacttcttttccatttaggacactagctgctgtaatctcggtactacttttttttaagttatcttccccaagcagtgttacaatccagctggaatgggcattagatatacacatcattagactcttaaaaagaggcccgatggcctctcatttaaccagaatattaaaaaagaaaatatatgtacacacatataaatatatttaag

SEQ ID NO: 233116 - DNA, 932 bp, Homo Sapiens
cgaatgataatatgtgtaaagccctattaccttgttttccgtcgagatgttcggcgccaactgtgtataattggtcagcagaaaacacttgtgtatatgctctcaagaggtgtgtaacccctagcgccgtttgtgccccggtgaaccttggccccggccacccttggaacacgtgccccggggataatattaatgggtgagggcttactcacactgaaaaatgcggcaccattaggacacagtcaccagctagttgccaccgtcccacagtcagctctaggtaaacagaattcagaaaacacattgactattgtctaattttctatcttaattttacaccatttaatctcgtataaataaacatttaaacagaggtgagctcataaggctatcaaatcttagatttttccttttaaaaaatttactatgataaccaataatcttcccatgttaaggttattatatgcatccattttgagtcatataatagatattctgtcaaatgagcataccttaatttacttagccactccttcctggaaatatccagtgcacacctcccaccaatatattctttaataatcaatgaaaacattttgtgtaaacatttttttgctctcgcttccttttgttcctttaagactctcagaagcgggcttagtgagtcaagagatagaacactctcaatacactgccaaattactccctctgcacaagttgtgccaatttctaatcccacaagcagtgtgtaaaaatatttactatgcctcatgctctgaccagtactggggatcatttaaaaaattttttttcctttcatttttaagtttaaaaattaagaacaaatactttgatagatttcttttataactccttaatccatctagtagtttgcaagtcatgaactgacaatcttcgttcacctcaagtaa

SEQ ID NO: 233117 - DNA, 725 bp, Homo Sapiens
gactaggtctgggaaattttccttctcttttccgtgaaaggtctttaaaatcaaatatagaattagattcttcaagtgttttttttgttttttgttttttttaaatctgtagaattctagcaaattggttaaaagtcaagttcatgggagatgaaggctcagtggatgacacatccagcgatgctggtgggattcagacgctttcgcttttcaactcacttagcagcaaaggggatcagatgatttctgttaacgtgtgtataaaggtgaactataattactttgtgtttacttctgtgttttcattactttcacttactcccagatatcactggaaccatgcaaatactgcttattccctaatgtggttttgaaagactgggaggctcagaagcaagtattatgtctgtccgtacatgtcgtttaaaaaattatttttttaagccagtcaaattgagtagtgggcaccaagcccagcctgcttctttactttttctgttttaatactatatattggatttcctaaatgtaatatgtacacaaaacttttaaaaaatgaggaaatgtaaaagaagtataaagatgatgataagagccatccatgctcttgccattctgaggtaacagtaacttcttggtgcaaattcttcccttttcctgggattacaaagtcacatttcatctactggaaattagtttactgctgctgttaccttcattttcat

SEQ ID NO: 233118 - DNA, 711 bp, Homo Sapiens
tctcttgagaccggaatctcactctgtcgcccaggcttggagtgcatggcgcgatcttgccttactgtaatcttctgcctcccaggtcaagcgattctcctgcctcagcctcctgagcatctgggactacaggcgcccgccaccatgcccagctaattttttgtattttcagtagagacggggtttcaccctgttagccaggatggtctcgatctcctcacctcgtgatctgcccgcctcagcctcccaaagagctgggattacaggcatgagccactgcgcctggccttgttttactttttaaaatttctgtgagctgctctagaaaactaaaggacgaaaactttactgtcataattccaagttcagtcagggatttctcagaattgaggtgtgcagcatccagattcccctttatgtggatagggatccctgtgccatgtcttgcacttacctaagaactataggaattctccatgtacctcctacagtttttctagcagtgttggacaatggatttaaaggttcctgagactttgttaaatttctcataattccagagggaaggccaaaatattgagaatactcaatgataggatgagtttccactctacttccttatcctcaaggcacacaccagagttccactgggtgaggacagggaagtaggatgtcccaacaccctctgagggttttcatgcattaatcccg

SEQ ID NO: 233119 - DNA, 410 bp, Homo Sapiens
gtgaatcattatttttattaagtgatgatgtttaaaatttaggagcaaaacaggcatttccaacaattcaattacagatgccattttattcagctttttctgtcaaactgaattgttcattccaaatccttgcttttagagaagagctgagtgtgtaggaaaaaaagagggaccacttgaagtctgttgcaagagaaatagagatcaaagttcacaacatacaaagaatttatttatgcaatacaggccttttctcaaatatttttcacagaattccacacagtaatctactagaaaagtagaattatacaccaccaaataacattgtttcgtttcttagtacaaattgctaatcaaaaggaaggtggagatgatagtttaataacaaatagtaaaacaggtgttgctga

SEQ ID NO: 233120 - DNA, 907 bp, Homo Sapiens
ttcgattttcttaaggcttgtctttttctagtttctcttttttttccctatcttctctatcccctattcaactggtctaagcttttttcctttgcctccctttggatgtactcgtggatggaaccaaaggccatgaacgaaaccatgctgtagaagggcaccaggaagattaacttggctaaagagttttactatgagttcatcatatcggcccataatcagataaacgtagctaccctctgtatgcaccagagcctgcttgctggcactttaatgattccatcaataccatgtagattgaattagcaaggagaagtaaacctttcatttctttgccagactatattgggaaatgaaaatccgtcattacttttccttgctagcaattgttcgaatatctgggataaagaaatacatacaggaaaatgttagggcagaccaagtattaaaagctaggacagagcaggacaaaggaggaaggataattctacttgtttggcaaagttacatcagttgtcttactgacacatcaggtactatctatagtggaaattgaggcccggagaggttaaatggcatgccagtgtcacttgctatttttcagaacaaaattagaatccagatctgaatcctggtgcagtgttctctcctatgccctactgggctttagtgggctaaagttctgaagcaagatgttaagggctaattgaaatgcgtttattctcctagattctttttcagcatagatggaatctgaaaagcactcagatatttagtgtgtgcttccttcagccctaaatacagcattagcatcaaatcaagggtacatttgtaataaacctcagcaaaccttacctgaagaaccttttaagaaagtacagatttccaggtcctatcactagagatg

SEQ ID NO: 233121 - DNA, 621 bp, Homo Sapiens
taccagtacaaaacttttattgcatcccaaccaagctaagatgaatacagaattgtttcaacagaagttacccattatcataattcaagacaaaatcagccggcaattacatgagttggaaaaccaactactcttatgtcacagtctaccctaaagctccaacttatgtcagaatttaaaatacacacacatatacacaaccctgtggattcctcctcatttatgtaaaacctacttttgtgatgatctgctattttcttgagtcttctggaatgaacactgtagccccactcccggataaggagaagataccacttccagggcttagcactgcccctggcttgaagcagatactcaaatatttgttgggtgaatgaatgattgtctgctgatagggctgcccatcaagcctcataaagaaaaaattcagaaaaaagcaactttatagagaaaataggaaaaagtttaagagatattttgctcacttgaagaaatcagcatttgttaaaggtgaagactggattgactggttcatcaagtggcttagacacaactgactaagtgggctataccttatcccacccccaagttaaataccaaacaggtatttttttttttcgg

SEQ ID NO: 233122 - DNA, 552 bp, Homo Sapiens
gaggagcaagggaacagaaactacattgtaacctgtttgtctttcttaaaactgacatttgttgttaatgtcatttgtttttgtttggctgtttgtttattttttaacttttatttcgtctcagtttttggtcacaggccaaataatacagcgctctctctgcttctctcttgcatagatacaatcaagacaatagtgcaccgttccttaaaaacagcatctgaggaatcccccttttgttcttaaactttcagatgtgtcctttgataaccaaattctgtcactcaagacacagacacccacagaccctgtcctttgcctctattaagcagaggatggaagtattaaggattttgtaacaccttttatgaaaatgttgaaggaacttaaaactttagctttggagctgtgcttactggcttgtctttgtctggtagaacaaaccttgacctccagacagagtcccttctcacttatagagctctccaggactggaaaaagtgctgctattttaacttgctcttgcttgtaaatcctaatcttagagttatc

SEQ ID NO: 233123 - DNA, 680 bp, Homo Sapiens
  misc_feature (6)..(6): n is a, c, g, or t
  misc_feature (79)..(79): n is a, c, g, or t
  misc_feature (166)..(166): n is a, c, g, or t
  misc_feature (173)..(173): n is a, c, g, or t
agaacntactttgttcagcatgagtgaactcatgccagaaagaagccgttggtgtgtaacgaatgtgggacaacgttcngtcagagctcatgcctttctaagcatcagagaattcactcaggtgagaagccctatgtatgtgattactgcgggaaggccttcggcntgagtgntgagcttgtccgccaccagagaattcacactggagaaaagccttatgtttgtcaggaatgcgggaaagccttcacccagagctcatgcctttctattcaccggagagttcacactggggagaagccctacagatgtggtgaatgtgggaaagcctttgcccagaaagcaaatctaacacagcaccagagaattcacacaggggagaagccttactcctgtaatgtgtgtggcaaagcttttgtcctcagtgcccatctcaaccagcacctgagagttcacacccaggagacactttatcagtgtcaacgttgccagaaagcctttcggtgccactcgagcctcagccgccatcagcgtgtacacaacaagcagcaatactgcctgtagccattgggtggcagcagagtcccagaatatgagaccgttactcggatgttgaaagttggaaactatcccattgcaagtttctctccaaataaatgcatctaaagattgaaaaaaaaaaa

SEQ ID NO: 233124 - DNA, 523 bp, Homo Sapiens
cttgcaagtgatgaaataaccacagtccggaagaaccttgaatcccgaggagtagaagtagatccaagcttggtaataaatactgctgagaagcaggaatctgcttccttaatatttgtttcttgcagtaaatgttactacatgtgttagttagatatttaagtgcttaatttgacttttgtcacgtgtacatttgctgacagtaaaagcttagtcattttgattgcgtgaagagaaggaattttattctcagtattgcttttttaagagtaatgctttaatttgtaaatggagaaatttactttggcaagttcaatggtcaacagtcagttcatgcaaaatgggatgaaaccgacctagacctttgccccacgtcacgctgtttcagattgcaaaatagaatttctgtttaaaaatggcatatatatgtgtttttgtgtgtggtttacagtcaaatgtaactcaattagatgtgagtggattcagaaaaaataaaaatgttgtttttattaaattggaaaaa

SEQ ID NO: 233125 - DNA, 597 bp, Homo Sapiens
aagccctttacctcctctcaaagacctcgacctaccagcccattttctactgacagtaacaccagtgcagccctgagtcaaagtcagaggcctcggcccactaaaaaacacaagggagggcggatggaccaacaaccagcattgcctcatcgaagggaaggaatgacagatgaggaggccttggtgccctatagcaagcccagtttcccatctccaggtggccacagctcatcaggaacagcttcttctaagggatccactggacctaggaaaaccgaggtgttgagagcaggccaccagcgcaatgccagcgaccttcttgacataggatatatgggctccaacagtcaaggacagtttacaggtgaattatagtaaatgagaggagacatacaaagctgctctgaaggaccatcaggtccggactcatggaagtgatgactctaaacagtgcaatgaacaatttatttatgtactattaaaagaactgtaaatgcaatgtaaagacacacagccacacatatcccacagatattttcattgtgttcttctcttaagtacaccacccaccttaactctttcttgtcaggagtatat

SEQ ID NO: 233126 - DNA, 661 bp, Homo Sapiens
  misc_feature (129)..(129): n is a, c, g, or t
gtgctaggctacagcaagaagagtctcaagcgcgggtgccgcaagcgcggtaacgcggagtcccatcgggggtgcccgatgtgccccgacgattgccccgcgcagatgcagacacgtacgcaggctgangggcaggggcaggggcgcggcctgggcctggtatccaccgtccgcgccggggcgtcctggggatccccgcctgcctgccccggagcccgagctgcacccgagccgcgcgacccgcctgcgctgttcgccgaggcggcgtgcccggaagggcaggcgatggagccaagcccaccgtccccgctccttccgggcgacgtgctggctctgttggagacctggatgcccctctcgcctctggagtggctgcctgaggagcccaagtgacaagggacaactgacgccgtctctgtgagcaccgaggctttttggcctcagcaccttcgaagtggttccttggcagactgcctttcctggaagagggcacgggcgatcccgacgggggcattcctgcgggtgagagccgtccccaccgcggcggcccttttcagcccctccctccatggagggacccatagggctagacactttgaggcaagcaggaggctctgcctaatgtgaatttatttatttgtgaataaactgtactggtgtc

SEQ ID NO: 233127 - DNA, 677 bp, Homo Sapiens
cttaagagaatctttgtgagaagatgtagatattggcttcataataataaagtggaatttgtggtattaaataaatggaaaaaaagacacacggtacaaattaaaagttcttgagatgtttgggctgaccatgaagggatccattatctgaagagtggcttaagatttagaaggcatagctctacagtctctttgtcttctaagggcagggcatcttctatcttctaggacagggtacagtaagccttaccaaacatgtaagacatgttatttggggatattcagcattccttttcccttcctaaaggtactcaggtttctttctcagaaattgtatatattcatccctgaaaggtctgagaaaaaataaaaaaaaattgtgtatagttttggtgagatcgtccatccaggaacctgtttccccatattaaagtcaaaggaactatactgttttcactgccaggctggggactcttagtacctaagtttggtccattctactctttttcatgactttgaatcttgagcaatgactacagtaagagtggggttcattcatgtcatcaacagcatcccagctgtacttgttaaaagtacctgtcattcttagttcccacccagtcttaatcctgttctccactttcacaacacccagcctcgacctagcctatcccgtt

SEQ ID NO: 233128 - DNA, 431 bp, Homo Sapiens
  misc_feature (22)..(22): n is a, c, g, or t
  misc_feature (427)..(427): n is a, c, g, or t
tgaaacggactcttgctctgtnaccctgggctgcagtgcagtggcgtgatcttggctcactgcaacctctgcctcccgggttcaagtgattctcctgccccagcctccctaagagctgggattaaaagcgtgcgccccaaatgtccgcctaatttttgtatttttggtggagatggggtttcaccatgttggccaggctagacttgaactcctgacctcaggtgatctgcccacctcggcctcctaaagtgctgggattacaggcatgagcaaccacacctgtccccttttcttttttcaaagaagagttttcatgaccatttgcttttcttccaactgaccaatatgttaaacttagcaacaagtttatcttggagatccatatttccagttgattaatgagtagaagttaactgaagatttgcancttt

SEQ ID NO: 233129 - DNA, 891 bp, Homo Sapiens
cttatgatgtactaaaccgaaagtgcactcccttttccggttttcgtggtccaaccccagagtctccaaaccaagctttcctccacgtttaacccccgtcttttaatctcctttgggccttttacaaacggggcaaactgcccctcgggattttagcccccccctttgtttgttttgtttgtttttttgtaaaacccaggacaaagttaattttgcaaagaggactgcacaaaaaaaagaaaaacctttcggtatgtaagtgaaaaagtgtacgaattccttctaccaaatgtccaaagtgtgtaatacaagtctcagattcactgacataattattgccaagcgatccgtgcatacagtacagtgggggcttgtacacacctcttactctggtataggactaagatttctagtactgtgggaagggttgggaaatggctggagaaattaaatagatcccagttctaattacaacccaggtagagagacacccatcagggaggtgtggagaaggccatggctgagttaaatcttcagcaggaagctgcagagaaaactatccagctcagcagttggacccaggctggggaagtgtctgaacaaaacaaggaacaaaaatgagtgggtgggatgagatggaagaaaccccaaagaacctaaatacgtcacacttgaagtggcacagtggtatatgagaaagtgcctgagtgggcatggacatcgaagaagtggggggacctctggctggatgcctgaaccacaccctcacagggaggtttggcagatccaaagacaataaaggacctttcaggtcaaaaagaggggatgtaggagaataaacagtgctagaaatgtttcaatcagtttgtctctgcatacatataaattata

SEQ ID NO: 233130 - DNA, 406 bp, Homo Sapiens
  misc_feature (37)..(37): n is a, c, g, or t
  misc_feature (58)..(58): n is a, c, g, or t
  misc_feature (63)..(63): n is a, c, g, or t
ggtgtgagacgccgtccccggccctaaccaatttacnttatacctattaaggggtccngatantttccaaaagaaaaaattaaaacagcaaattataagaatataaaatggaatatttggctccctgaactagtcctcacagcctaaattagttttgaagtgtaagtcgaatcctcagcatggcctaatggaactgtttaatttgtgtgatatataaaaggtgacgtttggaaaatacaacttaaggtatgctggagtcatgttcaaataaatgtttagaattcacataatgaaaaggaaaagaagtttctttaacttaaatcttcaaataatgtaccatgtcccaaaagcataacttactgcttcagtgtaagcttcactgttctgttcttcatgagcttctcag

SEQ ID NO: 233131 - DNA, 549 bp, Homo Sapiens
caagcaggctcatggactagtgcttaccataacccaggtgcaccagcaatctgggatatggtctcccacagaagcactgcatacagagaaggtgcatttatttattcagtagacagcaagatttcccagggagaggaaaaccgccctgccccacctctaccctggcttcccagacttctaaggtctttattcagcagtgactttcatttgatgaggtggctctcctctctcacgtcaccctgtcggccaccttgaccaataggtcaagggagacttctgccagctcgcttctgctctgctgatggcctcatcctgccactgtggcttttcaggctcttcctcctcttgccctggcggacgtggggccccactctggctttcttctttgtaccaggccctcgcaatgtattcttgctgcttgtaggagaagccagcttcttggaggagcctttctcagacaaaccctgggctgggccagaagctaaggttgcactggaagattttctagcagctttctctgattgttcctttaagcaagtccaagactgt

SEQ ID NO: 233132 - DNA, 1000 bp, Homo Sapiens
tttttttttttttttttgagaaagagtctcctccaggctggagtgcagtggtacgatctcagctgactgcaacctccgcctcccaggttcaagtgattctcatgccttagcctcccaagtagctgggattacaggtgcccaccaccacgcctggctaatttttgtatttttagtagagatagggttttgccatgttggccaggctggtctcaaactcctggcctcaggtgatccacccatctcggcctcccaaaatgctgagattacaggtgtgagccactgagcctggctggagttttctcttatcatagaagcattctgtgtttctatgagttttaggcccattcgatccacataaaaaccgcagcaggtattaccacctccctcttgacaaacgggggcatggaggcacaggcagttcagtgattcttttctgaagatcacgtggtgactgtgggacgtggagctcaaacccaagtctgtggattcctagctggaggcaaattctaccacatcacatttttaagtacacgtgcctgaaaagcttgccactcaggcaaaatcacaataagactcagaatccgtaagcgactaaatttgcctggagtgacattatttttgtggcgggtgttgagactgagaatagagttaaatgttaggaaaaaaattctgaagtttactgatacattgcttggaccccaaagtccctgcactccttagacaagtgttggagggaaacggccacatcaggggtgaagtggcatttatccactagtatactccaagatgtcgcgagtccctgaatcccccacatctctgatttggtcttccagcaactattggaataaggctatatgatttgtgcaacaacaatgaaaagaaggcaggaaagagggaaggaaggataggaaaaaaaaaaaaagaaagggaaagaaaaagaacaccgtactgcgaccactagttattaacagcccagcctgtggtacacaaagctgacagt

SEQ ID NO: 233133 - DNA, 1000 bp, Homo Sapiens
tttttttttttttttttttttttttatgagacagggtctcactatgtcacccaggctggaatgcagtggcacaaccatgactcactgcagccttgaactcctgggctcaagagatcctcccacctcagcctcccaagcagctgggactacaaggcatgcaccaccacacctggctaatgtagagtcaagagtccccagctatgttgctcaggctgaagacttctgagaagtgtaaatgctaagttcaaagggcatgtacattattaaaacatatctgcattataaataaaagggggtctttattatttgcatattcattaaccaagtccttgcagctaccaaattatatagagaagtgaaagtcatcccaatgtgaaaacattcactaatgagctatttataaaaagttagtccctctttgcttcttaagtacctgaagccaatgtatttatcctgcccactgtattctggtcttctgttagtctctatggttatactgtaagcatatgacaaatgacacaaatagaatgcaacttaattgcaataatcacaaatcttgcaaatggtggtggatttgatgaagttgataaataatgctagaaaactgctcaaaccttaagcaaaagctctgaaaagtgtgggtgacagactcagaccagttaacaataaaaggaaagttgaggaggtgatcaccgatagatacttataaaaaagaatgtgaatatcaaaatatcaagaggccttctgaaaactgatgaagccctcaaatatttttgcaaaacttccttctatgatcacgttgcaaaaatcaaatgagaaaattattgtaagatacaaaatcagtttcacttcaaaaacaacttaatttccttgtcagaattaatatatctttaaaattatgaacatgcttttgtcattttgttccattttcatgattaaagttccattcaggtttcccctatcccccagtgtccaccacatatgaaattttggtccccgt

SEQ ID NO: 233134 - DNA, 455 bp, Homo Sapiens
  misc_feature (5)..(5): n is a, c, g, or t
  misc_feature (18)..(18): n is a, c, g, or t
  misc_feature (36)..(36): n is a, c, g, or t
aaccnggcccctaaccgncctccatgggaaaaatcntcccccaacttgaagtaactggggcccgttgtgaacccaatcaccctcccaagacacctacagccttcctcaatgaccctgtccattgggtaccagtagcgtaaggaagcctagtgaagccttagtgcggtacagttcatgcctgaacaatcacacggtgagtgattttagctttttttcccggccctcctaccaccccacacatacactttctcgacacataaaggagatatgtaaactgaggtcccgggtattgctacagcaaagacggtggtcctgattcccacgatactgccagattatacttacgtcatcagagtggctctttgagatccagatgatgtgagttatggtgaagtcacctactgctactcatactgcagataaattagtagtagtgacaacggtagcctgccttc

SEQ ID NO: 233135 - DNA, 427 bp, Homo Sapiens
  misc_feature (2)..(2): n is a, c, g, or t
  misc_feature (33)..(33): n is a, c, g, or t
  misc_feature (47)..(47): n is a, c, g, or t
  misc_feature (55)..(55): n is a, c, g, or t
ancccgtcctcaaaaataaaattaaaaatcaanggtacctccaactnatgttttnataaaaacctttgggaaactagacaggctcctcaataagaaccaaatttgagagaagagactacagagaggacaggtgtcaactgtaaaagagtaatatcatattaatattgtaggctgcagtatccagtggttttctgcatttcaacaaatgttcatttctgcaaataattttatttcgcaggtttcttcctttggatacaatgttcaaatattgtgcatttactccttttgattcagttaacaaacaagtattgagcacacctacaagcactagtcaatgttaaggttgtatagattcggtagcaaagttcctgcccccatggagcttacagtctaatggacatcaattctggcaccttcatcagtatac

SEQ ID NO: 233136 - DNA, 447 bp, Homo Sapiens
  misc_feature (6)..(6): n is a, c, g, or t
  misc_feature (257)..(257): n is a, c, g, or t
  misc_feature (440)..(440): n is a, c, g, or t
  misc_feature (442)..(442): n is a, c, g, or t
  misc_feature (445)..(445): n is a, c, g, or t
  misc_feature (447)..(447): n is a, c, g, or t
tggtgnaagccctacccccggccctgcagactgcctttccctgcgtgtcctcacacagccctttccctcagccccataggaggggaaatgtaggaggagccagagggagagggaagagcaggtgcctctgtgtctctccctcttgtataagaacacccagtccaactggacccgggcccctcccttatgatctcatccaaccttgattacctcccagaggcctccatctccaagtactatcacatgagattagggcntcagtatatgaattttaggggaatacagtttaatccataacatgtaaccatagtagcatctttaatactggggttattttgcacttcttttgtatgtgagagagaataaagaacacacctttttaggtatttatacctgaggtatcattctaggaaatgagaatgagtttgtgaaaaataaananatntn

SEQ ID NO: 233137 - DNA, 594 bp, Homo Sapiens
agacatacagattcggatttggcccggtaccggggggcccaaaaaaaaaaaacccttttaatttataactggaatttcaacatgaatgttaatgtagtttgggttcctgctctctctcgccctctttcttttttcctgagagagtgattttgtaccatcagactgttttgaagttcttagtcattttgtttctttattagtaaaatgggataatggtacagcatggatgtgagcattagaatactgtgatttgggaaaagaacccagtgctgtaacggaagtctaatagctgctcagtacatagtaaatgctatttcaaatttagattaaagaaaaaacatgttcacggtctatgcaggcagtgtagctctatatgaaaaggaacctattgattaaatacttagaaagtttcaaaaagcccccttttaaatcctaagatattggcattcatgtgatggatgtcttgaggcagataacacagttgaatctttttagtggaagaaacacagatcttttcacctgaagttgtacttgaaaaatattgccataattaaaatatacagtgtagttatcaggaaatgtaatttcttgtca

SEQ ID NO: 233138 - DNA, 512 bp, Homo Sapiens
agccatacgataccatagaaaatacatataatttattagatgggcttaaaatcaacacaaatccatttttaggcacttcttgagtacagactatgggaattttctaccaaagaacaggatatctagcaagcaacagcataaagatttaaactttagttttcagaacaatacacaagggctagacattgataagaaatactgcataactaatccaagtgtatcctggaacatttcttcacaatctgacaggactttagggttaactagaaagttactttttagcatccaaaattgtaatttctggctttctttcctttttactctattatcatggtcttaaaataatctatcacacattctttgagggagcatgatatacaagttttatttttgtgtaagtggagcttcaaagacatatttctctatctgcatttacagtctatgcatgacaagtgattattttgatgtctttaaagcccatttcaacaggttattttttaacgacaggcttt

SEQ ID NO: 233139 - DNA, 821 bp, Homo Sapiens
ttccccttttttcatgaagcttttccatgacaaacatcaacttaaatcctcccttatcctgtcccaatttgatgaactttccggtcatttttcagatcctagccatttccatcgacccaatttttaaaatccaggcacaccaaagataaatcatgattacactgaactccacatgagacaaagcatttcagatccccaagtaattgtacacaccttcctacacacatatgacaaccatataatgatccatcaaataataaatttaacagaaaatgtctcatttacataataatgttcacacaattatatgaaattcattttgcaatgatggataatttaagctttcatcatctaaagcttgtcatttttttttccaagagaaatggattgtttcatttttaatgagtgcataataacacatttagtttcacagatgtaaaataatgcacacaaaaaatgatttgaaatttgcagaacaaataaggaaacagtactagaataacccaaagaaacatgtactatatagggcttttcttctttcaagggtcaaatctgtcaaatccagcgtattgtttccatttaagcaataaaatcaatatggtcagggaagcaagtgcacagaaattttaattagttagtttctttttctttttttaaatttctgtctcagacaagtactgttggctgacaagaaatatggcattcctcacctaatacagtaaacaataaaacaaacaaaccctctcataatcactactagacagcctctagacatacattcctgcaaggaattgtaagtgaaaggattggatgccactttg

SEQ ID NO: 233140 - DNA, 566 bp, Homo Sapiens
aggatcacaggctgaccactgcacccgccatcttcttgataattctatattgcctagaacatcctcttcttgtgttaacctggtcaatgcctacttactcttttttcatccacgagacaaatgtcggctctattttctttatctttcctcagaaactgcctaggccagttaatttttcttacatctgttcccatgagactttatacataactttattatagtatactctccaccatgttataattgtttagctacagaaatactacaatagagtgtgagatccaagaaatcattaatgtaaggtgatttttacaaaggaaaatgcttttccttgggaaagcagacaaattacatcttataatctttagaggaacaaatgctgcccttaaaaatatgttttcaaaatctttacaataaagtaatataaaatattatgataaaatatttgcaggtgaaatgatgaatggatatacaagtttaaaaagttaataaaggcccttttgcagtgataaagagaaaggtatgagaattcttcagagtctagagtataggtatgagggcaaaac

SEQ ID NO: 233141 - DNA, 368 bp, Homo Sapiens
  misc_feature (6)..(6): n is a, c, g, or t
  misc_feature (15)..(15): n is a, c, g, or t
  misc_feature (23)..(23): n is a, c, g, or t
  misc_feature (56)..(56): n is a, c, g, or t
  misc_feature (59)..(59): n is a, c, g, or t
  misc_feature (78)..(78): n is a, c, g, or t
  misc_feature (146)..(146): n is a, c, g, or t
ccaagnaaaggaccntggtgaancggtcccggaaacttgaacacactcggagctgnaancatctcaagaggtggaaangggccgggcgcgtcggctaactcctgtaaccccagctctttgggaggccgaggcaggaggatcacttnaggctaggagttccagaccagcctgggcaacatgcgagacccctgtctccaaaaaataaaaataaataaaaagccgagagtaggggtgcgtgcctgttgtcccagctactaggaagtcttgggggtgtaggggatcgcttgagcccaggagtttgaggctgcagtgagctgtgatcgcaccactgcgctccagcctgggtgaggagaccctgtcctaaattt

SEQ ID NO: 233142 - DNA, 547 bp, Homo Sapiens
ggacatgttccaaggctcttttcatattatgtcagactagcaagtcttgcctcagcttttctcccaacaattggactgatgggttgctccactgggcacaagcatcatgggttcttaaaacaaggccctgaacaagcaccaaatatgttcctgtcaccacactccactagcccttcaactataaacatgcataggagtcacctgggggccttgctaaataaaatgcagcttctgattcaatagtctcaaacaggaccagagattctgcgtctcttgttgagttcccgagtgaggcagacaatgccagtccacagactcacattttgagatacagcacttgggccattgtgttccaatgtgcttgataacctggagcacctattaaatatccaagttgccaggactttcttctggaaatcttaattcagtatgttttgtttggagccttggacgtttgggaaaactagaatttctttctctccctttagacaaaagtcaactactgctgaggcatgggcttaataaatgttgactaaaatatccaact

SEQ ID NO: 233143 - DNA, 663 bp, Homo Sapiens
  misc_feature (38)..(38): n is a, c, g, or t
aaaaaaggaaagggccagggcaagtctcatgggaaganacagaagaaaccagaagtggacattctcagccccgcggccatgctgaacctctactacatcgcccacaacgtcgctgactgcctgcatctgcgaggcttccattggccgggtgctcccaaaggaaagaaagggagaagcaagtgacagcatttcacaacacatctctgttacagacaacaggacctggggaagagaagtcaggataacacaactgttgccagcaacatagactttactccagacgacttgagatgcaaattaagtgtgcttttctgtgatggtggaagatcaggaaatgcaccttacttcctctgttatgccagatatggttagccactttggttttttaggagctataggatgggaaaagcctgagtaattcctacacagtgtgctgaaattaatagaactttcagaaattattataattctgggtcaggattaaactttgctctcagaaggcagttctagttgcattaattgttttcttttgccaaagagcgtttgtcatttagagaagacacggcaagaaacactgggtttccttaggaacattcctctcttgggcaccatttcctttttttttttaatggaaaataataaatactttgtttctaaaaaaaa

SEQ ID NO: 233144 - DNA, 530 bp, Homo Sapiens
taaagaggatgtggccgggatggaactccatcaccatcctgaagccacagcagaggtggcaggtaacagacagtccagagctgctcactgtcttcatacatgacgtgaggacggtggttccagtgcgccgcaaggtgggactgaggttcagagttgagaggaaacaataggaaggggctgagatgctgcaacaggtcacgggctgctattgtaaacacttttttaaggataggttcaaataagagcttcttggcttggagaactgaggggaagtacgactaacctaatattctgaggacaagaaagacatttaataccacatgactttttttaagtaagaggtctcattttctaaataacttgaaaatagaggctctccaagggttccgttacaggagagaataatcagaggtgaagaaaacccatttagagctgactccctttcccagggaatgagcttttggtcctcatagactggcatcctgcagacacgcagagagaaagaataaagcctgcctgtgcattgttaa

SEQ ID NO: 233145 - DNA, 501 bp, Homo Sapiens
ccattccttaggattttaaggtcacattttattcctggatgctttatgtccccacctccacctgagccctcatcctctgttccctactatactcccaacttctactctttgttttatccacctatccctattacctgaccctttgtcttccctgtctcccatccttggggggacatgtagccctgtggtcatggttctgatgacatcatcagggcagcccccctgcccaggtattatggcctgtcagcattccctgtgccctccaaaccttaggcctagaatgcggagctgccaacataacattcacccttttgaacagatggagtcaggcacactaacacagccttctgtcctcaataacacagccattattgccacttgctcagtcgtcaatgtaaaccctcagagtcagctgaactattttaggccaaacatactgtttttgtaaagtatttttcattaataaatctataagacagttctatttaaaaaaaaaaaaaa

SEQ ID NO: 233146 - DNA, 592 bp, Homo Sapiens
aaggaggatccagctttcctgcattactatgacccttccaaagaagagaacaggccagtgggtgggttttctcttcgtggttcactcgtgtctgctctggaagataatggcgttcccactggggttaaagggaatgtccagggaaacctcttcaaagtgattactaaggatgacacacactattacattcaggccagcagcaaggctgagcgagccgagtggattgaagctatcaaaaagctaacatgacaaggacctgagggaaccaggattcctccctcctaccagatgacacagacaagagttcctggagaatgggagtgttaagacttttgacttctttgtaagttttgtactgctttggagagtgaatgctgccaagagttcctcagattacaaacagcagtggtgccatttccttccccatcttcatgttacaaacctggaaaggctagaacagccattaggcgtcagcatcttgacttttccccagcatcacaaacagccatttcctcgggcaccaaagtaggttccctttgttggaacaattacactggccatgccataatgttgaataaaactctcttcttat

SEQ ID NO: 233147 - DNA, 469 bp, Homo Sapiens
gcataaaacggcaatgagctcagtaaacaaccccttcccgtgatcttcgtggcttcccgcccagacgtgtgaccaagatagcaaggagcagtctttaaggcgacacggcagagaggcagaaaaagatgggccttaccggttagttaagaaaaaaagaggacctgttgcctgtccctctagctttgaactacaaagtggaggggaagtttgtctggattttcctgtagaactgagggcaggacatgaggctctgcctgcagtcagcaacttggaatattcagacttcagaccagcatcacagattataaccctccgtaaatcatctgcatcccagctcccatcaaaagccagcctgaaggacccatggacacgtgactccagtgttctcaacaacatcttaagatcaagttggtttgcacaacatttgcatctacttgggacaaagcaagaacaataagggcaaaaaagt

SEQ ID NO: 233148 - DNA, 519 bp, Homo Sapiens
ccatcatggcaatatatgcagagtttaaatgaatgacagaaatcttgattttagactgtatgttgtgctgttttgagtacactttatttcggaaagtgatatttagtattttctatacactctgaaatcatgagcatttcactttttctaagtcaattatttcataaggattttattaatagatattggtaaatagaactttggaaatcttaattcagaattcttactatacctgagtcttttgtaagctatagttttatgtacaaccttgtacagtttttttgacatacaattcagaactttgtttattctcttggactttgttctggccaatacattttttttaaatctttaagaagaactgtgattgttttagtgggtatttttctaattaaatgaaaacttgtataatggtattttagagaatgccagtaagtgcatgtttcaagttaatgtttttctcatcacttgtatgtttctaacacagcatgggactttaataaaaccatcctggaaact

SEQ ID NO: 233149 - DNA, 472 bp, Homo Sapiens
cggatcagaggctgggggagccgacagtctgccttgcagtgaaggaggcatgtgatcaccatcaaagtcttctgctctgggaaggatcacacagtcgtccttcagcctgcctggggcgcagtgttttctttcctcagaccgaaactgcatgaagagagattccagcaaggaagatagagcatgccccgtacactcctctctggttttcttcctcaaaggaaatttatgcatgtaatccacaagccgaagaacccatgtttttctttggaaaaggctacgccctttcagggtttccttttctcggctgtgttgccttcccatcagaagctgtctcttgccctccccattatgggatgtgcgaaatgaaggaaaacagagacactgctgggcatttgtctccatgagttgatccaatcagaaatctttgacttttcacacctgtgtccaaaaatgagtgaaggcaacaacacag

SEQ ID NO: 233150 - DNA, 552 bp, Homo Sapiens
ggcttggtctgcatgtttaatgatgtgcttgtatatcgattagctgtgtcacttttaaataagaagtccacacaagcaagccaaatttttagatgacgaagtccataaataactagagaatttttgttatctgttgttaagttgaaatgtataatcatttatcactaaattgcacattgcctttatttatttgtgctctgtttttggtttacagtgtaataatacctcatttaaaaaataaaaaccactactgttacattttattaatttaaaaagctagaaaattcatgtagttactttttttacatatataatctgttaatgaattattgatttttgtatctgccccagtaaattaaagcattacacagtatttatcagtattttttaaacatcctgtccttttttaaaatctttgcttagtcagtcatatttttgtctgtatgattagaagtttttacgtccttccttttttgtacaaatctgtattgtattaatttctggatgcaatttttcaaatattaaaattatacagtcaaaaaaaaataaaaa

SEQ ID NO: 233151 - DNA, 642 bp, Homo Sapiens
tttttttttttttttaaacagggtctcactttatcacccagctggagtgcagtggtgcaatcatgactcgctacagcctcgacccccaagggctcaggtggatcctcccatctcagcctccccagtagctgggaccataggcgtgccccaccacacctggctaatttttgtattttttgtagagacagggtttcaccatgttgcccagaccggtcttgaactcctagactcaagcaatcctcctggctcagcctcccaaagtgctgggattagaggtgtgagccacgtgtctggcctgaaatacttagataccagttgataaacagttgtgccttacactacctctccacctccaaatgccaacccctttttgttccagcctctcttccttatgttccaaggatctaagagttaaagtgttaatactctgcatacaaaaggtagtcttgaggaccatgctccagaactatggctgttgtccaccctgacttgctggtgcccatgccaccatgattgttattaagtagcttgggttctacttttgcatccaagaattacgaacggtcaatgcatcactcatttgcgttgcttttgcttccgcttctttgcttttttttgggatgcaagctcgctttgttgcac

SEQ ID NO: 233152 - DNA, 613 bp, Homo Sapiens
atgtttacagcccaaaatgtgcagataacttgtttgtaaataactggcaggggtcacagtgtcacatctaggagatttcattttattttatttcgacaaccagagttacagcctctttacaactgagaagtggtaataaatggtattgtgcttattcttcaacaactccatagcactggcacctgacatatatttgcatgaatttcatgtaacaaaatgtagaaatctttctttctaaagggcttcaaaatttcccgaaacagacttctgaacttcattttattcctcttgctacatggttgttctggattagtatatatatcaacacctccagtagaattatgttgctaaggttgggatcacggctttggtctcgcgaagggacctgctttgcagatccagggctcgtttaattttccagctgggttcctgctttgcttaactaatcctgtgcaccccgttgtgcggtccacaccttgacctggctggactggtctgctgcctctaagaggcgggtgttgtattaaaatgagaggtcaaactcctcgaatgggaatcgctcctgcccctgcaccgcttgctccgagccgcggggtccgcctgctaggcctgc

SEQ ID NO: 233153 - DNA, 420 bp, Homo Sapiens
tggggacagcagaaccctaatgtaactttcgcaatcttcttttcatacttcggaagtgtttgacatcttggcttccaaaaaccagtgaacacaacagcctcggtgcgtcagaaataatacaatgaatctaccgtgaaggacagataggtcccgcctccctgctggaagaaaacgtgcccttatgatagagcatccaaactgcggctctttttttttttattgagaaactgtttttcttacagaagtggcagtgtagaataaataacgcgagggacagagagtgtgaggtaccaagaggctaaagaagctgggaggtttgcctttaaaaggagacaaaaatcccagggaagctgcaagcggaagggagtggggtggcccggaggcggaggactcaacttacagaggtgaagtctgcaaagc

SEQ ID NO: 233154 - DNA, 658 bp, Homo Sapiens
tcgtttcttaattcattgatttcggcctttatctttacattttttttttttcctaagcactcaggctgaatgcttagtttatttgccttttctctctccctttttaataatagaagcatttaaggctatgagaatagtgcagcttgtctcccataggtttgggtatgtggcattctagttttcaatgctttctaaatatttgtcagtacattctttatttcttccttgaaccaatagcaatttaagtgctttaaattttttcaagtggttgggttttagtttgtttaaatttacaatattttggcgaggtttactgcatggtgatcaaaggactccccgactggcacaatttctgttttgggtagaatatgagtttttgcagttggttactggtagctgacagaaatgtttgcaaagcatatgctcacttgtaaagcccatgtgcttttttaaagtttttgtttgccataatgttatgtcaaatgaaaaagaaaaatgatataaagttcaatgtgcttgtaaccatgtttaaaatacagtgtatttacatatatgcaatgaaaaaggctgtgaggaaatacacaaaagtactaaatggtgttggtaatttccagcttgtgagattatggagcaatttgtactgtctttacccttgtct

SEQ ID NO: 233155 - DNA, 627 bp, Homo Sapiens
tgagacaacgatcttgctctatcatccagcctggaatgcagtgtcatgaacataagctcactgcagcctagacctcccgggctcaagcgatcctctcacctcagcctactgaggagctggaactacagaggcaccagacccagctaactttgtgtagaaacagggttttgccatgttgcccaggctgttctcaaactcctgggctacaatctacctgccttggcttcccaaagtgctggccacggcccccagcctaacattttgaaaattattattattattattttcttgctctgtcacccaggctggagtgcagtggtgcaatctcagctctcagctcacctccgtctgctcggttcaattgattctcctgcctcagcctcctgagtagctgagattacaggcatgcgccaccatgcctggctaatttttgtagaaaattattatttctatgttacatcattttaacaatgcagtggttatctttgacctaaaaacgaaagtttaaaaaccattttttaaattaaagaatgcaattagtacattcttgttgctgacatgaagattacagtgcatacctagctcctttcattatttataattcaaatctttgttgtacttcatctg

SEQ ID NO: 233156 - DNA, 810 bp, Homo Sapiens
ccttcgtagtggaactacgttgaactccaatcgatgtgtcttgtgaacacccccatctgagtatccagtgccatcaagatgacctcataggcatgcaattctcctatcctgggaatttaaagaaatttaggagctttgttcaggaactggggtcaaagaccaatactagacaaagatgtactccatcacttgtgaatttaccaggcttttaggagctctgcaccaggaactagataggaagatcaaatatatatttcttattatatcacattatcacatcaactcaatgtacatgttattacactttcattacaggttgaagtttacagactggtgtacactaaatgcatttcaggtaagctgctccctaaggacctatacgaaagcccgataatcagatgataaactgtctccaaatccagcttccaggaagtttacctatagactgaaatgccatcgatggaatttagacactagtgatctttaagtccaaagggcctgggtatcctaacctcatcagcttgatctttttcttccaatatcacatctgtacccagtctttttttctttttttctgagatggagtctcgctctgttgcccagactggagtgcagtggcacgatctcggctcactgcaacctccacctcccaggttcaagcaattctcctgagtagctgggactacaggcgcatgccgatctgtacccaatcttattagggtctgcagcattgttcactcaacacaaaaactggacatgagcattttttagttccattatgtgcctagtacagaggcgtattcagcaggt

SEQ ID NO: 233157 - DNA, 929 bp, Homo Sapiens
cccgtttccggttgtggggggcgcccgagggtgacctccgctcgtggcactcctgtgtcccgcgtgtcgttttcccctcgtggcccctgtccgaaagggcggtactggccctccggggttttttgcgccgcccgtttttgtttgtgtttttgttgttttagacagagtcgcacatgtgcgatctcgggtccggcgaccgcgcctcctgggttcagtggattctcctggctcgccctccggcctcagcctcccgaagtagctgggattacagggctgggtttttctctcttgagattaaacagaaaggatgtatctctaggcaactgctacttaaatcactgcctccaacagcaaggacagaggcagcttccagagctgcttcgcctcaaacttagaaacctgctctaccaggcagcttcctaagcactgcagggaaatttctgggcaaaatctggaaagtgaagcagaggacgaggacaattcactgctcaccacaaggctgaaagagccctaactttcaaagcaaaatcccagaacaaaatgccatgaaaaggggcagcaatcgaggctcagtgaaatccatacagaggaacatatgggtgaaagccagtcaccttgaccttgctaatcctaagctgcatcagtgctgcctcaatgccccctggagccccaagctgtccctgtgcctctccaagtccaccacccagctaggcacatgaaaacccgtcaggtgggtcagggcttggctgagccaggggtgcctaagaaggagcagtaactccgtttcagagaagagccgtaagaacatctaaccactgactcagcaatcctaaaggacaggctggggagagggcctggtggagggggcgaggttcccagctagtggtaccacttgggaagggggaccccaggcagagactaatcgcctt

SEQ ID NO: 233158 - DNA, 324 bp, Homo Sapiens
ttacctccgtgcttgggtgggtaaagatccataggactaaatgccaaggttcaatttcttatttaataatggaggcctagtgacaaatacgtattacaaggcaaagacaaactcaaacagagattttcttctgaatttgaacatctgtcactgaaatgcatgaatcttgatttctccatttaaaaatgggaataactttattacttggggatgcaagatgaatgaattaatgccagttagaagggaccatgccaatttgaaatattcagatggaatgtgctatccaatacaaaatattgttataaataattattgttaacatac

SEQ ID NO: 233159 - DNA, 472 bp, Homo Sapiens
atggcctggtattttctatcatatctagccatttgtatagaaagcaaaataaagatggtaagccaaatgacaaattaagtctatagataaataaagatatatcctattgcaatgcttttgtttttgaaatatcaagtccagcttcattttctggtttagttaaaatgctgtgggaagcttctctggactagaggacattgacctttggaaggcgttggctgctcctgaagaaagctcctggctgtttaaaggaatggggtggagtggaaatacacacagacaggaaacctcacaggtggggagaagagggccacgcccaaaagcaagtcagttcattcaccgatcagatctttaattctaagtaggtctccaaactcaattggccctctcagaaacatgtaggttactgaccttgtgtatcagatctgggttaatgtttatgtcatgcacaaagaaataacaataagtactt

SEQ ID NO: 233160 - DNA, 511 bp, Homo Sapiens
caggcactctctgcaacatagaattaaacatgcttcctgaacattgtttgcactttctttgacagagagcagaaatacaggtttatgtatccataaatcctgtcatggttgacaaagtaatttaatagtgttttgactcagaaccatccgttaatacgatttgagagacagagtagagtgctcgtgtgtgtgtgcacgtgcgtgtgtgcaggactggatggggtgggtgcagggcaggaagcatgtgacagaacaccaccacgctgcagtttcacaccctccctgcagcaataggttttaactgaaaagctactactcatgctttgcaaattgatagtcccactgaaaaaaaaaaaattaaattcttccaaaaaacactctgaggttttcgtgagcagaattggttgtagaaggggaaatagatcatatagcttaggccatttgaaaggacttgtcagttgactattgctggaatggaaccagtgtctagacttgttctttgtgatgcctt

SEQ ID NO: 233161 - DNA, 530 bp, Homo Sapiens
gacaaagatctaggaatatgagtacactatcctacataatagaaaagctaattttttgttttattactactgtaataatattaagtacctaaagagagttataggcctcttggggcccagaactcagagttcaaaatgacccttctttgattggatcaaaatctaatatttggctgtggcattatccagaagtatggagtttattatagctatgttcaaggaaaaggtaaggtgaaggaagatcagaagggatatatagtaaggagattcccatgttactaaactatttgtggatgttttcctgcatcatatgcaaatgagaattggtaggaaaacagagggctaagaattagagaaaataaatttggggaggagggatggattgtgcctcttattgctctgctgaatctccaaatataaacacacacacactcaaacccttctatgagtcctaaattacattcttgcttcaagctggctttttcaaatctggcagtccactggcgaaaatgtttgcaggttagagaaaa

SEQ ID NO: 233162 - DNA, 585 bp, Homo Sapiens
ctttcatatttgtaaaattatatttaatggaattcttctctttgattatcaaggactttcactgcaggcagtgctatttcttgtgcctaagaatgtttccaaaagtcgcatcgctaatgatatttgccaagttgagtgtacacaaagtttctcatatcctgttcaagttaatcaacatcaagcacatggggatgctttagggtgagtctatagtacaaaatgcataaaccatgtccccaggaaatttgaaaggaagcaggtgctgaatggaatttttttccttttccatgagctgtgttaattctatctccagtaggcctaatgcttgaataagcaagatgtctaatcaataaattattttcatgctcagaatttcaggtttttgtactccagcatagcttggtcttatttcttactgtatgaaagcttaacagcaatgtgatttaaggttttgttttaaatgggagatgtaagtgatttaattcatgggtacttttagaacctgatagataatcccattgcctttatttttctaattaaagaattcctaaatactttgaaaatacaaaaaaaaaaaaaaaaaac

SEQ ID NO: 233163 - DNA, 703 bp, Homo Sapiens
  misc_feature (45)..(45): n is a, c, g, or t
  misc_feature (168)..(168): n is a, c, g, or t
aaagaagtgaatggcctgagatgtgtaaagggctggaatagcacngctgatccattcccaccttcagggacaaagaggctctgaagggtttgtgagtcccataggttttggacatttgtagttcctcttcccctttgtgaaaatgtagaatagtgctgtccttttgcnccttctgctcatctgctcctagctgtactgtcaccctgtctttaggggagaagtctcatgtttatagtgcctgtgaggtcagggaaggcactgtcaatgctgttttgaaactttgtttccccactgttcagctcacaaaagtattttatcaccctcacgcccctgccctcacccagaagcacaaagtgaaatctgcccccggcagcttcccaagctgtgacccacagcaggttcctagttgttgttttggaccaggctgctggtcatggcccttgtccaactttctgagatctcaaaaagcagcagcccaagccagggcgagtggccgtgggagggttttttggtgtttccccttccctcaacttttagttttgaaaaagtgaaatctgcagtaaagttgctagaataatgcaacaaatacctgtacacctcacctggatcccacagttgttagttcttcagcacatttgcattctccctttctgtgtgggcatcacagatacaacaaagttagtatagcgggtgagtaggaaaa

SEQ ID NO: 233164 - DNA, 532 bp, Homo Sapiens
aatcatatcctttcagtacaccgtataacttcaatattacacaagtaacattgaggagaatgccatcagctttgttctcccttaaattctttggttttctttttacattttgggaacaactgcatttaaaatgttattagtcagtatatagtaaggattaggtgtttgctttctgaaggaatggtccagtgaggtgattgggagaggttattttctacctaacttgtatatgccctatacctcttgggcatactttgtctatagaaaaatattttgacctttaggtacattttgggccagtagtcaaataatcctagggccgatataaaaatcttagaataatttaaggtttgccttttatacctgttttgaaagcctttacatttttgtcaggtaatttttcccaagccgtggatataatctattcaaacatgtttatgctatccattctgtttttaaattgaaaaaaatgttaaaagtgtttatgaagaaaagtttaaataaaatatttttaatctttaaaataaaaaaa

SEQ ID NO: 233165 - DNA, 490 bp, Homo Sapiens
  misc_feature (17)..(17): n is a, c, g, or t
agagttttttgattcanatccattagtttgaacttttcgagcttattatccatttccttaaatcccatagcttatcagagttaacatcagagggaggtaaaatatttctgtgatattctttgtataaaatctacactttgaaatggattagtaacctgtgaacaatacatattttagttaacatataaattatgtgagcaaagtggttttcagtgtttttttcttattttagttttgaacctgtcttaaactcacagacttgtagaagaaatctctaattcagtatttattaggagttcacttttgccctattacagccttaattagtgacatcccagtgctgttacagcatagcagtgtcttaatatgtaatctaattgaaataacacatttgtaaaataattactagaaggtaaacttacgttaatgtcctgtgtggtttctacaaagtgtgtcattgtagacctcttggccactagatattttaaga

SEQ ID NO: 233166 - DNA, 479 bp, Homo Sapiens
aaagaaaaaccctcacagtcttcctggttcataagatggatttggaggttatttctgcagcaaacttgggtcctgtgtgttcaaaaccatagagcacaaggtcaaggaagctagagtctgaaaaacgaacaattcacttccaggtcttcatcagggttttgtttttgttgctttaaagcaagagttaagtttatagtctgttaagctcttacaaatttggcttattagttaaatggacgtagtttagcttaaactttatgttagagtgagatgaaaccctatgaatataatcagttttagaaaaactaatcagtttattgtgcatcagagacgtcacatgaagaagaaaacttgtcgacatccaggatgatcaggagccttcattaaaacagaaattttagggaaaaccacaaaaaccttcgtaaagtgaattgcattaaacatcaattataataaaatttcatattttgaataaaaaa

SEQ ID NO: 233167 - DNA, 572 bp, Homo Sapiens
actagattgatttttcttgcccttgagtgtcacagtggtggcactctatactttaaaaagtgtgaaataacaaccaggagagatagggaaaacccaattggcttttaaaaaaatgaatacatgtcaaagattttatattaggcattaattaataattaattaactggcaaagtaagtggttactgcagtccaaaggaaaatccaaagagtagacacatacataggcaatggagaatgtgaaaatgaatttgttagcagacgcacagctggcttctcccatgggcagggtggagtgtgggattaggtgtgtcttaactggacaagatttgtttgcagtaatatcagtattctttaagagttgtaaatagatcagtaaaaatactaaaaggtgtagtcccctgtagaatcagatagcccagaaaagtgtgctagacaacacctgaagttccgctgaaaagatacccagtgatcactttttgcccatttcaaatctttctcagtttatctgactgtgcttcccccctcctcccctgtgatcgtaataatctcagtgattatccttcatttaaaaa

SEQ ID NO: 233168 - DNA, 539 bp, Homo Sapiens
cacttctctataactccaacataaccagttttccctctatagagttggaacagattatagtttagtagctcaccaaataaagtacgtagcttgtatttaccagctatggtatataaaaatatgaatcattaaatgctagtataaagcagttagtcttaaaaaaaaaaaaagatccacaaaagggatgagtgggagataagattgaagcaaaattatagaaagttgtataccaggctgagggctttctgtgtcacttcacaggaagtaggtaaacaccgaaatttagtcagtgtcattattagagttgtgctttcataaaaagaatctctcaagtgtgacaaggctaaattagaaagaagagactggaggtagaggccagttaggagatccttgtaataatccacagttgatggaatgaggatctagagtagccaggctggaggtaacaaagagggacaggagggcaggagtactctactttaaagtagaatgaataggaccaacaaatgacttaaagggatttaaagaaaggagacatt

SEQ ID NO: 233169 - DNA, 691 bp, Homo Sapiens
atggcccatgaggtgatttataggctaccttatgggacagaggtgaacatctggtccttcgggatcatggtgatagaaatgattgatggcgagcccccatacttcaatgagcctcccctccaggcgatgcggaggatccgggacagtttacctccaagagtgaaggacctacacaaggtttcttcagtgctccggggattcctagacttgatgttggtgagggagccctctcagagagcaacagcccaggaactcctcggacatccattcttaaaactagcaggtccaccgtcttgcatcgtccccctcatgagacaatacaggcatcactgagcagaggattcgtgtaggtggcaaagctagatgaggacatgagaataattcaggagaacaaaaggaaacacagaacatgcaaaaggcctgtgcattctagaccagccaattggtgggacagcgtgatgaccggcagggttcaacagaccagggcatcttcttgtgtcttaaacaggcatctctccactgacagccggtgtggtcacttggagcacggctttaataagtcattattatatttttcagcccttcatccagcaaatcagaaggactcagtacaaactccgttatgatatatcctagccacatgcagggtaacatgtaggattttctatattgaaagaatacttttctggca

SEQ ID NO: 233170 - DNA, 538 bp, Homo Sapiens
agacatttagattttcacagcctgtttctatagcatttgatgttacaactctaagcgtagttcaaagacatttaaattgacaagttaccagttaaagaatttagaatatattagatcccatctagtattatatattttttctagttgatcattgagcagtaaataccaaatactcgattagaaggtaatttttacattgttttgaaagggtgaaacaatttatctcctctggtattattcttaaaccacagatagggatagtagggtagtgaaacgaataaatacctggtagaagacaagagacttgggctcttacacctggctctgccactgatttgctaagtcatattggcaatcaccacacccttcagggaattagtttcatctgtaaaatgcagcggttagtactataaaatcatacaaatttctttgtgctttgagaatctataaaggaatgtctgttgatattctgagtcgattttcatttgcttttgttccagaacggttaaaataaagcatattatttcatttaaaaagt

SEQ ID NO: 233171 - DNA, 468 bp, Homo Sapiens
aggcttgccacgcactaggagctcagatagtgtttgttgatcacatactacttttgtgtcccctactgttgcctagcaaagtagggcccctggtagacactcagtttataatgatcaatgcattaaactgaccacaaatctcagttcttcaggtcctaggaaaaccgtgagccacctgcaaatataggctgcttatgcccttgacaggttcagggaatccgtccttttagcactggggcggtttcactttggacttgatcagggcttagaggcctttagctttccgatcctgaggagcctccctttatccaggaagcaggggactggaccactgggaccttcatcacgggtgggcacggattccccatcccaatcagaagaatagctgtatctgtagcagtaggttattctaggccagttctttccattaaaaaaaaactaaagcccctaggttgaattaaaaaaaaa

SEQ ID NO: 233172 - DNA, 543 bp, Homo Sapiens
agagtgtgaaactagtttcatatattacctagttattctttcaaaacaaaacaaaaaaaaaacaaaaactgacgcactgcactagttattattagatattcttagtcttttttgtacatggagatttaagtttaagatggtttatataataggttatacctacatttatattgtagaataaatattaaaaagcctgttccagagactcccaagcagcctgggcaggcagatgtaccattgttagtggtgtatgctcggcctcgtggtccatatattctgcacttttatatttgccaccagaatggtagtttgctggcaaaaaaaaaaaaaaagagagagagaaaaaattacaactcttacaatctgaatttttttcttagccttgagtgaccaagaagaatttgcttgaggcaaattgtggcaaatattttcccagacaggggaagagtcctgcagattacagattactggtgttttcatgccttgaggattcttttatttttacataggggtctaagtgaccaatggattgttcatacaaac

SEQ ID NO: 233173 - DNA, 464 bp, Homo Sapiens
acagcctctcccagaggccaggatcagcaggtttgagtggataattggcttgtggtcattttctcataggatttttcttttagtagtggaaactgtttttcaaatcaaatttggatgccaactatgtggaacagaagtgtggctgctctggtggaagtggcaatggtagtcctagagtctccctgtcagccacaccctttgtctccccctacccaagggaccctgtggcctggaaccgcagtgtgaaatgctatatagtgcaatgaagtcaattcgaagacaagagttctttgcctttctcatctaatttttagttatggatatgagacgcttgttcagaagtatggaaaagtatatataatatgttatcttttagatgtgggtgtaaatatgcttatgtatgcaatatgcttatattttaacgcataaacaacatgaataaagcaaacactctagacttctcc

SEQ ID NO: 233174 - DNA, 517 bp, Homo Sapiens
ctccgttgtgctttttttttcctcttcagtaacttttgcaacattattgcatagaagatccctgaccatttactaggaacctggttaagcaagcactaatctcttttcctggagatcaaggatgcaacctcaggttgagaaagaaacagggttccctgggcccattagactgtttgcagggcatcactgcttccccctgacacctcacaactagcaaaaattgtctttgtctttggaaattatagagggatttgggtatccagattgtgcagatgcaaacttaggctgtcttgatgcaaacttagaaccacagaaatgcttttaaaatgcctgttttaagatggaattgttgtttttataatttgattttagtgctaaataaatgattggctttgtacatgaatatgttctgtacaagtgctctttcactagtactacagataatcaaagctatcagaattgtgtctttgatcatatttgacggtaatacacaaataaatccatgttttagcaaaaa

SEQ ID NO: 233175 - DNA, 585 bp, Homo Sapiens
aatgctgttgggcacccctagaaataccttgatgttttttctatttatatgcctgcctttggtacttaattttacaaatgctgtaatataaagcatatcaagtttatgtgatacgtatcattgcaagagaatttgtttcaagatttttttttaatgttccagaagatggccaatagagaacattcaagggaaatggggaaacataatttagagaacaagaacaaaccatgtctcaaatttttttaaaaaaaattaatggttttaaatatatgctatagggacgttccatgcccaggttaacaaagaactgtgatatatagagtgtctaattacaaaatcatatacgatttatttaattctcttctgtattgtaacttagatgattcccaaggactctaataaaaaatcacttcattgtatttggaaacaaaaacatcattcattaattacttattttctttccataggttttaatattttgagagtgtcttttttatttcattcatgaacttttgtatttttcatttttcatttgatttgtaaatttacttatgttaaaaataaaccatttattttcagctttga

SEQ ID NO: 233176 - DNA, 420 bp, Homo Sapiens
tggcctggccaaggatgagtcacagcattcacggctgcatttttggtactcacgggatgcctctctgaaaagctgtcccaagtgcctgctacagaggaggatataccatgatagcaaaggaaggttactgctgtaaaagtggaaactgcatggatcaaagggcaggcctactggggtaaggaactctccctgcagctctgaggatacttaaatctaggatcctagtcttagtctcccccaactcctttgaggttcctttcaaaagtccttctccacagattgaagctgaatatagtcttccttgggacaaatgcatttgtccataggactctttcccgagattgttttaggcccatttctgtacctctcccctcagactgttagccacagacccttagtcattgcaaagttactgcataa

SEQ ID NO: 233177 - DNA, 589 bp, Homo Sapiens
aggtctaatgaaaccaatattgaatctctgataaatattttctgatgttactagctatgggaaattagaactggcacaaccctgacattactaagtggaaatgttaggatttttcggcatcgcatgttagaatctctaaaatttaaacattcctgttaaatgactaaggtttgcttttatcaatatgaattctgaaggccaatatcataccattaactatgaaagcttttaattcctaaaaatagttttagagatattcaagcaatgctctcctaatatccatacgcaagtgtgtttatgacacaaattcactagtctgtttaaaaatgaattctttatattgactggtgttccacatatttcagtaatttctgttatgagaggacttgaaatagcaaattgccacacagttaactggatagaccacgtacgtggtgatcataaccacttggtactacacccagaaactcaaaattgtctttctcctgatgagatatgggtgtccttttgtacgtctaggcctaggtaaccagtggagtgattatattagcaaatgtgtttgtatccagagtcttcctgtcattgtaat

SEQ ID NO: 233178 - DNA, 585 bp, Homo Sapiens
cctcccgctggggagcggcgccttatcgggcccgccggaagctgctgcagctgccgctgggattcttgtacgtgcatcacacctacgtgcttgcaccaccctgcacggacttcacgcgctgcgcagccaacatgcgctccatgcagcgctaccaccaggacacgcaaggctggggagacatcggctacagtttcgtggtgggctcggacggctacgtgtacgagggacgcggctggcactgggtgggcgcccacacgctcggccacaactcccggggcttcggcgtggccatagtgggcaactacaccgcggcgctgcccaccgaggccgctctgcgcacggtgcgcgacacgctcccgagttgtgcggtgcgcgccggcctcctgcggccagactacgcgctgctgggccaccgccagctggtgcgcaccgactgccccggcgacgcgctcttcgacctgctgcgcacctggccgcacttcaccgcgactgttaagccaagacctgccaggagtgtctctaagagatccaggaggcagccacccccaaggaccctgccagccacagacctccaataaagacagc

SEQ ID NO: 233179 - DNA, 640 bp, Homo Sapiens
aagatcaccttgggaagcctgttcaattgcactttcggggtttagtaggtctgagttaggacctgcagtctttcatttctgataaactcctaggtgctgctgatgctgtagtctacagagcacacttggtgtagcaggcactggagtattcaagattcccttgttatgcttttttttcttttaacatacgttgaatgattggttggactgtctttggcagttattttatatcttctcagatattgtgactgtttttaaggtagttaacaataatattttggactcatccagtgctttgttttgaaaacttttttgttacaatgccagggacacaatatttttaaaaatattttgtagtgctgtatatccaaatattaggggcaaacaattaaggtagacatgatgatcttatctacttttgtaggtaaataggtttattgaatttgaaaggatgccaagcaaggatttatggcatattaaggcagatcaagccaggaatggtggttcacacatacaatcccagctctgggaggctgaggtgggaggatcgcttgagcccagaagttcaaggctgcagtgagttatgattgtgatactgcattccagcatgagtgacagactaagaccccgtgtcttaaaa

SEQ ID NO: 233180 - DNA, 595 bp, Homo Sapiens
tttttaaagggttaatgctacttaattgcagttttttccccaacaagttaatagttaagaaccctgatctcaactcttcgtttttccaggttatttatttcataagatgactatccataaatcttccgatgaacgaacctctttatgaccagagctcctggggttaaaggagaaaggttttataatggctgtcttaatttgtttggtggttttccaggtattaatgccaaatttgcctttgtttagtttctgtttcttatcacactgttttcaggttacatcattatcttaaaaaggcagaggctttattttcttcgttgtgatataacctaattcttagaggtttcttaccaagatcactttgcttgttttgcttaattttattttctaaattttacaaattaatattttccaccaaaaggtggaacgaaacaaagacagcaaaatatcaaactgtttagtaatagttaaaaaagtcaagtgggaaggaaggttgaggctgaggcaggagaatcgcttgaacccaggaggtggaggtttcagtgagctgaggctgcgtcactgcactccagcctgggtgacagtgagactctgt

SEQ ID NO: 233181 - DNA, 588 bp, Homo Sapiens
ccctttcgttgcctggaagaaaatctggggattgataagcgtgtgactagattcgtccttcctgttggagcaaccattaacatggatggtacagccctttatgaagcggtagccgccatctttatagcccaaatgaatggtgttgtcctggatggaggacagattgtgactgtaagcctcacagccaccctggcaagcgtcggcgcggccagtatccccagtgccgggctggtcaccatgctcctcattctgacagccgtgggcctgccaacagaggacatcagcctgctggtggctgtggactggctgctggacaggatgagaacttcagtcaatgttgtgggtgactcttttggggctgggatagtctatcacctctccaagtctgagctggataccattgactcccagcatcgagtgcatgaagatattgaaatgaccaagactcaatccatttatgatgacatgaagaaccacagggaaagcaactctaatcaatgtgtctatgctgcacacaactctgtcatagtagatgaatgcaaggtacatttcccattcatggatatcgagacttgtatatagtagtgc

SEQ ID NO: 233182 - DNA, 591 bp, Homo Sapiens
atgtgatcacagtgaaaaatccttagcctgctttggataagaactttcactcgtgcactagagagagagggaatgtgggtatgaaagtgtgtgtgtgtatgtgtgtgtgtttgtggcattggcaaatagaagagaaggatttgtcttatctgctgatttaaaaaaaaagattttatgtttattatcaagaatgtagcacttaagatatatgcaacttaaaaaaactactgagtaaaattctgggttttgtccttgaaagaaaagtggcatttcctgcatgaaaaacagtttctattataaatgacaaaaaattgttagggagccaagctttgatgcatttactacatgaaggtcaaatacttaggtcattataattctgcccccttttgtgcatgcagtacaatgaagctctttgacatggtgctagcacattctcaagatgaaggaaggtcacgtgttttcaggcattaagagcatgatctactcttttttggttccctgttataagtggctgttgagggtaaagttgaggggagaaactggactaatgaatggcttttgtctacctttgtactattttttacttttctt

SEQ ID NO: 233183 - DNA, 683 bp, Homo Sapiens
  misc_feature (150)..(150): n is a, c, g, or t
ccagagccactaacgcgggaactcaagaagcatgtgaaaagggtgattgctccatacaaatacccaagaaaggtggccttgtttcaagaactgcaaaagcgggtttctggaaagatccaaaggagtaaattgcgaagtcaggagtggggnaaatgaggtgcaccccagaagggccccgtagacctccgaagactccacaagaaactaatggatcactggtcagtccccatggggagcatcatctcttcgaccctaaagatgtcaaaggtgtgcagcttccaaacggcatccccaggatcactgggcaatgctggaaagagcaaaagaatatcattggccctgatcacatagatgctgcgccgcctagcaaatgcttggtggttcgacttctccctctgtctgggggcaggctcagcatctgcccactggtctcactaagagctttcagatttccctccataggacaggttaccatagacttggggcacttgtgggtactcattttctgccagtgggaatgtaaaggcttcatcctttgtatgtaaccatttggcaaaagtatgcaggaacataaaataaaatatcctttagctcagaaattctatcttcgggagtcaccacaaaagaaaaaaatcaaaatgcagaaaatgtgtggtgcactaagatgatcacacagcattaaa

SEQ ID NO: 233184 - DNA, 698 bp, Homo Sapiens
  misc_feature (49)..(50): n is a, c, g, or t
  misc_feature (61)..(61): n is a, c, g, or t
  misc_feature (92)..(93): n is a, c, g, or t
  misc_feature (129)..(129): n is a, c, g, or t
  misc_feature (139)..(139): n is a, c, g, or t
  misc_feature (153)..(154): n is a, c, g, or t
  misc_feature (162)..(162): n is a, c, g, or t
agtcccgtataacgcggcccgggaagccctccggccaggtttagtgggnnacatgcttgancaagaccttcttgcttcgtctttgtcccacnnccggttggggttgctgacctcgctctggggtctcanggccaaggcntaaggatcgcgacnntctgcccnccagtccttcaagcttaacttactctttcatccgatgtttactgagctcctgtcccgtgccaaactctgtcctaggcagggagcgtatgttggtgagttgtgcaaaaatctcttcccgatctaggagaactctcacgttcttgggtgaaatcaccgcctgcagttcggtagaagagagataagtgctggggagggaaaggaaggacagaggggctgaagagagagttgcaggggagccgagttgctctgttagaaggagcggaggctgtgctcggtggctcacgcctgtaatgccagcactttgggaggccgaggcgggcagattacctgaggtcaggaattcgagaccagcctgaccaacacggaaaaatcatgtctctactaaaaatataaaaattagccgggcgtggtgggcacctgtaatcccaactactcgggaggctgaggcaggagaatcgcttgaacttgggaggtggaggttgcagtgagccgagatggcaccattgcattccagcctgggtgagagagtgagactc

SEQ ID NO: 233185 - DNA, 596 bp, Homo Sapiens
aatgcagagaggtctctgtagagtgcagggcagttccctcgcggatgtgttacggtatcccttgattgatcgtgtcgagaatagaaagacggtgagcacaggcagcatccctggtatctgaagagagcctgggagacagaactaagctagctcatttccataatttccaaaactcatggtcctcttatactaaattgactccatttctgttttctgtcttgggacatttacaccattgctggtatattttggatctcctgggacaacagaaagtgctagtggttgtgtttggccttgttgatgggaagaagccaggagagcctggataggactccccggtccttctgcctgggagggaggagcaacaggtcttgggcagggcctggtgtaagcgtggtggcaaaggtgaatgaccctccagtctggccttccttgaggtcatatggagcaggcagtgctctgaggcagggagtttcagaacccgggttcagatgtcacagctctcattcctggcttgggacatctagctgggcacataaacttcttgtgcttcccctggaaagaggggtcatgatacccttaaaaagcaaaaagaa

SEQ ID NO: 233186 - DNA, 609 bp, Homo Sapiens
agagctatctgtacttgctagtttcacattccttgaggctcagcgagtttctgcttcacctcccccgtgcagctgcaaagttacaaggtttatacagaaacatggtttcccaaggatttggaacatgtaatatagataaatgtaaaagactgatcaactgcctttgttcttgcttctctaagtgtgcttcctgcatcacgtagctcccagccactgactgcttaaaaggtggctgctttctttgtccagggctcagactttcctgtacactaatcctactgagccaagtgatcatcaataaagacctttcctgaactcactttgtttggtctctcccatctttgattgtcccgcaacaataataactataaaacagaaactgttttaacttgttgccctactcagtgacctgatgaatacattgggaacagtcctccatgtggggaaaatcagtggaagtccttattacataagtccaaattttaaggagaataagtcccacgatgagtttcctcatgctttggctgtgcatagatgagtcagcttctgggtgtgactgcagcagggcttgtcgtccttctcagagtcactttgcaggggttgtctggg

SEQ ID NO: 233187 - DNA, 500 bp, Homo Sapiens
tcctttagcattgttccaagtctaaatgttaacctcaagctactgcaatttagacaatgaaatgggctgggtctaccccccaccaccagccctcatcctctctacccagtgctctggtttatgcttgtctcctgactgctctgcttaaaggtgaaagtagcaggaacaacaacaaaagccaaccaaaaacaaggtagccagtgcaagacatctcactcttctgacatcctgcagtccccaccagtcctgaccgtgggcccctcaggggtctgggagtgtgacgttgtaatcttcatccgtctctatcccaacttcctcctgtgagacagggagacaagtgaatgagatgtcaccaggataagaccacagggaagcaaagaaggaagagagctccacttacaaagaactgcttcttgctcttggggtatccttcaagtattgcatcagacagctctgtagcctgacaagaaataaaaccacccgttttcagatgggcaaaa

SEQ ID NO: 233188 - DNA, 538 bp, Homo Sapiens
tagccaagccccctccctcatctcccattaaagggtccatcttcaaccaaacttaagtctcaataaatatctggacattgtccttccaactctgggaagctgctaagactctgtccttactgcagaagaaaaaacagccttgtaccctggtcttctcaacaggttgttctggagatgttctggggagactgcattaaacacagcttcgcaccattgaataaactcagcaacaagccaatgcataaaagtaatctatgcttcaggtcacagaagcttcaaggggaaaaaaacagaatactctagggccattgttcacaaactcatctgaaaacatcctggaaaaattttcccaaacacatggaaagaaagagaggaaaaaagaagatatctgaataatgtggactagaataaagagctgccaggagctgtttatttaaaaacagtactttcttctctggctgagtccctggtattctctgctgcaatctgtagctgtagaattttgaagaatgcaattaaattcaaatggtttgatgag

SEQ ID NO: 233189 - DNA, 481 bp, Homo Sapiens
ggtcaattggaatagtacacctttctcagggttttcagtttaataaggttgtcatattattcccaacatgggaatatagtggcttctaaagtttgcaaatgaattatgtaaaaggattttctgtgtattaggaaggcaacctgttctgttcatggtatattaacacttcattgtcatgtgtctacccttaaaattgctatttgtagtgaagaaaaaagcatagtggtatttagtcacttctgggttcctcttgtcagtttatatgcaaacattttggcatgtgggacttggggaggagggacaattggttgtatgttttgaccacttccacctatgaaaattatctgaacattattcagatttaagagttcatgggagcaggtggtacagaacctagtgttgaatataatttttgtgccatgcttgaatgtattttgacggattagcaaaataaaagtgaacctccatttttcaaaaaaaa

SEQ ID NO: 233190 - DNA, 644 bp, Homo Sapiens
attgtaatagctttatcggggaacaaggccgacctagcaaataaaagagcagtagattttcaggaagcacagtcctatgcagatgacaatagtttattattcatggagacatccgctaaaacatcaatgaatgtaaatgaaatattcatggcaataggtaagattaatatctctttttaaatgatcaatataagcaaaacaagtgtgaagcatatttggtttgactgtctcttttttaaaaaatttttgggggtgggtttgtgtgtatgtttatgtgtgtgtgtgagagagagagagagattataccacttttctaagtcccttccacaaaacaatattttgttggtaatattgttaaatttgaaagatgattacctattaggttgtaatactgtcagtttaggcagcttcttccaggtgagttaagccttaacctcttaacctgatagttcagacagacagattttgcaaaggtttcgctgggaaatttggataaatattttttttattagattatactttttaaaaatcaaattattggtaaatataactcagaagaacatgacacataagtatacagattgacaaattattttaatgtaaacattataaggaagatgatttcaaagcatagaggcgtaagg

SEQ ID NO: 233191 - DNA, 684 bp, Homo Sapiens
cttcagaaacccgactttggcataaggtgagctttatcctcctctgataattctctgggaagaggaaaagaaaaaagtacatcactgaaagtaaaagcacctgttataggtttaccaacaaatatgtcctaaaaccaccaaggaaacctactccaaaaatgaacaaataaaaaaataagcgaaagactgcagttgtgctaaaaacaaatcaagacaaacaaacaaacaaaaaagtaaaaaaagattactttcgagagagaagtttaagcttcaccaatgctgctcctgaccaatggaaatatgtacaacttcagcattttaagtaactggcttcaaggggtactgtggcaaccaaataaaataactccattttctaaaactttcatgtaacttttatgtctggactacagttcaagtggacaaaaacatttctgtattttttttaagtaaataagagtagttgaactgagcaatacctcctcctgtgttgtattacacatattagccacgagtttttgcagtgaccagataaacttgaattgacacgtggtgtaataaaatggacaaattctgtagagtagacacagtgagtatgtggacctcttttataaggaaaaatacattttggattaaaatcaattgcttctgtcttgttttgtttctaaataaagaataatttctggg

SEQ ID NO: 233192 - DNA, 550 bp, Homo Sapiens
tagtataggaggatagatagaagtggttgggacaaaaacaaagattgtcttaccaatgccttaaaaaagagcagttcagaggtgagattggttgtcaggaattctctattttgtttcagaattattatgtttaaaataatacttaaaacgtagtgatattaaaagttattttacattttaaaattcattttgaataagttgtgtatacatttcatagaaaatcctgagaatatactaaagtggacagaaaaaaaatacatttcccatgaattttcacacccaaaaattgttattgttaatatttgttttattttttctggcttttgttttttttgcaaaggtttcaagatgtttagccaaatataaatacataaatgtcaagttcaggtcttttaattccaaaagttggggacaaataaataactgtaaagggtggatgttcttttttcctctacaaaaacatggtcttcttaaataatgttcttacattttcttttacctgttcattacatgattctcagacttttagatttcaaggaaagtaatatcc

SEQ ID NO: 233193 - DNA, 573 bp, Homo Sapiens
tctcaactgtagactgtgtcccagtaagagagtcacagcttcaggtgtttgctgaatccaggtctgagatcacaatcccacctgaggacaggatccgcatatgagagtcgcacattggtataattgatttgtggtagagctgagattagaatccagattcctagtctagtatccttcccactgtaccacattatctcttttcagaggggaaaaaggagcagctcttaagaaacagaatactaagggcccccattactgtgtggccctgggcatcctcagtttcctcatttggtaaatggggataatggtaccgacctcttaggcttggtgtgaggatgaaatgagatagggaatataaagcaagcagatagtggctggcacatagtacatgcaatatgtttaaaactagttaaggaattataaaaacaaatgagttcttccttctgctcaaaaatattgaatttcttgtccttgtgctctgtgaaacattgaacagccccatttagagaaacaaattctctgccctcatagaatcctaattgtttctgtatgtgtctggtgttttgcacatgc

SEQ ID NO: 233194 - DNA, 540 bp, Homo Sapiens
aatgaattcatcaattttttaaaaagaagcatgagatcaaaggtagaactaagtggtgaatttcacaaagtagacctaggcaatttcaaattggctgctatacttttcaaggtaaaggacacaaaccaaaggtacctatatattcttttcatgatatttatttcaaggagacagatcaaattaaaaacttcaagaatgttttctgcctggtaaataaatattccagcaacccacataggcacagactcagacacttagtccaatagaactccaaagaggttttcctgacactgagaagagggggtgagttttgggggaaaaatttttaaaaataaagtacttccagtctatatattgtaaactcacctattcatggatttgtgaaatttagaaacagcctaataaaaattctaggacaactgagttgtcacaacgtcacaagagcacaaattcatattgagtgacttttctagtaatatgaacaaaaccaacataaatttccctcaacatatcagaaataatatatattctatttagttc

SEQ ID NO: 233195 - DNA, 473 bp, Homo Sapiens
ggctttgccagaatgaaaaagtgaatggtttttggggccttcaactttttgtgctcttgaagaaataagaagacaaaatagctttcaatccacatcaggcccaatttgcattgcttcgggagttcctgggaaagtgacggacttctatccaaaatcgcgccgtgaatttgattattggtagttctacagtcagcttgagggttgttggtttgacagttgtcagagcatgttgcagctgtatgaggtgggtatctgtacatatggatgtcccatattctccagcattgcataggaatagctggtgtctagatcctgcctcaggagctatgtgtcctgaatttaaaaatcaggtatgttatatccctggggcatgtcagacatacaacaacagtgcattagtccattttccattgcttacaacaaaataccttaaactgggtaatttgtaaagaaaataaattcttactgttgaa

SEQ ID NO: 233196 - DNA, 707 bp, Homo Sapiens
  misc_feature (554)..(554): n is a, c, g, or t
tttttttttttttttgccttacaacttttctttagaaccacattattggtcataatccttgttactgtcatgaggattgttgcatgggttaaacacaaacacagactagcaatgcacttgaacaaacctggtggtctttggaaataaatcaccattagatttcacctggttatgctgcatcccataagttccaaatgaatcacctgcttatcctattaacgaagcatttaattcacacacaaatgcttgaatttcccctgtataaatgtagtcatgcgattcaacttttctaataagatttgtgaatgctgcatcatgatgaaaatgtggattaactgtgggttgcatgcctgttgttcatacttcagtgatggtcacacacaaaacaagatgagttttacttaggtgaaacattattaaacttgactaacaatacagaaacatattctcttttgcgctctttatcaccaaaactgaatggcaaatatgtcttgacattacttggatgaactgtggctagcaaaatttaattaacttagccactataatttttntaaaacattaaagtttctaaattgtttttggggcctagtaacgcatagttcataaaggtggtaatatgtaagcttttacatgggcttaagaatttttaactttttaaataccgttttttttttacgaataatgtggagctatgctgcctttcc

SEQ ID NO: 233197 - DNA, 659 bp, Homo Sapiens
tttttttttttttttggcaatgcctgtttcctatctttaaaaaagggaagaactttgaatttaattgtttcattaacataatctctttggtcttgataagacctaaggtgaaaatatgccaagcagacattatcacactgttgtaatttggtcaaccacacgggtactatcgatatctaccatttctacacactcaatttcctcccggttctcaggatttttcttctctttcctttttttcttagagggtggcaggaaagtcagtatcacaggtaaaatggcaaagcagtgaaagaaggtgacaaatgctattaaaaacaagcacctgaacagtgtacaggtcagatttgaaggcacagctgcaagaggaatcagaccaacaatatagcagaggtaactctgttagctaccccatgcacttccagggcattttttacccatttagttcttgtgaaatccttgcccagaacaaatgtggataacattggagcacaattgtcaattgtgtaattaattccataaattaagcatagcacagaaatgcagtccagttctactttccataatgtcatgaaacctatcactccctccacggacacaactgtgagagtgatccagacgtttatcagtgaatctgccaccagaatgccgagaaggct

SEQ ID NO: 233198 - DNA, 650 bp, Homo Sapiens
  misc_feature (28)..(28): n is a, c, g, or t
  misc_feature (163)..(163): n is a, c, g, or t
gaacacagctgagaccaaagtccaggtntgctggcatcatggcatttctccctccagattcctgggtgggcaggactgctcccagactttagttgacagggactggaggtagggggactggagctgggttttaggactgcttcaagattcacagtgggaatanagtcagccagcatgcctacaggggcacatatagtgtgttttttggcaggtcccaggttaggaaaaactgcttctggacttcagtttcatggactgggagccagattatagtgccacgtcaagatccaccattaaataaatattggcaagcctacatccaggggcacagatggacgtttctgtctgtgggttcctgcatgtgcaggatttattccacatcatgatagatgtgtgcaaggggctaattcggagatcactgagaggagcaacatctaaagtcctttcacctgagacacaggacattatgaatcctccttggtgtcttggcagatggtgctagtggcataaacaaaaccaaatggcctacagctatacttacaatgagaattaatcatattttattttgtagctgggactatgatgggcaagcatgccactcaagcaagctcatgccttctcaatacagccctcatcagtcttaggtttac

SEQ ID NO: 233199 - DNA, 653 bp, Homo Sapiens
  misc_feature (77)..(77): n is a, c, g, or t
  misc_feature (197)..(197): n is a, c, g, or t
ccggctgtaactagttgctctcaattttcactggccaccatcatctttgcatataatgcacaatctatcatctgtcntacagtccctgatctttcatggctgagctgcaatctaacacttacttgtacctttataataagtgcaattctttcattgtctattattgtgcttaagaaaatattcagttaataaaaacnagagtattttatgtaatttctgtttttaaaaagacattattaaatgggtcaaaggacatatagaaatgtggatttcagcaccttccaaagttcagccagttatcagtagatacaatatctttaaatgaacacacgagtgtatgtctcacaatatatatacacaagtgtgcatatacagttaatgaaactatctttaaatgttattcatgctataaagagtaaacgtttgatgaattagaagagatgctcttttccaagctataatggatgctttgtttaatgagccaaatatgatgaaacattttttccaattcaaattctagctattgctttcctataaatgtttgggttgtgtttggtattgtttttagtggttaatagttttccagttgcatttaattttttgaatatgataccttgtcacatgtaaattagatacttaaatattaaattata

SEQ ID NO: 233200 - DNA, 559 bp, Homo Sapiens
  misc_feature (12)..(12): n is a, c, g, or t
cccggccgcgcnacaaccgagcggccgcttttttttttttagtgttgatcagtttattagtatttttccaaacctgaagaatggtgaaagtttgtggtacagtgtggggaaaacagtaagtgtggctttgggcaagccacttcccttctatggctctcagttttcccatctgcacaatgagggggttggagtgtgtggtctctaaggcactgaatttcagtctgttctccatccatcagtggatatgtgagatgcaatgccaggggtgctggcctgtccctggtaatgagcggggatatgagcaaagcagtgagtacagcctggaattccagctactcaggaggctgaggtacgagaatcacttgaacttgggaggctgaggtttcagtgagctgagatctggccactgcactccagcctgggcgacagagtgagactctgtctcaaaaaaaggattctacgactatgattccaagagtgtaaaattccaagatgttctttaaaattagtagaatggcccttctgtcgtcttctcgcagcgtcgacgcggccgcgaatt

SEQ ID NO: 233201 - DNA, 354 bp, Homo Sapiens
  misc_feature (8)..(8): n is a, c, g, or t
  misc_feature (14)..(14): n is a, c, g, or t
  misc_feature (59)..(59): n is a, c, g, or t
  misc_feature (122)..(122): n is a, c, g, or t
  misc_feature (337)..(337): n is a, c, g, or t
agcagagnttggantgatatactttgcagatggaggaaggggctgtgagtcaggaaatncaggctgcctctagaagcttcaaagacaagaaaatgaatactcccctgcagcctccagaagtncagccctgctgacacctttattttagccatataaggcacattttggtattctgactcccagaactgtaagataataaacttgtattgttttaaacacccagtctgtgagtttgttacagcagcagtaggaaactaatatacatgacaatagttcccaaattaatctacaaattcaacacaatcccttgcaaagtcccagctggcttttttacagnaattgacaaactgatcc

SEQ ID NO: 233202 - DNA, 379 bp, Homo Sapiens
  misc_feature (7)..(7): n is a, c, g, or t
  misc_feature (16)..(16): n is a, c, g, or t
  misc_feature (29)..(29): n is a, c, g, or t
  misc_feature (35)..(35): n is a, c, g, or t
  misc_feature (47)..(47): n is a, c, g, or t
  misc_feature (107)..(107): n is a, c, g, or t
  misc_feature (127)..(127): n is a, c, g, or t
  misc_feature (169)..(169): n is a, c, g, or t
  misc_feature (227)..(227): n is a, c, g, or t
  misc_feature (232)..(232): n is a, c, g, or t
  misc_feature (316)..(316): n is a, c, g, or t
cggcttngccttcccngatattttcaatngctgcnctcgttagtatncccatctttttttttttaaaaactgcctgtctttttttctccttacaacttcctaagttnagcctcaagtgagaatctcngcaaattgacttttagtaatattttaattattgagattattncggtgtggtccagtgtggtgaatcctatagtcattttactcgtgtattctaatgtcancaggnttgtgctagtttagatgccctgtttgcgtctaatcattttatgtcgaaaatagatgggggagaggtcaaggacgtagtctgtgnaaacaatgtgaaccgggacctctgatcttcattcctgttccctttttctcccaacttatttgt

SEQ ID NO: 233203 - DNA, 711 bp, Homo Sapiens
cccgcccaccatgtttaaaattttttggccagccccccacaattttttttcttctgtttttgtttgaatctaaattaacccctttccagtatgctgacagagaaagaaacagaaaagtgagcaaataattgagaaaactaaagcaaaatgagaattcctctaaataaaatttaggacaacttactcaggtttgtttatttagtctgtttcttctttaacccactgggttatttctccattttctactcttttccaacatacctacatacataacttttatatgttttcttcatccagaacctaagccccctaatgtgcttaaactcaaatctgtaccttcacactctatccctctgttcttctttgcctgtataatatctatactataatatctgccaccagggacaactgaatatatggcattatcatccaaatcactttgccttcccgatttttctatttctaggtttctctagtcaatctaggcttgtttcccatcaccccttcttttctttctgatccataatcagtcagacaggatattcaggcaagtctactggtgaaacagctctggatttatcccatttctagtctcactgtaaccaacatgtttcaggcccttatcacacagtatcttcccgcatggtctcctgactctaaagtccatctagcttacataacactcctagacagcactgcttgagttctctt

SEQ ID NO: 233204 - DNA, 463 bp, Homo Sapiens
tgttaattgcatgatcaacagttcatttcaggaaattgaggatgacgctgatgtgaagtggaaatttgcaagggcaaactctggttttcctactttgaggagggcagaacacttcctgtacccttcaatctggtgccgagtccaaagtccctgttttatctcttactgaagcttaaaaaatggatttctgagctgttccagggccataaaaaaggtttccaggaagatgcagagatgaacaagataaatgaagaaaagaaacttggaattttaggaagtcatgaagacctttcaaaattatcacttgacaaaaaacaggttgggcacaataaacaaccaagtataaggagctcagaagatttccatctaaatagtttcaataatcctccaagacaatatcagaaaataatgaaaaggctcattaaaagatatgtactgcaggcccagatagattaaggataga

SEQ ID NO: 233205 - DNA, 229 bp, Homo Sapiens
catcagttacatgtttgtctttagaatgaagaaggatggaggagagcagtgtgggagaacatgaagatgattgagcagtacaatcaggaacacagccaagggaaacacagcttcacaacagccatgaacgcctttggagacatggtgagtgtgctgtggactgctgaactctgtgcttcctctcctcagttctttaccgaatcaatctctatcttctagtaacccggac

SEQ ID NO: 233206 - DNA, 367 bp, Homo Sapiens
  misc_feature (73)..(73): n is a, c, g, or t
  misc_feature (276)..(276): n is a, c, g, or t
caaggaaaactgagttaacattccttaggtcataagctggtggcaggtccaggaagccccgcctcctaatttncagacatgtgttccttacacaatcactctaaatatttaagcatgtctaattgtttattagattaactttccctcggcaaagagagatactcctcccaactaccatccctagtatattcttggccctggaaaagccctgcaattaaagacgccaagaacatacctacggtcaacaaagttgagtctgttgcacagaagagagcnaaccacggggaaccgtggcatttgagtgacagggtgttaggaagggcttgttccaggatttgggtttgtatcaggtgactgaggggagggt

SEQ ID NO: 233207 - DNA, 849 bp, Homo Sapiens
  misc_feature (270)..(270): n is a, c, g, or t
aagatctaatatccaccattgaaaaaccttttgcggaaaaggaaattatatcagaattcctctatcacctaaagtcctggtttcaccagtctgtccatatgtgtcccattaactctcccatctgcatgagtggtataatgtgggtgcttaagaagataacccccccaaatcagtagcttaatcaaaatgaattttgattctcaaaccccagtaggtgtaattggtagaaggcattgcactccacagtcattcaaggatccatgctaaggnaaggttgccatcttctacacatggcttctaaaccatccaaggtctctctggatgacaataaaaaactgtcagtggggtaaaagaggcactggacatcatgtggaaggtttttgtggcccaggcccagaagtgcctatcacatctgtccatattccattctcagaactgtcactgggcatctaaccacaaggatggctggaaaatgcatagctgtgtgtccaggagaaaaggaaaataggattgttgaacaactaatgaggttctgccatggccttctttttaggtcgccaaatatctgctttcctctctttcccacacatagaagacactcattcctaccccagggtctcataccattattgcatccagtccaaagtccaagggggaatagactatcctctctatcagatccagatatttcagcttctggtttggtattcttggataaaaaggtgaattttctgcctcccaatgttgaggtagaaaatgtctctgttctatctcttgtcattcccggccataatggccgaattcccgggtaccaacacaatggcgcgcttcgtgagcaaaaagagtaaa

SEQ ID NO: 233208 - DNA, 654 bp, Homo Sapiens
aggagagagaagcgaaaggtaaaagagagatgatggataataattgacttaaggagaggaattcagacgtctaaatcgaacttggtagtcatgcaagtgggtaaaagcctcatgaatacatttctaaagccagctttaacatgtatacacaggcttaataggcgctaattgtaatagatggttctgcacatactaaatttatatcctctgttggtttcaatatagaaagcctcaagacacaaaaaagactgcatctatatttcaccaactccaagatgccactgatggatcattattttacatacatgtaaaaaagaaaaaagctacaataataattataagacaccagtggttataaaaatacataccttttaggagtgtgaagaaagtgaaaaaatatgtacctcagaataaataatacaggtatttgattaatgctaacaagatatgggaagattgatcagaggttggtttataaaattcaagatgcttaggaaacacaggactgctactagaaatatatgaaatgtggcaatttgaaaagtacgaatgattcaacacaatattccactggtttgtataatgttctggaaataagttatttttcctttaaatttttctgacttgcccccaaaatgattaattcaaaacata

SEQ ID NO: 233209 - DNA, 666 bp, Homo Sapiens
  misc_feature (19)..(19): n is a, c, g, or t
  misc_feature (44)..(44): n is a, c, g, or t
  misc_feature (93)..(93): n is a, c, g, or t
ccagcccaacggtaaacgncggcaagtgaattgtaatcgactcnctatagggccgattgggccaagtgagctcgaattccggccgccataatnaattttttttttcgagaccacgtcaatcttttaattggtatagaaactacttttatttcaagagagcccttgtgctctggtttgattttgtgcacaacatatacaaaatctatggctgttgagttaaggtaggatcagagttaaaactacctgccaagatagttttgggatgaaatgactatgtttaccatctggagagctatttgctctctagaggtgagaggagtccatacaatgtctctgctcggcgggagggtggagctggctgtccgaggaggggcggccatctcctctgcacactaggtgcaggtggtgcggcactagctggaaatcatggagctggagtgagactggctggagaaggtggtggtgcactcaactgggagaagccactgtggctggactccaggctcgtcatggaacctctgaaatcctcggagcctatcactttggtgtagtacatcactttacagttgtgcgaagagatctgcagggacgcgagcacatcatccacctggggcaggctgctgatggtgcacacgggcatgctgtggaatttccactgcaggatgc

SEQ ID NO: 233210 - DNA, 690 bp, Homo Sapiens
  misc_feature (6)..(6): n is a, c, g, or t
  misc_feature (8)..(8): n is a, c, g, or t
  misc_feature (67)..(67): n is a, c, g, or t
  misc_feature (91)..(91): n is a, c, g, or t
  misc_feature (145)..(145): n is a, c, g, or t
gggtgntngttgatagagccagggtctcactatgttgctcaggcttcatcttgaactcctgtgctcnaacgatcctcctacctcagcctcncaaagtgttgggattacagaggaagccatcacacctgctttgagccattccatntgatccgtttcaaaaaccagttctgagtaagattccccacctttttttttccttaagcataattgtcttaggtttgcctagtttcattttaagaaaaggctccactggtattacaaaaacacaaaggaaaaacaagaaaaaaaagtagtagtaataggaaaactactgccatatatcatcacaatctatataaaatgtaattacctaaagataatttagttaacaccaaaaaataagttaattttctttgacacagactcagccatcataattttttttttaaacagggtctcaccctcttgcccaggctgtagtgcagcggcatcacggctcactgcaacctcaacctcctaggttcaagcgatggcctcacctcagtttcccaagtagttgggactacaggcacgcaccaccatgcccagctaattttttgtagagatcgggttttgccatgttgcccaggctggtctcgaactcctgagctcaaaccgattggcccaccccggcctcccaaagtgttgggattacaagcgtgagccaccaca

SEQ ID NO: 233211 - DNA, 833 bp, Homo Sapiens
  misc_feature (7)..(7): n is a, c, g, or t
  misc_feature (9)..(9): n is a, c, g, or t
  misc_feature (24)..(24): n is a, c, g, or t
  misc_feature (145)..(145): n is a, c, g, or t
tgggaantngcccaaccctggtanggttgaaaattttccccaaaaccccaaccatatggtaaagtccaccagaagcagatggctttaaaatcaaccaataaataaataaaccaagttataaagagtcagtaattaccattaaacncaaacaggattacctttccttcctccaaaagggtaggtattaggcagaaattaccacactatattcattgagatcatacctgctcttaaaatgttatttttttaatctactgttttcaggaattttgtcttcttttacccaaagtgaatttatatggactgaatttagaaatggctgaatttactcaaatttaatttaatttagattcaaatgagtatagttgattcactgctaggaaaattatcaaaaataagctcgtttcctcatatcacgtagataatttaaatttatattagaaatgtattattttaagtgatatatgtctgtatttccaggaaattatgaagtgtttacgtcctcccatgcatttgaacacattggctacaaatagtcattcctattaataataaccttgcaagaaaaaaatatatggtattctacattgatttacattattacataagacaactttcaagattccctggtcatgatcacattttaaaatatgcgataacatgatgtatcattgctttttccatatcagtgtacattaaaagacatataatagcactctaagtatggttcctagatctgtagcatctagaaacttgataaaaatcaacttctcatacttatacctaataagccagaaacactaaggtcaggacccagtaaactgtgtttaaaa

SEQ ID NO: 233212 - DNA, 379 bp, Homo Sapiens
ctaagaccccagagctctgtcctatccagagaggctaaaccaacttggatggctcaagacaatatagaaataaacgctaaaatatgggatctagagtacacccagggttgctatatcgaattcatgtttctagaggtcagttcaacacaatgaatgaagtggaccaggtgtaggtaagcagggagtggtgctggatgttgcaagctggaggacatgtgccaagggtgaaggggggcaggaccactcagttactctgttgcccagtagccatgtgggtccaatgttgtcacatgactttgttttttatgagaagctgggtgtctgttttttccataaaatatctttaaatttttggcaaataattcagtttaaaaaaaaa

SEQ ID NO: 233213 - DNA, 690 bp, Homo Sapiens
  misc_feature (103)..(103): n is a, c, g, or t
  misc_feature (125)..(125): n is a, c, g, or t
tcccaggagaccctttgtgttggcttaccaggtttgagccgcgaccagaaatttgcagcaggcactttagggcaaatgtgcactgtggacttgggagaaccantgcattccttgatcatcacagnaggcagcatacatccaatggagatggagatgctaagtctgttttccataccagaaaatagctcagaatctcaaagcatcaatggactttgaacatagatatttaccattgtctgatgtaaatttcagccatatatggattgatatggtttggatgtatccccacccaagtctcatcttgaattttaatcctcataattcccaggtgttgtggtaggtaattgaatcatgggggcagtttccctcatgctattctcatgatagtgagctttcatgagatctgatggttttataagtgcctggcatttcccctactggctctcattctcactcttgccgccctgtgaagaggtgccttccaccgtgattgttaagtttcctgaggccttcccagccatgtggaactgtgagtcgaaaattaaacctcttttataattacccagtctcgggtatttcttcatagcagtgtgagaatggattaatacctgaatgcatgcatgtttgtgtaacaaacaggtcttttggcttatctagtaagtataaaacaagtgaccaaaaagaaaaaaa

SEQ ID NO: 233214 - DNA, 592 bp, Homo Sapiens
aagttttatcagatgatcaaatagtagatctgatacatccccattgtatgtacgacattttcaaaccaagtcttaacttttcaaggacattttagtagctaattcaggggagggggaagaatgatgcaggtttttagattgactgactatttttgagttatggggctcattttgaaagactgctgtccagatcagcttgttgctgcagataatagaaggttcttatgaatccaagttgtatattcacttgtaggataatttaaaaattagattttttttgcatatgagcaaaaaccttttgctggatacaggagaaggttggactttatctacagttatcttttgattacagcaacagctctgggtgagagtagaatttatagagggataatttgtcaagccatagaaagaaaatttaaattaatctagtaagtgtatgacctctcaccattttaagaggtatcagattcatttgcactattaggaatgctagttttgtgcaaaaataatgccttacctgttttttccccacatttaggttgaaaagctttcaaatgttccaagttatgctgaaccaaaaaaaaaaaaaaaa

SEQ ID NO: 233215 - DNA, 480 bp, Homo Sapiens
gacccggcataaaaagaacctggtccggtagacctagcctctcagtatgctaggaacttacactttttagttgcctttaccaagtattgcagatactactgcaaataagtgaagaaagtaacagcatttaactgatttgggaacttggtttgatcttgttctaatgacccacttcgaatggtggttgaaagtaaaatctgtatcgccgtcttatgtttccatttacctagaaatactttacctttgagcacaggaaattaatccccttctggttgttctccccctggcattggttttaaatatataatgattatgtttgttgtaggaaaaatagaaaaacaactacaatagaaaattcttcccatatattattttgaaatacatatttccgatccgataatccattgctctagcatggaaaatgttggatttacttgtgtttgctttttccaaataaaatggaacttttgtggctacatt

SEQ ID NO: 233216 - DNA, 657 bp, Homo Sapiens
tgtgagaatttgcaagcggtgactgaatttttaaattcattgacacccacatttctatgtggcacttacagggacttcttcattgatatcaggactaatatttatatttgaatggtggtacttccataagcatggcacatcttttattgagcaagtatctgtaagccatttgcaaccactgatgggaggaacagagagcagcatttcagaaccaggttctccttcgaggaacagagaaaatgaaaccagcagacagaatttgtcaggtgactacttttctaatgtgttttcagagctgtgtatttaagattgagtttggctctgggagatagaaaactcaaaacagcagagtgctgtggtgtgcatgtttgtgtttcccccaaaattctaatcaccaatgtgatgttacgaggtagggtctttgggaggtgatcaggtcatgagggcagtgccctcagggatgtgatgaatgcccttatgagagaccccagagagctgcttgccacttctaccgtgggaggacaccacgagaaggcgccgtctgtgaaccagaaagcagaccctcaccagacaccaaatttgttggtaccttggtcatagacttcccagcctccagaactgttaaaaataaatttatactgtttataaaaaaaaaaa

SEQ ID NO: 233217 - DNA, 570 bp, Homo Sapiens
ctcaaacttctgattttatcaaaggtttgccagccaataaagtgcatcccaagtatacaggggagaaagctagactcctacagggtcctagagtttaagtaatttttttgttattaatataggtaataatttttctaatttttattttttggttccaaatgtaaagctccttgtgtttacctctgtttatgtcattcttgacatgtttatctaaattatgtgtgctctgtgacaggtgaaatgtaaatctgggatccatagtcaagatatcataaggacctacttcccagcctacctttcttcctctacctgataatgataatactcaaaataacaacattcaaaggaaacacaaagaaatcctgctttcacatctcctatttcttgggctccttaataactactgatggtttgttcatgaaaaaaaatttttaaatcaaaagattgtacttggccctgagttgaaaaaatttcaaaaatcaaaagtttgtacttggccctgagttgaaaaaaaaaattcacattctaagaataaacagaaaaatgttcttcttggaagtaaaaaaaaaa

SEQ ID NO: 233218 - DNA, 469 bp, Homo Sapiens
cagattgttttattctggtgtgctgttgtgttctcatatggttgtctttttggtcttgatagtgtatcagtaacagagtacgagtaacaaacagggatctcttctgaacggcgtgacattagaaaagctgtttacggcctcaactttgctgtggtttattaagacacagatatgtgttcattctggggccaagcagtaactggagagtggcacttattgaggccagtatggaggcagtacagagattattgagattaaaagaaagaaacaggtggaacggatctatgtaatggaaagctaaacagaatagttcgtggtacacagtagaaaagcattacatgtttattaagatatggtcatcttccatttattaaagttacatgttttataatttttagagtatatagaaattctctaccctatcatgtttgccaaagtcagaacaataacttcatttattaaatataaa

SEQ ID NO: 233219 - DNA, 462 bp, Homo Sapiens
  misc_feature (50)..(50): n is a, c, g, or t
ttggagttgcctgacactgaactcctgtcccctgaagccggcccagaccntggggacttacccctcgacaaccagaggacttagggccagccctgcgtgaactgcaggggcaatggatggtaaagccctttggctcttggcaggcagactttccaggaagaggctccatgtggctcctgcttcactttcccacccatttagggagacaatcaagctcttagttataggtggctcccagggtctaattggaggcacctggctggggtccactctgaccctagacttgcctaaaagagctctctaaggggcagcctcttacgatgccctggtgtctttctcctgggcttctatccctgtgaggagaggtgctgtctgctggagcctctagtccaccctctccagtggtcactcttgagtcacatctgtcacttaattatttccttctttatcaaaaaaaaaaaa

SEQ ID NO: 233220 - DNA, 642 bp, Homo Sapiens
taagtgaatgagtaataagcggacatatatgtacatgcacacactgtagtataggagaagacatataaacagctaatttgatacagtgcaggatatgtactgatcaactgggtagattttgccatacatatgtaagttaagatttgcaggtaaggtggtatcttacctgcttggagagatgtgacgggagaggcatattgtaaagaacctttggattccatgcctaggaatttggactcttctctgagtgaaaaggatgttaaatcagtccccacttcttcagggaagtgacagaaaattggagtgaagtggaggatggattttgagctaggagagccagaagaaatgctgaagagttaggccattgtagtattctgagcaggagatgatgaaggcctggatcagtagagtgattgcagaaagtagagtggagattcacatgagaaattgaagggatttacatagaagaactgcgttagaatttgttgaatccattgcctctaatttcctgatagatatttttagtgtaatccttattggtgaatttgcaatttttcctttcagactatttctgttatcctttgggtatccagttactgtgagagtgtcctacgaccatacaaactaaatttacagaaaaaa

SEQ ID NO: 233221 - DNA, 434 bp, Homo Sapiens
tgatctcctggagctgggacactcttctgcctgtggacatcagagtctaggatttctagcccttggactccagggcatacaccagtggcctcccgaaggatctaaggattttggccttgaactaagaattacaccatcggcttccctgggtcttaggtttttgggctggattaagtcctgcttccagcatttcagggtctctgctgtgcagatggcctgttgtggaacttctcaacctccattatcagatgcattaattcctccaataagtcccatttcatatatagtcatttaccccacaacatttcagtcaagggaacagcatataagatggtggccgtccagtaagctaaggttaatttattaattatttaatttatttaccttgagttcaagtcacaattaaagtacatatacctttggaaatttgaaaa

SEQ ID NO: 233222 - DNA, 246 bp, Homo Sapiens
acgaccctctctcctcccggctgtccccgagcccctctttgcttccccagctcagccccctctctgacggcttctccctcccacccccaggcgaatctccgggctcccacggggtgcccccgatccccggggtttaggtcaaccgacaaaattattttaaatgggaagatttgaattccattgaattcatggaagcaggaatccatctggtcatattttaaataattttgaaatgataaaaaaaaa

SEQ ID NO: 233223 - DNA, 551 bp, Homo Sapiens
  misc_feature (7)..(7): n is a, c, g, or t
  misc_feature (21)..(21): n is a, c, g, or t
  misc_feature (258)..(258): n is a, c, g, or t
aggaaanatctgtccttggcncaatgtgtaaacacttgctgaggaacttggaataacttgcagtgtcttgcagtattgtgaaaccagcaacttgttcacaattcttctgaatttcttgggaaatttgaagtggagtacctgtaccaacatgaaatgacacgaatttaagtgacgctcaacaacgaaaagcaaaaagaaccaaagaggaagcaactgaaacaacatctggatgtatttaaaaatatacaatgcctccanaatcaggtgtcattaatgaaaattctgaagaaatgccaccggacatagccaacgcacctacgctgttgttattcatttcctgcttttcacagaaaacaattttgttgcatggaagatcgtgaacttcaaagggcagaggggaaactgtcccttggcctctacccctccaaggccccactttttcgtcaacactccttggacgcagcagaagtatgaacataatatggtcctgaatgaggctgagtctttgggcgcagaagacccgggttaataaaaataggaaggtaagaaaa

SEQ ID NO: 233224 - DNA, 699 bp, Homo Sapiens
gcagaagcgggagatctcagagacgacggcagagaccaggaaatcagagatggtggttctctcacaatgattcactttggtctggtgtaaacattaggaaacaaagaacactgccttcttcatatctaaacttttcatggcctgatacagacttaaaatcccccgtgtggatttttaacaagagacagtatgaatcatataaattagttaagagttttgagttgagtgtttgttttcaaaataaagttttattatttcaaacacatgcagcataacagcaaagtgatcgtaagtaaaagtcttcaacctacttattttcaataatgtaaaattttgaaagtgtcttaaattgtatgttaattaggtgctacaaaaatagaatatttaaactttgttctcccaggtactttaaaaaaggggcagtagggggcaggcatagtgctcatgcctgtagtcccagtgctttaggaggccaaggctgaaggatcacttgagcccaggagttcaagactagcctgtgcaacatagtgaaacgctgtctctagaaaaaattttaaaaattagccaggcatggtggtacatgcttgtgaagctgaggcagaagaattgcttgagcccaggagttcaaggctacagtgagctgtgatcgcgccactgcactctaacctgggcaacagagagtgaccctgtctccaaaaa

SEQ ID NO: 233225 - DNA, 518 bp, Homo Sapiens
  misc_feature (20)..(20): n is a, c, g, or t
ttaaattttaagtttctcanagggtgtccattccctgctgctaatattttcttcactatagatgtctttgtgagaaggtttggtacttttcaaaacctgttggtcttagaaagaagaaggtaagaattgtgaaaagctgattgcgactggtgcccttgtaggtcaataatgtctattttgatgtggcctgaatatttcacttcattttatatggtcggatgctccatgttaggattaaggggtaattaatagtaatgtatgtggaattcagtgtgagttgattcattcatctgattctgtatttaatatctaaatgggatcagtgacactggtaggatgggtgagagaagaaaattggctaaaattgcatcatggaagatcaggcttggatggggtgccataggtgggcctgaggggcaacatgagatcccaggagcacaaacttagaggggtgttgaaagataccaagacaaactgtctgctttaacattttgccaacagcccttatgagcctcaag

SEQ ID NO: 233226 - DNA, 485 bp, Homo Sapiens
cgccactgcactccagcctaggtgacagagtgagactccatcttaaaaaataaataaataaaataaaataaatgacatcactttggttcagaactctaaaatggagggaggaagccattctaaaaaggactccctacatgacctgcaacttgaaaaaaaattaaaagctccaaaaaaaaaaacaatacaggagcttaccttgaacctttgaattgggccaaattgcgatgaccactgcatcctggaaaattttatttcaccagcactacaactcctcaacagcaccaaccaataaactatggatttttgtactaagccagttgcctctttcaaaacaacttgtcaacttgtctaatcaccctcagctttttttaaaaacccctcctctaccctctctcttcagaacacaagtggcttctagctgaatctgtctcccaaattgcaattcctgagacctcaataaaaacaccttgtcttgctaaaaa

SEQ ID NO: 233227 - DNA, 563 bp, Homo Sapiens
  misc_feature (91)..(91): n is a, c, g, or t
tgcagaggaggggagaagccacacaacaatctggacccaataaagtggagagaagggcgtctctacacagcccggccagcgtggagggccncaggacagggacccaaaagcttgacgtcactgaacagggctgggtactggcagaacaggaagatttggccagaggtgacctcagtgttccctccaggggcatccaggcccctctgacctggggagaagaaggcccatgctcaggcccacctccctcttcccatcagagcccatgcgtcctgggcaccaccacttccactctgcttttcgaggctccggagggctcttcctgctgtgaaaggaaaggagaagaaagccctgtgggcaatggcaacctctgagtctggcattcttgccaatggctggccagcgaggagaatctcccgagccctgacacacaaaggcattttgtggctgcagaggaaatgggttggctctgaacaaagatgcagtttctagggccgtggccccaaatcgcttccccgagagtgaattttaacactgtaacaataaatactactgcacagcaaaaa

SEQ ID NO: 233228 - DNA, 476 bp, Homo Sapiens
agaggaaaaaaggttacttgcttgagacaggaaactatcacctttgaaagcatattaagtagttggcttactttggaacacacagtagactgaaaatgtgaactaatactttaaaattgccgtataatgatgtcattgcaagccattcatctatccaatgggggaaaatgtggaggtctaggcttgtgttgtcacaaaatacaccttttagataatccttacctgtacagatttttataactgttgttatcataagagaatggctacatcattatcctgccttttctgggtgtttattttgttgtttttgaaagtggacaaaacctcaaagcacaattttgttctgatatatccagtttagtagtttatgctggttaaatgatcaaagtaattgcttaaatgtcttgtggaattagctgtcactttatagtttatgtattgtggtgggtaccttaataataaaaagatttttaatg

SEQ ID NO: 233229 - DNA, 547 bp, Homo Sapiens
agtcatgtatatgctataatcatgacagatttattcaccaaatggattgtgattttgcctctatgtgatgtttcagcatcagaagtttctaaagctattatcaatatatttttcttatatggacctcctcagaaaataataatggaccaaagagatgaattcattcaacagaaagtctttatctcttgcaaggttcagtagtggcagatcatgactacattggattgcctgaaattccgattggagcatatcaagcaaatattctggtggaagatgcaactattggtatagtgattaatgaattactgacatcaagcaaggatcgtgaactattagaatatagaaatacgaaaatctctccattgatagacgatcatagttctcttgaaaagcagactttcagtctgttggactcttcaaaccaggttcttgaatacttaagttagtaaataccaaaatttatttaaagtgcttgtttagaatataaattcttaatgatatcttattcattaaaaacgttgaaaagaagaaaaaaaaaaaaaaaaaa

SEQ ID NO: 233230 - DNA, 616 bp, Homo Sapiens
ccgtcaccctccccaagggtagaggattcatctgggagcccccggccgggccccttttttctttttttgagacagattttcgttctgtcgccacaggcaggagtgcacggcgcaatctcggctcactgcaccctccaccacccagattcaacgattctcctgtctcagccgcctgagtagctgggattgcaggtgcccaccaccacacccagctcatttttttgtatttttagtagagatggggtttcaccatgttggtcaggctggtctcgaactgacctcgtgatccacctgccttgtcctcccaaagtgctgagatgacagacgtgagcagccgcgtccagcctaaattgactttttcaaaggctggtagagtgcctgtgagcaagaatatctgtgtcatacacgcttagcattttcctatcaacctggaaaatgtaccacagtaaatgttctagtcagtcaggtagatggaactgaattggggaagcattatcagttttaaaggaaagatcccaatgccaagcatccattgtcttcagaagcaacacatcatttttcacttcatgtcaatttgacttttaggaaggaatagacatgagcttgggagaaagac

SEQ ID NO: 233231 - DNA, 951 bp, Homo Sapiens
tgtgtgctgttgtgcggaaggtcgagcagagccaaagtgtttgctaaggggttcatagtgcgaggtgctgaggagtcggacgtgcgcgtgatggcgggatacggtgaggtgcggggctggtccgacgttattttcatggtggtactgctttgggcgttgaaagaggctcgaaggtgccggccgtctgtaaagtgggcgacgctcctgggcctggggtgcaagcatgattcagttgacctgactctgaactgtttcccaactctttatgctaaactgcaatcttcaacctgttccctatccacacattccgcgatgaaggactggacagtgagatatcgggaaaccccatgaagatagatgcataataaaggtgaagatcatttaaaatgtaacactgaactccagttcaacaaatcttcttaaaataacagatgtgaagtacacatagaaagagcacaccatacgcttgcaaatatggaccaggacaaccaataccaacacatgacacattcgaataaaacggccgacttgacagaaaaaggaaaaaatcctttgggcatctaaggaaaaacagcatatgactgtcaggggaagaaaacaagattcatcaggcttttcatgcatcactttatgctggaagaaaacagaataaaacaagatactcaaagaaaatctgggccaagaatttcgtatccagcaaaactgaattcaacatcagaaactcaaggaatactgtccccaagatgacactgactatagactggttatgagacctgaacacacagaaatgagtcaatggtggtaaaaaggagcaatttttctgacaacgtagacacagtgctgttttcatcatcacaattaatgctatggtattagtattttttttaaatgctaaatgctaaagaggaataaaacaagtgagtgattaagggatggatattccatgccatt

SEQ ID NO: 233232 - DNA, 557 bp, Homo Sapiens
gaaaatggagaaattgctgctatcatccatcctaatctgcaggatcaagactggaaaccactgcatcctggggatcccatgtttttaactcttgatgggaagacgatcccactgggcggagactgtaccgtgtaccccgtgtttgtgaatgaggccgcatattacgaaaagaaagaagcttttgcaaagacaactaaactaacgctcaatgcaaaaagtattcgctgctgtttacattagaaatcacttccagcttacatcttacacggtgtcttacaaattctgctagtctgtaagctccttaagagtagggttgtgccttattcaactgcatacatagctcctagcacagtgccttattcggtaggcatctaagcaaatttcttaaattaattaatatatctttaaagatatcatattttatgtatgtagcttattcaaagaagtgtttcctatttctatatagtttattatacatgatacttgggtagctcaacattcttaataaacagcctttgtattcagaatataaaattgaaatagatatatataaagtt

SEQ ID NO: 233233 - DNA, 421 bp, Homo Sapiens
tattagtatttttagagacagggtctcactctgttacccaggctggagtgcagtggcacaatcataactcactgcagcctcaaactcctgggctcaagcgatcttcctgcgttggcctcccctgtagtcccagctactcgggaggctgaggcaggagaatggtgtgaacccaggaggcggagcttgcacatcacgccaccgcactccagcctgggcgacagagcgagactccgtctcaagacaaaaaaaagaaaaatgaccaaatttaaaagatatcctttaggccttggctgaacacaggatctctttaaaaagaaaaaaaagataccattttaggctaagtgcgttaaaattcctacagtcagatttacaatattaaagagatggaaatcacataccaaggggacaaaattaactttag

SEQ ID NO: 233234 - DNA, 357 bp, Homo Sapiens
tgcagcagcgacgacgagcacgatgttgggatgagagtcggagccgaataccaagctcggatccctgaatttgatccaggctccccggcggtcacgagatttcagcctgtgcagggattgggcgagagttccgcatatggaggcgcccttgctggagcctctcggagtggagcgcgtttccttctccccaccctgcctgagacccttctcagttaaggctttggacagactttgaaagggacccacctttttttttcctccttacagtttgtcaatttttgcccagtgcccataatattgcgtttgtgtcagacattggatttctatgttagatattaaagagcttacttgtatttt

SEQ ID NO: 233235 - DNA, 536 bp, Homo Sapiens
  misc_feature (26)..(26): n is a, c, g, or t
aagcactgaatgccaagaatacctcntgaactctctctccaactgctcagaagctctaaaagcatgaaaagtggttaaaatcttacaggaccaaacctgcattatttaatcagtaggttgtaatttctaactctagtaaatatctttttttaaataatcctatcctagcctgttctcaaatatggcttaaatatacaaggtatatatattttttaataaattatttatctatacttttttgaaacaggttaatactctgtgcatcacatgtttaacattttcattcaagatgtggaaaaaatccctctgctgaacctagtctatacaccaatattatgtcattcaaggtaccgacaacctgtttcaggagagagacgttcatttttccctaatgaaatgcaagcattctgttagacctattatattgcctgttaatttgactgtaatgaatagggggtagaaacaaaaggatcaagtgtgttataaaacatttgatgttaaaaggagacaataaaaaggcaatggtttttcaaaaa

SEQ ID NO: 233236 - DNA, 538 bp, Homo Sapiens
agctcccggcccctggcgctgacgtcaaggtccacagggcacgcaagaccatgccgaagtccgtcgtgggcctgcatgcagccagtaaagatcccagagaagttcgagaagctagagatcataaggaaccaaaagaggagatcaacaagaacatttctgactttggacgacagcagcttttaccccccttcccatcccttcatcagtcgctacctcagaaccagtgctacatggccaccacaaaatcacagacagcttgcttgccttttgttttagcagctgcagtatctcggaagaaaaaacgaagaatgggaacctatagcctggttcctaagaaaaagaccaaagtattaaaacagaggacggtgattgagatgtttaagagcataactcattccactgtgggttccaagggggagaaggacctgggcgccagcagcctgcacgtgaatggggagagcctggagatggactcggatgaggacgactcagaggagctcgaggaggacgacggccatggcgcagagcaggcggccgc

SEQ ID NO: 233237 - DNA, 506 bp, Homo Sapiens
  misc_feature (21)..(21): n is a, c, g, or t
  misc_feature (50)..(50): n is a, c, g, or t
  misc_feature (68)..(68): n is a, c, g, or t
  misc_feature (75)..(76): n is a, c, g, or t
  misc_feature (200)..(200): n is a, c, g, or t
  misc_feature (220)..(220): n is a, c, g, or t
  misc_feature (246)..(246): n is a, c, g, or t
  misc_feature (262)..(262): n is a, c, g, or t
  misc_feature (287)..(287): n is a, c, g, or t
  misc_feature (344)..(344): n is a, c, g, or t
  misc_feature (348)..(348): n is a, c, g, or t
  misc_feature (354)..(354): n is a, c, g, or t
actcggaaggctgaggcaggngaatggcgtgaacctgggaggcagagctncgcaagctagctgagatnggccacnncactcccagcctggcgacagagcgagactccatttcaaaaaaaaaaaaaaaatgttcttgggccttccagaaagtcaacaagcaaaatgcattgagcatcccaagaaactgttgccatgacctnactttgacttgtccacattngccttgactaggccacttctacctcntggtagccattgcttngattgtggtttgtcttcaggatggnactggtaaagtcctgttccatctcctgttataattcaaggaaatgcttcagggtctngatnccactngtttaaaatttccattgaaagctctgctcttgtctgcagctgatctgggcacaacggttttggcacccatcgagtggaaagcttgctcaacttcaattttgaaccagttgagatgtcctgtggtccttggctattgttcttgttaatcgtcc

SEQ ID NO: 233238 - DNA, 545 bp, Homo Sapiens
  misc_feature (5)..(5): n is a, c, g, or t
  misc_feature (45)..(45): n is a, c, g, or t
  misc_feature (196)..(196): n is a, c, g, or t
ttgtnattaaggacgtcagccaaaattggcaactttttcaagcanctggctcaagaaattaggaatttctctaataataagccttcgttttttgatttcaccaatttaaaagggctgtatagttaggatatgattccagtttcccatcagtgcaaattgatatttttttctgttgacacattgtactttgttttcnaagactagtttatagtgttcttttaaaagcaaagaaaatatctttaaaaatcccagctttttggctgggtacggtggcttcatgcctgtaatcctagcactttgggagggtgaggcaggcggattgcctgagctcaggagtttgagaccagcctgggcaacatggtgaaaccctgtctctactaaaatacaaaaaattagccgggcgtggtggcgggcacctgtagtcccagctacttgggaggctgaggtaggagaattgcttgaacccaggaggcagacattgcagtgggctgagatcacgccagtgcactccagcctgggtgacagagcgagactctgtctcccac

SEQ ID NO: 233239 - DNA, 502 bp, Homo Sapiens
  misc_feature (14)..(14): n is a, c, g, or t
  misc_feature (24)..(24): n is a, c, g, or t
  misc_feature (44)..(44): n is a, c, g, or t
  misc_feature (49)..(49): n is a, c, g, or t
  misc_feature (61)..(61): n is a, c, g, or t
  misc_feature (73)..(73): n is a, c, g, or t
  misc_feature (80)..(80): n is a, c, g, or t
agtagttctcgtanaaagtatgcntaatatgaagcccaatttgnttcgntgaacttcccantgatccaaggtntgccctntgggacatttctgatttactccttcttccctatcctagcttctcacacatgtgaagtcaattacatcagatcctcctttcctcctgtcatccttctcctttccaggtcaaacagtgctaattcacaacccttattcaatggcgtgttcctaaaagcctcaccatcctagtcatcctgccctggctgtgcttcagtttgcagagaaccctctaaaaatacagtgaagagaatagcacagccctctagatatattctgattagtgcaaagcagaggaactgtcacctttctcagggtaggctactatacttctcttaatgcagcctgaggttaaatttggtcttcttggaagctagatcatcctgtcaattcatactgagtttgatgtctccccaaatacatgttgacagtgagactttgggag

SEQ ID NO: 233240 - DNA, 553 bp, Homo Sapiens
  misc_feature (5)..(5): n is a, c, g, or t
  misc_feature (29)..(29): n is a, c, g, or t
ttttntaaaaagttgtgccagtcacacangcttttttccaatggggtcaagccagtgaaaatggaagctttactcccatcaaaatcaaatcagattcacagcctgtgaaatccactcttggtgttttgcattcagaagcatcactataaatgttccagagtctaagacctccaccatctgctccattaggcactggatttcagtagcactacttgatttagaaaaagaaaaagaaaaacttagcatatccaagcaactattcagcctgaagcttcttgaaataagaatgatctggcatttccttccccttcagtgagcctcataactccatggtctctgcacaggtttacacctttaaatttgcattttatcaacctttctctggtgaggaattttttcctttttaggctatgatatgtttttttctgaatttgatagttgtatgttgaattgaaggctttattctgtgcagccctcctgttaatctcaaacgtgaatcttttgcaccttgttcttcaaagggtcattgaaggctctaccaggtcaatttcag

SEQ ID NO: 233241 - DNA, 531 bp, Homo Sapiens
  misc_feature (4)..(6): n is a, c, g, or t
  misc_feature (12)..(12): n is a, c, g, or t
  misc_feature (19)..(19): n is a, c, g, or t
  misc_feature (33)..(33): n is a, c, g, or t
  misc_feature (81)..(81): n is a, c, g, or t
gccnnnacatcnatccaanagttgccccagtgnctgaagccctcttgaatatcagcatcatgctctcccccaacttagggnattcgttttcctcccctgcagtagacatttgcgtgaaggttaatccacagttaggagttgcttaactcaagcctcagaaagcgtacactgcatctttaagaaatagtttacttgtgaatcagtaaacgtactagacaaagcagccattacttatgcattcctgcatatccagcaaggtgaaaataatagaataaacatcatatacttcattatgatatcggtttacacttccagggtacacaaaaagaggccatttcatcaagctaattgcctgaaagtaaaagagagagaactttagctattagtctattatggggcttttttcttaatcacaaataggggccgtgtgtccctggggggatgtgtattctaatttacaattgaactacagatcagagcaatcaatcttgggcagcacttttacagtgtaattgctgcaacataacaaat

SEQ ID NO: 233242 - DNA, 570 bp, Homo Sapiens
  misc_feature (2)..(2): n is a, c, g, or t
  misc_feature (6)..(6): n is a, c, g, or t
  misc_feature (17)..(17): n is a, c, g, or t
  misc_feature (25)..(25): n is a, c, g, or t
  misc_feature (38)..(38): n is a, c, g, or t
  misc_feature (45)..(45): n is a, c, g, or t
  misc_feature (133)..(133): n is a, c, g, or t
cnaatntgtccaagccnatttttgngattgggaaattnaggccanagtgggcaggtcacttttcccaccatgaaacagctagtcagggtaggtgttgcctttctgattcccagtccaagccttttgctagtcncagtgccagccaggtatgcttgtggggatgtcagtggcctcagaaagagtgacgacttgggactgatgtccccacatgctggggtcacaggacaaaggaaagggtttgtgactttgagctctcttcttaccctgggcaacctctctctctgtttaaaagcctggtgaccctgctgtgaacttcctcttttaaatgaacagctccctagagcatccttggctgagcttagcaacaaggggggagggagtgaggaggggtgggaggaaaatgggctcccccgttatcatgtcagtgcaatcactgggaattatggttgaggattaagagtcacttggggataattcagccaggctggagagggaaacacacacaaatacacacacactcacaacataaacagattgctaaagctcatggcagaaaacaaacagcatagg

SEQ ID NO: 233243 - DNA, 575 bp, Homo Sapiens
  misc_feature (32)..(32): n is a, c, g, or t
  misc_feature (121)..(121): n is a, c, g, or t
  misc_feature (127)..(127): n is a, c, g, or t
agtcaaagaaatttccagtatggtagtatccnttctgggccatgggattataacttaggcttcagttcaccagtacttcccaagtatggggtttgggtttgggctataatggtgtcatctnccaaangattaaaagcctattaaaagaatattggaaaccagaaaaactcattggttaccatcagagtttgctagggcatcagattcttactctgaagattgataaaggagagaatataatatttatcctgcccttcttgttatgaactgtattttaggcagccaagtaactgagggaaaattcttaggaaaatttccagctaataggtgcaaaagaaatgatagacttttaaaaaataaaagtttgaaagtcttaatgaagtagtgaatctagacagcagtatttcttggatgtgaaaaccattagatgataggttaatgggaaattttataatgtagaaatctgatcaaacccactgattgaagatgagacagtcaattattgtgtacctcctggtttgatgcaagagacagtacacaacagtagtaatagcaccaataaagaactcttgtcc

SEQ ID NO: 233244 - DNA, 470 bp, Homo Sapiens
  misc_feature (3)..(4): n is a, c, g, or t
  misc_feature (16)..(17): n is a, c, g, or t
  misc_feature (22)..(23): n is a, c, g, or t
  misc_feature (29)..(29): n is a, c, g, or t
  misc_feature (128)..(128): n is a, c, g, or t
  misc_feature (180)..(180): n is a, c, g, or t
  misc_feature (248)..(248): n is a, c, g, or t
  misc_feature (336)..(336): n is a, c, g, or t
  misc_feature (349)..(349): n is a, c, g, or t
  misc_feature (354)..(354): n is a, c, g, or t
  misc_feature (358)..(358): n is a, c, g, or t
ctnntgtctcaaatanngaaanngaaagntcatgcttttcagagttctgtgggttgtatggtgaattatcaaacctgaggacgtggtgggaacctccaaatttgcagccagttggtgaaaagtacatncggtctgtggacacccaagcttgcagctgcatctgaagcgagggcagcctancgggggctggtggccttaacctgtggcatttgatgtaacatcagggagttgacatcagaattacgtcncacaggccaggtgcagtggctcatgcttataatcccagcaattagaaaggcaagataagaagattgcttgagcttgagtctgagcccncagtgagctatgnccgcnccantgcactccagcctgggagacagagcgagactgtctccaaaacaaacaaacaaacaaacaaacaaaaaaaccctgtagcttgggatcagccttctcttctgttgtttttcttt

SEQ ID NO: 233245 - DNA, 614 bp, Homo Sapiens
  misc_feature (7)..(7): n is a, c, g, or t
  misc_feature (9)..(9): n is a, c, g, or t
  misc_feature (31)..(31): n is a, c, g, or t
  misc_feature (40)..(40): n is a, c, g, or t
  misc_feature (50)..(50): n is a, c, g, or t
  misc_feature (54)..(54): n is a, c, g, or t
  misc_feature (69)..(69): n is a, c, g, or t
aaaaccngntggactgtgccaaccggacctntggtcaaanggaggggccnaggncccccaggacttctnaagggggcttgataatgtggaaacattttaagttttcctctccggactggtttggctctctcaattcaggcaagttactgaagtacgttttttatctagaaaaaggtttgatgtagtctgtaaatggtccttgtaaagtacattgccatctcagaattaaaagatccactctcatttattatgcagaagttagtggtcattctttcctgtagatagtttatctcatgtaaagacccacccagcttggtttaaatttttttctcactgacgtataaccatcagctttgatacttccattttcaggctcagactttgaatttaaggaaactaaagatgactttattttcttttctcttggtttttttttccaaaaacaaaaaataaatccattacatgttaacatagatgataagagtgacatcttgcatttttgcaaatctttttaatgcctggtttaatagaagattctcagatctacgtcagactgttgtggttagcacaccatgtaacctctggaacactccactgtacactcatactttttt

SEQ ID NO: 233246 - DNA, 610 bp, Homo Sapiens
  misc_feature (2)..(2): n is a, c, g, or t
  misc_feature (50)..(50): n is a, c, g, or t
  misc_feature (121)..(121): n is a, c, g, or t
cngttaccaactggtctgctgccataaaatgtccaagctgcaaatgctgncaaagctccttccaatgcaagattttctgccgtatttaccatggtaacttttattttaatgatgcccaaancacacatccagttgtttgtgcaacatccagtgtggtctctggagcccatcccattagctgaaaagtatagtcagtgtcctgttccagtggccattaatggtaaaattcttcaattaaaaactgtggagttatgctgattcaaccattcactctatcccagaagtaaaatagatatacctacttgctgtgaaattattgagtttgtttagcttgattttctgtgcattacattagccatgagtgtattatagaggctaagaatgataactctatgaaggtttattatgagattcccatatttggctcaaggttttatacaacttgatatgctacctactactagtcttccagttccactattgcaactagttaacacatacattgtacttattgtgtgccaggctctgttctgactgctttatatgtatctactcatttaattttcacaacagtcctatttattaagtgccattgtcctcacttaaaggt

SEQ ID NO: 233247 - DNA, 590 bp, Homo Sapiens
  misc_feature (14)..(14): n is a, c, g, or t
  misc_feature (65)..(65): n is a, c, g, or t
tttaaaattttaangggtaaccttccaattctctccatttggttatggttatttggaccaaaggnaaaactcacttctaatattagcgaatttcattgtgagagacctatcctctttttaataaaccatttataaacctgttagcaatggccggaaccaggcctcctgaggatgcactggtctatagcaattgccctgctgcatttactaagaatccttacaaggcatttgtttaagaatattgtttatcaactaagaagattacagctttgaagtagagcaggtctcatatacatgaataataacatggcacgatgaatgcttctttagagtaaaaaggttttctttaacttgttaagtcagagttgtctaagtaattgtaatgtcatgatcatgtacattttgtccttttttacagaaacacactggggaatggagcaaaacagtctttgaatatcgaacacgcaaggctgtgagactacctattgtagatattgcaccctatgacattggtggtcctgatcaagaatttggtgtggacgttggccctgtttgctttttataaaccaaactctatctgaaatcccaac

SEQ ID NO: 233248 - DNA, 544 bp, Homo Sapiens
  misc_feature (3)..(3): n is a, c, g, or t
  misc_feature (6)..(6): n is a, c, g, or t
  misc_feature (9)..(9): n is a, c, g, or t
  misc_feature (13)..(14): n is a, c, g, or t
  misc_feature (53)..(53): n is a, c, g, or t
  misc_feature (67)..(67): n is a, c, g, or t
ggnttntgngtcnntggtggcctttgtttgagctcagtcccggttaggtgaantgaaaggcttggtncagcttcagtccctttgtctgtctgtccatccattcctccatccacccatctgtccatccgcccatctgccgtccatccatccatccactcttccaccctctaccccttaccttattctaaaaagaacttaggtaggttatggtgcctcacacctgtaatcccagcactttggggggctgaggcaggtggatcacttgaggtcaggagttcaagaccagcctggccaacaaggcgaaaccctgtctctactaaaaataaaaaaattagccgggcatggtagtgcacgcctgtaatcccagctactcaggaggctgaggcacgagacttgcttgaacccaggaggtggaggttgtggtgagctgagatcgcgccactgcactccagcctgggtgacagagcgagactatctcagaaacaaaacaaaacaaaacaacaaaaaaagaaaaggcagagtacaaggagatacatgtaacaag

SEQ ID NO: 233249 - DNA, 600 bp, Homo Sapiens
  misc_feature (10)..(10): n is a, c, g, or t
  misc_feature (17)..(17): n is a, c, g, or t
  misc_feature (90)..(90): n is a, c, g, or t
  misc_feature (125)..(125): n is a, c, g, or t
aagcagattnatagttncaatactaattggtatcagcttacccatttccaaaaccttgtgatgcttgtggtgtggttgcaaaatttaaantaaagtctaattctccttaaatttgattttgggangggctaatgctgatggccacacatccttcgtaggccagtgctcatcaattagaccctttcctatcttagggcctttacactttctgaaacttctactgaaaagcctttctgcagacactttcagaactcagcttcttcattccttactcagttcttttctgaaatgttttcttctttgtgaccgttcctttagtccttcaatgtttcttatcctcttccttcgttttttttcctgcacaatatttatcaccatcagacagatcttgtattaatttatcagtctgctgcctgtctccctgtcccataggatgtaatctctgttaccacaggaaataatttttgtttaatattgttcacagccagccttggtggcttatgcctataatcccagcaatttgggaagctgaggtgggaggattgcttgatcccaggagtttgagaccagcctgggcaacatggtgagaccaccatctct

SEQ ID NO: 233250 - DNA, 559 bp, Homo Sapiens
  misc_feature (8)..(8): n is a, c, g, or t
  misc_feature (11)..(12): n is a, c, g, or t
  misc_feature (41)..(41): n is a, c, g, or t
  misc_feature (53)..(53): n is a, c, g, or t
  misc_feature (86)..(86): n is a, c, g, or t
  misc_feature (104)..(104): n is a, c, g, or t
  misc_feature (109)..(109): n is a, c, g, or t
  misc_feature (135)..(135): n is a, c, g, or t
  misc_feature (150)..(150): n is a, c, g, or t
  misc_feature (170)..(170): n is a, c, g, or t
  misc_feature (185)..(185): n is a, c, g, or t
gcatccanggnncaggttttttaaaaaatgggacgtgtggntacctatgccantgcccattgcctttggaaggaaccatggggtanttagagccatggcccaanaaggnccaggggtccacgcagctccgccttnagaagttgcactgtncagtacagccaggcgggccncagaagccactgtgncagggaatgcatgtgtcagtgtgtcaggcgtggtcagtaaaaggagttgtagaaggtaaaccggaggaaaactcagattttaatccctcggagtaatctttggcctctcctccttccgtgtgtgatgtttctttgtttttaattttttgaccttctgctttttgattcgggattttggagccagaatgccttggccccgccatgaggtctgacttgtgctggctactttacccttggtgcctccatttccttcactggaaaatgggtgattgtgcagagtacagtgagtcaaaccattgagagtggtgcctggcacacagcattatttaagtatttttgcacttaatttcatgtaacataaagcactaataagt

SEQ ID NO: 233251 - DNA, 406 bp, Homo Sapiens
  misc_feature (3)..(3): n is a, c, g, or t
  misc_feature (10)..(10): n is a, c, g, or t
  misc_feature (16)..(16): n is a, c, g, or t
  misc_feature (48)..(48): n is a, c, g, or t
  misc_feature (54)..(54): n is a, c, g, or t
  misc_feature (60)..(60): n is a, c, g, or t
  misc_feature (74)..(74): n is a, c, g, or t
  misc_feature (131)..(131): n is a, c, g, or t
  misc_feature (151)..(151): n is a, c, g, or t
  misc_feature (206)..(206): n is a, c, g, or t
  misc_feature (403)..(403): n is a, c, g, or t
ttncatgtcnaaaatnaagaatagggctgggcccagtggctcacgccngtaatnccagcnctttgggaggccancggggcgggatcacttgaggtcagaagttcgagaccagcctggccaacatggtgaanccctgtctctactgaaaatncaaagattggccgggcatggtggcatgcgcctgtggtcccggctactcgggagtntcaggcaggagaattgcttgaatccaggtggcggaggttgcagtgagccgagatcgtgccactgcaccccagcctgggcaacagagcaagactccatctcaaaaaaaaaggaagaagaatagaattgtagcaataagtaaatttcagccatgtatatacgtgaactaattgagaaaataaagctgtcttcttattancag

SEQ ID NO: 233252 - DNA, 557 bp, Homo Sapiens
  misc_feature (14)..(14): n is a, c, g, or t
  misc_feature (32)..(32): n is a, c, g, or t
  misc_feature (35)..(35): n is a, c, g, or t
  misc_feature (41)..(41): n is a, c, g, or t
  misc_feature (91)..(91): n is a, c, g, or t
  misc_feature (108)..(108): n is a, c, g, or t
  misc_feature (114)..(114): n is a, c, g, or t
  misc_feature (130)..(130): n is a, c, g, or t
  misc_feature (140)..(140): n is a, c, g, or t
  misc_feature (155)..(155): n is a, c, g, or t
  misc_feature (274)..(274): n is a, c, g, or t
  misc_feature (376)..(376): n is a, c, g, or t
ttttcccagggatnccaggcaatccatggtanggncttccnagggcttataacggcacgtgctgccatgaatgccttgggcccttgatggncagacttggctcagtgnccaggnagaaagggtagagaancaggcctganaggggattcagggancagggtgtctggggccctctgcatgggggagccctgtacccatgccgcaccctccatggcaagctgcctcccatcttctccccaggtgatgaacatgtatggagacctggtcatggacncagtccctgaaaaggtaggcccaaccagataggtcagtacccagaggaacttctgcagttttaagcagctttttaagctcctttcatctctttcattttacncagagagggtctctgtttcagggagagaggtggtagtggtagtgtattaatttcaaatccgtaatcttgggctctggatttatcagttgttttcctttctgccagtatttagtgtttttcgctatggccagccccaaggattgggatgggttcctattgtaactattgtaaaacaagattt

SEQ ID NO: 233253 - DNA, 540 bp, Homo Sapiens
  misc_feature (6)..(6): n is a, c, g, or t
  misc_feature (9)..(9): n is a, c, g, or t
  misc_feature (28)..(28): n is a, c, g, or t
  misc_feature (34)..(34): n is a, c, g, or t
  misc_feature (38)..(38): n is a, c, g, or t
  misc_feature (40)..(40): n is a, c, g, or t
  misc_feature (53)..(53): n is a, c, g, or t
  misc_feature (114)..(114): n is a, c, g, or t
  misc_feature (226)..(226): n is a, c, g, or t
ctatgnccntgcctgttaaataaagttnggggangggncncccaggatggaancagggggccccaccagaatgaaagattttcggtagatctgggatctggacacttgcccccngtcatgaataaatgccatcccttcccaggccacccatatcgatgatatagtggcaggaaggagagtaagggactctggagcttaaacagccatcacatgggaaggcagtaancaagatgctaactgatggagtgaaatccccaggagatgcagaaggcaagtgcagctaactgaggcctcaggggcaggagatgcccatcaggatgagagctatgtctttctccagtgatgactctgcttctatgaggtcaccagcagtagaaccatatcttgctggcatacacttgggatggccccgcctcctggacttccatctgtcatcaggagaacataaccatctggagtcagtacagatcatcaatccttccacatatacaagttcattttaaatttttaaaaatataatacaactgagaagtcttcatt

SEQ ID NO: 233254 - DNA, 513 bp, Homo Sapiens
  misc_feature (3)..(3): n is a, c, g, or t
  misc_feature (14)..(14): n is a, c, g, or t
  misc_feature (19)..(19): n is a, c, g, or t
  misc_feature (23)..(23): n is a, c, g, or t
  misc_feature (31)..(31): n is a, c, g, or t
  misc_feature (42)..(42): n is a, c, g, or t
  misc_feature (57)..(57): n is a, c, g, or t
ggntcaaaggttantcccncctngtatccanaagtgttttanaacttgtcctgatgnggttgttctctttctaaaaggtagggctcccatgacagccatataggttctcttggttgcataagtaaacataaataaaccagtaaacaaaatgcctgctttctgtgtgaatacgttgtcatttgatgtcatggtgttaagtatgaaggtgctataaagaaaaggggaggccaggtgcggtggctcacccctgtaatcccagcactttgggaggccaaggtgggtggatcacgaggtcgggagatcgagaccatcctggctaatacggtgaaaccccttctctactaaaaatagaaagaaaaaaaatttagccaggcgcagtggtgggcgcctgtagtcccagctactcgggaggctgaggcaggagaatggcgtgaacccgggaggcggagcttgcagtgagccgcgatagcgccactgcagtccggcctgggccaaagagtgagactctgtctc

SEQ ID NO: 233255 - DNA, 560 bp, Homo Sapiens
agccctttcgggggaatgaaagccaaattaatggaatgtatgtttttgctctagttctccaaaccattgctaatgatctgcattttgttggcctgtttgccacagtaagatgcaagtgctttcacccactcaacacatatttattgtgcgcccatgatgttccagccacagtactggccacaggcatgagtgtggtattattctgctttacagaagggctttacaaaagcttatggtttcaaaatttccctgcttttgtttatggttctaacccttgcttgttttagaaatcattatgcaaagaacaactgcattctttttaatgtctgcatggagggatttttctgtgaaatgactgtacaataatcagttccctctggttggacatttttgttatttctggattataaataatataacgatatagccttaaacacacttgttctcagatatttacatatatggacaagtgtttctgagggtagtcaccaggaagggaaatgattgggtcaaaggacatatacatttaactatttgatagatgctgatggattgcctgc

SEQ ID NO: 233256 - DNA, 561 bp, Homo Sapiens
  misc_feature (3)..(3): n is a, c, g, or t
  misc_feature (27)..(28): n is a, c, g, or t
  misc_feature (73)..(73): n is a, c, g, or t
  misc_feature (87)..(87): n is a, c, g, or t
ccnaaacccccaaaaggttcccagganntaagggattcctggccttccacttcttcttccaaaaattcactcngggcttttcttccnttcccacccctcattcagctgctcgtggtggcaggaggtatgtctgacaggacagaagcaagctccccatcatcttgtcctagagtgggcgtcaccttggagcttctcttccttccgcctctgttcctcttctggagcctttgcctcccatctcttatctccttgatataattttgaacttgacctactttaaacttttttgctctgctgtgctgtgggctggcactcgatacctctggcaagaggatgatcatctacctcactgataagaggcatcgcatggacgttctctggtctgtagtggagacaagcagttaacctagcaccatcctcatcctccctgcagaagccattagcagacctttgggccagggcagcctccctataattttcttcatctcttgctaatctctataataaggttgctttttctttcttagttgagtaaacaagtaagccacagtgtttgaaagg

SEQ ID NO: 233257 - DNA, 541 bp, Homo Sapiens
  misc_feature (22)..(22): n is a, c, g, or t
  misc_feature (40)..(40): n is a, c, g, or t
  misc_feature (47)..(47): n is a, c, g, or t
  misc_feature (71)..(71): n is a, c, g, or t
  misc_feature (82)..(82): n is a, c, g, or t
aaccagtaagctcaaccgttanaaaaaacccttggggganaaagtantcttgcctgtccagattcttgcancagagtagaanctggccaggcagcagtcccaatatcaggaggaaccccaaggcttccctgcagagacctccagccccttccttcccctcctgctggccctggggcagaggagcagatggagcagtttttcctgggcagtgtttctgggatgcggtggtggttactcttctgccgatcccacagccttgaaagagccccgtggtggcgggactgaaggtagcaaagctggcgatgtttcaagtgctcaggggagggaagcagagcagggagggaggccccggggagatagaaggctgggattgttcccacagtaaccatctgcgtggccttggggtgggcagggtggggttcagactgaagtcagggacagagcagcaggcatcttggatgtcagagccatgtttttcaggccgggacctgagcaaaccaaaggaaccctcctaattcttcccttttgatggtctcagtcc

SEQ ID NO: 233258 - DNA, 548 bp, Homo Sapiens
  misc_feature (20)..(21): n is a, c, g, or t
  misc_feature (46)..(46): n is a, c, g, or t
  misc_feature (49)..(49): n is a, c, g, or t
  misc_feature (69)..(69): n is a, c, g, or t
  misc_feature (98)..(98): n is a, c, g, or t
  misc_feature (138)..(138): n is a, c, g, or t
  misc_feature (158)..(158): n is a, c, g, or t
  misc_feature (179)..(179): n is a, c, g, or t
  misc_feature (224)..(224): n is a, c, g, or t
  misc_feature (310)..(310): n is a, c, g, or t
  misc_feature (326)..(326): n is a, c, g, or t
  misc_feature (358)..(358): n is a, c, g, or t
  misc_feature (379)..(379): n is a, c, g, or t
gaattttttgaaccaaatcnncatttttggtaatgggattgaaatnccntttattattgttccacttantgctaagaagttgttatcctttttacccntaatgtgcaccttggctagcagatagaaactagtgtgaancaggtagccctgtgattctntgaattgtcacattttaagtncaattggctaacttcatttttctgtcccaagcctacttagttgtncttgttaacactttaaggttatttagatcagaagaaatctggatgtctcaggccaggtgcagtggcttacacctataatcccagcnctttgggaggccaagncgggcagatcacttgaggtcaggagttcgagnccaggctggccaacatgtctntactaaaaatacaaaaattagctggtcgtggtggtgcacgcttgtaatcccagctacttgggaggctgaggcaggaggatcacttgaacctgggaagaggaggttgcaggttgccaagccaagataatgccactgcattccagcctgggtgacagaatgagactgtctc

SEQ ID NO: 233259 - DNA, 646 bp, Homo Sapiens
  misc_feature (8)..(8): n is a, c, g, or t
  misc_feature (17)..(17): n is a, c, g, or t
  misc_feature (22)..(22): n is a, c, g, or t
  misc_feature (27)..(28): n is a, c, g, or t
  misc_feature (60)..(60): n is a, c, g, or t
  misc_feature (83)..(83): n is a, c, g, or t
  misc_feature (145)..(145): n is a, c, g, or t
  misc_feature (176)..(176): n is a, c, g, or t
  misc_feature (194)..(194): n is a, c, g, or t
cctgcccnccagctggncacanaggannctccgtttcaaaaaaaaaaaaagaaagaaccnggttttaacagaacctgaaagcntcaggaaaggttttggcaggagataaagcctgagcttgaagtttgagaagaaagacttcaanagatgtcagaaagtagaaaagctgtcccagncaaaagagccccagagtncaagtttttatgattttatagcaaaagatgattattgattgtgagataggttaggttttggggggccagtagttcagtgagaatgtttatgtttacaactagccttcccagtaaaaaaaaaaaaaaaaaaaaaaaaaaaattgtaaacatcacttatattactttattgcagcttcatcaccagtacattatatgttgtaatatttatttacctgatcattttgatcattttctgctttattttgctaataaactgtgatgttacttctagtgctaaacatggcatatttccacctatgattcgtgtttacctggtattaggagctcagaatggaatgcataaagcttcactggaagtgtatacaactgtggtgtagaatctgttattattatcattattattttatttagacttgactatctcttatgtttattaaagaacatgttttcct

SEQ ID NO: 233260 - DNA, 551 bp, Homo Sapiens
  misc_feature (11)..(11): n is a, c, g, or t
  misc_feature (24)..(24): n is a, c, g, or t
  misc_feature (34)..(34): n is a, c, g, or t
  misc_feature (49)..(49): n is a, c, g, or t
  misc_feature (67)..(67): n is a, c, g, or t
  misc_feature (79)..(79): n is a, c, g, or t
  misc_feature (96)..(96): n is a, c, g, or t
aaggtgggccngggacctgccttnttctgccaanagttccccgggttcnggccctatcaatattctncagtccagggcncagatgaccatattttnatctttctttgatgcttcaagtgactctattatcttgcaatgtcttcaggtcgtcataattaacatcatgttgttgactataaatgtttaacaatgcaggttgtagagagctgtgcttaatagaaagctgaatacaaattattcgttgagatactaacatgtgcctagcacagcaatactacgtaaagaaaaagcaagcaagcaaacaaacaaacaaaaaagggaaaaataaaaagacatatcccttgcttaatttgtttattatcttaagcctagagaaggtattacaagtggtcagaatagcagtgttaagattctgacctttcacttgctatgtgacctagggcaagatacataactttttagtgcttgggttttttcatttgtaaaatattatttgtagattattagtgtctttctcattaaggagttatgaggtttagctagggttaacc

SEQ ID NO: 233261 - DNA, 563 bp, Homo Sapiens
  misc_feature (20)..(20): n is a, c, g, or t
  misc_feature (40)..(40): n is a, c, g, or t
cacaggtgctttcctaagtncaggtcctccgtctgtaagnctccagtgtccttgtcttcagggcctcaacataatttagatttcttgacttctccagtggtgtttcctgccaaaagcaatttggtgttctgcttcacctgtgtgttctttggctctaaataggttttcttttcctggtgaacaatatgggctagaaggagcagctgtggctgatgctctggactgaactttctcatgaaaagcagcttgaaagaaggttggttggttcagggagcactaaatcaaagctgagagcttcttctagcccgcgtgctgtgggcaccgcagccccaggcatcatgctgttggcttatgattggagatcgcagactgccgaggtataaggacagcagaggggccacatggtggtcttcattcagggacattttactcttcatcacactgttttgcctagaaacagattatttaaattggaagagaccaaaaaaattataataccagaatttaaaaactcctctggccttttggaaaaattgccgtaaaaactctgatctatatagtgc

SEQ ID NO: 233262 - DNA, 554 bp, Homo Sapiens
  misc_feature (10)..(10): n is a, c, g, or t
  misc_feature (14)..(14): n is a, c, g, or t
  misc_feature (17)..(17): n is a, c, g, or t
  misc_feature (26)..(26): n is a, c, g, or t
  misc_feature (75)..(75): n is a, c, g, or t
  misc_feature (83)..(83): n is a, c, g, or t
  misc_feature (94)..(94): n is a, c, g, or t
gtttaagttngggnccnttgattttnaagggggaaattaatgaaagccggtggtttttcaaggccaagattcccnaaaagctntatggaaggtnttttataccaacccaagggaaaggtattttccagaatgagttttttacaaatggatagtgatgttttctgtaatacttaagtttagaaacatatatcacatgacaagtccattgtttattcaaaaaacaaataggcatttgactcatttgggactgtaaaatcttcaaaaatatgccagaaaactaaaaaatgtagaaaagaggattttttttgttttgtttttagcccccagaccaccactttttatagtaacttattttctagtgtctcaaaaaataagggcttttaaggaaagagagtatttctcttaaagttaattttgatagatatttatctagatgctttcttttttcccttgccataatagctggcttgtagagagagttatgtttgaaaaggcttgccttttttccgtcgctctgagcaggattatgttagggcccaaatagtgactttgac

SEQ ID NO: 233263 - DNA, 551 bp, Homo Sapiens
  misc_feature (15)..(15): n is a, c, g, or t
  misc_feature (18)..(18): n is a, c, g, or t
  misc_feature (43)..(43): n is a, c, g, or t
  misc_feature (95)..(95): n is a, c, g, or t
caacgggaattcccnttncattcaacatcattttaaaaatttncagcgtatagcaagaccagccagtgaataggattcatttcagctatttgggnaataagaaattttcccataaatgcagcattgaactcatccattagcatatgctggtgcttttctgttgacattagtcaaataatttagaagcacaaagaatattattacacatttaggaatgaagtgtatatccaatttaaggtctagatattaaaggaatcacaatctgtgttattaggcctgcatttttcctttctttttgtctcttcagacatgttaaaatttctacttatcattttgtcaactctgtgtgtttgcattcgttcttggaaatttgtctccacaaaaatgttaaaattagcaggcttgctggtgcatgcctgtagttccagttacttggcaagctgaggcaggaaggcaagagtatcacttgtgtccaggagctcaagactacagcgaggtatgattgtgccactgcactccagcttgggtgagagagcaagagcctgtctcag

SEQ ID NO: 233264 - DNA, 565 bp, Homo Sapiens
  misc_feature (11)..(11): n is a, c, g, or t
  misc_feature (44)..(44): n is a, c, g, or t
ttcattccagntccttggaagccagatagaagtttctcttaaanctgaaggacttcttaccatatgatccagtaatgatactccttggtatttacccaaatgagttgaaaacttaacacacacacaaaaaaaacgaacccacacatggatatttttaagagtttcagtcataattgccaaaatttgaaagcaaccaagatgtctttcagtaggtgaatggaaaaataaactgtggtatatccagagagtggaacatttttcattgttaaaaagaaatgagcaggccaggcacagtggctcatgcctgtaatcccagcactttgggagttcgaggtgggtggattgcctaaggtcaggagttcgagaccagcctgaccaacatggtgaaatcccgtctctactaaaaataaaaaaactagccgggcgtggtggtgggtgcctctaatcgcagctactcaggaggctgaggcaggagaatcacttgaacccgggaggcggaggctgcagtgagcagagatcacgccattgcactccagcctgggcaataagagtgaaactccagctc

SEQ ID NO: 233265 - DNA, 471 bp, Homo Sapiens
  misc_feature (9)..(9): n is a, c, g, or t
  misc_feature (22)..(22): n is a, c, g, or t
  misc_feature (26)..(26): n is a, c, g, or t
  misc_feature (29)..(29): n is a, c, g, or t
  misc_feature (39)..(39): n is a, c, g, or t
  misc_feature (45)..(45): n is a, c, g, or t
  misc_feature (97)..(97): n is a, c, g, or t
  misc_feature (152)..(152): n is a, c, g, or t
  misc_feature (213)..(213): n is a, c, g, or t
  misc_feature (306)..(306): n is a, c, g, or t
  misc_feature (308)..(308): n is a, c, g, or t
  misc_feature (389)..(389): n is a, c, g, or t
atcccattnttttagatttagncttnttnaaaaaagtgnccttgntagcataaaaccccatttaatttcttcaaagaaaaaaaaatggaggcaggtntaagagccagagccaacttttttccccaatatatcataccagcttttggaggtanagatttttttcttattaaaaaatggcttttttttttttttggccaggtaaggtggctcacncctataatcctaggactttgggaggctgaggcaggcagattgcttgagctcaggagttcgagaccagcctgggcaacatggtgagaccccgtntntacaaaagtacaaaaattagccaggcgtggtggcacttgtctgtagtccagggtacttgagggcctgaggtagggggatcncttgaacctgggtggtcgaggctgcagtgagccgagatcgcgccactactccagcctgggtgacaaagtaagaccctgcctc

SEQ ID NO: 233266 - DNA, 543 bp, Homo Sapiens
  misc_feature (2)..(2): n is a, c, g, or t
  misc_feature (4)..(4): n is a, c, g, or t
  misc_feature (16)..(16): n is a, c, g, or t
  misc_feature (21)..(21): n is a, c, g, or t
  misc_feature (56)..(56): n is a, c, g, or t
  misc_feature (64)..(64): n is a, c, g, or t
  misc_feature (81)..(81): n is a, c, g, or t
  misc_feature (111)..(111): n is a, c, g, or t
  misc_feature (113)..(113): n is a, c, g, or t
  misc_feature (147)..(147): n is a, c, g, or t
  misc_feature (297)..(297): n is a, c, g, or t
  misc_feature (443)..(443): n is a, c, g, or t
  misc_feature (481)..(481): n is a, c, g, or t
gnanttaactcccccnaaggncacttaatgggatgttataaagaggaataaccttntaagaccnaatttcctttaacattnaagcttcaaggcagagtgcaactttttaantntgcttcttggaacaagaggagagagcagtgggtntgtttgctttttccaactcagaaataaccctaggtaaggaagggatttatagaggcatgatgtggacctcgaatgaatggcttagtgaactgacccaggaagttgatgtagacttacattttgttcattaaaatcaagcagttgccagcnctttgggaggccaaggtgggtgggtcacgaggtcaggagtttgagaccaacctggccaagatggtgaaaccctttctctactaaaaatacaaaaattagccaggtgcggtggcgggcacctgtaatcccagctacttgggaggctnaggcaggagaatcacttgaacccgggaggcggaagttncagtgagctaagatcatgaccctgcactccagcctgggcgacaaagcaagactccgtcaaag

SEQ ID NO: 233267 - DNA, 548 bp, Homo Sapiens
  misc_feature (8)..(8): n is a, c, g, or t
  misc_feature (28)..(28): n is a, c, g, or t
cccggttnaactccgaaatgtctttgtnccttaaagcccaagcaggaaaatgaatataggtgatccattaaattcctttactgtacatcatattgaattaatatgaaaaatccagagaatgtagacatctctgagttaaaatattttccaaaagttttaaagcatggataatatatctttaaaattggataaaatgtgcttggatgctttaaacatatactcaaaatagtaaataaatgtttgtggccaggcatggtggctcatgcctgtaatctcagcactttgggaggctgagacaggcagatcacttgaagtcaggagttcgaaaccagcctggacaacatggtgaaaccccgtctctactaaaaacaaataataataataataataatgcagaaaaatctgggcatggtggtgcatgcctgtaatcccagctactcaggaggttgaggcaggagaattgcttgaacccaggaggtggaggttacagtgagccgagatcatgccgctgcactccagcctgggtgacaaagcgagacttcgtctcc

SEQ ID NO: 233268 - DNA, 546 bp, Homo Sapiens
  misc_feature (12)..(12): n is a, c, g, or t
  misc_feature (38)..(38): n is a, c, g, or t
  misc_feature (40)..(40): n is a, c, g, or t
  misc_feature (54)..(54): n is a, c, g, or t
  misc_feature (58)..(58): n is a, c, g, or t
  misc_feature (77)..(77): n is a, c, g, or t
  misc_feature (82)..(82): n is a, c, g, or t
tttttggaaaanattagggtccttttaaggtgtccagntnggtctcaaactccnagcntcaaatgatccttccactnaagcntcccaaagtgttgggcttacaggcatgagtcactgagtctagcccaccagccttttcttagtgccttagagggcactaatcccattcctgatggttccatcctcatgacctaattacctccccaaagccccacctcctaataccaacaccttgaaggtaaggatttcaacataggaattttggagggaagacaaacattcagaccacagcagccactgagtcacatgaggcaagggcaaaagagccaaatgaaacagaggctctggctcgaaggaagcggagggcgtggctgctgagacagccaacacctcttccaaggccttccttggtgttgcctccattccctggaaaggtctggctcctgtgttttacatttcagtgtgctcttcccagtagagcggtaggttactctgggcacagggaatttttaaacacccttgtgggagggttcctggaactgaatt

SEQ ID NO: 233269 - DNA, 500 bp, Homo Sapiens
  misc_feature (7)..(7): n is a, c, g, or t
  misc_feature (14)..(14): n is a, c, g, or t
  misc_feature (27)..(27): n is a, c, g, or t
  misc_feature (33)..(33): n is a, c, g, or t
  misc_feature (49)..(49): n is a, c, g, or t
  misc_feature (71)..(71): n is a, c, g, or t
  misc_feature (80)..(80): n is a, c, g, or t
  misc_feature (112)..(112): n is a, c, g, or t
  misc_feature (135)..(135): n is a, c, g, or t
  misc_feature (165)..(165): n is a, c, g, or t
  misc_feature (183)..(183): n is a, c, g, or t
  misc_feature (303)..(303): n is a, c, g, or t
  misc_feature (329)..(329): n is a, c, g, or t
  misc_feature (335)..(335): n is a, c, g, or t
tgctccngtttcanagggtgtgtctcntctggnccagtcagtttccaanaaggttaattaataaagccccncatgctganaaatgagtttccctcaagtgggcccagttttnagggagactggcacatgcctgtnatccctgcttctacacgagatttcttagancagtcgcagtctgccttntagattccatcctgttttgttctaactcttgggttcaattttagaaaaatcaggctgtaatcccagcacttcgggaggccgaggcaggtggatcacaagttcaggagattgagaccatcntggttaacacggtgaaaccccgtctntactanaaatacaaaaaaacaattagccaggtgtggtggcggtcacctgtagtcccagctactcgggaggctgaggcaggagaatggcgtgagcccgggaggcggagcttgcagtgagccgagatcatgccactgcactccagcctgggcaacagagcgagactccgtctc

SEQ ID NO: 233270 - DNA, 557 bp, Homo Sapiens
  misc_feature (6)..(6): n is a, c, g, or t
  misc_feature (15)..(15): n is a, c, g, or t
  misc_feature (23)..(23): n is a, c, g, or t
  misc_feature (29)..(29): n is a, c, g, or t
  misc_feature (42)..(42): n is a, c, g, or t
  misc_feature (48)..(48): n is a, c, g, or t
  misc_feature (75)..(75): n is a, c, g, or t
gggggnggttccccntgaggtgnggggtncaaacccagctgnccaacncgggtgaaaccctgtctccactaaaancccaaaaaagagtctcagaataagagaatagtcgttaaaaccttcagaattattattctcagcctttagtgtggatgtattgtgtaatttttaggaatgacactccattaataataatttctttctagttaagggttaagttctgtatatgcgtttttacattttagccctttataagaagcatatggggtaatacttttcccccaaaagttaaagcatctgaatcttcagaagataactgtcacccttttacccattgcttggaagtggattgtgatccttgatgtgagagattctgactaaaaaataaatatagtataatcagcttttatttactcattaacaattcttatgcattattggcattactggttaattctgatacttccaggtactgtgctttgcactagagttatttgctcagaaagagtatgctgatattaacatgaggatatcacaaagtaggatttcttcagtagacc

SEQ ID NO: 233271 - DNA, 588 bp, Homo Sapiens
  misc_feature (12)..(12): n is a, c, g, or t
  misc_feature (14)..(14): n is a, c, g, or t
  misc_feature (19)..(19): n is a, c, g, or t
  misc_feature (27)..(27): n is a, c, g, or t
  misc_feature (71)..(71): n is a, c, g, or t
aaaccctttggngngaaanatttgggnaaactccaaaaattgatttctttttttaagacggagtctcattntgtcaaccaggctggagtgcagtggtgtgatcttggctcactgcaacctccacctcccaggttcaagcgattctcccatctcagcttcctgagtagctggaattccacgcatgtggcaccacacccagctaatttttgtatttttagtagagatggggtttcaccatgttgtccaggctggtctcgaactcccaacctcaggtgatctgcccacctcagcttcccagagtgctgggattacagacgtgagccaccacgcccagcccagaaattgatttctatttgccattctccaaaagacaaaaaaagttggttttttttttttttcggtcttttgtttgtttgtttgttttttaagagatagggtcttgctttgttgcccagactggaggtcagtggcttttcacagctgcagttatagcctactgcagcctcgaactcttggcctcaagcaatcctcccacctcagcctcccaggtatctaggacaacaggcatgcaacacaaagcacagctct

SEQ ID NO: 233272 - DNA, 584 bp, Homo Sapiens
  misc_feature (6)..(6): n is a, c, g, or t
  misc_feature (27)..(27): n is a, c, g, or t
  misc_feature (37)..(37): n is a, c, g, or t
  misc_feature (78)..(78): n is a, c, g, or t
  misc_feature (108)..(108): n is a, c, g, or t
  misc_feature (117)..(117): n is a, c, g, or t
tccccntaaatggttcagccagttttnaattctgggntcaaaccatcttccggctttgcttccaaaaaagctggattncaggcgtaagccacggggcccgacttttcntagtaaccntaaccttcacaaatacccaccattttctttagaagatgcctgggaatatacatgtgtgcgtgtgcaagagttcttgacagcatatagttaggaaaggaattgctgagtagggtgtgctccccttcaattttatcatatattgtctggttttcaaagtggcgtaatgcattgccctcccatcagggatgtgtgagacttccatttgttctactttttgcacaacacttgattaaacttggttggacttttaaattgtttccagtctggtgggagtgtaatggtagtttttttgtgtattttcaaaaaaaccttttattatgagctattacctacatatggaaaaatgcataaaacaaggccgggagcagtggctcacgcctgtaatgccagctcttagggaggctgaggtgggaggattgcttgaacccaggagtttgaaatcagctgggcgagacccttcctctaac

SEQ ID NO: 233273 - DNA, 569 bp, Homo Sapiens
  misc_feature (17)..(17): n is a, c, g, or t
  misc_feature (30)..(30): n is a, c, g, or t
  misc_feature (36)..(36): n is a, c, g, or t
  misc_feature (61)..(61): n is a, c, g, or t
taacccattattctaanaatgccagagggnttagtnaagggaattaaggctaagaagtaangatcagctgaaagtcatgtgtgaatcatggagaaatctcataatattacacttgatgaaggaatatggtaagaggagccataaggaatgatttcaaagagaggtgtgtacagcaaggaagcaaaaataaaaatgatcaaaaaagaaacggttaattcatttgaagaaacataggaattaaaaaagaagacagtcaaatgagatgaaacaaaaaggccaaaaggtagccgggtgtagtggctcacgcctgtaatcccagcatttgggaggctgatgtgggtggattacctgacgtcaggaattcgagaccggcctggccaatatggtgaaaccccatctctactaaaaatacaaaaaattagctggacatggtggtgggtacctgtaatcccagctactagggaggctgaggcaggagaatctcttgaacctgagaggcagaggttgcagtgagccgaggtcgctccattgcactccagcctgggcaacaagagtgagactcccgtctc

SEQ ID NO: 233274 - DNA, 579 bp, Homo Sapiens
  misc_feature (14)..(14): n is a, c, g, or t
  misc_feature (16)..(16): n is a, c, g, or t
  misc_feature (24)..(24): n is a, c, g, or t
  misc_feature (35)..(35): n is a, c, g, or t
  misc_feature (42)..(42): n is a, c, g, or t
cagaagattgcttnanctcctagnattcaaggctncaggaanctgtgtcaccaccatgcattccagcctgggtgcagagcaaaacccagtctataaaaagaaaaaacatatttcagtttatttttatttctgtgttaattgtttagaaccaagaaaatatgagtaccttaaattctgtaagtaaagaggaaaatgtctttaacattgtaggaaattaggaattaagtaactgcccttcatactggtaatcttgatatgttgagggaagtgacttgttataagatagaggccaggtatggtggctcatgcctgtaatcccagcactttgggaggccgaggcgggcggatcacgaggtcaggagttcgagaccagcctgaccaacatggtgaaaccccatctctactaaaaatacaaaaattagccaggcgtggtggctcatgcctgtaatcctagctactcaggaggctgaggcaggagaactgcttgaacctgggaggcagaggttgcagtgagccgagatggagccactgcactccagcctaggcaacagagtgagactctgtctcaaaaaaaaaaag

SEQ ID NO: 233275 - DNA, 592 bp, Homo Sapiens
  misc_feature (6)..(6): n is a, c, g, or t
  misc_feature (24)..(24): n is a, c, g, or t
  misc_feature (28)..(28): n is a, c, g, or t
  misc_feature (33)..(33): n is a, c, g, or t
  misc_feature (118)..(118): n is a, c, g, or t
aacccnccagacgtttcctacccntgtntgaancaagccgtgacggtcccctgagactccgtggggccaatgaggatgagctaagccggaagactagcccctatgtcaaagaattcanagatggctgccagacacagcaaggccggacggtgctgaaggtgcgaacgcctgtgctggagcagctgccagtgctggatgcctccttctcagacctgggagccccaccgaggcggggaggggtgctgctggggcctgtctgcttcatgggataggaccgtctctgtctgatcctgtccattcggaaccaggcccacctggaatcccacaacatcagctctgtgccacctcccaagagggctcctcactatctagggagccctgggccagggcgtggagagccctcagtcggggcaggccaggggaggggtgaagtggttgcctggacaccccacgggaggagtggcatctggggctcttggccctcccacctggagcctgttacccgttagagagctgagacccttatttaaaactcacctcccaatcaccccaaacaaatggaagagaagagaaaggacatggcgtattttgt

SEQ ID NO: 233276 - DNA, 580 bp, Homo Sapiens
  misc_feature (6)..(6): n is a, c, g, or t
  misc_feature (12)..(12): n is a, c, g, or t
  misc_feature (16)..(16): n is a, c, g, or t
  misc_feature (18)..(18): n is a, c, g, or t
  misc_feature (31)..(31): n is a, c, g, or t
  misc_feature (51)..(51): n is a, c, g, or t
  misc_feature (138)..(138): n is a, c, g, or t
caaagnaatccntcangncattatcattccntaaggccattaaaatgtccntccgttaaatccttaaagccccctgataaaagattgggctctgatttgctgccaaactttattgggattagacttaaaatggccaancagtggaagaaatccattttccagaaggagctctgcctgtatgtcccagtcaaccacatggatggtcgttgtgaaagttttaacttcctgcagagttaccgagtgctcagcgattgagctttgaccacacccgtgtttgttcctagtctgttcccagccataagcatctccacaagccctctgtggcttgtgtggcctgatgtccatggccaccaagggcctctcaccatacgcttctccactcaacctttggagagacacggaccaccaaaggcttgatttttcttcatcctacattatattcaaaacaaacaggctgggtgccgtagctcacacctgtgatcccagcactttgggaggatgagctgggaagatcgtttgaggctaggagtttgagaccagcccgtgcaaaaaacgagacctcgtgtctaaaataattttt

SEQ ID NO: 233277 - DNA, 573 bp, Homo Sapiens
  misc_feature (2)..(2): n is a, c, g, or t
  misc_feature (8)..(9): n is a, c, g, or t
  misc_feature (16)..(17): n is a, c, g, or t
  misc_feature (25)..(25): n is a, c, g, or t
  misc_feature (38)..(38): n is a, c, g, or t
gntcaagnntgggtgnnaaataagnttaagcccggcantgtgtcaagcgcattgttaggcacttagacacgtgctctttcattttattcctcaaattgctttgtgctgtaacgctacccagaaaggctcatgttcattactcaagtcacttcaccagaaagtgacagagccagaattcgaacccaggtctgccagattccaggtcccttgcttcttctgttgttgctcattgcaagggagtcttcttcaaggttattctcaggactttgattaagatacaggctcacagctgggcatggtgtctcatgctgtaatctcagcactttgggaggccaaggtgggtggatcacttgagctcagaagttcgagaccagcctggccaacatggtgaaaccctgtctctactaaaaatacaaaaattaaccaggcatggggacgggcatctatgatcccagctactctgaaggctgaggcaggagaatcacttgactccaggaggtggagtttgcagtgagccaagatcacaccactgcactgcactccagcctgggcaacagagtgagacttcatctc

SEQ ID NO: 233278 - DNA, 576 bp, Homo Sapiens
  misc_feature (3)..(3): n is a, c, g, or t
  misc_feature (39)..(39): n is a, c, g, or t
  misc_feature (79)..(79): n is a, c, g, or t
ccnaggttaagggattcccggctaagcttccccagtagntgggactacaaaagttgccaccatgcccgggtaatttttngtatttttagtagagcggggtttcaccatgttggcaggatggtcttgatctcttgacctcgcgagccaccgcacccagccatattggaacactttaatcacctcccaaagcaatgccatactcattagttgtcgcccctaacctcccctctccgtgtcctaggaaacctccttttcttccaaaaattttagcacgtattttcatatgttagtgtgtagatcaattcaaataatagatacaacaaatactgtaatatgttgtgtaccttgtaattattccagctgtattgcagaaatattttataaatttaatagggctgggcagttttttttggaaatgcttgatcatttgcaagtactacatgctcttgaataatatattttcatttttagaaacatttagaatatttagtgtacaacccctgtctcccagtaattctgctgcccaaggaaatcagttactttattttttcttttcatttcttagctatagtcttt

SEQ ID NO: 233279 - DNA, 572 bp, Homo Sapiens
  misc_feature (4)..(4): n is a, c, g, or t
  misc_feature (8)..(8): n is a, c, g, or t
  misc_feature (22)..(22): n is a, c, g, or t
  misc_feature (26)..(26): n is a, c, g, or t
  misc_feature (80)..(80): n is a, c, g, or t
ctcncatnttttgagcccaaanttcnggaaatgcttccaagtctttcctgacatgcctataagaatgactttgatgcctntactctgtttccctaaagcccattgtgcatacccctgattgtgctgaacacatttacattgcacttgtctggcacaggtatgtttaattaccgctttctcctgaactggaagatcactgatgctagggtttggtcttctttatgtttctatacttaacacttacctagaagtgcttgccacattaaggatgctctgggccaggtacagtggctcattcctgcaatcccagcactttggcaggccgaggtgggaggatcactggagcccaggagtttgagaccaacctggccaacatagtgagaactcatctctacaaaaaaataaacaaaattagctgggtatggtggcgtgcgcctgtagtcctagctatttgggaggctgaggtgggaggattgcttgaggcaatcctggacaggaggtccaggcagcagtgagccaagactgcgccactgcactccaacctgagtgacacagtaagaccctgtctcatt

SEQ ID NO: 233280 - DNA, 581 bp, Homo Sapiens
  misc_feature (6)..(6): n is a, c, g, or t
  misc_feature (20)..(20): n is a, c, g, or t
  misc_feature (60)..(60): n is a, c, g, or t
  misc_feature (62)..(62): n is a, c, g, or t
  misc_feature (91)..(91): n is a, c, g, or t
attggnatatcccattctanttttaagccaaatgctttttgagaaataagccagctgttngnaaatgcttgattataatcggtttgataancagttatgtcttatgcagatgaattaggggctacctgtttttatgcactggtctttggggtgcttttgaacagtagtgtctgatgttttaattgtcaaagcaaaaagaaatgagagggagggcaacttttcttcctcttctgaagtccaggaaactggttattttctcatgcatattattttaaaatatattccagccaggtgcagtggctcacgcctgtaatcccagcgctttgggaggccaaggcgggtggatcacaaggtcaggagttcaggaccagcctgaccaatatgatggaaccccatctctactaaaaatacaagaattagccgggcgtggtggtgtgcgcctgtagtcccagctgctcgggaggctgagtcaggagaattgcttgagcctgggaggcagaggttgcagtgagccaagatcgcgctcttggctgcgatccagactgcactccagcctgggtgacagagcaagactctgtctc

SEQ ID NO: 233281 - DNA, 571 bp, Homo Sapiens
  misc_feature (2)..(2): n is a, c, g, or t
  misc_feature (12)..(12): n is a, c, g, or t
  misc_feature (17)..(17): n is a, c, g, or t
  misc_feature (27)..(27): n is a, c, g, or t
  misc_feature (37)..(37): n is a, c, g, or t
  misc_feature (77)..(77): n is a, c, g, or t
cntgccatttgnaaaanttgattcatnccattttaangaaatatgatataggtgccagaatccaggatgaagaggtnccttgttgcttagatgatgacgttgtggattcatttcacatctctctctctttttaatgtagctcttctccctccttggtttttattcctccctccttctttcttcttcaagcctcctctaatgttaacatctttggcagtttggccagtgttgacaactactttttgattatttggtattttaaaatatttggtattttaaaatgcttttattggccaggcgtggtggctcacaccttataatcccagtactttgggaggccgaggcgggcagatcatgaggtcgagattgagaccatcctggctaacacggtgaaaccctgtctctactaaaactacaaaaaattagctgggcatggtggcgggcgcctgtagtcccagctactcaggaggctgaggcaggagaatggcatgaacctgggaggcggagctggcagtgagccgagatcgcgccaccgcactctagcctgggtgacagagcgagactccatctc

SEQ ID NO: 233282 - DNA, 568 bp, Homo Sapiens
  misc_feature (15)..(15): n is a, c, g, or t
  misc_feature (47)..(47): n is a, c, g, or t
ggatttttgaattcnaattgatagatggcatagtttttcaccaaccngtatttggatatttttgttggtcttattttctagttttaaaaccaatgctgtagatgatcccttcagaagttaaaggttttggagtcatctcttaatcaaactcagtaacttctgttatttctacttttattgaaagtatatgcagaacttttaggtctaagatttctatattttatattgacagcaggaatagatcatttttatgtcttcatgagtttaatgatatattggaagaagcagtctttagcatttgcatttgactgatttactggcagacatttaaaaactataaacccaaagtcgtctgaaaagctaacaagcttgagtgtgtaaaaatattatactgcgaggcacagcatattgagtaccagccctaggctaccatattataactttatgagggctgggcacagtggctcatgcctataatcccagcactttgggaggccaaggagggaggatcactgaagcccaggagttcaggaccagcctgggcaacatagtgagaccctgtctctac

SEQ ID NO: 233283 - DNA, 573 bp, Homo Sapiens
  misc_feature (7)..(7): n is a, c, g, or t
  misc_feature (26)..(26): n is a, c, g, or t
  misc_feature (28)..(29): n is a, c, g, or t
  misc_feature (33)..(33): n is a, c, g, or t
  misc_feature (59)..(59): n is a, c, g, or t
  misc_feature (128)..(128): n is a, c, g, or t
  misc_feature (132)..(132): n is a, c, g, or t
aaaaaangcaggtataaggtgaaggncnngccntcacttttcaaggtccttctccaaanatagggggtaacatagcctgccaaaggcttaaggaaatgcagatatttattcccaataataatgtaacnttcntttccctttttttttttttttgagatggagtttcgctcctgttgcccaggctggagcgcaacggcacaatctcagttcactgcaacctctgcctcccgggttcaagcaattctcctgtctcagcctccggagtagctgagattacaggtgcctgccaccatgctcggctaattttttatatttttagtagagacagtgtttcaccaagttggccaggctggtctcgaactcctgaccttcaggtgatccacctgcctcagcctcccaaagtgcaggggattacaggcatgagccactgcgtctggcaataatgtaactttgaagcttaaaaattaatcccagtttgtagcaataacagaagactatctacaacggaagaaagaagcaactgccttacagttctgtaaagaattggcaagaaaataaagcctatagttgccg

SEQ ID NO: 233284 - DNA, 574 bp, Homo Sapiens
  misc_feature (3)..(3): n is a, c, g, or t
  misc_feature (5)..(5): n is a, c, g, or t
  misc_feature (21)..(21): n is a, c, g, or t
  misc_feature (50)..(50): n is a, c, g, or t
  misc_feature (55)..(55): n is a, c, g, or t
  misc_feature (77)..(77): n is a, c, g, or t
ttntntttccaaagggggtgntcatcctggggaagtaggctgcaaaaagnagtanctgtctgtgtgcacacatgaanctgtctgcatcttttgtgcacctgcagttgtgtgctcaggatttcttggagcaaggctgggtgcaccttgtcatgcaatctgcacacacttgccaagtgccttcccccacccagcaccatgcggggggtgccatgggggctggtggccacgtcctgtcctcatggagctcacactctagcaacacatatggggtttccatcaaagctctcctatcagctgggcgtggtggctcatacctgtaatcccagcactttgggaggctgaggtgggtggatcacctgaggtcaggagcttgagaccagcctggccaacatggtgaaaccccatctctactacaagtacagaaattaggcaggcatggtggtgtgcacctgtagtcccagctaccagggaggctgaggcaggaggattgcttgaattcaggaggcggaggttgcagcgagccgagattgtgccactgcactccagcgtgggcgacagagcaagactcattctc

SEQ ID NO: 233285 - DNA, 587 bp, Homo Sapiens
  misc_feature (5)..(5): n is a, c, g, or t
  misc_feature (47)..(47): n is a, c, g, or t
ttcgncaaaaatttcaattgaattgtaatctaaaatcagctgcttantcagatttatattaccagaatccagatgtttaaaggatctggttcccccaaaatactttgtccttttttgtagtgtttatgtatactgttagaatgtggttatataaaccttttaaatttaggaatctgttaaataacttgttttaacaccccatccgtcgtcatccctaatctgatactggagtctaaatacatgctccataatcatgcaaactaagttgaatctagatgatgagggtagactgggtgcggtagctcatacctgtaatcccaggactttgggaggccaaggtcagcagatcacctgaggtcaggagttagagaccagcctgggccaacgtggtgaaaccctgtctctacttaaaaaaaaaaaaaatacaaaaattagccgggcgtgggggcatacacctgtaattccagctactcataggatattgaggcaggagaatcgcttgaacccaggagtcggaggttgcagtgagttgagatcgtgccattgtgctccagcctgggcaacagagtgagactacgtctcaaaat

SEQ ID NO: 233286 - DNA, 579 bp, Homo Sapiens
  misc_feature (2)..(2): n is a, c, g, or t
  misc_feature (11)..(11): n is a, c, g, or t
  misc_feature (23)..(23): n is a, c, g, or t
  misc_feature (34)..(34): n is a, c, g, or t
  misc_feature (77)..(77): n is a, c, g, or t
  misc_feature (81)..(81): n is a, c, g, or t
  misc_feature (86)..(86): n is a, c, g, or t
  misc_feature (453)..(453): n is a, c, g, or t
gncagtccagnccgaaattaggngaaaggctttnaagcaaaatctcattctgaataatctcccatctgttcaatacntttnaatgngctcaaatatggacttattttaaaactgcctacaggatagtttgtgttactctgcctgtatccatgccgtgataagaaatgtaagaaaaggccaggcatggtggctcacacctgtaatcccagcactttgggaggccaaggtgggtggatcacctgaggtcaggaatccagacaagcctggccagcatggagaaaccctgtctctattaaaaatataaaaatgagccagatgcggtggtgcatatctgtaatcccagctacttgggaggctgaggcaggagaatcgcttaacccaggaggtggaggttggagtgagcgaagatcatgccactgcactccagcctgggtgatagagagacagactgtntcaaaaaaaaaaaaaaaaaaaaatgtaagaaaagaggttgagtcttattttcatttgtatttctctcactgcctagcatagtgcctttcactcagttggaatatataataaatgttcattaaactg

SEQ ID NO: 233287 - DNA, 589 bp, Homo Sapiens
  misc_feature (21)..(21): n is a, c, g, or t
ggtaatgatatgtaaggcccntaaaatacttgaataattgttaatggtaattgtagcccattcccattattaaaaataaagccaaaacttgaagtacctgaaaatccttatcgtgctatgtagaaatattgaactaatattcaaatatttgaatgctttggtttcagggattggtttaaaattggagtccttttttatgggttagtctcacaaaaatttaagcctttatatttttgactttaaatcaaaacaaatgttattttaaatgtacagaatagattggtagtgcagaagagtgtaagttcttcataggagctttagaaaagagaaatatgtgctaattcagtttttttttaatctgcactgtacatatatacttggtaattatgagcttgattttgtttttggaaatatgtgttcataatttaggtaatttgctacttaaagcactaagtctctgatacctgaaaagtacatgtaaatggtgatggtgaaataatactgcagttaacttaatagatgtatactggtgatttttgtatgctggattaaaactccagatattaaaatataacctggataaaaagcc

SEQ ID NO: 233288 - DNA, 537 bp, Homo Sapiens
  misc_feature (45)..(45): n is a, c, g, or t
  misc_feature (48)..(48): n is a, c, g, or t
  misc_feature (53)..(53): n is a, c, g, or t
  misc_feature (71)..(71): n is a, c, g, or t
  misc_feature (78)..(78): n is a, c, g, or t
  misc_feature (82)..(83): n is a, c, g, or t
agataccttttaatgtaaaggaattattgtaagaaaagatttaantgntccanggggaatttaattaaggnaagtttnaaanncaggttttaatgaaaatgaccagcttcatgttcattcaagctgaagatgcatagctagttccacagagcatgcccacatggattgcatctggaatccattcacatttttatgatcatgactgatcagatttgcaaattcttaagggtgaaataggcctatttttgctattttggacaaataaatgattctatatgtgcaggtccttacacagttttctctaaagttaagagttaggacaatcctctggggagagtctagttcactgccctccctcagctgactccagagatggaggtagaaggaattgcctttcttttttaaacagcatcatcttgattcttagcttggacagcacctttaagctctaccccctacatcaaaatgtactttagtgccccttcacggtacctcgtgtggggtggggactgagaactctttgagatgaaaaaattt

SEQ ID NO: 233289 - DNA, 524 bp, Homo Sapiens
  misc_feature (24)..(24): n is a, c, g, or t
  misc_feature (35)..(35): n is a, c, g, or t
  misc_feature (60)..(60): n is a, c, g, or t
  misc_feature (70)..(70): n is a, c, g, or t
  misc_feature (84)..(84): n is a, c, g, or t
  misc_feature (88)..(88): n is a, c, g, or t
  misc_feature (90)..(90): n is a, c, g, or t
  misc_feature (230)..(230): n is a, c, g, or t
  misc_feature (270)..(270): n is a, c, g, or t
  misc_feature (330)..(330): n is a, c, g, or t
  misc_feature (498)..(498): n is a, c, g, or t
cgctttgtgattcagggtggtccnttggggccaanacccgggtgctcctccttttccggnttcaaggaangcttggttttaaanaccncnaggttggtgtccccaaaggcggttgaggggctcagaaaccattttcaccttctgtctcctccatgtctgcactgtttgggaaagaaagcacgcagccaaagagcgcaaagaggctcagaggaggcccgggtgccctgganagacgctgcgtcctgacgacacagcatccctgtcccgcancggagatttcccagatgaaggattccccggcgggagacagggccctgcacacaggtcctntgccacgctgctcaccatgcctgtgtgttatctccccatgaaaagtcacctaggccgagcatggtggctcacgcctgtaatcccagcactttgggaggtggaggcgtgcggatcatctgagatcaggagtttgagaccatcctgagtaacatggtgaaaccccgtctntaggaagaatacaaaaattaactggg

SEQ ID NO: 233290 - DNA, 512 bp, Homo Sapiens
  misc_feature (2)..(2): n is a, c, g, or t
  misc_feature (18)..(18): n is a, c, g, or t
  misc_feature (38)..(38): n is a, c, g, or t
  misc_feature (40)..(40): n is a, c, g, or t
  misc_feature (50)..(52): n is a, c, g, or t
cnttccaacctgggtaanaaagtaaaacttgtctcaangnaaagaaaaannnattaagaaaatgttgggttctcagcactttccagcccacccccatccatatacattccagcacattgttggggccatttgcaagctctgagatgagattctgcacaagtcagcagtgcagagactcccagggaaggcctgaggccgccaagagcaactctgcagggtctgctccaagaggcagaggtgggccccaccgtccttggcaaaatggagattggtctgagggttccatgaggcaggcttgcaggagcaagggagtgatagaaagccatgtgaggggacgagagggaggacaccctcccctgcagaagtcaggaaggtctttgagcttgttctgagaggaaaacccattctctgggtagaggaatgaagactcagaggagactggggttcgctttgtgtgatactgatatggttactgaaaggctagcccagtcccaggctacgtgaacagactt

SEQ ID NO: 233291 - DNA, 560 bp, Homo Sapiens
  misc_feature (3)..(3): n is a, c, g, or t
  misc_feature (35)..(35): n is a, c, g, or t
  misc_feature (75)..(75): n is a, c, g, or t
  misc_feature (81)..(81): n is a, c, g, or t
  misc_feature (99)..(99): n is a, c, g, or t
atnagggaaccaaggctcaaaaggtttaggtaccnacctaaggtcaggtaagtactgaggaactgtgcttggatnccaaanccaggtcatccaacctgnaatcttaagcttttgacccccaaccttctcccgggcaactttgatgataatatggaaataccttagactcttgacttgactttactttctcttctctgttataaaatctgctacattccttttcctgggaaagcgaaatagattatgccaaaagttctgatttttaaaaatgttttattgtgggccgggcgcagtggctcatgcctgtaatcccaggactttgggaggccgaggtgggtggatcatgaagtcaggagatcaagaccatcctggccaacacagtgaaaccccatgtctactaaaaatacaaaaattaactgggcttggtggtgcacgcctgtaatcccagctactcaggaggctgaggcgggagaatcccttgaacctgggaggcggaggttgtagtgagccgagattgtgccactgcactccagcctggcaacagagcaaggctccgtctc

SEQ ID NO: 233292 - DNA, 570 bp, Homo Sapiens
  misc_feature (2)..(3): n is a, c, g, or t
  misc_feature (6)..(7): n is a, c, g, or t
  misc_feature (40)..(40): n is a, c, g, or t
  misc_feature (59)..(59): n is a, c, g, or t
  misc_feature (82)..(82): n is a, c, g, or t
tnnatnnaatttttaattttgaaggttgaaaggccaaagncaggcatttaacaggcctntcatggaaaatgctcagatgaanctgatgctgagaaggaaaaaaaaatgctttggtttgttctcactatgcactttggatttaaaaaaaaaaaaaaaaaggagagccttttccataaccaaatacagacaatattgactaaatctcctgagcatattcaggcagtcaggtctgcactgtgatagcaacctagagaaggagaatgctttataccgaaaagcatgtggccctttgtgactctgttattccgtttttaatgtctaatgattcattagaggaaaaaaaaaagtctaagtatttatgtgtcatggtggaccagagggatgcaagagaagttcatgtggggctggcctcacctcctaagaaattagtgttcacaacttccttgtaatagtatgagcctttggcaccagaatggattgccgttgcattactgcaccaagaagccaatagatcaaaacttgtttgctaaaatgtatgtaaaaattctgaaattccctctctctgtgtac

SEQ ID NO: 233293 - DNA, 571 bp, Homo Sapiens
  misc_feature (5)..(5): n is a, c, g, or t
  misc_feature (13)..(13): n is a, c, g, or t
  misc_feature (16)..(16): n is a, c, g, or t
  misc_feature (30)..(30): n is a, c, g, or t
  misc_feature (39)..(39): n is a, c, g, or t
  misc_feature (67)..(67): n is a, c, g, or t
  misc_feature (93)..(93): n is a, c, g, or t
gtccntaaagtgngcngcttccaacatttnccccagttnaattcctaccggcatttaggtctcaccntagccatcactttttcaggaaactgntactgctctctctatttggcattgactgtaccaactaaaatgcccatatggcagttttcatttatttcttattatgctctacaataactgcttgtttacttgtctttttctcctactggattgtaagttttttcatggatggtacatagtgttgtttgctatatccacgttctgggagtgtcatagaatctcaataaatttatttgaagagaatgagaatttattttttatgaactcactttccattgacatatcatggtcacatcaatggggagttcaggcaataaattatggcatatattgtctactgtatactgtgctggcaccaggggttcagataggaaaacatttcgattgctttttacccttttagtgagtgactaatggacatttctttgtctgaggatatatcttggcagtacaggatttcttcagacgtggctcaggaaatggccgagagtaaggtgaatcacaaggc

SEQ ID NO: 233294 - DNA, 574 bp, Homo Sapiens
  misc_feature (9)..(9): n is a, c, g, or t
  misc_feature (14)..(15): n is a, c, g, or t
  misc_feature (19)..(19): n is a, c, g, or t
  misc_feature (21)..(21): n is a, c, g, or t
  misc_feature (47)..(47): n is a, c, g, or t
  misc_feature (111)..(111): n is a, c, g, or t
  misc_feature (116)..(116): n is a, c, g, or t
aagcccaantgccnnagtnanagttgggcatgagtaaaggaaagggncatgagagacctcagttcctacaaagcttaagtttagggtcacacttgggaccaaaagcatcancaaancaaaatattctcttctcctatcttcttgacattttgtcacatcagaagaacataactaacagagtagctttcattgctcctgaaaaggggaaaggcaccagtcagaaataggaaagaaaatcttgttaggttaatggtacatgatagaatttcacattaaaaagtttaatgatggaggatgggcgtagtggcttacacatgtaatcccagcactttgggaggctgaggtcagtggatcacttgaggtcaggagttcaagaccatcccggccaacacggtgaaactccatctctaccaaaaatacaaaaaccagccaggtgtggtggcatgcacctgcactcccagccactctggaggccgaggcggaagaactacccgaacccaggaggtgaaggttgcagcaagctgagatagcaccattgcacttcagcctgggcatcgcagcaagactctgtccc

SEQ ID NO: 233295 - DNA, 583 bp, Homo Sapiens
  misc_feature (26)..(26): n is a, c, g, or t
  misc_feature (58)..(59): n is a, c, g, or t
  misc_feature (61)..(61): n is a, c, g, or t
  misc_feature (80)..(80): n is a, c, g, or t
ggtagggaaggaagttcccgggctcntggacttcccggatgaggcgacggccaacccnngnttctgctggccctccgtgntctgcacccactgtctacccagtcctaatgagatgagctaggaccctcagttgaagatgcagaatcacccaccttctgcattgatcttgctgggagctgcagaccagagctgttcctattcagccatcttgccagccctttgacttgctatatttttcatgccgactgtccctgtgcagacaggatacattcttgttcactcttccctgttgataggaggttttgtaggttttgtgtgcagtgtttctattcctgctgatttcttagttgaaaactggtgtaatacctcaagggatgtagacaaatactcaaggttattttataataaactgtgatgtactaaaatatttaaatgtagttttaagaaaaatgaatgcaggttgagcatccccaatctgaaaatccaaaatcctaaatgcttcaaaatctgaaacttgatgagcacccaaatgccgctcaaaggcaatgctcattataagtataatgaaactattccaaaattt

SEQ ID NO: 233296 - DNA, 591 bp, Homo Sapiens
  misc_feature (48)..(48): n is a, c, g, or t
  misc_feature (50)..(50): n is a, c, g, or t
  misc_feature (60)..(60): n is a, c, g, or t
  misc_feature (79)..(79): n is a, c, g, or t
  misc_feature (101)..(101): n is a, c, g, or t
atccattaccctttaagctccagtagttctgttggacggtaatccatntncccttaaggntttaatttatgcataaaancagtttaaagagattctgtganccaagattttctactgttatttgccggatttgattgcagtatgagaccatattgtaagttgattaatttatcctgcttgtcttaatttttgtgtttttaaacagatccatattactaatctgacatgaccaagtaaatcaccgtagaacaataaatctgttttagttgttcggtgtaattttgagtcagtgtgcacgcattatgcaaagtcgcattccaaatattcattttacattttaattattgaaattcattgtatggaaacatgtatgataaaccatttgttacatagcattactcattgagagttaaatggcctggaaggtttatagatactgtcaattgtcagctaggaaaagagctagcatcttgtactagctggaaaaagagtcttgccaataagactgaccgatccctcattgaggaaaccaatggttgaacacaagtccctttttgggtttcagcaatattgatttttgacaacaacaac

SEQ ID NO: 233297 - DNA, 593 bp, Homo Sapiens
  misc_feature (37)..(37): n is a, c, g, or t
  misc_feature (66)..(66): n is a, c, g, or t
  misc_feature (84)..(84): n is a, c, g, or t
  misc_feature (119)..(119): n is a, c, g, or t
  misc_feature (122)..(122): n is a, c, g, or t
  misc_feature (126)..(126): n is a, c, g, or t
atttttttcttaattgattgggtgccccccacccgangcaggcacaggtcgcaaccagataggaanaggctgaatttcaggctncttttgacaaagctttcttcctccttccttccttnggnacgntgcatcccacgctgcctgcttaaagcgccctcatgtgtctacagatggtaaaacgtttatttctcaacagacattccagtgatagcatccaatgacctatgtaacggcacccttttttgctgtacgcgttttttgagatggagtctcgctctgtcgcccaggctggagtgcagtggcgcggtctcggctcactgcaagctccgcctcccgggttcacgccattctcctgcctcagcctcccgagtagctgggactacaggcacccgccaccacacctggctaattttttgtatttttagtagatacagggtttcaccgtgttagccaggatggttttgatctcctgacctcgtgatccacccccctcggcctcccaaagtgctgggattacaggggtgagccactgcgcccggccccagtcacttgttcttaagtttcttaagcaaactataaaatagcaaaagacc

SEQ ID NO: 233298 - DNA, 586 bp, Homo Sapiens
  misc_feature (4)..(4): n is a, c, g, or t
  misc_feature (14)..(14): n is a, c, g, or t
  misc_feature (21)..(21): n is a, c, g, or t
  misc_feature (30)..(30): n is a, c, g, or t
  misc_feature (57)..(57): n is a, c, g, or t
  misc_feature (71)..(71): n is a, c, g, or t
  misc_feature (80)..(80): n is a, c, g, or t
taanttttaaaccnttttggntcccaatcnttttggataagggatactcaacctggnactacttacttttntccatttcncagataaagaaagtaggtagggaaaaagataagtaacttgcccaaggttacagagctggtaagtggcagagccccaggcagccttgctgtatagcttactgtctcctaaccattattctatgctacctttcatgggccctcatgttaagagtaactcttcagtttagcaaattattctgcattatatgatgagcttacatataatagcaataatagaccagaagcggtggctcacacatgtaatcccaacactttgggagaccagggtgggcagattgcttgagttcatgtgttcaagaccagcctggacaacttagcaaaactccatctctacaaaaaatacaaaaaaaaaaaaaattagccaggtatggtggtacatgcctgtagtcccggctactcgtgaggctgaggtgggaggattgcttgagcccaggagttggaggttgcagtgagccaagatcgtgacactgcactccagcctgggcaatagaaccagacattgtctc

SEQ ID NO: 233299 - DNA, 563 bp, Homo Sapiens
  misc_feature (24)..(24): n is a, c, g, or t
  misc_feature (36)..(36): n is a, c, g, or t
tattggaaaaaaagggtgccaggnagcctcaaatgnttaagcaaattcaaagaagagttaaggaaagtagaatattgaggaaagaatattccctgcagaagccctgtgttgttttttttttttttcgatttataaatagtttatcctgttcacattatgcagaatttcagtgtcgttaatccacaatgttagtacggtaacagaaacataaaggagaaaaaaggcaggtggggggaggttcatagtgtggcctgacatagtctaagggttctctcctgtagtatgcatctcctgcaggcaagtattaatatcacttcattgtttgaaggacagtacactatccaggattcatttattgttcaggtgtcttttctaaagtatgagaaaacaggaataaattcaataatgaatatctgcaattcaaaccaatttaactacaggtcagtggtgtctttcttatctattatcacaaacatcccagttgcctccatctaaaaatttctttcaaaagttaagacacaattaattatatcttattaattccctcaaaagcaaaaaaaaac

SEQ ID NO: 233300 - DNA, 544 bp, Homo Sapiens
  misc_feature (7)..(7): n is a, c, g, or t
  misc_feature (9)..(9): n is a, c, g, or t
  misc_feature (46)..(46): n is a, c, g, or t
  misc_feature (61)..(61): n is a, c, g, or t
  misc_feature (74)..(74): n is a, c, g, or t
  misc_feature (88)..(88): n is a, c, g, or t
  misc_feature (91)..(91): n is a, c, g, or t
ccacccntncaaggctttttaaaccgggttctcattgtcacccagnccgaagtccagggcncaatcagggttcnctgaagcttcaccnttntgggttcaagcgatcctcccacttcagcctttcaagtggctggatgactacaggcatggccaccacagccagctgattttttttttctttttagtagaaatgaggtctcgccatgttgctcagactggtcttgaaccaacacatctttagctttttaaaagacagccttggccagccatggcagctcacacttgtaatcactgcactttcggaagctgaggtgggcagatagcttgagccgaggagttcgagaccagcctgggcaacgtggtgaaaccccatctctacaaaaaatacaaaaattagctgggtgtgatggtgcacatctgtggtcccagctgctggggaggctgaggtgggaggattgcttgggcctgggaggtcgaggctgcagtgagctgtgattacctcactgcattccagcctgggcaacagagaaccctgtctctattt

SEQ ID NO: 233301 - DNA, 578 bp, Homo Sapiens
  misc_feature (2)..(2): n is a, c, g, or t
  misc_feature (9)..(9): n is a, c, g, or t
  misc_feature (41)..(41): n is a, c, g, or t
  misc_feature (56)..(56): n is a, c, g, or t
  misc_feature (58)..(58): n is a, c, g, or t
  misc_feature (72)..(72): n is a, c, g, or t
  misc_feature (89)..(89): n is a, c, g, or t
cngagtttntgaacgatggcaccattttacacccccggcancaaggtatgaaagtncnagtggctcttcaangctcactaccatctganattgttctccatttgattttagtcatgttagtagatgtaagatgttagttgcatttccctgatgagtactgatgttgagaacttttcatttgcttgttagccagtcacatattttcttttgtaaattgactgttccaatcttttacatgttcttaaatctcattatttttgttattcatatcaacagttaccaatagggcatttttatattttatcactagaaatcctttgtcacatatacatacctatattgcagatatttttcctcaaaggcatgtcttgcttattcattttcttttccttagtgatgtcttttgatgagcagaaatgtcttgatcatggtagttttatagtagtcttgaaatcaggtgatgtaagttatctttttcaagattgttttgactaatatagattctttgatttttccctaatgtggcaatcaacctttcctgccaccagaggtatgctagaagaaaaaaaaaaaagaag

SEQ ID NO: 233302 - DNA, 598 bp, Homo Sapiens
  misc_feature (2)..(2): n is a, c, g, or t
  misc_feature (5)..(5): n is a, c, g, or t
  misc_feature (17)..(17): n is a, c, g, or t
  misc_feature (20)..(20): n is a, c, g, or t
  misc_feature (26)..(26): n is a, c, g, or t
  misc_feature (55)..(55): n is a, c, g, or t
  misc_feature (96)..(96): n is a, c, g, or t
  misc_feature (272)..(272): n is a, c, g, or t
  misc_feature (393)..(393): n is a, c, g, or t
anaanggtcctttcccntgnaaaccnaaaagcaacatcccaattttttccctttncacttttggccaaaccctgtccttaagagtcctctataccnggttccattcaccttctttattactccttaaccacttgcattctggcttccatgaatgagagaggaggcaactcattaaaatgataagctttaggatcagacacaactgggttaaatcctgtgtccatacttaatttatacaagggcttgaacaagtcacttaacctctctcaatngcacttttcatctataaaaagggtgttaaaagagtcagtgtaagcattgaaagagataaagcctttttttaaaagaggtgttaaagtctcttttaatcttatatagtgcctaataaatagnatctgtaaaaaagaaaataacccaacctccctacattctaccaagctgctcttttaaaagtcactaatgactgccattcaccaaataaagcagctttgtcttattcctcacatctctgagcccctccatagtattagcaataataaacctttttttttttttttttttaaacagagcctgggcaacaagagcgaaactccgtctc

SEQ ID NO: 233303 - DNA, 589 bp, Homo Sapiens
  misc_feature (11)..(11): n is a, c, g, or t
  misc_feature (31)..(31): n is a, c, g, or t
  misc_feature (33)..(33): n is a, c, g, or t
  misc_feature (37)..(37): n is a, c, g, or t
  misc_feature (103)..(103): n is a, c, g, or t
  misc_feature (124)..(124): n is a, c, g, or t
aggggggtccnttaaaatggaatttaaatancngaantccatttaagagtgaccagtgtgccagtcctagtcttggtaagaatatggagccccgattgtgaanacatgaattgttcaaaccacntcaaaaatcattttcattatgagaactggaacatatgtatatcctgtgacccagtatttctattctttgtcttctagagaaactttttgtcatatataccataaggcctatacactattattcctagcaacatttattgaaatagcaaaaaattagaactgcccaaacatccatagacagagaatagattaataaattgtagtgttcttatccagactctgccgcctagtaacatttattttaggcaagttgcttaatccctttgaattttagtctcttcatacggagtaggttgataatactatgtacctcaaaggattattgtgaagattgagttaacccatgtaaagtagttgagactgtctgatacacagaaaatgctcaatatattttagctatcattggtacacagaggtcaaaatgactgattattgctacacatgtcaaggtgaatgaatttcactg

SEQ ID NO: 233304 - DNA, 557 bp, Homo Sapiens
  misc_feature (4)..(4): n is a, c, g, or t
  misc_feature (9)..(9): n is a, c, g, or t
  misc_feature (17)..(17): n is a, c, g, or t
  misc_feature (57)..(57): n is a, c, g, or t
  misc_feature (65)..(65): n is a, c, g, or t
  misc_feature (84)..(84): n is a, c, g, or t
  misc_feature (111)..(111): n is a, c, g, or t
aaanagggntttgtttnccaaaaaaaaaaaaaaaaaggaaagaaaaaaagttggccncaaatttnagcacccagtccgaatttnagcatctagtgatatgccaaagctccntctatcctggagctcttcctggtagttcagtaagcgtttgccaaactatttctaccttatgagaaagatgaaaaaaatttggctttgaggagctgggacttgccagggtcacatgatatacagatgttatgcatcctgactttttggctagtgttactcattttgccccagttaagtcaaaacttttttttcctttttttttttttagatttttgttgacactgaagtcaactaagaacaaacattgctttaaaatactttctcagccgctccctgcctgaccaaaccctcccactggaaaaaataataataaagtactttcccttgccgggtgcagtgtctcacagccataatcatagcattttgggaggccaagacaggaggatcgcttacacccaggagtttgagactagtcttggccacatagggagaccctatgtgtttac

SEQ ID NO: 233305 - DNA, 536 bp, Homo Sapiens
  misc_feature (7)..(7): n is a, c, g, or t
  misc_feature (37)..(37): n is a, c, g, or t
  misc_feature (40)..(40): n is a, c, g, or t
  misc_feature (46)..(46): n is a, c, g, or t
  misc_feature (53)..(53): n is a, c, g, or t
  misc_feature (61)..(61): n is a, c, g, or t
  misc_feature (68)..(68): n is a, c, g, or t
  misc_feature (114)..(114): n is a, c, g, or t
  misc_feature (196)..(196): n is a, c, g, or t
  misc_feature (219)..(219): n is a, c, g, or t
  misc_feature (229)..(229): n is a, c, g, or t
  misc_feature (248)..(248): n is a, c, g, or t
  misc_feature (286)..(286): n is a, c, g, or t
  misc_feature (409)..(409): n is a, c, g, or t
  misc_feature (414)..(414): n is a, c, g, or t
  misc_feature (416)..(416): n is a, c, g, or t
  misc_feature (463)..(463): n is a, c, g, or t
  misc_feature (468)..(468): n is a, c, g, or t
cctcccnaaagccattggaattataaaatttgttctnaanccaccnatttttntgggccanaattttncattgggccatgctcatgtcttggatgaggttgaacaaactgttcncaaaggcatacccatagaggaaggtgaatgggaagctaaagccagcttcctaggactttttttttggttagtagtctaagcncgagaaaatgagacatcaccatntgttgtgganagtagctgtatggactganaggcatttaaattctggcaagggaggtggaaatgctgncaatgaggaggaagcttatagtgggtcaaacaaggaggtgtctagtgtgttgtttaaaaagaaggcttacaattagccaggcgtggtggcgggcgcctgtagtcccagctactcgggaggctnaggcnanagaattgcctgaacccgggaggctaaggttgcagtgagccgagaccncgccnctgcactccagcccgggtgacagagcgagactctatctcaaaaaaaaaaaaaaaaaaaaaaaaaaatg

SEQ ID NO: 233306 - DNA, 565 bp, Homo Sapiens
  misc_feature (6)..(6): n is a, c, g, or t
  misc_feature (17)..(17): n is a, c, g, or t
  misc_feature (27)..(27): n is a, c, g, or t
  misc_feature (81)..(81): n is a, c, g, or t
  misc_feature (379)..(379): n is a, c, g, or t
  misc_feature (407)..(407): n is a, c, g, or t
ttccanaaaagcctttnaagggacccnaaccttcaggtcataccaatgggaaatgattaatccttaggaaaattgggggcncttttggggatcctagtaaaaagtttggttactgggtaataagtctgttgaaaagattataatttaccaaaatggaaaattatggaatatttatgaagatttttttaaagcagcatatcagattctttctcacattttatattggtgtggttggtgtttttcttatggggagaaatactagtaagtgaactatatagacatttaaaattaacatgagttaaatccattataaattttagaaaaccatttattctacagtagtttccaaaactggggtatacctatcccaagctatacnctaagatttttcaggatatataaaggcncagagagctttaagggaatctgtttctagtcttcggagatcttgtttatgttttttgcattgtcttttccaaagtctcttacttgttaccttttgctgttatgtatttcccattatgcattgatccaagatgtaaaaacctctagggcaccaaacagg

SEQ ID NO: 233307 - DNA, 581 bp, Homo Sapiens
  misc_feature (2)..(2): n is a, c, g, or t
  misc_feature (47)..(47): n is a, c, g, or t
  misc_feature (55)..(55): n is a, c, g, or t
  misc_feature (58)..(58): n is a, c, g, or t
gncttaaaaaaaaatccaaatgaaagtcaatacccaagtgcaaaggntccaagtnaancctggaacttgtggcaaaagcaagtagcctgtctctgtacattctgccacttcctagcgggaacagcttttagttcctgtgtcacagaattgaacattttcctgctttgcaaggaactttcaaaggctaattcgcctttactctcacctgcttccgtggaggaggtgaataaagcctgtatttcagtgatgtagtagtttcttaggctgctgtaacaaagtaccccaaatttggtgacataaaacgagaaatttattctgcacagttcaggaggccagaagtctgaaattgagatggcagtaggggtagtgccaccttgggaggctgtaggggagagtctgttctttttctcttcctaccgctccagtttctgcttctgtggtcacactgccttttcttctctgtctctcctttgtacatctttcattatgaggacactgtcattggatttagagcccacctggatagaccagatgatttaatcttaagatccttactaacatagcgagaccccatctctacc

SEQ ID NO: 233308 - DNA, 598 bp, Homo Sapiens
  misc_feature (2)..(2): n is a, c, g, or t
  misc_feature (13)..(13): n is a, c, g, or t
  misc_feature (44)..(44): n is a, c, g, or t
  misc_feature (46)..(46): n is a, c, g, or t
  misc_feature (102)..(102): n is a, c, g, or t
gnaactaggatcnaatccccccaagtttacttaggaatagcaancnaaaggacccactgggtatttatctaccaatgaagatactttaaatagcaatacatncaaggtaatgatctaactttgtatgttttgacatagaaaagtaaacaccgtgaaagtaggtgaaagagtatatatattacctcatttttaaatgctttcgtgcataaataaaatctgaaagtctgtgtgcctcaggaaagaagtagataatcactttatttttttcaaataaatatcttttattacctctgcaattaaaagtattacacatttttaaggatgaaacaatgagagacacaatgatgacatacatctgccaagtagatgctgattttagagaagacttttttcccagtttgttgaaaagtatgagtaggtaggtagttaactgaaggtaactgaaggtagttactgaaacttttaaaaaattaaattcttaaagtctttgtaccgtcttttcccagaatatggaatatgtctttctacttgaacttctgagattcctaaagcaatactgtttaaacacttacattgtcactaacaatggatttaagtg

SEQ ID NO: 233309 - DNA, 617 bp, Homo Sapiens
  misc_feature (2)..(2): n is a, c, g, or t
  misc_feature (13)..(13): n is a, c, g, or t
  misc_feature (56)..(56): n is a, c, g, or t
tnaatgatctccnttatccaatttcctttcttatttccttctggttgggtttggtnagtggtttttttttttaaccctttgatataaggcattccaaatgtttcagcccacctttcctcactgttttctcagcaaatccggagtggattatttgttttaacggtacgcacaaagttggtgagccccagcctcacaccctgctcgacacccacacacatgagcagatccgcctccccgaacttcaataccagtgggggagcctcggcgggaggttccgatgaaggcagttcttcatccctgggtcggaagacccctgggcccaaggacaggatcgtcatggaagtaacactcaacaaaggtgatagcagctattccttacctttgtctcatttcttgaataacattttggaatctgttgttagcttaattcttccttgttgttctatgaattattcctttggtacaatcttctatcaacaacacgtggtctctgcatgggacagtgaggtcaggtagagagatgttagtcactttagtcaaagtgaagggaagttaccagtagcatggagctctctaagctctccccatgaatcactgtgggtcagaggcttgtgttt

SEQ ID NO: 233310 - DNA, 535 bp, Homo Sapiens
  misc_feature (2)..(2): n is a, c, g, or t
  misc_feature (14)..(14): n is a, c, g, or t
  misc_feature (17)..(17): n is a, c, g, or t
  misc_feature (30)..(30): n is a, c, g, or t
  misc_feature (37)..(37): n is a, c, g, or t
  misc_feature (61)..(61): n is a, c, g, or t
  misc_feature (76)..(76): n is a, c, g, or t
gntttccatggttntanggcatgaccattncagtgtnataatggtatccttgaaccagtanggtgaagtactgagncagaccaaaccaacccaagagagaccttgttccccatcttcctttagaattcaagtatagattcttttttatatgattgggtaagaccaagagacgtagcgtgagagagaactgtgcacccttaggagtgtacaaatcctttatcaggggtgcagatgcctctgaagtagcaacttcttcaggatcccccctttattctttttctctctcccttttgtatgagtttttctctcttgtatgttatgtttcttgttgcctttagttaaaacgtccactctttatggaaaagtgaaagtcatgtcaggcacttttttccattcttaaaaagtgcctcttccattggctgggtgtggctcatgcctgtaatcccagcattttgggaggccaaggcaggtggatcacctgaggttgggagttcgagaccagcctggccaacatggtgaaaccccctctctactt

SEQ ID NO: 233311 - DNA, 555 bp, Homo Sapiens
  misc_feature (46)..(46): n is a, c, g, or t
atttgttttgcggagtgcatagtcaaactatgtaatatgccttccntttgttgactacttggcctccaaaagatttcaagtgaacagatgtatatactgtatgcatttgttaatttaatttgcatgggagatggactggagctgtgaaagaatcttaactatctcgtaggagagactaggattaaaatctaataatatctatggatgaattaatcagtaatataaagcaatacctaatttattggtaatttatttggacagaatacagtctgtacaagcttagagaaagaggagttcaatttggaccaggaaaataagaaaatttcattgatgaggcgagatttgcattaaaccttgaataatgggtatagaatttaattaggtaatagaattagccatccttaaaagattttaatccaatactgaactgtttataaaatgctttctctattgtaatgtactgtaagtagtgaaattctgtatatactgctattttctgtctgttcattgttgtgaacttcttatgtatattagtgaaataaattttcagctttc

SEQ ID NO: 233312 - DNA, 496 bp, Homo Sapiens
  misc_feature (2)..(2): n is a, c, g, or t
  misc_feature (10)..(10): n is a, c, g, or t
  misc_feature (24)..(24): n is a, c, g, or t
  misc_feature (30)..(30): n is a, c, g, or t
  misc_feature (36)..(36): n is a, c, g, or t
  misc_feature (61)..(61): n is a, c, g, or t
  misc_feature (66)..(66): n is a, c, g, or t
  misc_feature (120)..(120): n is a, c, g, or t
anccagaccnttccccaccttgcncagttngaccancgatgggctcagcatctgacacctnacgcntccatccgacaggtgttccctaagtgacacttggttagccagacagccctgccntcatctgccctcctgtagactcacccgtggacacaccatggtgtactcggtttgagagcttaatcatagtgggtagtgctggagaggggaatgggacaggatgtggtcctgccgcaggggctggccgcagcctgcctgagggagccctgggcagggggccaagggtagcccacctgagtatcggccccctggatgctccgcaggtctgcgggttggagtgagggcagaccagccagggcaccctcattctcctgggaggatgccttgctttcttggtctggtggtctcttagttacattacactccggtgtattcgtgtactgatttttcacaaaagctttttagtttggaatggtatgacttactgtaaaattgc

SEQ ID NO: 233313 - DNA, 528 bp, Homo Sapiens
  misc_feature (2)..(2): n is a, c, g, or t
  misc_feature (17)..(17): n is a, c, g, or t
  misc_feature (29)..(29): n is a, c, g, or t
  misc_feature (32)..(32): n is a, c, g, or t
  misc_feature (38)..(38): n is a, c, g, or t
  misc_feature (49)..(50): n is a, c, g, or t
tncagagtttattcatngccataataganccntgtagnaaatgccctgnntgcatgttattgtggcaagaatatcctaaatgtcattaaaatcctccaacatgatggatctacttatggtcttgtttgttgacatgccaaattaacatagttccatctggaaatgagcatttgaaatgataatccggctgggcacagtggctcacccctgtaattttagcactttgggaggccgaaggggggcagatcacctgaggtaaggagttccagaccagcctggctaacatggcgaaaccttgtctctactaaaacacaaacgcgcgtgcgcgcgcgcgcacacacacacacacacacacacacacacacacacacacacaaaattagccaggcatggtggtacatgcctgtaatcccagctactccagattctgaggcaggagaatcacttgaacccaggaggcagagtttgcagtgagccgagattgcgctactgcactctagcctaggcgacagagcaagactccatctc

SEQ ID NO: 233314 - DNA, 550 bp, Homo Sapiens
  misc_feature (51)..(51): n is a, c, g, or t
  misc_feature (105)..(105): n is a, c, g, or t
ccgactttttttttttgaggaaaagcatttttttaggaaaaagccaaaccngattattaagatgcttattaagaatgcccagacattcaccccagaagtgttttntgttttgttttggtaaatggtatgagagatatgttgccctacacttaggccactgcattcccgcttaagtgccaggattgtgtcagcaacaggatggcctaaacaatctcagtcttgtctcctgccagccccctaaatcttccagaattgcaagaataggccaggtgtggtggctcacacctgtaatcccaacactttggaaggccaaggcaggcggatcacttgaggccaggagtttgagaccagcctggccaacatggcaaacccccatctctactaaaaatacaaaaattagccaggcaggtgtggtggtgcatgccggtaatctcagtttcttgggaggttcgggtgggatgatcgcttgaacctgggaggcggaggctgcagtgagccgagatcacgccactgcactccagcctgggcgacagaatgaggctttttcttt

SEQ ID NO: 233315 - DNA, 554 bp, Homo Sapiens
ttcccaccaccttccctttccccaaattattggcctttagggaggtaagggaccagaagaggtctcttgcagatattatatttttaaaaatggttctatggtaataagcagcagctaaggagacagaaagccagtagatgaagagagtgccaatatcttccatggggaaaaatgaatgaactgaaagagaatattatttttctagaatacagaaagctgtcctctcacagatcagctggaattccaaggtggattatggacttcttctaactcccattgatagtgcttcttaccaggtgaagggaagggctactttttcctaaaggagaaaaaagctttcagacaaagctcgtaccaacccctgaactgcaaatttgctcaagtgaccgtgcatacttatattcctaatttaaatgattatttatgtcaaacgctcattgtgaaacttgaaaatgttgtattacattacatcaaataaagtttacttgtagcagacagaaagagagaaagagaaagaaagaaaggaaagaaaggaaggaaagaaggaaagaaag

SEQ ID NO: 233316 - DNA, 550 bp, Homo Sapiens
  misc_feature (5)..(7): n is a, c, g, or t
  misc_feature (12)..(12): n is a, c, g, or t
  misc_feature (47)..(47): n is a, c, g, or t
  misc_feature (69)..(69): n is a, c, g, or t
ttggnnntaccntaaccgttttgacatgcaaatagagtaaaataccntctggccattataccagacccncagtttgaggaccaaatttaataataacctttgagaaataaatttaataatcctttttgaagaaaactaatttttttttcaatcctgtcttatggggttgaaggaagacttaatttcttcttgaaagacagaaccgtgatattcaacgtaatggcataatgtttctgggtataaaaagtcttaatataggtcaggcacggtggctcacgcctataatcctaacactttgggaggctgaggcaggcagatcatctgagttcaggagttcaagaccagactggccaaaatggtgaaaccctgtctctaatttaaaaaaaaaagccaggtgtagtggcacacgcctgtagtcccagctactcggggcggggctaaggtaggagaattgcttgaaaccaggaggtggtggttgcagtgagccaagattgtgccattgcactccagcctgggcgacaaggctggagcctgggcgaaactccatctc

SEQ ID NO: 233317 - DNA, 538 bp, Homo Sapiens
  misc_feature (44)..(44): n is a, c, g, or t
  misc_feature (54)..(54): n is a, c, g, or t
ctgtatcccagcccctttagagccaagctgccagtcaaaggccnggagtcaagnccagcttggcccgcatggtgaaaccccgtttctacttaaaaaaaatccaaaaaattagctgggcacgggggcatgcgcctgtaatcccagctactcgggaggctgaggcaggagaatcgcttgtacccaggaggcagaggttgcagtgagctgagattgtgccattgcactccagcctgggtgacaaagcgagactccatctcaaaaaaaaaaaaaaaaaaaaaggagaggaatgagatgggcagaaagatgatcattgttgaagctggttgatgagtctttagggagttcatagactattctgggttgtgtatagtttctgaatttccataataaagagattaaaagagagagagaaagagagttggccagcacagtgcctcgtgcctgtaatcccacactttgggatgctgaggtgggcggatcacctgaggtcaggagtttgagaccagcctggacaacatggtaaaactccgtctctact

SEQ ID NO: 233318 - DNA, 480 bp, Homo Sapiens
  misc_feature (3)..(4): n is a, c, g, or t
  misc_feature (22)..(22): n is a, c, g, or t
  misc_feature (25)..(25): n is a, c, g, or t
  misc_feature (34)..(34): n is a, c, g, or t
  misc_feature (50)..(50): n is a, c, g, or t
  misc_feature (60)..(60): n is a, c, g, or t
  misc_feature (245)..(245): n is a, c, g, or t
  misc_feature (380)..(380): n is a, c, g, or t
ccnnaagagacccatgcactgnggncaattgatnttccaccaatggttcnagaatatccngtaggaaaggccagtgtcttcaataaatggtgtttggaaaattggatatccatatgcaaaagagggaaatcgaacccttaccctcacaccacctacaaaatcaaatcaaattggattaacatcttcagcataagacctgaaactgttaaactactggaagaaaacataggagaaaagctaaatgncattgtgtctggacaatgatatttatagttattaaatatttttatttaaatcctcaaaacaactctatgagatattattattcccattttatggataaggaaactgatgtacagagtgattaaatgacttgctanaggctaggtgcagtggcccatgcctgtaatcccagcactctgggtggaaggatcgcttgaggccaggagttcaagaccagcttaggcaagactctgtctc

SEQ ID NO: 233319 - DNA, 575 bp, Homo Sapiens
  misc_feature (24)..(24): n is a, c, g, or t
  misc_feature (40)..(40): n is a, c, g, or t
  misc_feature (59)..(59): n is a, c, g, or t
  misc_feature (69)..(69): n is a, c, g, or t
  misc_feature (85)..(85): n is a, c, g, or t
  misc_feature (148)..(148): n is a, c, g, or t
aaattgttttcccggtcaagtaantgaaaagtgctttggnacccttggaaaaaagcttntcctggttanaagcccttgatcatcngtcttctggcctgaaaagtggctccttggggttcatgtaagcccatgtcaaccaaaaccaggnagaaattgtgtccaaattcgtgcttagatgtgtgtctgactcagtgttttcctcctttataaagccaagataaatgatttttgaattaaacattgttttggcacttcgtactttcattcattaagagggatgatgaacctgtcaggccataatagctagcctggaattttccttgccaagtctgtcctccttgaatagtttgctatttatgctgatgatttggagcaaggaggtggaaaatagtcatattatttgtccctacaagggaaaatacagcagcaatgttaaaatgataatgacgccaggcgcagtggcccacgcctgtggtcccagcactttgggaggccgaggtgggcggatcacctggggtcgggcattcaagaccagcctggccaacatggagaggccccgtctctactaaaaatcc

SEQ ID NO: 233320 - DNA, 525 bp, Homo Sapiens
  misc_feature (4)..(4): n is a, c, g, or t
  misc_feature (13)..(14): n is a, c, g, or t
  misc_feature (21)..(21): n is a, c, g, or t
  misc_feature (27)..(27): n is a, c, g, or t
  misc_feature (42)..(42): n is a, c, g, or t
  misc_feature (64)..(64): n is a, c, g, or t
aaanagggacttnntgaagcncccttnaaatcccataaatgnattttaagatgctaaagttttncattttaattaagcaaggccattaactccctttacatatacacttttttgtagccagttatgcttgtatgccttataaggctattgaaaaattatccacgaaaattattttaaggatttgagaaatagttggttaactttaagtcaaagttttagatatagagaccctatactcatgtgcccaaccattgtaatatgcgtattgacgtatatgataggagaaaacactagcattttgagttaataagtaggtcagtttggattaatggaaagtttgaagcttagagtgtttaaataatgattttattcttttcaatacacaagtggaaatgtttctccagtctaaattccccctagtattctcctgaaacaaaatttttatatgcagatatttgcttcttttgcaagtttgagaatttcacagtaacttctggttaccctgggttgtgtcttgcagttacc

SEQ ID NO: 233321 - DNA, 541 bp, Homo Sapiens
  misc_feature (5)..(5): n is a, c, g, or t
  misc_feature (26)..(26): n is a, c, g, or t
  misc_feature (43)..(43): n is a, c, g, or t
  misc_feature (65)..(65): n is a, c, g, or t
  misc_feature (73)..(73): n is a, c, g, or t
  misc_feature (130)..(130): n is a, c, g, or t
aaggnttccccattttttcccaaagngtttctttaacccagtngggcaataggaaaatgtaatgntgctctgnggtgtttatcacatcagggtttttcagacaggccgtgtgacccccagttttcaggtnagggcacgggcccagttattacacggtgccgggtctatggggcgtgggagaagtcaagccacagatgcctccgaggggaccaggagatggtaattggttcagatcggacattttccttccctgggccttcctgcccctgcccccaccgccacgcgtttgcttgttggaatttggaagctttgtgcatgaccttgaatgcactggatgaaaggttctaagtaaattcttttccttccctcaaggaagaatactctgatgaaaagagtcctttaaaaatatttaaaacacaggccaggtgcagtggctcacacctggaatcccagcattttgggaggctgaggcaggaggatcacttgaacccaggagtttgagaccagcatgggcaacatagtgagaccttgcctctatctt

SEQ ID NO: 233322 - DNA, 552 bp, Homo Sapiens
  misc_feature (31)..(31): n is a, c, g, or t
  misc_feature (33)..(33): n is a, c, g, or t
  misc_feature (35)..(35): n is a, c, g, or t
ggctgggtccttccggggtgtgccggtctcnangnttttccttaaggatactagtgattggatttagggccaccctaatctgtataacttacatcttaattacatctgcaaagactctttttcttaagagggccacattcacaggttactggaggtaggacttcgacacaccgttttggggaacacaattcaatccgttataacgtgtatctatttttaattgaatttttgcatgattacagaataaccgtttataaagttttgaaaacccagaagcaaaaagaagaaaataaagcatccctgttaatcttaccaaatggatacttattctagtttttacattttccctatgcatatacgtagaggaacacacatacatagttgagtttctttttcttttaattagtcttttgtgggggacatgttgttgtactatggatatataggggtgactgaaaacatggcccccaccatcagagaataagaatgaaagagagagagagaatcctaatcacacaaataaacacataattccactggacaactgctatt

SEQ ID NO: 233323 - DNA, 519 bp, Homo Sapiens
  misc_feature (3)..(3): n is a, c, g, or t
  misc_feature (12)..(12): n is a, c, g, or t
canagcagattnccttttaagtctcatcatttatgtgcagattatgaaccccatttattagtcaatagagtcccttcctgcatttatacattctcctcataactcagttgttctacttcacttccataaggctgacttgcaagtctgaatttatagttgtgttctctttcctaaatttagttcagttatctccctccataatttacatttaaatatcccactgtaacctaaaacatagcttcctttgttaatttccccgttgttacgaagaaaagtattattcctcagtaatttgggctcaaaatattaccctaatctttgactccttctgtcttcctcagtcccaagacacatcaaaggctgatcaaagttagccgggcatggtggtgggcacctgtaaccccagctactcaggaggctgaggcaggagactcacttgaacccgggaggcggaggttgcagtgagctgagatcacaccactacactccagcctgggtgacagagtgagactctgtctc

SEQ ID NO: 233324 - DNA, 549 bp, Homo Sapiens
  misc_feature (6)..(6): n is a, c, g, or t
  misc_feature (18)..(18): n is a, c, g, or t
  misc_feature (42)..(42): n is a, c, g, or t
  misc_feature (66)..(66): n is a, c, g, or t
  misc_feature (88)..(88): n is a, c, g, or t
  misc_feature (100)..(100): n is a, c, g, or t
caaggntggttcagcatncccaaatgattaccatatccatcncccaaccagacccaatgccaaaanccccatgatatttacctgtatncctttttaagtncaaataaatctgggctgtcattatttatgctaacactggttttgtgtccctggaatctatctatctaagtttttttttctttttttctttttccattttccagtacctattagacagaatggctttcaattttttctcttacttccaaacttagtcattataagaagatgtaggccaggcgcagtggctcattactgtaatcccagcactatgggaggctgaggcaagtggattacttgagtccaggagttcgagaccagcctggccaacatggtgaaaccccatctctactaaaaatacagagattagcagggcatggtggtgcatgcctgtaatcccagctactcaggaggttgagtcaggagaatcacttgaacccggaggcagaggttgcaggcagattgtgccactgcactcctgcctgggaaacagagcaagactctgtctcc

SEQ ID NO: 233325 - DNA, 545 bp, Homo Sapiens
  misc_feature (17)..(17): n is a, c, g, or t
aaaaaagtcgaaagtcncagtcattcgagattttatgtaatataagctatagtaactatgctgtggatataaattagaatatatttggtatcttttatttgcaataaatgtaaagctgaatcttagaatttcaaacggataaattttaacagcactattcccagggcttttttggtagtgatagaaaagtgtaactgttgagtttttccatattggcaatatactgccaggttcccttatggacagaatgaatcatcggctgggtgcagtggctcatgctgctaatcctcaggaagattgtaaaccttaggacgctgaggtgggtggatcgcttcagcccaggagttccaagaccagcccgggcaacatggcaaaactgcctctctacaaaaaattagcctggtttggtgacgcgcgcctgtaatcctagcctgtactcaggaggctgaggtgggaggatcgcttgagcccaggaaattgaggctgcagtgagccttgagcatgccagtgcactccagcctgggtgacagagtgagacctgtctc

SEQ ID NO: 233326 - DNA, 550 bp, Homo Sapiens
  misc_feature (5)..(5): n is a, c, g, or t
  misc_feature (33)..(33): n is a, c, g, or t
  misc_feature (47)..(47): n is a, c, g, or t
aaggnaattctgggtaaccacttaggaactgcntctggtttttttcntaaaaaaagccacttgtaatggctggtagttggagtgtataatcagagcaacttgaatctacggctcctgagtggccatcttcaacgatcaccctggaataaactctttttaaactagaaaacaaaaacaaaggaaacaacaaaaaagaagaaatctatagagtgaactatatttttccaccttgcaaatagaaggggcaaaaatcaaccttgcctatctgatgatttagtgtcatagggattccaaaatgttatttgtaacgtgtaccttgatatgctaatggtgaaatctcctgtttcttgatttggtcttctcatcttacatttcttacctcaaatccattctgcgacttcaccagcagattaatattctttcctggtctcttggaattttaataaaaacagcatggtcatggggtttcatgaagcttgcagccctctgggggatgcagataataatcaatcaatctcataattaaatgtaattttaaataagagcttac

SEQ ID NO: 233327 - DNA, 530 bp, Homo Sapiens
  misc_feature (4)..(4): n is a, c, g, or t
  misc_feature (8)..(8): n is a, c, g, or t
  misc_feature (12)..(12): n is a, c, g, or t
  misc_feature (20)..(20): n is a, c, g, or t
  misc_feature (36)..(36): n is a, c, g, or t
  misc_feature (40)..(40): n is a, c, g, or t
  misc_feature (94)..(94): n is a, c, g, or t
gttntgcntctngggttcangccattttcctgcttnagcntcccgagtagctgggactacaggcggccaccaccacttcctggctaattttttngatttttagtagagacagggtttcaccgtgttagccaggatggtctcgatctcctgacctcatgatccgcctgtctcgtcctcccaaagtgctgggattacaggcatgagccaccacgcccggccttagaagtttcaggataacggtactgccatcttacttcttataaaagcagtaattcgtattttatgtattaaaataaatgagccataggatgaatcagacaggtttgcttctagttttcaccactctatttgaccttggacaagagagttaattcccgagcctcagatttctcatctccaaagagctttttctcataggaagtgtgcaagaattaatagaggaagttttatacagtatttagctcatatagaaatctatacattgttcttctttttacattcccatgagaaatttcatgcccattttgatt

SEQ ID NO: 233328 - DNA, 541 bp, Homo Sapiens
  misc_feature (28)..(28): n is a, c, g, or t
  misc_feature (41)..(42): n is a, c, g, or t
  misc_feature (67)..(67): n is a, c, g, or t
  misc_feature (72)..(72): n is a, c, g, or t
  misc_feature (75)..(75): n is a, c, g, or t
  misc_feature (87)..(87): n is a, c, g, or t
  misc_feature (129)..(129): n is a, c, g, or t
tccaggttcaaggtccctgttctaaggntgcaagttctacnngattgcccaaaccttctgtttgccntgtancanagagccgtcatnccaggggtgggcttgtttcttcacagagccagggttgcaacncaaaaggtgtgataccaagtaccgtgggggcttcatccagacgcagagaacttctttgggtttacatggcaaataagtcaacctttctgtttcctaaagggtttcacaaaaaaaggcatctttgaatggcctcagcagtgctctcacagaagaaagtaagggttttatcattccgagaggcactggtgggctcctctactttcagttaggtggaaatggggtctctgccactacctcttcaccagtgttgcacagctgacccttggagagggtcagcatttccagcacacaccagccctggtgttagcttgaatctgtgcgacttatgccacacagttagaggagaggcctgcagttctggagaggagagtggcatttgaagttgctgggcgacagagcgagactctgtctc

SEQ ID NO: 233329 - DNA, 539 bp, Homo Sapiens
  misc_feature (30)..(30): n is a, c, g, or t
  misc_feature (40)..(40): n is a, c, g, or t
  misc_feature (56)..(56): n is a, c, g, or t
  misc_feature (64)..(64): n is a, c, g, or t
  misc_feature (77)..(77): n is a, c, g, or t
  misc_feature (84)..(84): n is a, c, g, or t
  misc_feature (86)..(86): n is a, c, g, or t
tttaaactcagcctttagagttcccacttnccagatcctnaaagccaagttaaggnccttatangactccaccaganggacccncncagtttcatgctgaaagggcaaggttactctatttttaattgatggctagacttcattaagacttgaaatgaataccagtgaggaaaggcggggcagctactagagacagaagagtcattgtgatttagttgtttggtgaattgctcatactttcaagggtcatcggtagcataactgcaccttggtgcttggagaaagcagagcgcagcagctgggccagcccaggactctctgtgcctggagctcctggtaatggacctgccagcgtgtgaactgacgtgcccagcgctcccacggtgggaagctgtttactctctcccgggaggacacagggttagacatagttgaatctataatcattatcaaccagatcaacacgttctaactgacttgcttgtgtcgtttttttccccaacagtagttcaatggcctgtgaatgttttgcttccagt

SEQ ID NO: 233330 - DNA, 528 bp, Homo Sapiens
  misc_feature (19)..(19): n is a, c, g, or t
  misc_feature (26)..(26): n is a, c, g, or t
  misc_feature (28)..(28): n is a, c, g, or t
  misc_feature (43)..(43): n is a, c, g, or t
  misc_feature (51)..(51): n is a, c, g, or t
aaccatccagttcaggttncggggancntgccatttttacccnttctttgngatctttgcaagtctggaacctgaaggtatcttacttttatttaatctgtaggtcattaagtattagtgcaattgagctcaatattgttaagatgtcagtttgccccagtgtgacatatatattcagtgtaatcatgatcaaaatcccagcatattttttgtagatattgacaagctaattctaaaacttatgtggaaaggcaagtgaactagaagagcccccaaaatttgaaatggaaaaagaggaacaaagttgagaattcacactacccaattttaatataaggctacataagtcaaaccagtggggtcctggccaaaggataaacatataattcagtgagacagaatagagagctcagaaatagacccacacaaatattatcaactgactgttggcagaagctaaaaagaaattccacaggaaaagggtagttttttcaataaatggtactggaacaatgaacagctttatgc

SEQ ID NO: 233331 - DNA, 559 bp, Homo Sapiens
  misc_feature (7)..(7): n is a, c, g, or t
  misc_feature (32)..(32): n is a, c, g, or t
  misc_feature (114)..(114): n is a, c, g, or t
  misc_feature (146)..(146): n is a, c, g, or t
ggtgccnttcccaaaaaaggccagctcctccnttttaacatcccacatttgaggggacgtttgtaccaacccgatgaccttccattgaccacatcatcaccacccaaaagtccncagttgcgtagggtccacttcttgggggttanacttcaatatgctaagtttttataaactaaaattttgttaattgtttttggaattttttcttagcctctaagtctagatattccaataaaaatcttctcctttcctgcatatgattctagtggcttaatttaaattttacaaaggacttggccaggtgcggtggctcacgcctgtaatcccagcactttgggaggccgggacaggtggatcgagaccatcatggccaacatggttaaacccgtctctgctaaaaatagagaaattagctgggcgtggtggcacatgcctgtagtcccagctactcaggaggctgaggcaggagaatcacttgaacctgggaggtggagtttgcagtgagccaagatcatcacaccactgcactccagcctgaagacagagcaagaccctgtct

SEQ ID NO: 233332 - DNA, 527 bp, Homo Sapiens
  misc_feature (33)..(33): n is a, c, g, or t
  misc_feature (41)..(41): n is a, c, g, or t
  misc_feature (45)..(45): n is a, c, g, or t
  misc_feature (60)..(60): n is a, c, g, or t
ccattccattccattccctttgggcggcaaaantaagcccntttncaaaaaaaaaaattnaattaaataaagtctccttaaaaagttgaaataagcatgagatcttcagaaatagattttaaaatgttttaggcattgtttttagtttgcctaacctccacattcaaactctggtagtaaactgagcaaaataaacttgctgctctactattttgtgcctcgggatgcattcagatgctcctttcaaaagcaatacatggggctcacgcctgtaatccaggcactttgggaggctgagtctggtggatcacgagagctcaggagtttgagaccagcctggccaacacggtgaaacctcgtctctactaaaaatacaaaaactagccaggcgtggtggcgggcacctgtaatcccagctactggagaggctgaggcaggagaattgcttgaacccaggcggcggaggttgcagtgagctgagatggcaccattgcactccagcctgggtgacagagagactcggtctc

SEQ ID NO: 233333 - DNA, 532 bp, Homo Sapiens
  misc_feature (81)..(81): n is a, c, g, or t
  misc_feature (133)..(133): n is a, c, g, or t
aactgagagccttttaaggaaaagttgatatttttaccaaggccaaggcttattccaattctttaggttatttttcttaancagattaaagtagttttatcgggttatcaagcatttgttgagcgtttactanggcttctcttgataggtggtcctggggagataggaaggaaatggtgcaaatttcaccaatacccactggggtgaacaaaaaatccctgaaacaccccattccagctattgttatctggaaaaaaatccttacaataattagatggtgatttgacgtctgggggaagttgcagatatagttttaatttactgtaggactagtggcagtgagtctcatattgctgtcatataaaaggtaaaccttccagaagaactttggaaatttcagtagcctaaagaccacgctttgagaaactcgtaaaggtttgtcatagaggttttaaaagtctgatcaaataattttaagctttagttgcctactaaaaagtaggatgcagtacaagtttgtcctttacttggt

SEQ ID NO: 233334 - DNA, 539 bp, Homo Sapiens
  misc_feature (3)..(3): n is a, c, g, or t
  misc_feature (22)..(22): n is a, c, g, or t
tcnccttttatgtaccatgccntaattgaggtagtaaattggcctggtggattgtcataaagtttatttgatgtaaaggacccccttggtgctcagataaaatcattatataaggaggaaaagaaaattatgttgactaattataggtatatagaattcccattcattatgtccacaatgatatgtatctgaatatgatatgttgtagactgaaaatagtaactctccctggttatttccacagtcactttaggcacttgggaaaatgcattctcccattttattcaattaaagtatgtgtaggaatgaggcaagtacagtacaaaaatctccaggaatcaacaaaggaccaccaagagaatttaaatggatttcagccattgtaaacagaagacaatttaagtccaattcactgttgaaaacttaattgaggctgggcaccgtggctgctttgggaggctgactcaggaggattgctcaaggccaggagttcaaaagcagcctgagcaacatagcgagaccctatctctgcaaaactt

SEQ ID NO: 233335 - DNA, 586 bp, Homo Sapiens
  misc_feature (22)..(22): n is a, c, g, or t
  misc_feature (25)..(25): n is a, c, g, or t
  misc_feature (29)..(30): n is a, c, g, or t
  misc_feature (122)..(122): n is a, c, g, or t
  misc_feature (159)..(159): n is a, c, g, or t
ggcccccaattaagaaaatagnttnaccnnccccttttaggaaaggtggattaaaatttttcccatggaaattttaaaaattaccttaaccatcctttgaaatataggaaagatttctccantccacttcaaaattaaatggcaaatttaaacttcccntgagaagccttttttaaaatctatgagctggcaaaaataataaaattataaaactgtcttggtgaaagtatggaattcaatttggcaatatctttggcatatatatatcttttgccccagaaattccacttccgggaatttatcctacagatactcttgtacatgcagaataacatatggactagattgtcattatggtattatctgttaaaaaaaaaaaaaggaccaaacaatctaaatataactggttacataaattatgatacagctttccagtggaataataagcttctattaaaaaaagagaatgggctgggtacaatggctcatgcctatgatcccagcactttggaaggctgggaggattgcttgagcccaggactttgagaagaccagcctgactaacatagggatatcctgtctctac

SEQ ID NO: 233336 - DNA, 547 bp, Homo Sapiens
  misc_feature (2)..(2): n is a, c, g, or t
  misc_feature (22)..(22): n is a, c, g, or t
  misc_feature (27)..(27): n is a, c, g, or t
  misc_feature (35)..(35): n is a, c, g, or t
  misc_feature (66)..(66): n is a, c, g, or t
  misc_feature (73)..(73): n is a, c, g, or t
  misc_feature (77)..(77): n is a, c, g, or t
  misc_feature (112)..(112): n is a, c, g, or t
cncagacggaagttccaatgcntagcnaaacttcntaagatttacttacttacttactttatttanttatttnaagncggagtcctcgcttctgtccccttaggctggaatncagtggtgtaatctcagctcactgcaacatctgcctcctgggttcacctgtctctgcctctcagatagctgggattgcaggtgcatgccaccatgcccgactaatttttgtatttttagtagagatggggtttcaccatgttggccaggctggtctcgcactcctgacctcaagtgatccacccgcctcggccccccagaatgctgggattacaggtgtgagccactgtgcccggccctaagattaattttcaaacaatgtgcatcagtatgttagaaatacctagtgttagccgggtgtggttgtgtgtgcctatagtcccaactactctggaggctgacttgggaggattgcttgaggccaggagttcaggggcgcagtgaactatgattacaccactgccccaacctgggtgacagtgggagaccctgtctt

SEQ ID NO: 233337 - DNA, 557 bp, Homo Sapiens
  misc_feature (7)..(7): n is a, c, g, or t
  misc_feature (61)..(61): n is a, c, g, or t
  misc_feature (427)..(427): n is a, c, g, or t
tttatangtttgtcccaataaagttgcttaaaaggaggttaaaggattattttaatgcaantgttaagtagctgtttagaaccagcttaggagaaattaagtgatttgaaatatagatccgaaataattactcagaatatggaccagagaaggaagatggaaaaccagagaggttagacacatgcatgcttaataaaggaagaagatccaatatttattacatgggagtttaggataaaagatgatagaggctggttatggtggctcacacctatagtcctagcacttaaggaggctgaggcaggcaggtcacttgagctcaggagagtttgagaccagcctaggcaacatggcgaaaccccatctctatgaaaaaatttagctaggtgtgataatgtgtgtctttggtcccagttacctgggggtntgaggtgggagaatggcttgagcccagaaagttgagtttgcagtgagcagtgataatgccgctgctctccagcctgggtgagagagcaagaccttgtctccaaaaaaaaaaaaaaaaaaaagaggaagac

SEQ ID NO: 233338 - DNA, 508 bp, Homo Sapiens
  misc_feature (3)..(3): n is a, c, g, or t
  misc_feature (17)..(17): n is a, c, g, or t
  misc_feature (26)..(26): n is a, c, g, or t
  misc_feature (45)..(45): n is a, c, g, or t
  misc_feature (52)..(52): n is a, c, g, or t
  misc_feature (65)..(65): n is a, c, g, or t
  misc_feature (73)..(73): n is a, c, g, or t
tgncctgaagcgtctgnggtctcttngagttcctctgttctgttntgtggtntccacatttcccntccagcgntgccccagccatgtctgtctgacgtaggagccgtataacgctgtgctgtagctgtacggttctcaacatcaggaagggcaattcctctactcttcttttttggaattgctttccatatacattttagaataatcttgtgtctctctaccaaaaaaaaaaaaaaaaatgctggccgggcatggtggctcacgcctgtaatcccaacacttggggaagccaaggcaaaaggatcgcttgagcccaggagttgggagaccagcctgggcaacacagggagaccccatctctatgaaaaaaatacagccatgagtggtggtgcgcacctgtagttacagctacttggcacgttgaggcaggaagattgcctgaggctgcagtgagccaagaccacaccactgcactccagcctgggtgacagaataagaccctctttcc

SEQ ID NO: 233339 - DNA, 560 bp, Homo Sapiens
  misc_feature (7)..(7): n is a, c, g, or t
  misc_feature (15)..(15): n is a, c, g, or t
  misc_feature (28)..(28): n is a, c, g, or t
  misc_feature (36)..(36): n is a, c, g, or t
  misc_feature (38)..(38): n is a, c, g, or t
  misc_feature (42)..(42): n is a, c, g, or t
  misc_feature (73)..(73): n is a, c, g, or t
gtgtttnggactacnggcatttaaatgnaaagccancnttangttcgtgtgtaggtcatgtaagccttgaaanctgtccttaggtcaagcgtcagattccgagtcatgtttgccttagtccggcacatgacttgcagtacttgaataagtgcctacagcagacatttctcattttcccagaactatgatttgtaggtaaagaaatggaactgtggtgtatccaacatcatgtcatatatgctaaggtaaaatctggcactaaataagaaaaatggtttaactcttaaatggaatgaaacttttaaaaaatctgattttttcagctcttaaatagggaagttaggctggagacagtaggctcagtcatctcttaagcattcatggaaaaacctactatgtgtagtcattttgctagggtcatggggcctacagagacatatcagacagtagtaggagatgataggttcataaacaataacaataacagcaccatggcacatgtatacctctgtaacaaacctgcacgttctgcacatgtatcccagaacttaaagcaaagt

SEQ ID NO: 233340 - DNA, 556 bp, Homo Sapiens
  misc_feature (35)..(35): n is a, c, g, or t
  misc_feature (47)..(47): n is a, c, g, or t
  misc_feature (50)..(50): n is a, c, g, or t
  misc_feature (64)..(64): n is a, c, g, or t
  misc_feature (101)..(101): n is a, c, g, or t
ggcctttccttgacccagtagcccctaatgatgcnccagattattanggnggtattaaggaccntatggaccttgccaccatggaagaaagagtccaaagncgatattatgaaaagctgacggaatttgtggcagatatgaccaaaatttttgataactgtcgttactacaatccaagcgactccccattttaccagtgtgcagaagttctcgaatcattctttgtacagaaattgaaaggcttcaaagctagcaggtctcataacaacaaactgcagtctacagcttcttaaagttcagcgtgttaacctaacataaaacacagcaagaatctggttgtctgaactattttaaattaaggagccagatgtttttagtcaggctatcctgacaagacttgacctaaacttcgtttttattggccataacagtccaattatattcttggccaattttgtccaacggacaagaaaaaagcaaagtcaacgacaccattatcttgtcaagatcagatggttttactattgtggcagaagcgagaaaactttgtttgttg

SEQ ID NO: 233341 - DNA, 541 bp, Homo Sapiens
  misc_feature (21)..(21): n is a, c, g, or t
  misc_feature (25)..(25): n is a, c, g, or t
  misc_feature (31)..(31): n is a, c, g, or t
  misc_feature (93)..(93): n is a, c, g, or t
  misc_feature (102)..(102): n is a, c, g, or t
  misc_feature (142)..(142): n is a, c, g, or t
  misc_feature (144)..(144): n is a, c, g, or t
  misc_feature (147)..(147): n is a, c, g, or t
  misc_feature (229)..(229): n is a, c, g, or t
  misc_feature (460)..(460): n is a, c, g, or t
ttttggttttgcccccaggtncaantatccncttaagccaggggtttatctgccagggccaaatgttaaagcctggggaaaaacctagaaganccattaccntcatcaagaaataagtgatagaggccaaaagtcataaaancngtncaaaaattggaaagttgactgttgaagcatcgtggttaagacaggatttgggttgctaggaaactttggggcaagtatttanccttcctaagtgtcagtttcctcctctttaaaatgggagttagtaataccatccttattgagttattctgaggattaaataagatgatgcgtataaactattttaccccatgcctggcaagaaaacccagtaagtggaagctgttactgtgaatacattttgtggccttttgattagggtagtgttttccttagatctctaattttgtggatgttaattgtattataattncattaaaaagagttccatggtaaatcaatttgggaattaaagaggggtttgtttttttgagacagagcgagactccgtctc

SEQ ID NO: 233342 - DNA, 542 bp, Homo Sapiens
  misc_feature (10)..(10): n is a, c, g, or t
  misc_feature (22)..(22): n is a, c, g, or t
  misc_feature (31)..(31): n is a, c, g, or t
  misc_feature (54)..(54): n is a, c, g, or t
  misc_feature (69)..(69): n is a, c, g, or t
  misc_feature (140)..(140): n is a, c, g, or t
aaaaaattantaatttataggnctattttcngagccttcttaaaggccgttttncagtagtgactgaanaagctcttactgaagagcattttgtcaatactcagtgtctacagagggtgctgtctgagtgttgagaatgncaaaggaagcaactgacatggtctttgaccttgaattgtgtccctttcaacccaaaacaggacaggcagaagtattagagtagttgatgattcaattaactagatcttagctgactgatctcagaaggtttcatgaaagaagtgagaacaaatgctttaaacatcttgatctagcataaagaaaagtgtctctaaattggtgagatgttatctgtggagacaaatgtaggatttagagagagagatgcaaaaggggaagtaagagggtttattcaagagagattatgactgggtgcagtggctcttgcctgtaacctagcactttgggatgccaagacgggcagatcgcttgagctcaggagttcgagaccagccagggcaacatagtgagacctccacctc

SEQ ID NO: 233343 - DNA, 566 bp, Homo Sapiens
  misc_feature (10)..(10): n is a, c, g, or t
  misc_feature (30)..(31): n is a, c, g, or t
  misc_feature (36)..(36): n is a, c, g, or t
  misc_feature (52)..(52): n is a, c, g, or t
ccaagaaatnttccccaatttaggttcctnngccanggttccaaccggtccntccatttggggtccctgacttcccggcaacatataaggaaccaaaatacccccagctccttaccccagaccctttgtccagatagaaatttagacttattaatatattgaattgttcaagtgtccatatactaagaattacatcagcgatgtggaactatggataggcttccttgggttcctggctccacactataaccaccgccccccaccccttaaatttctgtatagcagacttaagagtgaatatcaccatatgcagttgttcatgtacttcttcccctttctcttctagctcttgacaaaattctcagggaaaactcttcagctctggatgtctccctttttgtggatcaaacacaaagggcatcattctaaaatatatacagaaccataaaagccccaaatagccaaagcaaccctgagcaaaaagaacagggctggaagcatcacactaccagacttcaaaatttactacaaagctctaatacctaaaataacatggtactggcatt

SEQ ID NO: 233344 - DNA, 546 bp, Homo Sapiens
  misc_feature (11)..(11): n is a, c, g, or t
  misc_feature (18)..(18): n is a, c, g, or t
  misc_feature (24)..(24): n is a, c, g, or t
  misc_feature (30)..(30): n is a, c, g, or t
  misc_feature (59)..(59): n is a, c, g, or t
  misc_feature (71)..(71): n is a, c, g, or t
  misc_feature (91)..(91): n is a, c, g, or t
  misc_feature (149)..(149): n is a, c, g, or t
ttagctaatgntaagggnccaaantgaagntaaagctttttttactatccaactgaggntgtcctcctccntgcaagatagagtgaaggcntggattttagtgaagagagggaaactttcctgtgttgttctgagtttaggaaactacncaggaaacaccttggactatattatgcttttgcttcttctgattttatctgatcattttcaaaatatcaataacagagctgtacttctaagaggtcaagtggtttggagttctataaagctataaggatgggcagaacctaggaaatgctgttagtaaaggagaaaaataaaatctaatggctagtaggaacaagggaattttagggaagatgagcttcccagttatattgagaggtccctttccacagtaagtagtagtttgatagagcgattacatggctgggcatggtggctcatgcctataatctcagcactttgggaggctgagacaggcagatcgcttgagcccaggagcttgagaccagcctgggcaacatagcgagaccccgtcttttt

SEQ ID NO: 233345 - DNA, 569 bp, Homo Sapiens
  misc_feature (4)..(4): n is a, c, g, or t
  misc_feature (23)..(23): n is a, c, g, or t
  misc_feature (31)..(31): n is a, c, g, or t
  misc_feature (41)..(41): n is a, c, g, or t
  misc_feature (46)..(46): n is a, c, g, or t
  misc_feature (61)..(61): n is a, c, g, or t
  misc_feature (88)..(88): n is a, c, g, or t
  misc_feature (108)..(108): n is a, c, g, or t
  misc_feature (144)..(144): n is a, c, g, or t
  misc_feature (152)..(152): n is a, c, g, or t
  misc_feature (178)..(178): n is a, c, g, or t
gaanccgttccccggtgccaaanacttccantccaggaccntggtntcagccaagggcccntccaccatgtcagaatgaaaggagatnctagtttatcctttttgagnaaacttaaagaaccaccttgtgaatcaaaatagagncctttatncaggggaagataaagaagccagagancagtttaataaagaaaccagtagatcagtctcactaatataaattcaaaagtaaaaataaaatattagcaaattgaatctgccattgtatcaaaagaattctagactatcaacactagagtttatttcagacatgtaatgatgattttttaccaggaaatctgtcaacataatttattctatcaaagggacaaataatcatagaagctattctcatgagaatttgaagtaaaatgggtataagaaggcagttatgcgtgtaatcccagcactttgggagggcgaggcagttggattgcttgagcctggtaggtggagtttgcaatgagccaagactgtgtcactgtacttgagcctgggcaacagaatgagactcagtctcaaaagaaaag

SEQ ID NO: 233346 - DNA, 585 bp, Homo Sapiens
  misc_feature (14)..(14): n is a, c, g, or t
  misc_feature (16)..(16): n is a, c, g, or t
  misc_feature (33)..(33): n is a, c, g, or t
  misc_feature (39)..(39): n is a, c, g, or t
aagatttcttcccnanaatttggagtaaattcnttttangaaagtagaaggccagggcctgataaaagcaaaatgaagaaaagaataaggaaagccccagttttgccatcaccagccagtgtttagtgatcttaaaatagctgcttttgtttttgagcatcatttgttgggtatggagttgcagaagttgggttgagggacactggcttctagaatcaaatattggcctccatagagtgtttctgtacagtgagttgggaggatgggcaggggccactgaggactgtggcgtgtccccacgttagagtgtatctcacacagagcctgtcctgaaaatatagttatttttaaaaagtgtttccccctccttttcattggccattttctcttttactactctttacctagcaaagggtgggcatgagaaacctggtcagtggaagagaaagccattttgcaacagtggttataggggtgggagagtaaaatttcctggttcctggggaagctaagcccattggtaggaccagacttttgtatgtgtgtttcttcctttagtcatctactaaggttaataaatacctt

SEQ ID NO: 233347 - DNA, 588 bp, Homo Sapiens
  misc_feature (5)..(5): n is a, c, g, or t
  misc_feature (8)..(8): n is a, c, g, or t
  misc_feature (28)..(28): n is a, c, g, or t
  misc_feature (38)..(38): n is a, c, g, or t
  misc_feature (41)..(41): n is a, c, g, or t
  misc_feature (58)..(58): n is a, c, g, or t
  misc_feature (84)..(84): n is a, c, g, or t
  misc_feature (109)..(109): n is a, c, g, or t
gtttnttntccaaaacaaaccggtcttngactgttaanccncttgggatttccttccntctttaaccttccacttgtgcccttncaaaccatttttattccaaaacccntccaaaagtcttgaatttgagtgaatacctttttatagatccaaagagatgttaacgtgcttgttccttttcagtctttcttttctagtacttgggtagactttcctttggttggggagcggggtgcttaccatataacttgtaaaccaaagcatgaaatatatgtttctgtttaagcatcaaaagtcttttgctgggcacggtggctcacacctgtaatcccagcactttgggaggatgaggcgggtggatcacctgagttcaggagttcaagaccagcctggtcaacatggtgaaaccccttctctgctcaaaatacaaaattagctgagcgtggtggtgcatgcctgtaatcccagctactccggaggctgaggcaggagaatcgcttgaacccgagaggcggaggttgcagtgagccgagatcatgccattgtactccagcctgggcaacaacagcgaaactccgtctcaaaaag

SEQ ID NO: 233348 - DNA, 576 bp, Homo Sapiens
  misc_feature (12)..(12): n is a, c, g, or t
  misc_feature (21)..(21): n is a, c, g, or t
  misc_feature (54)..(54): n is a, c, g, or t
  misc_feature (93)..(93): n is a, c, g, or t
  misc_feature (254)..(254): n is a, c, g, or t
aattaaggtggngcaaaatgnggctttggtaaacagatgttgaaaggccggcanactcggttaagagtcatcccccactccctaatctcaagnacccaatgaccccaaccactgcggaaggccgcagggtcctctgcctaggaaaaccagagacctttgttcacttgtttatctgctgaccttccctccactattgtcctatgaccctgccaaatccccctctgggagaaacacccaagaatgatcaataaaancaaaaacaaaaacaaaaaaaactaatatatattttcccaaattttgaaattaagaaacattcttctaaataactcatgagtccaagaagaaataataatcaatgaagagttccttctcagtttctagcatatgatgattagaaaagagttcttaaaaaaatagtgaaaatgtcctagctttctttaaataataataatgaggggctgggcataatggctcacacctgtaatcccaacactttaagaggctgagatggaaggattccttcagcccaggagtttgaaaccagcctgggtaacatagggaaatcctatctctacc

SEQ ID NO: 233349 - DNA, 579 bp, Homo Sapiens
  misc_feature (7)..(7): n is a, c, g, or t
  misc_feature (14)..(14): n is a, c, g, or t
  misc_feature (66)..(66): n is a, c, g, or t
  misc_feature (68)..(68): n is a, c, g, or t
  misc_feature (102)..(102): n is a, c, g, or t
  misc_feature (114)..(114): n is a, c, g, or t
aaacttntccttcnttaaaggaataagtccctgtgtgtaccacaggggatctcaaattatgctttnanagtgatggaagccagaccccaaggccatgaaccncggttccctttntagaaagttctggaaaatgcacactaacctactaatgtgaagccaaccagtggtagcctggaagctgggatggcaagaagaatcgattgcaaagagacaatagaaaacttttgtgggtggtggaagtattccatattttaattgtgatcatttcactcatgtattacatatttcaaaattatcgggccaggcgcggtggctcacgcctgtaatcccaaaactttgggaggccgaggcaggtggatcacaaggtcaggagatcaagaccatcctggctaacacagtgaaaccccgtccttactaaaaatacaaaaaattagccaggagtggtggcgggcgcttgtagtcccagctactcgggaggctgaggtagaagaatggcgtgaacccgggaggcggagcttgtagccagccaagatcgtgccactgcactccagcctgggcaacagagcaagactgcgtctc

SEQ ID NO: 233350 - DNA, 586 bp, Homo Sapiens
  misc_feature (15)..(15): n is a, c, g, or t
  misc_feature (87)..(87): n is a, c, g, or t
  misc_feature (100)..(100): n is a, c, g, or t
aaaatgtaaatgttnagtaggtagttaccataagtctggagttcaggaaaaaagtctgggtcctcagcttcccaagtgctgagattncaagctgagccantgcacccggacagaaaatatttttaaatgcggaaattacaacatgtttgtatactaatgggaatgatccaaacagcgaagttaatgatgcaggagataagagcgtcctgcaggtggcattagtgagcactgtggaccaggatttctcaaccttggcattattgacgttttggacctgatcattctttgttggggggcagggggagctgtcctgtgcattgtaggatgtttagcatcattcctggccttgactctctaggtgccagtggaactccctcagttgtgacaatcaaaacgtcttacacacgccaattataccccgggtggcagaaaggggcaaaattgcccaattgagaaccatggttacaggctgacaacatgagtttcaaagctagttttaggaaagagggcaagtaaagagtctgggagtagcaaggaagacacctaattccagtctcagatccagtggtatgagctgtgagaggtt

SEQ ID NO: 233351 - DNA, 540 bp, Homo Sapiens
  misc_feature (4)..(4): n is a, c, g, or t
  misc_feature (14)..(14): n is a, c, g, or t
  misc_feature (31)..(31): n is a, c, g, or t
tggncctttgaatnagttggttttgagtaancagtgagttgatctaacttgtgttttaaaagatctgattgctatgttgactgtatgcagcaggtgcagaaataagagttgttagtaggccattgactgcatttatccaggttaaaggtcgaggtgacttgaatcagggtagtaatagtggcggtagtgcgaaatgaccagattctagacttttgagagcagtcaggtagaagaagggtcaaggacgactccaagggttacggactgagcaactaaagaatataacttggccgggcgtgatggctcatgcttgtaataccatctttgagagaatccccagcctgggcgacataacgagaccctgtctctacaaaaaaataaaaaattagctgggcatagtggcatgagcctgtagtcctggctacttgggaagctgagatgggaggggaggatcacttgacccccttgagctcaaggttacagtgacccatgatccttcactgtagtccatcctgggtgacagcaagaccctgtctcttt

SEQ ID NO: 233352 - DNA, 559 bp, Homo Sapiens
  misc_feature (8)..(8): n is a, c, g, or t
  misc_feature (31)..(31): n is a, c, g, or t
  misc_feature (35)..(35): n is a, c, g, or t
  misc_feature (75)..(75): n is a, c, g, or t
  misc_feature (85)..(85): n is a, c, g, or t
ttgagagntttatccaaaatgctagtggaancctntccaccacttggaattcaatcagtccaattttttagccgntcttggaccntcatggacatcagaacatcttccatatatgatttacatcatgtgtcagttatagggctgtgccttgtactgtgcccctgaaatctggatggcacagaggactcaattccaggaatatggggaaagggaggcatccctcatggatataacagaatctttgggactgtgaagatcaacatctccatgggacctttcaggtttcactataacaaacccacagtgtgctctggatgcatcggagggccccacagaactttgcctggttgtggtttgtgacttgtggttttcatttcactgtttcccagaccaaagctagcaccccttacgggctgggtgcagtggcacgcacctgtagtccaagctacttaggaggctgaggcaggagaagcacttcaacccaggaggtggaggttgcattgaccagagattatgccactgccctccagccagggcaacagagcaagactctgtctcc

SEQ ID NO: 233353 - DNA, 547 bp, Homo Sapiens
  misc_feature (8)..(9): n is a, c, g, or t
  misc_feature (13)..(13): n is a, c, g, or t
  misc_feature (27)..(27): n is a, c, g, or t
  misc_feature (86)..(86): n is a, c, g, or t
ttcattgnncagnggtcagagatccanttttccttaattggcacctacatccagggtaatataaatgtcttcattcaccaatcccnccaagggttgtagatatcaatatgccgggggatagtgtatgggaattgagggtcatagtaggtcaatactatataagaaaattcctacagagagtgagtcaaaatccctactcctatgggaccagcgactattattgtctatttatttacttatttgaaaatgtaaacaattatttcccagtggactaattacaaagttcctgtgacatcaagatcattccttctcaaggcttttcactatatattgagacgtgtagtcttaatttcattttggtttgccccaagacttccaccaagtctaggggatctgtacggaactatcctttcccaaggtacatcatgcatactttctgctattattttttttttcagtctgtcccttgtggtcaatcaagagaaatgcagacttgaatctctataagaagagcaaaggttctccctttttaaacctttgaactgag

SEQ ID NO: 233354 - DNA, 537 bp, Homo Sapiens
  misc_feature (3)..(3): n is a, c, g, or t
  misc_feature (43)..(44): n is a, c, g, or t
  misc_feature (58)..(58): n is a, c, g, or t
  misc_feature (69)..(69): n is a, c, g, or t
  misc_feature (71)..(71): n is a, c, g, or t
  misc_feature (99)..(99): n is a, c, g, or t
ccnattgggggatttaagttccacctttcatgaagaccagaanncttggatttgcctnttagctcttgnanctggaaagtggatgcttcctgcaaggcncgatttttggattggcttctcaattattacaggaatcctcaacttttagaattgccagcctattcatctgatcttgaaagtgtacaaacttaccttcaaacagtgtagaatatatgcaattctggacctagacagaggcaataacctaaagacatttgcagctcatttcttgtcagaacccattgagaatagtggtattgatggaagactgtcaagcccatccagttctctagtctaaatagtctcagtttatccatgacttgagccatctaaaagttgcataacaaattagccgggcgtggtggcgcatgcctatagtcccagctacccgagaggctaaggcaggagaatcacttgaacccagaaggcgaaggctgcagtgagccgagatcgcaccactgcactccagcctgggtgatcgagtgagactccgtctcc

SEQ ID NO: 233355 - DNA, 553 bp, Homo Sapiens
  misc_feature (3)..(3): n is a, c, g, or t
  misc_feature (23)..(23): n is a, c, g, or t
  misc_feature (39)..(39): n is a, c, g, or t
  misc_feature (41)..(41): n is a, c, g, or t
  misc_feature (55)..(55): n is a, c, g, or t
  misc_feature (60)..(60): n is a, c, g, or t
  misc_feature (99)..(99): n is a, c, g, or t
  misc_feature (112)..(112): n is a, c, g, or t
  misc_feature (159)..(159): n is a, c, g, or t
  misc_feature (341)..(341): n is a, c, g, or t
ggntcccaactcctgttcccagntgtccggccgcctggncntcccaaagtgctgnaattncaggcatgagccaccaggcccgggctatagtttttcttnatctgaccaatanctaattataaagtatagtggaagagaaaaacccattcagaaaattancaaaaagatcacttatctagaaataaacttaaaccatagcagagcttacatgaagaaatcttttaaaactgagcaaggatttgttggacaggacacagcactaatctcaaaagaaaatttgatgaataggtcttattcatagtttttgctcatcaaaagacagcattaagaaaatgaatagncaagccacagaatgagttaaaaaaacagaaattcccagcatttacaagggattaaagatgtgtatcagaatatataaagaacctctgaaggccaggtgtggtggtttacacctttaatcccagtgctctgggaggccaaggtgggaggatcatttaaagctaggagttcaagaccagcctggtaacatagtgaaacaagattctgtctttac

SEQ ID NO: 233356 - DNA, 557 bp, Homo Sapiens
  misc_feature (7)..(7): n is a, c, g, or t
  misc_feature (49)..(49): n is a, c, g, or t
ctccccntaaaagatgttccagaaagatatttccgggtgaaaaaggtanccaaaagatgaaattattttccatggtcttagaaaaggattcagaagattcacttaaattattttttgaaacagacataagaaggtattaaatagttttttgtacgtaaaagtcaatgataaatggtgagagttagaaagggagcatagataaaattcttcacacttttgcagggcttttgacaagttccacatacaaaaggtgcttttaaaaaattaaagtattgtgggccgggcgtggtggctcacgcctgtaatcctagcactttgggaggccgaggcgggcagatcacgaggtcaggagatcaagaccatcctggctaacactatgagacctcgtctctactaaaaatacaaaaaattagccagtcatggtggcgggtgcctatagtcccagctactcgggagactgaggcaggaaaatgggtgaaccccggaggcggagcttgcagtgagctgagattgcgccactgcactccagcctgggcaacagagtaagattccatctc

SEQ ID NO: 233357 - DNA, 554 bp, Homo Sapiens
  misc_feature (5)..(5): n is a, c, g, or t
tttgnccaatgtttaatggtttttcaggaataaaaataaagtcctatgaattaggatataaattgtgtttatgttgccactgcttaccatttctttgttagatgttatgcctagattaatgtcattagcttatatgctgaaaatgtaatcacataatgtttttaaaatagtaaatgacacaattattatatatatgtaaaattcagatccattcaaaaaatatccatgttcttttatatgcttaggactcaacttggtgctattgtatttagctattgtaaaatagctcagcctttaagaagtttgtatataaggtaagacctgcttatataacagccaatttaagattaaaaatagcagtctaagctgagtatagtggcacatgcctatagtcccagctactcaggaggctaaggcaggaggattgcttgagctaagagtttaaggctacagtgagctgtgattgtaactgagaatagccactgtactccagcctgggtaacacagagagaccatgcctcagtgtaaaaaacaaacaaacaaacaacaacaac

SEQ ID NO: 233358 - DNA, 532 bp, Homo Sapiens
  misc_feature (4)..(4): n is a, c, g, or t
  misc_feature (33)..(33): n is a, c, g, or t
  misc_feature (51)..(51): n is a, c, g, or t
  misc_feature (53)..(53): n is a, c, g, or t
  misc_feature (60)..(60): n is a, c, g, or t
  misc_feature (71)..(71): n is a, c, g, or t
  misc_feature (87)..(87): n is a, c, g, or t
gttngcccccatgtttgtaccagttccaaaggnaagggtaatgcccatggncnccatggntcaccccagcncaagtcatacatggcncctttagggaatgccagaagtccacgtctatcgtgatgtttgcaagagatttgatgaactgtatcataatgtctttcatagatagtaagacagggaagtgtttactgaaattgactatccaaaaaatgttgactaactggttttatttgactttgggggtaaattattcctagcaatctctgaattttgggttccaaagagccctggagacgagtggcagttgtgtgctcagtattataggttatttaaagtaaccgaaccaaaacttgcatatgcacagcacataacagtggttggcacgtagtgggttgtgtgtgcgtctgtagtcccagctacttgggaggctgaggcgggaggatcacttgagcctgggaggtggaggttgcaatgagccaggattgcaccactgcactctagcctgggcgacagattgacacccagtctc

SEQ ID NO: 233359 - DNA, 557 bp, Homo Sapiens
  misc_feature (4)..(4): n is a, c, g, or t
  misc_feature (15)..(15): n is a, c, g, or t
  misc_feature (25)..(25): n is a, c, g, or t
  misc_feature (63)..(63): n is a, c, g, or t
  misc_feature (70)..(70): n is a, c, g, or t
  misc_feature (74)..(74): n is a, c, g, or t
ttanactttggcaanagaaaatttntttaataagaccaggaaaacttatgttccattgcagcnctattcnccantagcagggacatggaatccaacccaatggttcatcaatggtagctggataaagaaatgtggtacatatataccatggaatacttatgcagccatgaaaagaaatgagatcatgtcctttgcagggacatggatagagctggaaggcattatcctcagcaaactaatgcaggaacataaaaccaaacgccacatgttttcattcataagtgggagttgaacaatgagaacacatggacacgtggggttggtcggggaaacaacacacactggtgtctgtcctggggaaaggtggggggagggagagcatcaggaagaatagctaatggatactgggcttactacctaggtagtgggttgatctgtgcagcaaagcaccatggcacatgtttatctatgtaacaaacctgcacatcctgcacatgtaccccggaacttaaaagttgaagaaaaaaataaactgtggaatgtattgttcagccatt

SEQ ID NO: 233360 - DNA, 549 bp, Homo Sapiens
  misc_feature (3)..(3): n is a, c, g, or t
  misc_feature (7)..(7): n is a, c, g, or t
  misc_feature (9)..(9): n is a, c, g, or t
  misc_feature (14)..(14): n is a, c, g, or t
  misc_feature (24)..(24): n is a, c, g, or t
  misc_feature (52)..(52): n is a, c, g, or t
  misc_feature (69)..(69): n is a, c, g, or t
  misc_feature (104)..(104): n is a, c, g, or t
ttncccnanagccntttttaaggntccccagtactttcagatcaaaggaagncatcgaatggccaggcntcagtagtggcaaggcccaggcagttccagatccntgcagccttgccactaccccgagtctctccaggtcaccagccaggcttgggggtgatggaggaggactcggtaagggacagttcacttggcaaatgtttagggagcacctgctgtggccaggcattgccctagaggcagggaatatgatagaaattgcggcagtacaggaaggtaaggtccctgtaccgcagagctcacagtctcatgggaaggagttcttacacaggtgaggtaagtgttagggagaaactaaagccaggtaatgagagagggcagtggggctgcagaggctggggtgagccacagactactgtagacacggtagcaacgtaggtctcttaagaaagtgacacacaacgtaggcctaatcacagcactttgggaggccaaggtgggaggatcactgagaccagcctgggcaacatagagagaccctgtctctgt

SEQ ID NO: 233361 - DNA, 537 bp, Homo Sapiens
  misc_feature (4)..(4): n is a, c, g, or t
  misc_feature (13)..(13): n is a, c, g, or t
  misc_feature (36)..(36): n is a, c, g, or t
  misc_feature (57)..(57): n is a, c, g, or t
  misc_feature (69)..(69): n is a, c, g, or t
  misc_feature (79)..(79): n is a, c, g, or t
  misc_feature (105)..(105): n is a, c, g, or t
tctnacattctgntggccagcagataacttccagtntcagcttgctgccaaaaaggnccaatgtgatgnacagaaggcncagaatgatgccatgattttatatgncaagtacttctccctcccaagccacacatcctcttggatttgatgatgttgtacgattagaaattgaatccaatatctgcagggaaggtggccactccccaactgtttcacaactccattacgtcaggcctggacaaccatggagaaggtaacccagaacttcaaacgtatcaaactacaagaagttttattggtagaactcataaaatataaggtgggaaaaccaagcagaatagcacagtggaaattgaagcagtccagcaaagtgattaagagcagaggccttgagtctggcctggtatgtacagtcacgtgccacataacattttagtcaacagtggactgcgtgtacgatggtcctgtacgattataatggatcaaagctggtagtgcaataataacaaaagttagaaaaaataaattttaataagt

SEQ ID NO: 233362 - DNA, 573 bp, Homo Sapiens
  misc_feature (10)..(10): n is a, c, g, or t
  misc_feature (90)..(90): n is a, c, g, or t
  misc_feature (93)..(93): n is a, c, g, or t
  misc_feature (97)..(97): n is a, c, g, or t
tttttccttngaccaagttacttaccttggaaaaattattggaagttaagcatataaagtcttcatcaggaaaacttattgagatcctgnccntgantacccagcaataacatttctggaactcccgaagcaatcagtgctctctgatcgctaaacatgatgggcttctattagagagattacagtaaaaaataacaatcagctctctgatgatcctgtgaggagggaacgggttgggaggagtagatttggctgaggacaagcccagactttcgtcacagggacagaccaacgtgttaacacaaagggagaacacgggagcatcctgcaccgtgcatttcagccacagatcacatggcccctccgcgggcccagcccacgccctgaccgcccggcctggccaggtctccgtatctctctgccccgccgccccttcccaactgcggacatgctgggtggatccggatcgcatggaagacgcagcctggccgcgctctcccagtgagtcctcatttcgcctctttggttttttcctttcttttttttttttataaaaaacaaacgaattgttgt

SEQ ID NO: 233363 - DNA, 531 bp, Homo Sapiens
  misc_feature (4)..(4): n is a, c, g, or t
  misc_feature (14)..(16): n is a, c, g, or t
  misc_feature (41)..(41): n is a, c, g, or t
  misc_feature (44)..(44): n is a, c, g, or t
  misc_feature (64)..(64): n is a, c, g, or t
  misc_feature (118)..(118): n is a, c, g, or t
cttnttgggggttnnngcccctcccttggttggggtttttntanagccttaagggccttcacantgagtcagcgttgtatctgtaagaagaagcttgtgcaggtctggtgacacacanttcaccctgccaagccccccagtaactgctgtggaccaggcagcaagaagatttgccctgagcggcgcaaggggcaggacccatggctggggctccacactcagggtgtctggctccttcattaggtgatggcttcgccgattcactctcacttgctctccttttcctgtttcttgggcctctcctcgcctggccacctgaccaaaagattgctttatgtgatgtgattcatgtaacaagtgcttctgccttaaacccagagtctgtgccttggctcacgcctgtgatcctaacatttcaagaggcccaggctagaggatggcttgagcccaggaattcgaggctgcagtgagctatgatcacgccactgcactccagcctgggtgacagagcaagaccctgtctctaaattt

SEQ ID NO: 233364 - DNA, 352 bp, Homo Sapiens
  misc_feature (7)..(8): n is a, c, g, or t
  misc_feature (14)..(14): n is a, c, g, or t
  misc_feature (17)..(17): n is a, c, g, or t
  misc_feature (32)..(32): n is a, c, g, or t
  misc_feature (75)..(75): n is a, c, g, or t
  misc_feature (96)..(96): n is a, c, g, or t
  misc_feature (129)..(129): n is a, c, g, or t
  misc_feature (135)..(135): n is a, c, g, or t
  misc_feature (213)..(213): n is a, c, g, or t
  misc_feature (215)..(215): n is a, c, g, or t
  misc_feature (270)..(270): n is a, c, g, or t
  misc_feature (283)..(283): n is a, c, g, or t
tggtctnnaacttntgncctcaggtgatccanccgcctcgcctcccaaaagtgccgggattataggcatgagccnccgtgcctggaaaatgatttntaggccaagtgtggtggcccaacacctgtaatntcaacnctttgggaggccaaggtgggctgattgcttgaactcgggagttcatgactagactgggcaacatggcgagaccctatntntacaaaaaattaaaaaatgtgccaggggtggtggctcatgcctgtaatcccagcnctttgcaaggccnctgtgggacgttacctgagcccaggagttggagaccagcctgggccacatggcaagacctgctctcttt

SEQ ID NO: 233365 - DNA, 558 bp, Homo Sapiens
  misc_feature (4)..(4): n is a, c, g, or t
  misc_feature (53)..(53): n is a, c, g, or t
  misc_feature (63)..(63): n is a, c, g, or t
  misc_feature (122)..(122): n is a, c, g, or t
  misc_feature (124)..(124): n is a, c, g, or t
cccncgggggaaaaaattgccacccccctttggcagataagctcccccccccncaacgggaancaagatttattggggtggaagattttccttctgcccaagagagccttgaaagagcaccntntgtgctactcttgggtggcccagtgattaaagagcaaagtttgtgcaaatataattgtgtaaaacgttggagaaaagtaacttaataaactcacaaccacccttggacttcaataaagcaagcagatgaaaaagtaaataaaagatatagaggctttaattaaatcgaatcaaaaaatgattaatggatatttaacagcacccttcaaataaataattcatattattttcttaacttgtaaaaatcaactataacttaggccacaaagaaaacctgaaaaaagagagaacatataatttttagagtccacatataccaccaaaaataaaaataaaaatctacaatttagcaataagggattaaactcttgcttcaaaaaagcacttagacaccactgcactccagcctaggcgacagaccgagagcttgtctcc

SEQ ID NO: 233366 - DNA, 570 bp, Homo Sapiens
  misc_feature (7)..(7): n is a, c, g, or t
  misc_feature (42)..(42): n is a, c, g, or t
  misc_feature (83)..(83): n is a, c, g, or t
  misc_feature (128)..(128): n is a, c, g, or t
tccgggntcaaagaatttccgggttaagcttcccaggggccnaagattccagggtgcaccaccatgcccagttaatttttggnatttttagctggccaacatggtgaaacgacatctctataaaaatncaaaattagctgagcttgatggcgggcgcctgtaatcccagctactcgggaggttgaggcaggacaaattgcttggatacgggaggcagaggttgcagtaagccgagatcacaccactgcactccagcctgggcaacagagtaagactctgtctcaaaaaaaaatcgtaaaataaaataaatagataccttccttatttctaactccacgcgtccactcatccactggaggccatactttatgactatggccaccattttgagtttttgtaacattgagatatttggaaatttcatgaactctaccttctagaagattttcccacagaacagcatttaagagtccccactcagtcctcaagcatacgtcaatttttggctcaccatactcagacttgagtgccaaagcccacaggcctacacttctgtctttgaacatgctc

SEQ ID NO: 233367 - DNA, 573 bp, Homo Sapiens
  misc_feature (12)..(12): n is a, c, g, or t
  misc_feature (27)..(27): n is a, c, g, or t
  misc_feature (60)..(60): n is a, c, g, or t
  misc_feature (66)..(66): n is a, c, g, or t
  misc_feature (68)..(68): n is a, c, g, or t
  misc_feature (91)..(91): n is a, c, g, or t
  misc_feature (122)..(122): n is a, c, g, or t
gaaagtgttccnttgggcatattttgnaggtaaattctccaacccggtaattaagtggcntggggncntgatagaaagccttgctcaggantaaggcagagttcccagttatatcgcagatncaaagagaccaggaacacgcttgtaatcacagcacttagggaggctgaggcgggtggatgacctgaggtcaggagttcgagaccagcctagccaacatggtgaaacccccatctctactaaaaatacaaaaattagccaggcgtggtggcacatgcctgtaatcccagctactcaggaggctgaggtgggagaatcgcttgagcccgggaggcaggggttgcagcgagctgagatcgtaccactgcactccagcctgggcaacagagtgagaccctgtctcaaaaagaaaaaaaaaaaagagagaaatcaggaacatcatgaaagatacagcaaaatgttttaccccagcccactgcaccacacctgggattgtgacaattaacttgataaattgatgtaaacttgattattttattgctaatttaaaaataaaaatgactttgtattgat

SEQ ID NO: 233368 - DNA, 501 bp, Homo Sapiens
  misc_feature (3)..(3): n is a, c, g, or t
  misc_feature (9)..(9): n is a, c, g, or t
  misc_feature (23)..(24): n is a, c, g, or t
  misc_feature (26)..(26): n is a, c, g, or t
  misc_feature (53)..(53): n is a, c, g, or t
  misc_feature (65)..(65): n is a, c, g, or t
  misc_feature (148)..(148): n is a, c, g, or t
  misc_feature (150)..(150): n is a, c, g, or t
ccnccaccnccgggccaatcttnngnatttttagtagggacggggtttccccngtgttcgccagnatggtcttgatctcctgacctcgtgatctgccgcctcggcctcccaaagtgctgggattacaggcgtgagccactgcacctgncntgattttgttatttactatagtccaacacaagaattaagatggtatatatacagtttaaaatgggacttttttactcttctgactttttgttttaaatatatagtgaaaactgttaaaagtttctcttcagatatgtggtaggtatttgagaggccttattattggctttggttgacatgctggttttggaatcttacctcctagcctccaaatgtccacagaatctgacaattcagaaaagctttatactgagaaactatacataggcaacaggcatatgccacgccagttcatgcttctgagttagacactctatggtaggggaggttggcaatccatttttgtttttt

SEQ ID NO: 233369 - DNA, 560 bp, Homo Sapiens
  misc_feature (4)..(4): n is a, c, g, or t
  misc_feature (27)..(27): n is a, c, g, or t
  misc_feature (82)..(82): n is a, c, g, or t
  misc_feature (87)..(87): n is a, c, g, or t
  misc_feature (130)..(131): n is a, c, g, or t
  misc_feature (136)..(138): n is a, c, g, or t
gcangtggggggccctgtagtcccagnatcccttgaccccaggagccgaggttccagtaactaagatttcaccattgcacantgcantccagctgggcaatggaatgagattccatcccaaaaaataaannaatannnaaataaagaacataccttgggttgatccacttaggaacctcagataataacatctgccacgtatagagcaattgctatgtcccaggcactctactagacacttcatacagtttagaaaatcagatgggtgtagatcaaggcaggagcaggaaccaaaaagaaaggcataaacataagaaaaaaaatggaaggggtggaaacagagtacaataacatgagtaatttgatgggggctattatgaactgagaaatgaactttgaaaagtatcttggggccaaatcatgtagactcttgagtgatgtgttaaggaatgctatgagtgctgagagggcatcagaagtccttgagagcctccagagaaaggctcttaaaaatgcagcgcaatctccagtgacagaagatactgctagaaatctgctag

SEQ ID NO: 233370 - DNA, 567 bp, Homo Sapiens
  misc_feature (14)..(14): n is a, c, g, or t
  misc_feature (20)..(20): n is a, c, g, or t
  misc_feature (36)..(36): n is a, c, g, or t
  misc_feature (185)..(185): n is a, c, g, or t
ttttagaaggatcnactcangcctgaattctcctgncagtgttaatgaaagtgacccaagcattcctcaggtctgtacctaatggtattttagaaaataccaagtcatttcagagtgttggtcagtctgtgttaattattagcatctgactttacattgaaatggtgatgtccaaatattcagtncagtatatatggtaaacacaggtttgctcatggtttcttggaaaaagttttaaatgaaagcaagactgtattatttctcattttaaaaattaatgcaaggccaggcactgtggctcccgcctgtctgtaatcccagcactttgggaggctgaggtgggcggatcgcttgaggccaagagttcgagactagcttggccaacatggcaaaactctgtctctactaaaaatagaaaaagtcagccaggagtggcgcatgcctgaaatcccagctacttagttggctgaagcgtgagaatcgcttgaacccgggaggcatacgttgtcatgagctgagtttgtgccactgcactccagcctgagcaacagagtgaggctctgtctc

SEQ ID NO: 233371 - DNA, 565 bp, Homo Sapiens
  misc_feature (49)..(49): n is a, c, g, or t
  misc_feature (55)..(55): n is a, c, g, or t
  misc_feature (68)..(68): n is a, c, g, or t
  misc_feature (84)..(84): n is a, c, g, or t
  misc_feature (129)..(129): n is a, c, g, or t
  misc_feature (245)..(245): n is a, c, g, or t
aaattccaattaatacccaccggaaccataggttgttaaagtgcttgtncatggnttaggaaccagcntttcaattgggctcancagtgcagttgtgcttcagtctgcaagtctagctagcttggctcnttcactccaggtaagagcttgtttgctccacgtgtatttattctgggacctgggtcgaaggggcagcagttacccaggagaatttcctatagtggtgatagcagaggtacaaggancaaagtcaagtctgcaagtacatttcaaggccctgcttgtgttttatctgttaacaactcatttgctaaagcaagttatgtagctaagccagagatcagttggggagtgagcaactgtacttgcctctttgggaaggaatgaaaaagttacatgataaaggcttagatacagggaagggtgaatgattggacccaaaaaaggctgagcacggtggctcgcgcctgtaatcctagcactttgggagaccgaggaaggaggatcacttgagctcagaagtttgagaccagcctgggcaacatagtgagacccccatctctac

SEQ ID NO: 233372 - DNA, 568 bp, Homo Sapiens
  misc_feature (14)..(14): n is a, c, g, or t
  misc_feature (24)..(24): n is a, c, g, or t
  misc_feature (43)..(43): n is a, c, g, or t
  misc_feature (167)..(167): n is a, c, g, or t
  misc_feature (186)..(186): n is a, c, g, or t
  misc_feature (361)..(361): n is a, c, g, or t
  misc_feature (458)..(458): n is a, c, g, or t
gctgggtgcccaanaagccctgtntcaaaaaaccaaccaaccngcccaagcccggtggctcacgcctgtatccccagcactttggaagcccaaggcgggcagatcatgaggtcaggagtttgagccagcctggccaacatagtgaaaccgcgtttctgctaaaaatncaaaaaaattagctgggtncggtggcaggtgcctgtaatcccagctacttgggaggctgaggcaggagactcccttgaacccgggaggaggttgcagtaagccgagatcacaccactgcactccagcctgggcgccagtgtgagactccatcccaaaaacaacaacaacaaaaaaacctgtaggggtggggcanagggacaaagatgggactaaaggagccaaaaagacaggaagatgctgtgtctcatgcctgtagatgctgtgtctcatgcctgtagttccacctactntggagagtgaggcagaagactgcttaggcccaggaatttgagtcgagcctaggcaacatagcaataccccatctcttttttttttttttttaagagatggggtattggtt

SEQ ID NO: 233373 - DNA, 557 bp, Homo Sapiens
  misc_feature (7)..(7): n is a, c, g, or t
  misc_feature (18)..(18): n is a, c, g, or t
  misc_feature (38)..(38): n is a, c, g, or t
  misc_feature (57)..(57): n is a, c, g, or t
  misc_feature (69)..(69): n is a, c, g, or t
  misc_feature (78)..(78): n is a, c, g, or t
  misc_feature (91)..(91): n is a, c, g, or t
  misc_feature (121)..(121): n is a, c, g, or t
cccttcnatggtaagttnttggtgcccaagggttaagncccccaagcatcccttttnacatctacccangacttttcntctgaagctctgnaaaactctggcctttccagatgcaggaccntcatgaacttcctggccccagaccaatttccctctatgtccctttcccttccttcctcaagcccctcatttcccagatgtgagaccttggcgttctggccccccagcctctctccccatttaggaacttcaagattcctacctgttgcccatctcggaggacaaggtcatggagggaaaaggccaaagcccctttgaccccgctcacaagcatacggctgtcttggtgggtgagtatcaggtttcccacttcatcccaacatctactttctccagtcacgctgtgaaatatggaatattacagagttttccaaaaggcaggggaaactgggtgtggtgatgcgtgcatatggtcccagttatttggaagctgaagttgaaggatgcttgagtttaggggtttgagtctagcctgggcaacacagcgagatcgtctc

SEQ ID NO: 233374 - DNA, 543 bp, Homo Sapiens
  misc_feature (4)..(4): n is a, c, g, or t
  misc_feature (7)..(7): n is a, c, g, or t
  misc_feature (19)..(19): n is a, c, g, or t
  misc_feature (26)..(26): n is a, c, g, or t
  misc_feature (36)..(36): n is a, c, g, or t
  misc_feature (68)..(68): n is a, c, g, or t
ccanagnccaagattttgnaaatttnacttttgtgncacgttgttggtatttactccaggatctttgnatttgcttggctgcatgtatatgaatcagtgtgtttatttactgaaatatgtgcaaaagtcttgtctttggtggattaatttataatataaatccacaaaagtcagattctgctcctaagtatattttacatttttaaatttaatgccagcaagaagttacagtactagaattgccttacccctgagagtatcaatgatcagatcatagtatcaggtgactgggctatagaagatgacttttattacttaacattatgaagttactagggctgatttagaaatcgaggaacactggtgaaaccccgtctctactaaaatacaaaaattagctgggcgtggtggtgggcacctgtagtcccagctactcagaaggctgagtcaggagaattgcttgagcccaggaggcagaggttgcagtgagccgagatcgtgccactgcactccagcctgggcgacagagtgagactccgtctc

SEQ ID NO: 233375 - DNA, 555 bp, Homo Sapiens
  misc_feature (2)..(2): n is a, c, g, or t
  misc_feature (8)..(8): n is a, c, g, or t
  misc_feature (93)..(93): n is a, c, g, or t
cntttaanattagcttattttcttgttaccaccaaggatatctcttctggagatctcaagtcaaggtagaaaaagtagtcaacaggaaaatgncagaacagttttggatatgtatgagaatttaaagcaaatgtttctaaatgagaaattgtaactcaggaaatatttggcacattctatcaaaattttgtgaattttgataataaaacattcacaattcaattaggagtaaaggaacatcagaagaatttgagagcataccatggctggcagtccataaaagactagttaggaacatcagcttttaatcatcgaccctgctttcaggtttcattttaaacttatagaagaggggaagacatcagtgtgcttatttggcctttactctaaatcttaaaaggaagaaaattttaatatttcttagtttgagcccaggtgcggtgtctcacgcctgtaatcacagcactttgggaggccaaggcaggcggatcacttgaggtcaggagttcaagaccagcctgccaacgtggtgaaaccctgtctgtactaaaaatt

SEQ ID NO: 233376 - DNA, 552 bp, Homo Sapiens
  misc_feature (28)..(28): n is a, c, g, or t
  misc_feature (38)..(38): n is a, c, g, or t
aaaataggctccctgtggaataaaaaanccaacccatncaaagttgcccctttggtaattatcattaagtttctgttggggtaagttttattatctgtgataatgattttaattgtgttttacatgtaacattatatttggttccataatgcaatataaattttcatacagatttggcagttgacttgtttcattaaatgaggtttttttttttctcttaggcaaaggtctaataagtatatcaatgtctacttcaatagtatcatttcaaaagtaattattcactttatgtatatcagtctaaacttagactgcctttaatgtttgtaaataggtgtatatggtccatgatctgtgagtatcctagattcaaacgcaaatcattacagggtattgatgaaacagtgcctctctgatcacttttaaaagtatattttagacctctctaccctagttaacattccattcttaatttagtcacattttcagatttttggttaagcatcaatatgtagatctttttttccatcattacaactaacttggctttct

SEQ ID NO: 233377 - DNA, 559 bp, Homo Sapiens
  misc_feature (39)..(39): n is a, c, g, or t
  misc_feature (62)..(62): n is a, c, g, or t
  misc_feature (124)..(124): n is a, c, g, or t
aaaccgggcccttttaaagccaagtcatgccaaagtagnttagaggattccttccttttggnttcactttcagggatggtcattttaattaaggtggggatcattttaaaatcacatataaacncaaccaatattattaaatagtgatttctgacataaattagggaaaaatgtggttcacatttcagtcaaacaatatttaataattagcttttccctgcttagcgccatttataagacaggcatttaagagtcaaaaaaacaaacaatgttgctttactcttaatagccaaaaactggaaacaaccccagcactttgggaggccgaggcggttggatcacctgaagtcaggagtttgagaccagcctggccaacatggtgaaacccatctctactaaaaatacaaaaattagccaggcatggtggcaggcacctgtaatcccatctactctggaggcaaaggcaggagaatcatgtgaaccagggaggcggaagttgcagtgagccgagatcatgccacagcactccagcctggatgacagagtgagactccatctc

SEQ ID NO: 233378 - DNA, 549 bp, Homo Sapiens
  misc_feature (3)..(4): n is a, c, g, or t
  misc_feature (38)..(38): n is a, c, g, or t
  misc_feature (67)..(67): n is a, c, g, or t
  misc_feature (90)..(90): n is a, c, g, or t
ccnncggatttaaaggcttggtaacttcaaaggaactngtaaagtcaaaggtaagcaatggtttttntaacccttttcccagaaaggggncattgacacttgaatttttgtcacctttttcctcattagaaggaaagtagaaagccttactgtaggatttttaaaaaaaaatccatctcaccccatattggtcttaaataagtatagactaattaacctaagctacctttaacaacgtagaatttagatgggttcatatatgtgagaaaaacctgaatataggacaggggtcctacttttttccccacctctgtcgcccaggctagagtatagtggtgtgatcttggcccactgcaacctctgcttcctaggttcaagtgattctcctactttttgtatttttagtagagacagggtttcatcatgttggccaggatggtctcttaactcctgccctcaagtgatccaccagagaggagatcctcggcctccccaagtgctgggattataggcatgagccaccgtgcccagcctactttctaattaatt

SEQ ID NO: 233379 - DNA, 550 bp, Homo Sapiens
  misc_feature (5)..(5): n is a, c, g, or t
  misc_feature (22)..(22): n is a, c, g, or t
  misc_feature (29)..(29): n is a, c, g, or t
  misc_feature (33)..(33): n is a, c, g, or t
  misc_feature (49)..(49): n is a, c, g, or t
  misc_feature (67)..(67): n is a, c, g, or t
  misc_feature (81)..(81): n is a, c, g, or t
aggancttaaaaaggttcatgntaaaatncaancagtattgatgcaaancagaaaataattgatgcncaggtcataaatgnagatgagattattcaaccaggaaaaccgggatcgtgtccctggattcagccaacaccagactgatgagcgcgctgacccaagtgaaggagcggtacagcatgcaggtccgcaatggcatctcccccaccaaccccaccaagctttccatcacggagaatggtgaattcaaaaacagcagctgctgacgggctttgtctgtggaaggagacagaaggaaattgacccactctcctatctccagacctttacctagcccctccaggtttacagaatgttgctacttcacaatggcgatgtggtgagaaactcctgaatgaagaaaggaaccttgtctttcagggcataaggcggcgacttccaaggtcaatgcttttcccccacatctctatgtacatagggaacttagttctgggccatgtacagaaaatatcactgtaatataccaaaaggaagttaataatgtagatt

SEQ ID NO: 233380 - DNA, 537 bp, Homo Sapiens
  misc_feature (5)..(5): n is a, c, g, or t
  misc_feature (24)..(25): n is a, c, g, or t
  misc_feature (83)..(83): n is a, c, g, or t
  misc_feature (96)..(96): n is a, c, g, or t
  misc_feature (107)..(107): n is a, c, g, or t
  misc_feature (157)..(157): n is a, c, g, or t
  misc_feature (167)..(167): n is a, c, g, or t
  misc_feature (278)..(278): n is a, c, g, or t
  misc_feature (309)..(309): n is a, c, g, or t
  misc_feature (451)..(451): n is a, c, g, or t
  misc_feature (481)..(481): n is a, c, g, or t
ttttnttttcggaatggaaaccgnngaggagaaagggagatttttttttcaaacaaaatttgttgttctgttaataacatttntattgttaaaaanaacagaaatcngttcaagaatgtttaagaaaaagtgagcatttttggaaggatagtggagntcatgaaatntagaagttgaacaatccagttttacaagggcatgtggcagctgcagtatgtggacacaccctccagaatagcactgttgagaatgactcactcccagctcccaatcctgtntcaggtcaatgcttgagagagataataggtntgattcaacttgaatcagatattcactcctgctccaaccagttgtggctgtggagttagagtcacatagcaggaacacagttgctgataagccatttttgtggacagagtgggtatctttaagagttacctatgatcaattnttggtcacattgtgaggcagttgaagtttnttttgtgtcctttatatccccctaacaacagggaagttttatcagtaaatgcctac

SEQ ID NO: 233381 - DNA, 579 bp, Homo Sapiens
  misc_feature (2)..(3): n is a, c, g, or t
  misc_feature (26)..(26): n is a, c, g, or t
  misc_feature (30)..(30): n is a, c, g, or t
  misc_feature (32)..(33): n is a, c, g, or t
  misc_feature (40)..(40): n is a, c, g, or t
  misc_feature (211)..(211): n is a, c, g, or t
  misc_feature (404)..(404): n is a, c, g, or t
  misc_feature (406)..(406): n is a, c, g, or t
  misc_feature (487)..(487): n is a, c, g, or t
  misc_feature (511)..(511): n is a, c, g, or t
anncggaattattatatatgtaaagnggantnngtccaantcgttaataaaacaagcaggccggggtcttgttaaatagttgtatcaatgacttgatttagattaatgaggatatatttttcaaatttatgccttttacaaaatttttaaagagtaggtaatgtcggtgatagatataaagaaaggaaaagatctccagatgtggatcttntactggatccctgtaacagaaagaagacattaggctgggcgcagtggctcacacctgtaatctcagcactttgggaggcggaggagggcgcattgcttgagcctaggagttcgagaccagcttaggcaacacggtgaaaccccatttctacaaaaagacacaaaaattagacaggtgtggcacacgcttgtantntgagctacttgggaggctgaagcaggaggattgaggaagaggttgcaaagttagccgagatcacgccatcacactgcagcntaggtgacagagcgagaccctgtntcaaaaaaagaaagaagacattagcagaaaagctgaggaaatgcaaataaagtctgcaatttttaaat

SEQ ID NO: 233382 - DNA, 580 bp, Homo Sapiens
  misc_feature (23)..(23): n is a, c, g, or t
  misc_feature (31)..(31): n is a, c, g, or t
ggatgttgtttaacttgatgtgnccttttgnattaagaggactatcagattaaagcaaaatgtaattttaattcaatgaagatatcattaccaggttactcttgagatttttcaacggtgttagaactctcaaccaagacctgaaaaccaagtatgcaaggtttctgaatctctctggtagattaactattgacaatgattttctgttatctttgttcaaaaagttcatgtcttctcaaaatatgaaatattgataaatggaagagcatacggtgacaagtctcctttccaaccccaggttccctacaccctgctctcagcaggcagtgagtgtcacacacctgttaatccatcttgagcaggacagtactatacaaatagaatgcaagctgtaatgtaattttatattttcttatagccacgttgaagtaaaaacaaacaggtacagtgttttttaccagctttatagaagtacagttgttacatatttaatgaatacaatttgatgggtctgactatatgcacacacctttgataccatcaccacaatcagggtaataaacatacctgtcatctccac

SEQ ID NO: 233383 - DNA, 548 bp, Homo Sapiens
  misc_feature (4)..(4): n is a, c, g, or t
  misc_feature (37)..(37): n is a, c, g, or t
  misc_feature (49)..(49): n is a, c, g, or t
  misc_feature (56)..(56): n is a, c, g, or t
  misc_feature (65)..(65): n is a, c, g, or t
  misc_feature (101)..(101): n is a, c, g, or t
gggncccattaaggtttataaggaatttaatgatccnctgtttaattgncagtttngcatagttngtctacctttagagaattaagagcctctcaactgancagtaaaggtaaggagagctcaatctgcacagagccagtttttagtgtttgatggaaataagatcatcatgcccacttgagacttcagattattctttagcttagtggttgtatgagttacatcttattaaagtcgaaattaatgtagttttctgccttgataacatttcatatgtggtattagttttaaagggtcattaggaaaatgcacatattccatgaattttaagacccatagaaaagttgaagaatgcttaattttcttatccagtaatgtaaacacagagacagaacattgagatgtgcctagttccgtatttacagtttggtctggctgtttgagttctagcgcatttaatgttaataaataaaatactgaattttaaagctgttaagaaattgtccagaacgagaatattgaaataaaaacttcaaggttataatcgc

SEQ ID NO: 233384 - DNA, 578 bp, Homo Sapiens
  misc_feature (2)..(2): n is a, c, g, or t
  misc_feature (42)..(42): n is a, c, g, or t
gnaataaaggataaattagaaaccgtcatggggtaacctatncatttaatgatacatttacccccatagcgtctcataaaaatttaagacctggtagaattatttgtaaggtatatttagtgtttttttcccttttttcaaatgtgcatagtggtccagatcatctataattaattataagtttcttatgatttacataaggataatttggattctactcttgctgcatattcagaaaaatattatttactgttaattctgatatgaattgtatttaatttgttgtcctaatagtttttaattggttcatttaattttaaagcataggttaaatatctttattttttttaaaatacaagggtccttctgtacttttcatttgaatcatatcctctaactactctgtaagaaacgtttttacatcaatattttgattgattttattgctataccaatacagtcattaattttacttggtgttttcttcaccatatgtctgtttgatttaagtgaatttagatttgtacagttctggaaattttttaaaaaatattatgcagagtaaaacattttaaatt

SEQ ID NO: 233385 - DNA, 535 bp, Homo Sapiens
  misc_feature (11)..(11): n is a, c, g, or t
  misc_feature (33)..(33): n is a, c, g, or t
  misc_feature (45)..(46): n is a, c, g, or t
  misc_feature (57)..(57): n is a, c, g, or t
  misc_feature (65)..(65): n is a, c, g, or t
  misc_feature (77)..(77): n is a, c, g, or t
  misc_feature (196)..(196): n is a, c, g, or t
  misc_feature (201)..(201): n is a, c, g, or t
  misc_feature (504)..(504): n is a, c, g, or t
ccaaggaaggntcaagccctttttgcccggaancccttccatggnntgaacactttncccattcnttgatccctttntgaggctccacctctggtggctcctcctaggaaaccagctcgtgggctgggaatgggggagagaagggaaaagttccccaagaccccctggggtgggatttgagctcccacctcccttnccacntaatgcactttcccccttcccgccttccaaaacctgcttccttcagtttgtaaagtcggtgattatatttttgggggctttccttttattttttaaatgtaaaatttatttatattccgtatttaaagttgtaaaaaaaaataaccacaaaacaaaaccaaaaaaaaaaaaaaacttctcctcctgcagccgggagcggccggcctgcctccctgcgcacccgcagcctcccccgctgcctccctagggctcccctccggccgccagcgcccatttttcattccctagatagagatactttgngcgcacacacatacatacgcgcgcaaaaagg

SEQ ID NO: 233386 - DNA, 556 bp, Homo Sapiens
  misc_feature (2)..(2): n is a, c, g, or t
  misc_feature (10)..(10): n is a, c, g, or t
  misc_feature (22)..(22): n is a, c, g, or t
  misc_feature (37)..(37): n is a, c, g, or t
  misc_feature (40)..(40): n is a, c, g, or t
  misc_feature (53)..(53): n is a, c, g, or t
  misc_feature (84)..(84): n is a, c, g, or t
gncaagaaantatccctatccngtggttaaaaggggnatncccccattttggngatttttagactttttggcctgattttcacncagttttgactttaattttcttctttattagaagatatgggtaactttagaacctctgagttcaaggaaggatctaagcaatgaggccagaggagtgagatgtcctatggtaaccaagcataccatttctttgtcaagtgggcttttgtttatggctgcttaggggcttaaaagctccatggactggtgaggattatcatttgaatggaatttccccaattcaagaaccttactattatcctccaatcagttctacactgttggggaaaatcccctggaccttatataacatactttgtaaccatgcagttagttactcttacactcttgtcattataaatgcttgatcaatagttgatagactagctcttgatcagagtacccttgtatggagagaaggaaaaaatgccatacatttcacttgattctgtgaaccataatgcttaggacagtagtggtttgggtttgattt

SEQ ID NO: 233387 - DNA, 585 bp, Homo Sapiens
  misc_feature (14)..(14): n is a, c, g, or t
  misc_feature (25)..(25): n is a, c, g, or t
  misc_feature (28)..(28): n is a, c, g, or t
  misc_feature (32)..(32): n is a, c, g, or t
  misc_feature (97)..(97): n is a, c, g, or t
  misc_feature (102)..(102): n is a, c, g, or t
attacccattatancaggttatagnatnccgnttaatatttaaagtccagtggtccttccataccagcatgaccaactggaatgtgaactgaaagcncagtnccatttacattagcatcaaaaatctccaaaacaattaggtataaatctagcaaaatatttacaagatctatatgaggaaaactatgaaactttgatgaaagaaatcaaagaataaataagttgagaggtctagttcatgtacatggatagaaaaactcactattggcaagatgtcatttttttccctacttaatctgtagattcaacacaatctcagttgattttgttcttaacaagttattttgtggatattgacagaatctaaaatttatatagaaaggcagagcatgagcaacatggcaaaacctgtctctacaaaaaatacaaaaactagttggatgtggtgtcatgtgcctgtagtcccagctacttgggagcctgagatgggaggattgcttaagttcaggaggtcaaggctgcagtgagccatgattgtgcccctgcactctctagcctgggtaacacagcaagatcttgtatcag

SEQ ID NO: 233388 - DNA, 571 bp, Homo Sapiens
  misc_feature (21)..(21): n is a, c, g, or t
  misc_feature (25)..(25): n is a, c, g, or t
  misc_feature (40)..(40): n is a, c, g, or t
  misc_feature (70)..(70): n is a, c, g, or t
  misc_feature (74)..(74): n is a, c, g, or t
  misc_feature (86)..(86): n is a, c, g, or t
  misc_feature (88)..(88): n is a, c, g, or t
  misc_feature (505)..(505): n is a, c, g, or t
ccaaaggaaggcttcttatcnagcnggccttaaaacaagntcttggggaaaagcccttaaccatgaattnagcntaagggaacatngngctttctccactggtttctttatcagggaaaagaaaataccagccctcccttttggacaaaattgttgggctttgttcagtcagggctgagattttgcaggtaaaccctgggcggtgtggcacttcattgaatttattagttttgtattccaaggacattttatgaaaatatcaaatattctgaaaacttccatgcttgatttagaatttaaataaacactatgaggcaactccttggtagagattgtttaaatttggaacacatactgactcttcccctgaatttttgagatcccctgagactggcattttacttctgtgttttaccagttggaatggagcaaccttcactaaaatctgtactgatggattttcgtaactttttaatgccatttaagaacataacacctttaaatnaaaaatcttcaaaaggctcgtcattctgttcaagagaaggttcaatacatattcttctaattcagg

SEQ ID NO: 233389 - DNA, 572 bp, Homo Sapiens
  misc_feature (4)..(4): n is a, c, g, or t
  misc_feature (17)..(17): n is a, c, g, or t
  misc_feature (20)..(20): n is a, c, g, or t
  misc_feature (34)..(34): n is a, c, g, or t
  misc_feature (38)..(38): n is a, c, g, or t
  misc_feature (40)..(40): n is a, c, g, or t
cccntattgaaatgaanccncttcaaatatgtancccncntttctttttaaaatttctagaagggtttcaatatagactttctgacttttatggtatacatataggcaatattctattcttctttccttttaaatacttactgtttcaatttcaaataaaaaatcagcattctagtttgtacattttagcacagaaatgtttacaaccttcagcacaattgcttttgtaatttactgacttggcattttgaggcgtttttaacaaattatgagaaataacaccttcagaaagcatgtgactactttgatgcaactatttacaatgtattcataagaagtcattaacctgtagagttcttagacatgtggaacctttaacaattatactaaagagtacatacaaaatacagagctatgtaataataactaattttaaatcctgacaaattagaagttaagcctactatctgtaaaaatatgtcctgattcatttttttaagtatatacctgagcctttaaaaagtatatgcctttacaattgatttccaataaacaatactgaataacatact

SEQ ID NO: 233390 - DNA, 602 bp, Homo Sapiens
  misc_feature (13)..(13): n is a, c, g, or t
  misc_feature (30)..(30): n is a, c, g, or t
  misc_feature (86)..(86): n is a, c, g, or t
gagcaaccattanggctgaggtcaactttntgtcagttcaccagggccattagattctcaatggaggcatgactttattgtgaacngcacatgcaagggatttaggttgcacactccttatgagatctaatgcctgatgatctgaactggaccagtttaatccccaactccagtccgtgggaaaaatgtcttccacgaaactggtccctggtgccaaaaagttaggggaccactgatttagattatgtcacatgtcccatccactcattaacattaaggctttcatccctgggacctcaagataatggtggtatttagagatgtggtttttttaaagaggtgattttaaaatgaggcagttagaatggggccctcattcaatatgactggtttccttataagaagtgaaagagataccagggtagcaggcacagaattttatgtgaagtgaccggaaatggttaccttcaaggcaaagagagattcctggaggagatccttcttttaaggctcattatagaggaaatcatccttatctacactttgatcctggacttccagcctcaaaaattatgagcaaataaatttctgttgtttaagcc

SEQ ID NO: 233391 - DNA, 547 bp, Homo Sapiens
  misc_feature (9)..(9): n is a, c, g, or t
  misc_feature (23)..(23): n is a, c, g, or t
  misc_feature (41)..(41): n is a, c, g, or t
  misc_feature (53)..(53): n is a, c, g, or t
  misc_feature (56)..(56): n is a, c, g, or t
  misc_feature (77)..(77): n is a, c, g, or t
ggatgcccnccacaccgggttantttggaatttttagtaanacaagggttccnccngtattggccaggctggttttngaactcctgaccttcatgatccggcccattttggcctcccaaagtgctgagattacaggcatgagccaccgcacccggcctttttttttttttttttttttgaggcggggtctcactctgacacccaggctggagtgcagtgcacaatctcggctcactgcaatctctgcctcccaagcaatcctcccacctcagcctctggtgtagctgggaccacagatgctccaccatgcctggctgtatttttggtaaagatggggtttcgccttgttgcccagggtggtctgtaactcctgagctcagatgatctgcccacctcggcctcccaaagtgctgggatcacagacgtgagccactgcgtccggtccatctgacttctcaaagactttagaccttgacttcagtgatttgttgtagtcttgtatgcttctctataaaattttaataaatgaaatgtcttatttttgtag

SEQ ID NO: 233392 - DNA, 522 bp, Homo Sapiens
  misc_feature (2)..(2): n is a, c, g, or t
  misc_feature (15)..(15): n is a, c, g, or t
  misc_feature (78)..(78): n is a, c, g, or t
cngccgtggtttaanaagtaggaattttacctcattctttaaatttgggggcattcagaaagcccttttaaacccttntaataaattggatcagctgagtttagacttgaatttattttttaaaccaaagagggcatattaaatgagtaatttggaaatacttcagatgaataaataacatctctgcaacttcctttttctcctgatcagtcctgtgagtgacccttgataacttttcttaaaagcaatatgagtcaaccaaagaataagattaatttttgaggatttgtgataaccagaagaaagcactgtaggctgtgacaacctgtgagggccgagagaaatacaggggagccaactggtgatccatattggctttcatagagtggtagtatttttgtgtcagcttgttacatgcctgaacctctggattgcagcagtgttgtcattgtaccagcagttgctcagactctaatcagagtctgatttaccctcaataaagttctgtacgcatcagattgg

SEQ ID NO: 233393 - DNA, 552 bp, Homo Sapiens
  misc_feature (5)..(6): n is a, c, g, or t
  misc_feature (18)..(18): n is a, c, g, or t
  misc_feature (34)..(35): n is a, c, g, or t
  misc_feature (61)..(61): n is a, c, g, or t
aaaanntaaccctttttntcatcaccagatactnntaagaacaggcaagttatagagtggnaaaagatatgtgccccataaatctgacaatcctttatgtccagaatgcacaaaggagtcctatccaattaaaaggaaaaaaggacatgaaaagtactgtccattagtcatcagggaaatgcaaactaaaccaccatgagataccgccacatatccagaagcatggctaaaatgcaacaggtggacaataccaattgtcggcaaggatgtaaaaaacaaccagagtacaatgtgctggcaggaacacaaaacagcacaatggttttagaaaactgttgggcagtttcttaaaaagttaaatatacagctaccataaaacctagcaattctactcctagctttttaatccaagagaaatgaaaacatgtccacaaaaatccctgtacaagaatatttatagcacatttataatagccccacagaaacagctcaggggtccatgaacagaaggatagctacataaactgtcatgcattcaaatagcacgacaac

SEQ ID NO: 233394 - DNA, 547 bp, Homo Sapiens
  misc_feature (2)..(2): n is a, c, g, or t
  misc_feature (7)..(7): n is a, c, g, or t
  misc_feature (31)..(31): n is a, c, g, or t
  misc_feature (38)..(38): n is a, c, g, or t
  misc_feature (50)..(50): n is a, c, g, or t
  misc_feature (84)..(84): n is a, c, g, or t
  misc_feature (107)..(107): n is a, c, g, or t
  misc_feature (133)..(133): n is a, c, g, or t
  misc_feature (182)..(182): n is a, c, g, or t
anttttnaatctttggggggcttttgacccntttccantcattgaattcncccagaataattataggttcttctgagggcttantgtggggtcagaaaagcaggaanagttgcttttggatagtaatccccantgctggccaccagcagctgcagcctccacagcagctgcttcccctcgcntccatgccaccatctccccttcatatccactatctccttgtctctctgcaggtcatttataatcagcagtcatggcgtacaggcctcattagtgatatagccattccttcagtgcttcagaaataatcatttagaaaaaaatgcacggtttccatcccttgagagcccatgagtgatgaatttatttcagtttggctggcttggctgtcttgctcagccttatttccatatttatttcaacaaacaatgtagggtgggaacaagaaaacacatgctgggtgcacacacacgctgcatatctgctccctaagttgattcctcttggggaaggatgaaaaggaatgccaacgaaagaaccctccatt

SEQ ID NO: 233395 - DNA, 534 bp, Homo Sapiens
  misc_feature (47)..(47): n is a, c, g, or t
  misc_feature (51)..(51): n is a, c, g, or t
  misc_feature (54)..(54): n is a, c, g, or t
  misc_feature (80)..(80): n is a, c, g, or t
ccccacaaggggaaaaaccctttccagggtcatggccccctccctgncagnccntgctgttgtaaagttgagccatttcnggcttctaaagccaagggatcaggctggtaatccccttcccagcgggcttctgtagggccgctgcctagtcactgcaagcgctttggcagtctcccggctgcagctggttgacagcagatcagagagctcttgggcctcttgttctcttccataagatttttctgggtcaggccaggatgaaacccagtggctcctggcaaggctgcctgaggtgctgtctcttcattgtccaggcctctctgactcaaaatgcctacacctgttgaaggataactcatgtgccacagcgaggtcgaggctggccttctcttttcttggtacatttgtagtgaatgtttgtcagaaaatataactaccaaagaggatgttaagcttctacatctagaatgcctgtgactctgaccataagaagatattggtatcaaaaaaaagtttttaagaaaacagcaggac

SEQ ID NO: 233396 - DNA, 470 bp, Homo Sapiens
  misc_feature (3)..(3): n is a, c, g, or t
  misc_feature (12)..(12): n is a, c, g, or t
  misc_feature (20)..(20): n is a, c, g, or t
  misc_feature (36)..(36): n is a, c, g, or t
  misc_feature (46)..(46): n is a, c, g, or t
  misc_feature (64)..(64): n is a, c, g, or t
  misc_feature (76)..(76): n is a, c, g, or t
  misc_feature (210)..(210): n is a, c, g, or t
  misc_feature (214)..(214): n is a, c, g, or t
  misc_feature (232)..(232): n is a, c, g, or t
tanccccgggantcccagcnctttggaaggccaagngggcagatcncgaaggtcaaggagatcnagccatcctggntaatacggtgaggccccgtctccactaaaaatagaaaaaattagccaggcgcctgtagtcccagctacttgggaggctgaggcaggagaacggcgtgaacccgggaggcggagcttgcagtgagccgagatggngccnctgcactccagctggggngacagagcgagactccatctcaaaaaaaaaaaaaaaacagtttctcagtccatgtaaccacctttcaaatgatcagtagccacatgtggctagtggttaccatattagacaattgaggaaatattgaacatttccatcatcacagaaagtacggttggactatgggccaaatctagcacaccacctgcttctgggtggtcttcaacctaagaatagtttttacgtttttaaatagttg

SEQ ID NO: 233397 - DNA, 523 bp, Homo Sapiens
tcatttttgaagttgggaagtctcatgagagatgttgaagtatgtatttaatcaagagtcatgatttcaaactagttttacatattaagcagttggtgttctaatttaatgggtaaatgtgtgtttggataaatatctgaaaattttatccttaagtatatataattatttgcctcttatatgtcttaaagctatttaaacaaggtgttaaatgagccaaaacaattaagtaattagaacagtacatttttatcagagtgtctgtcatatgcaatgaatgtatgtaatactaaaaaatcatgactacttttatcaaagaaaaaccacacattaatcctattaatcatgaaagcgtagcattgtaaattaaaggttttctttgaggctcttgaaagtgatcccattgctttcctgttttaaaaatattttatgctctttatttccacttctgtgaatgtgatatttctattttgtgattatgttactgaataaacaaacttgctacataaaattcttagcaatt

SEQ ID NO: 233398 - DNA, 625 bp, Homo Sapiens
  misc_feature (12)..(12): n is a, c, g, or t
agcggacttccngccctgggcttgccatttcccacctttcattctccatacatatgagagtcagaaaccatccagtaattgatattatgggccccattgaaaggattgaatctggaattagttctgtccactgtgaagggagaggaaataatgctgtaaatgttgagttacagaaagtccaatgtcaaatatagtttttttgtttcctttcaaatgtattacagactgtgccaaaacagttaccaattcacactgtcaatattaaagtataccatagtatacaaattagtcagtacttgctgttaattttaatatttctgatttaacagttagttattaagtggtacttcattgctgttttagccaacgttttaaaaataatttgggagtttgactattttggcttacgtactcatttccttttctctgctaaaaatgttttgcttgtgtgcgttcctgatttttgtcttgtataatcttgatctttgaaaaccctcaaacatgtattaaattgttgtaactttttttcattagagggaagacattaaggggattggggacatttgtttcacacatctgcagtaatatgagttaactaatatttaacaagctctttctttacatt

SEQ ID NO: 233399 - DNA, 560 bp, Homo Sapiens
  misc_feature (4)..(4): n is a, c, g, or t
  misc_feature (15)..(16): n is a, c, g, or t
  misc_feature (87)..(87): n is a, c, g, or t
  misc_feature (96)..(96): n is a, c, g, or t
ttanactccattccnncagtaataagtaaaattgttaacccatgtgcccattcctgagtagggcagactcttcacaaaggcccatgncaagaattntagggtccagattgaactttaatatagacctttgtctgtgtagaccagtttgtcttgtaaactgtcttacttatgtgtgtaaacattttacattcacatgaaaagttattttcctttatataattggattcagaatcataagggacaggactgaaattattctacagtaaccagtaagaataagattcggccgggcacggtggctcctgcctgtaatcccaacactttgggaggccaaggtgggcggatcacctgaggtcaggagtttgagaccagcctggccaacatggtgaaaccccgtctctacacaaaaattagccaggcgtggtagcgggcatctgtaatcccagctacttggggggctgaggcaggagaatcgcttgaacccaggaggcggaggttgcagtgagccgagatcacgccactgcactcccgcctgggtgacaagagcaaaactccatctt

SEQ ID NO: 233400 - DNA, 555 bp, Homo Sapiens
  misc_feature (50)..(50): n is a, c, g, or t
  misc_feature (71)..(71): n is a, c, g, or t
  misc_feature (80)..(80): n is a, c, g, or t
  misc_feature (92)..(92): n is a, c, g, or t
  misc_feature (161)..(161): n is a, c, g, or t
  misc_feature (198)..(198): n is a, c, g, or t
  misc_feature (278)..(278): n is a, c, g, or t
  misc_feature (285)..(285): n is a, c, g, or t
  misc_feature (396)..(396): n is a, c, g, or t
  misc_feature (540)..(540): n is a, c, g, or t
ttgccagaaagccattccagaattggcttgagtttgagtgacttaaaacnttccggtgaagcattaattgncattaaagngtttatgttaanaggattgggccaggcgtgtggctcacgcctgtaaacccagcactttaggagcccaaggtggatagatcncttgaggtcatgagtttgagatcagcctggccaacanacgtgagtcacttttcccagcctgctttttgtttctttaacaaaaaccaataggggtttttataggtattgtgttgaatntgaatcncattggcttatataataccaatattgatttttccaaaccatcaatgtgggttgtatatatatgtttttaatcattttggttaatgtttgtagatttcaaggtgtgaaattntcagtttttttatgtttattcctaagtatttcttactttaagatctctagcaaatggaagtgttttttaattttcgtttaaattttttattgtttatggaaattcaattaatttttggtgctgctattgcattgtgcaaatccnctgaatgtgttgatt

SEQ ID NO: 233401 - DNA, 552 bp, Homo Sapiens
  misc_feature (3)..(3): n is a, c, g, or t
  misc_feature (13)..(13): n is a, c, g, or t
  misc_feature (35)..(35): n is a, c, g, or t
  misc_feature (39)..(39): n is a, c, g, or t
  misc_feature (46)..(46): n is a, c, g, or t
  misc_feature (51)..(51): n is a, c, g, or t
  misc_feature (57)..(57): n is a, c, g, or t
ttnaaaatccccntggaaaggccaaagcctgggtncagntaggccntcttntgggcntggcagttcccagatgtgaaggatatgagtctctcccgctctcaggaatcattctctcatctcatttggatggctatctcctattttaaatttgaatcatggaatttgaatttgtaatttggttttagccttagtttccttctggttcgcacctaagcaagataattttaagacacttaggtcaataactgtgcctataagaatttcctttgggccaggcatggtggctcacgcctgtaatcccagcactttgggaggccaaggcgggcagatcacctgaggtcacaagttcgagaccagcctggccaacgtggcaaaaccctgtctctactaaaaatacaaaaattagccggggtggtggtacatgcctgtagtcccagctactcaggaagctaaggcacgagaatcatttgaacactggaggcagaagttgcagtgagctgagatcgtgccactgcactccagcctgggtgacagagtgagactctgtcttgg

SEQ ID NO: 233402 - DNA, 573 bp, Homo Sapiens
  misc_feature (21)..(21): n is a, c, g, or t
  misc_feature (36)..(36): n is a, c, g, or t
  misc_feature (49)..(49): n is a, c, g, or t
  misc_feature (54)..(54): n is a, c, g, or t
  misc_feature (91)..(91): n is a, c, g, or t
  misc_feature (121)..(121): n is a, c, g, or t
  misc_feature (124)..(124): n is a, c, g, or t
  misc_feature (128)..(128): n is a, c, g, or t
agggggaccacttgttggccnttttgtcctgggaancccccccggaggnccccnttcaaaaataggggcctttgggccaaggtgaattggnccggtgtcaagttgagcttttccatgagcntcntganccgctttgtggatgggttgacctttcaaggtgaactttaccttcaaccgccagccgttgcgagtccaagcaccgtgccctggagctgacagggcggctggctgctgtggcccatgctctttcctgtggcacctcgggacgtcccgctgctgccctcagatgtgaaactcaagctgtacgaccggagtctggagtcaaacccagagcagctgcaggccatgaggcacattgttacgggcaccacccgtccagccttaactgcctgcctgaccctgaaccagaacccagctgaactgcccctccaagggacaggaaggctgggggagggagtttacaacccaagccattccaccccctcccctgctggggagaatgacacatcaagctgctaacaattgggggaaggggaaggaagaaaactctgaaaacaaaatcttgttctatgc

SEQ ID NO: 233403 - DNA, 546 bp, Homo Sapiens
  misc_feature (48)..(48): n is a, c, g, or t
  misc_feature (66)..(66): n is a, c, g, or t
  misc_feature (69)..(69): n is a, c, g, or t
acttgagatacccctataaatgaatataagattgctgatactaaggtnccaaaaattatttccccnttncagaaacctaaagaaatatatctcaatagaaatactagaaattgggtgatcttgttactaattggctcaagattttgctcactgatataggaaaatcacagttcccttttgggtactataagatgtgaaattggatttttacagtgtctgttagacttccgtcattcaataaacataatactagagcagaattgagttgaaatcaaatgttgtgagtgggtaaggtaatgtgcacatccagttctcagcaggtggttctaagcaggatgcggggcctgcaccccaagctgctaacctatcaagggtagcccatgtggttctgagggcaccgtgctgatgagcacccactgtggttctgattttggcagccacggctgaatcaagtctttgatctttggagtgacttctgccacagtgagcatatctgtttgttttgcccctccctttggtcattattccaacctggcagtacaggac

SEQ ID NO: 233404 - DNA, 486 bp, Homo Sapiens
  misc_feature (21)..(21): n is a, c, g, or t
  misc_feature (39)..(39): n is a, c, g, or t
  misc_feature (48)..(48): n is a, c, g, or t
  misc_feature (54)..(54): n is a, c, g, or t
  misc_feature (56)..(56): n is a, c, g, or t
  misc_feature (77)..(77): n is a, c, g, or t
  misc_feature (80)..(80): n is a, c, g, or t
  misc_feature (154)..(154): n is a, c, g, or t
  misc_feature (463)..(463): n is a, c, g, or t
  misc_feature (468)..(468): n is a, c, g, or t
  misc_feature (471)..(471): n is a, c, g, or t
  misc_feature (474)..(474): n is a, c, g, or t
  misc_feature (477)..(477): n is a, c, g, or t
  misc_feature (480)..(480): n is a, c, g, or t
  misc_feature (485)..(485): n is a, c, g, or t
aaagctgcaggaaaatttggnctgtgaactttacgtgtnatgtttacnatttangnaaatgctcaagacgacacacncgnccttaccctgatggtttggaagttgtgcagtttcttaacaagcagacagatcagaccctctagttgcaggaaanaaagctcagggcggtcgagtgcagtggctcgcgcctgtaatcccagcactttgggaggccaaggtgggcagatcacgaggtgaggagttcgagaccaacctggtaaacatagggaaaccctatctcttctaaaaaaaaaaaaatacaaaaaattagttgggcgtggtggatggcacctgtagtcttagctactcaggaggctgaggcaggagaatcgtttgaacctgggaggtggaggttgcagtgagccaagatcatgccattgcactccagcccgggttacagtgtgaggctttctaaaaccaaaancaaancancancancancaaanc

SEQ ID NO: 233405 - DNA, 563 bp, Homo Sapiens
  misc_feature (9)..(9): n is a, c, g, or t
  misc_feature (12)..(12): n is a, c, g, or t
  misc_feature (20)..(20): n is a, c, g, or t
  misc_feature (28)..(28): n is a, c, g, or t
  misc_feature (71)..(71): n is a, c, g, or t
  misc_feature (75)..(75): n is a, c, g, or t
  misc_feature (92)..(92): n is a, c, g, or t
  misc_feature (503)..(503): n is a, c, g, or t
tttttagcnagngccaaaanaatgccantagcctgggggaccttttaaaagggctggcctgaaacaatttntagntcccaaacagagtcttnatgcacattttgcggctgagtgtacagcaaatggctcttggctaggtttagaatgctgcttttaccattctctgtacctgacccagtttgagtctccttatgacacttggcttcctccagatggaaattttgaagcctttttggacttttattgtacttattcttgattgccacgtctcatttggattccccagactctgattagaggcactgccaccaggagagattttatctaaccaatagtacttccaggaagatcctcacccttgtactttcaagaagcacttgtaattaatgttcagcttcctgaacactgagtggtacttgaaaatctctgtggtttatagccttacagaagctactctggaggctgaggcaggagaatcgcttgaacctgggaggcagaggttncagtgagccgagatcacgccgttgcactccagcctgggcgacagagtgagactccatttc

SEQ ID NO: 233406 - DNA, 601 bp, Homo Sapiens
  misc_feature (56)..(56): n is a, c, g, or t
  misc_feature (74)..(74): n is a, c, g, or t
attgggttttcctaattcctttggattaaattaattgaaagagatttagtcccggngcaacaattatttagaanccaatggggaaagatccaatagtgcagagaccagacgttttggtgtaacccattaccttaatcccagaaaagcaagacgtttgggatcagatcattttaatacaattcctttccattcattttcctattccatttgaggagtaattgtacaaatctgactatacacacgacctactttcttactgtggtatcatgcttgctattcttgcccctgagttttttgcttcattaagatatatggtcgatgtctgggcacggtggctcacatctataatcccagcactttgggaggccaaggggggcagatcactggaggtcaggagttcgagactagcctggccaacatggtgaaaccccatctctactaaaaatacaaaaattatctggtgtagtggcgcctgcctataatcccagctacttgggaggctgaggcaggagaattgcatgaacctgggaggcggagattgcagtgagccgagatcatgccactgcactatagcctgggcaacagagcaagactccatctc

SEQ ID NO: 233407 - DNA, 469 bp, Homo Sapiens
  misc_feature (11)..(11): n is a, c, g, or t
  misc_feature (14)..(14): n is a, c, g, or t
  misc_feature (21)..(21): n is a, c, g, or t
  misc_feature (23)..(23): n is a, c, g, or t
  misc_feature (26)..(26): n is a, c, g, or t
  misc_feature (30)..(30): n is a, c, g, or t
  misc_feature (41)..(41): n is a, c, g, or t
ggaagccagcncanagagatnanagnaggnttgcactcatntgttcttccagatggcactgatcaaaggacgtggtgatcatgggaacactctggagagcacgtagccatatttagatatattgacaacacaaccatttagtagactcagggtgactttaagccacatgtcacatggcagctgttaaaatcatctctgtacatgtacatggatagttctgatggcacacccttgttagctttgtagcttttagctaaagggccatatggtgaaggtgcattttttgcatttcttatttcttctcttttctttgtcaatatatccattctagaaaatgagatgagccaggcacagtgtggtgcatgcctgtaatcccagctactctgaaggctgaggcaggaggatcacttgagcccaggaatttgaggccagcctaggcactgggcaacatagtgagactccgtctctt

SEQ ID NO: 233408 - DNA, 386 bp, Homo Sapiens
  misc_feature (6)..(6): n is a, c, g, or t
  misc_feature (8)..(8): n is a, c, g, or t
  misc_feature (15)..(15): n is a, c, g, or t
  misc_feature (17)..(17): n is a, c, g, or t
  misc_feature (19)..(19): n is a, c, g, or t
  misc_feature (21)..(21): n is a, c, g, or t
  misc_feature (38)..(38): n is a, c, g, or t
caggcntnagccatngngncnggaacatttaaacttgnctttccatttaataccggtttttttaggtggggcatgatggctctgcaatcccagcactttgggaggctgagaggggtggatcacttgaagccaggagtttgagagcagcctggccaacgtagcgaaaccttatctctactaaaaatataaaaatgagccaggtgtggtggcatatgcctgtgatccccatgacttgggaggctgaggcacaggaattgcttgaacccaggaggcggaggttgcaatgagccgagagcgcgccattgcactccagtctgggtgacaggagtgagaccctcaaaaagaaacccgtttttgtgatgtgttgtcattcttcctgagaattc

SEQ ID NO: 233409 - DNA, 500 bp, Homo Sapiens
  misc_feature (11)..(11): n is a, c, g, or t
  misc_feature (13)..(14): n is a, c, g, or t
  misc_feature (16)..(16): n is a, c, g, or t
  misc_feature (19)..(19): n is a, c, g, or t
  misc_feature (41)..(41): n is a, c, g, or t
  misc_feature (62)..(62): n is a, c, g, or t
  misc_feature (152)..(152): n is a, c, g, or t
ggccaataggntnncnccntgtttctcccaaaaatccaaantttagccaggcatggtggctngcgcctgtagtcccagctacttgggaggctgaggcagaagaattgcttgaacccaggatgtggcggttgcagtgagccgagatggtgccnctgcactccagcttgggtgacagagggagactccgtgtcaaaaaaaaaaagaaaaaaacgtgcgctgcctgggtgtggtggcttacgcctataatcccagcactttgggaggccaaggtgtgtgaatcattcgaggtcaggagttcgagaccagcctgaccaatatggtgaaatcctgtctctactaaaaatacaaaattagccaggcgtggtggtgcacgcctgtaatcccagccacttgggaggctgaggtgggagaatcgcttgaacccagaaggcagagtttgcagtgagccgagatcgcaccactgcactccagcctgggcaacaagtgtgaagctccgtctc

SEQ ID NO: 233410 - DNA, 538 bp, Homo Sapiens
  misc_feature (5)..(5): n is a, c, g, or t
  misc_feature (19)..(19): n is a, c, g, or t
  misc_feature (45)..(45): n is a, c, g, or t
  misc_feature (65)..(65): n is a, c, g, or t
  misc_feature (71)..(71): n is a, c, g, or t
  misc_feature (77)..(77): n is a, c, g, or t
  misc_feature (90)..(90): n is a, c, g, or t
  misc_feature (111)..(111): n is a, c, g, or t
ccttnggggccccaccagncttccatttctttagccagttttccntgggctcaaaattttgaaanagctgnaggccntccaacccagggnatgttcgctggtcttcccagnagagaaatgacctatcttttgtaaaagtaagtttcaaaggccaagtgtagtggctcatgcctgtaatcccagcactttgggaggccaaggcaggtggataacttgaggtcaggagttcaaaaccagcttggcaaacatggtgagatcctgtgtctactaaaaatacaaaaaaaaattagccaggcatactggtacatgcctgtaatcccagctacttgggaagctgaggtatgagaactgcttgaatccaagaggcggaggttgcagtgagccgagatcgagccactacgctccagcctgggtgacagagtgagactctgcctcaaaaaaaaaaaaaaaaaaggaagttgcaaaacagtaaaggaactctcaacccctgcattacatgattaggacaacaaatagaaaagtaataaagtttacgatc

SEQ ID NO: 233411 - DNA, 566 bp, Homo Sapiens
  misc_feature (2)..(2): n is a, c, g, or t
  misc_feature (13)..(13): n is a, c, g, or t
  misc_feature (16)..(16): n is a, c, g, or t
  misc_feature (38)..(38): n is a, c, g, or t
  misc_feature (60)..(60): n is a, c, g, or t
  misc_feature (76)..(76): n is a, c, g, or t
  misc_feature (104)..(104): n is a, c, g, or t
cngggcataaccnggnaaaaaaccccggtgctttaaanagcttcttattaggtccgtaangtttggcaatattgcnaatatctgaccttttatgaagtatgtcnacagggattaaattaacctttttgggaactttactttgaaagagttattttgaaagggattttttataaaatagtataggtttttatgaaacacgtcagagtgttgctgttaactggttgcactaacaatacttatatccattgttgaagaatatagggaaagaaataccaaaatttttagtaagattttgtaaaattgcaaaaattaatattaagaattcatagaggcacagaaatgtattttttgattaatgtattgtaacctgatgtaaatccttagttcttttctcatttctgcattgacatcatactatgttgaagaatatttctaaaaatattctagagttaagaaagtgttgatagcacatctatatttaaatacttagtaccacagcaagtagtttatatgacttgagaatgatactgtaggaacatactaaaagactttagaaaaagcatgtc

SEQ ID NO: 233412 - DNA, 568 bp, Homo Sapiens
  misc_feature (17)..(17): n is a, c, g, or t
  misc_feature (37)..(37): n is a, c, g, or t
  misc_feature (79)..(79): n is a, c, g, or t
  misc_feature (83)..(83): n is a, c, g, or t
  misc_feature (97)..(97): n is a, c, g, or t
  misc_feature (206)..(206): n is a, c, g, or t
aagtatgttttaaaggnggagaaataattaacctggngtttttcaagtaacatccaggcagtccttggtggggaaattntttntatgtagcactttntgtcacatgcctgttgactcaaaagtaaatggttttcgttttaaaatagaaaatgaaaaatgtatcattgaaagaaatcactgttttaattcctctcccctacaaattngcatgttcaaccttccttttaaagtaaccatttttaaatgttccctagcacttaaattttaaggaaatatgcttagaaatcacattattcagttgcacagtttcagttgcccagcagtatcattaaatcctctggagtgattccagtcccacaaaaattagggacccctttacattgtttccatattcaaatggaaatctttttgcaagttagtaattaaagtatttaacctctctctccctccatttattagaaaactcttttttctttattttttcaattacgaaaaaactgctaaagccaatcaagcatttattttgataaaccgcttgtaacagtctcagctaaattctgcaaatacc

SEQ ID NO: 233413 - DNA, 440 bp, Homo Sapiens
  misc_feature (2)..(2): n is a, c, g, or t
  misc_feature (11)..(11): n is a, c, g, or t
  misc_feature (40)..(40): n is a, c, g, or t
  misc_feature (42)..(42): n is a, c, g, or t
  misc_feature (91)..(91): n is a, c, g, or t
  misc_feature (128)..(128): n is a, c, g, or t
  misc_feature (235)..(235): n is a, c, g, or t
  misc_feature (334)..(334): n is a, c, g, or t
  misc_feature (431)..(431): n is a, c, g, or t
anataaccatngaagacaaaaatgaaaccatgtgcacagntntgagtcaaggcatcagtccttgctccacactaacaagcagcaccgcatntcctagcaccgatagcccctgttcaaccttgaatagntgtgtcagcaagacggcagccaacaaaagtccctgtgagaccattagcagccctagttccaccctggaaagcaaggacagtggaattataggtaagaagcacactgntcggtaacataatggctcgaatctcatcaaccagagcattcaccaggcacttcctcagagggttttagcatggtctgtgaaggtcagtctgccagcgcntgctctgttctttgcaggcagcactgactccatgtgtagctgagagagtggagcattggcttttacattccttgatgtttactttataacagtcagntcatttgtt

SEQ ID NO: 233414 - DNA, 611 bp, Homo Sapiens
  misc_feature (4)..(4): n is a, c, g, or t
  misc_feature (25)..(25): n is a, c, g, or t
  misc_feature (30)..(31): n is a, c, g, or t
  misc_feature (71)..(71): n is a, c, g, or t
  misc_feature (126)..(126): n is a, c, g, or t
gggnagccaggagaacacacatatnatttnngaagctttctccccaaaactgcataaactgatctgatcgngagaaccattcagccaccccaaattcaacacattccattcataagtgttctgtantcttcaaaaatattcattaaagtcaaagagaggctgaggaactatttcaaactcaggagacttggaaactaaatgcagtgtgtgatcttggattggattttagattagtaggaaacatgactgtaaaaaagtgactgaaaaataactggtattattgggacatcaatgttaaatttcatgaatttaatatatattggttatgtaagttaatgttcttgttctgagctgaaattagtttgagcctatagggggcaaagctgtctaaaactcccaaatagttctgcaaaaagattttcagtggggtacacacatggagagagacagagagagagagagagagagaacatatttgatgaaacattaattgatgagatgaatctaagtgaaggctatatggggtgttcattgcacaattcttgaaacttttctgtgggtttgaaatttttcaaaataaaaagttgaaaaagaagcaatttggaaatttc

SEQ ID NO: 233415 - DNA, 593 bp, Homo Sapiens
  misc_feature (2)..(2): n is a, c, g, or t
  misc_feature (9)..(9): n is a, c, g, or t
  misc_feature (11)..(12): n is a, c, g, or t
  misc_feature (50)..(50): n is a, c, g, or t
  misc_feature (138)..(138): n is a, c, g, or t
  misc_feature (151)..(151): n is a, c, g, or t
  misc_feature (207)..(207): n is a, c, g, or t
  misc_feature (265)..(265): n is a, c, g, or t
  misc_feature (406)..(406): n is a, c, g, or t
  misc_feature (492)..(492): n is a, c, g, or t
antaagggngnngattttttttttggaaatgggcagaattttcaaaaagnattatttcagttggtaataggtcaaaagaaatagactggcacctttattttaataaaagcattgtagatgactttggcaaacacttangagtattcagaanggctcaacagaaaataacagagaaagatgatcaagtgaaaggtacagcagaagatnttgtagatacttttctttgaagttgaagttgaaatggagaaggaggtttgccgtgatntagtgtgcacttcccccaaagatgaagaaggattcctaagggatttgtgtgaggtcttactatatttattgctacctcctggagatttccagaacaagatcatgcgatactttgtcagggaaatccttgcacgaggaattnttcctccattaataaatcaactcagtgatcctgattatattaatcagtatgtcatatggatggtaggtgccttttaaaattacaantctgttttagaaataatttttgaaatgtaaaaatatagttgggagatagggtgtttaagcagtaatttattaaagaaattaagtaaaaatgtttctgaagt

SEQ ID NO: 233416 - DNA, 474 bp, Homo Sapiens
  misc_feature (16)..(16): n is a, c, g, or t
  misc_feature (29)..(29): n is a, c, g, or t
  misc_feature (37)..(37): n is a, c, g, or t
  misc_feature (48)..(48): n is a, c, g, or t
  misc_feature (83)..(83): n is a, c, g, or t
  misc_feature (267)..(267): n is a, c, g, or t
  misc_feature (459)..(459): n is a, c, g, or t
ccattggcagcccccnggttttttaactngggttttngcccaccaagnttaaattttaattcgggatccccatgaccccttcntggggtttgcttaatttgctagactgtctcacagaactcagagaaacaatttaccagtttactataaatgatattacaaaggatacaaatgaagacatgcacacgttgatcccttttattgatgcagttctcaaagacccaggattgcaacatgggcagctatttaaccatttagcagaaactntaagttcctgggaagccaaagcagacacggaaaaagatgaaaaaacagctcacaacttggagaacgtactgatacatttctgagaaagactgtcagagatctgtgttgcgaaaatcagtgagccggaagctgatgttgagtcccgttttgggtgtatctaacctattacaggtgcttcagaagccgaagagntcattgaagtcaagt

SEQ ID NO: 233417 - DNA, 483 bp, Homo Sapiens
  misc_feature (8)..(8): n is a, c, g, or t
  misc_feature (13)..(13): n is a, c, g, or t
  misc_feature (15)..(15): n is a, c, g, or t
ggcacaantggantnttatttcacatagacatttagattactaaagagactatgtgtaaacagtcatcattatagtactcaagacactaaaacagcttctagcaaaatatattaaagcttgcagaggccaaaaatagaaaacatctccctgtctctcccacatttccctcacagaaagacaaaaaacctgcctggtgcagtagctcacacctgtaatcccagcagtttgggagactgtgggaagatggcttgagtccaggagttctagacaggcctgagaaacctagtgagacatccttctcttaaacaaaacaaaacaaaacaaatgtagccatgcgtggtggcatatacctgtggtcccaactactcaggaggctgaaacggaaggatctcttgggcccaggagtttgaggctgcagtgagctataatcttgccattgcactccagcctgggtgaaaaagagccagaaagaaaggaaagag

SEQ ID NO: 233418 - DNA, 549 bp, Homo Sapiens
  misc_feature (6)..(6): n is a, c, g, or t
  misc_feature (8)..(8): n is a, c, g, or t
  misc_feature (25)..(25): n is a, c, g, or t
  misc_feature (33)..(33): n is a, c, g, or t
  misc_feature (41)..(41): n is a, c, g, or t
  misc_feature (55)..(55): n is a, c, g, or t
  misc_feature (83)..(83): n is a, c, g, or t
  misc_feature (393)..(393): n is a, c, g, or t
  misc_feature (515)..(515): n is a, c, g, or t
gaactnanattgttttttaaggaangggggttntaattttnggatgggagggaanttaggggaaggccagaacatgaacttanccatttttggaacaaaacatatgtggatcggtgtaaaagatggagatttttcaataaatgatgtttgagacaattgggtatccatatggtaagtattaaataaaattcagttccaagtggattgaagatttaaatgtgaaaggcaaaactgtaaagcttctaaagtataatcagaaacttacagaagactttaaaaagttggccaggagcagtggctcacactgtcccagcactttgggaggccaaggcaggtggatcacctgaggtcaggagttcaagaccagcctggccaacatagtgaaaccccatntttactaaaaatacaaaaattatccaggcgtggtggcgagtacctgtaatcccagctacttgggaggctgaggcaggtggtagaggtggaggttgcagtgagctgagatcacaccattgcantccagcttgggcaacaagagtcaaactccatctc

SEQ ID NO: 233419 - DNA, 566 bp, Homo Sapiens
  misc_feature (11)..(11): n is a, c, g, or t
  misc_feature (15)..(15): n is a, c, g, or t
  misc_feature (33)..(33): n is a, c, g, or t
  misc_feature (39)..(39): n is a, c, g, or t
  misc_feature (77)..(77): n is a, c, g, or t
  misc_feature (110)..(110): n is a, c, g, or t
  misc_feature (162)..(162): n is a, c, g, or t
  misc_feature (266)..(266): n is a, c, g, or t
  misc_feature (326)..(326): n is a, c, g, or t
  misc_feature (333)..(333): n is a, c, g, or t
  misc_feature (351)..(351): n is a, c, g, or t
  misc_feature (377)..(377): n is a, c, g, or t
  misc_feature (393)..(393): n is a, c, g, or t
  misc_feature (554)..(554): n is a, c, g, or t
aggaagggttntttnttttggattttttttccngaaaanttgttccaaggcaaaaaccttataatcctatttaaagnatattcaacagggtgggttcagtggtaattttnagcaatttttaaggcccaaggtggggaatcacttgaagccagggtttgagantagtttggtcaacatgacaaaaccctatttttactaaaaatgcaaaaattagcttggtgtggtggggtacacctgtaatcccagctacttgggtgcatgaggcntgagaatcacttgagtccaagaagcagaggttgtagtgagccatgattgcaccactgcantccagcntgggtgacaaaatgagantctgtctcaaaaagcaaaaaggatantcacaaattcagtacntccatcctatttcattaaagctctgattaaacatatatgtttatgggccgggtgtggtggctcacacctgtgatcccagcactttgggaggccaaggtgggtggatcacctgatgtcaggagttcgagatcagcctggcaaacatggtgaaacctcatctntactaaaaatac

SEQ ID NO: 233420 - DNA, 561 bp, Homo Sapiens
  misc_feature (8)..(8): n is a, c, g, or t
  misc_feature (19)..(19): n is a, c, g, or t
  misc_feature (38)..(38): n is a, c, g, or t
  misc_feature (41)..(41): n is a, c, g, or t
  misc_feature (82)..(82): n is a, c, g, or t
  misc_feature (194)..(194): n is a, c, g, or t
  misc_feature (525)..(525): n is a, c, g, or t
ttggggangttggcagggngaaaaattaatataatccngangcattaaggatttcagagatcattcaaaatggaaagtcatnttcatatccccaggagggtttatattctggcttttctaaagtggagagctagagaattatcatatagcagagttcagcaattttcattcgcatcagttctttcttttctgtnacttaagtttcacttgctgtttacagtgttagtgattgacctcatcccttgacgcaacaatagtcttagagccatgtgccagtgattatacaggtgattgtgcaaaactagtgtagtacaaacctacagttacatatcctattgataatggagtagcactgtactattactgttactctttctataaggtaagaccagccaaacaaagggtattcttagccaggagtggtagcacacacctgtagttccagctactcaggaggctgagacaggaggattgcttgagcccaggagtttgaggctgcagtgagctataattgtgccactgtantccagcctgggcaacagagtgagaccatgtttcttt

SEQ ID NO: 233421 - DNA, 568 bp, Homo Sapiens
  misc_feature (9)..(9): n is a, c, g, or t
  misc_feature (21)..(21): n is a, c, g, or t
  misc_feature (45)..(45): n is a, c, g, or t
  misc_feature (49)..(49): n is a, c, g, or t
  misc_feature (70)..(70): n is a, c, g, or t
  misc_feature (74)..(74): n is a, c, g, or t
  misc_feature (115)..(115): n is a, c, g, or t
  misc_feature (193)..(193): n is a, c, g, or t
  misc_feature (203)..(203): n is a, c, g, or t
  misc_feature (206)..(206): n is a, c, g, or t
  misc_feature (214)..(214): n is a, c, g, or t
  misc_feature (218)..(218): n is a, c, g, or t
  misc_feature (242)..(242): n is a, c, g, or t
  misc_feature (398)..(398): n is a, c, g, or t
  misc_feature (530)..(530): n is a, c, g, or t
gtttttttntggggggaattncccggattttataacaacaaaaanttangtttggaataagggggggggnaaangtatttaaaaaaaagcattttccgtcccaccctgccaagtnatgattttttatgcactgaacgtaggggcattagagtagaaggttgcctcaggttagttttgtgtggggttgaatgcnttttatttcnganttcatttntatntgccaatggatcaatgcattttantttatattatcaaaatacaatatagtgtaagaagtggatcctggctaggtgcagtggctcatgcctgtaatcctagcactttgggaggctgaggcaggaggattccttgagcccaggagtctgagaccagcctgggcaacatagggagactctgtntctgcaaaaaaaaatttaaaaattagccaggtgtcatgagacacacctgtagtcccagctactgagaggctgaggtggaagagttgcttgaacccaggagtttgaagctgcagtgagctgtgatcacaccantacactccagcctggacaacagaataagaccctgtctc

SEQ ID NO: 233422 - DNA, 568 bp, Homo Sapiens
  misc_feature (20)..(20): n is a, c, g, or t
  misc_feature (59)..(59): n is a, c, g, or t
  misc_feature (330)..(330): n is a, c, g, or t
  misc_feature (364)..(364): n is a, c, g, or t
  misc_feature (564)..(564): n is a, c, g, or t
ctttttttaaaggaaagaantccaacaaaaattaaaacaatgtaggaggatattcagantttccctttttcctgcccccccaaaaagtaaatttcaacattttttcctttaaggaaagttccccaaggaggagaagctattggttttgtggatgctccccttactgggtctgaagtttggagtataaaaagagaactaaagccactgttaaataatcctaacagggtggcagatcaaattgatcagtttttaggcccacagttatatacttgggctgaatcagtgtgcatcctaggtattattttttcaaggaaaaaaagaaatacgatntgggaacgtaaacatcctccaggtcaaaatgttntggcagcaaatcataaattccctgctcaggacccgcagtgggataaaataatgctgcccaccgaaataatataaggaattttttaaaaaataataatcagggggattcaaaagtcagcacccagaccccaaaacctttcccaaagcatttaatgtccaacaaaagaaagatgaaggacctatgagttcatagataaattnaaag

SEQ ID NO: 233423 - DNA, 604 bp, Homo Sapiens
  misc_feature (5)..(5): n is a, c, g, or t
  misc_feature (12)..(12): n is a, c, g, or t
  misc_feature (21)..(21): n is a, c, g, or t
  misc_feature (66)..(66): n is a, c, g, or t
  misc_feature (105)..(105): n is a, c, g, or t
  misc_feature (109)..(109): n is a, c, g, or t
  misc_feature (152)..(152): n is a, c, g, or t
tgggnaattggngcccccggnagggagccggtttttttttattaagaaagggctgcaaggggaagnggataaatataggcaccttgtaaattatatggagtaaangaangaaattgtgatttcctgagaattgaaccttggtttcctaaccntaactgatgagaggcttgttgcttgatggtgtgtacaaatttacctgaaagggaccttttaaagacagatcttcatgacttgttcccatcccaggtcttcattacctcttttacacaaaaagatctacagggtgtggtcactgtttcttttgtgctgttttggggtggagagggtggatgtgatgaagccaataattcaggacttaattccttcctgagttgtggtttttttgtccttgcatcaggtataaaatagcttccaggagctctagctataagcttggaagagtctgtataattgtaatcacagggtgacagcactcagaatctaaactgggcttatgtggtattctcaccactcaatttattttttagcagtttaatgggtacattttagagtcttccattttgtgtggaattagatcctcttcctcaaatgctgtaattaactt

SEQ ID NO: 233424 - DNA, 588 bp, Homo Sapiens
  misc_feature (2)..(2): n is a, c, g, or t
  misc_feature (16)..(16): n is a, c, g, or t
  misc_feature (41)..(41): n is a, c, g, or t
  misc_feature (47)..(47): n is a, c, g, or t
  misc_feature (62)..(62): n is a, c, g, or t
  misc_feature (119)..(119): n is a, c, g, or t
  misc_feature (124)..(124): n is a, c, g, or t
  misc_feature (176)..(176): n is a, c, g, or t
  misc_feature (179)..(179): n is a, c, g, or t
  misc_feature (184)..(184): n is a, c, g, or t
  misc_feature (207)..(207): n is a, c, g, or t
  misc_feature (420)..(420): n is a, c, g, or t
  misc_feature (555)..(555): n is a, c, g, or t
cntctaaattccgggnggaatattcaacatatattattggnacctantgtaaacttaagttnggcatggggaataagttagggaacaaggggagacataaaaaatatacccaatatcantgccntgtgtgttaaataatgttcattactgacaattccaaaatttagtttgcatantgntaccntatacaatcaggcaagtactggnttcacttagatgtaaactgagactcagttcaaacaatctgcataaaaacaaccaaccagagacttggactctgattatacaatttaaaatcctgtgattggacaggcgctgtggctcacgcctgtaatcccagcactttgggaggccgaggccagtggatcacctgaggtcaggagttcaagaccagcttggccaagatggtgaaaccccatntttactaaaaatacaaaaattagctgggcgcagtagcagttgcctgtaatctcaactacttgggaggctgaggcaggagaatcacttgaactcggggggcagaggttgcagtgagccgagatcacaccaccgcantccaccttgggaagcaaagtgagactccgtctc

SEQ ID NO: 233425 - DNA, 567 bp, Homo Sapiens
  misc_feature (6)..(6): n is a, c, g, or t
  misc_feature (22)..(22): n is a, c, g, or t
  misc_feature (66)..(66): n is a, c, g, or t
  misc_feature (96)..(96): n is a, c, g, or t
  misc_feature (115)..(115): n is a, c, g, or t
  misc_feature (126)..(126): n is a, c, g, or t
  misc_feature (186)..(186): n is a, c, g, or t
  misc_feature (224)..(224): n is a, c, g, or t
  misc_feature (259)..(259): n is a, c, g, or t
  misc_feature (301)..(301): n is a, c, g, or t
  misc_feature (342)..(342): n is a, c, g, or t
  misc_feature (481)..(481): n is a, c, g, or t
  misc_feature (486)..(486): n is a, c, g, or t
  misc_feature (522)..(522): n is a, c, g, or t
ataaanttaaggattttttaanaattggtttttttggaagggattgcacaaccaactttttgtaangaaatggattcattttagatgtttcgaacnaattagatggaatatgaantttcggaaggntgtgtttcatgattgcagcaaatcacctgtaatatattttgttttaggaaaatttgattngggggtatcctgaatttttagcccttggcaagaaaaantatcattcagcaattcatgagaaaactttgttttnttgatccttagaaaataaacttagatgttattaagtgttttntgagaggatgcaggagaaaaggacattttgtcagctatatnttagaatagaaatgcaaatttcagttttggcattgttgacttcataaagcagtgttttgagggctcaggattcaggaaatacaaacagacatggcagagcagtttgctttgggttggcagaaagcaggaaaataaccanccttnttggattgcccacagtttttgtagactcctcagttntgagtggagcagaggggcatgcttaataaaacagtcaataaagag

SEQ ID NO: 233426 - DNA, 482 bp, Homo Sapiens
  misc_feature (2)..(2): n is a, c, g, or t
  misc_feature (57)..(57): n is a, c, g, or t
  misc_feature (70)..(70): n is a, c, g, or t
  misc_feature (75)..(75): n is a, c, g, or t
  misc_feature (80)..(81): n is a, c, g, or t
  misc_feature (96)..(96): n is a, c, g, or t
  misc_feature (349)..(349): n is a, c, g, or t
  misc_feature (383)..(383): n is a, c, g, or t
  misc_feature (392)..(392): n is a, c, g, or t
  misc_feature (421)..(421): n is a, c, g, or t
  misc_feature (425)..(425): n is a, c, g, or t
gntaagtgtttaatttttaaggtataattaagtaagtatttttaagtagggcatttnattttggtttttnatttnggggnngggaagtttaagccntgatgaaactgcttggtggaccctgaccaccacccttgcagcacaagccccgcgtttaaaaattatagacccgtgctcacttcagcagcacatacactaaaattggaaccttatagagaagattagcatgacccctgtgcgaggatgacacacaaattcgtgaagcattccatatttttctgaaattgaggcagtaattaatagcctaccaaccaaaaaaagcccaggaccagatggattcacagccaaattntgccacaggtacaaagaggagctggtaccattcnttctgaaantattccaaacaatagaaaaagaggggtcntttntaactcactttatgaggccagcatcatcctgataccaaaacctggcagagacaccac

SEQ ID NO: 233427 - DNA, 474 bp, Homo Sapiens
  misc_feature (6)..(6): n is a, c, g, or t
  misc_feature (21)..(21): n is a, c, g, or t
  misc_feature (32)..(32): n is a, c, g, or t
  misc_feature (34)..(34): n is a, c, g, or t
  misc_feature (66)..(66): n is a, c, g, or t
  misc_feature (78)..(78): n is a, c, g, or t
  misc_feature (82)..(82): n is a, c, g, or t
  misc_feature (106)..(106): n is a, c, g, or t
  misc_feature (146)..(146): n is a, c, g, or t
  misc_feature (158)..(158): n is a, c, g, or t
  misc_feature (161)..(161): n is a, c, g, or t
  misc_feature (182)..(182): n is a, c, g, or t
  misc_feature (187)..(187): n is a, c, g, or t
  misc_feature (249)..(249): n is a, c, g, or t
  misc_feature (285)..(285): n is a, c, g, or t
  misc_feature (362)..(362): n is a, c, g, or t
aggtanaaagtagcattgatntcccccacagngnggacccaccaattgtcctgtttcctttttaanagaaatggggtngaangtcattattcttggggggtaattngtgttgaagaaggaaagcaacattgttccaagcaagtggnttttcagattgnatnacttgtgctggaaatgaaatngacantaggttggcagcacggaatggtggttaaatgcttgggccctggagcttgacagcctggtttnacattcttgctgagcaagtttcatttttcttacttnacaaggctgttgatgggatggaatgaaatgaggtaagttcagcataagaatagtacctggcacaaaagaactcggtntacattagcttatgttgttgctgttgattgaatgagctcaagctgggactatagatattttacacaaatgtcattcactgcaatttaataactagcagaaaacaatacaaac

SEQ ID NO: 233428 - DNA, 569 bp, Homo Sapiens
  misc_feature (2)..(2): n is a, c, g, or t
  misc_feature (6)..(6): n is a, c, g, or t
  misc_feature (12)..(12): n is a, c, g, or t
  misc_feature (39)..(39): n is a, c, g, or t
  misc_feature (42)..(42): n is a, c, g, or t
  misc_feature (76)..(76): n is a, c, g, or t
  misc_feature (134)..(134): n is a, c, g, or t
  misc_feature (177)..(177): n is a, c, g, or t
  misc_feature (189)..(189): n is a, c, g, or t
  misc_feature (270)..(270): n is a, c, g, or t
  misc_feature (340)..(340): n is a, c, g, or t
  misc_feature (453)..(453): n is a, c, g, or t
  misc_feature (522)..(522): n is a, c, g, or t
tncacnctttcntgaacaatgtaagaggcccattattantantcccgccagatgccagccagagtttttttgtatntaaacctgtgtttgttttttaaaattcatcaggagagttttttcctccaaagatcatnttaattgaagaactgaattaaaagcatacatgtgccctgtgtntacacttaaaantatccaaaacacaaacctttatacctaaaggaaactgaggcctggatttgctcagataatgctggaattcatacttaaaantttcagacataccctcaagaaattcagaagtaggaaagacagatatttaaacaaatatatgtgaaaatgntctttgaactataaagcaatttacaaaagtgtcatcaattcatcattgttgttatctttatcacagtcaataatattgttgcccaaattagaatggtttaacaaaacattttnttccttgccttagagcaggggtgtccaaacttttgactttcctgggccacattagaagaagaatgtgtnttcggccacacataaaatacgctaacactaataatagatgatgagct

SEQ ID NO: 233429 - DNA, 543 bp, Homo Sapiens
  misc_feature (8)..(8): n is a, c, g, or t
  misc_feature (22)..(22): n is a, c, g, or t
  misc_feature (42)..(42): n is a, c, g, or t
  misc_feature (76)..(76): n is a, c, g, or t
  misc_feature (83)..(83): n is a, c, g, or t
  misc_feature (98)..(99): n is a, c, g, or t
  misc_feature (120)..(120): n is a, c, g, or t
caggtttnaaggggttttcaangggggtttccaagaaattcnggattccggttttttcgggaaaaaccccagaatnttttggntataaacagagatanngcatttccaggtgctagccangaatcttcaggcaacccaccattacgagtcattgttaaagacgccctcttctgttcttgtttatcagacatccttcgcttcatttattcaggtatcttgtcaagtggttctggttacttacaatctcataagctttggaaatgaaatgtgcctgtgacactcaagggtactggttagttttacagtggtctttacctaccatctgagattaagattatacatgaaatattacttgctttatatataagaattggtccaagctttctgttttccttacaaatgtacttgcctcatcttttccctatcaatttcattttattgtggtaaaatacatagaacataaattttaccatctcaaccatttttaagaacacagttcagtggaattaaacacattcataatgttgtgtaactatcaccacc

SEQ ID NO: 233430 - DNA, 479 bp, Homo Sapiens
  misc_feature (4)..(4): n is a, c, g, or t
  misc_feature (19)..(19): n is a, c, g, or t
  misc_feature (37)..(37): n is a, c, g, or t
  misc_feature (39)..(39): n is a, c, g, or t
  misc_feature (41)..(41): n is a, c, g, or t
  misc_feature (45)..(45): n is a, c, g, or t
  misc_feature (51)..(51): n is a, c, g, or t
  misc_feature (171)..(171): n is a, c, g, or t
ggangcttaataaaaattngtggagggaaggaataanangnattngggggngtcttcccaataagtggtctttattcaaacgttggagcttcagtaaacccctatttggctgtgaacagattagtctcaatcctagtatttaatttaccccgagtgaaagtaacacctttntcttaagcagcaagatgcattaatctttacgttaagatttttcatggcaaaaaacaaatccattttttttcttccctttcttcagctctggggatgccaggcaagaaggagatgacggggtagataatggttactttgtaattttctggaagatcatgctggttctactagaagacttttacctcacatgattggatgctcctcaagctgaactttcttccatttgtgatagtatttggaccatttctagaatatgttataagatttttataagattgtctttccaattaaagttttaggttaaagtt

SEQ ID NO: 233431 - DNA, 588 bp, Homo Sapiens
  misc_feature (9)..(9): n is a, c, g, or t
  misc_feature (22)..(22): n is a, c, g, or t
  misc_feature (40)..(40): n is a, c, g, or t
  misc_feature (71)..(71): n is a, c, g, or t
  misc_feature (74)..(74): n is a, c, g, or t
  misc_feature (86)..(86): n is a, c, g, or t
  misc_feature (151)..(151): n is a, c, g, or t
  misc_feature (160)..(160): n is a, c, g, or t
  misc_feature (174)..(174): n is a, c, g, or t
  misc_feature (189)..(189): n is a, c, g, or t
  misc_feature (237)..(237): n is a, c, g, or t
  misc_feature (245)..(245): n is a, c, g, or t
  misc_feature (249)..(249): n is a, c, g, or t
  misc_feature (279)..(279): n is a, c, g, or t
  misc_feature (281)..(281): n is a, c, g, or t
  misc_feature (340)..(340): n is a, c, g, or t
  misc_feature (376)..(376): n is a, c, g, or t
  misc_feature (387)..(387): n is a, c, g, or t
  misc_feature (431)..(431): n is a, c, g, or t
  misc_feature (434)..(434): n is a, c, g, or t
  misc_feature (442)..(442): n is a, c, g, or t
  misc_feature (508)..(508): n is a, c, g, or t
tttttttanagttaagattcangttggaaagtgggggttnaagtttaataatttttttttaaaaaaaggantanggggatttaggnttaaaggggatcctaatggggaatttgggttttggactgagcagtacctttgaaaccattacttnatttgttantaggaagaatgagntagcatttacattcntcccccttggcaagtttgaaaagaaatactttcccccctttttggaangaagagantatntataattttatttgtacctttatccacaananactgttttttccatttgatccttttatcaaccttgtaggatcattattattattcttantttgcagttgaggaaacagaattgttggctagtganatagccaaganttgaaagttttttaaaattcaaagcccacattcattatcatagntantttatatntttccactgggataacaggacatgcctaattggctttttaaattaataaatatcagtttatattgntgggtcatccccccccccatagtgtttttaaataattttaaaactatcagccgattaaaaaattattttaaataaaaaac

SEQ ID NO: 233432 - DNA, 550 bp, Homo Sapiens
  misc_feature (6)..(6): n is a, c, g, or t
  misc_feature (14)..(15): n is a, c, g, or t
  misc_feature (50)..(50): n is a, c, g, or t
  misc_feature (59)..(59): n is a, c, g, or t
  misc_feature (75)..(75): n is a, c, g, or t
  misc_feature (83)..(83): n is a, c, g, or t
accccntttcaccnnttgtaacaagtccgccagtacatggatttcacttntgcttccanatgtctgactccaccnttcatgcnttcacattctcttcttctatgctgggagaagaggttcagctatatttcatcattcccaaatccaaagagagtcattttgtcttcagcaagcagggcaagcacctggagagcatgcggctgcccctggtttcagacaagaatttgaatgcagtcaagagccctattttcactccttccagtggtcgacatgagcacggactcctaaaccttttccacgccatggagggcatcagccaccttcacctcctggtggtcaaagagtatgagatgcctctgtaccgcaagtactggcccaaccacatcatgctggtgcttcccggcatgttcaataatgcaggcgtgggtaaggggcccccctgggatggggagaagggcttcgaagataaactgagctccattcccctggcatgaaactttcagattcccctgcctctagaaattgtcctgccctcctcaccactcttcgg

SEQ ID NO: 233433 - DNA, 553 bp, Homo Sapiens
  misc_feature (17)..(17): n is a, c, g, or t
  misc_feature (26)..(26): n is a, c, g, or t
  misc_feature (85)..(85): n is a, c, g, or t
tttttttcatgaagctncaccattcnaaggtttactgtgggccaggcactgtgctaactgtgtattatctggatacttttcaggncaagtgaaagtgatgaccccatttaatagatgaagaaaacttgacactcaaagaagggaaataacttgcccaagatcacagagctcaggttggctggactctaggacatcccatgcctccacaccatgctgcttgtcagcagcagcacgcagagctggttgcaaaggaggggctgacatatattaagagttgaggccgggcgtggtggctcacgcctgtaatcccaacactttgggatgccgaggtgggcggatcacaaagtcaagaggtcgagaccatcctgaccaacatggtgaagccccgtctctactaaaaatacaaaaattagctgggcgtggtggcgtgtgcctgtgatcgcagctacttgggaggctgaggcatgagaatcacttcaacccaggaggcggaggttgcagtgagctgagatcatgccactgcagcctgggcgacacagtgagactatgtctc

SEQ ID NO: 233434 - DNA, 561 bp, Homo Sapiens
  misc_feature (30)..(30): n is a, c, g, or t
ggggagttgagaaggagtcaatccctcacntcaaaaggaattgaccagcccatggccaataggatatattcagcctttaggaagaggcagagagaaaaagtgcttctgctctctttagagtcattctaatggtttctggaagagtgttgccattgcccaatccaggaatggtccaatccaagaatggtctatcagtctaggaatagtttagaatgactttgtagagggactgagttcaaacccaactgagaaaacatcagggcttaaaaaacaaattgggccgggcacagtggctcacacctgtaatcccagtactttgggaggccaaggcgggcggatcacgaggtcaggagatcgagaccatcctggctagcacggtgaaaccccgtctctactaaaaatacaaaaagaattagccaggcttggtggcgggcgcctgtagtcccagctactcaggagactgaggcaggagaatggcgtgaacccaggaggcggagcttgcagtgagccaagatcacgccactgcactccagcctgggtggcacagtgagactctgtatc

SEQ ID NO: 233435 - DNA, 548 bp, Homo Sapiens
  misc_feature (29)..(29): n is a, c, g, or t
gaccaaccatggagaaccccattttctantaaaaaagataccaaattacccgggcatggtggtgcgtgcctgtaatcccagctacttggaaggctgaggcaggagaattgcttgaacctgggaggcggaggttgtggtgagccgagattgcgccattgcaccccagcctgggcaacaagagtgaaactccatctcaaaaaaaataaaataaaataaataaataaaaaataaatgggacaaacagcagtacctccctcatcaggtactgtgggattaactgagattatatatatatatatgctgggctccaaacagagcctgatatatagcaagcattcagtgaatcttaaccagcatcattgtgattccacacaggagcccatctgcttgaggaatttagctgtaaaaataaaagtttgaacactactggatgggatgatctagaacagggtgtccaatcttttggcttccctgtggcaccttgggaaaagaagaattgtcttgggtcacacataaagtacactaacactaaccatagcagatgagct

SEQ ID NO: 233436 - DNA, 550 bp, Homo Sapiens
  misc_feature (71)..(71): n is a, c, g, or t
ttccttggaaaaattatttgaagtaagcatataaagtcttcatcaggaaaactactgaagatcctgggccntgactacccagcaataacatttccggaactcccgaagcaatcagtgctctctgatcgctaaacatgatgggcttctattagagagattacagtaaaaaataacaatcagctctctgatgatcctgtgaggagggaacgggttgggaggagtagatttggctgaggacaagcccagactttcgtcacagggacagaccaacgtgttaacacaaagggagaacacgggagcatcctgcaccgtgcatttcagccacagatcacatggcccctccgcgggcccagcccacgccctgaccgcccggcctggccaggtctccgtatctctctgccccgccgccccttcccaactgcggacatgctgggtggatccggatcgcatggaagacgcagcctggccgcgctctcccagtgagtcctcatttcgcctctttggttttttcctttctttttttttttataaaaaacaaacgaattgttgt

SEQ ID NO: 233437 - DNA, 578 bp, Homo Sapiens
  misc_feature (4)..(4): n is a, c, g, or t
  misc_feature (17)..(17): n is a, c, g, or t
  misc_feature (27)..(27): n is a, c, g, or t
  misc_feature (42)..(42): n is a, c, g, or t
  misc_feature (59)..(59): n is a, c, g, or t
tccnaaaggctggattncaggcatganccgtgtgcctggccntggagttttcttcttanatctttctcctgttgatctcacttgattttcttactagtctacaggaaatttcacgtggagattctgtgcctgtcctctttctggaatatcttccttattttagcatctcaacatgctgttcagcttctggcttgaaaccacccctctcccatcccaaccaagttaagcagcttctttcctgcttagaagtaccataacttgtgtattaatcttttgtctttttctctctccttcccttcattttaagctcctttttattaatctgtagggcagagcttagaaaaaggtttttgtatattgtaagtactaataaaatatttgtgaagttgatttgggacttgggagacctctcttctgtaagcaactcaataaataattatttaagtaccatcctcacccagtgtactgttagctgctgttatgatattgattactgtaaaattttaaagtatatccttggtagactgttgatcaaagtcagaaagcttgagaaactctgaggcaaaaaaaaaaaaaag

SEQ ID NO: 233438 - DNA, 562 bp, Homo Sapiens
  misc_feature (6)..(6): n is a, c, g, or t
  misc_feature (18)..(18): n is a, c, g, or t
  misc_feature (72)..(72): n is a, c, g, or t
cttccnaaagtgctgggnttccaggcttaagccaccacaccggccagggtgctttctttatctcctcgggtntgacatgggggttggagtcttcccataccctgtttctcctctctcctgtcttcaagctgagccctagacttaactcaccttctctgcttatgcattctgtccctgcgacaggagtggctgagcagtttgccatcgcggaagccaagctccgagcatggtcttcggtggatggcgaggactccactgatgactcctatgatgaggactttgctgggggaatggacacaggtgagggacatcctgggctagggctgtggtggacccacctgatagaccttggcattctttcagagccacatccagaacactctcagcctttgcaaggggagggagagggacagactcagtccaggcaggcctggacactccagggacaggaaggctgtccacactcatgggtgggaaatgagcagacagaaatggattcgttcctttcccacaggtgctgaggcttctctgcctgtctgcacagttgtgccttgcagtcctc

SEQ ID NO: 233439 - DNA, 546 bp, Homo Sapiens
  misc_feature (52)..(52): n is a, c, g, or t
  misc_feature (191)..(191): n is a, c, g, or t
ttctttgagtcaccagtttgagccagcttggccaacatagtgaaaccccgtntctgctaaaatccaatccaagccgggcacagtggctcatgcctgtaatcctagcactttgggaggccgaggcggacaggtcatgaggtcatgaggtcaggagatcaagaccatccgggctaacacggtgaaaccccgtntctaccaaaactacaaaaaaaaaaaaaaaaaaaataaaaaaagccgggcatggcggcgggcacctgtagtcccagctactcaggaggctgaggcaggagaatggcatgaacccaggaggcagagcttgcagtcagccgagatggcgccactgcactccagcctgggcaagagagcgacactccatctcaaaaataaataaaaaaacaattagctgagtgtggtggcacacacctgtaatcccaggtacttgggagtctgaggcaggagaactgcttgaacctgggaggtggaggttgcagtaagcggagattgtgccactgcactccagcctgggcaacagcaagactccatccc

SEQ ID NO: 233440 - DNA, 566 bp, Homo Sapiens
  misc_feature (3)..(3): n is a, c, g, or t
  misc_feature (60)..(60): n is a, c, g, or t
  misc_feature (80)..(80): n is a, c, g, or t
gcnttaagaaccccaggaaggtccatgtttcattaggatatccaaaatgtcctcaaagtncacccaattttaccccatgntgcagtctcctgaggagtgctgggtgattctgctttgaatataacctagggcatttagttaataaagctcccatataatcttatgcctgcttgttggattttgttttcttgttttttgtttttaattatctatgagagaaatgaattaacaagaacaacatagcatggagagttagttcatagtttataaaaccacatccctggccgggcgtggtggctcacacctgtaattccagaattttggaaggtagagaggcgagcgagcggatcacttgaggtcaggaattcgagaccaacctggccaacatggtgaaacaccctctctactaataacacaaaaattagctgggcttggtagcgcatgcctgtaatcccaactactagggaggctgaggcaggagaattgcttgaacgccggggtcggaggttgcagtgagccatgatcgcgccactgcactccagcctgggcaacagagcgagactctc

SEQ ID NO: 233441 - DNA, 550 bp, Homo Sapiens
  misc_feature (14)..(14): n is a, c, g, or t
  misc_feature (27)..(27): n is a, c, g, or t
  misc_feature (37)..(37): n is a, c, g, or t
  misc_feature (42)..(42): n is a, c, g, or t
  misc_feature (48)..(48): n is a, c, g, or t
  misc_feature (98)..(98): n is a, c, g, or t
  misc_feature (119)..(119): n is a, c, g, or t
  misc_feature (194)..(194): n is a, c, g, or t
  misc_feature (202)..(202): n is a, c, g, or t
  misc_feature (329)..(329): n is a, c, g, or t
  misc_feature (394)..(394): n is a, c, g, or t
  misc_feature (415)..(415): n is a, c, g, or t
  misc_feature (427)..(427): n is a, c, g, or t
  misc_feature (442)..(442): n is a, c, g, or t
ccagggccttcatntatgggccttgtnttcccccccntcttntgcctnaggggtcggggtgacctgttcccctcaggggattttaataactgggattntgcccagttttcttttctggngccatcattcggatgctcaacagagggcactcttcccccgcaggcctgcccacatccagtcaccccatccccatntggggccnctgtcccttctctccgtctccgtggcagtggaaagaaactggatttggaatcaggacaagcccggcttccagtcccagccttgccactggagtggctatttcatctcactgagcctatttctccttntgcaaattaagaatgatgatcaaacgtatcccatgttggtgtcctggggatgtgaaggagttttnttcctatcggtgtgtctagcnccaagactggcncaaagaaccaacttntgaaaagacgctagccttattaacgctattatgattccttccttcctttgaccaatgagcatgctcaggagtagaaaattattttggtcttgaagatacttatgatcc

SEQ ID NO: 233442 - DNA, 549 bp, Homo Sapiens
  misc_feature (2)..(2): n is a, c, g, or t
  misc_feature (21)..(21): n is a, c, g, or t
  misc_feature (36)..(36): n is a, c, g, or t
  misc_feature (45)..(45): n is a, c, g, or t
  misc_feature (97)..(99): n is a, c, g, or t
  misc_feature (142)..(142): n is a, c, g, or t
angcacagtcttctcctcttngggtgtgacttgttncaaatttcncttttcaaaatcgaaatcaggtgtttgctcaaatgaggggagattttttttnnntttttttttaaatgctgagacctcagcagtgtacttttctttntgttgtttcccccacaaacccatcagtctgggagagcattgggagtggaaatcatgttgcctgggatgctggtttctttgtatattatataaaacgtatgtaaatgtctctccatttgggctggggtttgcattctccccttggctatttaaccaaggggagaggccagcgggcaggcggccctcaccctgcctggcacgtgcagagaccccagccactctgtgtgggcagggtgctgtcaagaccagacctcttgggggggtaggggcggggggtggggggaactcttggaagggaagaagtatcacttctttctcaagtggagtgtttacaccttgctgtaacatttgaactttcacaagagatgtaataattttgataataaaattcttaaccataataatcat

SEQ ID NO: 233443 - DNA, 554 bp, Homo Sapiens
  misc_feature (9)..(9): n is a, c, g, or t
  misc_feature (11)..(11): n is a, c, g, or t
  misc_feature (21)..(21): n is a, c, g, or t
  misc_feature (45)..(45): n is a, c, g, or t
  misc_feature (90)..(90): n is a, c, g, or t
  misc_feature (115)..(115): n is a, c, g, or t
  misc_feature (170)..(170): n is a, c, g, or t
cccggtttntncaaaattttnaaattgcccaggatgttggtgccncttggtagtcccaactacttggaggctaaggtggaagattgcctnagcccaggagtttgaggctccagtnagctgtgattgtgccattgcactccagcctgggtgacagagcgagaccctgtctntaaaaaaaaaagaaaaaaaaagaaattctgtattgcagcagcctaagagagtcattagttaagagatttgtagtaggcattttttagaaagttgcattgagggctaggtacggtggctcatgcctataatcccagcactttgggaggccaaggtgggtagatcatttgaggtcaggagcctggccaacatagcgaaaccccgtctctactaaaaaaattagccgggcggtagtggcatgcgcctgtaatcccagctactcgggaggctgaggcaggagaattgcttgagcctgggaggtggaggttgccagtgagtcgagatcgcgccactgcactccagcagtctgggcgacagagtgagacgctgtttcaaaaaaaaaaaag

SEQ ID NO: 233444 - DNA, 575 bp, Homo Sapiens
  misc_feature (2)..(2): n is a, c, g, or t
  misc_feature (6)..(6): n is a, c, g, or t
  misc_feature (44)..(44): n is a, c, g, or t
  misc_feature (84)..(84): n is a, c, g, or t
  misc_feature (90)..(90): n is a, c, g, or t
cntggncaagccttacctccaaactagtttttccaaggcttggntccgtgccagaaccttgccatggcttattgtttgttctanaagccntttgggggatgggtcagggagcatgcgggcagtcaagctttgacaaacatctggatttgctccagaactgcattaagaaaagtggttccttgttggagatgggaagtcagggcccttggttatgcatatagccaagtcaaacagattgataacacttgtcaatggcagggaaggttgcctgtagccagcactgcagattcaggacttagaaacgtgcctctggggccgagcatggtggctcacacttgtaatcccagcactttgggaggccgaggtgggtggatcacgtgtgatcaggagatcgagaccagcctggccaacatggggaaacagtcttcactaaacatacaaaaattagcctgtagtcccagttacttgggggtctgaggtaggagaattgcttgaacctgggacgtggaggttacagtgagccaagatcatgccactgcactccagcctgggcaacagagtgagactctgtcttt

SEQ ID NO: 233445 - DNA, 542 bp, Homo Sapiens
  misc_feature (6)..(6): n is a, c, g, or t
  misc_feature (10)..(10): n is a, c, g, or t
  misc_feature (19)..(19): n is a, c, g, or t
  misc_feature (77)..(77): n is a, c, g, or t
  misc_feature (111)..(111): n is a, c, g, or t
  misc_feature (133)..(133): n is a, c, g, or t
  misc_feature (138)..(138): n is a, c, g, or t
  misc_feature (294)..(294): n is a, c, g, or t
cccccntttntcctaaaantccaaattagctgggcgtgttggtgcatgcctgtattctcagtacttggaaggttagncaggagaatcgcttgaacccggaagcgaaggttncagtgagccgagatcacgccantgcantccagcctgggtgacagagcaagactccgtctcaaaaaaaaaaaagaattccaaaagcccatgtgctcccttgcccattcttaagttgacattgaacattttcatcagaattataagtcaagccaggctcagtacctcatgcctgtaattctagcnctttgggaggccgaggcgagtggatcgcttgaggccaggagttcaagcctagccggggcaacatggcgaaacctcgtctctacaaaaaaaatacaaaaactagctggacgtggtgccatgtgcctatagtcccaactactcaggaggctgaggtggaatgatcacctgagcctgggaggtcaaggctgcagtgagccgagatagatccactgcacctcagcctgggtgacagagtaagaacctgtctc

SEQ ID NO: 233446 - DNA, 489 bp, Homo Sapiens
  misc_feature (2)..(2): n is a, c, g, or t
  misc_feature (10)..(10): n is a, c, g, or t
tnaaaatttnaaaaaaaattagtccagaaaaacttttcccagctaaagggttctcatggaaaggaagaccagcactgcccaataggaatgctataatggagccatagatctaaaatcaaattttagattttccaggagccacattaaaagaagtaaaaagaagcagataatatgaatttaaagaatgtattttatgccaggtgtggtggctctcgcctgtaatcccagcactttggggagccgaggtgggcggatcacttgaggtcaggagtttgagaccagcctggccaacatggtgaaaccccaactctactaaaaatacaaaaaactagccaggcgtggtggcttgtgcctgtaaccccagctactcgggagactgaagcaggagaaacgcttcagcgatttaggagaaccaggaggcagaggttgtggtgagttgagatcatgccactgtactccagcctgggtgacagagcaagactctgtctc

SEQ ID NO: 233447 - DNA, 548 bp, Homo Sapiens
  misc_feature (2)..(2): n is a, c, g, or t
  misc_feature (44)..(44): n is a, c, g, or t
  misc_feature (75)..(75): n is a, c, g, or t
cnttccaaatgtaacgaatttggcaaggtcttcacttcaaaacntcccatcttgcaaatcatagaagaattcccnctggaaaaaacccttataggtgtaatgagtgtggaaagccttcagtgttcgttcaaccctaacttacccatatggcaatccatactggagcaaaccttacaaatgtaaccaatgtggcaaggtctttactcaaaattcaaaccttgcaaaacatcgaagaattcatagtggatagaaaccttacaaaggacgccgggcgtggtggctcacgcctgtaatcccagcactttgggaggccgaggcagggggatcacctgaggtctcgagttcgagaccaggctggccaacacggtgaaacgctgtctctactaaaaatacaaaaattagctgggtgtggtggtgcacgcctgtaatcccagctactcgggaggctgaggcaggagaatcacttgaacctgggaggcggaggttgcagtgagcgagatcatgccattgcactccagcctgggcaacaagagtgaaactccatctcc

SEQ ID NO: 233448 - DNA, 512 bp, Homo Sapiens
  misc_feature (5)..(5): n is a, c, g, or t
  misc_feature (11)..(11): n is a, c, g, or t
  misc_feature (19)..(19): n is a, c, g, or t
  misc_feature (45)..(45): n is a, c, g, or t
  misc_feature (47)..(47): n is a, c, g, or t
  misc_feature (77)..(77): n is a, c, g, or t
  misc_feature (96)..(96): n is a, c, g, or t
aaccntcattntgggcaanctgacccagggccagaaacccaaccncngcatgttctcactcataggtgggaattgancgatgagaacacatggacncaggaaggggaatatcacacactggggcctgttgtggggtggggggaggggggagggatagcattaagagatatacctaatgttaaatgacgagttaatgggtgcagcacaccaacatggcacatgtatacatatgtaacaaacctgcacgttgtgtacatgtaccctaaaacttaaagtataataaaaaaaaagaaaattaaacaactttaaaaaaagagtaattacagcactgtaataaatgaaccatgcacatgggagtattcatagagaatgataacttcaacctaaatcttgaagtataagtataaatttgccaggttcacctcttgattatttaagtgtgaaagaggatgcatagatcaccttcaagtagctaaggcataatgagataaggatgctgaactaagttggtt

SEQ ID NO: 233449 - DNA, 578 bp, Homo Sapiens
  misc_feature (8)..(8): n is a, c, g, or t
  misc_feature (36)..(36): n is a, c, g, or t
  misc_feature (38)..(38): n is a, c, g, or t
  misc_feature (62)..(62): n is a, c, g, or t
  misc_feature (64)..(64): n is a, c, g, or t
  misc_feature (69)..(69): n is a, c, g, or t
cccatggnttggggggaaaccactcccagctgttcncntcttcccagggttaaacgccagcngnaattncttggccagtttgtttttaaaatgagtgtgcaattgtaactgtctcaatgcaagcttcgctgtagatgcccttcttaccaatatgctttatcttctgactgagaaaatcacttgagatgttatcatgcacaatcccacttgttctgcctctccaccctggcaccttctccgaacccagagatcccagagggccagcatctcaccccatgtaactccatgtaattctcccatctaattacaccggctgagagtctgtcttaagaaattcagtgggagctccaggtgtggaggggataaagaagagatggaaatataccaagtgaaaacatcagatttttctaaaaagggatttgtgtattttcctggagtcatgagtcctatagaaaaaaatttatattctttttgttttgtcctttttactggcaagggatttaagcctttggattaagagaaactcaaaagataatttaattccattcttatacttctgcctggataaataattccag

SEQ ID NO: 233450 - DNA, 517 bp, Homo Sapiens
  misc_feature (13)..(13): n is a, c, g, or t
  misc_feature (20)..(20): n is a, c, g, or t
  misc_feature (33)..(33): n is a, c, g, or t
  misc_feature (38)..(38): n is a, c, g, or t
  misc_feature (53)..(54): n is a, c, g, or t
  misc_feature (60)..(60): n is a, c, g, or t
gccatgcattcangcttggncaacaaagtgagnctccnttcccaaaaaaaaannaaaganaaaagaaaaaaaagaaaacacttgcccaactggctggccgcagtggctcaggcgggtaatcccagcactttgggaggccaaggcaggtggatcacttgagttcaggagttcaagaccagcctggggaacgtagtgaggccccacctctacctagaatacaaaaatcagctggttgtggtgttaccctcctgtggttccagctgcttgggaggctgaggtgggaggatcactggaaccaggaagttgaggctgcagtgagccgagattgcaccactgcataccggcctgcacgacagagtgagactccatctcaaaaaaaaataaataaataaaaataaaaaataaaagaaagatctcaaatcagtcacctaactatacactttaaaggacctacaaaaagaagaactaaacccaagctagcagaataggggaaacaaagattagagtggaaataaat

SEQ ID NO: 233451 - DNA, 569 bp, Homo Sapiens
  misc_feature (3)..(3): n is a, c, g, or t
  misc_feature (5)..(5): n is a, c, g, or t
  misc_feature (20)..(20): n is a, c, g, or t
  misc_feature (30)..(30): n is a, c, g, or t
  misc_feature (42)..(42): n is a, c, g, or t
  misc_feature (105)..(105): n is a, c, g, or t
ggntnataagaagagaaggnccaagagggnaaaagttcccancaaagagcaagagggcccttttaagggtgaaatatgccatttcctgaccacaggggacttccntaggtggattaaaaaatcctgtactgcccatgtctggtacagaagtatgtatagaattgtagagaaaatgaccacttttgggatgatttgaaagcaaattacagaacttaccagtttcaccactttaaaacttttggggaatggccatttagatataacctggtgcagtcaggtaaccccaaacagagtttttaaaagtttccacacccttctttgctggtgcctgccctgcatcatgctgtcgctgtgaggagggacttgttccagatctctggggcagcccgagtgtctcacctaaagtcacacagcttccacggaacattactggaagctcagtgagggccttctgcctctgaaacttgctctatttccctcaagtcctgcttccttttgtaggtttaagacattagttcctgagaaattgactaatcaagaatattctggaaatcttagtttagcaaaac

SEQ ID NO: 233452 - DNA, 571 bp, Homo Sapiens
  misc_feature (12)..(12): n is a, c, g, or t
  misc_feature (25)..(27): n is a, c, g, or t
  misc_feature (48)..(48): n is a, c, g, or t
  misc_feature (55)..(55): n is a, c, g, or t
  misc_feature (129)..(129): n is a, c, g, or t
gcaaggattagnttcattcaaattnnncccccagccagagttttcccncctattnaatgtccagtaagtatgttcagaataaatgatattagtcccttttcatgtgctgataaagacggtacccaagantgggcaatttacaaaagaaagatgtttaatggactcacagttccatgaggctggggaggcctcacaatcatggtggaaggttaaaggcacgtctcatatggtagcagacaagggaagagagctgatgcagggaaactctcccctacaaaatcatcagatctcctgagactcattcatcaccatgagaacagcatgggaaagacccaccccctacaattcaaccacctcccaccgggtccctcccacaacacgagggaactgtgggagccacaagtcaagatgagatttgggtggggacacagccaaaccctatcaaaatggccaaaaagaatatgctcaaatttagactatgaggtacttataatccctcaagcccctgaagattgtcaaacactgaacttgcctttcagctatttctactatttttcaaaagacttatctt

SEQ ID NO: 233453 - DNA, 413 bp, Homo Sapiens
  misc_feature (6)..(8): n is a, c, g, or t
  misc_feature (11)..(11): n is a, c, g, or t
  misc_feature (14)..(14): n is a, c, g, or t
  misc_feature (17)..(17): n is a, c, g, or t
  misc_feature (36)..(36): n is a, c, g, or t
gaacgnnnggnccntcnaagagagttttgagaactnccgcaggaagcgcgccctcaggaagatgcagaaaggatgccggcagggggaggaggaccgggagaacaccacgggcagcgacaacaccgacactgagggctcctagccgcagcagacttccccgagccgtcgctgacttggcctggaacgaggaatctggtgccctgaaaggcccagccggactgccgggcattggggccgtttgttaagcggcactcattttgcggaggccatgcgggtgctcaccacccccatgcacacgccatctgtgtaacttcaggatctgttctgtttcaccatgtaacacacaatacatgcatgcattgtattagtgttagaaaacacagctgcgtaaataaacagcacgggtgacccgc

SEQ ID NO: 233454 - DNA, 557 bp, Homo Sapiens
  misc_feature (5)..(5): n is a, c, g, or t
  misc_feature (11)..(11): n is a, c, g, or t
  misc_feature (23)..(23): n is a, c, g, or t
  misc_feature (25)..(25): n is a, c, g, or t
  misc_feature (127)..(127): n is a, c, g, or t
tcctnggaagngcctacatccananccgggtgaaaccagtgcctatcttttctgccccaaccaagaaggtccggcctgcaaggcatggtgtggtatagcatcctcaaggccaccaaaatcacgtgtnaggagaagatggtgtcaatggcccgaaacacatattatttgactctatcaaaagtctctcctttttaaaccttttcttatggatggctgtcaatcccgaggcagaagttttcaggtggagaccaagcggcctttgctcttcttccttcttcctgccacactctgctttcttcctgccatggacccctggaggagacctatggagggacagttttgacctgacccctagaggagacagttttgacctcttcagcaccaggaaggaagctctgaggatggttgcagtgaggaagcatgggtctttaaggacttctctctcttttttgctggacattattgagtttgtgggaccctgcctcttcctgctacctgtgggtctgcccagagtccctgcaggcctgtccatgcattaaaaattcctattgtctctc

SEQ ID NO: 233455 - DNA, 574 bp, Homo Sapiens
  misc_feature (5)..(5): n is a, c, g, or t
  misc_feature (13)..(13): n is a, c, g, or t
  misc_feature (47)..(47): n is a, c, g, or t
  misc_feature (83)..(83): n is a, c, g, or t
aagantcccaaangcttcccagggactgctggtccacgggcttaccnaaagtcagagtgggttgtagggaacatttgggggtnatctgggggtgtggtgactcaagggcacattctcaaagcagagcagtggccaccacagctgcacaagcagtatggtacctgtcatcttagttccagggtaccagggagtgcagacatgcctgtgcaatctggcttccccagttctttgtcctctggaactccccaaatcattattgataagtgttgctgtgggtcacaagagcagaagtgtttctcaacagtttggcagtcagccaactgttgcaggggtgaagacagcagagatgtttttctgtctaccccttccgtgaggctctgagttcctcaggggttcatccctgccagactcttgctgctttccttttctgcaacccaacttctttctgtgggcactctaatgggtcctggcccacttccctcagttttccatgcataacttgtccattcaccagtaactgtgatcttctttctgaggagaactgacatccaatgtccctagttagacatcctga

SEQ ID NO: 233456 - DNA, 378 bp, Homo Sapiens
tggtttgtccccttcctagcacatgtagcctcaagtttgaattcctgggagaagaaaagtctttacatctgtgatgtgggaggttgttcccagggaacatcatgtttttgtgggcaaatacaagttgttataattaaaacccctaatttgaatatttttgttaccaagaaccaaggcaaatgtttaatttgttataaaacctgtttgtgaagtgctgtgttaaattgtgctgctggctaataggcctcatttcaatttaataaatatttattgaggactggctttatgtctggccctgtgctatgccctgggactcaaaatttaaaaaatacgagccctgctctcaactgttctcaagttgctctcagttctattgag

SEQ ID NO: 233457 - DNA, 533 bp, Homo Sapiens
cataaagctatcctgtttttcatgtttaggacattgttcccataaattcatgagctattcaaccctttataataaaaaagaatttgtgttagatgattttgcccaaatgtaggttaatgtaagtgttctgagtacgtttaaggtaggctagtctaagctctgatgctcagtaggttaggtgtattaaagacgtttttacttacgatatcttcccctcccaataaacccattgtaagtcaagaagcacctgtagaggtctgcctttaccaatttcagctgcgacaaatttaatgttcctgtattgcttttaaattggagagcagaagcaggtctgaaacaaatactgcagttagctttgtgttcttcgctatttattgaacagttcagagggcaaggaagcaaagagaagtgctctgagtgtgtctttgcttgccagctcctgaatttttaacagttctacagtggccttcctgtatttttctctcgttttgtgtgttctcttctgtttttgttgaccctgcctcaaaaaaaaa

SEQ ID NO: 233458 - DNA, 463 bp, Homo Sapiens
gagtaacattttattatgttctcaacttctctctggtattggtgacagtgaactaatgaattgttgagaacatgaaaatgctattgtttaatgcttcaataggttgtgtggttttgcttgtttgtttgtttttaacttatctatacttttgaaatagccactttgaagcctgatattttggaattctttatatcacctctcttggttcagattgtagacagtttcatagggcccattttctgtcactagattcctcttcactaggtcctacatcttctctaaaacatatttctaccaattaaaattgtggtgtagtgaaaacagtaatggcgtaatgaaaacaatggtttttattataaaatggcagacttaacatacccatttacttttccctacttctcagatgtcattggaaatgacaaaacagacataagacaaagaataaatcattgtaattaaaaaa

SEQ ID NO: 233459 - DNA, 520 bp, Homo Sapiens
aactatactaatttgcatttttacttcatgctttttaaaattcagggatatcctcacattttaattttgttttaaagttgaagtagaaaagtaaatagggctttaaggagaaagggtgaactctagctcatgatggcatgtgtagcaaagatgtgggtgggtggcatctccccagctttaggggtaagttgaggcagactgcagcagtagtcaggccagatgtaagggtttggcccgagctaatctccagtacttcttgtcaattccagctgcttcaggagattgttgccaaatattcagccagctgaacagggcatgctgtctcccctgtagtgatctcagaggcagagccactccaagaagggcagttctgtttctaccacaaagataagaagttgtctgatcaaagcaattccttattttcatttcttgcacataaacaaagaagaaaataatccttcatccaattatcctccgagcaaatcaagaattttctatggtgttgggggcttgcttaaaa

SEQ ID NO: 233460 - DNA, 539 bp, Homo Sapiens
cagctacagtattcagtacactgagggccatacagttttgtgtagcctaagtgcaacaggttataccatttagccagggtgtgtagaaggctgtaccttcttggttggtgtgaatacactttatgatgtgtgcatgatgacaagttggctaacaacacatttctcagaaggtatccctgccgttaagtgatgcttggctgtatataatacataagatatggtattgtgtgcctgggctcttagacctagcatagtattttcaaggttaatgtgtagcatgagtcactacttcattcctttctgtgtctgagtaacattccattgtatggatatgccacattattcattcatcatttatggacattgggttatcagaattactttagagtaaaactgatgcttgaagaagtgtcagcaatggtcaggcgccaggggcccatgcctgtaatccaagcattttggaggccaacatgggaggatcacttgagcccaggagtcaagaccagcttgggcaacagtgcaagaccctgtatctaccc

SEQ ID NO: 233461 - DNA, 519 bp, Homo Sapiens
accgttagtttcacattttcctagaaggaattgaggggagtggggtggaccgcgatgcattttaaaggttgggaaagagctaagccattggattccttttcttgaaggaaggagtggaattgtgtaagataattgatacagataactttttcaccctaaaaaattctaacacttctttcagcagttaaatgccaaatttagtgtgtacctgttttacttcattctttagctgtaggttggagtggtgtgagcgatctgcagaactggcattagaggggcagaagaagtagacctgataattaaagtttatgccttaacattttagatctggtttctgatatgctctcttagtaaatctgagtgtgtctttaaaaacgtaaacccaaagcaatttaaagtttctctttaaactttgcaactcgcgaatgagaagattgaaattatttgtaggtaattgcactattccgattttttaatgtatgaggcaaacaaataaattctatgtacagtgtgctgtga

SEQ ID NO: 233462 - DNA, 527 bp, Homo Sapiens
aagatggatgtatgcacatttccaaagaactggtattacataaagcgcatctgtgtggttgctcaaatcttaagtacctttacaaaaaggagaagattcattatgtaggagaggttgtactgctgagttgcctatggttctgagttaattgcacccacagtcactgcactgtgttgaaaaatcaccaatttaattagcagatttcctagacagtgactagactgaccttttatatgttaagctttgtaaacacatttaagccgtgatggaatcgaagtgctagctcagatttattgaaataaatatagctcttgctgttggcaacaggaattatgagaagcagtcttcataagaagaattacatttttatatgtctgttaagaaattaaaaaaaatttttttaaccataagatcttagtaagtgttctcgctttggcagatggattaaccttgttcttttggagccagatcaatatctagtttatctctagagcagtggacagtctaactatgttttgattatatta

SEQ ID NO: 233463 - DNA, 539 bp, Homo Sapiens
cgaggtgcctgaggtctgttgtcactcactcactttctgacaattaggtgagccacttgaggattttctggcctgaagttataaaaacttggcatctgtcctaaggtaattgtaaaggcaaaatgaaagcattgaggtgaatttaggttatatggcatttatctggtaatgtgtttcagaaaagctagaatgaaaatgtgatgtaagggatagcaagtgtaggttgattcataattcttggtataaaaccaagttttccttagtcttgaggaatttgaagaaaggtaaaatgttggattttaagcaaagtaggattgaccagagactgttctgactttgacattcagacctttcagatgttcttccttcagaccagtccaagacactcagcatttccagccaagttgtcttttttttctgccaataaagtattcattagttgatgtttgtttgtattttaagtaaagtcaattttttttaaagcattaatttaattcacgggtatgcctttcatttctctggccttcagttggtttaaa

SEQ ID NO: 233464 - DNA, 568 bp, Homo Sapiens
tatctactatgtatctttaacacttttgaatagaacaaacagcttttccattttgctctgctgcagtaaattgcaattgccattcatcattaaatgtgcactatactgtctctagtcttcttgactatgccagttgtagtaccagcttctgtatctgcactgaattctgcctcagtaatatgcctttgtttaaaatttaaatattttttcatttttttaacctagaaaataattataatgaaaatattaagtatctcattttaggattctgatttacataggtatcactgtaacttgtgctgtttgcataggtatactctatcttgtgctatctgcataaaatatccaagtaaacacattgtgattttacatccgtgcatagaaaaaaaaatcatctgaactcaaatcaatctgttgatactgactagattggtaaaaagtttatgtgtaacactagtgataatgcacgttcctgtacaagcattataatacaacagtgtcctatgcaatgcagtggttaaagtgaattgtagttctatcaaaataaagatacgtttagtggagaaaa

SEQ ID NO: 233465 - DNA, 544 bp, Homo Sapiens
aggcggaacacagacaacttggggagctttactggaaggccaagaaaatactcttggacactggaggaaatgacagctactaaagcccaatcatggaaaaggaccagaaagcagcccactggaatggggagcttagtgggcaaggaggtagggatataatttctcttcttggctccaccagtaattagctctgtggcccagtcacctaaactttctggacttcagttcaggttgtatggcagtaggccatagaattggctactgccatacaatctctatgggaaaggactgcaaaaactaaattttatctctgtatgggcaaaggctactgtcatcctgttgttggtctggggccactctgacaattttttttaacctcatttgattgtgtaagggtctaaccacaacaaaaaatcatagtgtaatagaattaatcaagttcagcaaggtcacaggctagatcaatatacagaaaatcaattgtatttttctgttcagaaaactccaaaaatgaaataaagaaaattgtgttcacaataaaaaa

SEQ ID NO: 233466 - DNA, 557 bp, Homo Sapiens
tttaatactcacataatggtgaaaattgtttgaaaatatttggaattaacaccaacactaaagtattcttgctgtcttggaaagggaagtcattgtcttgaggaatcttgtgtaagttcaatttggattcagagagctaatttctggaaagctgtattaaatgctaaggcttcagcattccactgggtgtgccgtcatctaacataaaataataccattttgtgagaagcgtatggtaaagagagaaataatcgagttgtagcacccacagattgagatcatcctgacactcagcagtgatgctgcaacgggataattgagggctaggcatgggggaagctctcgcaacttttgaaagctattatgaattttttagttttctcttgtagattcttgatttatctgcctcttgcttgtttttctatctcgaaagtatgtctgagaaatgctgttttagagagcaggtccttaattttctattgaattttgacatggagcccttcctcaattaatataaaatatacctactttcactgcccagttcttgcaatacaaaa

SEQ ID NO: 233467 - DNA, 554 bp, Homo Sapiens
tggtagccatgtcggagccccacagggtccagttcacctctctcccaggttccctgaatcctgcgtttttgaagaagtcccggaaggaggaggctggggcaggagaacagcatcaggactgtgagccggctgcagcagctgttcggattacactcaccctctttgaaccagatcacaaacgctgcccagagttcttctacccagagctggtgaagaatatccgagggaaggtaaaaggccttcagcctggagataagaagaaagatctgtcagatcctttcaatgacgaagaaaaggaaaggcataaagtagaggcccttgcccgaaaatttgaagaaaaatacggtggaaagaaacgtagaaaagaccgaatacaggacttgatcgatatggggtatggttatgatgaatccgactccttcatcgataactctgaggcgtatgatgagcttgttcctgcttctttgactacgaagtatggaggattttacattaactcgggaaccctgcagtttagacaagcatcagagtctgaagatgacttcattaaagaa

SEQ ID NO: 233468 - DNA, 553 bp, Homo Sapiens
gctcatccctcctcattcagacatcctccaccataccagtgttagaagcaaaacatgaagggctagcgccaccaggatagttagcagaactattgtctgtaaagctaggcagatgagcccagaagaatggtcccagagaaagcagactggctccaatagatatcaggcagcaatcccaataaattctgacatgtccttggcaatggaagcctgggttggagatcctgaggcagctgtgcctactgttccccacctcagaagcttcctgcccagagagccagcagccttgggatactaatgaggatgcaactggcttattggtatgaaatagaaggtggctttgtaggggcaagcaggcaaagagtactatccacatggcaggcaggtggctttgtgtctggaaagctttgcctagccagtacagctgtgagcagaggctggttataaatttgaactccctcagcccatttgcaactctgcctctgttctcttgcattctgtttggttgccctttagtttcctagtaaatgctccttttgaaaaacaaaaaaaa

SEQ ID NO: 233469 - DNA, 518 bp, Homo Sapiens
gcctcgtgccgcctcgtgccgcaatttctcagatggtttctactctgtataaggatatgagagtaatgtctccctacacttagtgaatggttgacagtcccaacaccccacccctttcttaaatatgtgcttcctgaataactagactcttgtgcaagctaatttctttcatcttttagttcttgtaatgctatttgaatttagtgggacctcttggaagtagtctgtccttgtgtgagaggtggcccaccatcaccatggatgagagctgatggagaaaggataactgagtccaaagaactgtggaacttccctcagggctggaaggtccctgctccttgctaactgcccagggccccttccataggttagaatgtgggacaacccacccatagctgacttaacatgtatcaggagttcatgccttctttatactgaatggtaacccattgtatggatataatttgtttatcatctgcctgttaatgaatattacactgagggagagaaaccagacc

SEQ ID NO: 233470 - DNA, 854 bp, Homo Sapiens
tcgtatagtgtgtttgacacaatgttatcacgtgtggaaggagattgagagagccgatgccttgtagtgctacacttagatagggtgaaacaagaaagcggttagccataaaattccgtgaaacaccaaagctggcggggggcattaggaaattggaaaatcgaccatgggatagtccggaccattgatgggacgatgagtgcccagcttgtaacgcaagactggcctttttaaaagacctgattaaccccagacacccttgctgacacttcgcccaccccttaacactgatggactcttgttacacatcaactgaaatagttatgcagcaaaagattgtgatggcaatgaaagtttgtaaactgtattgtcaatctcttgttcttaatcccacaaaggcaagatgcagggttctccatcctttcagtagtgcttctcctgtaaataatcctgtcattttgtttgcaaaggcagtttctgaattaagtctattctggtatactgacgtatataccaacgacacaggtactgcaacgagcgcacctgcatgaaccgggacactgggttggttcagtctgacggggtaagttgcagatccaggcagccgagaccttgaataacaaaagctccattttcagagtccctgattgaatgctcaattagatcaactatggacgtatgtccttccacatctggctgttcataaaagctaaacctaccatttgagtgctcaattctagtgtgaagtgttttaccatgggagcgaaagctcaagcttaaaaggtaacggtcgtcagaactgtcccgacaagaaaagaaccatctggcacgtttgctagcttcccttctgcctc

SEQ ID NO: 233471 - DNA, 849 bp, Homo Sapiens
tttgtggcgcaccattgtacgcgcctcgaggtgaacccaaattggggccttttctctgaccacacgagggcaaatttccccttgtgtcaacgccgcatcaccagtcctggttcaaaacaggagtggtctcagccatctaccctctggttctggttttcctttcatggaagggagatcccaataatttcagaacagggacaaacccagttgagcttccagcctcaggtctgtggtaagatggagcgaggaaagaccccactgactccagaggaaaaagggtaaggttgagatggatatttctttacagctttggtgaaaatggaagaaaaaagatttacaaatgaggatccatttcatagatgagaatctccctcataaatgaaggctccagctcctaaaatgggaggggcctgactggacagcctgaatcagatgaggaatcggccacactgaataaaaacatctgaaaataatcctcttaattttgaagccagataaaatatttggggagaatggaaaaaagaggaaaaagccccaacagatggaaaaaatgctgacatcagagtggtataaaaaaattcggctgagttttcagtggtggtggctaatttagccctgttctgtagtggggcacaaaccttgaccaagcagagagtagtagaaaaggctagaaagaggggcttgaagacgatgaattttgactcctgattttattatgtcaatttctttttttcatttaaagtagtcttccgtggttgggaagcctcacctcccaagaccagagtcagttggagctggttgttgttggaagggagtgggttggggaactggggtgggggcagggagatc

SEQ ID NO: 233472 - DNA, 468 bp, Homo Sapiens
tagggaatattattaccagagtttatcatgtggttgtgtttgaggaggagatctaccaactaatcagcagttctgagatgaatcgcatagggcctcatgcgtcccttttatgggagaaagttattttgctttccggtacaggatacagctgtgcttctcctactttgtatttgccatatacggatagatacaaaacctcatgactgatttttccctatttattttgagtggctctgtataccattttcatgtattacttcatttttctgtttttcagttatattctctgttttcgtatatttttggaagctagttctaagtcatgttttgtaggaaataagcaatcttaaatacatgcataggggatttctttcttctgaggatccttaatttcttctatttttaagattcaaattgaatgattaatcagtaacagtttatgttttaaataaaagtctttaaaatgtt

SEQ ID NO: 233473 - DNA, 419 bp, Homo Sapiens
ctttttggggccccccgggagagtcagagggcaacagagtgagactctatctcaaaaacaaaacaaaacaaacaacaaaaaatgggctggaggagcgggttgtaggcccttccgcctctggtgggtggggagaagcaggggagactggtgttcagctatattctacaaagaaggggtggatcctgagaggcaagggtgggactgaggcctagttacaggtggtcgggaaggaggttgaaggggaactgtgtgaccttggatgttctttgtaattatcttatgcttagctgacacatctgtaaaatggagatagcagcacccacttctttgagttgtgagaagtaaatgcatgtgaaatgtttagcgtggtgccgggccaccaatgttaagacgcccagtaaatgttggctgttaaaaaa

SEQ ID NO: 233474 - DNA, 539 bp, Homo Sapiens
tgagttaagaaaaacagatactgaaaatagtggtctgagtgctggtctatccattcaggcactcagtctccactgcctgattgtctgtaaggggaggccccaagtgaattttatctgtagagtcacatctaggcaaatgcgtgcttgacaaaggcgcccaataaattactttactgaatagagtatttgaataatgtttatttttctgctgataacaacaatctacatattcaatttcgaacatttgaaaaataacaatatagtataaaatttaaaaatacacataattcaccacccggagacgactgctcaacctgatgtcgttacagttttttaaaaaatgtgtataacacacatataaatacacaaattcttaactcacaaagagtcctggttcccactttagccagcagtcctgatggccttcccaggagacgcagtaatgaagtagaacctctctgcccctacagaagggctcttaaggaatagagcggtgcagggaattaaatgggacgggttatcccagggataaggcaagc

SEQ ID NO: 233475 - DNA, 471 bp, Homo Sapiens
atctgtttcctctgctggctggatttcttctgtgtatatggcactaggaatggaaaagtggatcttcaagatattcttttatgttatgttcttggacgctgactggacagagaggagcctgtctctcagggcacatgagtcgtcgtggcaggaggagacgggcctcagtcacagtgtcacagacccttgtcacagtggacactagtcattcctgccatgtccttgcagcccaggaggactaaaaagattttaatgaagtctgtgttactcattctgaagaaaagaacttacctgagaggagtaatatttttttaatatatattgggtcagggacagggatggagtggttgttttatgtttacatttttaataagtaaaatagaagatttaagaactaatatttatggtattgaactttaagtgtgatatattccttagaaaaacacaactttaataaaaatggaaactaaa

SEQ ID NO: 233476 - DNA, 624 bp, Homo Sapiens
  misc_feature (33)..(33): n is a, c, g, or t
cacgagaaagtggaaagtcttaaaagcattcgnaagtacctacctccaatgtggcttatgggtctacaggcattcgggacgtgcacctcgagctgaaggacctgactctgtgtggacgcaaaggcaatctgcactttatacgctttcccactcatgacatgcctgcttttattcaaatgggcagagataaaaacttctcgagtctccacactgtcttttgtgccactggaggtggagcgtacaaatttgagcaggattttctcacagtatgcattttttagcttatatacaatttatggtaatttgattgttaaaaataatgccagtagcaagtggtgaaataatttccatctctaatggaacttgaattttcttgagtcaaatgaagattaaaggtacgctagtgataggagttggccatctagaggtggttgtctagttcagatgtatggacgacaatcagagccactaaaagggtagcattttattgctcctttagtatgaaaaattagggcatctgctatacgttgaggaagaaactacctaaaaggaacatcattagatcatgaacaatgagattgaaatataattaaaatcatttcatgtcataaaaaaaaaaaaaaa

SEQ ID NO: 233477 - DNA, 534 bp, Homo Sapiens
attcagtacgttctgtgaaagtggagcgagaagccaagacgtggatcgagaagccccgtggggcgggtctcagggtggcccaaaagacccctgttcacgccactaccagcctaactttaggaactgtcgtccacctggcttttattatactgccttaaacatattcacttttttgagactctagaaatttcacaagttttggggtagagcacactgggctttgggtgtgtttctcatgagggcactgacgctgaatggtgcagtgagaaaggacggtagaaaccactgcctttgcttttaccattgaagaaactgaggtcctgtgactttcccgaggtcatcggaatctgccttgcacaggagacttaaaatagttgccagcagataaaagaatgagcaaaaccacatctactccaatttgttaagtctgaaagaaagtaattgaggggggattcctctttggggaaatatttatttcctgcattgaaaatagtttaatgttagtaaacatataaaaagtattttaaattcaaa

SEQ ID NO: 233478 - DNA, 373 bp, Homo Sapiens
gaatatcagaaaatgcaagactgccccagtgcagcagcagtgatgcagccagaggttaccagaagttctggcacctccaccttcatggacacaagctgtatatatcagtttaccatggttttcagtgtaaaaaagcaacttatgtccttcagtgtcagtttattgagctcttcagtgcagcctcataacttatattaattgggaggaaaatgcttccagagaaaggagagatgctggacaaaacaactttgtctttgactagttgtcaaggccctgctgtttggagtcattgacaagtccttgattcttgtatgacagatccaggggaaaaaaagaagtgattcatcttcttctgttgcacctttcaaggagg

SEQ ID NO: 233479 - DNA, 588 bp, Homo Sapiens
aagcactttcacaacaatggtatattcctttttaccacagctgttctccagggttaagatatattttcctgcatcatatttgttcacattttcacagcgcaagaaagtgtcaaagtcagttgactttatgtccagtccaatcctgtctcttagattgacatttggtttagaccaagtaatctttggaggtgggcgtccttttactggtacatatagtctcatagtaactccagcacgtaatatgagtgtcttccttaagtccgcatcaagttctccctcaggtggaactgtttaattttgggtgaagaagttaaataaaaatttaatagtcaaatgtatttccagggactggccttgtcactcctaaaatacatttattttctagagctgatttcttgttctttaaaacttccttaatacaatcctcaaaatcatttttctgttctgtactaattgttgatctttccattttccactatgctttaggcttaaccaggttttccccccggaggatctgtacctcctctttcatgagccttatgtactctgaaatgctacatatattaaaaggaaagtagacgattgaaa

SEQ ID NO: 233480 - DNA, 576 bp, Homo Sapiens; identical to SEQ ID NO: 153659

SEQ ID NO: 233481 - DNA, 417 bp, Homo Sapiens
  misc_feature (44)..(44): n is a, c, g, or t
aaataaaccttttagaatatagagggtcaatttatatggagggnttttgtgagaatgggctaaaagggccaagtgtttggaaagcccaagtgcagtcacaccctttcatgtgctttcaggtgagattgggccaacagccatgatctaagggtagcgaggttgtggagggcacagcctaatctctggccacttgagacttctactgccattcactcccaaaatggcctttcctttaattatcaaggtcagcaccatgcacacttagtttcctcatgataaagacttttgggaggaagaagtgacttaccaactgctacacaaaggatgacactgatgtggtacctcaagattttactgtaattttacttctccaaatacatggctgacctatatagagggcagacttctctttcacag

SEQ ID NO: 233482 - DNA, 440 bp, Homo Sapiens
  misc_feature (1)..(1): n is a, c, g, or t
  misc_feature (173)..(173): n is a, c, g, or t
nctaggtataaagcatttaaactgtgtcaggcacattttaagtgctcagtagatagtgctggtaaggctggctataagtactcacgcctctaatctcagcattttgagaggctgaggcaggaggatcacttgagctcaaaagttcaagcccagcctgggcaacatagcaagancttgtctctactaaaaataaaaaataaattagctgggcatcaggcatcgtgcacaatcctgtactcccggctacttgtgaggccgaggtaggaggattgtttgagcctgggaggtcaaggctgcagtaagctatgattgcaccactgcatcctggttgacagagcaagattctgtaagtaagtaaataaaataaataaataaataaataaatatagcaagctggtttggagtgaggaatattaatagttgtgttaaggaaagaaaag

SEQ ID NO: 233483 - DNA, 716 bp, Homo Sapiens
ccatacaaatgcacaatagtaaagacgctgtacggaagtgcccagtgacccgttcattctggttgttttgacctgcgtggtggaaggaggcgctcctgacaatttttgctttgcaaacatttattctggtgatataactcaccatcgctgcaactgccagcactcagagtcaccaaaaattgggtaattatcttgtttttagtaatttttcttaaatgtatgtataactaactcatgtctatttaatgtttaatattagaagtgtttggtttaaagttctaaagtttggtgaagtttttatggccagcatatgccgtgggaacttaactcttgtttacatccattagcctatagtaaaattagtttcattatatatcattttgcttaaagttgccatttctttttttgagacgaagtctcgctctgtcgcccaggctggagtgcagtggtgcgatctcagctcactgcactccagtctagtctaggtgacagagcgagaccccacctgaaaaaaaacaaaccttctggctttatattaactaactattggttttcgattccactgatgtctgtttttatcctgatttaacccctgccttctgctgctttgggattgctgctaccttttctgagctgaggtgccagcctcacagcccctcccagccccatcccctgggttttgtattctgtgcttttactgtcagcccagtctagac

SEQ ID NO: 233484 - DNA, 672 bp, Homo Sapiens
ggacatccccaacctatatcatctgtctccctcatccagaccatgtgatccgtagctcacttttgtctagcaacagattaaatacagcattttctgtgtgatatctttgttgaggtctttgcagatgctgtttctttgtcctgaaactttcttcatctgctctttcaaaatgagtgactcttcatcctcgaagtctatgcttatatattgcttttcagaggaatcttttctgaactgggcattctgccttcaaccaactattttctattatagtttcctgtttgtgagttaatagtccttttgaaaatttgactactcatttaccttcttgggcttatttgaaattatctcctcttcactagattctatagaagcatagccatgcctgccctctttactgtttctctactgacttgttgcaatgaatattgtcagtaaacatggaaataaatcagttattcagatatcctaccttggtgcttgcttagataactccacactgtgatgcctaatgacctacacagggctttctagcaaggagtgactttctttctgctacgtgtaataatgatccgtcaacttaaacatatagttatatttccagcagacggtttcttgaaactaatgtccagggtgtagttattcccaaaagcaactcttctcttgatttcc

SEQ ID NO: 233485 - DNA, 916 bp, Homo Sapiens
ggctttacctcggggttgcggacgcccagccggttacgtattgaccgtttgtagtctccctccgttggtccctttcccgtctgaactgggggtgcgctgttgcatggcaccagcgttcgtgccgcacgggtttgggcctctttttttcgtgtgctcttgcgctcgctgttttgcccccgcacgggccttttgccgttttgctgtgctgttcgtgaggcgtgtccaatggccggggcggtgtcggtgtccccctgtgtattgtttgcttgccctctccgggacatgagtggatcctctcgacaggttgctctgtgcgtagtgtgtggggtggtccttagtccatcattggtgtctgaaatttggctatttataaatgttaaatttagttttccacttaaacctttgagttccaataactaatggaggtaatatgaagaagaaaataagttacactcaattataagaaaggaagcagaataacttaatcacaaactaggcacacactcctgaaaatctaaagtgatcgtttagtataaaatctagattcaaactctattcttcttggatcacaacctctttgaaaatctaaggaaagctaaagaccctgtagcaggcagcttctgacaggactcccataatacccacctcttcatattcccagtcctgtttaatctccttcccttgagttctggctggacttagcaacttgcttctaatgagaagaatgtgacaaagtgaagggatgtctcttgtgttattacatcaccaagactatgacttctgttttactagtgctgtctcttgccctcctacttgctctccttttatgaagcagctaccttgtgtgagatgccccatgaagaggtccatgtgtcaaggaagcaaggaggcctccagccacagctcacaagaaacc

SEQ ID NO: 233486 - DNA, 930 bp, Homo Sapiens
  misc_feature (411)..(411): n is a, c, g, or t
ccttgtgtcctcccttggcctcattccaggagtatggtttcccgcttgtagaacgagtcttagcctagcctgtccggctaggagtcttccccacttgcacctcctctgtcaagtatttgtttacatagtccctgaggcatcacctgttccgcgagacctccacctcccttaggttggagagccttgccatctggattacacagaatgattgccctcagcaaccaagccttttcttgtccatcctcatgtcacggcatttttggacacttagctcttgtcagcacccttggagaggggaccgatcaaagatgctcctactcctgctgaatgggctgatttcggtgcacgtgaagacctgtggcaaggaggatgccatctcgaacatcaatggatcggtgtgaaaaggaggcnatgaggagttcattccagcctgggtggggcagcaagggtcaggagccagaaatcaggccagggattcaagcacatcagtggaagagaaggagaaaagaggtggcgaggtcagcaagtttggctcctgggtacgcaaggtaaggccactggggtcactaaagatcgggaagtcaaagaggggtcaaatgtcaagaagtcaaagggatccaaggtcactgacctgcccgcagcaatatgacctgatcatccagaggcaaggaggaaaagtgtgggatcctcttcgcccactcaacaagcgtgaatagctgtttgtcagctgcctgacagatgttagtcacagggtcatttggctgcaggggacgggggtaagagttatggaagattttgagatatgctgggagcccccttgtaagaggcttttgacaccccctccttacatatagtcttcctgtgagccccatccaaaccatccctgtaagttgagtcttctcttctggcattagtgcaaacattatttat

SEQ ID NO: 233487 - DNA, 600 bp, Homo Sapiens
cccttttattttttttttttgttttttttttatgtatgttttttattttttttatttttttgagacagagtcgttactcatcttgtgccacacaggggagggacacacggtggtacaaccaccacctcccaggttcaagcaattctccttcctcagcctcctgagtagctgggaatataggcacatgccaccatacccagctaatttttgtatttttagtagggacagggtttcactatgttgccaggctggtcttgaactcctgacctcatgaatcgcccacctcagcctcccaaagtgctgggattacaggcgtgagccaccgcacccggcctagcccatgttttttctatcatgccatagtgttgctatttaacatgccaaaataaatgaatatgataaaatattagtaattcaaaatggcagttaccacatgattgcaactttttaagagcacacaggcctagggacatggaacagagtcacttgaaagtagctgaattgtcatgtggggctttcccaagttccagtatgttgtcacgatgtaacttgaacaattttctaaagatccctccttcaggacacacatcagtcatgaga

SEQ ID NO: 233488 - DNA, 900 bp, Homo Sapiens
cccgttccgctccttgtgcctttgttctcccgctccctttccgtccagaagattttgccttggccctggtcctccccaatgtattgtgaattgtcctgcctggttctggccgagaggcccttggggaacccgtgaacccgagccaaggaacttagtaaaagccccggaaatggcccagaacccaaaggtggacttcttgggcaccgaataccccaatgtaagactaccaatagctactggattgcaggaagttgaaggaaaaaacatctatgaaagggaaacttacctatgagaaagcccccatcttagagaaccagttctctgaggaaaggactactaagtccttttgaaactccagacttgccagctatttcagaggaatttcctgtccatccctgggcatagatatctgctcagccttacctgggaatccagtccaatgccagtaaaagtattttccaaatgctcagaggtgtaagttctccttcctccatgatcccccaccagcctgggggggataaccgtgtggtttctctgtgagtgtgtgaagtcttccctttaagctccttttttttttgtataaaatgttccttcccaactttatcctaattcatggatttttttttcgcctaaacctggagagaagtcactagcttcatcatagctcaagatgataactgtgaagaataagatgatcttcaaaagaaatgtttatttgagtctgataagaaattgatctaaaatcaagcaacccctgtcatcctacccgacaggagaaccagattcaccgttgactccttgctcctggcagatcaaacatagcaagctggcaggtgggaagtctaagctattggcatcttcctcccctctttgccccatcctgccctcctcagaaactct

SEQ ID NO: 233489 - DNA, 436 bp, Homo Sapiens
gcctaaatgtttcagtctagttaagttgatttgtatattacttagaaatttcattttcagggaaatagttttcagatttaaataactgtaaagagctgagttattctttgacttggatttaaaaaaaaagaaaaaaagtgtcctgaagtcatttcctgccagtttgtccccccgactttttttcctgctcttcctgtaactggttcttgttacggcaatgtagctgtatatttaaatcctaagagactcgcttattgtgagtaggcagggtcagtagtctgctgaaacaagcacaggaaacttgaaacacctaggggctattttaaaaatcccttgccactgacattttagttagaattctaaagagagaatgggctgtttggatactgagctccagtaaaagacctcgcggtttttacacactacgctgcatgcc

SEQ ID NO: 233490 - DNA, 538 bp, Homo Sapiens
tagtcagaaccagagtactgataaacaaaatgtcagttacctggagcagtcctggagaggttaagacattctatactgttctacgtcaaccatttctacaaagttgtccagacacctaaaagcagctttcttggttatccagatgccagaatcaaccttgtatctgacaatgcacatctgttgattctaaagtatatttatgtgtgtgtgtatgtgtgtgtatacagcacatatttacatctatgaagacatagacacttacagagacccacatgagctggcactttctgagcctttacagcctttaagactcggaggttgagaattagagacacaagagaggctgtggatggcctattaaaatgattaaagatgtaaattcagtgccattttaaaactgttcatatttatcaaacaattactgtctacagctacattttttgttaacttacttaaagtcatgtcgcaagaaagatcaaacccatgaatgcttagtagctagtaagtgttcgaagcactctaaagacactgttaccga

SEQ ID NO: 233491 - DNA, 523 bp, Homo Sapiens
gagctcggttccgctgggcactcgtcatcttccgtgtgcaggtccacaccttgtgccatccatgacctgggggttgtctttgggaaggaggaccttgatgatgctttcaaagatgatcgatttccagagtatggcaaagtggagtttgtattttcttatgggccagagaaaattcaaggcatggagcacctggagaacgggccgagcgtgtctgtggactataacacctctgaccccctcatccgctgggactcctacgacaacttcagtgggcatcgagatgacggcatggaggaggtggtgggacacacgcaggggccactagatgggagcctgttatgctaaggtgaagaagaaagactccctgcacggcagcaccggggctgttaatgccacacgtcctacactgtcggccacccccaaccacgtggacacacgctttctgtgagcagcgactcgggcaactccacagcctccaccaagaccgaacaagactgacgagtgcccagcgggatcctctaga

SEQ ID NO: 233492 - DNA, 463 bp, Homo Sapiens
tcccctccactagtgtaggcaatcaactatggttttcattcaaaatactattactctaacgttaaatatttgagtacagcaatcatttcagatgcattatgaataagttactgaacacgcctcccatctgcttgctttacggttttattttgcctttcgtttgttagctcattttataatttgttacttctgcacaccttccccgtgctggtgctttcagatatctacctcaaagtattatttgtaaatgtcaaaaagtccctcttacatataattgaaagctggctacatggtagacaatatgatcacaaacttttaaacaattttttaagctgaagaaatactttttctttctataagtatcaaatcaaaatgtaattcagcatccacccataaagcgcaactaaaaacttttcacatgccattaactacttgtggttaccatcataagccaacacggccc

SEQ ID NO: 233493 - DNA, 526 bp, Homo Sapiens
  misc_feature (13)..(13): n is a, c, g, or t
  misc_feature (415)..(415): n is a, c, g, or t
tattttaccgganccaccattttgtgttgccagtggactccctcaatggattggtttacataggtcaaagaggggataaccatcccaaagatattagtgttcacagaggatggatatttcctacgagcctggaattatacagttgacacacctccatggtatatttgcagccagtactctatatgaacaatccgtctggatcacggatgtaggaagtggtatgtatagtaatatctattaaattatcttactggaaatcacatctttgcacatgtccttgtttgtattgtttaaaatcagagttgctgaatctaattgtaatttctttaacgattcatgaaatcacatgtttttaacaaactttattttgtacttctgtggaattaagaaatttaacaaggctggacgcccgtgncacgcctgtaatcccagcactttgggaggccgaggagggcggatcacgaggtccaggagatcgagacgatcctggccaacacggtgaaacccccgtctccactaaaaatac

SEQ ID NO: 233494 - DNA, 475 bp, Homo Sapiens
agctggtccagccctgacacctacttttgctttttttctttctttcttttaatttgttgaactataggtttctttctgagatgtatttttcattcttccaataatgctctctttttcatttcaaaaccattaccactttcaatatgtaattaacatcctcattcatcagaaagctggtaagtccacacagcatttgtgcagtatcccttctgtgtaaaatgttaaggctttcagatgaaagaaaaaagaacttcctgcaaaagatcaaaagcatcatactaaataaaatgatgacaatatgtgccttgatttttctctcaatggaggttcaacattgacatttaagatgtaaaaaaaattactttgatggtttaattaagaataataagtcaaatatcacatgtatgtagttcttttggatgaccgaataccttaaaatgaactaaataactgaaataaagtgttaaaatgttaa

SEQ ID NO: 233495 - DNA, 554 bp, Homo Sapiens
atcattgataacatatggcttaaatttgctgctgcctgaaaagtatattaactagattagaagacaccatatactccaataaaatgaaatatattctattctcaatatataaactttaattgtactccctatcaaatattttgaaatttccatcacggcattactttgcatatttttttctaattaaatggttagtacagatgaaatctttatagatgactacttgaaaactaagtgctacaaattttcaaaccattattaagaaatatatcctgaatcatatatttagttactttctatagtgattgtatggatttaaaagaataattaaaatgtgaagttgaaaaacttgtaaaatttggaatatacagatactgatttttttcatttttgttagtatacctataatacataatcacattgacaaaccaatgaaaatattgtttttctgatgaatggcttgatttttctccttgacatgttttgactgttcattctaactgaaaacatatatgggaaaatatgaacctgaaataaaagcactcaaattcaaa

SEQ ID NO: 233496 - DNA, 522 bp, Homo Sapiens
cggcgctcgcagaaaaatcatgtcttcttccagagtggggctccgtttggctgcctgtttactaaacgtttcagaagccggaagaaaatacattgttgagaacatagcaaaagcagctcttcttgacaaaaatggaaagaaacatcctcaagtttcagtgctcaatatattttccgatcaagactacaagagatcagtcattacaatagcaacttctgttgataagttggtggacaagcgcaaccaagcctaaaggcaagtgctgttgcgaggtcgacatccaggaaccagaggagggcagagcaatccacagaatggatctggggtgactcatggaggaaaaccaacacacagtaccatttaattctttttaaaaagatggaaaattataccatacccagaattattaaattctaaatagagggtatattgcatttacatttgtaaaagaatgtttccccatgtatcttttaaaaattcattttaaagatatacaataaaaagtgtttaactctgtttttc

SEQ ID NO: 233497 - DNA, 516 bp, Homo Sapiens
cattggtggacacctaactgaattgcaagctacttataaacttacaggaaaatatggagttagctctgagcacatagcaggaggaaagtggccttcataagtatccctcataaggaatctccctaaatagaaattaaacataaaggagagagaaaacttactttcttgactcaaagtcagctgtcaatgactaggctgccaaaggaagtcattgcattatgaggacacctagctgtgaagcttagtattgcatgcctgctctattagcgcagccaaatagggaagaggaaaggagttaatttctaagttctcaggagagtttaggagatctggatggttgggttaacagtggaaagatctaggaaagtgtcctaaagaaagaaaagaaaattattgactccagttcccatcatgagggtatgtataatacatgcatacacaagtgcacatcaacgtagaagcatctcactgatgatatgccatcatcctgacaattttaagtccctttgtaaaaaa

SEQ ID NO: 233498 - DNA, 571 bp, Homo Sapiens
gttgagttttggtttggtcctgctcagttttggtttttagttgtccatcctcacagtcctacacactcgcctcctcctgctagggctgggggtatctgtgtcctttaaaatggatgaggacctggtcctcgacatgtgggtgagccatggaccttgccttcccttctcgtccttgagggtttagaacacacaccaacacctccagcgtccccgccccagcttccggtggggtgatgcggtcaccctgcaaaagacttgcactttcctcagaaccaacatgacgcagctcaataagggtgagggtcactccctcccagaagccccgtctggacgagccttgcctgacctcttcggtgctgaccttcccaaagtgatgccttactggttttgtactaactgtgttcattttacataagtgtcgtgcctgcctggggtttgttttttttgtcattgttttccccattgaaacaaacagggctaaaaagtcatctgttcattaggagaactcaagttgctgtgacttttctcatccaaaagactcatttgtgtggatgcgtgaccatgggaaaaa

SEQ ID NO: 233499 - DNA, 566 bp, Homo Sapiens
caagtcaataagcttgccaacataatggacttgaacaaagatggaagcattgactttaatgagtttttaaaggctttctatgtagtgcatagatatgaagacttgatgaaacctgatgtcaccaaccttggctaaacacaaatgagagcttccctcaggctccctgaaacagctaggcccaaatcacaagtacagtcctttccaacacccctgaaattcatagtcagtagcagagaaaagcagatcccaattcatcccacaaacagatgcatagtatgggttttggaagtccctagcaagctgttattggtaagattaggttaaatgtcagtaataggatttggtttcagcattagtacctacatattgccagtgagaaactgggttggacctagtggtgttgtcgtgagtgccacctaaccaggaggccagagcggtttgaaaacatcctgaaaggaactcatacagcacaagagaaaactactaagcttgacatctgtgagtgactgagggagacaggaggaataccaggttattcatggaataaagtctttccatctttaaaa

SEQ ID NO: 233500 - DNA, 566 bp, Homo Sapiens
gtggtgagaaattgagctcatgaagcaggcaaggaccgaacacctccaccccaacgtagacctgcaggtgctgccccatgacctccaccaaagcccatataaggagcggagttgttaaggactgaagaaaaacttctctggagaaaaataaaattgcaattctacttaaaaaaattttttttttttttttacttcataggccaggcttgaagttctgaacactttgaagtctccaattatgagagatccagtctaagcctctggcctgctaattagcaataagtgctttatttggaaggagggagtcatccactcttgagccactgcagtgaagtcacttgatctcagtctgggggaaaacacttcaatagctaaacattctagctttgatttttctgaagggaatacacttgttttcaattttggggtttttctttggggcacttgcttgactctgtatgaacttgtgatccaaggaaaaaggagaaagaacagtgttggcttttaaaatcaggatggttttatgtttgctacgaaataaggcaagaataaaaaattcgtatttt

SEQ ID NO: 233501 - DNA, 528 bp, Homo Sapiens
tacatgactttaagttttatgcattacgctcttaattctattacaaaatgtggactcaccaattgctttgtgttttccatgtgacctgttacttcaggctacttggggaacatcttagtcctctgtagctcctgaacccagcactggtgcttcaagagagaaggtagcacgtctttgttcaaaacaaaacaaaacgacacttctggaggccacatcctgaatatgaatgttctactaagtcactcagttatggttctaaagggaaactgtaagaagacccacaaggagtggaccaagactattatttaattgcacaacttgaaactttgctgccagaagaggcagctccattcctttgactccagtgttgggctgttaactgctgcacctcattgcctttttttgtttttgtttttgttttgtaggagggtaggcactgttgggccatatgcacaaatattgtaactcttggtatctttactgcatcatagtcaataaacttctttgtaccctttggctaaaaaaaaa

SEQ ID NO: 233502 - DNA, 519 bp, Homo Sapiens
ccatgcataaagctgagagagttaactttacaaagaagtaatcaaatagatgaaaaataccccctaccaaggtagcccatgtaagaactaaggaaccaccaaaatcacgcatatcagttcaggagagaaagttatcatttagctgtttgacacgttgaatcttttccaaaagcaatgaagctagttcttggagtgcagaagctctcttgtgctgggccacttccctggtctcaaccaagagagagttggctccactaaagcagaaattctcagtcccatccacaatcactgacttcttctaacaagtcttctgaaaatctctttactaatttctgaaatgaaattcagaaataatataacctacctatgcatataatttttaaaatcagtgtaaggtctaaattgaaacataaagtagaaataatttacatgatgacatatataacattaataatgaataattattatattaatagccttacaataaataaattggtttttaaatacagtaaaaaaaaa

SEQ ID NO: 233503 - DNA, 553 bp, Homo Sapiens
caggacattaacgacactgtcaggcttctcaaggagaagtgccttttcacggtacagcaagtcaccaagattttgcacagttgcccctctgttcttcgagaggacctgggtcaactggaatacaagtttcagcagcctcgtcttacagcgtgactgcaaagaaaaagacttttgttttgcaaaagaaaagcagctcggtgactccgtccacatcgccacagttgagtcagatggcagtggcagtcctttgccagtggaaggagttcctgctaaggggaggtgcaggaggactaatttattattgtgcaactgccagtcctgcgcattccagctacgctaagcgccctgcccaggcacgtaacaaaacatagacctgttttgaagtggcttgttacccaagggtgcctcactcatctgcgccaccaggaagatgaactgtgagggctcctataaggggcaggaagagcaaagctgtcctaggccaaccagagattcatctttcatgcagtgacatgttgataaaaaatgatggtcagtatgaaactgggaaaaa

SEQ ID NO: 233504 - DNA, 549 bp, Homo Sapiens; identical to SEQ ID NO: 152858

SEQ ID NO: 233505 - DNA, 471 bp, Homo Sapiens
aggtagtcagacgacaaagaaagcatcagccatatccatcaaacttggatcaagtgtgagttgttatttcatatatgatgtttgtaatgggtcttaaggatttgctttggaaacgtggcgtttactaggttatggtaaattaagggtgaaaaggtacattgtttgagaagtaatctttgacgtatgaacttagatgattagcaccctgtttaagaagggtctgaatgaattttatctcaaagctgttaagaaacaaagatttggaatattaggaacaactattatagggaatatgatttataaaataataaacttagaatttttctgcgttggctgggcacagtggctcacacctgtaatctgaaaacttggggaggccaaagtgggaggaccagttgagcccaggaatttcagaccagtctgggcaacatagcaagatctatctctacaaaaaataaaaatataattaaa

SEQ ID NO: 233506 - DNA, 570 bp, Homo Sapiens
tcaataatgaaacagattcaatttccatcacccagtgagacaccatgggattagaataaatttttaaaaaaacaaattgaaaaaaatgcatttttaaaacaacaaaatcagaaaggatgaaaggtgatatttctagcatatcagtttgtggtggtaaattaattaccttatacaaaggcctcagtgactttcttctccttacctaacgaatcatctttaaaataagtaaaataaagaaacaagagcagcagcagatgcttcctaaaaagaagttaccaaatctgttcaccacaaacctgagaattcaactgtggacatttggacaccagcaatgaacatgaaactcagcttatgaggcatatttggctaaaggtcaaggtgacttaaagttcatcataggacatctacaatttgcaaagcaggtgactggatatggactccttccaagtctcatttaattggataatgcctacgttttaagtatcagaagtgagtctttctctattaaatgaagtcagttccactaaaacctaaatcttgtttggcaggcaaaaaaaaaaaaaaaaaaaa

SEQ ID NO: 233507 - DNA, 548 bp, Homo Sapiens
acaagttcacagagctcattattgacaaaaccagaatttgaatacaactcttctgattccagatttgctggaaatactgtgaaagaagaattcagtctggtagtattacgtgtggttttaatttttttttttaactttagtttgaattttatgtgtgtgtgagcatctgcatttacttttaaaaacttttattgtaaaagccttcaaacatatacaaaagtagagaatacaaagcataatgaacttaagtacctattagccagcttattaaaacatggtcagtcttgtttcacctgttacatcccttttcttttactgtctaaaggaaggaaagaagaatcacaaatcagtttatgaagtctgctttctaaaaagtacttaagtgtttattgccaatatcttattttggtcagcaatcaatcacgtactcaagcatacttctcttaccttcagagaaattaaaatttaatcagcaaaactcatcagcctgtacatttaaaatatatgcatgttattgtacagaaactataccttaataaaaagtgaga

SEQ ID NO: 233508 - DNA, 353 bp, Homo Sapiens
taaaatacgaggaaagtagagaggtatataactgttgttggggtgaattagatagttaatgagaagaaagtcagaaaactactgaaggcaaccacggtgaaattggcttccagatcaggccctcaggccagataggtttggccttgatggaaagaccattagaaagtatccaaagctgccattatagccttaatcatatgacctatccatcctcagtttctaacttggtaaactgagtgttagattacataacttctgaaatctcttccatcttcaaagtctgaattttgccctgaatgctttttagctcacagggaactagatttcaaggacctaaccacagatatcttaaa

SEQ ID NO: 233509 - DNA, 527 bp, Homo Sapiens
tgcttgccactgtagcaacacaacaaagccatgattgtaattaatactaggctaaagaccttgatcaaaatgggagctcatttactgttctatgaggtatgtaagtaacttctcttcacattttccctcagagataaaccacacgtggtagtcttgtttgcgttagtactaaggtcatgtttgatctgtcccagacgagtcgcatatttcctgtagctggagtgttgctcaccataaatggtcattttcaaaaagtattgtgtaaatccagctgtacaactgaccagtgagttatctgtcatcactgttgcccacatacccgtccttccttgtgtagtttcatcatcctcatccttcccacatcttgcgcaaaatgattttctgtgctcattcggcaataactatgttattcggcatactgtctttttggcatttgttgaaaaatccaaatgcttttaatccaaaagattaatccaaatcttttttaatccaaatgattttaatccaaatccaaataacaggaggtt

SEQ ID NO: 233510 - DNA, 528 bp, Homo Sapiens
tgacttaaaacaaaaggaaagaaactacctttttataatgcacaactgttgatggtaggctgtatagtttttagtctgtgtagttaatttaatttgcagtttgtgcggcagattgctctgccaagatacttgaacactgtgttttattgtggtaattatgttttgtgattcaaacttctgtgtactgggtgatgcacccattgtgattgtggaagatagaattcaatttgaactcaggttgtttatgaggggaaaaaaacagttgcatagagtatagctctgtagtggaatatgtcttctgtataactaggctgttaacctatgattgtaaagtagctgtaagaatttcccagtgaaataaaaaaaaattttaagtgttctcggggatgcatagattcatcattttctccaccttaaaaatgcgggcatttaagtctgtccattatctatatagtcctgtcttgtctattgtatatataatctatatgattaaagaaaatatgcataatcagaaaaaaaaaaaaaaaa

SEQ ID NO: 233511 - DNA, 552 bp, Homo Sapiens
cccatcattgaaaataaatattattcctattttacataagagaaaacagagtcctggggaagtgaagaatcatgctcaagaccacattgctaagtgtgagagcagatttgagcccaggctacctggtcccaagacccaaactctcactttacatagctctgctgcactgctcagggcctcctttcccaactcttgatggcaagttacacaaggccccctgaaaaacccagtcctacttacataaaatctcatcactaaccattctggtcatagaaagccattctctaaatcccaaatatcaatactcagagccttaattggaaaacttcccgaagaacattgagtttagaatatacctttgcaaaaagagaaaataaacactcgatatgtttaggtttttaattattgaattttttttttacttgcagatatagtcataaacgttttaagatccataagcaaactaaagcaattatgccaataatgactaaggccactgcttcctcaattgagtctttgatataaaagccttcacttttggttaattaccaa

SEQ ID NO: 233512 - DNA, 516 bp, Homo Sapiens
ctcaataataccaagacaaacagctcaattttttaaatgagggaaaaatttaaatatatttcacatgagaatatactcaaatagccagtgagcacatgaaaagatgttcagcatcattagacattagcaaattgcaaattaaaaccacactgaggaacccactaggaatggctataatcaaagacgatcagtatcaagtattgcggagaatgtggagaaactcaaactctgttacactagtaatagaaatataaaatgttagaaccactttggaaagagattggcagtttctggaaaaaattaattgtaaatttgaccaagcaattttactacgtaagtatgttaagaatgaaaacgtgtgcacacaaagatctgtactaaaatgttgatagcattattcataacagcctaacagtgcaaatgtctgtcaactactgtgaatggagagacaaaatgtgtttattaatacaacaaaactacccagcaataaaaagaaataattgactgataaaaaaa

SEQ ID NO: 233513 - DNA, 474 bp, Homo Sapiens
aacttaattagacatagggtatatataaactcaattttatctgcattttttaaaaaattgaaataatctgattgcatgtatgaaggactcctgcctcattacccaattacataaatacaattatctataggaaggtgaaattgttgatctattatttcaaagacttgtagactagcaaagattcattctgattagaaataaggtctatagctaaagatatttttattttaaaaaattacagcccttgtaacaaaaatcatttgtaacattggatatgaagacattattagtatttaaaattattgtagtcatttgatcataaatgaagtagcttgcaaaatagacttggtctttgaccctttaaggtgtaactgactgactgttgtgtttttcaagactgattttaggcagttttatgtatcgtgtaccaatgatatgtaaaataaagcaccttttctactataaaaaaaaaaa

SEQ ID NO: 233514 - DNA, 648 bp, Homo Sapiens
attaatgttttctctttaggtacaatagaagaaaagatctatcaaaggcagatcagtaagcaaggtctttgtggggcagttgtcgacctcaccaagacatctgaacatattcagttttcagtagaagaacttaaaatttgttcacattacatgaaagttcagattgtgttactcatgatctgcttgactgtgagtgtacaggagaagaagttcatacaggtgattcgttggaaaaattcattgtctctagagattgtcagcttggtccacatcaccagaaatctaactccctgaaacctctttctatgtcccagctgaagcaatggaaacatttttctggagatcatttaaatcttacagatccttttcttgaaagaataacagaaaatgtgtcattcatttttcagaatataaccactcaagctactggcacatagtgaaagattacttctgacattccattgctcttcttttgaaaattagtatggtaattaaatgtactttttgaaaattaatagaattatttaaattacagtatatgttgcaaaatatatcacttttgatacaatagtcaaaattgagtggtttaatgttttgtaaatattaagtgtttaaatgaaaaataaagatgtgcttatatcattgtaa

SEQ ID NO: 233515 - DNA, 509 bp, Homo Sapiens
tttgatcagcctaaatattttcttggcaaacggaaattgaccatgccatgaatatgataacaacctgcttggaaaaaaagctattttgtttccaagcagcagaaaaaaaggggtggggggacggtgaaggaggctggctgttaggaatgcctgtaacagattccagcacatacatctttttgcagtctctgaagcagctttgtgaaaactgccttttctctctcgtgaagcttctttccttcctctcctcctctcagttaaacacacacctggtctcctaaaagcctttgatactctttattaaaaaatagaacttcaatggatgcctcaggagactttccctttaaaacatagatgaaaggcaaggttaatacaatgttctcttaatccctttgccttctgagtcaaaataaatattttcttctgcatgtgattgtacatcctgccatttggctatggctataagcaaattgacggtaataaaaatgttttgaggctgtgtaaaagaa

SEQ ID NO: 233516 - DNA, 552 bp, Homo Sapiens
  misc_feature (118)..(118): n is a, c, g, or t
cggcacgaggcctgacctcaagtgatccacccgcctcggcctcccaaagtgctgggattacaggcgtgagccaccacacctggcctaggagttaagagtattaaatgttaagaacagnccaagtccatcaaacagctccacacccttgttccatgttctggattggggagttgtgggggtggaggtgtagaacttttaaaaagcttcttaaaataagttgctgtgaatacttcaggtatataaaaaaacattggttgacaataagccagtgttctgccattcttacctgcttatcaagacaaaacctgctcaagtccctgcccagctgcattccaagtgttttcaagtttggtggtaagacctgacctgaggcttcttataacctttactcagtgcgcatatgcatacagttcactacagaaatatttgtgtttacttagaggaagtgccctggatctgggggcgggggggggcggggggaatgggtcttttctaaattgttaaaagcagttcatgccattattcttaataaacatttctaatatgctgtga

SEQ ID NO: 233517 - DNA, 566 bp, Homo Sapiens
ggccactgtgagtgggctgcccccaacatgagtcggctgtctaggactagtttatctctgcttctcactttactggtattatggggcagctcctgctgtcttccaatttggtgtttgtaaaatgagacataaaaagcaggtgacaaggataccaggaagtgcacaggtctgagtggagtatggggctgtctccaggggagaggtggctgtttggagggaagggtgacaatggataatcagggtccatgggcatccctgcttgttttggagccatggacactcaaataatgtgattttatgaggctattggagaaaaaattggccacagggccaagagggctgggaggaccccagctctccgactggtgtttgcttctctgccatcagggtcgggaggccatgccaagcattgtgatttgcagagtccatgagacaggaacactcccaccacagtgacctgcctctgcacacagccagaatgtagctgactcctttcttctcccacttgcatgcttccaagccttcaaaacatactcatctccatgttctgtgaattagcaattttt

SEQ ID NO: 233518 - DNA, 557 bp, Homo Sapiens
acgtttcaaattctttataaaatttgcttagttaaaaaagtaccaattgcataatatggttataagtctggtagaagttaggctttttacaagacatgctgcttactgcaccaaggaggcaagaaggctttttagagagcccagaatttcctttcctcaactcctgcttccaagacagtcattttgcatgataaccgtttccccaaaaaacacagacacaaaatttaaagaactggaacagaggaagcagagcttatcatagtatatatgtttagtaccctgtcacttaggtccacccctctttctttgtggattgtggacattttgtttaactgctaaatcatgagaatatatgactgctgagacttttccaaggattttttaaaaaacacattaggctttgtgcagaagtaaagaaaaagtgctgtgagaaccccaggtaggtaatttactttctattgtactcatagtttgtttgaaacctcttcacctctatcccttattgttttatactctgtaaatctgattttacctttaataaacttttctgaagtgaa

SEQ ID NO: 233519 - DNA, 540 bp, Homo Sapiens
agatcaggcttagtggtcagcattcctagtacttggaaagttggtattttttacaacagatatatgtaaacatataaaaatttcaaaatgaatgaaaaacagtgactaaatgttccacttcacagttttctgctgaatttttttttttcaggtactggtaatattttagagtttgttaataatttatattgccaacctaccataaaagagattatgatggtatttttctatgaccctgagggtcttaagctattctgagtcagaatacagttgacccttgaacaacacgggtttgaactgtgtgggtccacttatacatggattttcttccacctctgccacccaagatagcaagaccaaccccttctcatcctcagcctattcaacatgaagatgacaaggatgaagaccttcatgatgatccacttccacttaatgaatagtaaatatattttctcttccttataatcttaacaaacattttctcttctctagcttactttattgtaagaatacagtatataatacatatacgaaaaa

SEQ ID NO: 233520 - DNA, 528 bp, Homo Sapiens
agcttcaattgaccaatcacataacagttatatgtttggggggaaaaagaaaagtttctaaaaaatgtagcccattacatatatgggtatgaaagcagaaaagtggaggaggcagggatatcattgacaaacacctttgccagtttctttgtattcgtgattttttgtgctattaaatgcagtattaaaacaagaaaagcccacctgggctagtgaaaggagaggaaataagggggcttgtaaaaggggagccgtcgctccaaaagtagagaagacaagaaatgctgtaagataagcaaccaacgcagacaggcctcagctaagagtatagtgtgtgtgtgttaaaaaaaaaaaaaaaaaaaagaaaaaaaaaagctgtatgatatacttgagcaaatcaatgaacctctttgcgattgttttatcatctgtaaaatgcagataattcctaccttaaagggttattgttaaagataaaatgatataaaaatgtgtcaaagtataaagtaaaaggcttggaactttaaa

SEQ ID NO: 233521 - DNA, 563 bp, Homo Sapiens
cagggtaagtattctgtaagtattagctatttggtctattttgttggagtaaagtgggttatagttaaaatcctaagatttttaaagtccctcaagttcatgtggacatctgcctaggtcctactatcctagaattcgcatgtcttatcacacaaataactgattcttccatatcttataaataaaggtttgatttagcaaagtcacatgttgtgtaatagctcgaagaagccctttttgtccacagttgccagagcttttggagaacagtccttatgttattgaaacaaacctaatctgtagctgagttgggagggagctaagtggacagagagtcctccacccaaacaaaagaatctttgattcttgggcataatgggagcaatatttaaaaaaaaaaaaaaaaaaaaaaaaggaatgtttggggaagactcttgcggtgcaaaggctgtttcagattgctgagatcagaccttaagtaccaaagcccaaatatagtacaacataatacaaatgagaagaaaatagctgaagaataattcgagtttatacagtacaattca

SEQ ID NO: 233522 - DNA, 360 bp, Homo Sapiens
aaccaaaattcaaaccaaatatgtcaggttccagagtgcaaacttttcaccactgtaatataagctgtctgcatatttggcacagttttcaccatttgttaagcatgtggcccaaacaatgcaagaaggatctattgagcaactacactgtgcccccagcattgcagctgagggaggaagggcagcattctgctttctgagcactgtgacttccttgtcaaagcctaacttctaaagagccatttacctaccaaaagattttgctgctgtaaagaaagccattgcctggtacatgaccatagcaagggttagcaaactgtgacccaccaccagtatggcccataagccatacaaatagtc

SEQ ID NO: 233523 - DNA, 520 bp, Homo Sapiens
aaaatacatttttatataataaaataatatttgagtcaggtatgatagctcacttctgtaatcctgatgcttttggaggccaaggcaggaagattgcttgaggcaggaattcaagaccagcctggggaatatagcaagactcctgtctctacaaaaatttttaaaaccaccaagaggattgcttgagccccagagttcaaggccacagtgagctatgatcatgccactgtactccagtctgagtgacagaataagaccctgtctcttaaaaaaatatataaaaaaagagtatttgaaatcaaaagcaaatatacttaatagtaaaactggaatgatttccattaagttcaaaaacagtataaagatggtcactattgacagattattcagcatcattctattattctatctaatggagtaaggctaggagaagaccaattttgagattcaattaaggaaagctgttgatttttttctatacttatatcttgaaaataggtaacttttactgttggatagc

SEQ ID NO: 233524 - DNA, 559 bp, Homo Sapiens
acccacatttcctatcctggttagaagaaaattaatgttctgacagttgtgatcgcctggagtacttttagacttttagcattcgttttttacctgtttgtggatgtgtgtttgtatgtgcatacgtatgagataggcacatgcatcttctgtatggacaaaggtggggtacctacaggagagcaaaggttaattttgtgcttttagtaaaaacatttaaatacaaagttctttattgggtggaattatatttgatgcaaatatttgatcacttaaaacttttaaaacttctaggtaatttgccacgctttttgactgctcaccaataccctgtaaaaatacgtaattcttcctgtttgtgtaataagatattcatatttgtagttgcattaataatagttatttcttagtccatcagatgttcccgtgtgcctcttttatgccaaattgattgtcatatttcatgttgggaccaagtagtttgcccatggcaaacctaaatttatgacctgctgaggcctctcagaaaactgagcatactagcaagacagctcttctt

SEQ ID NO: 233525 - DNA, 510 bp, Homo Sapiens
attgctgtgaagaagaaacattccaggaacgagtggctctcggatgttaccatctagagaagagacaagcccacagtggattgggaggcccttgaagaatcccctcccacagcactgacagacagagctggaagataggaaggatcaggaagtcagaggcgtagtctaggaaatctagcccctgataggagtttcagaaaaagaaaagtgtcccgggacccaaaggctttgcatttccaggttaaaaagtccaccagaaagtccgcccaagaatggaaattacccaaaccacaatgcatcgctgtgaaatttcacaattcctggattaaacaaaggccctgaaagcttccagagcaaacagatcacataaacagctcaccagactggggctgggcatggtagctcatgcctgtgatcccagcactatgggaggccaaggcaggaggatcacttgaggcccagagttcgaggtcagcctgggcaacatagcaagaccacatctctaaaaaa

SEQ ID NO: 233526 - DNA, 559 bp, Homo Sapiens; identical to SEQ ID NO: 152469

SEQ ID NO: 233527 - DNA, 597 bp, Homo Sapiens
  misc_feature (27)..(27): n is a, c, g, or t
  misc_feature (46)..(46): n is a, c, g, or t
gtattactatccagaaagaaaggacanatgggatgtgaagaactanagtgacatagttaaaaatttaaccaaatttaagtgcttcctaaaatttggtgaatgtcttattttttaaaatgataataccaataaggaatgttggcacataattcccatttcattataaaacctctttaatagaatagaatcaaataattggaaatggcctatagattaaaaagctgagaaagtatatggtaggtagcaaactccccagaagtatgaactctggattagacatctcagaatacatgagcactcatgttggcttgctttgtagctatgaacttaccctgtattattgaaatgtcagcataatgactggaaggtgaaattggtccattttagagcattactattatgctatctgtccatttaaattaataattgcattaaattcattttagaaggtgctattacattagtagtaagaaagtaaattcatatataaatatttgattatcagatggtttacttacagatacttattttcctgtaaaataggagagtttacctgaagaaaaataaaacttttaacttttctgggaaaatcaaaaa

SEQ ID NO: 233528 - DNA, 526 bp, Homo Sapiens
cctagaaaaacttttaccccgtgtgaatgggaaaacatacagcaatgtaaatgctgcattattttgaaatactaaaaacttaggataaattccatataatggaatgcttatgcaccaattaaaattagagctacaacacaaataactctcaaaaacataagattgacaaagaaaaaggaagctgaagcaggttatatacagtataccatttatgtgcttttaaacatgaaaaattatattgtttaagtgatacattaggaatgcaaaacattcaagttttagataatggctacctcttgaataaaggggatttcagccatatctagtatttattttttaaaagtaaatatgataaaatgtttccttttgtcaaaggtttccttttgtcaaagctaggtgttttccctatactctttatgttcaaatgtgctttagtgggtaacagagagtcatcagtaacccagtcttgaaagccatcagttgcagtgggttctgcctataaacccagaggtgaatgcaaagcaaa

SEQ ID NO: 233529 - DNA, 442 bp, Homo Sapiens; identical to SEQ ID NO: 100882

SEQ ID NO: 233530 - DNA, 447 bp, Homo Sapiens; identical to SEQ ID NO: 152758

SEQ ID NO: 233531 - DNA, 523 bp, Homo Sapiens
atttggattacatttgaataaggataaagggcatcatacctattcattcctcttagatttctaagctgtatttcagtaaattgattctcaaagagtggtataactggatcataatatccttgtttgccactcaagaaagtgttccataacttaagataacagtggtgggaaaaatcatttaagaccttgtttcatatgctttaagatacaagaaatagagataacactgggaacatatgaaactttgtcagcatcagataatagtgttgtagcgacttgaaacattttttgtctgtgattgtgccagtcactatttgtgacttggattgaaccttgatatgactttaaattcaggttgatgttttaaaattatttctgaaatatattgagcttattgccctaaattaaaactatattctgtaattttacatgagttatgtaagttttctgaagaaataaggaggaatcctttaggcacagactgtcaatctacagattacataggagatggcacaaatggaaa

SEQ ID NO: 233532 - DNA, 492 bp, Homo Sapiens
ccacaaagccgtgaaggtcttctctggaggcctctggcagctatgcaaagcagtccacaagtggagaaagctacattctgcattcatactgttccatgagccacaaagtttagctatgccaacaaaagctgtgacccccttcatagtaacaggacctacttatttctgaaccacccatacagtgacaacaaccctcaagattgaagaaggctgaaacaataaggccttcataatagcacaaaccggagaaatgggaggcaagctgttcttaggatcatgacttggagggtagaaaatttgtcaagattgatgtgatacccacaagatctctgaaagacatagtccgtcttttcaagtcaacgtaagaggcctctgggataaaaatgggtaacgtccatggcatgacttatcagacagaaaaaaatgacaaaggaagaagtgctgaagctactcaacaaatccttctgtgactcgatcagaaattaaaagtta

SEQ ID NO: 233533 - DNA, 315 bp, Homo Sapiens
ccttccctctactcccagagcccgcccggcaggaccaccgagcaaggccttggaaaaccagagagattagagcgcagaatggggaaatggagagagaacctgaaagagccccaaactcgaggacctattgctccccaagaataacatcttccagaagaactagacagaaaactaggcgtctgggaactctgaaatccttggaggagtagcatcatcatgaccctctgtgttccttttggcaaaggacttgctcccattgtttgcttgttccattgtctgtctgttaaataaataaaacccttttcatatatcttt

SEQ ID NO: 233534 - DNA, 427 bp, Homo Sapiens
ggggcctccctcataaaccaatgcctttcaggtcgcagggatgggtcgcctgggtggtccgggggctctggcagcaggggaactgggccctgaagcagtccctcagctccctgttgaagaggaagcacacgacggggttgatgccggcctgcgcgaaggtcagccacacggaggccgtcaggtaggcctgggggacggcgccgggccgcaccaggacccgcaggtagctggccacgacgtagggcccccagaggagcaggaagagcagcgtgacggcgtagaacatcttgcacagcctcttctccgtcttgaattcttccagcacgaggaggcggcgcgcgccgcggcccggccctgcgggccggatgcccacaagcgcgggcggcgtgggcccgcggccgaagcccgccgtccagttggcggccgc

SEQ ID NO: 233535 - DNA, 544 bp, Homo Sapiens
tcatgactgatcgcataatttttaatgtaagtaaatgagctcactaagggtaattaaatactagcttttaaaatttaaagttctcacgaatattagtgcatcttgtcactttgatttgtcacctggttaaatagctggaagcttgtgcaaatgaaaaatgaaatggaagactacatttgtatatatatctgtataatttttgtttactagtaggttcagagagagatctgagatgttccttaacatgtagccatgtaattagaactcacaaggggcattgaaatgtttttctttttcagatagtctggggctatttacttattttaagtaagccaagtctaccatttgaaaaatggtgctttatttccatatctgaagcctgaagttattttttagtttgttttcatctaaaagtggaaagatttttgcttctgcgttattaagagcctctttgtttggaggagatggttatctccttcactcattaacctttgagtgcttgttatctacaaagatgaataaaatctttcatttattatttaaa

SEQ ID NO: 233536 - DNA, 507 bp, Homo Sapiens
  misc_feature (24)..(24): n is a, c, g, or t
agtccagcagagcagcacggtgcncaggacacagagctcagtgcaggcactggcaacttctatttggtatgaagcactctattcagtcaccaccatataggtcacttctctcatactcggtcttgaggatattctggattaatcctttctatgcagacgtttctggtttacaaaaggacgcagccctggactacaagtctggaactgacaagttcttatgaccttgacaaatcaccttaacccatctgagccttaaattctcatttatttcctgcataaggagatttggctaaatgctttctgaggtcctttggagtcctgtagctccatggtaatgtgctcctttccttgaagactgggggttttgtaatgttgagatactttgcctctatgcttctcagctcatgaccagtcctagaagaggagtcgagacataagccaccttcagaggttcaatggaaactttaaaaccataccaaactcttttttaaaattagaattaacaaa

SEQ ID NO: 233537 - DNA, 496 bp, Homo Sapiens
aattttttaacaagagaccccacatttttgttttgtactgggccttgtaaattggttgtggctttacttgaatctgggagtagtgaaagcaggttgagaaaagagcttcctacattgtgttccacttatatgaggctgatggtagaatccttttgatcccaaagattattattttggggctttttctttaggataattaatcctttatttgggactctagcagaggccttattcttctctgggaagaagttttgcataacagatgcatactacttatactaacaattaccaatgtattcttaatttggtttcagctatttggatggctcttttgcaaagtacatcctgttgctattgtgtttgctatattagcagcaatgtcaatacaaggttcagcaaatctgcaaacccagtggaatattgtaggggagttcagcaatttgccccaagaagaacttatagaatggatcaaatatagtactaaaccaggtaggaa

SEQ ID NO: 233538 - DNA, 453 bp, Homo Sapiens
aatataacatattttaatacattgtgtgtaatgtacatatgcatattgtctatgtactatatacacattgtttataatattgttattacagtttgtcattcacctgaaaggagaaggaaaagtacgaaaggtttctctgcttgggaaaaggtgaatgttgttatatcaagaacgattacacacatggatctcatacatgtttttagaacattgttcttctgattgaagaagtctgatgctcctgaaaaatcttaaaatatctgacttgtattgaagaaaattatttaattaaatttttaaaggctggttgaaaaagtctgacagttctgagaattttttaaatgtctgaattgtaataaaaaaatggtttactttaaacttctaaaaactaatgaccttgtgactaaagaaaaatcatttgaagtgtatttaaaaatagccaaacctttaaaa

SEQ ID NO: 233539 - DNA, 597 bp, Homo Sapiens
tgactatgtacatggatttagtggacggcatctttttgaaccaaattatgctgcaaatagatcccaggcccacaaatcaacgcatcaataagcacgtcaacaatgatgtgaaccttcgcattcagaatttgaccatcttggtgagaaacattaagacctactaccaggaagttctccagcagctgattgtaatgaatttgcccaatgttttgatgattggcagagacccactgtctgggaagagcatggaggaaatcaagaaggtgctgctgctggtgctgggctgtgctgtccagtgtgagaggaaagaggagttcattgaaagaatcaaacagctggacattgagacccaggctggcatcgtggcccatatccaggaggtaggtgcgtggcctcgtggtgggctcagctgtggactgctgctcctgtggtggccgggaggcaaaacttctctatgagtggaaacgtttgaagaatacatcacccattacgattttgctaatcttaggtttcagacaccacagacacattgattctatttggaaagatagccatcaatcagccagctaaaataaaatgagggtaaaaataaaaatt

SEQ ID NO: 233540 - DNA, 539 bp, Homo Sapiens
gtctgtcaatgaaggaatagataaattgtaatatgttcatataaaatgctgcataaataagtgaaatttataaatatactaacgaatgaatcttgaaaacagagttgggagataaaagcaagctgttgaagaacatggtcagtatcctctcacttatgtaagttaaaaactccaaagaacattatctatattggtaatggcatagacatgtgtggtaaaatataaaaatattaactaaaagttctatacgcttcaggatattgttagtataataaggcaggaagtggatagcattggggtgagacagtggtttggtggttatgtttggttactttagttatgttagtaacattttttttttaaagaaggatctggaataattatggtaaaataatagtatttgctaagactagatgattggtgtactggatttcatccgctattttctaagtttgttatgaacgcttaaaatatatatgtatgtagtaaaattaatgtaaatttgtacaaataaaaataaatggcatgtgatatatggc

SEQ ID NO: 233541 - DNA, 511 bp, Homo Sapiens
  misc_feature (492)..(492): n is a, c, g, or t
aagtatcccaaggctgctaacaagttttcccaccccaacctagcccatatattctaactataaagattagactagacaaggccccatgcaaaacaaaacaaaaacaaagacaattcaggagaagtaactgcccaaatcttatctctgttataatacatgagctaaattttaaaataatcagtgggttgtagttacgaatggtaagttcaagtatctgttgttacaagcagagttaaacagtccacacctgacacctcaggaatttaagttataaaagtatttgatatttttaaagaataaatacagaaataatgcctatttaggtagaaaaaaaacttttggtgccatctaatatcaatctgttctattagtaactgacataaacatctcatgcaaagaaatagcttagaaaaagtagatttgttccaatggtgtccctgatgccaagtctgatgttaaagctattttgtaaaataaaagaatataattagncgaaaaaaaaaaaaaaaaa

SEQ ID NO: 233542 - DNA, 468 bp, Homo Sapiens
gtaggttctcgtcatcaggagcatgacgtacagatttggtgtgagtgcagtcctgctaacctgctgcgggatccgagtacccgctttataggagctttctccaagtacccactttataggagtgggaagcagtgtaggaagtaagtacgaaaagcacttttaaaatgctgttaaagggctagagacagaactaaccacaatcagggcagtccctgctgtagctctggcctggcctccccattcttgcctgactcaagacactaacttagttcctggttcggtgccctgttggtgctcctctgtccagtagcttagctcccacggtgggggaggaatcgaaggggctctgcagcccccaccagctgccctcgaatcccatccaggccagttccagattctaaactgaattttcttcatattgtcaaaacgggaaacaaaaaaaccctaaagcaaaaaaaaaaaaaaaaa

SEQ ID NO: 233543 - DNA, 484 bp, Homo Sapiens
aattcggcacgagggtttctgtatgcccgaagccctgaaccatgctgtatttatggtatttattgtaaacacctgtttttgtatgattaagcccttgggctacactgtaccagtttgactggataagtttatcctagaaaagtgatttatgatgaatgcctggttttgctctgtggtgaagactggatggagtctgagtagctgaggtcattcatatgggcactgcatgcctatgtgactgacccccaacaaaaactcttgataccaaggcttcggtgagctttcctagcaacacttcacatgtgtagtcacacattcctcctggaacaattaaggacatccctatgtgactccactgggaagggttacttggaagtttgaacttgatttctcctggacttaatccatgtaactcctccctctgtcaactgtgatatatccttttgctgtaataaactgtaaccatgaaaaaaaaaaaaaaaaa

SEQ ID NO: 233544 - DNA, 550 bp, Homo Sapiens
attcagacttttgagaacaggtcactgcttgcctgtaactgatttctctgagttcagaggagggagcctatagacctgggaaccaggtatctgaggaagaagcacccagtaattggagctggcatctcaagaaggcacattgagattggttctataagtgttgggaaacccccaaattgcaatcagctgctactactagcaggcactattgctttcggagtgaagaattgttgctagagtgagacttaacaggattaagaaacccatccgaaggaaacagcaaattccttcttccttctctacctgtgaagtgtcacgctggtccctctattggcagagcctaacagggagacagaaatgcttgcagaattccaaagagtgggtttgaagccaagagacagtagcttactgtcatggccttaattataatacaagtggaagataatagaaataatactttaggtatgtataattgggtgcatgtagacattttctgggatactaactactgggtagacatttggccttattgtaaaaaaaaaaaaaaaaa

SEQ ID NO: 233545 - DNA, 307 bp, Homo Sapiens
cggcacgaggctggcgtgggccctctccgggagggggccgagcctctcctgcccgggcttggtcctggcgccagcctcaggcctgcaggtcctaacctcagccacttccagtgtggggttccccattcatccgccttttggagtagggtctgcgctgaggcaggggaatgggagaagtttgaaagggagagagtaaaaggaagccctggcccctgacagctttgacagtccatcaggggaataggttgtagcaaatagaaagcactcaataaagtttttatattgctgtgaaaaaaaaaaaaaaaaa

SEQ ID NO: 233546 - DNA, 614 bp, Homo Sapiens
cggcacgaggtgtaaactgtttttgagagcatctaaatgtagttttatgagtagcattgttaccattgtcgctgttctatatgctgaatcttgtttaatttggaagctccgtaattcacagtgatttgtatagtggggtcatcactctgtaggagctataaatggagactctgtccatgatttccaaaaggtcatccaccccagagtcacatgagactggaaagcaaatctttttcattaattggcttcaagtactttcagcttcaaatggaggtctctaagggtccttggctggcacatcaagggggcatttcaaagaaagtggcaaaatcttgactaaacttcagagcaaacacgcactcttttctttgatactctctttctaaaaagaaaaacaaattatactggtctgggttgtgtgagcatgtgtgtatcagcttgttataattctcttttcccaaccccttctttgcttgtcccattttcaagataggataacacccaggtttttatattaccttctgtgttaggactttcttaggattcctaaaaattttggctaagtagcattaggcatgctctatttcacaggtaggcataaaaaaaaaaaaaaa

SEQ ID NO: 233547 - DNA, 654 bp, Homo Sapiens
tggaaggagatgcctgaagacagagcaagcactccccgcaccacgacgatgacgttcacttgttttgtgtttttcgatctcttcaacgccttgacctgccgctctcagaccaagctgatatttgagatcggctttctcaggaaccacatgttcctctactccgtcctggggtccatcctggggcagctggcggtcatttacatccccccgctgcagagggtcttccagacggagaacctgggagcgcttgatttgctgtttttaactggattggcctcatccgtcttcattttgtcagagctcctcaaactatgtgaaaaatactgttgcagccccaagagagtccagatgcaccctgaagatgtgtagtggaccgcactccgcggcaccttccctaatcatctcgatctggttgtgactgtggcccctgccgtgtctcctcgtcaggggagacttttaggaggccgcagccttccatcaccggatcagtttttcctcttaggaaagctgcaggaacctcgtgggctccagggacccaggcccacatccatccagcgttcccgctggctgtgggacagacagggaggggcctgtacagaaacaccacactgtttattaaatcacaatgatttttattaaaaaaaaaaaaaaaaa

SEQ ID NO: 233548 - DNA, 667 bp, Homo Sapiens
gccacaaaaaaataatccaggtaaacattttaacctgtcgttaagtgtgtaacctcaaaaacccaaaatgcttattttaatgtgatttttctaaaactattgaaaaattaatatttgtataatctattaaaaaaaatggagaatgttttctctcaaatttcctctgacccatgggaatgaaaatacttaaatactgtaaagcatatctattaataattcccccaattttttaaactaacaaaatggaatgttaactgaatggaattaaacatagcaattgtcaagccatcaaaattatatatcgaaccacttaggcatgttacggggtaaagtcctcacccctgcatttgagaaatattttattatttttattttaaggcaaaacagtgtttactgtgatgggcagaacagccttttgtatctaggagtccatttgagttctttccaatatttccatatcgttcataaatgtgtctgggggcttccttgtttggaaaatatggatatcgctttgttttcctttgaaagtaattatatcttaagaacatagtatcatgaatggagtagacagggaggctgcagaagccatttctctttgtagataaaaagcattatctatgattgttgtataataaattgatttttacattaaaaaaaaaaaaaaaaa

SEQ ID NO: 233549 - DNA, 653 bp, Homo Sapiens
cggcacgagggagaagcctactggatgaaatttaacagtctcctaaaagttgattcccgggatcctaaggttagagaagtttgtgttcaggatgtcaaattagagaatcaatgggaaacatctataagggagaaactgagagaagagaaagaaggctctgaggaagtgacctgcagtgagtgtggcacgtccttccgtcagggctcagctctgattggacataagcgagttcatactggggagaaaccttatgaatgtgaggaatgtggaaaagcttttagagtgagctcaaatcttactggacataagaaaagaaaacatcaagtatggagtacccatgaacttgatgggagtaggaaatccctctctccagtgactgtttctcagacctcagtagtcagtattttgaccagtgcctgagtataacgattctggtgttactttctgtttttcctacctcttaggctggtccttctgtctcttatattagttattcctgatttcctgacccttaattgtgagattccccaaagacattgtcctttaccttcttattcactattttttcagtgagcacatttacttccaagagtttatcaatcacttcctaatattaataaacacttattagtgcttaaaaaaaaaaaaaaaaa

SEQ ID NO: 233550 - DNA, 740 bp, Homo Sapiens
  misc_feature (67)..(67): n is a, c, g, or t
cctagtgtccttcctataatgcaggggctggaaggtgagaaaataaccacatttcccagactccctntgcaggtagatttccagatgtgaattgggttccactgatcagacacccatgtgtgagatttggaatgcagaactgaggagagagccatcttcctcttgcttgtgttctggtggcatgtgtggttgaggagacatttaatttccctgcagcagaattcttgcagtcagttgttgaggcaagtggcgtggtggatgcaaccctgattcttcacctttctcattattgtggggtagcagcgcctctggcaagccagacagacctgcagtgtttttctgggagttaattctggagacccagtatggaacccactcctagcccttgtgacaatattgcaagcatccagttccctgttttacagtccttttaaatgtggctagctacagtagtttgtgtttcctgcaactaatcactcatacatctgtatctaaagcactccacctgggtcatgtactatacttaaaattataaggcaatattaattcacaaaactacctactcgttttatttaaccctcagaagaactgaaaacaaaagctataccaggcttgctctagagcgtgggcttgggaatggaaaggcagagtgcacctattgaattccatcatcagtttttctataccatggagttacttaccatgtgtatacataacactgattaaaaaaaaaaaaaaaa

SEQ ID NO: 233551 - DNA, 556 bp, Homo Sapiens
cggcacgaggcaactttttctgaatatttaaagttcctcttttttctatgtctgcacaaactgcagacctgggctggacccacatactcaagagtccaccttaagaaattattttgatgtccaagacatcactaaaatatttaagtttaaagataatatgtggtgttaatagattgtggtgcttttactatttaaagacaactttcatacttcagatgtttttgagaagaggggaatgtgaggggagggggcagaacagggaggagttgtttgaatgaattacattctttatatccatcctgctcatttggggcatgtctttaagagaaggctgaaagttgtgagagtatattgtataccgtaagagaatcaactcttcatcatggatgggattgtgaaggctgaactataaaattcagcattgacagcatcctcaattaataattcttggtgacagaataatacagctgggctgttttttaaaatataaacaataccatttttaattattacattaaaaattgtaaatatatctatgtaaaaaaaaaaaaaaaaa

SEQ ID NO: 233552 - DNA, 744 bp, Homo Sapiens
  misc_feature (16)..(16): n is a, c, g, or t
tgaatacattttcatntcaatactgtcatgaaaaccctgagcaggcagtacattcagcagcacctttaaaaatcagacagatacaccggcagcataggttctcaatgaaaaaagacaaacatttaaattttccccaacaaagcccattttagtgactaggagtacacatttactctcatgccaaattaaaaacctactttgtttctgcaacaggttctccacaggcaacccatttatcagaaccacgtggacatctttcaactatcctggacaacaaccatgttatttcttagccattggacttccaccttatctttattgagttctgctaaaaagacaacatcagcaccaggggcttcaagaatatcttgtggaggcctgatgatctcaacaggaatttctggaaagaaaatgtgaaataaatacaaatatgtttacattttgattaacaattttaaaaaattggtaacattagaattgttttttcacttaatatgtaccttccacaaaaagtctagcacgagacttcctgtcttctaccccgcaagcatattcacactcatcatccagcctgcaatcttttataatgagtctgtgtatacttccatctttttcaaatttgtatctaaaggagacattggattatcagttagcttgcaatgatggccactaaattgtcaaaagtgtatatatagctacagaaatagagaataaaaagatcttgcttaaaaaaaaaaaaaaaaa

SEQ ID NO: 233553 - DNA, 781 bp, Homo Sapiens
  misc_feature (23)..(23): n is a, c, g, or t
gtgattagccaaatttgattccnaacagtcatttatggccataactattgcatagagtgcaggatgccagcaaagatgagggtgggggcagatactggctcagtgatttaactcacattatagatgaccccttcctcaacagaaatgctactgagagaaccagagaggcctgggccaggcaggtcttatttgagaggagattatttgataattgctttggttagaaggactttacatttcctgatttcaagtccagcaccaatttagaaagttcagagatgaaaccacctgtctttacctgacagagtcataacggtttgtgtaaaaatgtggtcagggaccttttttgttctttctgattagttaatactgtacattgtaaccaggaggggcagttttgccaaccagcctctgctcatggtcaccatatgtgtatgacaaggcctgagtgagttcctgcataaactgggtagtgggctcttttgacacatttgcaagcatgtaaatgaatgaatgacactaccagcaaccatctgtacaggtccatttacttacattcataaggtttatgctatgaaacttcttctcattgtgatgtcagtaacagagttagtgtctctgatggaatagtgtacctgtcacccaagttattttgttcctttttgggtcctccagtataatccccccctcatcccaattaactgtaaaatgttttacacatcacattttttatactgtaaacttggaaaataaactgaaatatcaaaaaaaaaaaaaaaaa

SEQ ID NO: 233554 - DNA, 514 bp, Homo Sapiens
gcacgaggtcgagtcttgagtttgactatatagagaaaaggttggcaaatattttctgtaaaggccctgatagcattttaggcctgtgggacccataggtctgttttatacatgtgtatatatatgtgtatatgtgtgtacatgtataaataaaacaacactttaaaaatgtaaaaacagctcttagtttgaggacctacaaaaacagactgtggagtgggcccatagccctagtttgccagcctcttatatggacactgattctcagggaagagctatttgttatttaactttctactccagccactctcaactataacagaatcaaattatgaatctttgccattgccttctgcgtttctgggaaacagtagcagaaaaaaacatgaatgttgagattggtatgaaaatggcaggaaaacactgagctcattttaatattatacttttgttgtgggttagccatttaaagttataactgattcattgccctctggaaaaaaaaaaaaaaaaa

SEQ ID NO: 233555 - DNA, 535 bp, Homo Sapiens
tgctgaagatttgcccaaggggcatcagtagcttttgtggagtaatgctagccagtgatgcttttgatatttcagcacagtttagtagatgatttatggaaccaagcagtggctccagataacaaggatcctaggcaggtatgggtcagtaagtcggacagggtgttattaggcctccctagtggaagagtctcttggataggaagccttaagcctgggaaggcaattagggtttcagagtttcatttactgtcctcaaatatacattaagccctactttgtcctctgcacaaagatgtatttgatgatccccagtggcacagagctaatcctgcctgggggttaatcctgcagtttaatctcctgttcatttctgtctgacttgagtacccggggtccatcagtcttgtccatcatttccaggtgaggcggagcagaggtttaatggaggtgtgggatgtttgcattacgctaggtcaattccattgtccttaaaaaatgagaacctttctgatttgaaaaaaaaaaaaaaaaa

SEQ ID NO: 233556 - DNA, 528 bp, Homo Sapiens
gcagagctcgtgttgtctaacctgttttctggttgggcagataaacagcccatgaaatgagtgcacacagtgctcacgggacccaagagctggctgggcgccgggtgccaagcgcaggggccctggaggggctggtccagctggcgtggcctcagtgtggtgggcggcccggtgagcacctgctgctctaggggctggcttccttgtcctctcccagcaccctgtatgtctgctgtgttctcagaaacaaagttcgagaccaaaggctggcgagccagggccctggctggaggcagacgagatgggtgcaggatctagaacgtgcttccaggcgtgtgctcagcggggagtgcggcctggcttggttgcattcttattgtagatttgcttttagaacaggtggtcttaaaaaggcctggatgctttgccagagcgtaggagccctgctgtgtacacaggcgtggcttacgattgttggtaacttaagacttcgagtcttgaatcaatcaccagaaaaaaaaaaaaaaa

SEQ ID NO: 233557 - DNA, 724 bp, Homo Sapiens
aaatgtttataggctcatctttcattttcattttcataaaaaaaacaaccaaaatgggacttcttaattcactattttatagttaaatccgaattacctagtactagcttagaattcagacaagtgcaggcttggaaaatatgtgtctgaatggtaccaggaacttgctatttttgactcaaactattgagaatatgtgtttatgatgctaattactcattttaatgtgtagattctcgtctttggggtattaggatgaaggaaaagaagaaagaagcagaaaggtgactgctctatgtaacagaaataagacctaatgtatgagttaagcataaagtcagtctactttatttgcagtcttaattgtaactgtcataattctttgcattggtacatttttaattattcttcctcttcctgttcctttttttctgtccttttcagttatcctcaataaccactaggaacctctgcttctttctcctgaatttcttctttctcctacattgttccatatattaatcagttcagttagtgttgctcactttagatagtaaaagtatacacagaacagcaaaatgtcaggatatgtgaaatataaattgctttttgacagttttgccttatatccttgtataatgtgagacatcatatcctgaattctctgttttgttttgttgttttgcgacagagtgatgctccgtctcaaaaaaaaggaaaaaaa

SEQ ID NO: 233558 - DNA, 653 bp, Homo Sapiens
  misc_feature (17)..(17): n is a, c, g, or t
aaatatactaatagttntaagctaagaaaagctgtcagttagatggaaaatcacttttctaaagctgagctttgtagatgaaatatgaacatattagaggaagtaagcgacatataaatgtttctaggaataatattttctaatgttcaagaaaaatatgattcacacagtttcttcataacctcagaaagcctatatctttgtcagctataaagagcatttactttgtttttactgcagttgtttaatatagtagtatcaattctgtattttaagcttgataatccagcagcaaattgagattaatggaaggttggaaaaaaaggctatgaaacaaaatgcaacctttcccacatgaatataggcacaaaatgatgatttgtaatcctgaatgccttccacatcttatttctgatactttccttttttccatactattttatccatttcgtacagcttacccatttcctttatcacactctgttcctgcttctgtgaactttggattctctgctctatttgagcattgttcagaagtcactgaaatatttgagttgtcagaactatgtgttttctgggtgcttcatttcttatccaattctcctaattccactgtagaagcttttttcaagaagtaaaaaaaaaaaaaaaaa

SEQ ID NO: 233559 - DNA, 451 bp, Homo Sapiens
cggcacgaggggcacccagcctagctctcagatctctatttcattttgtggcttaccattccctagcacactggccttgccatcttgtggccgaataaaaaataacacctcttaagtctagcacactgcagtgaggccaggcacctcagtgctgggcaggggcatcagaaggtgctaagccctctctccacaatgccaagacggagaccacagcctacaccaaatccagcccttgatttccctgctgcctccataaacagaaagaggtctgctggatccgctaagggatcagggagaggaagaaagagggatggggtgggaggcaccccctccagtgctcctactggttcccaagctacaggtggggtgggaaaggctttatcaggtatcatcaacaggttctcaattaaagatttgatttattcaagtatgtgaaaaaaaaaaaaaaaaa

SEQ ID NO: 233560 - DNA, 592 bp, Homo Sapiens
cctcatgcatctgtggtcagctgcagaatagcttgtctgatcttggctgggttctctcacaggtttatggcctgtggtcagtgtgatctctcatctccaacagggtaacttgggcttgttcacaccccagagtctgaggttcttagagagaaagcagaagtgttcaagccctcttgaacgaaggactatgaatctgtgtaccattacttctgctatattcttttggccagtgcaagctaagccacagtctaggccagattcaaagggtgggaaataaacttcagtccttgataggaggatctacaaagtcgtatgcacaggatgtggaaacggggaggagtgaagatttttgggcagtttggaaatttaccacagtgtacacgtgtgtttacatatgtgtacgtagatgaaaagtgagagcatatacattctgcatttttatcaccagacatgctccaaatccaagttactaatccaaccctgtggatatattggggaaagtaagtaaatcttaaatgggaagtgcctcaacaagtatctagaacaataccttccattcaatcaatggaaggcttaaaaaaaaaaaaaaaaa

SEQ ID NO: 233561 - DNA, 602 bp, Homo Sapiens
tagttccagaacatttcatcttccaaaaaggagaccccatccccatcagcagccactgcccattcccctgcaccgagcccctgacatccagtcaactgctttctgcctctgtatttccctcgtgcttcattcctttttatggctctgtaatactccattgcgtgggtagctacgttttgtttctatctcttggtggacatctgggctgtggctgccttatagagattgtgagcaatgctgctctgaacatttgtgtacaagtttttgttccgtgtccctgttgacaaacctttcttgaggttaaattgacaacatggaaaaaaccttaacccacttatcctgagggagggtgggaatagtgatttcatctgcgttggttttagtagtagcaaaaacccagcccccactgaatgtcaacacaaggaaactggtcacgtaaatataaacagcagacgtcccagacgagctgggtgtggttccaggacatgggtcctgcctggtttctgccagaatcattgttcatggtgacctccatttcctggtcaccaagtaaggctgttcatcataaagtggaaaaaaagctggaaaaaaaaaaaaaaaaa

SEQ ID NO: 233562 - DNA, 579 bp, Homo Sapiens
ccctcaaaatgtcctaggcagtgtggaaagcactcagcaataactgtgtgaagtaggtaatattcccattccacagatgaggaaactgaactaaaggctgcttaagtaacttgtctgagattacactcctaaaaagtagtgaactaggtttcagcagtctgacttgtattctcacccattacactaaaataacacccttgaatttttattttgaaggtgggcccactctaggctttcaaaccagattgccctttcaaaggcagtagtagtctctgttctgaacccttcttgttcccaattctgtgtgtctgatttttatcccatcacatttatatttgaaccaaggctttctgaaaacagggccttaatccaaaggaatgtctcatgctaggaattaccaactccaaggcaagacaggcccctggaggcagatggatttgtgctactctcagattatgtagtagctacctggatccttaatgacaccgggttgggggatggtgttggtaagataaagagcaaagagtccgggtgtcattaaggatccaggggcctgtcttgccttggagttggcggccg

SEQ ID NO: 233563 - DNA, 568 bp, Homo Sapiens
cggcaggaggtaatgaatacagaacacttttactgcaaccagtggcaagacattcaaagagaaacaaacacacatttacccacagaattgaagctcacttcccaattttttttttttttttagcaacccatagtaaaagagcaactcaaaaaaatatgcactgattttgaagcagctccagtgagaaatgcaacttgctatttgggctagtcaggttcctggataccactgtgcagccctttggcacaacttgctgtggagctctgtggtcagaaccgcttctctgcccttccatgacgccacactcacacccggaggtcgctccacatctcccagtccttcaagcttttcgtttttttgtttttttttaaaattgttcccagaagcaaacacatggcctgaacaatccctggattgtaaaataaacaacactacaaaggaagacaataccaaatgaggctccgtagtcaccatacccagcagcaaccgaaaaaggtttggtttctgtctggaacagcactcaccccacaccccaaaggaactgcttggtccaaaaagttggcggccg

SEQ ID NO: 233564 - DNA, 639 bp, Homo Sapiens
taaaaataatttactccaaaattaagtctatataaatatcagagaattcacagtagaaatatctaaggtactgacacttcagacattgctgagtatagaatcagaatgctgagtatagaaaataatttaaaactaaagttggtaggtaaataatgtgtatataactttaaaagaagtagaatttttttgtagatgtataattacattcaaattatattttttcttgaaaaattagtttttgaaaagcaaataatgatgtaattcaactcaaattcatgctcttcattcctattgtattcacatgtgaaagcatgtgattaatttttcatgcatcaaagatatgagaaatcatttctgttaggtcggtattatttatgacactttctatgaaagaataaggacattaaaatgtaagatgcatgatgaaaacctgagtgaagaggctgtttgtgtttaacttataatattgagtgatccatgaagtaggttttcagagcaatattcttctgcattatagtaagagaaaaccatttttaatcttagttaaaattaaagtgaattagtagtatatcattttactatttgtacttttatgtaataaaatgcaatgtgtttaaaaattaaaaaaaaaaaaaaaaa

SEQ ID NO: 233565 - DNA, 602 bp, Homo Sapiens
gagtgttggatgatgtccaggctatagcccacacatgcttgagcagcagcagcatctggtgcagctgacccctccctccttgaagcactttctctccctgctcccagcccttctctctgcacctctctggtcaggcctagtcactagcccagcatgtcaactttggcatgacccagggccatggcgttgacatctctatctgcacccacccataggtgctcttgtctagcttaatgactctaaaccccgtctctattctgataatcctcaaatttctgtctgtaacctagacctggccacgaaaccttgggctcctacctcattaccatttctacccaagggtttaaaagacatctcaaattccataggttgcagtggaaaaaaaaaaaaaagataatttctctctctttctctctctctctgacacttgctttagaggctacattaaaaaaaaaaactagttgccatgctggggaggggtttgggttacacaggtgtatgcacttatgaaacttagtgaagtgtgtgaatttcattgtatgtaaagtttacctcaaaagaaaatattgaacgccagttaaagttaaaaaaaaaaaaaaaaa

SEQ ID NO: 233566 - DNA, 509 bp, Homo Sapiens
cggcacgagggtgcaactttatttcttcagttattgagtagtttatacaaggcatgggatggggaaaggggcatttttttaacttaaagataaagcagatctttaaaaattatgtggattaatgaatcactttttgcctttttcttgctgtgtacagtcatccctttgtatcagtggataccacagatgttcaaattccttatgtaaaatattgtagtatttgcatataacctaaccacatcctctcatatacttgtatgtgtagattatttataatacctaatacaatgcctgcacgtcacttcattcacataaattgaacatagtactcagcacgtggcaaattcaagttttactcttcaggactttgtggaatttttttttttcctcaaatatgtttgatctgtggttggttgggttcagggacgcagaacccatgtatgcacaggaccgactacacttttgttaaagactaaaagagattctggtgttaaaaaaaaaaaaaaaaa

SEQ ID NO: 233567 - DNA, 488 bp, Homo Sapiens
caaaaatctgagtataacttttgactcccttaaaacttaactacttataactactgttataagcgttcccgataacataaatagtctattaacacattttgtatatttattatataccgaattcttacaataaagaggataaaaaatggtattgagatcataaggaaaatatatttactgtttattaagtggaagtggatcaccatgaaagttttcattgtcatcatcttcatgtttagactgaagaagaagaggagggattggtcttgtgtcttgggggtggcggaagcagaaaagaatctgcatataattgcactgtttgaagtttaaatccatgttcaagattcaagtgtataacaacttcagtgtaaatacttactacttacttttaaatacttgattcctaatgttttagtgaaaccctactagcacccatgaccctgattaaataaatttacttttttcctgcttaaaaaaaaaaaaaaaaa

SEQ ID NO: 233568 - DNA, 389 bp, Homo Sapiens
gaggataaatagaggcattgtttttgctactttgcatatcattggccaatcaatgattgattgatttgtatatccttttacattaccgcttcttgctgtggtagtttctgtaccaaaaaaaaaaaaaaggtcacaaaaggatagttggttattttcagagcttatcttgtttttaaaaatatgttactgtcattgaaatatttttccaaaatcttgcctctaattctggtaagatttaatctttactagctggcgaccttatttatactagttgctatagtagactagaactcttgttttattgtcgttgagtaaaatactaaatagtagccagttttgacttactttggcttcaaagctgttgtaaacattaaaaaaaaaaaaaaaaa

SEQ ID NO: 233569 - DNA, 469 bp, Homo Sapiens
acacaattcttgaaagtaataccactgttgttactctttctccttacaatttttatgttgttgagatgtatcagttatgtattataatcatgaaattgtattggcctcaaacccaaattttctttgtagtctaggatagatttttcatgaaagctatatagttataactgtgattgtacagattgtttatttgttttacagctaacattaagcatgattccaggtttttaattatgttccagcaacactagtgtttctttataacttaaaatcataaccactttgataatttacctttggatctgaccagtgattcatttttttcttgaatatactttgtgtttgctttctcatccccgttaagtctgaaacattattgacaccccacatcacttactctgtttaaagactttacgagtagtgagtcacatgtttaggatgatcactttgggaaaaaaaaaaaaaaaaa

SEQ ID NO: 233570 - DNA, 468 bp, Homo Sapiens
atattaagtatgttttttttcttttttcttgaggttttggcaaccatcactattacatattcttcttgtttttcctttccatggtatgtggctggattatatatggatctttcatctgtaagtgtaaatttttcttacaacaagcacatacatctacacccatttctacttttccttgtaaacccttgtatatcacattctggctgggtgactataaaccatactcctaataaaaacaaagcaaatgcctctaagactccctcagcattgggaagctgcaagaaatacaagatgaggttagttctcagtactttaggaaaaaaatgtgataaatttgaaaagtagtcaaaaatagaaattcatttaaggcaagtgcagatttgctccccagtgaagaaggaaagtcagctgctgaagtacaaagctggaggtgataactgaataaaacaggaaaaaaaaaaaaaaaaa

SEQ ID NO: 233571 - DNA, 569 bp, Homo Sapiens
  misc_feature (94)..(94): n is a, c, g, or t
aatatcagcctttcatttctgatatttggtctttgaagaggaaacataatgcaatagtaattcataatagtggagggttctttcctcacatccntgaaagccaccagtcttattcttcagcctggctcttgagctattgctgtattaattttaaatagggtgtgatagcataagctgatggaagcctgcagagatctcactttgaaatggtgatacattacatgggaaaagattagagaggtgttttatactgcacatcggtgaggcctaataagaaagtagaatagacgtaaaccattgttttcatcatcctttaagacagggatttcagactcaagaaccaggcagctacctatttaaatgagtcaagtgggccctaatgtaagacaatgtgatgggtaaggattgattctgagggaacaggagcaggcatgccctctctaacagaggccgtcagttctgatgtacctgaaatgtgggcccattgttgctggcgattccacacttacatctaaaatttcctgattttttaagaatgacaataactaatttaaaaaaaaaaaaaaaaa

SEQ ID NO: 233572 - DNA, 531 bp, Homo Sapiens
gagtacagagatcatgaattacgaaggtgtatatggtatatttgcttggttgtcttcatgggagcatttcaccatcctctgaatgtcgatttgtgctttctttttcccccaaaccaccttattgaggtatgactgacatactaaaagctttaggtatttaacatatagcactcgatgtgtttggagattttctttaaaaaaaaaaaaaaaaaactatgtttagatattgttatggattttcaggttgggtcattaatgaagtttgacagttttaataagactgactttctttgtggtttataaacaggctccgaaagcagcttcaaaagtagagctccaaaatagttccataattattgtaattaatgcaagtcttccagaattcgggcagagttggagagtctctgaattaggagtcaaaagtcctggattcatttgtattgctgacatttgcttgagtgcatactgggtgccaagcgcaggaatgactgaaaattcaaaaactacagtatggaaaaaaaaaaaaaaaaa

SEQ ID NO: 233573 - DNA, 506 bp, Homo Sapiens
ctggatgtgaacacatctttgatcatataattgtttttattcccttggtccctatatttttttatgtatctcatcagctcactcttttagtttctcttcccacatagctttcctagactctattcataagtgccttactgccttatcttcctctccgagtatgctgcaaaccccagtcctgtgtcagttcagctgtttgcctttttatttcagtacccatcaaatactacctcacattcagcagatgactttccttcctaatccacagaagaaaaaggggacagaggcagaaaactgcctgaaggtttcattagatatctagaagcctatctgtatggcagcatacatttctctcagaggaaaaggtgtccttcctcttctcctaagcatacctcccctctaggccctggcttcaccctcaacagttattccttctctctgttggctctttccttttggcttaagaacatgtccaagcatcattcatctaaaaaaaaaaaaaaaaa

SEQ ID NO: 233574 - DNA, 499 bp, Homo Sapiens
  misc_feature (481)..(481): n is a, c, g, or t
taagagaagaaaaactacctgtggtaggaattggaaagcatctgtgtggtatggcaacaggtacgtaaacatactgataatgtttacattaatgcattaagttttggcctaacctggccccaaccatttcagtggtctcttttgaatagatatcttatgtttacaactcaataatctttatagagcactggccctgtgctttattagatgcatagctttcctatttatctgctcatattggccattttgcaggatgaattaagagttttgtatgtaaatactgcatcacattagaccttaaagttctttgggttaaatttcaaccagaaaaggaaaataagaccatttatggaaactgtatgattccacctagaagctactgattttttagagtagttgcttagaaagaactcagaaacctcttctactaaaagactattgtgtttcaggattctggggaaaaagaaaaaaataaatgttngacaaaaaaaaaaaaaaa

SEQ ID NO: 233575 - DNA, 501 bp, Homo Sapiens
cctctccatttttcactttcactcttccctccccaactagcttgcagggatttctgatcacctagtagagtctagaggcgtaagggaaggaggtcaccaaggggcaggccaggctttatgtgaatagtgctgttgtgagccaagtacttgagtacttcgaggtccccttctactgcagacatcttccctatggttcctgtgacccaggtttgtctcagagtggggttagcacacggtaccatctccatcccctttaaaagtatttattacatttttctggaaatggaagtctggaaattatatttccctgatagtcttatgagcaggattccaggttgattctgccaaatgtgaggcactcaggtgagactagaaagcagaaagatggtttaaaaaatcattgttttcttcctttgactctgcacttacgacagcaggatgctcgagactcttgcagtaatttgggcaaagatttccacagtgcaaaaaaaaaaaaaaaaa

SEQ ID NO: 233576 - DNA, 478 bp, Homo Sapiens
aaatatttttaaatgtcagtgttaattcaagctgggagctacttagggtgagcctgccttcttccattctatccgaagtctcttctaaagttgcggaattgtccacatccattagttcaggattttttgttttttagggtttcactaaagtttcaggtttctatttaacatgtaattctgtataccaaatgtaccagaaagggttatgttattcatgaaaaaaaaagagaatagttttgtctaattcaatagttatctaaaagttggttcaaattacagatttaaaaaggttattcataaaacaatgtagtaaggaatcattaggcaaaaaatgtgggaaaagtttaaatcataaaatattttttaaaccctgataaagaattggagacgtttggctaattaaacattttcataaagctgttagttttgattaaagtaaaataaaaagtattgtaaaaatgaaaaaaaaaaaaaaaaa

SEQ ID NO: 233577 - DNA, 519 bp, Homo Sapiens
ggtgatgctaattttgatcacttgggtaagatgtccagtttctccagtgtatcgttattgtttttccttttgcaattagtgggtaatttgtgaggagaaactttgagaccttgttgacaattctgttcctcatcaaatctacccctcctaggtttagcatcctttgacgattcttgtctgaataaatttttactaggatgtttccaaaattgtgattgttctaactctattattatttctgtattaattagtcatcattctactgtaaggaagaggtttccctttatcatcaacttcgagtaagtacttttttctgagccatttgaatattccttactagatgtggtgcctctttaccccaattacttaagtttgtatttccaaagaacaagggtgttttcctgcatagccatagcacaattaccaaaatcagaaaattaacattaatactttactattatcaaatctttttcatattttgctaattgtttcagtaatatgcaaaaaaaaaaaaaaaaa

SEQ ID NO: 233578 - DNA, 653 bp, Homo Sapiens
cagcaagtgtttttcacaatttcactgacattctttccgggctcaactcaatttgttttcaacttctctatggcaattgatgactgactgtgtaattcagcaggatctcctgtgaagtgcttcttccccagttgaataggagctggtgtttgtctaagcctctgcttatgcatgaggtataatgctttttatatgttatataatgctcttacgcgttagctatctgaatgatagatttaataaaatatacctcataatattatggggaaaggatgacgactgttatagagaggaacttgggagtatcacttctgtaatccttatctaacctgaatctgttagcaggaaactgaaaaggcctgtgtatgacaatgagataaacaattttaatctcttagcaatgtcaagtggaaaatctaactacctgccagtagtttaagaaatggctaagagattttgttgggcacaaataatcctgagacccagattgctgagccaagggtaggaaaattggttttgctatgtgttacagctgggaagtgagaaggtcactgtttgacaaactactaaaaaaaccttatggattaaacattcgccagtgtaggggacattttgaatgtgttataattgatattttagtctatatgcggccg

SEQ ID NO: 233579 - DNA, 544 bp, Homo Sapiens
ctgtgtcagcaattgcttttggtttttaaagttataggttgctactacatggatgtgactaagaaaatacatagattatcttaaaatgggcatgatgtaaaagactcaatcagtagggtaactaaaaactttgtagtactctagctttggaaatctgagaggcctatatagttcatttgagtgtttgatcaaattcttattgagattacagcctgtgcaaaatatttgtgatgcatttttaagtttacttaagtacactttgaaattctttaaaaattttaaaatctttaaaaggacacaagagtgtaccacattgagattaaaatgtgtttattattaatttgtacataatactataacaaataattgttctcaggtatgtttaaggccttattttaaaagttgattcttcaatttctaatttaaaataagcttttagtttttctcaactatgtatatgtaatgattataaatgcctagagtagtgtttcccagacaactagaaccacacacaaattagtaccaccaaaaaaaaaaaaaaaaa

SEQ ID NO: 233580 - DNA, 448 bp, Homo Sapiens
cggcacgaggcctgcctcagcctcccaaagtcctgggattacagacgtgagccaccatggctggcctaaaatgctttctagaagggattcttctggaccgttaaccacgtccccaaaggaaaaccacacacacattatttaagtactttccatcttcctagagaaatttagttacactgttgactccttccctaaaggggaggattgagggagacctcttcttttgcaaaatgcaatataaaaagccaggtaagcaataaacagaaaacaaaagtgagggattttttttgttgggttgtttggtttgggaaggggaggtgctatggaggttattgttgtgacatgttgcttcgaaatctataaaccacacaacaggaacaactgtttttctgttttctgtgacaaggagtactgcagggacaacctcacccagaaaaaaaaaaaaaaa

SEQ ID NO: 233581 - DNA, 502 bp, Homo Sapiens
tcaaatatctgacttaggcatactgcttccagaggtgtgtatggccccagaggaaaagggagataaagacgaccaactcaacaaagaaacagaagactatttgaacagccttttagaaggatgtttaaaagatactgaagattccctttcctatgaagataaccaagacgacgactccgatctccttcaagatctctctcctgaagaagcatcctatagtctccaggagaatctgccttctgatgagagctgtctttctcttgatgatcttgccaaaaggatagagattgcagaggtaaatcagagatgaagtacaattaaaagtaaaatggcatttaaaaaacatatatatgtattaaatattgccttgtttttgtaagttttcccttgtctcaaacatgagggaaaattctagttaacgtaagcttttaattattagtagtttttacatttgtatgtattgaataaaatgacttttaatccttaaaaaaaaaaaaaaaaa

SEQ ID NO: 233582 - DNA, 450 bp, Homo Sapiens
tcaaacacttagacaaaggatggctgaggaatcaagtatggatttaccaatatatgaagattaggatattttttattagaatataatatgagagaatctccataaaaaatgtaatatgctgtctcacattttatagtgttgataatggtttttaacatcgatttggtccatgatattgtgacctctaaaagatgtatctgtatcaaaatgttattatcaaggagtatgtttaataatgtttattaatgcctgacctcccaccttgatgtttttggacaggttaaaaaaaatgtgcagtatcttactttcaaagcattgaaaacgatcgtttttacctgtataaatatattttttttaacatggaagcatctatagagattttagatgtcatgtattaaaatcttccctgctgtaataaaaaatttcctctaccaataaaaaaaaaaaaaa

SEQ ID NO: 233583 - DNA, 562 bp, Homo Sapiens
  misc_feature (120)..(120): n is a, c, g, or t
tactcccacttttcggagacagtgactggtgccagtgtcatccgggcctacaaccgcagccgggattttgagatcatcagtgatactaaggtggatgccaaccagagaagctgctacccntacatcatctccaaccggtcagaagccgcctccctcgctccctgctcctccaggaattcccagcaggctctctggtgttcagggtccttgtccctcctttcccctaagcagaaaactggccctgccctgcccctgccccatttcctcctcatctgatcccccataggtggctgagcatcggagtggagttcgtggggaactgcgtggtgctctttgctgcactatttgccgtcatcgggaggagcagcctgaacccggggctggtgggcctttctgtgtcctactccttgcaggtatgaagggcctggaccccagggcagggccaccactgggacagaaaccacacaggtgttccaggcatctcccgagtgcccctccctgctcagtatgggcaccagccacagggtctgttctcaaggactgtgagaaaaaaaaaaaaaaa

SEQ ID NO: 233584 - DNA, 562 bp, Homo Sapiens
gggaccggccctcccccctgtgttgcagatatgctgtccaaggagcttccgtggtgtgacggctcctactgctatgagtgcactgccaggttcggagtcaccactcgcaaacaccactggtaagaccccagcgtcactggcaaggagcgaggggactgccgctgatgtcattgcttccccccttctccaggacaggccgtgaacttgcctgggtcctgcacattgatgggcaaaccttgaccaaatggagggatgagatgagcacacccaaggatcctactgaggaacagagatgtagggaaggcagggagcctgcagacgggtggctttcctgctggaggctgaaggtgcacagtttccaggcagcctgccaggcctgtgccatccttcctgacttcctgcctgcaccaaagctgagatgagctactgccctcatggtgtgcctcagtatgggccgctttgccgagaactaaggggctgttcccattaaaatgagattacaggcgtgagccaccatgcctggcctgagctgctcttgatcttccaaaaaaaaaaaaaaaaa

SEQ ID NO: 233585 - DNA, 564 bp, Homo Sapiens
gaggttggagggtgcataacccatctgtcattgctaaccgcctcctgtggacaataggaccatgatttccaagtgtccttcactaacttaagctgggggggaaaaaaactataaaggctacagatataaatctgaatggcatattgtacatgtagaaatttgtggtgttcactttttatcagaactaaatccggattctggggctggaggacagataaagcagaagttgttaatggttacgaagcaaaggtaaaaggaaactcttaaaataagatttaatatagctatttagcttctatgcaaatgaggaatctgttcccatttttttcatgcatctgtgccatggagatgctctggggaatgagaactgtctaatgtgtctctcacttggatgtttgattttgtcttatttgactttcagaaaatgggatagcatgccctgaggaggtctgtagctatgctaaagagaaacaatatggtagagaaatgagtacaggtaccagttgttctggtaggaatgacaagctagtcattcccttaattatttaaaaaaaaaaaaaaaaa

SEQ ID NO: 233586 - DNA, 986 bp, Homo Sapiens
ttattctggccattttcgtgttcgtcgttttcgtgtactgtgccggagttgaccttttgctacttttgcccgtatggccctttccttacggctttttagtcctattgtgccctattgtgtttggcttctaactttagcgtcccagtctatgtcccacgtatgtgcagcttgccattgtcctcggggttaccaccggggttatgcttgggtaatggtttcttaaaagtttttaatcaatgggcaaacggtaagatttgtctttttggtttttttgagacagattctcgctctgtcatccaggctggagtgcccatggtgtgatctcggctcactgcaacccccgcctcctggggttcaagcgattctcctgcctcagcctcctgagtagctgggattacaggtgcacgccaccacgcccagctaatttttgaatttttagtaaagatgggatttcaccatactgatcatgctggtcttgaactcctgaccttgtgatccgcccgccttggcctcccaaagtgctgggattacaggcatgagctaccgagcccagccctaaaagacttctttataaggagccatattgctttggggagaccgaaggctgctgagggcctcagggcagggttgatatgcacctgccagcacgccaccataacatcttcatggaaccttaacactttcttaaaagtgctccacctccttttttttgacccttaaagaagagaccaactattagtactgtgtggcaactgtgcctgtcctctcacatggccaggggactgggtgacacattacccagaaaggtacacttctgtgctggtggccactccaacacacttcctttgtttggctggagctcgtccacttgacaaggggtcaggaagatgaagctgaatccaaccccctacactgccaggtgggtaccacgctgccctccccaccttgctatggaccatttctgatctggcttccggacgcgtggg

SEQ ID NO: 233587 - DNA, 587 bp, Homo Sapiens
  misc_feature (30)..(30): n is a, c, g, or t
  misc_feature (47)..(47): n is a, c, g, or t
  misc_feature (59)..(59): n is a, c, g, or t
aggccccatgatgtgtccccgagtggaaangactggttggtggtgangcgccaaatttnatagtccggtttgaggaggtggttctgattggttgcatcatttatgacgtttgcaaagtgcatgtggaagctggtcgcccccacccctaatcttatgcaaatggggctttcccagttgattgggtccatcttgtgtaacacgtggctggcagagaagggaagatgaagccacccatcttgaaaatgtctagtccttagtttctgctggcattcaccccatgcaagctgccagcttgtctatgtctgcagctcaactttacaggctgctctttgttagcaaatgatttggagcttcttttcattaaagaaaaaagccttaccgaggactcccatacccttgctttctgcttaagtgatttcttcttaactcctatgtcaattttatacagcatgaaataatgatgtatctataaatgagcctttgcaagattaccatttatcaaagaaaaccagtgatgtttagttaactgtttgtaaaaataaatggttagtagaatgtctaattcaataaatgtttcataaatgagt

SEQ ID NO: 233588 - DNA, 453 bp, Homo Sapiens
  misc_feature (129)..(129): n is a, c, g, or t
tctaacaccttttctttcccaaacaccaagagcaggttctttctgttacatccattgaggtcacattcttgaagtgcattttgaggaagtcattattttcgctacagcagggactgatgtatcagtctnattagaattcagaaaaaagtaagcaaacaaaaaacgtgttggaattattctcttctagcattttgaaatgtacaatggttaatgttaactatagccaccatgatgtattgaagaccaggtcttattctttttatctaactgtacatttgtacccattaacctaatgctcatagcatcaagaaaagatcaatatttaaggtgacaaatatcccaattatgctgatttgattatatgaatgtgttgaattatcatatgtactcccaaaatatgcacatctaagatgtatcaataaaaataaagacaaaaattaaagcttttacagt

SEQ ID NO: 233589 - DNA, 437 bp, Homo Sapiens
  misc_feature (24)..(24): n is a, c, g, or t
  misc_feature (360)..(361): n is a, c, g, or t
  misc_feature (364)..(364): n is a, c, g, or t
cctggaagccatgggagaatccangatcccctaaataataatggatggaaaacttttaataaatgtgagcacaggcacttttaatgaaaaaggcatcatctaagtttaaaaacaaatgaaaagacttagaaattcatgaatattgtgattattttacatttggaaacaacttctgcaagtttatgttttatgttttgtgtaataacttgcttcctagtatgatcagctcatgtacactatgagagggttcaggggtgggtcatttaaataatgaattggctaatgtggattttaaatttcatatcatgatataagcactgcaatggaaatgtttttactaaaacattatatttttgtggnnctngaatttcctgaggtgaaaaaccgatattgaagattcatttttcttttttccattcttcaggacttcggcaagg

SEQ ID NO: 233590 - DNA, 1000 bp, Homo Sapiens
tgttgtattttgtgcgtgtttgtccttttccttttctcgtctgtgtctttctttgttgtgttgtgcttgctctttctcattcttgtgcttctcgttgttgtggtgtcggttcgttcccggttggtgctcattgtgctggtgtgccctggtggttcccctgtgatctattcttcgtgctagatctctgtggggtcggtgtgatgactgcttgtgcatggctcccgacctgtgcagtgctaggtggacgtacttcctgcttgcttccactacgacctttcaggcggccgcgccctctttcgtggtggccaatcatgctgccggcttccggggttgctatgcgctggtgggcgccagtgcaccaactgcgtgcaggactacacggcacaaggccaagatcaccatcgttggcaggcgtgctgttccttctcgccgccctgctcaccctcgtgccgctgtcctggtcggccaacaccattatccgggacttctacaaccccgtggtgcccgaggcgcagaagcgcgagatgggcgcgggcctgtacgtgggcctgggcgtaccgcggcgctgcagctgctggggggcgcgctgctctgctgctcgtgtcccccacgcgagaagaagtacacggccaccaaggtcgtctactccgcgccgcgctccaccggcccgggagccagcctgggcacaggctacgaccgcaaggactacgtctaagggacagacgcagggagaccccaccaccaccaccaccaccaacaccaccaccaccaccgcgagctggagcgcgcaccaggccatccagcgtgcagccttgcctcggaggccagcccacccccagaagccaggaagcccccgcgctggactggggcagcttccccagcagccacggctttgcgggccgggcagtcgacttcggggcccagggaccaacctgcatggactgtgaaacctcacccttctggagcacggggcctgggtgaccgccaatacttgaccacc

SEQ ID NO: 233591 - DNA, 766 bp, Homo Sapiens
gccgaggagcggaacaaccaggttgtatccagctcggagcagctgcagtcctaccaggcggagatcatcgagctgagacgcacagtcaatgcctggagatcgagctgcaggcccagcacaacctgcgatactctctggaaaacacgctgacagagagcgaggcccgctacagctcccagctgtcccaggtgcagagcctgatcaccaacgtggagtcccagctggccggagatccgcagtgacctggagcggcagaaccaggagtatcaggtgctgctggacgtgcgggcgcggctggagtgtgagatcaacacataccggagcctgctggagagcgaggactgcaagctgccctccaacccctgcgccaccaccaatgcatgtgaaaagcccattggatcctgtgtcaccaatccttgtggtcctcgttcccgctgtgggccttgcaacacctttgggtactagatacctggggccagcagaagtatagcatgaagacagaactaccatcggtgggccagttctgcctctctgacaaccatcagccaccggaccccaccccgaggcatcaccacaaatcatggtctggaaggagaacaaatgcccagcgtttgggtctgactctgagcctagggctacttgatcctcctcaccccaggtccctctcctgtagtcagtctgagttctgatggtcagaggttggagctgtgacagtggcatacgaggttgttataataccttccctcctggggtgctggctttccta

SEQ ID NO: 233592 - DNA, 888 bp, Homo Sapiens
catgtccgcagatgcggttggggaacggcctcgccgtctgttgagcctcgctagcgagcggtagcgggcgtacccactgctcatagccgccccgttatgttttgacgccgttttcgttggagagagttaaaaacccaccatgaccggggacggtctggggtatacggtcgggcacaaagccacatattataggtgaaggctattatgagccgcaacttggttaagagttgttataatttttaaagctcaacataagacattccaaagttttataagtttggaagaactctatcagctataattcagtgtttgtaaattagaaatatattctatgaaaatagttatatcatgtaatatacatacaaatgaaaaatcaatctgcatatgaaatttggataagactaattcagataatagtcaaaaactataacaatttagacagggactggggctagttttctttttcctttttttgtttttttttgagacagtcttgtgctgtcacccaggctggcatgcagtggcatgatcttggcttattgcaatctctgcctcccaggttcaagagattcccgtgcctcagcctcccgagtagctgggattacaagcagcctgtcaccacaccggataattttggtatttttagtagagacgaggtttcaccatgttggccagactggtctcgaactcctgaactcaggtgatccacccactttggcctcccaaagtgctgggattataggcatgagccactacacccagcctagttttcctttttcaaaaatgattgtgctataagaatcacataaaattataagaagaatcatgttttaaagtttcttcagcatttttaagcaccctcaataactcagaaatacttataaaaac

SEQ ID NO: 233593 - DNA, 558 bp, Homo Sapiens
tttgaacatattgcactctgtttttgtagttcaatcacattaatgcatagaaacacaatttttacctttgaaaaataaactgtctaacctattataagaacaaaagtcatggaaaataatttctaaaagcctaacaggaaaaataggcatattaaccttcctttgcttaacgaaatatagaaaaaaactatgagaaaggaaaaatgtgcaaagaaaatttttggtcagtcttgtgtgggtacaggtttatatgtgccaactaaatgaactgtaagcagcactgtgagcactgattatttaaggtgactgaggattactgtcagtgataggattgtgttataattccacttatatacatctgatatggaaaactgaaacttccattttagaagagaaagaaaatagctgaatttggcatttcagtagcatgctatagaattcatcatgattaatttcacattaaattatgggcaatagctgtatcacatttcatgttatcgccaatagcagtaaaacaacaataaatgaacaaacaaacaaataaaaaaaaaaagaaaa

SEQ ID NO: 233594 - DNA, 618 bp, Homo Sapiens
  misc_feature (51)..(51): n is a, c, g, or t
  misc_feature (101)..(101): n is a, c, g, or t
gcaattcgggacctgattttgcagctggactacccctatactcagggatcncaggattcagcacttttgcaactactagagatcagagaccgtgtaaatanactctccccacctggtcagcgtcgtctagatcttttctcttgcttgcttcgtcatagactcaagctgtctactagtgaggtggtgaggatccaatctgctctgcaggcgtttaatgccaaattgccaaacacaatggattatgacacgaccaaattatgtagttaaccataaatgtcaagcacaacccaaaatcttgaaggagtttttacagtgcttttgtggaacagtttatgtttggaagagtaaatttaaattgtcttttcaatatctgtcttatatcagtcaataacattggatggcaatttacacacatgaacttgctgacaatgaatatattatacagcagttttggtttatgaatgacataaatactgacaccagtctagaagacattctactttttacaataaatttcatttgtaattttatatgttccgtggcaatgcttttgtgcattacatcctctagagggaacataaaaagataccaataaaattttgtagctgaacagttatt

SEQ ID NO: 233595 - DNA, 566 bp, Homo Sapiens
  misc_feature (543)..(543): n is a, c, g, or t
tgcagctactccagttgttccagtccctccgcagatgggctcctttaagccaggaggccgagtgatcctggccacggagaatgattactgtaagctctgtgatgcctccttcagttccccagctgtggctcaggctcactatcaagggaagaatcatgccaagaggctgcggctggcggaagctcagagtaactcattctcggaatcctaagagctgggtcaacggcgggccaggaaagaagggaatgagtttaagatgatgcctaacaggagaaatatgtatacagtacagaataattcaggtccttacttcaatccccgctctcggcagagaattccacgtgatctggccatgtgtgttactccaagtggccagttttactgctcaatgtgtaatgttggagctggccaacagatggaattccggcagcatttagagagcaagcaacataagagcaaggtgtctgaacagcggtacaggaatgagatggagaatctgggatatgtatagtgattatcatattaagatagagcagcttttcnctgcctgttgtttgccttttgtc

SEQ ID NO: 233596 - DNA, 537 bp, Homo Sapiens
atttgctatcgttttactccagtcattcgatgttgctgagatttacatatgactcttgtcaacatctcatcttttgacccaatcttattcatttaataagaggtctcattcatttgcatggaaaaatgctcattgtatattgcaaagtgaaaataacgagttgcaaaacagtgtatacatatatgtgtgtatatatgtacactttatttgtacatttctatgtgacataatgcaaaggaaagtgtctgattttattatacaccaaaggttaacagtgaatctctgtgtgatctctttttttttctttttgcctatctgcatcttctcacttgccaaaaaatgaatatatgtttatgtgtgtatattacttgtgtcacaaaaaaccctaaagtagacagtaaaagaacttgtcaatcgcctttggaaggcaatgaaacacttaataaactctcaataacagaagcgtaaaaatgaaatgtaaacctccaattacctctggatctcttagccagagtaataaactggtaattattacag

SEQ ID NO: 233597 - DNA, 482 bp, Homo Sapiens
gaaatcccaaatgacatgtagattttatatgcaaacaatcccactgcttgtaactcctggcagtgtgtacttaccaaaatcttgatcacacttaggtctcttgctatatatagaaccacatctgatccttatacagtgttgcaagatatatgtccttgctttcccatggttcttaagtgagtcttaagcttggatttgctccagcagaatggtggtttgtgtttctcaaggctgagctactatttggtgcatgtcggaaatctcacactaactgtggatactctgtcatcactgaacccaatcatacaatgaccagacagctttaaatacctacttttgtatgctatgaattcatccgtttacttgtcaaatcctttatttccatatgtgtctccatcacctttttttctctccggataaatggaattactgtaacttgtgaaacaatggcaaacactataaagctaattttacagtcttga

SEQ ID NO: 233598 - DNA, 561 bp, Homo Sapiens
tatgcaatttataaaggagagggaaagcccagcttgagttttgctgccaaagatggtatatttaaaattaaacgtaactaatggcaaaaaataatgggaatggtgcagtctttgagctgtatccagttggcattattctcttggactaaaaggaatagtattaacttcctcactttgggtaagccactttagatttttgggctgcagttttctcaggtaattagagactttatattatgaaagtttggttcacaattctttgagtctcttttgggaacaaagaaggtaagaggaggatatgtgccctcctctcaatcaaggggtttcttgaaaccctctaaggagaaaaatctgaaactgcctttcctaaaacgttcatgggtttgtcattctgatgatcaatatcgtcccactgaagtatctttttgaattcctagttaggaatctttatgttaagataaactgatcactctctccttcgtggacagtttatctacctaaagatgataggggaaaacactgtttttgaaagacgaaataaagacatgttgtagcagttaa

SEQ ID NO: 233599 - DNA, 442 bp, Homo Sapiens
gctgatcttggcaccctaggatccctctgttgtaagatcaagtctactaatctgccctttgcactctgggcatcctacatctggcccccatgcagcaacccgggttcccagggtaagactgtggtggctgcagggctccacaggtgtcatttgccctacagctggctggggttctgttgaaaggttcagaggcttcatgcagctgcctgctgaagtcatccatttttgtgttttgttgaggctgtgcagaggggcttcatgtagtcttctctgcacccacagccactccatgtgagctgcagcacttgttctcaaaatggtctttccaaagtctctgatgtgagttgcctgtaagaaattgatagtaatgtcaattaatccctagtatatagtatctgtctttgatatgcttgttgttgcatcacttaggtcttaaaaaaaa

SEQ ID NO: 233600 - DNA, 549 bp, Homo Sapiens
aggattagatgtgtatgcacataatgtagaaacagtcccggaattacagagtaaggttcgtgatcctcgggccaattttgatcagtccctacgtgtactgaaacatgccaagaaggttcagcctgatgttatttctaaaacatctataatgttgggtttaggcgagaatgatgagcaagtatatgcaacaatgaaagcacttcgtgaggcagatgtagactgcttgactttaggacaatatatgcagccaacaaggcgtcaccttaaggttgaagaatatattactcctgaaaaattcaaatactgggaaaaagtaggaaatgaacttggatttcattatactgcaagtggccctttggtgcgttcttcatataaagcaggtgaatttttcctgaaaaatctagtggctaaaagaaaaacaaaagacctctaaaacttcaacaagaccttcaagatcacagaaatttttaaaatttgattccagttaataacagaggtggtgccagaatgcctggactgcagtggatgtaccccacctctttgcttaaa

SEQ ID NO: 233601 - DNA, 487 bp, Homo Sapiens
aacataaaaaaataaatagatctgtatattgatggtagactctccatattgaaatgattattttccaaacattttcattttggtcaataattcaaactaccacttaggcaaagtattcgaacactgtgtcctttgtttaaggaaatataaaaaaaaatcacctttctttttgtgcaaaaaaaatattatttcaatcacatttcagaaccgccagggcaagaaagtataaagcaggatcatgttaagaaaaaagaaaaaaagatcatgagtcacttaaatatgtatttttatttgtaacaaacaagtattaaactgtaaagtatttttgtacaaatttaatactttaatagcatggtatttatcgtctatgtatggttttggggaattcaaaattgttcaaatatttgtatggaaaaaaataaaaccctctaccaaattgaataaacagtgattttaaaaagccaaataaacaggatatgcattaaaa

SEQ ID NO: 233602 - DNA, 525 bp, Homo Sapiens
ggccagcacagctccagccagcagctcccacactgctcccagtcctgggcacagtggaagctatggaggcagagaccagggtttgcaatctgggctcctctgcctcactggagagggacttctctcattcagcagagcagcagccctgctgctgaagggcctgctgctactgctgctggggctgtttgcctgcctgcaggaggtgctggagagcaagaaaaggagcctgtgagcaggggttccagcaggtcctcctgctcccagaggcgacctcctcctccaggcatggaggtttgccctcagctgggcatctgggccatttgcccctaacgtgctgcccaggatggcctcctcttgacaggcggacagggggtgagggggccagggggcatctccaaaggaagcttttaaactcagcagctgcaccccagaatctgtatgcctgcacctgcccaaggatttattcatagcttacctaagaatttcaaatttctaccataacactgaataaagtttgactttttg

SEQ ID NO: 233603 - DNA, 510 bp, Homo Sapiens
ctcccctcccctacgtcctgcactttctcggaccagtccccccactcccgacccgaccccagccccacctgagggtgagcaactcctgtactgtaggggaagaagtgggaactgaaatggtattttgtaaaaaaaaataaataaaataaaaaaattaaaggttttaaagaaagaactatgaggaaaaggaaccccgtccttcccagccccggccaactttaaaaaacacagaccttcacccccacccccttttctttttaagtgtgaaacaacccagggccagggcctcactggggcagggacaccccggggtgagtttctctggggctttattttcgttttgttggttgttttttctccacgctggggctgcggaggggtggggggtttacagtcccgcaccctcgcactgcactgtctctctgccccaggggcagaggggtcttcccaaccctacccctattttcggtgatttttgtgtgagaatattaatattaaaaataaacggag

SEQ ID NO: 233604 - DNA, 504 bp, Homo Sapiens
atttcctgcttattttgattcattagatccttaaaaggaatggaaagctttgactccagaataaaagacatttatttcctttggagtcttattcttttaagtacttcttaaaacataaccatcaccatcaccagaattttttaaacatgagaataagacagacagaacttttctttggtagtgttaacacaaaaggtgtctgatcttcatacaagcaatctttgctcacatacatcaaaatggaatgacacaaggaaagaaccattttgcaaaaggaaacaagacaagctgccgtcagctagatacgtttcgattgttcaggaaagtctgtacaggaactttgattggcatcctgcttgtctaccttctttcctactttaaagtggtagctctgatcattgttgtcagtgttttctgacccctcagatctggtctttgcctatcatgtctgatgtaggcacttggttcgattaccttgatttgcaggtgaattggtcctcaatc

SEQ ID NO: 233605 - DNA, 537 bp, Homo Sapiens
agaagctcataggctgttaactttttgcaactattcactcatttttaccacttttttttttgggtgagggggtgatttttgtaaggttaacagccagattccattttgacctcagatgctgtgtactttttaatttcattttttatattctgccatcttgactcttctctaaaacagaatgaaaatgtctgcatgctgagcaaaatgcttacgccaagcctgtttttctctgcagagtaaacaggatgttttcagcagacttggctctaatagccatctctaagattagggaacaattgagtctttatgtagaaaagatccattttttccccatcctcagagttaaaattcaacatttaaagctttatcggttattgttttagatttgagatttttgtttttaagtatctataagatctttagaagtgagataaatttttcgctggttaaaaaaaatcaaactttcctctgcagtgtttttgccaagttttgtcacacttcatgtgtatgcattaactatacttcttagtgttactg

SEQ ID NO: 233606 - DNA, 535 bp, Homo Sapiens
cggctcggcccggggtagtttgtagggacgcagctctccacgtgcgcgactgcgaggctggacgctacgggctcctggaaaggagacaccagcatttgccacaatgctgtcatccactgactttacatttgcttcctgggagcttgtggtccgcgttgaccatcccaatgaagagcagcagaaagacgtcacactgagagtatctggagaccttcatgttggaggagtgatgctcaagttagtagaacagatcaatatatcccaagactggtcagactttgctctttggtgggaacagaagcattgctggcttctgaaaacccactggaccctggacaaatatggggtccaggcagatgcaaagcttctcttcacccctcagcataaaatgctgcgccttcgtctgcaaaatttgaagatggtgaggttgcgagtcagcctctcagctgtggtttttaaagctgtcagtgatatctgcaaaatcctgaatattagaagatcagaagagctttccttgttaaagccgtctggtgac

SEQ ID NO: 233607 - DNA, 759 bp, Homo Sapiens
ctgccggaatcttttgggaaatttcccccccctttctctgtgccgtctatccctggaaaccttttttgtgacactgtcacctctttggcccatgctcaaccctaatcccacacttggcgctaaatgggtgggtcacttgagccccagagtttgagacccgcctggaccactctggtggaaaaccctctttcccaagaccatacccaaatttaggtgggccctggtggtacgccaacttatggttctaactactcaggaggcttagatgggaggatccattgagcgtggaaggtcgaggctgccaatgggctgtgatgaccaccccctgtaactgtactccagcctgggcatccagagtaagaccccgtcttcccaaaaaccccacccaacccaaaaaaaaaacgccaatctatcactgtcccttctcacctatgttgtgctcctgtagcaccacctacactgtgtctctcatacttatccgatttccttgtaaatgttttgggttttctttttcccttttgcggggaaggatacataccccactaaatagtggtgttctctgggtagtggggattgtgatggaaggcttcttgtttctacctttattatttgaatattttataatgagcaagtattattttttgccgtccaaaccatttttaaagaaacatactataaacggtacttaatggccactaagtatgtcccttattttcatactctaataaatgattttctccagtccaaaaaaaaaaaaaa

SEQ ID NO: 233608 - DNA, 400 bp, Homo Sapiens
tgtctgttagactatttgtttttaaagtacttgaggtgcagacttcgaccacctcactgtggaggtttycctgtaccacatggggagagggagctctattttcagatccaggggaatctgtagaatcctttggtactgattttggttttggtgacgttgaccgtcctctcaaaggttctgtgaggggcattttcttcttgcggagggtatctggatcaagtgtgtaagagtctgatttagaacgttcccgaggaggatcaagctttgtcttaacaggagcagtacttttttgaggtagatttttatcatgtggtgaggaggagcgtggagaactagcacccgatgggctagacctattggctgggagagtctttggcttaggagatgacaaccgagaacc

SEQ ID NO: 233609 - DNA, 379 bp, Homo Sapiens
catttataccagctttgctgtataggcctctaatttcccttattacctcctctcgagctcaagttcagcatctagtgcatttattcccctccctcttagcattaaactaagaaggcaggatgagtttaagcaggaggcgacatcactaacaggtgtctaaggagagaaggggcaagtagagcagggggcaggtgggagccatggccagttaaaatgagcaaagtctgaatggaggcagcagccatcgggttgaaatagagggtcacggtctaaaggatacagcaagtaaaaaggagagggccttgaggaagaattaggcacagaaagagggaaaagacacaggtttccagtttgtgcaatgagggaagaagtggtgcca

SEQ ID NO: 233610 - DNA, 419 bp, Homo Sapiens
  misc_feature (24)..(24): n is a, c, g, or t
  misc_feature (64)..(64): n is a, c, g, or t
tccatggccttccaggtaataacnttggagagagcttccagccagggtctggtggctgcggggnacgggcatctcagctccactggttcctccattcagcttaaccagcgcctcccaagcagctgcctatagctggctctataactgagcctggggaagatagaggaaagtcacgtccctgccttcaagggtctcgcagacaggtggggaggcagatggtgaactgtgggtacctagaacagcagaagttcactcaagctacagaaatactagaggagggtggctcatgcctgcaatcccagtactttgggagccaaggcaggagtattgctggaggccgggagttcgagaccagcctggccaatgtagtaacacccccgtctctacaaaaaatacaaaaataaaaaaattagttggga

SEQ ID NO: 233611 - DNA, 517 bp, Homo Sapiens
  misc_feature (1)..(1): n is a, c, g, or t
  misc_feature (87)..(87): n is a, c, g, or t
  misc_feature (97)..(97): n is a, c, g, or t
  misc_feature (134)..(134): n is a, c, g, or t
  misc_feature (171)..(171): n is a, c, g, or t
nccctggagtggtgcatgtgattgacgttgaccggggagaggagaaggaaggggaaaggcccaatctggagagggtatggtcttccngtaggacctngaagatccgcactggaaaagcagaccaggactccttngaactgtcctcagatttccttccacccattaaggaancagatttgttataaattagaaatgtgcaggtttgttgtttcatgtcatattactcagtctaaacaataaatatttcataatttacaaaggaggaacggaagaaacctattgtgaattccaaatctaaaaaaagaaatatttttaaaatgttcttaagcaaatatatacctattttatctagttacctttcattaacaaccaattttaaccgtgtgtcaagatttggttaagtcttgcctgacagaactcaaagacacgtctatcagcttattccttctctactggaatattggtatagtcaattcttatttgaatatttattctattaaactgagtttaacaatga

SEQ ID NO: 233612 - DNA, 469 bp, Homo Sapiens
ggttttctggtttcaaagcataccacaaaacatggtcttttccttttgtcttttatttttttgcgatagaatcttgctgtgttgcccaggctggagtgcaagtggagcgacctcagctcattgcaacctctgccccccgggttcaagttgattctcccacctcagcttctcgagtagctaagccacagacacgcaccaccacgcctggctaattttgtatttttttgtagaaacggggttttatcatactgcccaggttggtcttgaactcctgagctcaagcgatcctcccaccttggcctccaaaagtgctgggattataggcatggtatacatgttcttaactgacatatatacatacatacatacttttgtcagcatattctgtttttgtgcatgcatgtggaaacatgtagccttaagttcaagaacaaatacaaaagagagaatgagttatctttaaatgaga

SEQ ID NO: 233613 - DNA, 487 bp, Homo Sapiens
  misc_feature (11)..(11): n is a, c, g, or t
tttaaaagggnggatactttataggtcctgtctcaagtatctgacttccctgggaagcttgattctcacattcaaaataccatggggagtttggttcagttaaattttatcacaccagaattgttgaaaagcaataaattattactgtataattggtgccaggtattgttatttctgtttttaacttgtttggaaaaccatagaccataaactttttctgaacggttcgatgcagagctccaaccgaacttagcaaagaacatttcctcaaagaaacggagtatttttttctgtaacaatgtaactttctgtctttcattcttcaaaatgtatcactataaatttcctacaaaaagagctatttcttctctcagtatcatacagattgatttgtatagatgtatatgtatggctgttaaattgtttgttggtataaaatggtgagtgtcagtataataatgatgataataaatagcggctaacattt

SEQ ID NO: 233614 - DNA, 450 bp, Homo Sapiens
  misc_feature (18)..(18): n is a, c, g, or t
  misc_feature (33)..(33): n is a, c, g, or t
  misc_feature (65)..(65): n is a, c, g, or t
tcctaatggaaattttcngaaccctcccccccngcccttttattctctctcttctgctgatgaangacctttcatccagttcaaagcttttcttaagctcttttttaagttaattgaactttttctttatttatttttcaaaaaaatgtttatatcacatagacatattacatcggctaaagcaagacttggcccacaaatacctatttgttgctgaatgaatacaatggataaagcaaggctgttgtagctgaagttacatagggaatcccaaactctgccctcttagcatcttattctacatgacaactctcaaggtactcacagatctgtttaacccacttgaaaaaaaaacactaaaaatgaagaaatgctataagtataaactatgattttatttataaattctgtattaaaatggaattatatgcaacattctttcattctgta

SEQ ID NO: 233615 - DNA, 470 bp, Homo Sapiens
  misc_feature (245)..(245): n is a, c, g, or t
actccactgagcgcttttagatctccgcagactccactgagcgctttcagatctctgcagactccactgagcgctttcagactggggccatgcctccaggggatgggctccccctgtgttgttttgctggtggccacgaatccgaaaggcccatgctgcagcgtgccctgctttgagtttggttgatatgcttaataagaacattagttttctgggagaatttggtagcacccgttcttcccttnactgtgtgggggaaatagtgttgattgaaaggaagaggactccgagattggattggagcaagaaagtgtgggtatcgtgtgttgtgactgtgtcttctccggggtgctgcttcactggaggtctcccttcagggtctggccctcatgcctggccccaggtgctcgtgtgcacgtgagcggctcttcctgctgactgactacagctaattgacaaaaggcagtttc

SEQ ID NO: 233616 - DNA, 646 bp, Homo Sapiens
  misc_feature (1)..(1): n is a, c, g, or t
ngtcatattcccgaaaaatgaaaatcaaataagctgcaacatggcacttttttattaccagacagcatttaattgaagaatttagaactcacagcagttaaatttccaaggatttttactaacatccacacacaaattctgctttgtgattttgaaatattagtaagtgaccacagatttatttcttggttcttgttctagacaccaaccctgtcccatcccagtatgtttttttaccatgggttgaaggggaaacttccattaactgtgccaagcctgtggtactttcgtgtccatatttgtaacacaactgaactcagagcaccgggctagagtagggtgcttagaatagaggaaggacagatcggccaagttccactgcacgaaatttagtttggaaaaaagtgttccattgctcatgttttataaggtccccttgcaggcctaaaattataaaattctatatattaaactgcttgctctcctccttcccatttaatgttgaatacttatctttacatacagtcgtacttttgcaaagttttctgagccatttttctcccagtccaatcattctttatttcacttatatcactcttgtgaagaaaagtaacatgtagccacatgcagataatatcaaggtatc

SEQ ID NO: 233617 - DNA, 465 bp, Homo Sapiens
  misc_feature (23)..(23): n is a, c, g, or t
  misc_feature (457)..(457): n is a, c, g, or t
agatactttatttttcttagacnaggtatgccacctgtagtcctagctacttgaaaggctgaggtgggaggatcgcttgagcccaggagtttgaggctgcagtgagctaggatcatggcactgcactcctgcctgggtgacagagcgagaccctgactctaaaaaaaaaaaaaaaacgacaaaaaaaccctattacctttcatagcaaactaatggtttaaggtaaatatgctaagcaacaagatttacatatagatgcctcctttaaaatagttgtatcaaacacttagtttttatttcgagcacagttcactaacatttggaaaggcacttggaatgggaacccacagagcaaaactgaaagaagttccactttaattgactaggttaaatacatttgcagcctttttttattattgttttactagcagtagtttccctttaaataaacgacttncattctta

SEQ ID NO: 233618 - DNA, 792 bp, Homo Sapiens
gcgacgagcccccccggcgatggcccccccgcatgaacgaacgtgcccaaaggccggcacgcccaggggacccttaaagccgcaccaaactcacggaacggccgcctgtccttaagaacaccgtattgtgccaattaatggttaggaaagaagggaaaaaacgagggaagcggtcctctctaaatacataggacatgaagaggactgagttgcttcatataacctcagcctgcctcaaataccagattcttttcccatgtcccttgtgcttgccaaacgcatgaatttagactcacccacaatgtaaaactccaaaccttcaattggcctaacttagaattcataaatttggctaagcaaataatatgcaagagtgaattgtgacattgtatttaccctaactatggtgtttccaaatacattttaaaagagcaccttaacagttttcacttcagacaaatcagataataaggacacccagttgaagtcactaatctatgttactagttaataatggccctagtactagaaccattcaaattactttctttaaatattcaaattaaactaccattctccttaatacactgatgttctcacaaaccagtacagcacaactcagtataatttatgtttctgtagattctttccaggggccctattacttcaccacaacactgtcttaaccacatgaattagaggtatgaaccctaagagtaagaatgcattcagtctccatctatactggattagtgctacattataaatttattgaaggtaaagatcattttc

SEQ ID NO: 233619 - DNA, 780 bp, Homo Sapiens
gttccacctcgcgagaccatcgtgtaccacttgatggagggcgtgtatggatcttcgactcagtcctgtttgacaacatcgtgccctacccccatcctgcagaagataccatccacggagcagcccctgtacagcagcagcctgtggggcccggcggttgatggctgtgattgcgtgcgctgagggccttgtggctgccgcaactacactgtaggggactggctggtctttgacaacatgggcgcctacactgtgggcatgcggttcccccttttgggggacccaggcctgccacatcacctatgccatgtcccgggtggcctgaggaagcgctgcgaaggcagctgatggctgcagaacaggaggatgacgtggagggtgtgtgcaagcctctgtcctgcggctgggagatcacagacaccctgtgcgtgggccctgtcttcaccccagcgagcatcatgtgagtgggcctcgttccccccggagaatcccagcggggcctcagagatgcatctgggagaggtggggaagatggcaggcaagggtacccttggccaggactctggtgcccaccctgccacccccgcgctccacctgcagtgtttctgccctgtaaataggaccagtcttacactcgctgtagttcaagtatgcaacataaatcctgttccttccagctgtgtctgcctcctctgcagtgcaaggggcctggtcagccaggtgtgggggtgttattgggtctcctttgtctcctcccactatgccaagatatgcaaattt

SEQ ID NO: 233620 - DNA, 801 bp, Homo Sapiens
atatcccgggacccggacccctttttaaagagagagggtttgcaactagtagtttccaaagagtatttgaagtccaaactgcccggcattatcccctaaaatgtatcttcttatagtcaagtagcaaacacagtattaaaagtccatgtcatagattgagatctcatttttagaatatgtagtctggaatataaacatatagatattatgaatactcttgtaaaaccaaaaggagaattgggtaaccaaagtagggtatcctggtctggaggcacctccaggcatagggaaagttgcataacaggtaggtgagtaaagtgctctctgcaatagaaaagaatcacttggtgaggccaaaactcctaacaatcctaatatgcaggtaaacttcatcgtccaaagggctgatcggaattgttaatacttccattgccaaaatctgactctatttgaggagtttcagatggaagcctttaacttttaaaatggaaatcaaaggcaaagcagaattttgctttaaagaaattcctttcataggagataaatttcattaaaattttaatatggtatttggaaaatacgaaaacaattaaaaatcatatataagtatcaaaataatttttaaagtcctttttaaaggcacttaactgttctaatcctaaatgaaagaaaataatcctaaatcaatattgttctccctcccatttagaaaaagccttgaaactcgattgaattttcttccaagcatacttaaaggaccaacaatcagtctacaattctaatcctttcctattaaaattc

SEQ ID NO: 233621 - DNA, 750 bp, Homo Sapiens
  misc_feature (239)..(239): n is a, c, g, or t
ctccctaggaccgtttttttggacctcccaaataccgtggtaattcaacaaacactttggattagatcaagcacatattgaatataacctgataccagttatttaatttgactatgagatcatattgtagagtgaaacatgctgatctagagtccaagtggggtttgcccctagttccactactaacaatgtgtgactttcagtaagtccttaacttttccatttctcaagtttcttantatgtaaaatggaaatgaaaacatcctctctccctaggttgttaataagatgcatggaataatgaatgtgaaatatattttaacatgaattatcttcaatgtaattcatctattttggaaatgccttatgtgtgcatattgagcttcctgaaaacaaagcacaatcatatacagagtgattaagaagaagatattaagatacatatgtaatcacagtgttatattaagatatatgtgtaatcaggtatacatatgttaaacattaaaactcccaattgatggctaacattttatttaagttctataattattatctccataaatgttaccattatccattgttatgtataaacaatgaacataagaatatttaaggtaaaacttaggaatatgcttctgaaaaaagctagcccacttaaggttcttttctctctctagtgttgatgttagtgccatgaagttataagaaacatatgcgagaaattataccaaaaaagtgcgaattttttcc

SEQ ID NO: 233622 - DNA, 419 bp, Homo Sapiens
  misc_feature (4)..(4): n is a, c, g, or t
cagngactccacctcaaaaaaataaataaataaaaagaatttgttgttatcccacttcagagctcattaatgcccacatttgtcaacatctccgttgagaaatccacaatggttttgtaatctgctatgccatcaagcccctgttttactttcaagcctacacacaatagacgttattccaattttaaatcctcttttccattacttgctaaactctatccaactaagttcctcactctcctatcaatagtttatgtacagagttgcccacgatgtttcattaatatcgttcctggccgggcacaggtgtctcgcctgtaatcccaacactctgggaggctgaggcaggtggatcacaaggttaggagttcagagccagcctggccaagatggcgaaaccccgtttctactaaaaatac

SEQ ID NO: 233623 - DNA, 608 bp, Homo Sapiens
  misc_feature (13)..(13): n is a, c, g, or t
  misc_feature (190)..(190): n is a, c, g, or t
atatataccattngtaggtgaatttccagtgcacatcttttagttgcataactagggaatatgaaaatatctttagtctaggcgtagtgtctcgtgccctataatctcagaactgtgggagcccgaagccagatggatcacttgagcctaggagtttgagactgtcttgggccagtgccagaccctgttnctatttaaaaaaataaataaaatggcctggtatggtggcatgtgcctgtggtcccagctgcttgagaggctgaggtgggaagattgcttgagcctgagagtttgaggctgcagtgaactatgatcacgccactgtactccaggctgggagacagtgagatacttaaaaaaaagaaaaagtatcttcaaaaatgttctgacgtaatctgtgctgcctagcattttgttctccaagctgagtggaataatgcctttcatttacatgttaaatggaagcctatttttaggctaaatgtaagtcttaaagtactgagcagaaatatcttccacatcctattgttgcattaaatccctactgatattttaatggtaattgtgatagtacctgaataactattgtgtaagaataaagttaatgt

SEQ ID NO: 233624 - DNA, 500 bp, Homo Sapiens
  misc_feature (92)..(92): n is a, c, g, or t
  misc_feature (106)..(106): n is a, c, g, or t
  misc_feature (181)..(181): n is a, c, g, or t
gggctcaagccggtcctcctcccctcgacctccccaaagtgctgggattacaggcgtgagctgccttgctcagcctcagcacctcttaaaanggagttaatttcangggttattcaaagtgcaggaaatttaagaatgaaggaataatcgttatcccataagccaattattttaaacttcnaaattataagagtactatgagggttttgttcgttttgcttagtatttgaaattgtacatatttccatatattttctggccataacctgtacaagtatttgtattttttctgagtttcaagccttctctttggaaaagggaaccctgacttagagtgccctgtgattttttttttcaacctgtgtacatttaaaactatagattatagccatctgtttttaaaatagactgacaggactataaatacatttttctttctgttgtattgcttgtcttaaaaataacttatacccttccttttctccttcttacccccaacc

SEQ ID NO: 233625 - DNA, 427 bp, Homo Sapiens
  misc_feature (9)..(9): n is a, c, g, or t
  misc_feature (19)..(19): n is a, c, g, or t
  misc_feature (43)..(43): n is a, c, g, or t
cggctcatnttttgtattnttagtagagaccagggtttcaccntgttagccaggatggtctcaatcttctgacctcatgatcctccagcctcggcctcccaaagtgctgggattacaggcgtgagccactgtgcctggctggtatgccaaactcttaagatccttgtatagtgtgaggaattcatattgcacattttgaatacatctattccatgttagtattattattcccatttttagatagtaaaactctttttatagaatgcttggaggggtttatccattggttggtggaagtatagcatagccgcagttactgtggtgatgcatcattaagcatttttggaacctaatacagccctaaggttaagaggagaaatacagtatctaatatgaactttgccttcaagaagtttataaaatttct

SEQ ID NO: 233626 - DNA, 606 bp, Homo Sapiens
gagctgctcatgagtatcctcgagtggatgagtgaacagatttctaactcaacagacataaatccccagtggagcttaagttaaatgcctggtttttaaattaagaaatatgacttcagcaatatgtataaaccaaaaggaacattaaactaatgatagtatctttacaaatgagttgttgaggatttggagatagtttgtataacataaaacataacaaatacagtagaaagcatatggtagtgggattgaagaaacccgagaggttatttatcccaaacaccacctgatgttacagtgcttattgagtgattgatactgtgtcctacgtagagggggcacataaacaattcacatgtaatttttctgtattacattgacagatatatataaaatgatctctgcatctaaaattcaagcagtccagcctggaatactatcaccaaaaagtgaaaactgattttagaaacgaataatattttgttgtgaacaactctgaaaacatactggtcgatgaggtttatagctagagtctaaaatgccacatttatatgggtgaaacattttcagcttcaggagaaaataaaaccaaaaaaaaaaaaaaag

SEQ ID NO: 233627 - DNA, 638 bp, Homo Sapiens
tgcatgattagttcagggatgagtggtttctggggcatctgaggtcaggagttcgaaaccagcctggccaacttgatgaaaccccatctctacccgttctggagaacaggtcacgcctgtcctggagacagtgtgccgggaaaagggaacgtggtactcactggatgcacccaggccgggcccgagcctcccaccgcagacagtgtggaacagagtgagcctgagctgcccaaggcgatgccctttgtgctgtatgactggaggcctctccgcgtgggtacttgggggtggggccacaaatctggcgaaaaacttcatgctggccgccgtgaggttttactccagcgttcccgccattgtcatggcgggtcttcgtcctaaactgagaagaaaagcattcctgtttgatcaccgccttagttaccagttctggatcagtcagtgtttctgcatggaataacaaccattaaaaaaagcactgggttctgccctttcatctttgtaagagattcttgcctctagcaatgacaacctgtgatgtctcacagtagagcacttagtgcagaatcaggtccccacggctgttgctcaataaaagtggcggaataaagtgcaaaaaaaaaaaaaaaaaaaaaaag

SEQ ID NO: 233628 - DNA, 484 bp, Homo Sapiens
tgcttccgctacaagcagtcgctcaagtaccacctgcggacccacacgggcgagtgagcgcgcgctccgcagccgccgcccggccaggtgcacgggccgtgccccccctcggacaccgccaggcccgagcccagcgggcgggggcggggcgccccccagcccctttgccgtgagctccccctctcctctcgtccctcctcccaaggacatgggggcagtgagaccaggtcccttgctgccgcgtttccccgggggccccaggggggagggcgcggacctggggaaccctttcgggctgttaatttccttgacaataaaatggatgaaaccaatcagcacggggggcgtgatttggccgccggccactcagaggggcggtgtagggcccatctagttggggatagaactttataattaccttttggatactgtggttctatttgataataatagagtaatttttaaaaaaaaaaaaaaaagggcg

SEQ ID NO: 233629 - DNA, 463 bp, Homo Sapiens
cagtgaagaggatttcttaaggatggaactcattatattaaaggctttaaaatgggaactttgtcctgtaacaatcatctcctggctaaatctctttctccaagttgatgctcttaaagatgctcctaaagttcttctacctcagtattctcaggaaacattcattcaaatagctcagcttttagatctgtgtattctagccattgattcattagagttccagtacagaatactgactgctgctgccttgtgccattttacctccattgaagtggttaagaaagcctcaggtttggagtgggacagtatttcagaatgtgtagattggatggtaccttttgtcaatgtagtaaaaagtactagtccagtgaagctgaagacttttaagaagattcctatggaagacagacataatatccagacacatacaaactatttgtctgtgctggtgggaagaggggtc

SEQ ID NO: 233630 - DNA, 318 bp, Homo Sapiens
cggggttaggatggacgaggacgtgttgcaccctgaagagcctcatcatcgcctgctcttgaggttcacagatgatacctttgatccagaacttgcagcaacaatagaacatgaacttcatgaggacagagacttgggcttattcaccaccaagtccccagttcctaactccagtcctttggagttagaagcaggttgcccaaagttcatgatgcagaaaaaccattttttccgagatttataggataagtcctgtaattccagattgcttggcgccaatcaggtactcaataaatgtttgttgagtgaatatgtgaa

SEQ ID NO: 233631 - DNA, 270 bp, Homo Sapiens
ctcgcttcacacacatgggccttcttcaggtctcaatgataagtgacccctttccctggaagggcacaggaaatgtcatggaagatagcactaacagagtcatacagaacaggtgcacatcagctgtatgaaggcaagtggccttctaggcacacctgtaaaaacagctggagcaaggacacagcacaccatcttgttttttaagctatgcctcccattagtggatctttccatgatagtaaatatcagagtgctctctgcataactggg

SEQ ID NO: 233632 - DNA, 378 bp, Homo Sapiens
gtgttttttttttttttttttttttttgttttagagacagtctcactttgtcacccagcctggagtacagtggcatgatcccggctcactgcaacctctgactccagggttcaagcaattctctggcctcagcctcctaagtagctgggatcacaggagcacaccaccatgcctggctaacttttgtatttttagtagaaacggggtttcatcatattggccaggctggtctcaaactcctgacctcatgatctgcccaccttggcctcccaaagtgctgagattacaggcgtgagccaccgcacccggcctgtgcctctcttttaacacttatattttgatattttctggattgtgaagcctgttagtccttctcac

SEQ ID NO: 233633 - DNA, 334 bp, Homo Sapiens
aaattgcattctttgatgatttagcttctggtagggtccttcagaccagctgacatcagtagtttcatcagtatgcaggacctgaaagaatgtctcgaagggaaaacttagcatttcataatgttcaagctgttatctatagggcagttaaggggaactataatcttgtaacagactccacataattctgaagcaatagccaaacaactatgaggaaggggtcagcaagcaaagtgacctagtgattaatgctgaatgtggtgcagcttggattatttatgtttctcaccctctcttcttctctgattaattttataaagtttatgtacagttc

SEQ ID NO: 233634 - DNA, 515 bp, Homo Sapiens
ttttttttttttttttgtcattgtctttggtttttttgttgttcctctgggggggaacataattatttttaaataagcatagggggtgcagctactttaaacatcaattacttgtcaccataaatttagtttgaaaataaaaaattattatctgctaaagccatattctttccacaaggagaagtagttcttttacctgtgcagcactaagaaggtgtgtccgataaattgcaattacttcttggtgctgtctgtcagcatcctagaaatgtggaaagatggacagatgtgactatcagcgttcacatttccaaactttggacaatgctcaggcttcatgctacaaactattattattattaaggcgatcctgctacttctaacacaaactaccttggacctaccagatgcagaatttcaaacgtaacatataaacttctgtaaagaatgtgtggctaatgacagtaatgctactttccctaagcaacatcaaattattgctttagttcatatct

SEQ ID NO: 233635 - DNA, 460 bp, Homo Sapiens
gcactccagcctgggtgatggagtgagactctgtctcaaaacaaaacagtagaaaagaaacaaaaacccatgtgatgagaaacgggactttatggcagcactgacctcactgtcctcaatatgacctattaaagaacaagcattctgagcattctgtaatattggttccaggtatcaattacaacctatcatgatcatggtgaccctattacctatattctctagagcatgcaaatatgatttaattttctcctaccaggaaaaaggcccaatttcacttccttcccccgatcaatgaatacaccagaccacatgttccatgattggtaaaaggcagagataggggtcttactttcagttcattcttaacatggtgtaattggagactgcttagcccagcttgtcttttttctttgaccccaaggaaatgaaacaaaaatacaagcccacctgtatccta

SEQ ID NO: 233636 - DNA, 465 bp, Homo Sapiens
  misc_feature (30)..(30): n is a, c, g, or t
cggggtcgtgcccattggactccagcctgngcccatgtactcccagcctgagccaagagagtgagactctctttcaaaaaaaaaaaaaaaaggtcctattctatggattaatagacatgcctaaacatgtttactaaattgaactctttatcaaatgaagatggtgcaagtgatcctagatagcttattttaaatttgttcacatgttgatcatatatgttgatatgttgttcacatatattgataaaacgatgttacttagcctttatttgcaattttgattcagaagatatatctagaaccaaagttatacattttcgcattcttcctaggtgtatactactttttgtcttctttgtttctaaaatagttttggcaattaaacactaacattaatactgactttgtggcagccatttctgtagctgccatgagaattagttttaagatccgacaaagatcacg

SEQ ID NO: 233637 - DNA, 365 bp, Homo Sapiens
ttttctgctccattatgtgtaatgttaggggaccatggttgtatatgtggtctgtcgttgacccaaaacgtctttttggggcacatgactgtatataaatgcataaaagatgtgactgcagatgactcctgtgttatgccatccaagattaagcaccctagaataaagagaaattccagaagtaccttgattggccacataggacccaagaatgtgatgtgcctactcttctgctccgctagctaggcagatagggtacttgattggcagcaccaccaaaatcacatggttggaatggaggagaagcagttgccctccaggaaaggtggcagtggtgctggggtgttttaacctttgttttatcc

SEQ ID NO: 233638 - DNA, 328 bp, Homo Sapiens
tgatcaagcttcggcaacaagagactgctatcaggatgcaccaggcccttgggttttggacatataaattacccaagatggttgccatatacattccctttgaatggcagctactagcctgctattggactctaatttaaacagaacacttgaccactgaagcactgtatgtgaccttaagacctgagctgcccatctcatgcaggtattattaacgaaaaataaaaatggaagccccagtttagaaataccctaaggctgactacccgcaaccgtgtaaccaaaactaatcattctgattttcctgtatgctgtctctgatcatata

SEQ ID NO: 233639 - DNA, 388 bp, Homo Sapiens
  misc_feature (384)..(384): n is a, c, g, or t
tttgctcatttgaccaaaaagctcctgtttccccatgccttgattgttgagaattcatggctttgaggacccctttataggtcaccatatccgtatttctgtcttgcacattgggagagatgattatccctgaaactaactttccttatgtttgtttaggcattagaggttattaaagcacatcctgagccactttacctagttgactttggagttgaggaagaagcaccaactatttagtgatttgatgttccatgcatatacgaaagtaaaaggatatttgattgaatacctatgtcttgaatcacacactgttactttccctcttaagatttctggtttagctggtctgtccctcagtgagagtctctgtccttctctcanatac

SEQ ID NO: 233640 - DNA, 472 bp, Homo Sapiens
ggcaacaaggtgaaaccctgtctctactaaaaatacaaaaaattagccggcagtggtggcacatgcctgtagtcccagctactcgagaggatgaggcaggaaaatcacttgaatctgagaggcggaggttgcagtgagctgagactgcgccactgcactccagcctgggcaacagagtgagactctgtcccccccgccccacaaaaaaaagccagctgggcatggtgactcacacttgtaatcccagcactttgggaggccaaggagggcaggtcatgaggtcaggagatcaagaccagcctggccaacatggtgaaaccccatctctaccaaaaatacaaattagccaggcgtggtggcgggcacctgtagtcccagctactcaggaagctgaggcaggctgagacaagagaattgcttgaacccaggaggcggaggttgcagtgagccgagatcccaccactgcactcca

SEQ ID NO: 233641 - DNA, 516 bp, Homo Sapiens
cttcagcagcaacagcagtgacagcagcgacagcagtgatagcagtgacagcacatctgacagcaatgatgagagtgacagccagagcaagtctggtaacggtaacaacaatggaagtgacagtgacagtgacagtgaaggcagtgacagtaaccactcaaccagtgatgattagaacaaaagaaaaacccataaggttccttttgtgaaaagtttggtaatgggataggaaaaaaagatttccaagaaagtaaagaaaggggagaaataaacataagacgtatgtaaacaaaaacaactgggggaatcaaatcaaacagttggattcagaaccaagacctaactcctgcagagacagactctgaatgcatgaactttggtacatgcctgttaatattcatgttctgaaaatattttgttaaaagtgtaaatctaaacataaaagaacaattaaaatattctttaatacttcacacagaaacctcaagtaatcaactacacgaacttcaatttaag

SEQ ID NO: 233642 - DNA, 367 bp, Homo Sapiens
ccagcctggtgacagagtgagtctccttctcatgtatatagtgaataggcacaataagttatacatttctgcccaagtaagagccttccattttgtggatgtaatgaaaatatcttcaagcactgtataaataaattatatgtctgatactagccttccattgcctggatcacatctgattgtcctggtaatttgagaaatagggtagccccttggtatggatagtagcttgatgacatggaattcagggtaaagactatgatggtgtcacttgtaactgcttttgtgctgtataaattgtcatggattaagaagagagttggtctgggtgcgatctcagctcacatatcactagtgaattcgcgcc

SEQ ID NO: 233643 - DNA, 312 bp, Homo Sapiens
ccctaaacatcgacgttcctggaaatctttggcctctgagctgacttcttctctgttgcttgtgagccaggaatttaacagctctgttgtatgtgcaggctgcagatgcttctcttcagcttttgctatccaatgtgtgtgtgtgtgtgtgtgtgtgtgtgtgtgtgtgtgtgtgtgtgtgtgtgttggataaacttaaaaaacctgttgcttccatgcaacggcccacacaacttgggactcatggtcagcctcaccttccacattggctaaaactctacaggaaacagtttatggagtttaaggaagaaa

SEQ ID NO: 233644 - DNA, 496 bp, Homo Sapiens
  misc_feature (14)..(14): n is a, c, g, or t
  misc_feature (89)..(89): n is a, c, g, or t
  misc_feature (492)..(492): n is a, c, g, or t
atctcggagttganttgctcttccttcaacttggcaaaagggagacaccatcagccggatcagagggggtcatggtgagatggaacccnccgaaggtggtgtacagagctggcgctgccaatggccagagtgccagcctttctacctccttaaccctgcaaaaatcaaacgtgctagtacgcactgtccatccacactggaactccagttggttttagtctgcgatgatgactcttctgggttgacttttccagttcattatgcagccctcttgaagcaggcctcccaaacttagcagacaccaatgagaacctcacagagaggctcatcaagcaggctggtgaaactgggtgttacttcctgttccatgggtaccccatagtgtttgggaaacaccgggctgtggttcaggagaatttcacatatgctaagatggagaaagaacctgccctttacatttaggcttgggatgttaatttaaagtttgaatgnccca

SEQ ID NO: 233645 - DNA, 300 bp, Homo Sapiens
aggctccacattacaatgccaaatcctatcaaagggtattggctgcctgtagtgctttagtgcagattatgaggcctacttgaggctctgagaaaatagaggagttctgagattgactactaatgtctgccatggaagtgagaggagcagttatggtacgagtgtcatatttttgccagttctgactgaaggctctgacttcaaagcccaggatctttctagcctctacccagtgtcactgactttctagctcattgccctagtgaaattggcttgccaaaatatattgacaaaagtcat

SEQ ID NO: 233646 - DNA, 442 bp, Homo Sapiens
gttgcagagagccgagattgcaccactgcactacagcctgggcaatagagcgagactctgtctcaaaacgaaacaaaaaaacacacaaatgtttagtcatgttacttatttctggtttccagcctgactttataacattcctgactctgggactctccagctctccagaattatgctttgaagaaaaaacaagatagagcacagggcccacatgtctcttataaactgtgaaccaaaatattacatagcagccatctgtcagaactgcttccaggctattgtcctcagtcacaatcctaaatcaaactcactttctttaacaaatttaattttttttcttcagtccacatgagtaatctaaaagaaacacatagacagaagaatctctttattatcatctttctaccagtcacatcacgcattaaaaaattaacacgaacgt

SEQ ID NO: 233647 - DNA, 471 bp, Homo Sapiens
ggaactggagatgtctgaggttaggtaacaatgtacgggtgagggctactaattcagttcctcaggcagagtggacaaaaggcttggtttccgactcaatgactagatacttggttctgatagcacagggcataatagattttccctgagggtctgctgacaagagctaccagtgaaagcttcagctactgaattaaatcttgggtctctagtcatggtacagagagatgacgaataagactcccacaatggtggataaacacaaaagataaaaaattaaaagtctgacatttaattgatcagattttacatttttagagtgaaatcaagtaaatgcaacaagatactattgtagtgtcagcaagatactatttcacatctaccacactacgaaaactgacataggggttccacatactatagctataaccactcctctcagaggactctattggtaggagtcaagaaaag

SEQ ID NO: 233648 - DNA, 441 bp, Homo Sapiens
  misc_feature (312)..(312): n is a, c, g, or t
tgatttcctgccaagctacctaactactctaagcattgattttctcatctataaaatgggggtaacaccagccctccatggttattgaatattacataaaacaaagtcatggaatgtgagggcgatctggctgtgacatctgtcaccccattaatcgccagggttgattcggctgatctggctggctaagtggctgtccccttcctccctcaccactccatgttcatgcctcccaaagctgtgttctcagtcaaagaggacaaccatctccactagaagaggaccagtctttggtcaagggtatacgagtantgcgcttccctgctggaacctccagacaagctctcaagtccatttgtaggagaacatagggtagtcaagcttccaagattccagacacatccaaatgaagtgctgcatgtggcagtctgcctttcttaa

SEQ ID NO: 233649 - DNA, 465 bp, Homo Sapiens
cctctgccactggaaaggaagggttggtttaggagaggagtctgaggactcccagcaagccctctcttcagtattcttcctcgttactgcttccagcctaacagcccccttctccttggttccatccctcaaccctactcccacgtctagggcagaatagtcctttcagccctctcctccctgactccctattctcaccacctagcagaccctttccctcaccgcagtctctgcgcggccgattatgcttgatgtctagtcgctcttccgtaggcccccgaagcaccttggtccagttcaaagagtggtggtagcagagctgcctattggcactaatatagatacgcccagcactaatttccttcagggatcggaagcccagagatgtgacattcaagttcttcatgatcaacaatgagaagccccggctgagaataaggagacagcgcaatgagtacagagtta

SEQ ID NO: 233650 - DNA, 416 bp, Homo Sapiens
caggtggttgggggtaggggtacaatgcctcatatggccatttctacaaaatatatgactggcttaatcatattttttcattcttttctagtattagattttattcattttctttgctttttcatttatcttatacaagagcctatgaaacagcatacttcttaggccaaccctccattcatgtaaagaaataatacaagaatcaaagacattttatattgaaaaagaaaatatacttatattgtgttaggcgttgttatcatttatgaaaactaaacatgacaaacagagtcagtttctactcatcagcattacaatcagggatttagaaaacgttcaattcccagagtattgtggtgtttccaaacactaatcattcattttgcccttcccttccagctagaagcctctcctta

SEQ ID NO: 233651 - DNA, 344 bp, Homo Sapiens
ccttatgccgtgggcccgccttatgccgtgggtgaagaagctgggatttctcctggtctctctgaccctggaacacgtggcctctgggtgtgcccagtaagagacgttaaagaagggcctcccccatgagccctgactgaggcggggcgctaggcaccccatcgatgtgcttcgtggttcacaggggagaggcagagggcctgtcggggggcagcgatggggcagccagagggggcggtcctggcctgtgtgagcctccttgaggggagggtgccaggaactaccccatgatcttctattctcagtaagccacaagaccccaacccagatccccacgacataag

SEQ ID NO: 233652 - DNA, 504 bp, Homo Sapiens
ccaccggcaggttgtactagggttctctcataattggcttagctggaatttgaatctaggtgtgacaattacaaagcctgtgttctttctttatgcttcttgaggagcacagagtggccagtatgtgggtgggcaggcctgtcatgacatcaggacaggtgctgaacttcagtgttctcatgtgatgctaactctgctgtgtggttttagactatgtatagccaggacaggcatgttgatgtcctcaatctctgctttgcccagtttgagccagattccacagagtatatcaaggtgagtggattttagtttctaaaatataggcttaagtatggttatgagtaagatttttaatctagctcaatgaatttcgttgtaagttttgatacaggggaaagggaagagaaatacctgaaaatctattgagtacagttgtgtgccagatatatattttataatcacacacccttgattaaagatgagggagtacacctgccgtggcga

SEQ ID NO: 233653 - DNA, 559 bp, Homo Sapiens
acaggagttctccaatttaaattatttaaaaaaaaaagggagagaggtgcttactggcaacattaatactagacaccagacaagacagtgaaacggtttggtcagaactgaggaacaccatttccttgaaaagtcttaaaaatagctaaccaagcactgccttaagtccagtgagtacaatgttccatacgtttccacaaaaatattgtaactggcattcactcattatgatccacgtcatctcagtctccactttccaggcaaagtgtccctgtcccaccgcctctagctacaggctatcgtctccagctgctgttctgcttccgcagccatcgctgccgcctgcaactgttctgtctcgctctggatggcactgggggtaacctgcttcctttcactgtgcatattgttctcgtgccttttcagatcagatgccttggcaaatgccttggtgcaggagccacacacaaaaggcttttcccctctgtgtcttctttcatgatccttgaggtgagacttgtgtttgaaggctttgtcacacatgtgcacgcagacgcgc

SEQ ID NO: 233654 - DNA, 567 bp, Homo Sapiens
ctcccgagtagctgggactataggcgcatgccgccacatccagctaatttttgtattttcagtagagacggggtttcaccatattggccaggatggtctcaatcttgtgacctcgtgatccacccgccttggcctcccaaagtgctgggattacaggtgtgagccaccgcgccaggcctatatttacccgatgtcttaataacaatcacgtatagataaaaacgattcaactgagaatctgaacagagctgactccttaggcagtgaacatacggctaaattaacaatcagcaggtttacagagattcctaatctcaagaccagcaaaatagggatcaagtgagactctgaaaacctgaaaagccaccatctcctgcctgttccctgcctgtgtgactctaaggacttggggaaggccctccttcccactttggacctccaggccctacacctccaacttggatcagaatctacactggggtggctgaggcacctccccaagagcttggggtggtcccggctatgaactggccccacgtgctgcctgcctgtgccttgtcgtgagag

SEQ ID NO: 233655 - DNA, 202 bp, Homo Sapiens
gctctcttcaacatctggatccatctcagagcactggcaatctgtgtttaacagcagtcatgtctttaccagatgtagaaagaatgttctcttcttttggacttacctaaatatcatttggaaattggaagaacaggaaagcatatcctttttcactagctataaaaataatttggaaggagaaggaaacaaaaaaaacctt

SEQ ID NO: 233656 - DNA, 497 bp, Homo Sapiens
tagatgaagtaatgactaaaattctgctggaaacccagcaaagtttcttttactggcattgtttggtaaagagggcccccttcattaaacttgaatattgcaagcaacactctgtggcagatgatcaaaactgtctgacacaatttgagcttgctatagcaagaaagtctaacctattccggtgttctctctcccatgagacaagccgttatatagacttaaacagtgttccacctgttggctaaagctgggttgagttaatgactttgttcatgagggatgacagggatccttagggccacctctccctagtggaggcatcatcacttcatcttactctttcttagcagttacaatacccctaatattttgtgtcactccattcttagactaacattcttacgtatgaaatacatgatgaatttgatctgtgaagcctcttaggtagcattgtgtgtgctgtgtggtttttctgaggggatccataggaaaataag

SEQ ID NO: 233657 - DNA, 549 bp, Homo Sapiens
atcacttttattattttatttttattttctcatttttacatcgtgcctgtgttacctcatccatacccattgcttgagctataagcaatatgataaaatctccctaagctatagccaagacctgtcttccagctcaacccattttatacctgcttgtctgccaggattaagtaagtgcaaaactgaactcattttctttctaaccaagcctgttctgcacttcccatcttggtgaatggtaccatgagccacctagccacccaccccagaactccacgttatcttacataggtccctcattcctctgttccattacacaatcatgtatacagggctgatgagtctgtcttcttaatagttctcaaatctgctcttgcctctcaaattccactaccgtggtcttaaaggtcctcatcacttcttgctgtccgccctctacaatgaactaaggtttttttccaaaacacaaataatcctatttctctcttgcactcgtcacttaagagagaggttgattcctcagcacagcacagagacgcaagaatgatg

SEQ ID NO: 233658 - DNA, 348 bp, Homo Sapiens
gagcaagattctatcaaaaaaaaaaaggcagtggcaagtaagttatagaagagaaatgctgctagaaggaattaagcgttgtagtaaacgcgtgctcatcctctaagcttgaagaagggagacgaaaatccatttgtttaaattcacatctcaaggagggagaacccgggctgtgttgggtggttgccaatttcctagaacggaatgtgtggggtatagaaaaaggaatgaataagcgttgtttttcaaatagggtccttgtaagttattgatgagagggaaaagattgactggggagggcttaaaatgatttgggaaaacaattgcttttgaggctcctgacaccga

SEQ ID NO: 233659 - DNA, 621 bp, Homo Sapiens
atcagaccctttaccaacaaatgaaaatgatgatgatatatgcaagaaaccctgtagtgtagcacctaatgatattccactggtttctagtactaacctaattaatgaaataaatggagttagcgaaaaattatcagccacggagagcattgtggaaatagtaaaacaggaagtattgccattgactcttgaattggagattctcgaaaatcccccagaagaaatgaaactggagtgtatcccagctcccatcaccccttccacagttccttcctttcctccaactcctccaactcctccagcttctcctcctcacactccagtcattgttcctgctgctgccactactgttagttctccgagtgctgccatcacagtccagagagtcctagaggaggacgagagcataagaacttgccttagtaaagatgcaaaagagattcagaacaaaatagaggtagaagcagatgggcaaacagaagagattttggattctcaaaacttaaattcaagaaggagacctgtcccagaaacatcgaatgaatgctgaaattcctagtctggtttcttcagtggtgtgtttgtgttctagtacacctgcaaaagagttaacccatcgtc

SEQ ID NO: 233660 - DNA, 776 bp, Homo Sapiens
ccctctttttgcttgtgttggtccccacgcatcttaattttcggttacataaaacacagctgggctgggaagtgtgccttccctgaacccccaggatggagctgagcaggtaacaggacaacacaggagatgaagggcattgcggagggcattggacctcgcccacccactacagttaactcaagacgacataccatgctacaaagtcaccccattaacacatcctttccaagtcaagacactgccttacaaatgaactccaagactatagaaatgataaaaaaaaatcttgttcaaatatacagtatctgctattataggaaacatcagggcgtacatatttaacacagctgaacagtaagatacaggagccagaggaaaggacagcgaagctggaagcatctccacagtcctgctaagcagaagctaacccacagatctgcagccagctcaggaacattcccctccagaagtgggggttgatgggcctgagctgtgggtgccaagccagagaaggagggattgattctagggtgcaagcacttaggatgctttttggaataaatatattatttttcgatttaaatagatgccaataccctgatcctggacctcagcacattctcagggcagcctcagggaccccaaaagctgcgggctgtaagcagcaggggacttgcctgggagcagtcggcactaggtagcaggcaagccagccagcacaaaataggtagttttaggggagtaggtagtagtgagattcactttcttgcggg

SEQ ID NO: 233661 - DNA, 928 bp, Homo Sapiens
gagagtgtgttttctgtcgcttgttctttttttttttcttgcggataccctaggccgttccttaaaaggtcggaaatagctgcctttatcttttcgcccgaaaacccggggttttttttctttgtgtttgcacagagcacggcaggcagaagtagagattcttcaatgtccatagctgccggaactttcatggcaacttgtctaatgccagcagccaaccatgttttagttgctgggctacatacaaagtaccacagactggaggcttaaacaacataaacttattgtctcacagatctggaggcctaaaagtgtgagattgagagctggctggcttggttccttctgagggctgtgaggggaggatccattccagacttctctccttggcttgctgatggctgtcttctctctctgtcttcacatcatcttccctctgggtgtcactgtgttcaaatttcccttttatagggacaggttagtaagattagggcccacccttatgacctcgttttaacttctataatgatctagtttccaaataagttacaccctgaagtactaaaggttaggacttcaacatgtgaattgtggagggatacaactcagcttgtaactcatcatatccattgtcctttgttcaacgttaactggtttaacccttccacaccttcatttgttgatgtcttgtgggtgggcccagcagttcaacgtaccacattcataattcttcatctttcacaagatttccaatttcactttccagttgaatgagaaaccattggacattgatgtgggagtgagagatggaccctcttacaccagtgctgtccaatatggcagccactggccactatgtggtctgtccaaaccaagatgtgctacatcgagtaccaccagcagtgtctcggcgtcgagaagtctttcc

SEQ ID NO: 233662 - DNA, 1000 bp, Homo Sapiens
tcgctgttgttctccagccgtggtgccgcccttttcgtggttctctcatagcagtgttgcctttgaatggtggtatgctcgggggccatctacaacactgtgaatcttgggccctcggggtgtcatgtcgttttctgttgttcacagcctggcgggttgaaggccgccggttggaaccctcctgggggtgcacaccacaagggatagggggcactttgagcacagtttaactccgtgggctttccgtgggtctcccacctgtgtgtccaccggtctggatacgcggacctcatcatgattcccacgcggtgttctgcgttccccgatggcccccgttcgattcccaggtcgtggcttctccctgggttgtccaagttcggagacggtcctctgagccccgcaagtactctgcaatgagtactgaacctacaaggggagagcacacagatagacagattgccaggctggtggatgtgtctccctgacaggggttctcctccttcccgtgtgcctcaggcacttaacttttctccagaggaaagcgattctactgttctccaaaagtactgccacagaagtagctcgggaggaagccaagccgggtggagatgcagcccctagtgaggctcttcttgtagatatcaaactggaaccactcgcggtcactccagatgctgcaagccagcccctcattgaccttcctctcatcgacttctgcgataccccagaagcacacgtggctgtaggatctgaaagcaggcctctgatcgacctcatgacaaacactccagacatgaataaaaatgtggccaaaccttcaccggtggtgggacagctcatagacctgagctcccctctgatccagctgagccctgaggctgacaaggagaacgtggattccccactcctcccaaactcagcctcccaggtagctgtggctccaggcgaactactgtatatagagacagggtttccctatgttgcccaggctggtctggtc

SEQ ID NO: 233663 - DNA, 913 bp, Homo Sapiens
gccgagcggcgtgtggggaggagccaaccacctgggcgggagggggacatttttcgtcgaaagaaagggggccgggagaatggacaaccacgggggccgccttctcccaaaacttcgttctccggccgtggaggacaatttccaagaaaagggggtcggagtatccaaggattcagccaaggaacccggaacccgtacagtgatgaggacgaaaatcaaatgggagtgaccaccaaaggtggatagaccttcgggcccttgaaaagcagaagacaatccaaaacaaacgctattcctctcacatgtcccctagctgtgctgacctctgcactgtgtagtgttgtcatctggtggattgtttgtgactacattcttcccatcctgctattctgtctcgatggtttcagaacacagtagccatcaggaccccctgacagatagctgctacatagccagaatgcctttaataggctaatagcagcaaatctgtattctcttgagatctttcatctttgaaatgaagaccttaacagcgaagaggctttatttctgcagaagaatgtacaagaggccaacttgtggaacagcatgttgaagacccccagaaggcgggtgtgtccgtgtcacggggtccaccgccacccttctgtgtctgagctgcgttcttccttctctgaagctttttccttaactcatattttaagaatttcttctcttgtctcctcttggacttggaagttatgaaagaatgcaaaagttccttgcaagatctcttccaaagaaaaattccattgcaaccaactctggtactttgtggtttcactgagtattttcacatagctgagaaagatttaaaaatcaagctgatttcactcttcagaattaggcaaaactttagctcacgtgctcctat

SEQ ID NO: 233664 - DNA, 975 bp, Homo Sapiens
ttattcgcaaccctcgtgcatattgtggcgatttcctcaacaactatacttcagtacattcggaattaatttagtggctttttatgggaaatgcatcatctcctataagtttacgctgattgaagcatcaattcatgtcgacgctgtataaatagggcttacacggacaatcatctggttcttgatttatttacgccatatgtttaaatagtccgattccataccagattgggacgtacaatttatctaatgggcttcaatagaggtcgttttaagggattggacagattgatgttatctcattatgtagacaaatgattctcagcagtgtaactagcgcaacttgataatatcaattgcttgagaaaatcagataattgcttgagaaaatttaggacattgcttgaggaagttaggtagttaaataaattactttttttaaagaatagtttaatatttcggcaagtaggactgttaaaataggttggtaatattgtgtagaaggctactttctaaagaagtagcaatatgaacagtgtttaactctatgacaaaataatgtgtggaaacaattcaattcgtctactcagatcattcacaatatacagaagtaccatctcaactaacttagaagaagtagcagcaatttctgtcatttgttatgcaagttactcttagtccatttattatggtgtttaaatagtgtttttaaaatttgttttcaaacagggctaatcataaataatagtaacatattttacaatagttgaaggtaacaataaagtaagtgccatttaaaaaaattgtattagattgtttaaaaatgttgtgggtacatagtatgtgttgtgggtacatcgtatgtgttgtgggtacatagtatagtggggtccatgagatgttttgatacaggcatgcaatgtgaaataagcacatcatggggaatggggtatccctcccctcaagcgtttatcc

SEQ ID NO: 233665 - DNA, 751 bp, Homo Sapiens
cccagccacagaagagattccgcagatgcccgcagaaggggacgcattgccaggtccaccagctctcccacagacagctccaggcctcactgctgagtctgtgtcctatatacaatgtcatctgagggtggcaccgaacacctggctggcttgctggccacccaccaccctttcagccacctggctgccctctggtttctatcgcgtctgttaaaaggcagacccctctggatgctttcctccactctttcaaagtgcccccaccctcacccttcaaacatcaagttgatggttgtaccatgagccacaggaacaataaacagcccggaagccactccactcaaggtctcgaggccctcccgacagccggccgcctgccctgccacggaggctgggcagcacagctgggggcttgagagctggttcaaatcctgtgtctgccccctgcgagctatgtttgctcaggcaagtagcttgccctctctggatctagtttccctgtcctcaaaagcatgggcagacatgggcaaagtgctggcttgcaattctcaataaattacagattatcagatcgctatttaactcaggcaacaaaaggaaaatacttgattgtgtggagagcaataactcttaaaaatggggtggccgccccataataagaaaagctagaaaaaaataaaccacagacgcagtgatttggcagggtgatatacggaggaaattctgccatcagtacaccgtaggtccatag

SEQ ID NO: 233666 - DNA, 942 bp, Homo Sapiens
aagtgactgggtctaacccggaagagttcgggttcggaactgtattgtggaccacattaattcggtgcgttcaaaggagggacagggcccaatctgcttaaaagggtgacggttacctcaaacagagcactgttcttctggggccaagcaggtcattgagacgagacgatggccacaatggcaggagaaaggcaagagacacagagagggagactgggagagcaagaattaacacagagcctcctccgggcagaaaatagcccagccggaggaggagaagcaggcacgcacgcctgggtggttgagagggacaacgcgcatcttaccatcaggaacttgcagaagaaggtggagaggctgcagaaagagctgaacacgtgtcgagacttgcacaccgagctcaaagccaaactggccgacaccaatgaactgaagattaaaactttggaacagactaaagccattgaagatctaaacaaatccagagaccaactggagaagatgaaggagaaagctgagaaaaagctcatgtctgtcaagtcagaactggataccacagaacatgaggctaaggagaataaagaaagggccagaaacatgatagaagtggtaaccagtgaaatgaagacactaaaaaaatctctggaagaagcagaaaagagagaaaagcagctggcagacttcagggaggtggtgtcgcagatgctaggcttgaacgtgaccagccttgctcttcctgattatgaaatcatcaagtgtcttgaaagattggtccattcacatcagcatcactttgttacctgtgcctgcctcaaagatgtgactactgggcaagagaggcacccacaaggccatttacagcttcttcattgaacactgtatctcttgagagaggtggccataagacatggcacacaattcccaatttcacaaattcctcat

SEQ ID NO: 233667 - DNA, 535 bp, Homo Sapiens
  misc_feature (19)..(19): n is a, c, g, or t
aaaaaatgcctcgtaatanattgtcatgtttgaaatgtatcatgcttgttttgctctacatagttttttggtactacataactgtagacttaagtatctttttggtggaaataaaatatgaaatctctttaattttgttaatgttaggtctggtattcgttccattaagttccactttaaagtatggaaaaatgttataaacatctgctttaaacaatgaatggtactgcaatagtcctgtaaagaaaaatgaatggagtaaagtccttcaagttttcatttaaagaatggcatagctttataatacattaagtttttaatatgcggaatgtatttaatatcctaaagcgatgaattgtcttggcattatgctatcttatgaaacactttcttactctcacattgtgtctttatagttttcaatatcagcaaaacctttaaatagtcttagttgggtgttgtgtatcattgtacagcaactgttagtacatgtggtatttctgatccatgtaataaagtacatttgtcatgtaaa

SEQ ID NO: 233668 - DNA, 525 bp, Homo Sapiens
aacacaatacagttcaaaggggatataaattacagtttttctttttttaacagacaatagtaaaatactacagtcagctcactatacacacaaatcatgaacagcagcttttcattaaggtttccaatatcttactcatttaccaactcgaagaatttaaaagaaaaaaggtacagcaggctctacccattctctctctcttgctctcacaacacatttatagctgtacatccagaccgattatacaggcatctacagaataggtacagaaaggaattttgtaaaaatttccatacacataatccttcaatgtctccatttgtaggagaattttacaaatgaagacacgacagcagggtcatctgtattcgatcatctcctgcaaacatggtaaagggtgaaccattgaacttcatagctcagtccatctcctcagcattttccagaatcaagcaaaataacaacagcaaaaccacgccacagtgaaacctaccaatccaaaacaaaaccacacacacagaaaca

SEQ ID NO: 233669 - DNA, 463 bp, Homo Sapiens
aggggctcgttggctttacggagacgcgcggagcaccctcaaggtgccacacgctcgcctgctccctgttcctacatcctgggcgtcttcccaggctgtcatataactcctgagaatagtggtttttaactctgtaagtatatataccctcgtacgccttatggctggatgcgttacagccatttccatgtagatgtctgtgcatacgttcacacgcaaaactctccgcagttttggagatctccgtgttcagtcgtacctcacgtgatcttgcactgccaacattgagaaccctggccttagactatgcatctcccaaacttaattatctgtctccttcctattttcccaaaaccttggcaggcggtttaatgtcagaagttgttcaaactgagggttatgaactagtgtgtcacgaaatcaattcaataggttgcaaccaacatttttttgaaaaaaaaaa

SEQ ID NO: 233670 - DNA, 553 bp, Homo Sapiens
ttacagaaagaatgtttagtgtagttaagactaatttgacaacagataaaacagtctgtcagctattacaaagtaatcagctgaacactaatgctgttctgtctgctcacaagagataaagataccctctcatggaataaacaccttgcttagaattcatataacaaagaagtaaccttataactgctctctagtctgccttatttgtgtcatagagtaagatattccttgaaagcccattaagtggaatagactttctgaaaataagagttctttacctcagtcctcctctaatttggttgagaggaggtaatgaaaatggggacaggataaaaggtggcaactaaatttaaagcacagaagaaatgatttccttctagctatgagaatagtcaaattgagcttgccaggctgtctcattcctaacatgtaattcatgatttagccactaaatttctaaggagatcataagaaattaagaaaaacgtttaagtctagcctctgcgtggtagacaggtatggggagggagaatgcttttcccctcccagtaat

SEQ ID NO: 233671 - DNA, 612 bp, Homo Sapiens
tacaattcattaatttattgcatgactcagggaagggtattcagctgccttttattaggtggtaattgtgaagggggacagtatcttacaggattatagatttttgaaaatcaaggctgtatttctttttaaggcttacttgtacttacaaattaggtaactcaatccagtgtggtgctacaccaatcatattgtatgaaatgctgttaaaaacacgcacaaagttggcttcctttgtcttcttaaaatttgaacagactaccaagcatatttgaatactatttgattaaaatagaagcaattatgaaagcctctcttcatattatcagagtgtaacattggtctttgtctttttttatttatctattttccttcatagtacctttaaaatatgagctataatttgaattacttaacagattttcttatgctgatatgtagaagcctaccttttagtatcaaataattgaaaaaaagttcatcttaatttagttgtcaatatctctttgatcacagtagataaattctgaattgtgaagggaaatgaatacccttcatagatagagccaatttgtgtgccagttggtgctcataattggcctgatgttattt

SEQ ID NO: 233672 - DNA, 472 bp, Homo Sapiens
ctgaatccagataaaatgttcgtagcacatccaatcataaacatcaaaatataattttccattttaatacttccttccttctcttttgtgtggtggaggtggcaaagagaaggtgaacacatgtagcatcgactttttcctctttaaaggacttcttttgtggcttgaatagatcgtggatattaagcaaaataaataaattttcggagcttaatttaatcagtttggctggtttcttacatattttcttgggtttgttggagtccctttccgtatgacttactagagaattctaaagagagtttatgatttgaagcaaaacatgttaaaacaacagttaggatttgagacccagtacaatcttgtttttacatacatgtatttaaaagcttgaacccgggaggcggaggttgcagtgagcggagaccacatcactgcactccagccttgcaacagagtgagactctgtctc

SEQ ID NO: 233673 - DNA, 585 bp, Homo Sapiens
tttgtcttggcccggtctttttccagccaataccaggcagccacccctggtcagaacttgctgcgttgtaagatcctgatgaagtgaggccctttccatcagcaagtggcactactccaccccaggaatctccaccagctgtgcctctgccttggggtactcagtagatgctaagtggggagagagacacgtgcaagcccaatccatgcaaaacacagggagggccatggtaaaagcatcacagcggggacctgagagggtggtgacgctcaagttcgtcaagaaaggtaagcacgtctttgggccgggcgcggtggctcacgcctgtaatcccagcactttgggaggccgaggcaggcggatcacgaggtcaggagttcgagaccagcctggccaacatggcgaaaccccgtctctactaaaaatacaaaaattagctgggcgtggtggcacgcgcctgtaatcccagctactcgggaggctgaggcaggagaattgcttgaatccgggaggtggaggttgcagtgagctgagatcgcaccactgcactccagcctgggtgacagagcgagactccatctcaaa

SEQ ID NO: 233674 - DNA, 675 bp, Homo Sapiens
ttaaaatcagagaaagaagctctgctaataggtatcatatcaacgtttcttcacgtcaatccttttggagccaacatagaatatctttggtcatacatgcagcagctggactccaagatatctgcaaatgaaatagaaatgcttttgatgaggctgccacgcatgttcaaacaggaattcacgggtgtgggagccacgctggaaaaaagatggaagttgtgtgcctttgaaggaattaaaactacctaactgcgaagagcaaagcatctctggaaatgaaaccatgtgaacctggccagggcggtgcgacggggaagcaggaggtgtggggttggtcccgcacgcaacctttgtggagccatcgaagcctgcctttagttatatctgtggcgttctcttgtaagtggaaatgtaattgtgtaccagtttcttaaaataaacaaagcttcatactgtgacagatctgtttcctatgaaaaccaaacaatgattccacagtcataatgatggcaaaatcttaaaatgtgctacatttgagaatagctcaccaagcaaaatatttaaagttaatgatggtgtagcaatgattgttgctaggctacagagttgtatatgtaatgtatagctgaaatcattaaatgacattttcctgaaagtctttctgttttagtaaaa

SEQ ID NO: 233675 - DNA, 565 bp, Homo Sapiens
gaggtgggatagcttacacggaaagaacagtcatgtttggtggtttttctagagcaacatcagcagttggtatctggaggaggagtaatgaatggtgggaggacagtgaaaaagggaaactgtcttctaagtggagtgtctgagcaggacatccatgccagggggaaaagatatgagggagtcacaaagagtaggtagactgagaaagggaggaatttaggggctagaggtgacaatgaggacagagagtgattgtgcatatcagtaagaatggaattaggtttggtctagggcgaggagtagatcaatatgtaaatgttttgaaaactaaaacaccagataaaaattaccattcctaatctacagctaaaatgtggttccctgttcttaatagatgatattttccctgatcattgttaatttcaacaatattttcttctcttcttgtttggctgaaacatcctgaggttttccactctctcatgttctaaggtcagacttctgaatcctctcattttagtctaggtcagtgatcttcaaccttggctgtgtactggactcacct

SEQ ID NO: 233676 - DNA, 606 bp, Homo Sapiens
gcagtcactcagagatcccccgaacatctaggagaaagactatattgggcaagagtggaggaagtaagaatggtcaggacacgaatgcagtaatccagatgagaagtctggtgtggctggtggcaagaaagcaacttaagttttcagattcatgatatattagtattttggagggaaagccaatgagactgtttgatggaatacatgtagggagtgaggtatagaaaggaatttaggatgatggccaggcgcggtggctcatgcctataattccagcactttgggaggcggaggcaggcggatcacctgaggtcgggagttcgagaccagcctggccaagtggtgaaaccctctctactaaaaatacaaaaattagctgggcatggtggcgtatgcttgtaatcccagctacttgggaagctgaggcatgagaatcgcttgaacccaggaggtggaggttgcagtgagctgagatcgtgccactgcactccagcctgggtgacagagcgagactccatctcagtaaaaaaaagaaagaaagaaaaaggcaaaacaggttgctattgcagacaaatatttgactacatagatgtatcaggtaccgac

SEQ ID NO: 233677 - DNA, 534 bp, Homo Sapiens
cattatttgatttaaaaagaagaaaaatatatacttaacggctcctaatccagctctctttgcctggtctcccaagacacctatcattttgcccagcacataccttgccgctgtgccacactggagtccccggttaggttccctgtgcttagaccgccccctagtccctccaggaagcctttcccaaccctttcgcgttaactgcccgcctcatcatcacaaaggtaacttgagcttttatcagttttaattactccttttaatttgctcttcttccctatgtttaggcagaaacgagtctttttttaaccatattcatcacctggtgccagcaacagaagtgttccctaaaaattcctagaataaaccaacacgtgctgactagattctccatcttcataaacggtgatacaaactatgcacatcataactaccagcttcatgaggtcaagggctaaatcaaaaattctcaaggacttttctaaaaatttttttagcataaactgtttcctcttacttcactgtcttaatgga

SEQ ID NO: 233678 - DNA, 486 bp, Homo Sapiens
cacccttacttcccgaaatgcagtcccatttaacatcttatgaattccatatcccatttttaccgacccattagttcttccactctttaggaagtgctttccccctactctaatggttttttcttttttttttttttaaggtatttttaagtcactatccacattttgtgaaactgaaggaccaaggccaacgagaaggggaaaaaagtgagcgtgctgcgtcgtacccctcaaaggaaacaaccaaaaatgtttctggattttattaaagataatgctggattctcgttccccatagtaccaaagatgccacacagagtattcttgctcaaaagagcgaagcaattaatctagaggaagagataacgatgtcgaacgctggtaaatcaaaaaaattaggagagaggagtggaaaaggagaagacgcggcggcgctgcgcggtctcggagcagctctccaggaaagggttcttgggcagcggcccc

SEQ ID NO: 233679 - DNA, 587 bp, Homo Sapiens
ggtgacattatgtaatatcaccatagtttttattcagtatgcactatgttttggaagacatgacctgcttccagtatatctgcaagaaaatgaatacgttatgttctaataagattgtagtcatttattcaaccaaaaataataaagccagaccctgtgaggtgactgaacgatgagtaacacacagttcctgacttcaaggagttcacagcctaatgggggtgtcaggcccaggcaggtaatcaaaacagggaggcagggcagcacccaggcttatccatctcagtctactacctgttagctgcatagcctagaacaagtcccttagcctttctacaacttgctgtcttcattacaaactgaaataccacccactccaaggcagaggtgggaaggtaaatgagaagagtggccagcatcacgaatagctcagagctgtctctgtgtaaatggttaaggcagatcataagcagacaggaagctggagtcgctcaataggcaactgcatctatcaacaggaactcagagagataaggccattgagtaagaacagaagcctataccacacggcgaaatgcgctcgtagg

SEQ ID NO: 233680 - DNA, 389 bp, Homo Sapiens
tgacaaataatctcctggggacacaaatatgtgtacagtgagcagcttggttcaacagcgcatgcttttcctccaccagatttaggacacaacattaaagttttagaatggccagagaggtcactctttgctgaattccaatatctgaaaaacaattgcttgagcagattgtaagcacttgtccttattcttaaaaaaaaagggcggggtggggggagaaaaaatacacatacacacaacccaaaggcgctgaagttaagcattaatacgccagattcatgatttatgatcagtatccaaaactccaactacaaacaatgcaaagtagtgctcctcagtattatttttgcaattgttagtaatgggcactgtttgactctggccgtatt

SEQ ID NO: 233681 - DNA, 452 bp, Homo Sapiens
attaagaatcaagtgaataccattttagagattgctaaatccagagaggtccagtgggaaaactggtagccattggatttgagttgtaaacacgtaacagctgaacttacgtatatgaacactgccataggaactgaggtctgtgaatcccaaaatgtaggcaaaacttcctgttgaacatttttctggggaaaccaccatagcttttatcaaatgcttaaaggtatggaacattctaaaagggaggtgatattcaaacctaaaaatgtatcaacggtatccacatggagaagagggtcaaggatgggggaaccaagactggtaggtgggaaggtcaaaaagaaaatgggaaaaccagccatgggaaaatttttttttttctttttttgagacagtcttgctatgttgctcaggctggatcagtgcagtagcacaatcccctgtgaaaagta

SEQ ID NO: 233682 - DNA, 502 bp, Homo Sapiens
ttccattaaatcctcagtaaattctgctgtgagcacttttaaccagatacttgatgtagacttatttgggggggttaacacagatggcataaaatctggtctccaaaaacatgtaataaccaacatggttaagtgttcttaaagatttttttcctctatttttttttttttaagatattaacatgataggtttctttctcttttttactctgtctctcttactgttcatttagatctcaagatgataagtaaatttctcctctctttgtctctctctctctggagcactgtgatgactggttttatgtgtaaatttggctaggctatcgtacccagtttccaattaaacatgaatctaaatgttgctgtgaaagtattctgtagttgggtaagcatctatagtcagataagtctaattaaaggaggtatctttgataatctgggtaggtgtcatccatcagttgaaaggccttaataataaaactgagtttccctggaagta

SEQ ID NO: 233683 - DNA, 583 bp, Homo Sapiens
gagatactaagtagtaaactgtgatccgaattaaaatatgcctacagagaaaaaaaaatatgtaaataatgcatgggggggaaggatgaatggaaataaaccaagatgtttaaactattaacaggtgatagacaagtgacttttttctttgatttttttattttaaaatttatgtacaataagtaatagaaataaattaaaggaaaaaagttattttaaaagagaagatgaattccctatacaaaactatcagtaaaaagactaaaacacaatgatttcagagatacctatccaccagccttcagaaactcaggatacaagattcactaagttgtacaactgagctaacctaacagttttaatatataattttttaaatctgcagctgttgatagctttagctccttaaaaacgaattcttgtagagctcatattaactgttacatgccaataaaaatacacagcccagtcctgaagcttacttttgccacataaacataagcttcaatttcaattttcaaaattatatttagaatttggcaaatacagttaaaatggcaggtaaaacatccctgtggaaaat

SEQ ID NO: 233684 - DNA, 942 bp, Homo Sapiens
gagtccgcatagtttcccttttttgcgtgtctttccttttgggtccaccattgtttccctcttcttttgcgctcatttcttcgggatcccccccatttgtcttgaatggtctaaattccccaagaaatatttccaattgaatatcctttcccccttccaagccaattttcttaccgccctgtaaacaaaccgcaattccctcattcccaaccaggtctaaaccttagtaattattagtaactaactattattattaaattttgaacagaattagcttccccccggctgaataccatcatgctcaatctcattgactgcaacctcaccctcccaggctcaagtgattttccgcctcagcctcccgactagctgggggctacaggcatgtgcccccatggctggctaaattttgtatttttagtagagatggggtttcaccatgttggttggcaggctggtcttgaactcctgacctaaggtgatcctccccacctcagcttccccaagtgttgggattacaggcgtaagccccctatgccctgctgctttacacatttaaaaaaatagttaaataatctttctccatcacacatccatatatcatgggtgggataaggtggtgtgttctctaaaagatatattttttctaattaattttttattgatatataatagttgtccatactctaaaagatatttgattgttttataatatgcctttcactctctggttttaagaaaaattgtcaagaatgccatagcccagaattcagaaattcagaatataaacacatccttttaccacaaccttttctcaccccattgttttctcaagtcccctgcaagccgtttttctttcttttttttttttttgagacggagtttcactcttgttgcccaggctggagtgcagtggcgtgatctcggctcactgcaacctcc

SEQ ID NO: 233685 - DNA, 467 bp, Homo Sapiens
ttcggggttgtgtgggtgtgtgtgtttttttttaagggaaaaaaatgaggataaagggaagagaaagtgatgttactaaccctccatgtaatgataatctccaaatagctcttcccagcagttccatacttaagggtcaggatctccattcagggatctttctgtggtgctctaaaggggcagactgaggactttaagggctatcactttcaggtggctttctaagcagcagaattcgtgggatgaggaggacatgcttgttctttacagattcactgaagtgaatctgggggctgatcgatgataacactgtgttgatcccagagatgacaaaggggctgagtgtgagataatggagttcctgaaacccctacgatgaatatgtccacccttccttttcatcagctgctagtcctatctcatccttctcctgtcccaaccccgacacagataggtaccgagctcga

SEQ ID NO: 233686 - DNA, 429 bp, Homo Sapiens
tggctccaaagcaaaacattcatataatacataaagtgttagtctaaaggtataaaatacttggaatcttttaggcatctgaaaatcttactggtattttgatcatgccagaataattgtccagattgaactatgtcttagatatagtctcttcttttgctgtaaatgacagcaaatatcttaggttttgttttatgtgtagcattcaaatgtcagtggataataaaaaaattcattgaagattcaaagcttcagttttggaaaagaacaccagttagattagaagagtgatgatgacatatttagttgaggttacatttttaatgtttccatgtgttcttagtgattaaaaccccatggggccagtctagtgtgaagaaaaacttttatcttagttacttcacaaatgactgtaattgtagtgtatgc

SEQ ID NO: 233687 - DNA, 616 bp, Homo Sapiens
agatatagtcttaatgtagatttgttttgggtggtatggtaggtagaataatggcctaccactctgaaacatatgaatatgttacctaacatgacagaagagaattaagttgctaatcagatgactgtaaaataaattatcctggatcatctggatgggcctaatgtaatcacaaaggttgtttccttgccttttccagcttggctctggctcccttcctccagcaagggtgggttgagctctcacatggcaccactttgacctcttctgcttccctcttctacactgaaagacttatgggccaggagcagtggctcgcacctgcaatcccagcactttgggaggccgaggaaggcagatcgcttggccccaggagttcagaaccgtcctgggcaacgtggcgaaaccccatctagaaagaaaagaagagaaggggaggggggaggggaggaggagttacatatatacacatacacacacacacacgtacgtacatacatacatacacgctaactggacgtggtggtgcgtgcctgtagtcttagctttccaggagactgaggtgggaggaccacttgagcctaagttcagagccaggcctaagttcagagccagg

SEQ ID NO: 233688 - DNA, 532 bp, Homo Sapiens
gctctgctcttacgtgacacggagagtgacagagagattgagaacacaggtgagctctccactgtctcctcttatgaggacctcacgcaacctcactgaaccttaactactaccttagaggcccgatctccaaattcaaccataccgggggtgaggccttcaacactgaacttggggggacacaaacattccgtccatgacagatatcataaatggattctcagattcgcagacatcagcatcctacacattcgcaggtaaggaaaggtgcttacactagtgtcagcaacaggctggggtgtcggcagctgcaccgcgtatctccagatatgagcagtctgatctccagaagctgaagagagaaatcggggaaaattacccaaggcacagaccatggtaaaatgcgctcttcaccgccactatggctaagcagcagcagtcagacctttccagcttagtgaccacttagtgagaggaatgtacttatttacttacatactcttttctgagaccgcattcagggaccgccctg

SEQ ID NO: 233689 - DNA, 974 bp, Homo Sapiens
  misc_feature (874)..(874): n is a, c, g, or t
tgggacgtatagtgtatgttttctgctgttgatgtacagcaccgtactgtgtctgtgagagcgtggatcaagccgctttgtgtgtgttaacaacagcttgtgcacggtgttgtgaaatgtttggaacgttcccgtagatccccggtatcttcgcgtcctaggcatagtgaaggtcccctgtgcgtgtgtggaacgggttccagtctgagcctcggggtcaagcattgctcgcccgtgcctccagtggctgccactacaggtgtgcccccccaccaccagctaatttttcggaatttctttgttaagccttaaggttttcaccatgttccaagcttgttcttgaactcctgagcctcaagagatctgcccgcctcagcctcccaaagtctggatataagtgtgcaccatggtgcccaccaaatgtcacctgatcccctattgaaactgcaactttcccctgcccccatattccttattgtcctccttttttttccagaacacttatcaccagccatgtcccgtatatgttatgtatttattttattatctaatcccatttaaaccaaaaagcatcccaacccatgagggtatggatttgtatattttactccatatcttatcctaaggtttaccaagtagatgctaagtactttttttttttcaataatatacttggtccaagtccgcaaaaaagaatagctgtcagaattattaccattatctaatgacatctcaaatggtctaaagacaatctcaaattatgatctttagattgttattttaaaagaaaaataaattactgtaagcccaattgcaaaacattttagtttttataagatattcatacaaattatttgatgcttattgttacctnccttggttattaagaaatgtgaaactctagggtcaagttataatttcttgacatcctaaagaaaagagatggtgcatttgatctgaagtatctcaagtgc

SEQ ID NO: 233690 - DNA, 512 bp, Homo Sapiens
ttttttttttttttttttaaagatagttaatttattataacatggtattacttcagttgttgatgttgcatatctttggaacacatgttggcagagaaaaaagaggccttcccctgatatattctgtcttaatcctgttttttaccctctgatagctgcatgacactcaaatggtatgtcttctattcagatgttcacagatgatgtgcaggaacagcaaacaagatgaaaaaaactaatgaaaactgctcagaaaaaagaaaaggtaaaaaggaccatctcatagagcaacgcattcctgtcactggaagtgttcagacaaagtgtagaaggtgacctgtgaatgctcatgtaccttaagccatgggtgattcagtgcttcataaacagtgatcctttcagctggatccagcatcagcatgcgacgtactaggtctttggcactttcagagatatggctccactgccttggattcatcttatattttcctttaataatgccttcaaacaat

SEQ ID NO: 233691 - DNA, 320 bp, Homo Sapiens
cagcggtacaagcaacccaaaggtgagtgctatttttgggcttccagagtttgtagagggcaagggtggtcacgccatgttttctgatcacgctggttttccttttatttagctatggggcctaccccacccagcccgtgcagggctattcccagcagtgcagtcagccctacggacagcagagttacagtggttatagccagtccacggacacttcaggctatggccagagcagctattcttcttatggccagagccagaacagtgagtctctctcagcgggtcatatcttcctacgtctttctgaatattgcatgtta

SEQ ID NO: 233692 - DNA, 609 bp, Homo Sapiens
tgccaaaagctgcggcccaccggacagccagcacctgacccaggatcgccttggtcaggaggggttcggctctagtcatcacaagaaaggtgaccgaagagctgacggagaccactgtgcttcggtgacagattcggctccagagagggagctttctcccttaatctctttgccttccccagttccccctttgtcacctatacattccaaccagcaaactcttccccggacgcaaggaagcagcaaggttcatggcagcagcaataacagtaaaggctattgcccagccaaatctcccaaggacctagcagtgaaagtccatgataaagagacccctcaagacagtttggtggcccctgcccagccgccttctcagacatttccacctccctccctcccctcaaaaagtgttgcaatgcagcagaagcccacggcttatgtccggcccatggatggtcaagatcaggcccctagtgaatcccctgaactgaaaccactgccggaggactatcgacagcagacctttgaaaaaacagacttgaaagtgcctgccaaagccaagctcaccaaactgaagatgccttctcagtcagttcagccgcgcctggg

SEQ ID NO: 233693 - DNA, 494 bp, Homo Sapiens
acaggagaaaattcatacgatgcattgtataggctttaatgaggacacccaacagttaccctcaaatggaattattctcatgtacccactattttgggatttaattaaaatttcctttaacaactgccaagacattctttaaacttagtctttattaccttctccagaatttttttttttaatactagggtgagcaaaatgttaaatcaggttctcttgatcattatgtatgtattaaacccttggaaacacacagggaaagctaagactcctatcagtttcagtgttcaatacatgaagcatgaaaggcagaatggttcttcaagatgagaatgtttaaatggcaacttctttgtcactggatcagaccacacatgtggaacaccaagggctgtgtccaagcaggacaactcaatcgcaggctcaggaattagatattgagaaaaagtactaggcgagatcaagagtcaaacagcctgaagagggagcagcag

SEQ ID NO: 233694 - DNA, 599 bp, Homo Sapiens
tgcagattggtgtagtaatacaagagatgtgaccagagatgagaagaaagagacccaaaaaatgatcagaagcagaaatgggagcccagaagtgcagctgaccagaagcatttcagtgtcagatcacacgcagcctcctctgtaatgagatcacagcacgtctcatcagttactggttttcattatggtgacactgaacactcatgaaaagttagcattgaaatatgttggtatctccaatttagaaaggtagtgatgatgggtacagtgtttttacggggaaaaaaagccaaaaaatgcattcatgtttgtctactcttaaaacccagctgtccaagaacgattccccaaggccctgtccatcatttctctttctatccttgaagcgcagtgtctgacacataggatgtgctcattgatgccagatgatgaaacttgaatggctggtttcctagggttctggataactctgttttaccgtggatcctggatgtattccaggatgactttaagaaggcgagaaggggtaagacccctgagagctcagtgtttattctgtttttacacatggttagatgagataatacccaccctccttc

SEQ ID NO: 233695 - DNA, 508 bp, Homo Sapiens
tgtccagcctgttagaggtgttacatttgccctaggtgggctgggcagaaggctgttctgctcgggagcaacagtgtccacacgtcagtttccagagcccgggtcgccaggatccggctcagagtgtgagtttgctcaggtgtgtgatgagcacccctgggtgccagactcagggcaggtccctgccgcacccgcgtcagcagagcaatgtgatcgttgctgggactgttcccctagtctcagtcagttcactagggccatgcatgcagtgttcagacaggagattctcatgaaaaatagaattgttatcctaaaattacatgagagggaatgcttataagtttatccaatagtaaaacatcacaacacaggaccgggtgcggtggtgcacgcctgtagtcccagctacttgggaggtcaaggcaggcgatcccctgaggccgggggttcagactaggcaacgtagcaaggccctatccctgcaaaaaaaagtaaaaaaaaaaaaaaa

SEQ ID NO: 233696 - DNA, 487 bp, Homo Sapiens
aacctattttttatttcacccttagtagctttgcattttgtatggaaatgtttaatagtagttgctatacattttttaacatcaaagaaatagttcatgattatggtaagtactttggaagatatccttttcagtatctttttaaatgctaaaatacctctttttcaaaggcattttaaatagaagaaggagaagaaggctctatgctcatcgtgataaagtggagtttttaggaaagtaagctttaagctgcttttaccagttgaactccaaaaataatgtaggagagagatggctttctttgtttttgtttcagtggcggggcaaggtagaagaaggtggctttttaaattatttaggtgttacgttgttttaactaattttgagcacttggtagacagaggagaacaaaatgtacattaaagttcacctgtcaaattttcatttgtagagggaaggatggaggttctaaataccagcaatgctt

SEQ ID NO: 233697 - DNA, 109 bp, Homo Sapiens
gtcgacaatcactgtttcttatagcggtggtttaaacagaggtgcaaacagcaagcggatcttgtcgcctttggggggctgtggccgtgcccctcaaagtgaatttgga

SEQ ID NO: 233698 - DNA, 496 bp, Homo Sapiens
tcttgtaacatcagctggagttttggggctacctatcaaatcatggtgacaaactaaagtctgtttgataaaatactgtctacagagaagaacattgacccagaagagtgctttcctcttggcttctgaaggtattagaggcattcagtgaaggcaagaatgggccaagaatttctatgggccaagagacaagcaggctaaaggggaaaaatatgtgatctttcctcttaggacaggacaatactttcctttttataaaaatgagttgaggggaagtagtactgtgtatactcacggagttgtaatttttgaatttttacttcatcgatggaaaaactaatgcgtgggaaacattacaccaatctttactgtctgggttccttttctctgtagtacttttcagatttgaggctttttcttctgtttctggccttacccaacatattgttaaggataagcttaacttatgctgcaataaaaaacaactctcagataa

SEQ ID NO: 233699 - DNA, 502 bp, Homo Sapiens
gaagaaactgaaagagaaatatcgccacaggaaaatggcccagaggaggtcaagcctgtaggtaaaatggagacagatttgaaagaaattagagaagaaatttcccaaagggaaaaggtgctagcagagttcagtgctataagggaaaaggagattgatttgaaagaaactggaaaaagagacattcccatgatggagaaagtatcaggaaagatggctgttgttgaagaaatggaggcagatttgaaagaaactggaaaagaaaattttagagagagaggatctgaagagatctgtgttactgaggaaaaggtggcagaattgaaacaaactggaaaaacagacatttctccaagggaaaacgagctagaggagaccagtacctcaagacaaactgacacacatttaatgcagagcggtagcaatgacttcagtgctatgccttcactagatattcagaacattagcagtgaagtactgtcgatgatgcatacacctgtag

SEQ ID NO: 233700 - DNA, 939 bp, Homo Sapiens
  misc_feature (1)..(1): n is a, c, g, or t
ncaaaatattatgtactaattaatgtaatattggtgcgtgagggagtcgtagtggatacgtaggtggaggtgtgtcgttagaagagtgggtaacccttttgaccctgtttgagcggagcgtctacaaacgtggttcaccgcatgataggcgccgagcaggatgtggtgtgtttcgggtcggagaaataatgggctcctggattcaagtgggtaccccagaggctgtgttaacccacggtactgattgcgcaactgatttccagaggggactaggtagttcaaaccgtagcgcgaatggaaggaaattaacccccacttctggcttccaggacctcagactatggttttctgattagacaataggtaacatatgcagtttggttacccacatgtacacatttcctctcttgttgctttgtatcctttgattccaaatttgtacatcacatcttgttggtaaaaaggccaaatgacgggaaatgcctcaattttaaaaagtcatatcctaggtctgatttgtaacattttcctcgatgatatcagtaggtaccattctgaagaaggatcagatgaactgccctttcttcgaaagtggcagagaaccaatggctttacttcacattaagcccaccatgacagacagaaggtgaccactacatagagaatggatgcaacacagaataatctcaacacagaaacaattcctatgttgttagtgaaaaagagagtaagtttttaagaacagggagttattgttttatgggatcacctgctgcaagacaagcattattttaatataaatgttctgagacataccaataaggttggcaggtatatacatatactgatgcaaatgtaatttcactggacaagtaggcaaacatctaagcagtttatcccaaccccctccagcagagcacaaccaagtttcaaaatttc

SEQ ID NO: 233701 - DNA, 902 bp, Homo Sapiens
ttgtggacgttcgttttctatatttgctgttttatggaggccgctggtcctttttcacaccaatttgtgttgtcccccccaccgtgcccttttttggaagctgtttcttgtccgctgtgtcctgcccaggccgccgttaccatatggggcgtcgtttaccgtggaccaattggattggttgaaaggggttggccacctgacccaaacttgaccccgtccctgggaaactgaactccaggagatcaagttctctttgggggatcaataacgtggtaacaactttgggagctacaggtggccatgagccaatatgcattgagggtcagaccagagcattcgaatctcacctgaggtctctgcattccttcctcggttctgtgaaatatggtagctttcctctaacaaccccgctttgggttgggtagctcaggcagagatgctaactttgtaatcaaacgattctaatactaaccattgctctttcattattaaagcgttcattattatttactaccggagttgggctatggaaagtgtttctattctttggagaacaatataaacttttagcaacccactctctcctttgccaatctttgaagaaaagaaaatagaacaaaaatttaatatttctcaagttgaacaaaccctttccaagatttacattaggagaaatcattattctgtacaagatttttctggccctaaatattacttaacacattgtttggatccaatacaataatacatgaatcccttaatattaaatttataacttagaaacacattcatcagcctcaaagacaagaaacagaggtgaaagtcttccaaatagtcaaatgtgacagtatacacacattaaagtatatacacttcaacttcatagaacgcctttaccatga

SEQ ID NO: 233702 - DNA, 680 bp, Homo Sapiens
tgcccctgcatggttgaggcccctgggttttttttcccctctttttttttttttttttttttagattgatacctcaagtattcttttttaataaagttaatgcacacatcagaacacaccacgaagatctgctacatatttacaaggcaccaaccctttctcacctttaacgtgaattatgcaaatcaatgaaaagcatatcaagatccccccaccccccaaaaaactgtagtataaatatatacttcagttcagtacaagtcatgaaagtttggcctgggaagagtaaaataatccagatcgctcttacaatatagaaactgtaaacatttaatagctgcctttaggattggtgtattgtgcaaaagttattattactgggtataggaatcaaaatggcaaaaacaaactatataaaactctgtaagaaggtgctatacttctgtgatacaaagcaaaagagggctattctattgagataaaaatgtcatgctactcttaagaagctgaatgctcctttaatgtagtaaatctgtagtgtctgtgttgtgtttcgtgtgtgtctgtgtgtgtgtatgtgtgtgtatgtgtttgtgtgtgtgtgggcagaatttcttttaatttaaggcctaatgagtaaggcttatttgaacaaatgaagtgtggagatcaaaagtctt

SEQ ID NO: 233703 - DNA, 834 bp, Homo Sapiens
aaatatctgacttcttagggctcattgtcaccaagggtccttcgctggcaaagcagatcaagatcatggcacccattctcagaccatgagagggagtacagaagtctcctttctgcttggatgggaaacattttagaggaagaaattctaaaggtctctgaagacgtattttgcgacccacacaaatagttaaagttaccacagagcctattatagggactaatttggaatttttttttttttggatgtgttcttttgaaaactgcatagccaagtactatgcaacccatgtaaattgaccttgctattttacatagcatagcctctggatagcttttatcactttcccagatggtgtttggcctatgtattttagtggaatggtttattttctccttgataggtttcaaatgcacaagaaaacattatacccgtctatctgcatttgagtagaatacaaactgactaatagataaacattctgtgtgaaagtaaatagccttaaagtatactgccttcacattccattgatcagctcagtcagcaaagtttttcatattgtcactaatgttctaaatatttgggagagaagcatgccagaagtgtagagtatttccatttgtgtcacatataaggtcattatgaactacctcttgaatttctattgatcccaatactgaagtggtttccttcacttcctttttgtccctgttggaaatgttgctgcagttgggaagaagggaattaggggctgtaaagtggaatggctcaatctcttagccagacagtgagggatttggactggctcattaccttaccttcattaatagcctt

SEQ ID NO: 233704 - DNA, 917 bp, Homo Sapiens
ttctggtcctcattttcggttcctttgtggtcttctttcatcctactatcgtataatgtgccgttctgttccgcctgtgtattggtttgctcctgttggtccggcttcacttcaggcctcttttggggtcgctgtgtcctgcctgcctttcttcgccaggggaccaccacgggatctcggtcccacggagtggcctccatccaaaagtttcgtttatttggccacttcatgtagttcccgcatgatgaccaatggatgcaccgtttatacattatatacaccctaactgcacgatcattggtgtatatggaattcatagctttctgggtggcctgtaaggagtataatcccttttcttcaagaccagccacctgtggcttggtggtctactagttattccacgccttggtccagggaatatgtgtctgtgtccaggaaggtactgagggtctgtctgcacctgaagccagaaaagaaagtacacagagccgtgggctagcaggcagaaagcagccccaacttgggtaggaggtacagaactgtgtgaaaaatgctttagaaaggagaagagatcccagggaagctacattcagctctgtagttctgcttatacctgtgcactggctgaacaccagataaggactgagcttggctcagctaagctggagctcagcactacttatggggtatatatctgggggtggaagccacggggctttgctccaggactgctccatagcaaagatctctccctccttgtgtttcaaagttctgggatgggggatggattttatacttcatgacttgaatctttttctattagtaacagtccaacgatcaagggccagggagctttgctgaagagaaaaacctctggtccaggactgtaccctgtcatttaaacacatggtgaactt

SEQ ID NO: 233705 - DNA, 801 bp, Homo Sapiens
agtttttgaaaaaggcgcaaccaggaaaacgggaaaggtcgctgtggtgaaaattgaaagacgtttcaaaacatagtgggccaacaacacccccaaagtaggtagcctttcatattgcccagaaggaagggattcagagatgtccggattaacctgaagtaataccaggttcccaaacagggaattggagtacttcgctgttcgccagtcacttatgctaaaatggtttctaccattaactcctaccgtgtttaatcctcccaataagtatgaagtagatactgctactgtaactatgtagtaggtactgattttatagatgaatactgatgtccttatacttaactgagattaagtaacttgcccaaggttctaagtactgaagatggggtttaagtccagggagtctgattccagaggctttgacctcaagcactcagatattttcccaaatgattcattccacatcacacgggaagggactggtggctctgaggcctcctgactctcttctgtctgcataccttatactatacaaaactgcttccaaaagcctttagattccaaattaaagagaatgttcaagaccaaaaatcactgcgttttatgctttttcatagcataacttaatgcttcttttagaccagggacattgaacacagtatgcccagattctgatttgagaaaataatgttcttgtttagacacataacaacaaaaataacagcaaacttaatgagcacttctttgtgttaagcactattcagattctcttattcaatcttcagaacaaggcacttt

SEQ ID NO: 233706 - DNA, 720 bp, Homo Sapiens
cccctttgttttgttttttttttggagatggagtctcacgcttgttgcagttggcatgattctcagctcactacaactccgcctcccaggctcaggcgattctcctggcctcagcctccccagtagctgggattacaggtgcccgccaccatgcccagctaattttttgtatttttggtagacatggggttacaccatgttggccaggatgtctcgaactcctgaccttgtgattcgcccacctctgtctcccaaagtgctgggattacaggtgtgagccatcgcaccaggccttataattctttaagatttgtgcactggcatctgttttttaagcaaaccttctcatttctgtttctctccttctctcttccaaattcagctacattaaaaggtgtgatcttcaaatgacaacattatgagtggcttgccattatccctatgtttaagttaaaatgaaaaatttttttaaaaggtgattatatacctaggattctctgactttcctgactttttataaaattaaatgttataggtttttagtaaaggcaggatatgtgttactctaacgtatcactttattcaagccttctgaagccccagagcttgtgtgggtggactcagtcacactaacctgaaaagaatgcaagtgattaattttactatgcttctttgggaagttgtatatattcaacagtaaaatatcatatcctttaactt

SEQ ID NO: 233707 - DNA, 520 bp, Homo Sapiens
  misc_feature (10)..(10): n is a, c, g, or t
  misc_feature (75)..(75): n is a, c, g, or t
gtactattanccccatttcttttttaaatgaggaaagtgaagtaggccgggcacgggtggcacgcctgcctcggncctcccaaagtgctgagattaccaggtgtgagccaccctgcccagccgtcaaaagagtcttaatatatatatccagatggcatgtgtttactttatgttactacatgcacttggctgcataaatgtggtacaagcattctgtcttgaagggcaggtgcttcaggataccatatacagctcagaagtttcttctttaggcattaaattttagcaaagatatctcatctcttcttttaaaccattttctttttttgtggttagaaaagttatgtagaaaaaagtaaatgtgatttacgctcattgtagaaaagctataaaatgaatacaattaaagctgttatttaattagccagtgaaaaactattaacaacttgtctattacctgttagtattattgttcattaaaaatgcatatactttaataaatgtatattgtattgtaaaa

SEQ ID NO: 233708 - DNA, 476 bp, Homo Sapiens
ggatgccagattcacacataattccttgttgtccccttcctgagttaatagtttagcatacaatttaccaaaatttgtagtttcctgagccacagacttcacttggaatgatcatataaagtcatccatgctacataccaacccacagaaatgaggaccgctttcctccagtgtatgctgagtcctacaatctgagcactgcttcaagaggatgccttgagtcatttttccagagttaaatttgcttatgcttctaacctccacctacagtccccgttacactgggaatgataaaaactatgccttttgaaaatataagctgtcatgttattaaagatgacaaaccagtagtagttaaagtgctgcatctaaattgttgaagcttgttacgtgggagttcattagactgtttttcctacttttgtgtatttttgaagttttccataataaaacatttaaaaagacaaaaaaaaaaa

SEQ ID NO: 233709 - DNA, 660 bp, Homo Sapiens
  misc_feature (24)..(24): n is a, c, g, or t
cctggtgcggacggggcctggtgncgagcccaagtggttgcctcctacaaggagaccacgaaagtggagattcgatacgtggactacggcggatataagagggtgaaagtagacgtgctccggcaaatcaggtctgactttgtcaccctgccgtttcagggagcagaagtccttctggacagtgtgatgcccctgtcagacgatgaccagttttcaccggaagcagatgccgccatgagcgagatgacggggaatacagcactgcttgctcaggtgacaagttacagtccaactggtcttcctctgattcagctgtggagtgtggttggagatgaagtggtgttgataaaccggtccctggtggagcgaggccttgcccagtgggtagacagctactacacaagcctttgacccccatgctgcttcctgagagtctttttttgcactgttgaaattgggcttggcactcaagtcaaagatgaacatcggaataacaaacattgtcctctccagaaagtcctttctttctccatactgtagtcctattgagaagacatttcgtctctgagaaaaaaggatggaactatgggttctcttcgcaaagccaaaggatagtgtttaacaagccagctggcttatcctggttctcagctgtttaaa

SEQ ID NO: 233710 - DNA, 932 bp, Homo Sapiens
cgtgtgtggtccatcccccaagtggccccagcccacggtccgcgcgcgtgttaccccccgccttctttatccctctttggccgttgccaaacgggtcgcgaagttgccctcggtttctttaggcccccccctttttttttttaggacggttctcacttctttcccgctgaaaccagtggtccgatcccagtcctgcacccccaatctcctggcctcaagggatctttcccactgacttcgtgaatagctggcacttacagcacaataccaaccatgttcgtctaatttttaaaaatattttttatagagatggtttcttgctatgtacccaagctggcttcaaactcctggcctcaagcaatcctcctgccttggcctccaaaagtgctggaattacaggtgtgaggcacaatgtctggccctaagtgtgtttctaatgccattccaataccctatttggagtattttctgtcaattctccagcacacctggggaatcaaaataaagaaggtgctaatcacagttattactgggaaccctaaaacatttttctgcatttctgggtctcctcacatagtcctcacttcctgtagcacctctatggcagtcctgcacatcttcacttgatggtggggcataatgggcaggatagtgataagctcaaatgtacagtttcatccccatcccagccacagagcctcgaattggtttctgattccatacaaccttagaggttaaatctctaattccttacaaagccagatttacaggaataaatctcatagtaactacaagaaatctgtacactggtttctgtgttgtccctcttaaagatggcatattgcaggtggctaaatattaaaaggaataaagaatgctcactggcaaaggcttttaaagtatgttccctctatcaacgcacaagcattcat

SEQ ID NO: 233711 - DNA, 940 bp, Homo Sapiens
cgcagcagcgtcgccgatgctatcttttctccttttcttgtttttttttcgtcgttatgtatgtcatttctctcgtttattccttcctctttgtcaaagtagtccgttctactgtttccttttgtcatgtgtgtcttcatccgtttgactctctccacgttgtatccttctcctattggatcttcctcacggtgcagtccctttttccccatctggtatttagccgctgtttcgctttatcccggacgtcaacgccagctgtgccaacagaggagacccatctctcgacatatagtgtaatcatctgtgtttggtgtcatgtgcctgtagtctcaactacttggggactacagatgtgtgccaccacgtggcagctgattttcgtatttttttatagggacggggttttgccatcatgttggccaggctgggtctcgaacttctggaccccaggtttatccaccctggccttggcctctcaaaggtgcttggattacaggcgttgaccacggcgcccagccttcaaattttattttttaaaagtttttttttttttttagatagagtcttgttatgttgcctggctggagtgcagtggttattcacaggcatgatcatagcatacttcaggctggaactcctgggcttgaatggtctttctgccttagcctcctgagcagctgggactataggtgcatgacgccgcacctggccataacactccttctcagctcatttttgagtcatgaaaaatgctctttcaagaatcaccaggcctatgataagtcccatggaacaaacctatcactgtgtaagagctgagcaggagaaaaccatctctcctcatacacctcatttgttcattcaataaaaattcatgacacaccactatggacatcaggaagtagagatgaataaggctgggtctctgccctaagtg

SEQ ID NO: 233712 - DNA, 1000 bp, Homo Sapiens
  misc_feature (970)..(970): n is a, c, g, or t
cctcccctcctgcgtgtgttgtgtgtggtgtgagcagggatgatcgagcaaacggaacagaaagacgaaggagagcgaagagaaactaatgaaacatagtacgaccgagagtctgtaggtattctctgaatctgcactcgcttctatacatgggtcatgtatagagtgttgtgcgcccgctgtggttgacccccccctttttttttgtttgttaggaacaagttttgttcaccccggttgtagcatttactaaccggggctcccagacactgcgccgcggttccgctttctcgccgccgctccaagtggggaataacagctgtcgccccacgcccccgagtagtgtgaatttgagagaccgggtttcaccatttggctattccaactccgacatcaggtaatccactcctcgcctcccaagtgctgagaatacagatgtaaaactccgacccagcctacctaacatggcaaatttttttttttaaatattgagtgggaaaaacagatcataaaaccatgtgcctatgtatgctgctgttttggtgaagaatggagaaaacgacatgaaagaaaaaagaattacaaagcatatggatatggaaatatgggactacaaaaggacacacaacagaagttactacaaagatatggaagaatgagcagttcttttattttcctaaattcgcaagatttcattaaactaacataaatggacacagaatattatggtacaagctcctctatctggaggaagcaatgagtctgaatgtagagttcacaggactaatgagcaaatactctgacaataaagggtaatttgtatcagactctgagggggaaggagctcaactagggatcaagttcaaaagcatttataaaacaactgacaggtcttgtttttcagtgtgatttgccactaattcttaaataagaaaggcactcaagtattgctgctaactaaagaacaacntgaagatgcctcctggtgaagtgatttata

SEQ ID NO: 233713 - DNA, 940 bp, Homo Sapiens
ctgcttgtccttccctgtcatatccgttgtggcgccttgtcccctgtgttttcggttgtcttcctgccgttgccgtccttgtctgccttgctccgccgggacaggcgctccctttactataacaagtagttgatttcctgacagccacgggggtacctttttccataaagatcttagtgagtttagtgaggccaataggacgttatccttgtgtgactcccacctgaaatgtcatttattaatgaagttgcctgcatgataaagcaacatggtaatgtttcttagattccaatactactttgcttctattcctgactaatctttttcctaggatagtcaatcctttatactgattagagtttattacacaaactgaaaactgaataattatgtacattcattttagtcaattattgctgtgacaaatttcacacattcctattattacagtcactaatttttgttattttgttgcttttctaaaaaattattttaataatttcctaatttatttttcttatttatttatttattttttgagaggaagtcttgctctgtcacccaggatggagtgcagtggtgccatcttgactcactgcaacctccacctcctgggttcaagtgattctcatgtctaagcctcccgagtagctgggattacaggcatgcatcaccatgcccggctaatttttatattcttagcagagatggagtttcaccatgtcggtcaggctggtctcaaactcctgacctcaagtgatccgcctgcctcggcctccaaagagctgggatcacaggtgtgagccacagcgtctggccccttttcaaatttttcttgtattctccaggatttagggtgactctagttcttagatctttctaaaaatacaatctcaaaattcatcaaaaactggaaactcattgtttctttcatattcaa

SEQ ID NO: 233714 - DNA, 559 bp, Homo Sapiens
acgctcaaccagctgaagcagacccagaagctgcaagacatggaggcccaggcaggctgggctgcccctggcgaggcgcgggctccccaagaactaggcttgtccactttacagattgggaggtgagcgacgcacccacagctccgcagctggcaggtggaaaggacaggccaggccaggccaggccagggctgtgactccacagctcagatacagcagcagccccagcctgggcagcccaagccccgcactcagagcaggtagccctggtcttggcagacaggcccacctctgcctgagttctgtttgtgcccaggctggagaccagggcaggtgtgcatgtcacccaagtgacaccagcgtctggccatagctcacacgcacctgagccaatgtggggcggaagtgaggacctgctgtcctaggttttcacacctaacttgtttgatgtcagcgcgagttggagaagcatctgctgtttttcagctttctggaggggtttgtggaagactggtgttatttctatctcaaatatttagtaaaggtcatttgtgaatcc

SEQ ID NO: 233715 - DNA, 539 bp, Homo Sapiens
cggttgctcccagagacaggaactcacagagtacgagaaacatgcctgagagccctccacatctcaggccctaactcagggcctggcttgtcttaggctctgcaaacatagcacagtgacagttgttgaagtgtagcagcagctttttgcagggaaagagggagttgtatttattgcttctccatgacatggttcttttctcattagttcatgggcaagtcaagggaaagagacctaggtagcagctgagtctgtagcctacagatggcctgggctggcttggctcagtcacttcccttagtcacttccacacattccagaaattgtgtttttcttacaggtgacagaggaagttatatatggaaggtagggttaggggcaccaaccccctgtgcaattgacaatccatgcataactttgaccctccaaaacatagctaataataatagcccactgttgactggaagccttaccaataacataaacagactagtaacctgtatatatcttatgtattcatgatgtaccttttctgaaat

SEQ ID NO: 233716 - DNA, 472 bp, Homo Sapiens
  misc_feature (25)..(25): n is a, c, g, or t
  misc_feature (56)..(56): n is a, c, g, or t
  misc_feature (111)..(111): n is a, c, g, or t
  misc_feature (288)..(288): n is a, c, g, or t
  misc_feature (309)..(309): n is a, c, g, or t
  misc_feature (365)..(365): n is a, c, g, or t
  misc_feature (433)..(433): n is a, c, g, or t
  misc_feature (467)..(467): n is a, c, g, or t
atgaattccgaaaaatctaagcagnttttttagaatcaagtgattctaaaacttgnacaagatcaaagtacagtagccaaaacaattttgcaagagaaaggactcacactntgattttgagacttaatacaaagcgacagcaatcaggacagtgtggtgaaagaatagacatacagatcactgggacagagcagagtccagaagtagacccatcccccatgatcaggcggtttttaacagaggcatgggggcagttcagcggagaaaggacagcgttttcagtaaatngtcctgaatggttaggtattntatgccagaacgttggactttgatatatattttgcagattatgcaaaaattaactnaaaatggatgatagaactagacataaaactagtagttctagaagccaaaccaggagaaaatctttgtntcagagtcatgtacagattgtttagatacattgncaaaa

SEQ ID NO: 233717 - DNA, 578 bp, Homo Sapiens
ataaggggaaggaatggtaatgtgtgcagaatgttgagcacgtgtaatacagaacatttaggatgtaaagtaaatcctctgcttgaagcagggaatcctccagaagctgctcaccttaactgtaattgctattccagcaagcattcctcctccacctacaggtaccaccagtgcatccaccaaaggaacctttagtgaaaatataaactgtaagcagttttatatttaatgtatacatataaaataattgaatatagcccaacagctttaccagtagctaaacaggaagaactcagctattttacctggttcagcacttccagggcaattgtcccttgtccagctatcactgcaggctcctggttgggatgtaccatgatgccttctgtttcttctgtaactctttttgcaacattttctctggactgaaagtacattaatttagcttaattgatttgtatttaatagagtccccaacaagttccatttggtcattcagcattttattgaccatctacttttttcacactttgttcaggtactagagatatatatgttaataaaatatccctgccctc

SEQ ID NO: 233718 - DNA, 742 bp, Homo Sapiens
gaggcaccaatgcccagcccaagtgcacagttcttaagtggacgatggtgagatggtgtatgtgaacatatgtatatacccatgaatccattaccatgccaagaaaatgaacatgtccacattcccagaagtttcctcatgccttttgcaattcttcccgtttctctcgtaatcaatcctcactacacgcagccaacaactgatctgctttctagcactatgaattagcttgtattgtctagaattttatatacatgaaatcacatagtatgtattctttgtgtctagcttctttacccaaaacaattattttgagattcacccatgttgtgtgtatcagaagtcattttgtttgctttgttttttattgaatgttattctgtcgtatggctacacatcaatttgtttatccatttacctgctggtgaacatttgggttgtttctggttctttgctgttacaaataaagctgctatgaatattaatttgcaagtctttgtgtgtgcagacatacactttattttctcttgggtaaataccagaaatggaatggctaagtcatagtatgtgtatgtgtaatttttaaggaaatatacagcaattttaaataaagctaaagatacgtattccctttgatcaagcaagtcccaagagaactctatttctctgtgtatattactaacagaaataaatgcatatgtcgacccaaagatatgtgtaaaatattcatataagctttatt

SEQ ID NO: 233719 - DNA, 906 bp, Homo Sapiens
gaagttgatggcgcgggtggcagggcccatagtgtgccaatgcaccgactgagtttgcgcggcgacatatgcggggtgcgccgatgtgggccacgcgggggggggtccgagcgcagggagcgggggcgtgtggcggcgcgaggtggtaggtggcgggccggtgggggggtggatggaggcgcgcggtaggggccgcggctggacggaaaagtgggggaggggcggacggaggtggcgcgcgcgggggtggaagtggtcgctggcgggtgagcgccgtgtgtgtggggtgtaatggttgtgcgtgagaaggctgtgtggtgtgggtttgttgttgtggttatttgtgttggtgtttgcagaaaccaacagtgtgcttttaataaaggacctctagctgtgcaggatgcaaacgtctcggggtcagtgactgcctcctgcccctgttggtccctaggcagtgggggcagaagctcccagctgacctgtttctctgggatgagagggaggagagaagggcagttagcaggggcagctgttgcagatgggaggaatagtctcccacaaaaaaggtttcagtgacagacacggggtctctaaaaatagtcatgctgagagcctaatggcccttggcacaattgctggtgttggggtagaagatgtcttggagtttgctcaagtggttgagagggagggaggtgccatcgacttggaggaactggcaccaagccagggagatagacatccaggccaaggctgtggggcaggttagggagcaaggctgcaggagtgactcaggaagaaggtgggggaggtgacaagcccccaggcaggggccctgtggccatggggatctttttaaattgagactagggggtgaatagtccagggcagctaactttagttatt

SEQ ID NO: 233720 - DNA, 876 bp, Homo Sapiens
gtggttctttttcccgctgggttcatgtgatttttgcctcacgcattcccatcgcggtcagccaggttgccttgtcaggtcgcgggttgttaggatttacggctccctcccccatgcccgctaatttttggtatttttagcaaaggacgaggtttccccatgttggccagggttgggtttcgaaaccccctgacctcaggtgatccgcccttcctcagccttcccaaagtgctgggatttacaggtgtggcccaccattcttaggctagagccaaccaacatgttaaaagaattttttttttaagatggagtctcactctgttgcccaggctagagtgcagtggcgcgatctcggctcactgcaacccgtgcctcccggattcaagccattctcctgccccagcctcctgagcagctaggattacaggtgtacacccaacacacccagctaatttttgtatttttaacagagacagagcttcatcacgttggccaggctggttctcaaactcctgacctagtgattcacccgcctcggcctcccaaagtgctgggatcacaggcgcgagccacggcgcccagcccttacatttttttttttttttaagaagtgactagcacctagaggatcttgtcttataaagtgtccctaagccttccatttaagactgactacacataaatggttatatggaccagaaggtctacagacaacggaagcagcatcttagcaactttgagttcctaatgaggtaaacttccccagaagtgaccatttttattctttacaaaataaaatgtagcttctttttcagaaatacaatttttattaaattcagttttaattttttcccattaaacatttttaacttgtac

SEQ ID NO: 233721 - DNA, 897 bp, Homo Sapiens
tgctttgagagggatttgggtgtttaaaaaagtttctagtatcacatagaagctgtccttgagctgtcctatggaagggtaatttgatactgaccttgtagctatatttttataatggtttttaatgtctgagctagtgatttgcctcaacaacgtaaacttcctaatgattagcacttaataattgcatataaaatgctttattaattaaacaggtgcacttgaacattttaatatttgtggtgagtaaattaaaaggagtttattaattaaaaaaaattatgtctgcagaatactttatattatttgattacaatgtattatttatggattttttattctttcctttataatgaatagttcgggtgcgttttgtttactcctaaaaggtttctttgcgtattttctaaatgtaatatctcggggaaaatattagaaaagcacgtattagctgaagaatgtaacttgtagtccagctctgcagcttccttaaacttaagaaaaagattgggccagtgacaagaatttaaagacaatgtccaagttgacaattatttttctatagtccatacaaattaaataatctggcaactctggcaaatcgccttgtaaaatgcgtctcattttttaacttgctttcgttttgaaccgcccttgtaatcgcctgaaatcgctagttctttatgcggtggctgccgctgtgttccgttattttcagtaggtgtcatatttatttgtattgcctttgttctgttcgccgctggttttaaaccagcttgctgtgtgcatctcagacgtcggttggtacgtcctccgctgttcttcaggaaagcgatagcctcacctatttgaaacaagccctgagaggaaacgcagaaaaacctttttgtaaacaac

SEQ ID NO: 233722 - DNA, 765 bp, Homo Sapiens
cagttcccaagtcgggaatacaggctgacccactggcccgggcctcattatgccttcttattagttgcaatttttggttcagttttgcaccacctatagtcctcttactagtacaaacattaaggatgattcatgggaatacagatttggctggttagcaaaaaatatgataaaggcatatcagtattagttgtgaaacttaaattattcttggctgctacaaaaaagaattacatacattcagttacatattctgaatctgacaaaaatatttagatagctcgtaatgaaataagacactgaacttcttatttatcaggttccatgaggactttttttgaaagttgtaacaagtcttcttagcaattaaaagaaaaaatgataaactcttgtatctcctaaaacaaacatttggaatgttgtgagaaataaaaaacacttaaagcaaaatcaactattagtatttttttctcccaatctctggaaatcatttcacaaagatatgtttggtgagtcatggcattactgcttcagatatttaggatttaaaacaataaattatcaaaaaggaactgaatcttgaagtcggatttactttctacacaatctattccctaaagctttctacttttatcagagagcaaaagatcctgaagataaataaaagtatgaccaactgcttatttaattctctacaatgtgtaaagactttatcatttaaaccaaagatttagattcattttctgccctcatttcatctttcag

SEQ ID NO: 233723 - DNA, 806 bp, Homo Sapiens
  misc_feature (764)..(764): n is a, c, g, or t
gaaaatccgtgaaaaccacagggggatagggagtctataacctttttatggctcactttcattcatacgctgatggttgtatctcaggtcaagatccagggaggtggtaaattggttccattcactatctcagtgacattgctgccaccttgtaaacaaaatccgttattcattaatcctgtttgctttagtaacagaataataccaaggccctctgagattagtaagaaatcaaatttcaaaatcaaaccacattccaaatttcttaaaagatactttttttgttcaattcctttgtaaaaacattggtcaccatttaacatacatggcaacaaaatgcacccaatttacatgcatcaacaagttaataaatcataatacatggacaacacaaatttaaacaaacaggactaaagtagctcatgttgcatttaactatggttcttgtgctcctaatagagaagtagctaatatgagaaacaaacagttccagtttcaacctaaattaaagttatttgtggcaagtaacatgaaacaatgatcatatgaagtcattatcttaaaaagaaccattcttcagaaatcactttgtggcaaagcaccatactagggtagactatgatcttaaacatataccttcagttaaagacaaatggtctccattttttgaaaattacctgaatgattcaaatttttattatgcccataaattaaaattatctttcaatgtgaaggttatatattttgacaccttaaataattcntggagatgttcagttaaaccagtaattcctgggaccagatta

SEQ ID NO: 233724 - DNA, 816 bp, Homo Sapiens
accttttccgacaaaacaagcaagtaaataatccacctctcatttttaaaagagtacctgtttattaacttttcagcataatcatttttctcaagagaacatagttaatcgatttattctaatcaaaaagtgaaacagggaccatacttattttttaaaaaatcacttcaaatactgactacacaatgttatagaaaaaatttctctatttacctaagttttcccttaaatggaacagaatcataatcatagaaatgtaagtaacgttttcaaaatctatttttatttttcttcagtattacctgctgttcccaagtggctgggtaatctatgggttatattttcatttaccctcaaagctaggctgccagtggaagctaagaataacacaattaaattcaagtttctctagaaaatatgacaatcaattttaagaaagtgtaacttgtggttttgctttggttcaagatggctgatctgagaatatcaagcatttaattcaactaatagtgtgtcctcatcctaggactagaaggtaatttttcttttaaggagggaaaagaagagcaaggggaaaaatccctgaatagtgattcccttccatgaattatttcaattctccaaaatagacttttttttttaggaaggaacacctgactctgaatatatttcctcaaacggagtcgcttttgaacccaagagtccagcaaatcaggttgcaactcctgttccaagctggccagagagctgagggatggggcccctccacactccccttcctcgctgtagacgtgaggtaggtagccggggtcatct

SEQ ID NO: 233725 - DNA, 648 bp, Homo Sapiens
tttttttttttttaggaaaagttttttccatttaatactagactttcaaggattgagatgcaagctttgtatgcaattacatccaatgttaaaattggtaatacataatttacaaagattaacatcaaaacaatcatctatttagatatgcttttgtaaaaaggaaatatattagcagcatttatattttccgcaatcacacagcctacagacatgcagactaactctgtatctatttgcagtgatgtagtgctttgccccgcatttcaaacaccaaaacccgcctggcagctggggggttctttttatttcgttattataaaataactgaaaaataaaaaaaggcattaatttctacaccagtaagaaaaaacaagtttttgcacttacctaacatttgattgtctaaaaaacatttcagtttttttttagtctttcaacaaaagaaagataaaatgacagagcgtagtgtcttttgcttctgttctcgcattttacaaagtttttttttctttttcatcttttttaaaattttagtgtttaacactataaaggaaacattgaattttaatctctttcttgtcattttctcgcttttgactaaaaggagacccccaaagtgcccctagtcccacctccctcccaccc

SEQ ID NO: 233726 - DNA, 640 bp, Homo Sapiens
tttgccccttctttcccccccttcaatttattcgtcccccccctccctttttttcccccgtagtttttttctctgtccctcttttttttatttttgttttttttatttttttgtttttttttttttgttttttttttttgtctttttttgttttttttcaaacacacgaaaaagggcaagaatggctttattttcatgctttaaaatatcttgacacggaagatgtaaacacagaccaccaatgagaacttgctttggtcaatcttacctttgaagaactaggacaagccattcctaccaggccaccaccaaagacaggatatggcttttagatccacaattttaacaaatatgcagacagaaaagaagccactatagaaaatttaggactttatccataatttcaaaattggaaagtccaatattaaaaaaaagaaaaatgttccacacagtggcacttgctcaatctctttatttagtggcacacatggaatgaatgaattagctcttacttgcggcatacttaacaagtctgatcttgcttatagaaattggatcttaatacttcattctcagaatacttcaaaacgtaagccacagtttttctttcaaggatgtgggaagcattcctcattcaaat

SEQ ID NO: 233727 - DNA, 829 bp, Homo Sapiens
  misc_feature (4)..(146): n is a, c, g, or t
  misc_feature (148)..(170): n is a, c, g, or t
  misc_feature (173)..(195): n is a, c, g, or t
  misc_feature (198)..(198): n is a, c, g, or t
  misc_feature (200)..(201): n is a, c, g, or t
  misc_feature (203)..(206): n is a, c, g, or t
  misc_feature (208)..(221): n is a, c, g, or t
  misc_feature (227)..(229): n is a, c, g, or t
  misc_feature (231)..(234): n is a, c, g, or t
  misc_feature (236)..(238): n is a, c, g, or t
  misc_feature (241)..(248): n is a, c, g, or t
  misc_feature (257)..(259): n is a, c, g, or t
  misc_feature (262)..(263): n is a, c, g, or t
  misc_feature (266)..(268): n is a, c, g, or t
  misc_feature (271)..(271): n is a, c, g, or t
  misc_feature (287)..(287): n is a, c, g, or t
  misc_feature (317)..(318): n is a, c, g, or t
  misc_feature (325)..(325): n is a, c, g, or t
  misc_feature (562)..(562): n is a, c, g, or t
  misc_feature (720)..(720): n is a, c, g, or t
  misc_feature (726)..(726): n is a, c, g, or t
  misc_feature (759)..(760): n is a, c, g, or t
  misc_feature (772)..(772): n is a, c, g, or t
  misc_feature (781)..(781): n is a, c, g, or t
  misc_feature (799)..(799): n is a, c, g, or t
  misc_feature (801)..(801): n is a, c, g, or t
  misc_feature (818)..(818): n is a, c, g, or t
gggnnnnnnnnnnnnnnnnnnnnnnnnnnnnnnnnnnnnnnnnnnnnnnnnnnnnnnnnnnnnnnnnnnnnnnnnnnnnnnnnnnnnnnnnnnnnnnnnnnnnnnnnnnnnnnnnnnnnnnnnnnnnnnnnnnnnnnnnnnnnnnntnnnnnnnnnnnnnnnnnnnnnnnttnnnnnnnnnnnnnnnnnnnnnnnttntnnannnnannnnnnnnnnnnnnttttgnnnannnnannntgnnnnnnnntttgacaannnaanntgnnnaanccctttgacaagtcancctggttaagccaactgaatcagttggcanntaagtgntgaatatcagcgcagctcaagattgtagaatattggaaatcaaccagaaatttttaagaactatggcgctgaaaagtatggacctcattccgtttgtctaattcagaaatcagcattcgttatggagaagtgtgagaggaagctgagttacccagactggggaagcggatgctatcaggtttcttgttctcctcaaggtctgaaagtttgggtccaagatacttcatatttgtgtantcgggctgggcaggtcctccctgtcagtatccagatgaatggctggattcacgatggaaacctgctctgcccatcatgttgggacttctgtgagctctgtcctccagaaacagatcctccagccactaacctgacccgagctctgccacttgatcttngttccngttcctcgagcctggtggtcaccctctggcttnngctaggcaatcngtttcctcngctggctggatttcttcngngtatatggcactaagantgaaaagataa

SEQ ID NO: 233728 - DNA, 402 bp, Homo Sapiens
gatagagaaatcaagcaagtacaaaactaaagtctcaaactaggtctctcaacaaatttattcaggaataagttagaaacaggactaaataataaaatcagaattgtatcactattaggaagaccttagtagagttgtaattatggtacaacgtatatgaaaataataaattttaacgttttatattaattcataataaacttgttcccctaatctcatctatgtgaagagaggagatgctagaataaataatcatcactcataaagaaatgttaaagagatgatgtaaagagcaggaaaaaagacaacattcaataactatgatactctcgcaagctaatggtaagaaaaagcttacttacatttctctgtttgatggtctatcttgtaaccaatccttca

SEQ ID NO: 233729 - DNA, 839 bp, Homo Sapiens
  misc_feature (129)..(129): n is a, c, g, or t
gggctctaaactatggtcccgaatggtcctcccgggactcctaagggcagtccgtccctgtggtcccccaagcccgtacttatctttagtataataaatacataggaatgaattgaattgtactcaaancagagggtggagagaagtgcttcctaccagaatacaggatttaggcccatatctatttaaaagaagactacacgagactagaaacgataacactggtaaaaagatctctttacctgagctaccaaagtcatacattaggtagaggcttcaatagtgtagaaaatatactaatgtgttatctccttagagacagatttagaaccatgtcagttatgttgcagatgacagagaacagaaacctagtgaaatcaactcaagacaatgagggctaccataaggaggcccaaggagtagttggatggacctgaggaaggacaggagccagaggccccctgaggagctctgcgccgcagaagtaaggctatcctcgctgcaatggtgaccattacaatggggacagttgccacctcatcaaatgaaggaaatcagttcaaattctaaaaaaaacctacatggcacagccaattctagaattgtccactctgcttcacttggtttgagtaggatggggctgtgtgtttgaaaacatctaaggaagaaaggggggaacaactctctgaaaagaaagtagaactttcactaaatattgacccaactggaattttcagttttacgctaccaccagagaggatgggactcaggccaagataaggtcagttacaaaagttatataaaatactgtatctgtgatacagtgtaaaatatcattt

SEQ ID NO: 233730 - DNA, 583 bp, Homo Sapiens
tgtagttttagtagagacagggtttcaccatgttggccaggatggtctcaatctcttgatcttgtgatccacctgcctcggcctcccaagtgctgggattacaggcgtgagctaccacacctggcctcagccttttctttatggccacaagatgacagctgtagctccagcctctccacattccagactggatgaaggggaaggggcaggaccactggcgttctattcctgtcccactggccagaaccatctctcatggccacccgtggctgcaaaggagtctaggaaattgagtaccaccctttcacagtctctatgacagagacaggaaaggaagatggggagggattgggtgtagatgaggcaacctacagtgtctgccacggctttcaaattacaatttatcaagtactttttaattaaatccacaaacagctgatcagatacaaagtaataaattatcacagaaaatattgatatgaaaatcaagcataaggatctccactgtcagtaattctacacatatgtattggtctttcattctgtgttggaactaattctagttgtttaagcacttctgttc

SEQ ID NO: 233731 - DNA, 510 bp, Homo Sapiens
  misc_feature (65)..(65): n is a, c, g, or t
  misc_feature (94)..(95): n is a, c, g, or t
  misc_feature (115)..(116): n is a, c, g, or t
  misc_feature (125)..(125): n is a, c, g, or t
ccgagtctcaggttttacctgagaaatgaggaaaagaagcaaagacagcaattgctgaggaagtngaggaaaataatgctttgcacacacattnncggagcagaacgctgtttgnnccactcacnaggtctgacttctgtctgtttcagatagctatagaataacatctttggactcaacagggcacaggcaagcaagcagaattgaggatgtaaatgtgccaggtagcatttggtgcctcactttaaacaccaacacaaacatctcaaatacgcattgtagaattttcctggcactgtgcaaagcatggtcgattgttactccagaattattagaaataggattatatgattattccagaatattttattttcccaaagaaggttaaggatagaattttgtagagtttttgtttttttaatgcatccaacacataggagaattttattttaaagccctttttaaaaatgaaaattctagttggtcatcaattctcttcagagcaacatc

SEQ ID NO: 233732 - DNA, 990 bp, Homo Sapiens
ttaaaccgcttccgaagcggttacatcctattgttcctgctactctggtgtgtccatgtcacccgaagagtgcttccacttcaggtgtgtgcagtcgacgttttaaccgcccggtcttcgttatccgcccgcatgggcccgtgcacaaacctggtagcgtaactctggccccccggtgaaattttgccgcccccccctgttgttgtttttgtgttggagcagtctcgcgcttgtcacgccaggtggagatccactggtgtgatccttgggctacaccaacacatccgccccctcctggggttcaagccattctttgcgcttgcctccctgaggtacttgggacttccagcggcacaacccccccatgccggcgaaatttgggagattttaagtaaagaccggggtctcaaccctgttagccccggaatggtctgcccatctcccgacctcgtgaatgctccccccctggcgtctcccaaaatgctgggaattacacgtgtgagcctctttgcccggccccaaattttcttgtgtttaaaattgataattaggaaactggaataatatagacctgttttttttttttttttttttttttggtacggagtcttgctctgttgcccaggctggggtgcagtggcatgatcttggcccactgcaacttccacctccccggatcaagcagttctcctgcctcagcctcccaagtagctgggaatacaggcgtgccccaccatgccctgtaatggctttgtatgtttactggagacggggtttcaccacgttggccaggctggtttctaactcctgacctcaagtgatccgcccacctcggcctcccaaatgctgggattacaggcttgagccactgcgcctggccaggaaaactcaaaaaagttgcgcctgcggctgggcgcggtcattcatgcctgtaatcccagcactttgggaggctgaggtgggtggatcacaaggtcaggagatcaagac

SEQ ID NO: 233733 - DNA, 444 bp, Homo Sapiens
  misc_feature (1)..(1): n is a, c, g, or t
ntcaagaggttcccccatgagaccgttagtctctctttgcctggctgactacctgcatacagtaggcactcactgctggagtgaggcactgactcctcccaaagattgcagggggcggaggagggaaccacgaaggcctgggagggggcatctttggcccccactaaccatctccctatttctgcatcctggtgaccgtcagcaagagatgagtcggggagaccctctcctggagttctagcccctaattctgggctttctatatgagaggacatgcagatagggaagaaactaaaacctttcaatgtcttccttttttctttaaaagtgtttcctcaaaccatccccgtcccaaagaggccgccttgggcaagtgcatgggagcccggaagtggaactgaccaggtggggctccactgtcctgtgtgggcgaagtgcaaaaaa

SEQ ID NO: 233734 - DNA, 381 bp, Homo Sapiens
  misc_feature (131)..(131): n is a, c, g, or t
  misc_feature (262)..(262): n is a, c, g, or t
cgcgtccacagtgccaccctggccatcgcagagcagcacaagcgggtcctgctggaaatggagaagaacgtgaggctgctgaacaagggcacggaacattactcgtatccctgcacacccacgacgcagtntgccgcggcgatcctactggcaccacatcactggttcccagaacatcgccgaagccgtcagctatgctggtgaggggtatggggcagcccaggccagctcggaaacagacctcctcaacagattcatcctntaaagccaaaggtctttggggagggaggcagagctggctggctcagctaagtggcacgatgacgcatgaaggagattatgttgtgctctttattgccaaaaataaacacttttaaaaag

SEQ ID NO: 233735 - DNA, 528 bp, Homo Sapiens
ttggatgaaaatatatttccaaagcagattagtttgcggcaggcacagcagcagcagcaacagcaacagggaagtcgccctccaggcttgtctaaatctcaggtgaagctaatggacctggaagactgtgcactttgggaaggaaaaccaaggacatacatcacagaagagcgagcagatgtatccttaacaactctacttacagctcaagcatccctcaaaactaaacctatccacacaatcataaggaaacgagcccctccctgcaacaatgacttctgtcgactgggttgtgtatgttccagtctagctttggagaagcgccaacctgctcactgccgccgaccagactgcatgtttggttgtacttgtttgaaaagaaaagttgtacttgttaaaggaggatccaaaactaagcattttcagaggaaggctgctcatcgagatccagtattttatgatactctgggagaggaggcaagggaggaggaagaaggaatcagggaggaggaggaacaattgaaagag

SEQ ID NO: 233736 - DNA, 871 bp, Homo Sapiens
gagcctgtcctccacttgcaattcaaagctgtcatggaccttgtcatccgtatcattcgaaaatatagtgacctcaaagaccaaatggtctaagatgggaagaaccatcgatgatacctcggtgcccacggacttccctggagcggtggtccggcaggttccagtccagatctggaattctcacaggacattaatctacccaggtgacagagagaggaaagtgtttccaggtccatatattcttgacagactaccataatcgacgctgccttccccaggctggactgaggttggtaattgtttttgaaggctagacgaaaattttagatgttgaaaaaactaccttacatacaaaggagacttaacgacctaaaccattgtaaaaaataaccaactcttgtgaaatctgccatttgaagtaaaactgccatttgaagaagactctaccccctctctcgatccgcagggtgactggctcccacccagcccaggctatgaagacacatgtgcctcgtctgcgctccagagagcatctactgtcaccaagagttaaaacaataaaacatcatatctttaaaagcagcataacagaagatacgggagctgccaaatggggcccggaggaacactgacaagtaaggtgtcagtctgtccctaagaacaccaccattcccacagacagctggactgggtgggttcaggttgactggacggagctgagtggagcaggaagctgcgggcttcgggagcttgtctcgtcccgcttaccacgggtgctagcttatgacagtccagagcgggggtcttgagactctgttttctgggctcttctacgcaaacctggaaatgggcctttccacatattagttac

SEQ ID NO: 233737 - DNA, 685 bp, Homo Sapiens
cacagtaagataacatttataactaaagccaacaatccattaatagcaaaaatggtacccacttcactgcagttcttaccattatgtttggtcaaccattcgatgccacttgcaaaaaattattatttttttctgaaaagttaaatatcatagcttacattcacacagaccaaatacataaatacctatccgtaagaaccaaacggtcgaaatttcctcgcttctttctgctagtcccgaactctcaggagagatcttcaccaaagaaacttgcgtccattggaggtaaaatcttggctaggctcgccccctagccacttggctgaggaaataagtgctgggttacgtgatagagagacacacatacattggaacagtgacatatacatgcagtttaaggaggttcactgggaacagagcaaactattagaagatatggtatcaatatttccttctgaactttataccctcaaggaaataacatacatgaagacacttccatgtttctcttgcatggaccaacagtagtttggccaataagtaatgggagcactttctgctatgcttttaacataaaggattcatgaggatgctgtcaacgtgtaactgtcagataataaatgaatgagttagtgaactttacttaaacactcaggtttagggtttcaaaacaatgtagagaaac

SEQ ID NO: 233738 - DNA, 603 bp, Homo Sapiens
ccatctgcctcctgtcttcccagtacccctaccccatggatacaaatgtcatctcagtaaaaatcatggaggaaaaaagagatgaatccacaggggtcatctaccagaaagaggattgccaatctgtccagaaccgtggttcccagaaattttaaggaagtcccttaagccactcctggtgatttctttgttggaaaaagaaacttttgccagcacattcttacgaccacgggagccccgaagggaattagaatcactggagatgctgctaaaggaaccgtgtggtgcccccttagctgaataaagaatcatcagagagctgtatccatgtctacttttttaattatttattttttttttgagaatcacttcttggccacagcacatcacagacacagtttctggaatacaggtttgaggatacagtgttggcagcttcaagaagagaagaccttcttgccaggacataaaatgataccctcctctgggagcctgcttcgaatagtgggactcagggagataagaccttcttgctggatttttatgacacatctctttataattttacaaataaaggaaaaaagacccatgtaaaaaaaaaac

SEQ ID NO: 233739 - DNA, 772 bp, Homo Sapiens
ctagtgctaatgtgatatttagtgtgccatagtagaggtaaggctttgggtgacggtacggtcccgtaattgtggttttcgatctattttcttcagattgattaccattctttctattaaaatttaaaatgcccacgccagtttaagaggccatgctgcgagcactgatgtgctcttaatatagtcaaggtgaccaaccactgctttatgaagaaggagtagtaaggaaatttatttgggggagggaaagacactcctaagtctgacacagctgtcttataggaaaaatatagatccatagactccattatagagctgagattctaccagagttgtttaatgaggcagccatagagcctccctgaaagagtatgggcttcagaatcagacgtggtccaattcgagctctgtcacagctgtgttaaattagcccagtttctgaatttctctgagcctttcctcatctataaaatggagaccattagcacctaccttatagaggattaaggtaaaatcatgtatacagcaccacggcaagtgtgggcactcaaaaaataaattggtagtttttttaatcgtttttcagaaaaatgaatctaaacccttcatgctatgttcagaaaatcctaaaaaatataaataaagcttactaaagttttaaaaattaagatttttaaacctattttccatcacactttcccccgtatgatactactacagtgatattcaggccgtttacaccattttgtattaatataaatgcccaagtcct

SEQ ID NO: 233740 - DNA, 764 bp, Homo Sapiens
ggctcctccccccctcgggtttcccggaccgtgttgggattccgggcaggggcccccccccgcgcccgggcaagtgtttggcggtttccccccccggtgtgggtgcgcggtgtggtgcgggtttttttttttttgtagagatggagtctccctatgttgcccaagctgctgtcaaactcctgggctcaagggatcctcccaccttggcctagatttgtatttttaattgacaaataataattgcatgtagttatgggttataaatgtgatgttttgatatagctacatatactataaaatgattatattaagctgattaatatgtccatcacctcacatacttattttttataatgaagacatttaaaaacgtattcttttagcaatcttgacatttataataccttattatgagggctaaaaatgaataatattaataatcctgtacaatgggtctcagaaacttagccctcttgtctaactgaaacgtctgtaccgtttgatcaaccaaagatggctttgttggcaattcaatttttttgacaaattcctcatttttgtcttcatttggagtttttatccattacaagagaggaagatgacacaagccagaatagaggaagatgaaacaaaccactcaggattctgaagggaacactgggttgggttttttttaattttaattttgatgtttattatttgtcttagagacggggtctcactatgttgcccaagttggccttgaactcctctgctcaagtgac

SEQ ID NO: 233741 - DNA, 609 bp, Homo Sapiens
cgggagcgcgagctaagtcggatcacccgagatcaggaccttcgtagatctagcctggccgactctggtgaaaccccatctctacgtgcacacacattactagccaggcgtgctcggcgcatgcccgcaatcatcagctactcgggaggctgaggcaggagaatcgcctgacctcgggacatggaggagcaatggacccgagaccgcgccactgcactcagcctgggtaacaagtgcaaaagtgcatctcaaaaaaagaactcacagctctcatgaaaagtttgtgaaccccaccagatgatcaatctccattacattttgattaaaaatgacaacgcagattagtccatgttcttgaatccatccatcagatttgacttgggcctactttccaaactcaaatgcatcctcaatgggcacttacagtcctaagaagactccaaagcctctgccatcttaagctgccaaggccactctcagaggcttccgagcatagagaaccaccaaagtgagcgtgtaattccctaaggccaccacagtgagtccctgctcatcaggatgtgcaagctcccaaatgtctgtttaaaaaccagacatgctgtcttaatc

SEQ ID NO: 233742 - DNA, 863 bp, Homo Sapiens
tgtgcaagcctgtaatgttgaactgcaatgctgtaagtaaatgaaagtaataatgaccaggtatcttactgtggtaggtgtccaaatgcgttagtgaaaatagccccgtagtagaaatagccccacggttagtaacttaggacaagggtgtcatatggaccttccagttattcttgttgactttactgatcagcatcatctctgatgccagatataaatcaatttggtacatcaagaccaggagatatttttggtgatacatgttagtatagtaatccttagaaatgctaagtgtattgtgcttgtgtcagaacaggtccccgtcatcatacatatgtttaatactgcagacagctgacttcccacctgaagttgtcgtttaaaactaataacctggaaatgcagttctgttctatgacattcttcctaaaaatggcacaggtaggcatgctgaataaaggtatttggatgcaaatactgatggctgacaaatgggtccaaaaggtgtttcccaatttgtgatttaacatgacaatatctcatcacgaaacttatcgttcaaagagaactatgtggaggaaagtaaattttatttcatgtttcctacttgtgttagaagagatttggaataccttgatttaaacatgcttaaacaacagtgttttaacattctgttttaaacaatgttttaaaatacctatttattatcttacagcaatatgagatataaagtagatgtaggaaaatagagctgatatgtgcatagttactaaaaaaaaccaacagatttacattttaacatagtattcataaaattaaacattcttaaaaggtcattttagtgcactttaaaaaatttttct

SEQ ID NO: 233743 - DNA, 950 bp, Homo Sapiens
tcggggcaacttttgagctgtccggatccttcgttttgctgctccctccctccgttgtgttggtgctcctccctgcgtgtggtcctcctccgagagcctcccaccttctggggacgtctggttcttcaagaagaccgttcctgttggtttccacactgcctggcgcgttttttcttcatctttggtgtggaagagtctcccgcggccccctttgtcctctggccccccggggcttttccccttcggggtcccagctcttttggccacaggtctcacttacccctcttggggcccgtgctgcctcaaaacattgtgtttgtgtaaagccttctctcggtggccacatgctgtcctcacaaagtgtgtttgtttttttttttttttttttgtttttgaaagttgtttttagagattgggtctcactatgttgcccaggctggtctagaattcctgaccttaagtgaacctccaggagaccttggcctcctaaagtattgggattataggcatgccccaccatgcctggccagagttaggatattttgagctcagctctgtctggttctaaaatgcctgtttctaaaacctcagagcaatgttggatccttaaagtgaaaaatgtgtgcactattgtaattttgttatactggaatatttcacaacagacatcttgcctctacttgccccagtaggttttctggagggaactgagaatgcttaacaataccaaaaatgtttaatcagtgaattataattagttaacctttgtcttaaagcttatgagaaataaaaacaaattcattataaagggttctgcaaatctaaataccatctttttcatgcagaatgtcctggcattagttgttcctatagaaagagatagaaaagggaggataaagtactattcatgatctattttacgccaaatgcttgtgcacttgagattgcac

SEQ ID NO: 233744 - DNA, 773 bp, Homo Sapiens
ttttaaactttttggccagccccccaaacttttttttttttttttttttttttgtttgtttttaaagaaactgcatacatcatcagagacaaacataatttaataccatgcagtttctgtatgtacaaacctaggccacagagatccagtttaatttgtattctctatttacatcgttttcctcatacagccatcatctgttaaattagaacctgggagattaggggattgacggtcaccacactcactcctatacaaagacaactatgtacagacacccaggaagcaactggaaaatgcaaccggtctggggattaacagacagatagggagaaaaagtcatttaaggtgacctttgcccaccggctgtgcacagggagagcctgaaattccattcatcaaagcaacacaccacgattttcattcggcaaataaaaatacatgttcataagcgggagaaaaataaacccagagcttttcatcacatgtaccgtcacgttgtttggtttctctaatctgacataaaggctaaagttttaaaagttttacagtgctttgagggcctttagagatgaatatatcagccatttaaaaaaagctagttggctgatggcggtctcttctgtcactgattgattgggggcgggggcagggttgggcatgtctaatctttagaaggaagcatttgatttgagacatttcacattttttcctctcacgctaatccaaatgaaaaaatgctcaactgggaatttacacacataaaataaact

SEQ ID NO: 233745 - DNA, 712 bp, Homo Sapiens
cttacatatcaccttaataaaattcaagatgaaatgttttagaaactattttatcaaaagtggctctgatacaagacttgtacatgattgttcacagcagcactattaatgccacaaaagtagaccaaacctaaatgtccattaactgataagcaaaatgtggtatatccatacaatggaatattatgtagcccacaacatggcatggagtactacaacatggatgagcctcaaaaacgttatgctaaatgaaaaaagtcagatataggaaaccacatgtcatatgatcccatttatatgaaatagccagaaaaggcaagtcatagaaacaagatagatcggagatgggttggaggactacaaatggcaccagggatctttgaagttgatggaaatgttctaaaatcagactgtggttgtggttgaacaagtctgtaaatttaccgaaatgcgttaatacacttaaaacagctgaatgttatgatctgtatttagtaaagctctttttaaaatatggctctactactgctagagacattgatatcaaagatgcagagtttgaataattgtttcaggaaaagtttatatattcagtactacagataagttttttttttaaaggagaacctttttcgctgttataaacaacttcatttatagcataataaacatactttcagtcaatttctttacaatgtaaagacccctgaac

SEQ ID NO: 233746 - DNA, 784 bp, Homo Sapiens
  misc_feature (350)..(350): n is a, c, g, or t
ggcactttatatagagtctttggacaccgtggttaaatagctccgtatgtcctccttgaccctatgcgggtgtggttcgaaaacctcagttgtccccccggctttttcaatgggtgaaaatcaacccccattgctggcccgcggtttttcttggaaccggctttgaccacgtgtcatacatcacactgggcccggctggccccaagacggtggttctaacaaaactttcttctgcggccatggaccgcccaacaaaatggtttttttgtgcttctgttcgttgattgttgttggtccccacaataattaagttggagctccggaacctctttgttgtttttttttgagancaagggtcttgctctgtcacttaggctggaattcagtggcatgaccatggctcactgcagccttgccctcctaggctcaagcaatcctcgtctcagcctcctgagtagctgaaactaaggcacatgccaccatgcccagctaatttcttttcttttagagatgggagccttgcccaggctagtctcaaactcctagcctcaagtgatcctcccatctcagcctcccaaagtgacaggattacaggtgtgagccaccatgcctggctgctctgtaagtgtctgaatttcattttgtatttatcagtctgtttagatttcctttcccttcttgggtcagttaggccatttggtttctttttaaagggttttcaaatttatttgcatctaattcttcaaattactctcaaaattattccagtatatattcttttgtt

SEQ ID NO: 233747 - DNA, 840 bp, Homo Sapiens
tattttttaaaccaattcttcgttcttcaccagctggatctgaatccatgcctgtcttggtcacgccaaccccacctctggtttcaaaaattctcatgctcaccctcctgagcactgcgattacaaagtgtgtcccatccaacttcgctaaatttttaagtatttttagtagagacgggtttttccacattggccagcctggtctcgaactcctgacctcaggtgatctgctggcctcggcctcccaaagtgctgaggttacatagagttcttattgtttcgtatgttcaccaatacttggcattgtcaggcctttaaatatatgccagcattctaagtactaaatgtatatatcatagtatagatttattttgcattttattgattactaatgagatttcttaagtctataggccactggtgtttttgcctctgtgaactgcctgttatgtctgtttttataaacacttttatttttattgtgttgtttgtatttttcttattgatttgtagggaaggatctccttaaaatgattcaaaaagcacaaaccattgaataaaataccgataatctgataacattaaaatgaaagacttttgctcaacaaaagacatcaggaacaaagttaaaaggtaagtcatccactgggcaaagatatttgctaaacaacagaaaggattcatatgcagaattttaaaataatccctataaataaatatgaaaaaacaaacgattaaatattcagcaaaggaatgtaacaggtaactcacagaaagttcctgaaaggccaataaatgttaagaatacatgcataacctcactggaaatcagaaacatgc

SEQ ID NO: 233748 - DNA, 847 bp, Homo Sapiens
ctaaggctccattcccctttttcggttcttcacccaaacctttctcgccacatttcgggaccttacctgttctagataaatttaacacccaattgtgaacttccaccaaaactgttgctattccattatctcttgatgaggattcatatttttaaaacttagatttgctattgtagaatgctgcatatcagataatttcagtctttttcagcacttggaattgttcccacagaatgggaacacatggttccatggacatatgtagccaaccgaggtgcattttatagactgatttgagacagatatggtgcatgaccttacgtccccaaatggtgtatgtgtttgtgcacacacatgtgtgcacacatgcacacaaccatcttggcctttagtgtggagcactcttaattcccagaggattctccttctgcttgacccagccagctactgagggaactgcagcatgacacgatgatgcgcagacttgccttgaaaggaggaatcttaggaaagtttccgagttactattaaggccacagcatttttctgtttaggagcagaaccatcagtcaaccatgagctctaagaaacacaacataacccagtgctaatagcagaatggtatattcttagcctcctcagaaaggcacagcatacataattcaaacagcaaatctgtggtggccatcagaactttggcagggttacgtaacatttgtcaaacaatgtggacttctagccatttcatacatttttaagatctggtcatatacattgggggtaaaaatgtacacacacacacacgcgcacacacacacatttttcaccaataaaacatatatgctat

SEQ ID NO: 233749 - DNA, 805 bp, Homo Sapiens
atctgtccgatgttgactcagcaaagtaggagagacccctcctgaagagtcctccgggtcaatcctgtgaatgtctcacttgagattccacttgatgaagtaaattctcgtgctaagatgaaaagcccattagtttcttacatgatcatgtgaaatggcccattttgagttcctgagtcaacaggatctgggaagttcatgtgcacagagataatttttgaattgctataattaccctgaggatgtgatgaatgcaatatttggaaattatttgaattcaatgatgtattgggtcttacggatatgctgagtagattcttgcttgattcctctatgaggtgaaaaggaattacttgccagtaaaatcagataaagtctgatttgtatgattagatgcaagaactgcagaggactgaagtagactgtttggtgatatatgattactggaaaaggaataatgtgaagaaaattgctgtgaattactgacagaacaagaagtcatatttggggaaggtccattaaaatttccttcttgatgactgctacacttgtggaagtgtgctgaaggatttgacgtttgagaaaattgctgcattgaaatagactgttgtgaattagatgcattagtcatctgtggtgggtggttaacattgactctatgtggaccagaaacattcataaaatttttagactggctaagagaattctgccctgggttgagattatttctgttttgttgtgagcgtagtgaagtacactgtgtttgttgttcattggcctgaaataaggcaaagtcatggtgtgc

SEQ ID NO: 233750 - DNA, 815 bp, Homo Sapiens
ctcaccccaacgcccggctaattttgaattttttattagagaccaagtttttccaatgttggttcagcctcatctccgaactcccgacctcaggtgaaccgtccgcctcagcccacccaaagagctggggattaacaggtgtgagccaacaggcgcccttgccggtttggccatatttttgtgaacagttagcccacttggtatctgactaaaagaaggtagcaacatgttcccaatatgacatttttttaattgctttaaaattcttcaaactttgcctctgttaaatttatgtatttatatgcctttatcatccacatttgtttttaaaagccctccctttaaaagccatcattttatggtatgaaagttataatctgacctagaatttcccctgaaccacagcatgttaatacatgaataaaataagattccctacctaaaataacctttaccatcatcttcttttatttctaaagacacagagaaggtaaagatgtcactgtcaggagtctggggtgcagcagtggctgaaagtggggtctgcttggcagaacggcggaaggcagtggcaaaactgtaaagtatccggcttacctacaaccagacatgttaggaaatgggctgttatcaaaagatataaaatacctttattaaggctggaagattacctactttggagggcaataattatctttatcccacttatttcttttggtaaattacctaatttgttaggcctataaagcaagcaacactaaaaatgtccagacaaggggttttaaaaaagaaatggttgtaagcactataaatcc

SEQ ID NO: 233751 - DNA, 812 bp, Homo Sapiens
cataatagaatccaggaggttatgtcaaacacgatggggtgaagagcaaccagcctcagtccctttgactgcccaagagataaagcttaaaaaaaggtgataccacacagccctcacatctgcattgatttttgccaagtataacttcagctgtggatcctgttatggaacagaccacattagaaagaacatccttctggacacagagcaggaactctggcctggcagacagggaaaaattccataatgcctggcaaagttctttagtaccacaggcgtattctcccagctcaaaaaaaatcccttggaaaagggcaggtaactcacccagaaaaatgccaacttctcctcaaagacagttttgcttcttgaatggaagccagagaccagcttcaaattccaattaagtaagtcgcctgaatgtggtatgtctgtgtagcacttcataatattcagttattgtacccatattatcacatttgacccaccccatcttccaattcctagtccagtgttctttacactataccatattccccttttcatattccacatgacaggggggcaggcccactaagtttgcgatgacaccaagctaaagcagggctaaatgaccatgctgaaaagccaggaaaggaacacaaagtgaggatgaactgggaagaaaccaagctggggaaatccccttgttttacacttctaaaatgtacactgtgtctgtaatccctcttttaatatctgtccgtcctactacatatatgtgtgtgtgtgtgatgaaaatcagcaattgccgccccgacccttctcccccc

SEQ ID NO: 233752 - DNA, 838 bp, Homo Sapiens
atatatttatccttctgccctaaatatctgcaatcaatgtggcaaagtagggtcctatgtgaaataccctaactgttgggaataagcattaattctattgtcagcaacatgtcaaacttgggacttgcccagatattatataaagtaaagagaagaaagaaagaaaaaaagactctggtgagggcccctaactaaaatgtgcttaagacagcttcatgagagagctgccttctttcaaatttgaattttgaacaaggcaaaataacgattaggtgatatatttccctggagcatgggagtagttaacttcccccaggcaaaatgatctcaataatcattatttattaatgaaaggaggaggcaaattggtgaattaagttgatctaggagatggtggctgacatacactaacggaaatattaggattgctttataagtgaaataaacagtctggtctgtggaacatctccacttcagagagaggaaaaatgcacaaagctcctcaagtgaatctccagctctttcttactctcatgggacagatggcatttttaaaatgacagtctccctttcagttaagaaaaacacaacaataaaaggaaaaggaagataaataaatagtgtgtggatgtctttagatgagactttaaatgttctttaaataacttttgataatgtattttaaatcattacatacaactgccactgcagtgacaatattccagtaggggcagcattttgctaaatgtaaaagattgccatttaaaactcatacatatacatgtgtatatacagttatatcaacactatttatatacatatatatctggagagcata

SEQ ID NO: 233753 - DNA, 834 bp, Homo Sapiens
gtaattgtagtagagatgggtttcacatgtggccggctggtcttcaagctgccgacgtcacgtgatgcactgcctcggcttcccagggcgctaagattacaggcgtgaccaccgcgcccgggcaaattgttaacttaaaaatgaaatctgagagcaaccattaactataaagtcattaatatgtctaagaaaattcacaacctcaaagttaaaatatagcttgatgaatctaaattaaaatgactatgattacttatgtagcacacgcttaagatataattgtttgggaaataatttcaaatacatggcttcatttcaaaaggcagaggaatgttttctaaaacagatctgtcaagcaacatacaaggtatgtatcaaacttttatcatattgttatagaaaacatgctacttgaatgttacataaaccatcaagtcacatatttataacctaaggatcagaatatccttcaatttaaattgtgaaggttaattacattaaaaaataatagccaatttgaaaatcaaagtgcactgaagcattcaatctggaaggaggtagctggtaaaatgaagacatttatctttcatgtacaaaaattttgtaaaggaaattaaatagattatatcaggcatgcaaactataaatcctcttatttataacataatcatggtcaggtgaaaagtattaaataaaaccacttaactttatattaggtacatttactacatcattagaaaaattttttaaaaatgcttttactgaagcattctaaatattgtttaaagacagtacaattccttaatcgcttctctgaaatcagtttacaaagtc

SEQ ID NO: 233754 - DNA, 851 bp, Homo Sapiens
  misc_feature (119)..(119): n is a, c, g, or t
ttcgcggcagggggctttcccatgctagtgtagaaggatttgcaggtatgtaaggctgagtagtcagtaaagaacactggttttcgttttgtaaaaataagcaggccctaaagttctgntcaatggataaagctgttaaagaagtacatcagcatggaggggccaaaagacatccaagcaatctccttacagcaactcccaattgttcagatttcaagccatgagattaaaatggaataaatgaatagacagaggtagttttttttttgttttttgttttttcggtaatgtttctgtaccaaaaaaagggtaggaaggttaaggaatagaaaaaaacattagttttctgagattctcatactgaataaattgtcatacataaaccagagtcattaacttaagcataaaaatcagtttatcactgtggtaccacaatctctacatacttatgttaaaaatttccattatttgtttgtcctataagttagaagagagaaattacagcaagtgtttgttaaccacagtaacaaagggcagtgataatttattgagtgatgagatgtgtcggatgctgtgttaagtgctttatctacatgaacttaatccttacaatagtcctgtgaggtgttagcaccaatttgccaaaaaggaaactgaggcacagagaggttgcataacttgatagaggtcacacaactagtaaatggttgggctggatttcaaactcaagtgtctcactctaaaactcatgttcttgaccattctcctgctttgtctttttattccttccaaataagttcacctctaatcaataaaacctactgaatatctaaggcattatgtgtggggga

SEQ ID NO: 233755 - DNA, 732 bp, Homo Sapiens
tctttcttggtaagaacacttaactcaagaccctaccctcttaacaaatctttaaagtgcacgatatagtattggttaatttccaggcacccatgttgtacaacagatctttagaccttacttgtcttgcataactgaagctttatacctgttgaacaactctccatttccctggcccctagcaaccacccttctacctgtttctatgagtttgactattacagatatctcatatagtgggatcatgcattatttgtcctgtgactggcttatttcacttagcatagtgaaataagattcatccattttggaagccaggcatggtgctgtgcatctatagtccctgctatttgagaggctgaggtgggaggatcatttgagtgcaggagttcaaggacagcctgggtaatataggaagaccctgtcttgaagaccctgacctcaagtgatccacccacctcggcctccgaaagtgctaggattacaggcgtgagccactgtgcctggcctccggtgagtattttatatttagtctacacttccatacttggcttttttctgcttttatattgatctgctttcatagcagtgtgtagagtgccacttatgttttctttcttgtgtacagtattttattgtatggatttaccatcccctgtgtatttaagttgttccattctttggccattataacttttttctgcaaatattctggtgacttatctttggcca

SEQ ID NO: 233756 - DNA, 577 bp, Homo Sapiens
gatagattgggaaagctaaagaaactcccatacacaccttggtaccaccaatcaacttaaacatgacatcctcagagagacagtctcagatcatccaattagcaccttctattatttatttacttcctagacacttgtcgaaatctgaaaattctttattcgttggtttgtctatattgacagactgtaactggatgaaggcaagagaccttgtcttgtacatagttgtgtcctcagcacttggcagaatgtctagatggagcaggtgcttaaatacttgttgaaaaaataaaaactgcaactgcaggggtttttaaatatataaacataaaaatattactcatcaaaatttaagtaatatagctaaagctatgctcagaggaacattcaataggattacattttttcattataaaacataaaatattataaaagttgcaatttttttaagttaaaaaattcaaaactggccaggcacagtgggtcacgcctgtaatcccagcactttgggaggccgaggtgggtagatcacctgaggtcaggggttcgagaccagcttggccaacacgatgaaacc

SEQ ID NO: 233757 - DNA, 561 bp, Homo Sapiens
ggcacacaccaccacacctggctaatttttaaattatgcgtagagacgaggtcccaatatgttgcccaggctggtctcaaactcctgggctcaagtgatcctcccaccttgctctcccaaagtactaggattacaggtgtgagccactgtgcccaggctgtactttccaaatataactgtacagcatcacccattgcatatactcttgtacactgtgaccttgctcctccacaattaagtgtcagggcttaatttttctccccttgaatctgagtgaacttgttattgttctaatccataaagtacggcagatgtgatagctttgtcagttttgagatgagtcattaaaggcaatgcatcttgtttactatgacactagcttttggagcctaagctgccatctaagcagtttgaccatcatgtaagaagtgaccaccatgtgtgaggaagtccaggtcacatgcaaaggctacacacaggtgctccggaagacagctccagttgaggtcccagtggacagtcagcatcaaccattacataggtcagtgaagacactcctag

SEQ ID NO: 233758 - DNA, 707 bp, Homo Sapiens
acttttaagtcttagtacatacccttagggtaatccaagatggtgtggtaccggcaaagcgtcagtacatcagaaggacacacggatattcttaggcttcgacaatatggaacaaagtctttagattatgtgctcttaatgttcttcctcccccactcacaattacttagcctaggaaggaaaagagattctcagttaagagttgttggcaagtctaaacagtgtattaaaaagaaataggatagaacaagactaataaaatcaagcaaaggtggatctactttaactaaacatcaggcattacttttatttatggagaaaaatgtcaaaagttagaatgaaaattatgcatagttttacataaattgttaaggaaatactgtcaacatcattttatctgagaatcatttgcatcctgctgtaccttgtgctagaaatcaaaggaacatttttgtgacgagaaagatataaaccattcactagaaaataatctatttgggattatttggagagaaaaagtccatcaacagagtatgtcttcctagtatttcaccatgatcatcccaaccacataacgattagatgaaaatatcacttatcacccagaacaggcggcagagagccttctcttagaaaggacacgtcaaaaaaatgaaagatgagaaaaaggacaggttctactccctaaggaaacaaagagacaggac

SEQ ID NO: 233759 - DNA, 794 bp, Homo Sapiens
gatttagttatatataaaccagtttgatctcagtcttgcagaaataattttagcaacacataagtagaaataacctcaagttaaagacagatttaccaatggaatatatttgaaacatctttggcatgaacagtaaaagtaatgaaaatggaatactttgtgggcatggatttatatcaattgttacaacttgtggaaaatgtgataaaatattaaacttctggaaaatgtacaaagcagaaatatttcaaaagacttcactgtccaaatgaaccagtttccaaacagactttttattacaagacatacttttagaatgaactaaaataaaaatcattacatttttagtatcaagaaatacaggaaacattttttttagctgaccttaaagaaaagattttaattatgagctgtgtttagttacctaaatgtaaattccacagcctaatgtaggctacataacagaaacaaatttaaatttggaatggacttatgaccatcattgcatagcagtgaatgctgatgataaaccaataaaaccgggaaattaaaaaaaaatcatctgatctatcatgatctggaaatcctaatttaataaaatatggatgctacctggaagaaattccccacttccgtaatagcctcattcaagaagctctaatagggtctgatgagattatctgccttgaacaaagattttattatttagaataactggaatatttgacattgggacattaggagatctgtttctgaaacactgcctttttgttacttttaatacctcgttttag

SEQ ID NO: 233760 - DNA, 812 bp, Homo Sapiens
gtttttttttttcacagagttgaatcttatatagcttttatttcagtggatcagaagaatcaagtaaatggaattttacactaactaacattaggcatgcacctctacctgaaactgctgttagcttctgattggcctaaatctttataacttatttaggcacatcactgaattttttgtaccctgatatacagggtaagttaatttcttccttgtggcagtctagtaataagaattatgttcactggctagattcctttataactaaaggcctctagactctcaggctgcctaccctaccttgagacttacttaatatggatatttaagcaaatcatcatataggaaagggagatcaagataactgaagtgtactgtataaacactcttacagatatttttctccagcattgacaatcaaacactagataaggataccaaattattcttcccctacttctgccctttctgataaacacaaggatctcccctgaaatcagaaatgactccacacaaatgagagatttttacgtatgtggtcccactatcaaaattataggaagcagttaatggggctttgagaaaagcatagtcccatgtacagtaatatgcatctaaatagagttttctttcgcctgtcaattattttcacaagattagcattaaaaaatacaagcaaacatatgacccttaagcttcacacacaaaaaattggtctttgttcattctcagatgacaggatgtcccaagagtaacaaaagatgggagccaatcctctcatagctgtttcttcaatcatcccatcaacagct

SEQ ID NO: 233761 - DNA, 795 bp, Homo Sapiens
ctttgttaaaattcagactggtttccccatcgccctgttgcaaactggacgaaaactggcttagcactcctgtctggaacaggtaataaggaaataaatgtgctgactcaagagaacacagacatagtttaatataaaataagatagaaaactggctgaaccaagtcctaacaccagtctaaatccacatataaaagattgagatgattttctgctttgctttattcaagcccaatgctttatcagcacagccagccaaaaatttacaacccatacacagactatgtaaacctttagttgcacatacagtaagaccagcaggtacacactatacacatttttaattaaaaaaatgactaaccactgattttgtcaccacacttaacaacgacctgatatggcacagagtgatgtgtaccaaacatggaaataccaacttgggcgacggtttgaatcttgttaacttcagtgcaaccacaccccccaaatgcatgtaaagtttgcacacatggttttttcaaggccagcctgtctttgtttccctctcctctgcatttacccaagatcttggctctgagacagaaaactcccactctcaattggttcattccgtcctatgcaattaagcaacaccacaatccagtaaatgcaatggctcaattatttatcttctggccgactttaccaggtatttggaaaaggacaatgtcaagaggtttatttctctctctagagctggcttgacgggttgatggggattttattttgtctttttttctcttttttacaaggcgg

SEQ ID NO: 233762 - DNA, 648 bp, Homo Sapiens
tattcaacaaaaaactgagtatcttctatggtccaggccatgtccttggcactgcgaacagagataagtcctggccctcaaggagctcacagtctagtgggggaaaaaagacacaagaataaataaatataatgtatttggagtttgcaaagggggccactatgggagacaaagaacagaggaacctaaatatcctatagttagcatccacaggaaagaaagacctggcaatgtacatttttgtaaagaatagataaggcagtggttctcaaagtgtggctggctaattacctacatcagaatcatttggagcacatattaacaagtagattcccagtaccttctgcacatattcttgatttagtacgtgtgtgggggggtggtgtacggttgaggcctgagaatctgcattttaaaagcactttaggtgatgctactgcatcttaaagtttcagaactgatgagataaagtttgttcttttaactggaataaagaatgatctacacatctgaaatgctaacttgtattagtctttaatgaggggcaagggaagtagagaaaaggatggtagttgatattttctactatagtgaagttaatttaattctcacaataatcctatgaggtagatattattatccctattt

SEQ ID NO: 233763 - DNA, 581 bp, Homo Sapiens
  misc_feature (420)..(420): n is a, c, g, or t
ttgctgcattaagtgattgtttttacttgaatccaaagtgtattaaactccaggaaattagccttggttaatctacacataagaatatagttttgctcttatttaatcaacaatttacttatgcaaagtacatgtgttagtattgtgggcagggtatatggggtctgagtgagcttaaagtattttgaggagtaaggatgtagacataaaagagaaatagtttcatcatcttccactccctcacccccattttttttcctgtctctcaaggtgcaaaatgctgcagcagcatgacggaaagattgtcacctggcactggtcctaagtgtggtggtccccttctgcacagctattctgtagaggaaaggacaattatgttggctcactgcttcccagtaatctctctctacctcttaaaanacaagggtgaggataagtaatgcaatagagagatttttcaagaccacaactggctttcattgtggtgtcatttggaagatttgtttttaaaattttgtccccaatctaaaggcacagatcaaactgaaataaaaagatttaaacattggatctcagtctat

SEQ ID NO: 233764 - DNA, 879 bp, Homo Sapiens
ccgatattatttccttagtcaccgctttgatccctcttacctccagttcttctgtgttttctctacaacccgctgtctcccgctcgtctattttgtctaagtctaccccgcttttggtctccatttgttcgttgggcgctttgcagttatcgtctcttgtctgtggccgcgcgttgataaaatggttgtaaatgtttttgtgtggttttgtgttgtaatatttttttttttgttttggtgagtgtggtaggtgtttttttatgttgtgtgtgtgattttgattttttggaagaagtttaatcaaaggcagccataggcatgtaaatgaatttgaatacatttacagtattaaatttacaatgaacatgcaaaataaaaggacttgtaaataaatgcattatgaactgatgatactgatttagtgtaatggatctcaaaacaaacttttaacttaaggcacttttattttgccaacaaataacaataaacaaacattgaaacggttcactataaaataacaaatggctaatgtacctgaatttttcagtaaaaaaatgaacttctaataccagttgcctagtgtccacctcctatcaatgttacaagcatggcactcagaacagagacaatggaaaatattaaatctgcaatctttatgatgtaaatttaccatcctgatgtataaatattttgtggtttataaatttttttgctaaaacctacagaaaataagcactgaactgtcttatgattcaccatttgttcacactgaaaattttcattgatggggaatacaaaaatgttttaataactgcatttaaaaataaatgcaggctcacttttccacatgtaaaaagcaatgtaatacctgcacatcat

SEQ ID NO: 233765 - DNA, 653 bp, Homo Sapiens
ttgttgtttgttgtgagtgtaggtattgtgttttttaactaaacaaggggcactaagcatgattttcgtcatacgaaatcgagagccataaagtggcttaccacagtcctatttcaataaagatgaatactcgacatctggcaagtagtgtgtgcctgacagtgtccccactgtgctatgctcatttaaccctcagaaacaatctcatgttacagattttgcagaagttgttgagacggagaaggtaagcaacctccccaaggtcacatgactgctaagggtggggccatagtttgatcccagctagtctgaattccccaattgcttaagcatgattatcagaaagtatagcagtctgttttcacactgatataaagaaatacctcaggttgggtaatttttaaaggaaagaggtttaactgactcagtttcacatggctggggaggcctcaggaaacttagaatcatggcagagggggaagtccttcaggaaacttacaatcatggcagaagggcaggtccgacttacatggtggccgcacagagagtgggaacatgtgaaggagcaactgtcaaacatgtataaaaccatcagatctcagctgggcacggtgggaaatgacattgtagatgatgatgatgatgatgatgat

SEQ ID NO: 233766 - DNA, 816 bp, Homo Sapiens
ttttttttgcttctgctgttgtcgtcgtcttctttttcttctttttttttctgtgtctctgttgtgtttctttttggtcttttgttcgttgttctttctgctctgtcttcttgtgcttgtctttcccagcctctcgcggggtttaattgtgttattgtggcggtctctcctttgtgtgtttcctctttgtgatttggttttcctctgttgtcgctcctgagtccccttctggcgttgttgtcggagcgccttcggttccccgcgcgggtttttttaagctgggtgggaagctccatcccctgtgtgttgtgtccccggagttttccctgtggacactgccttgttgcacccttgttccgttaccctacttggcccccgcggccccaccaaatggtttttaaaagttttttggggcccagtgcgtgccccaaattgtttttgtttttttgttttttttttttttttgtcctgagacagggtctcactctgtcacccaggctggagtacagtagcatgatcagggatcactgcagtcacaactgcccgggctcaaacgattctacctcagcctctcaagtggccgggatcacaggcacacgccaccacgtctggccaatttttttaattatttatagaaacgaagtcttactatgttgcccaggctggtctcaaaattctaggctcaagtgatcctctttcctcagcctcctacggtgctgagattatgggcatgagccactgcgcccagcgttgaacatcttaccctttcctactttatttggctttctgttccttgctgactgtaagcttctgaag

SEQ ID NO: 233767 - DNA, 450 bp, Homo Sapiens
  misc_feature (413)..(413): n is a, c, g, or t
  misc_feature (427)..(427): n is a, c, g, or t
  misc_feature (433)..(433): n is a, c, g, or t
  misc_feature (435)..(435): n is a, c, g, or t
tttttttttttttgtgattttaaatctttaatcaaattccaaaggttatcagccatattacatgccatgattagctttctataagcaattttttttactgtgtacagatcggtgtcaatgaaataaaaaaataaaactgtatactaggcaaagaactttattaatctttgtttcaaacttgattcccaggcttcttcggcttaattagctgcaaagaatgaattgtgtataagcaaaaactgaaaagagctgcagtgtccaaggggcttgggcttaaaaatattagagatctagattttatcagatccataaacaaaaatttcttaaaaagcagtcataatataaaatagcagctcccagtaacttcttcaggttttatcttcagaagttgactcaattcagtttgcctcatnttggaagctcatcnaaaatntnccacaagtacccgaa

SEQ ID NO: 233768 - DNA, 868 bp, Homo Sapiens
  misc_feature (62)..(62): n is a, c, g, or t
atgcaaatcccaacccggaatcagttagtgtataacacttgagtctaactcggaaaaataancggagtcatacgtgcggtgtacaggctttttattgatattgaaattcttctgtagcctgtttacggtatgtggaacgatttcccatctaaaatttctatatataaaaagtaggaaattgtccaggctacccttaaatttcaaatttgagttgaatttggtgaatttattgcttataccacagaactcatatttgacatatttttttcattgatgtgttcctggtagattttcacgaatgagctggcaggtctaatgggggaggcggcgtcccagtctgtgttgcagcagcattctcatcgggggtgcgcacaccatcgttactgtcgggcagtaactgccgcttgccttgccgcagtaggagggaaatctcaccttccttccacatactgtcttgagcctttgctaaattaaactgcactttttgctgtttttgcctagtttttcgccagtctacactgattttggactgttacctaagttgaaaaataaaaggttgtcaatcgaatggtggtttaatgtttggacctgccgatgtatttgtatagtggtagaaacatgctgcttaagtggcctaacctgtttcttgccaataagtaggcttatcattttatctttacgtaattctatatctgtgactaggtttttaaggatacagcttataagttgctatcaattttcactacctaagcagaatttttctctaatttactttttgtattttaactaggttttacatggaagccctaaaataaggcaaaagactttttcttttgtaataagccatataataaaacacgatcggcag

SEQ ID NO: 233769 - DNA, 785 bp, Homo Sapiens
  misc_feature (125)..(125): n is a, c, g, or t
  misc_feature (785)..(785): n is a, c, g, or t
atctgtaatgtccatcaaatactttacaacaatgcattaacaaaaggcaagaaacatcttgctgtacagaggaaccccaatgcaacctgaagcctagagtcacaacggatgaagagagtaaacanagcgtgagaagccgtcccccacacagtgtgtaaactattctgtgtcttgtgcttaacgataacccttacgccccaccggcccgaatgcctcgtctctcctcccatcaaccacgttcagtataaagcacttctcgttactctacagctcacgctagaaaggtgctgcccactgtcatatttaggatcactttagctttctactgatttccaagttaacttgcgattcatttagctttctaaaatagctcttaatatttccttactggttatcacagccttcctatggaacaggctttaacaaactaaatttgcaggagaaaaaaacaaaacagaaagaaatgtcttgtggtatgcatgcacatgcactgttcccggagcgcctgtgccatgctcctcacacccaggagtcgggggaggccgggtagtggctcgtttcatagttcagttcactgtagggacgggcagctgagtagaagtcaacgtagttgccggtggacttgagacccaggtgcatggtgtactcgctggcgggagggcgatggtggacctggtcctcgaagaaggactcatcgtaatttcttgtggaattctgaaatggctggtaggtctcgtaatcttttctgctgggctctgaaggactggctgtggtgaaacctaggn

SEQ ID NO: 233770 - DNA, 588 bp, Homo Sapiens
atgaggccaagggagccttttggttgtattgcatggtctgcttttgtatttgtttttattaagcattcaggcactgaagatgtcatttattttagtttaaaaaccagaatggaggcagttccttccagtgactaaaatggtttaacttaaagtttaattaacaaaaaaagccacattcccattttccaattcacaaagacaagtttttctttaaaaatatgcctgaaacatattacagataatatcccaaatgattactatgtaaacattgtcattacaatgaaattaatatgatatcagctccatttcacattgtaaacagcaggactgaatgcagaagcctatttagactgtccagtgtttgtgcaggtttttaaatgaaccatacaaaatctacattgttctaccttcttgtcaagaggatccatctgtttccaattattggcctttaactgatgaagttcatcaaatttcatactaatattttctatggacaactgcagcatgccccaaaaccccgccaaatctgggagtggtaatggagagcataggatctgagtggatcttttttcttaaagtataataatt

SEQ ID NO: 233771 - DNA, 923 bp, Homo Sapiens
caaaaaggcaggagattattaatgcccagtgtaaacaacatcggaggataaataggaagtgagatttcattagccaaggatatataaaaatagatcgacggtcacggggaaagtaatatagcataaacagctcgcgaaagagcaaagacataatgaatcaggaactttgtcgataccaacatttattataaaagatcaggggagtagaattatcgtaacaattcgtaagttaggtgtatggattctttaaagaggccgtgatcaaaaactgccaatgccaagaaaagtaagagaccaagaaatcgtcaatggctctagaagccatttccctggaggaacaaatgtcaggtatgctcactgttcatgcgataaaaaggcaagataccgatatctgccttcaagaggaaagaaagaccaagcctatcgaatgccaaagaggcgtatacatccatacaaataaggggtttggctaaattccactcttaatatgatgctccagtatgcaccatactgtgatgacctttatactcagaaacaagctggagcctgcccttggccgtggggtgtcagccaatcactgcttgttccacttgttgtacattttatatttgagtctttttctttctcatatacagaaaaatagtatgaaaataaaataaatgtatgaaacagtattaatgcagaaatgagcagcaaatggatgtctgagtcaccagaaattccattcttaaagaggcggttagcacctattagacgtaacagtgatgtcttttaaaaaatccaaaagcatattgcaacaataagtttgagactttgtgtgaacaaagggaaattcagcctcttatgtctaagtctttaatacattaaatactgattttgaataaagatttacctctgaaaatgtggtcccaagttgccaacga

SEQ ID NO: 233772 - DNA, 700 bp, Homo Sapiens
  misc_feature (47)..(47): n is a, c, g, or t
ttcctggggttccccgatgaactcgagtttttactatgtgagcatcncggtgcctgcacagcaagaactctcattgggttccacacgtgctgcgcagatccctgacgcagcgttcactgaacctcaactgcaggagcttcattcctgaggacgctgttaccaagaatgacttgcctcttgaagaatgagtttgcaaagccggcagttagattgctgatgtccaaagtaagtatgtgtagcatcactaaagagaaaattcaggattcctggaaaacagttatgggctctctgcagtgttatttttgtaataaaaaacatatagcatatgtgaaatacctactgggtgatgcaggacacatagaaggctcgaaattaatgtgaatcattctcgtttttctgactgtcattaaaagtccccatttgtattatgtatgagtggtatatcaatatctaaactacactttattgtaggtcccaaccaacattagtttattgacaaatgtttaagagcagccaaaaattcatagaatacctatgattcttaaatcatgaacactcccataactggtatatgtttaggacatgaaaatttccaggctgacaaataatttcgctgtcatcggtcaagactccaggatgatattctgagccatatgttaattttgataaccacctagaacaataaaaggggatcgcaaag

SEQ ID NO: 233773 - DNA, 849 bp, Homo Sapiens
cccctaagttttaaaaagaacaccattttcatatttcctcccaattttttatgaaataaagattttttgtgggtccaccaagaccttttaatcccatgtttctctggaggtttctataagttttaggtaaaccaataaggccactttcccaaaggtattatcagatgtttccttgcacattaagaagaattctatagaactgaatgagaaccacaaagtaaatattttgggtcattgtaatccctgtggggtggggcctttgtcagaactagaatttgatttattaccataggtgaaagttaatccactgtgactttgcccattgtttagaaagaatattcatagtttaattatgccttttttgatcaggcacagtggctcacgcctgtaatcctagcagtttgggaggctgagccgggtggatcgcctgaggtcaggagttcaagacaagcctggcctacatggttgaaaccccatctctactaaaaatacacaaattagctaggcatggtggactcgcctgtaatctcactacacaggaggctgaggcaggagaatcacttgaacctgggaggcggatgttgaagtgagctgagattgcaccactgcactccagtctgggtgagagtgagactcagtcttaaaaaaatatgcctttttgaagcacgtacattttgtaacaaagaactgaagctcttattatattattagttttgatttaatgttttcagcccatctcctttcatatttctgggagacagaaaacatgtttccctacacctcttgcattccatcctcaacacccaactgtctcgatgcaatgaacacttaataaaaaacgatcggcag

SEQ ID NO: 233774 - DNA, 759 bp, Homo Sapiens
agaacagacttcctgtgggtattgtccaagaattttggagtaagtcttctttcggcgaggccactactcttaaaagtaatctttgtcaggaacccaccttgtttacacattcagcccatggaggacaggcatctctaaattaaaatatccgatagcgccttgaagctgttccaacccacctaacagctctcgaagcctggagccacaatgctgagagtacaggaggggttatgcaactgccacttcccctaccgtggccctctcagcaaacggtcttgcacaacattataaaggaatggctcccgtgtcttcatctacggtcagatctgtaacgaaaatttttgggcagcagcaagtgtgtgtgagccaggccaccgtgggaacctgcaaggctgccacccccaccgtcgtcagcgccacgtccctcgtgcctacaccaaaccccatctctgggaaagccacagtatccgattgataccagccagcatacggctggcactggtctaccggaaaaactgaatatcaccgagatacacacacacactcacgcatgcagacaacaccccttactgcctttggataagaggctgtggatgttgttgttgtcattactattattacttcattcatatgtagctccacaccaggccccttgtgtcttgtttggatagagaacaaaaaattaaggctgattatatttttctcttgatttctacctccctgttaaaattgaccaacttcagtataggagatcatgtt

SEQ ID NO: 233775 - DNA, 561 bp, Homo Sapiens
tttcagcaaaaaaatgtgtcatttaatcacacaaaggacattttcttacacatcaaataaaaaaatctaaacatcagcaaagatgtttagatattctaagaattgatgggacctaatatctaacaaagattcttagatattctaagaattgatgggacctgatagaagcatcagtgaaatgtcattaagaatatgtgtgaatattatacgagatgtgcacaattagcttcatctcggcaaaatctagcaagagatcttttggtacaaccaacatggcaacatttattagccaatgcactgtagagctgtctcttttttcgagaatgagtatccaagcctaagtattttaattctgaaggactgctgtctgcggcttcactttgtctattgcgaataagtttcttaaattcttcaaagagaagactggaatcttttaatacaggtacatgttgttgtagctgaggtaatgctggctgcatctcagacagggttaacttcagctcctgtggcaaattagcaacaaattctgacatcatatttatggtgtctgtatctctgaga

SEQ ID NO: 233776 - DNA, 771 bp, Homo Sapiens
  misc_feature (1)..(1): n is a, c, g, or t
  misc_feature (35)..(35): n is a, c, g, or t
  misc_feature (40)..(40): n is a, c, g, or t
ncctggtgattattaggagtgaaggtcaacaaccntaatnaatgcctccttcttgggaataagcaaatcatagaaagtttgtgcatggggaacagggagactccaggggcagtggagaggcagagaagagtggtatcgtgggagcacacagaaatctctgggcatcccctcagtctagctgtggacagtgccctcgttgggctgggaagggttgggggagagagagctcaccaggaacatgtactaagttgttccatttttactgatgctgatttctattcattcttttgccttatattgtagtaagtgtctactaaatttagatttagtgaatagtctaaatctaaaactctataaattcacttttatcattgtaatttgccactgagaacccaccattcaaaacaacagtccaacttcaaattgcttcagtgattatattgttaatatttcctagcttccagaattgaatctcatgaaattcatggaatttggatcaatgtgtgtgggtactgtggtgatccattccctcctgtggactatttctcctttctgaactgaatgcttctttggttttatgtctactcattaatgactacatagtaacccacttctgacaaaggccagtctacactgccaaagtgtttcacttagcatgcctcccagtggaagcagaggtggaatccaaagttttcagttcaagttgctgattcattcaagttactgaagaaatgtccagagactagagactgtggaagtgtttctgtctag

SEQ ID NO: 233777 - DNA, 684 bp, Homo Sapiens
  misc_feature (684)..(684): n is a, c, g, or t
accttttcctggcagctgcctatgttttgaatgcccagtacaacagaaatgttccatttgaaactcacctcaggccatcagacgttactatttttataaccactagacaacgcaggttgccgcatacttctttatttgtgtagacctcgctcttgccctgtttgaagagtctgagttgcttcccctgcctttcttggccacctcaatagcagaagtactctgcctgactgcatactttggcagactggtacattttgcaaaagtcactcctcaaatggttttctggaaggatacaaaagacatctgcaccatggtaaccacagtggcgagtgttcattgtagtacctgtaagagtttatgaccgaaggcaggagccatgaagaaaaaagactcaatagatttgcttttgatgaaacaacaacacttccatacagtgaacgccataagcacaactgcaagcaaaccccaaactgaagaacaaatagggcaaaatgtggcagtgcagacatttcagcatatcaagagcacttccaaattacaggaaaaaaaagatatctcaatagataattttgctgaagataagtgaaggcaactcataaggaaaaaatatgtaaaatggccgataggaaagatgtttaacgtcactaattaaaaattataaaataaaacgagagtcgcccgaan

SEQ ID NO: 233778 - DNA, 793 bp, Homo Sapiens
  misc_feature (180)..(180): n is a, c, g, or t
  misc_feature (309)..(309): n is a, c, g, or t
tttaatttcttttaatgtataacagttacgcctgagttacagaggaagcgcttacaagcagcaggtagttaaagcaaataccagtttctctttctagtctactactccatatagctgaataaattatggtgtgattatatttaaacacacacctcacgcccacacgcccacgcacatacnccactcacaccctcacgtacacccactcacttccgcatgggggaaggtggctgtgagtcaaacacagaagcaacaaagttgcagttactaggaagaaggaatgatctagagtactatgtaaatatttcncaggtcagggaattggccacgtcagagctgacttgaagaagcatcaaatacacagaagtctcagagcgtttcaagttggcggctagagaacccccatttggtcttagttttggtgcctctgcaggaggggaggagagaagacctgtgtacccccaaaaagtgtccaatagtgcgagacacattcgggagcttgatgagaagaacatcagcctgagagaggtcccagagaacatctttttagttgggtgatggagagtcactgaggcccaggatccaaaatcttggatgcttcaccaactccatcttgaaacactggattctggcagtggtcagactctgggacccgtcctgttctcaagccagagtcagatttcaatctggctcttcgttttccttctgggcaaacctctctctccattcttcttttcttctctcttatcccccgagttctctgttagctctgccctttggtgttcctcaaaag

SEQ ID NO: 233779 - DNA, 665 bp, Homo Sapiens
acatctcccagatggctctgcgcccagtgcacatgttgaattttatcttttaccatatcccagtgaagttcgtaggaggaaaacaaaatctgttccaaaatgtacggaccccacttacaatgaaattgtagtatatgatgaagtcacagagctccaaggacatgtcttaatgcttattgtgaagagtaaaactgtatttgtgggagcaattaacatccgactctgtagtgtcccactcgataaagaaaaatggtatccattaggaaacagtataatttgaccattgctatgaacatatgcattattcattaactacttgtatttttttcacttccgggcctctgaatcacataagtaaggcatctttgttgtcaaagacagcacagggtattaaggacacagaaaaaaaatcagaattagtcttttgtgttgtttattttctacctgtgctttcattgttttttcataatcttttctccttcagtggagtactgattgcatgaaatttgatgtgtaaaataataaaagacctttattaaatcattttaatatattttaaattaaacataggtttacatttgttttaattgtgtgcctacagttaaaagcagtatttttaatgtattttataagaaagacaatcaaataaaccgtgatcggcaagc

SEQ ID NO: 233780 - DNA, 522 bp, Homo Sapiens
tacccggatttgttttaatttattatttttttttatttttttgcaagttagagccctatatttaattcaaaatggttgacctagaaatggaaggaatagcgaattaggatatggtaaacactgtttatcacaaagacccaaaatagcagtggcttaaatctgatagtttattcttctttcacatgaacgtttgagcagctacggttcctcttctctacagaatcatcagagtccttggttccttttatctttgtcttcatccacatagtccaaggtagctcactaccaagtccacattccagtcagcgggaaggaagacagcaaaggatggaatcatcacacttttcaaggacagaagccagaagttgaacatgtgccttctatccatatcctcttaaccaggagttagttacatggacactgtgacctcatgttcactgtgaggagaggaggatctttatctcatttgaactgagggagaagaaaaatttccacatcgggtgtctgagcaacaacgggttc

SEQ ID NO: 233781 - DNA, 452 bp, Homo Sapiens
  misc_feature (32)..(32): n is a, c, g, or t
  misc_feature (38)..(38): n is a, c, g, or t
  misc_feature (52)..(52): n is a, c, g, or t
tcacttttttagacctctacccttcaacattncatagnctttctgtttgggnccatataattttgggggaggaggggaggaggtatttggtgtagtcttagaaaagagcaaagcttgttgagatgcaagggcaggtgaccagatagtttcactcactgcttaaataaatggctcctaataaatatttatgcctcagcaaataaataagttatgtcaggaactttggaagtcaatcctaaaagcagaaattgaatgtaaaggtcttctgttcataacagttgacatcagcagcgacgataaactgtctctttctaaggaaactacgtgggcaaatattggtcttttattggaataaaagaccctcatacacctatgcttctgcactgacaatacatttttgatactgaatttcagcttctaaaagaacaatttaaagaataaaatctgattta

SEQ ID NO: 233782 - DNA, 566 bp, Homo Sapiens
atgcccataggagggtgtctaagataactttggcctatttaattttcaaaaccaaatgtaatcaatagtctaccttaaactgtagttgtagaaaaaaacatttacacccatggaatgtgctgttttaagaagactagttttctggataaaactagccaggataatttagttttaaaacatattcttcaccaaaaattgacctgctttacagagttacagatgatgtactaaatttcagagaacatccgaccgaaaaataatgatttttactttacattaagtgtttctggctgtgcgtgatggctcatgtctgtaatctccacactttgggacaccaaggccggaggattgcttgagcccaggaattcaagaacagcctgggaaacatggcaagacctcaactcttctaaatatgaaaaaaatatcgagggcatggtggtgtgcatctgtggttccacctgctcgggaggctgagatggaaggatcgcttgaacccaggagttccaaactgcagtgagctgtgattgtgccagtgcactccagcctgggcatctctaaatctctta

SEQ ID NO: 233783 - DNA, 517 bp, Homo Sapiens
cacacacacacacacacccaaccagattagaaaagtttaataagtaccacttggatatctaagttttacccagctatttatatcggctatttagttttcatcctgcccagcagtgcttatttcattttgtctatatttaacatttggtcaggaatatgaaaacataatctgttttaagactcctagaaagctatgatattatttcgttaatactatcataggtttctaggttacaggttgctcgcttctgtaatctcagtactttgggaagctgaggcaggcagatcacttgaggtcaggagtttgagaccagcctggccaacatggtgaaaccctgtctctactaaaaatacaaaaattagccgtgtgtggtggtgtgtgtctgtagttccagctactcaggaggctgaggcacaaaaatcacttgagcccggaaggcggaggttgcagcaagccaagatcggatcacttcactttagccttggtgacagagtgagactgtgtctcagaaaaaaag

SEQ ID NO: 233784 - DNA, 414 bp, Homo Sapiens
  misc_feature (1)..(1): n is a, c, g, or t
ngcccagctcctggggccagaaaggggttagtcttgaagtcttgggttggacatttcaccatggccagcccagagctcggctggaaacagatgagagacaacatgtgaggaggcagacaggagctggggatccaggctctgagcacctgagaggtttgggggaaggtattggtaatggattggattgtgtcccccaacaaaagattttcaagtcctaacccctgtacaggtgaatgtgaccttatttggaaatagcgtctttacagaggtaatcaagttaaaatgaggtcatttgggcaggtgcagtggttcatgcctgtaatcccagcactttaggaggctgaggtgggtagatcacttgagtccaggagttcaagaccagcctgggaaacatggtaagaccctgtctctaca

SEQ ID NO: 233785 - DNA, 382 bp, Homo Sapiens
gcgctttggcaggctgaggtgggaggattgcttgagcccaggagtttgagatcagcttgggaaacacagtgagactccgatttctacaaaaaaagaaaaaagaaaaaaaagtcacatgtggtggcacacccctgtggtcccagctactttggaggctaaggtgggaggatagctcgagccccagagatcaaggccgccgtgaactgtgatcgcaccactgcactccaggctgagcaacagatcaagactcttgtataaaaaagaaaaaaaaattttttaaaaatataaatatagattaacaaagtaacagggaatataatattttcaggttggtcatatagaggaaatactatattgtgttattcagcttaataaaatataa

SEQ ID NO: 233786 - DNA, 544 bp, Homo Sapiens
  misc_feature (7)..(7): n is a, c, g, or t
  misc_feature (16)..(16): n is a, c, g, or t
  misc_feature (46)..(46): n is a, c, g, or t
ggaatgntcagtagtntgccacagtgagtgcttcacccagtctccntctggtcacttcagccaagcacatgggatagaaagtagcagggccgtctggccctttaatggaagagggccatccagtcctctccagttaacatctagaccgaacacaaagcatccttctctcatccagaagacataggaaccctaccttcagggatgatttttttttaacagtgaaatcttaaaagtaactgtttcactaaagcctccagtatttactgaagactgtcagaatcatcctccatcactagatcttctccaccagtcatgttccctgagcagtggggtggcttgaaggtataaaccagagaggcccaagggagggatagttagcagacttctggtctttttctagtttgtgctcttctgttccaaggaccacaggtatgtcttcttctgtgtagttgttcactattgtttcaatgtgattcgtttcccacatttgaaaatagggggggattttactttaaaattcagatatctggctcctctttagggg

SEQ ID NO: 233787 - DNA, 1000 bp, Homo Sapiens
tgggtatctgggcacgattctaacgagcgtctgggaaacttctatcaggaggtgggttcttcgattgtgtgcgaattttttgcccgtccgtagcagggtgacgtcaccaataggtgtctgacagctattgtgtgctgccctcccattatgggggtgaagaaagctttcgtgatgccctcacttggtcacttcgattaaacctggttgcacggtgccttacatatgtgttggtcccaccaccaaagagggtcttttggaattcttgagaacaacagaccaacggccaggaattgaaagtcaaggtctgcaatgtggaagctcattggaatttggtcttgttgaggacctgtggaagaaaggctcctccattatcgtgagctcttcttttagggtcaataagacaaccccttgggaggttcatgctaaaagggaatttgttttttttttggccttgtgggagcatttcagtaatgtcatagttagattctgcctaagaaccaccctaagctcctcattttatggtttaaacttacattctcgttattaaaattttattcctaatggcatggtcaaatcccttacaaaggaaactccttatgaaaagatatttatgatttagggaataagttttggatcactgtcctatggattttaaagaggtgttaatgatgccatgggttggttttaggtttggagaaggcagctctcattcttggcacagctgaggacaagctagtgtggcttcatatcatattagccacgtgatgctgagtgaaccacacagcttagtgggcctttgtgtatcaacgatgaattgaggaggttggactataatgtttctagaatccgttccattctttgagttggtaagtctatgccatcctatactcttcactggatgttgtacactggaccagtttcaaaaggagtatgtgggatggagtcttaaactccccatgactctcagtgcctggtaagaatgtatggaacagagatgggc

SEQ ID NO: 233788 - DNA, 841 bp, Homo Sapiens
acacattatactgtttatggtttaatacatatggttcaaaatgtataatacatcaagtagtacagttttaaaattttatgcttacacaagttttgtgtaaaaaatgcagatacattttacatggcaaatcaatttttaagtcatcctaaagattgattttttttgaaatttaaaaacacatgtaatgtgcaatttctctctgatataacctttattactatagcatggtttccactacagttaacaatgcagcaaaattcccatttcacggtaaattgggttttaagcggcaaggttaaaatgctttgaggatcctgaatacacctttgaacttcaaatgaaggttatggttgttaatttaaccctcatgcataagcagaggcacaagttagctgcatgtgctctagactgtagagcgagccaccgttgagaagcaaaggacagcagcaggaagagcaatggaacctcctcaggacttaccaggctgctgcacaggatctagcttctcccacctaagatgggcacattgaaagccttgttgcagcagcacccccatctgtggaagcacaggctgcctgcacttctccagctgctctagcacctgacttcctggtagtcagggtaccagggagagggaggagcaccagggtgggggatatttaggggacctctttccttcaggaccacacccttctaggtgaaagcacaaacacttgattactttgcattccatctgcaaaaacaaatttaggttttgaatatggtgaaaaacgaagaaaggaaaatataaaactctgtattttatatacagtaaggaataatggaggctgataatgatctg

SEQ ID NO: 233789 - DNA, 449 bp, Homo Sapiens
  misc_feature (128)..(128): n is a, c, g, or t
aggtactctaagcgctagacaggacggggtgggagtcggtaacatcgtctcctctgggctggccctgcttctgcttagctctgggcataagactgactcccagtacagtcacagttatgtctctgagntcaccccagtcctgggttccaggttcccagctctgagcctggcgagacacacacaggctggtgctgtgggatgtcttggtcaggtgatctgcttgccttgacctcccaaagttcagggattacaggcgtgaggcaccatgcccagccagtccctgtcttcaaatacagtcacactgggggttaaacaatgtataaatttgggggcgatacaaacattcagtccataacaccccctataccccaaccctaggcaaccactaatctacatcttatctctacagatgacctattctggacatgtcatataaatggaatcataca

SEQ ID NO: 233790 - DNA, 832 bp, Homo Sapiens
  misc_feature (70)..(70): n is a, c, g, or t
  misc_feature (178)..(178): n is a, c, g, or t
gtttttttgtttttttttttttggagagattctgctgtgtcactaggctggagcacagtggcaccattcncgggctcactggcaacttctgcctcccgggttcaagtgatttcttgtgcctcagcctccctagtgggattacaggcacgtgccacatgcccagataattttgtatttntagtagagatgggttttgccatgttggccagcctggtctcgattcctggcctcaagtgatcctcttgccttggcctcccaaagtgctgagattacacgtgtgcatggcactcggccactgcttcaggttaactctagaaaataactcctcactcttccaggttcctttttggaaaataaatcaacatttgcctatgtgaccaatcactttcagtgtcagagtttctgttttcatattctcagtctgcacatcattccagcagttaccaacagtagctgtcttccatgacttatagaagaattactaaaggaacagactaaatacttacttaaaataacatacagaaggactaaattagcggcaagaattattatttctcaggcatgcacctgcaatcccagctacttaggaggaagggaggatccattgagcccagaagttcaagacaagcctgggcaacacagggagactatgtctctaaaaacaaacaaaaattgtttcctgttttatgacagtcacaaagacttattatttctcagaataagagacttcatttgacagttttagttgttatattagaattatcaagcaccttatgagctgagattatggactcaatttctgaatacaggacagggaaaatctgacacaaat

SEQ ID NO: 233791 - DNA, 342 bp, Homo Sapiens
atgaagtacaccagtgtttcgtagtttttgaaatctgaattctttaaatgataggtttgatttctaatggattgtggaaatttattgtcactctatagacatgagaatctctgataccagctaatgttttcatttctttctttgttgatttcaaatagatcagaggttggatttatgcaaacctgggccaaaggacagttagaagacgacggagtttcactcttgtcgcccaggctgattaaaaagcacagaaagccgaacaagacccaaccaaatttggtaattcatccgattcaaaattgttttggttaaatcaaaaatacaagtacacgaccgcaggaa

SEQ ID NO: 233792 - DNA, 634 bp, Homo Sapiens
tttccagctttttgcatggaaacctaggaaatttaaatagctttgaagaggaagaaaagagtggggagagagtaaagtgcctcttaagaggaaaagtagaaatttttttttttttttaaagggagatctcattgtcagtggcattttaagagccttgaagctcaatgaaccaaaggaagtgtcaaacaattaagtgaggtagcaagccatgcaggcctaggggaagggcattctaagaaagacaacagcatgtgcaaagtctttggattgggaagaatgtgatttgcttaaggaatagcaaggccagtgtgtcaaaatagtgcatcattggggaaaacagtggagaagcatgacagagaatgaaaaagagaggaaggaggtaggcaggggccagatcactggaatctacagttggcaattaatgaccatatgtactccttaagagcatgctttaatgagactgcaaacaacagtgttgataataccaaccaatcactcaacatacaactaaaacacttcatatttttaccacagaaacagaatacgggaggtaagtatgaaaagtctgtagatctatttatacacagtgggagtatctacctgagacaagaaaaactggcacacacacaccgct

SEQ ID NO: 233793 - DNA, 850 bp, Homo Sapiens
cccaggcaatttcaccttggagtgttataaatatcaaggtgcatttagctggtggttaactctcgtttgtctcctttagtacaccagtgtccaagggaatattataatatcgccttttctattagggaccccagtggtcaatgagtaaatactgaaatgagtgagtttttggagaaattagaagaaaaattttgctcaaaactatggtagttataaactggcttgagattgaggtgcgtatttctaaattaattgcaatgttaagcctcaagtgatattttccccctcctttatttgtttgctgtttattggtaacccatcaggaaaacttattctttaaaactactctcacccgttgaaacaaacttgtttctgaaccaggtaagaaggaaataagttgaaatgattctaaaaataagtctgtatataattttcttgactaagaccatttcagtttagtcattttctcttttttctttctttttttttgtgatagggtctcactctgttgcccaggaggaaatggcagtggtgtgaacttggctcactgcagccttgagcttctgggctcaagtgatccttgcgtctcagcctcccctgtagctgggaccacagttgtgtgccacaaggatcagataattttttgattttttttgtagagacagggaggtctcactttgttacccaggttggtctcaaactcttggcctcaagtgatcctcccatctcagcctcccaaagtgctaggattacatgcacgagcctccgtgcctggccgagccatttcgtttgaaggcaaggattttgttttaattatttttatatttctcatatctagaaattagccgct

SEQ ID NO: 233794 - DNA, 748 bp, Homo Sapiens
gttcctgggtcattttttagggcacataaggtcataataaagtaatgcccagctaagtgctataggggaaggccaagtatgctggctggctataggaagtgacacccatacacctgaccatcaccccataccacagcgccatacgactattcaaccacttatcagacacatatgaaaatcccaaatgttttaatttaatttttgtttccttaaatagagataacccagtaaaccattttcagaacttggaagtttaaaaacgtgcatataaaaatgggccattaaatactttttattgaatgtggattgactgcagtctgctaagaaaaatggggtgtgggagctgaagaaaaaggaagttgtcttttttttttttaaggcttgcttgtgaaaggaacagttgtaaaaacaaaattgcttgaagcagggtcagcttagtgcttcacagtttgactgcttctctaagaggagcccttcctgcgcacgtgcattcaaaaatcacaaaaaagtacaaagacaaacacctaaaacacactgcgtcaagtgcagcaccgactttggtcaaataaaaaaaaataaaagaaaaattaataattgctaagcttttctacatgatataagcaggtattgcatattttcatatatctgggggaaaataaaggaagactccaaataaattgtaaaatgcagcaacatccaaaatactgatattctaagcatctacagatctcagaatagcactgccgct

SEQ ID NO: 233795 - DNA, 613 bp, Homo Sapiens
agccctggagaattttttttttttttttcaataccattttgagagtaattttaaagactaatgcgaaagttcgggagcacattgtatatttgaaataagtgtagtgtgtgcaaagaccattttctacctgtggataaaaatcaattcccccaaaggcctaaaagcatgaacaatgtttattttgagtaaataattaaactacatatttaacatggaaaaaattaaatgaatgtcaaaaccaaaattaagaactataagcaaagcatgcagtctctgttaacaaaacttagttgtgaaactacatttttcattttgtaaatgccattatttcatttcataaaatgtaaaaatcctcagtatcattctttacacttgatgcggcaaacacttctttcctattttcctcgtatttcctgcaaaataaatctacatctcaagttccttatagttcatactttcttctcaacatatttgagaccttcaggtccaggcctattttctcttcccgttaaaatcttacatgcagcttgagaactagctatgaggaaacagttagttattacttaccaaaacacacaatttaaggttaccaattttgtgggctctaaccgct

SEQ ID NO: 233796 - DNA, 701 bp, Homo Sapiens
catataacatttgacagcataagtatatacaagaagcctgccttatgctctaaacttcatcatcctatttttgtaagtgagcatgttctatatataatcctgttaagagtaaaggaaatattacaacttttaacattttccttatcatttttgctgctctattccctttcttaaaaaatgtattttgtaattgaaatataagactactcagttaggagtcatagttaaacaacacaagaacaagaaaaatacctcaaaatgtactaacatacggatttcttcagagtgaaagttgaaccaataaaatatgaaattatatttagacaccctcaaataagctacaaaacataatgacaagaaaaatggagatggtaaaaaatcctctcttaaaaattcaataagcatatttacccaacataagtaaataaaacaggaaatatcattcttgtttatttgaggcacgtacaaccatagtaaataaataatttcgttcttatatatgcagaaaaacatctatgagaaattagtaacaagaacaagcaagattaccccttcacataggctctttttaaaaatcacttcacataggcacttttaaaaactgatgatatatttagattgtctgtaatatccaaataaagctactttctaaatgtgttgcaaatgaaagcattttcagacctatcctagaaacccccgct

SEQ ID NO: 233797 - DNA, 437 bp, Homo Sapiens
  misc_feature (11)..(11): n is a, c, g, or t
  misc_feature (86)..(86): n is a, c, g, or t
cttgtaacatnaggcattctctaataattaaaaaatttaggggcaataatactgatcataatactattctcgaaagcactctctcnaaagtaaattttcactttttaggaggagttgtaggatagtgaaattcttcattaaagagttagtgataaactaactagtcttcagtcaatttagcagttcacatagtttattcagcaatataacaggagagaacctccattgtaagagacataaggcagatacagggtgcatctctggggtacattcttcatacagactaacaaataacttcaggtttcacaacatgtagcaagtatgatttgttgcacaccaacagccattcattcctcacgttttccttgctaaaagagccctggtcaggcacgggtgctatgcctgtaatcccagcactgtcggaggtcagggcaggt

SEQ ID NO: 233798 - DNA, 699 bp, Homo Sapiens
atttcacagaaatagcgtaatggaaatcattatgtaattaacaaagcatgaagctcattatctttttctttttaacaaaaccttcaatttcacattttagtgtacactgtggtttccagagaaatatatggatctcctatattctgagtcagaccaaatttattgcctttattcttaccctagtctatggggtcaataaccgttttcctgaatgctgtcaaaatggtgcctgaaaatatctaaatcccagcaaaaacctaggcctcaactttggaacccagtcatagatctttctaggcagaaggcctctcaggggagtacatgccctgggcaaaggccatggactcggaagcaggaaggtcacgggatgatttaatggcatcgaataatcctttggtgagatggcctttgttgccctcagcacagtcgaggcaggttaatcatttatttgccacaacccttccttgctctgtaaagctgcagcacaactgggtggtccgtatagccttttctgccacagatgtttgtggacatttcacttccagactgtgacgtctgaagatgggcttgaatgacagcagccatcatcgctgccattagggaggtgcacacagccccctttgctcgatgcaaatatttggttggtaagaaattccagtgcagctaaacaagtcagcttggactgagttaagaaaagct

SEQ ID NO: 233799 - DNA, 846 bp, Homo Sapiens
atgttggtgtctgttctctgccgtttctccagcggcacgcgcctacccgtagtgtactgattctagatcagggtcatgtagtgtacagagtacttttagtatgtattctctgaaaaggcatggactcttgtagggacataaccatggaatcttcgatacatatagtaccttaatatcctcgaatatctagtctgtgttcaaatttttctgattgcctaataattgattttagattttgctcaaattaggatctaaagtctatatgttgccctttagttgttaagtcccttataatgtatagattccccaacatttttttggtcctttgcaatttctttcttttttggttgaagaaaccaaaaaagaaaaccaggtttttgtcctgtgaatttcccctttctggatattgctgattgcatatttgtggtggtgttagtaggatttttttaaaatttcttttgaattgcaaataagatccagagacctgatcaaattcaggtttaattatttggcaagaccatgtcacgggtgatgtgtgcactcctatagtacttccaggcccataatgtctggtcttcctctgtgatgttaatatttatcaggatttgggacagtttgataaatccattagaaatttgttgttcttcttaatcagctttccacttaatggcttttggcagccacttgatgactgcccatatccataattttattaggggaaaattacattttgattacgtatcgctggttgtttttgttcaaaacataggttgtatgttaatctgccagtacattggcatcttcatggatgagggactcattagtcttctcacaagagtccctttg

SEQ ID NO: 233800 - DNA, 860 bp, Homo Sapiens
ctgggactacagttgtggccaccacacccagataattttgtatttttagtagagacagggtttcgccatattgcctaggccagtctgaactcctgggctcaagcagtcagcctgcctcagccttccaaagcattgggattacaggcgtaagccactgcgcccagcctctgctcaattttgaacctgaaactgctctaaaaaatacttgaaacaacacacctctgggttgtatagttccccagccctgctgtgtttcatacactgagaagttcaggaaggtaaacccctgaaggggagggaagagatgctggtcctggaatggagactctgttacactcctgtttcctctcctcggttaggccttcaccactctacatctgcaaaaccaggaacccacagtccaagctagactggtcttctctgtggaaactgtgattctcatgagtggggctctagcagtcccgactctgttctgcgggcatggaaggaagccccaggaagctgggaaatgactgtgattctcatgagtggggctctagcagtcctgcctctgtgggtatggaagggagcctcgggaagctgagaaatgagacaaggacagggttgggcaggtgggctttgttctggtgagtttgctagggtaagaatggagccccacccggcaccctcagagcagcacggctctgctagggtatggatggcaggtgaggacaggcgatggtgggctggccacagcacagaaaggcacgtgcccagtgagggagaagtgccctgacagcaacaacactgttatttacaaaagatggtgaaataggaacacataagcaatagcagcaaagaaggcgaattccattcatttc

SEQ ID NO: 233801 - DNA, 807 bp, Homo Sapiens
agatcggggtggggctccagcctgttcgcaagctccttggagtcgttgcagccccggctgctcctcctccactgcagcccacgctcatggcagtgattgctccagacgggctgctgctgccatcagtatgacatgctggtttattgcctgttaccttgtaagtgcccagtcaatgtcagttagtgttagtaatttcttggagtagtcaacttcatgaacatttgccatctggttatagcatcactcgtgattccggtacccaacagagtatacgtgtaaaaactgagcaacataaaatctatgatgtcttagaaatctgaaatagttgagtcattgtagtacttctttgagtctcttggcctaacagtagtctgggcaatgctactgtgtgtggaagagccaaacctaagtcaacagagatcgggtatcttcctgctctgcctcctctcaggcctttcttttgtgtgtcacaatcgttcctcctaccaaaaggaaaaagagagaatgaattagtggctaatcttggagaaatagcacaaaataggagtgaattttaaagagcccaatcaggctgggtgtggtggctcacgcctgtaatcctaggactttgggaggctgagaccagtggatcacgaggtcaggagttcaagaccagcctgggcaacatggtgaaaccccgtctctactaaaaatacaaaaattagctgggcatggtggtgcatgcctataatctcagctactcgggaggctgaggcaggagaattgcttgaatctgacccgggggatacgaggtgcagtgagctgagc

SEQ ID NO: 233802 - DNA, 394 bp, Homo Sapiens
  misc_feature (78)..(78): n is a, c, g, or t
atattccccccagagtgcaacattcccaagagaaaccaggcagaggcttatgtctttgttgcctggtctcagaattcnacgtagcattattactaccatactctgttggtcaaagcagtcatgaatctgcccagatttaaggggagaggaatagactctaccatttgataagggagtggcatggtaactttggcaaagaacatatgggatagaagatattgttggaaaatacgatctggatttggaaaatacaatctgccagtttataagctatattaaagtttcccagggaatatttttcctgaattctgtgggatcagtaggaaaaacatagaattccaagagcgttcattgcaatttgcccaagtatggctaactaccatgagggttagtg

SEQ ID NO: 233803 - DNA, 773 bp, Homo Sapiens
  misc_feature (178)..(178): n is a, c, g, or t
ccttgtgttttgtgggtttgtttgtttttttgagagcgggattctggctctgtccgcccaggctggagtgcagtggcgcgatcccggctcactgcaagctccgcctctcgggtttgcaccattctcctgcctcagctcccgagcagccgggaccacagcgcccgccaccgtacccgcncaattttttgtattttcagtagagacaaggcctcaccacgttagccaggatggtctcgatcccctgaccttgtgatccgcccgcctcggcctcccaaagtgccgggactacaggcgtgagccaccgcgcccgatcagcagtatctttgttatcatagcgggcccacacctctaagttgatgctaacaaggtgactcagagtgggcccctagatagtggatgctaacaagatcacctctggggaaatgagggtgctaaagtttgagtcacatgccaatgattcaatcaatcgtacctatgcaaggaagccccaataaaaatgacaaatactgaagctcaggagcacgtccctggttggcaatactctatacattgtcacgcatcgatgtgctggaaaggtaacagcccctgactccacggggagagaacaatgaaagctttgcgtttggtgtcctcccagatctatgtgtctttccctttgactggttcatttatatccttttgctttattgatcaattaataaaactgtagttgtaagcatagcatgtccctgaattctgtgaatcattctgacaagtgatcaaacctgaggggt

SEQ ID NO: 233804 - DNA, 605 bp, Homo Sapiens
  misc_feature (2)..(2): n is a, c, g, or t
  misc_feature (11)..(11): n is a, c, g, or t
  misc_feature (16)..(16): n is a, c, g, or t
  misc_feature (23)..(23): n is a, c, g, or t
  misc_feature (34)..(34): n is a, c, g, or t
  misc_feature (62)..(62): n is a, c, g, or t
  misc_feature (119)..(119): n is a, c, g, or t
  misc_feature (171)..(171): n is a, c, g, or t
cngcaaggaancaccnggcaccntctgccacttngacataatccattccactcattattccngcaaacacttactgacaaatcgggtcctgagttgaaaacaccatttgtcaaagaggncctttgaagagacccctaggaaacacagagagtgtttagttaaggacaaccngaagtacacatttacaatagatagatgtgcaaaagacctttttgtagccaaacaagttggaacaaaactctcggtgaatgaaccactgtcattttctgttgagtctattcttaagaggccttcatctgccatcactcgtgtctctcagtgaaaggctgcttaaacagaaagctggattttctgcagtcttagagcattatagccatttgctactttttttaaaagttaagatgtttgtgtaaagaaatttctaatgtaaagatgatgattttgaaaaattttatatattcctaatatgcatgtactttttcttatcacatatatttaaacttacagatggaaattgcccaatgtgcaaattgttaagtaccacactttacacagcatttcaaaaagcaataaaattgacactgtcttctcaaagacccaaaaaa

SEQ ID NO: 233805 - DNA, 424 bp, Homo Sapiens
  misc_feature (86)..(86): n is a, c, g, or t
atctgccactgggataaagtcctactaaaaaaggaacggtaaatgtaccctaatgattaaaccccgtgagatacatatgatttccnaaatagtccatttcattaggaacttttttgtttgaatgaatgtcacataggtatcctcagtaacacagaacgaaattacctttgtattattgtgattagttgttgcttattattttatactcagtaataatgtggtacactgttaatttttttgcttttgtaaattatattctaatttattgcccatgtttcctaacacttgtcctacattcattctcctgcttgtaatgaaaatgaaaaaatcattgtaacacttgatggagtgaaattccacgccaggcacagaatttttttgacatagataatttagtaaaataaaaattcagcttataataatg

SEQ ID NO: 233806 - DNA, 563 bp, Homo Sapiens
  misc_feature (1)..(1): n is a, c, g, or t
  misc_feature (16)..(16): n is a, c, g, or t
  misc_feature (72)..(72): n is a, c, g, or t
ntaaggtctcactttntcaccacgggccagaagtgcagtggcatgatctcagctcaactgcaaccttctgcntcccggactcaaaaagatcttcccaccttcagcctcccgagtagctgggaacacagatgtgcatcaccatgcctggctagtttttttcccattttttgtagagacggggttttgccattgttgctcaggctgttctccaaaatcctggactccaagctatctgccctccaatggcctccccaaagtgctgggattacaggcgggggccaccacacccggcccaagaataggaacattttttaaggagcttaccttcaactgagaaagctacttcggtgagttgtagcatatttcaaccagaaaaatcaaaatattagttcactttgaagagacaaactgaagcccatccttctgcaacttttgtagaaacagactgacagacttaattcaattgaccccaggctagttgattgtttttataccatctaatataaaatggtagcttaatcctgcctgtgcctttgttcatgtaatttagttgagtacagtga

SEQ ID NO: 233807 - DNA, 424 bp, Homo Sapiens
  misc_feature (1)..(1): n is a, c, g, or t
  misc_feature (75)..(75): n is a, c, g, or t
ngaatttaattttttttttttaaagagatcgtgccactgaactccagcctgggcgacagaacgaggctccgtccnccaaaaaagaactgaagcatttagaatcgatagtggcagtggtggtggtggtgatggtgatggtgactggtgataatgatggtgatgggatggtgacggtcatggtgattttggtagtgggagtattggtgtggcatttcagcaaatgttgttttcatttgttttaaccatcagccaaggaacaaagcgaatctgtctcttcaatatagttacacaggtgactaagtgtcacccgcttccaccttctctaatcaaggaaatggtgacgatcaggttactatagattccttataaggtgccttcataatggataactgtagccattttatgtaagcattgtcctgtgatt

SEQ ID NO: 233808 - DNA, 1000 bp, Homo Sapiens
gcgttctgcgttgttaggctgtcgctttgtttgtggggtatttccctcgtcttacttgcgtggtacgtccgttccgctttgtggtcgtcggtgtagcagtgtattgttaggagcccgagcgcctgcttgtcagctgtatgatgcccggtggttatgcccagggatattctgcaccttggtggctgtcccagtttgcacgggtgccggtgtcttgcccgtaatctttgatagggtccaccatgtaatctgttgtacaccgttggtgtcctcagattgccttttggatttccctcctctcctgtgtcggcacttggcttggttctccccggaatgtatgtttacctctttagaggagttgacgtttctgacaagcttcaagttgttaaaattcagtgttacttgaagtgactaaatgcacacagtaatttcccaaaattatgggaaaactgaaggttaattgaaaccgatgattacaccctgaggttccatccacagaggcaagaactctgtagattgtctccttgatatcatcaacattctgatatgctttctgatctcactaattctagtaaatataatcatttccttccattcctacaatagtctaaactaatttaaatgaagtcagcatatttattaagcagaagtctttagagaaacctcattgaatcaagtaagcattatgtgtaattaatacagtttataaataggtgatgatttttaagtgacttgttttttcttaaatcattctctgtatggtccttaattttttttaatggtaaaagaatttccaaaactaattaattcagtaaagaagagataaactaaggccccctctatatgagttaacatgatttcactgaattcccaaagcacactgattcacttttatatttttcccattatttggaagatgaaataatgaatatggtctccaccatgtagatatgtgcacaaacaacatatttactgaaaagtcaaaaacaggcacacctgctgc

SEQ ID NO: 233809 - DNA, 783 bp, Homo Sapiens
gaggtatcttaccatatgcttttttccacaggaatggcgggtttcccatgatcgggacttgatgcttcggaaagctttgtatgcactgatggagtaagggatttgagaaggaagcgttgtaaaggcgctggatggtgccagcatgacacagctagaatacaagagttcagggctggtatacacagaagatgaatggcagaaggatgtggctatgaactgatcaagcttgcctcaagtgaacccccgaatgcatctaggtaccaatggagccaactgtggtgggctggagagttctgaggagcctgtatatgagagccttgaagagtttcacgtctttgtccttgctcatgtgcttaggaggcccatagtcgtcgtggcagacaccatgctgagggactccggaggggaagcatttgcccctattccctttggaggaatctatctgcctttggaggtcccagccagccagtgtcaccgctcccctctggtgctcgcctatgatcaggcccacttttctgcactcgtgtccatggagcagaaggagaataccaaggaacaagctgtgatcccacttacagattcagagtataagctgctgcccttgcactttgctgtggaccctggaaagggctgggagtggggcaaagatgatagtgacaatgtccgattggccagtgtaattctgtccctagaggtcatattgcatctgctgcatagctacatgaatgtgaagtggatcccactgtcctctgatgcacaggctcctctggcccagcctgagtc

SEQ ID NO: 233810 - DNA, 660 bp, Homo Sapiens
tttagaactttctcagttctcttagtaagaactttagaagtaatcttgataataagcacagacagcctaacagcagaggcaacttaaataactcctgagcagttggcactagaacagaatacttggaatgacaccaaagttaaccaagtccagcatatgtccaaagagttaagtgtttcatttactgtagcattctgggtgagaaattggttgctgaaatcttaagacagtggtctcaaccttggctgcacattggaatcacctgtagggttttaaagcatccaaatggtaattaacaggcagcaaaacttcagaactagttctgcatctactgtgcaaagatcatgattaactgtcaagacactggtagaacagaacaagcaaaagattaagagttcaaaagtaaatgcaaccaatttaacatgtagtgttattaaaaaattacaaaggcctagaccagcctgggcaacatggtgaaaccccatctctacaaaaaatttttaaaaagttggccaggcatggtaatgcgcgcctgtggtcccagctgctcgggaggctgaggtgggaggatcacttgagccttggaggtcaaggctgcagtgaatcatgatcatgccactgtactccagcctgggcaacagagaccatcttactcgtgcc

SEQ ID NO: 233811 - DNA, 538 bp, Homo Sapiens
ggcacgagctcctgagctcaagtcatcctcccacctcagccttccgagtagctggaactgcaggtgtgagccaccatgcctggctgatttgtctttttaaattttttatagagaccgagtctcaactatattgtccaggctggaaaagaacttctttccctccaagtgataaccttttccagacaagtcagcttaaaaactgacccaaaggccctgaagtacacagttttcttggagaaagaaaaaaataagtgaaaaggacttgctgacttgctaattcattttggggcctgtgggtaacatcagaatggcaaagcacttggggctttttttctaatttgtatttttttaatcttctgagaaatgacttttatatgccaagattcattccatgattagtttttatgaccaagttatgaacgcttttgaatatggggacctagaatagaaatgctaacctacctgcaaggagagctctgtgattggcatccccatcatgctgtaactgacacaaaataaacttagggtaatctcgtgc

SEQ ID NO: 233812 - DNA, 577 bp, Homo Sapiens
agttcccctcaacccctgtgcactccataggaaggacaaacttacctgtctgcttccttcccatgtgcttctccccaaattttcatatagatatatacgtacactccttttggaataaacgaagaggtacattatatttgacacaaacttgggagtgttaagaggtcataagtgtttacctatcagataaccatctgtggctctgtgttggattttttttataccattaggaaaatgggaatttttttataggcctgccatacttctactttgccaaatagcactttattatcaagatacacccatggctcatttcagactcactgaactttttttatatgaatgcacagtcgtcatattttgggcagtctgtgagttcttggtaactcatccccttactacaaaagcactaagtgaacaatacaaaagtataaaagcacaaatttgaacttacatagtttagtttaagtatgtttcactagaaaatcaaatatttagatttctcacattgaaaatgcttaggattgaggtttagctgcttcctttaaaaaaaaaaaaaaaaaaaaaaaaaaaaaaa

SEQ ID NO: 233813 - DNA, 375 bp, Homo Sapiens
tattaaaataactacaaatgaaacaactctgatgaacatcacagacataaaagaagtcatacatgaaatgcacacattgaaccaattatattaaatttttaaaataggcaatctaaacatttatttagggatgcatggttacagactaaaactgcaaagacaagtgattaccataaaactgaggatgaaggtgattaagcgttaaaatcaggaggggacataaaggagcttctggggtactagcaaagttcaatttcttaacccacataagttacacgattacaatgagttttactccattactgaccctgtcagttgaaaaggcctagaagcaatgacaccccagtagcaatgaacatacccagcacgcagatc

SEQ ID NO: 233814 - DNA, 620 bp, Homo Sapiens
  misc_feature (33)..(33): n is a, c, g, or t
  misc_feature (77)..(77): n is a, c, g, or t
  misc_feature (127)..(127): n is a, c, g, or t
aacatataacacaaagtgtgtgtaactgttaangtttcagtcaggcttccggtcaacaataggctattagtagttangtttctggggagccaaaagttataccacagagttttgactgcatgaaagntggcacccctaacctccaagttgttcaggggtcaactatattaaaagtctatgatatactcttggctttccagaaacttaatttgaagaagttaatttaaaaaccatagttttctatatattaatttgacagttcagcctttattaggtcaaagtttcaaaagagctcagctgttagatgtttagtaatgaatgccatcagcctttatgtcatcaggattcaggatgtttaggtgtgtgtttgctcagggctcagaaatagtcttggtggtgggtttacagctgcccatcttgttaggtgtggaacctgccttagcgctgggctgctgccaagtctatgggaacattccctcccgtgcccttcctacactgtagaggcctacaggttgatgaccacttctgggacccttcattacacctctcactgaaagcatgtagagttgtgtaagtgacagcagccagccttgactcatcaaatagtctttcagtttgta

SEQ ID NO: 233815 - DNA, 556 bp, Homo Sapiens
tagattatgtttcttattgcgggtttttaaaaattcttgaattaggcctatttgctcttttgttctctattgagttagcaaattcagtttttccaagatgccctgaaagtatgatcatacatgtatacgaaatggtccttgggtccagctggcaactcctgtgcacccccgacctggattctgccttccttgaagtgagccttggaagaaacaagtgctcatgctccctgacattattagctgccacgatgaagcctcagtcccaaacaccccagcttcctgtctaactcaagagctaatcctgtgtttaaatcttaagagtgtttagatcttaggccatgccatgaattcccctggttgactgcatttgtgaaaatgagcttcccattattggctcttaagtaatggagatgagggggagtcctgctacacagataagtgcatcataaagttacataattaaaataactgagctctggcctatcaacaggcccatcagcagtccagaatagagtctagaaatggacacaaattaaatgagagtttgaaatatgat

SEQ ID NO: 233816 - DNA, 296 bp, Homo Sapiens
ctaaaggacctgcaccatgtcggctaaccttttttggtattttagtagagacggggtttcaccgttatctgccaggctggtctcaaactcctgaccctcatgatcccccacctcggctcccggtccacttttgttttagcttgagggcgtacgtgtgcggctttgttacaagggtatgctgcgtggtgctaaagtttgggcttctatgaatcctgtcacccagacagtgaaccacaggaagtaatatgcccagatagtatccaatagaaagcatttcagcccttcctccccttcct

SEQ ID NO: 233817 - DNA, 324 bp, Homo Sapiens
  misc_feature (94)..(94): n is a, c, g, or t
cggactgtcagtgccgaaacggcagaaacgcctgcccctgccccaagtcctggtgtctccagcctggctctatcttcctccttgtgatcgtccnatccccacatcccgtgcaccccccaggaccctggtctcatcagtccctcccctggagctgggggtccacacatctcccagccaagtccaagagggcagggccagttcctcccatcttcaggcccagccaggcagggggcagtcggctcctcaactgggtgacaagggtgaggatgagaagtggtcacgggatttattcagccttggtcagagcagaacacagagattttc

SEQ ID NO: 233818 - DNA, 341 bp, Homo Sapiens
  misc_feature (341)..(341): n is a, c, g, or t
acccctccataatgtgtgcccaggcctgtctgttggcctcaagtggtcctcctgccttggatctcccagagtgctgggattacaggtgtgaaccactgtgctcagcccattttttatttgtttcttgaaggaaggtagcagtattaattaattttggactttgctcactaaagtttgaatgttaagaatagatgtatacagtctggatgtggcacctgactttcaaggctgacttttgttctcacttgatgacagggacttctccacggcattctttaacagcatccccctctcgggctccctggtgggcacacattatggagggggatcctatagagtcn

SEQ ID NO: 233819 - DNA, 365 bp, Homo Sapiens
  misc_feature (24)..(24): n is a, c, g, or t
  misc_feature (35)..(35): n is a, c, g, or t
  misc_feature (182)..(182): n is a, c, g, or t
  misc_feature (319)..(319): n is a, c, g, or t
aaataaataagtgtccttgtgggnaaaagtcaagntttatagctgggattacaggcatgagcctgatttacaggcactgatttctgacaatacatccttactatatatccaaaacttacctgccctttgaaacccagcctgtctcacctctacaaaaacaaacaaactaccttcctaaccantcctacgatactattctatttctgtgaattcttaaaatctgcttgaacagcccattttgacatttgattctctgtgtcagtgtttattgtcttagatttaccccctgcatgcagaagtgactgcatagtcactactnttagtgagtttgaaatctgtttggagagctatgtaagtaccaatgg

SEQ ID NO: 233820 - DNA, 487 bp, Homo Sapiens
  misc_feature (12)..(12): n is a, c, g, or t
  misc_feature (18)..(18): n is a, c, g, or t
  misc_feature (24)..(24): n is a, c, g, or t
  misc_feature (30)..(30): n is a, c, g, or t
aggaaagaaccngggacnattganagcccngtttaggtaatgaaaccacctaccaggttttacacatgctgaaataattgcttggatttaggaattatgccgggccagggctctatttataggacccccagcagcacttcctggaagaaaaacaagcatcggttgtgggtcccaaggagacattttccgatccaaactgaaaaatcgaccatccagtgaaggaagtattaataaaattctttctggcctagatgatatgtctattggtggaaatctttcaaaaacacaaaacatggaacgatttggagaggtaagttttccctaggagattctatcttcttaaaactgatgttctgcatttgtttctcagttggacctatataacatagcagtgtcttttctctggatgccacgagtaccaagtttttagaagtagagccatccgtctatatagcaagaagcagaggaaagaaaccaattgccctta

SEQ ID NO: 233821 - DNA, 447 bp, Homo Sapiens
  misc_feature (15)..(15): n is a, c, g, or t
ctgaacagtatattnggtaaatataagtacctagtcctaattgcagaaagagcggtcagttcacctccccacgagcacttcagatcagtattgtaatccattttattcataaatggatatcttttcattgtcatataaagctgggttttatttttttttcctgaaaaataattgcctttattttctctcgttgcctccttggtttcagaagagagtagttttattataaatattgtatggactttgtatattaagagaggagctcatttcagattcctaaagaaatagacattttctgttattttgaaagggcatcttttgatttttttgttgttgttgttcacttttggcatatgtatataagtaatattgacggtgatatgaaaacttttgttatgtgaagatatttaagtcagaaaattgttaaataatattacttcttttcca

SEQ ID NO: 233822 - DNA, 700 bp, Homo Sapiens
  misc_feature (6)..(6): n is a, c, g, or t
  misc_feature (15)..(15): n is a, c, g, or t
  misc_feature (30)..(30): n is a, c, g, or t
  misc_feature (69)..(69): n is a, c, g, or t
  misc_feature (115)..(115): n is a, c, g, or t
acttgnccactaacncattatttttaatgngaagccttcagaggtgctgagtacaaactggcctgtgcngacacccagatgtttccccatgtcaggactgcagcagcaaagccantttatcaggaggtgttggaaagataacatcaacatggctctagttgtcgacacctactatgatgatcaactcattagctgtggcagcgtcaacagagggacctgccagcgacatgtctttccccacaatcatactgctgacatacagtcggaggttcactgcatattctccccacagatagaagagcccagccagtgtcctgactgtgtggtgagcgccctgggagccaaagtcctttcatctgtaaaggaccggttcatcaacttctttgtaggcaataccataaattcttcttatttcccagatcatccattgcattcgatatcagtgagaaggctaaaggaaacgaaagatggttttatgtttttgacggaccagtcctacattgatgttttacctgagttcagagattcttaccccattaagtatgtcccatgcctttgaaagcaacaattttatttacttcttgacggtccaaagggaaactctagatgctcagacttttcacacaagaataatcaggttctgttccataaactctggattgcattcctacatggaaatgcctctggagtgtattctcac

SEQ ID NO: 233823 - DNA, 560 bp, Homo Sapiens
ggaggcattacatagtcatgtgcgaggtcaaaactgagtcaccaccactaccaagttccagctggcaagaagaggaaaaataacacagaggagttatgaccagtgttgtaaggatctggcctagaaatggcatgcatctcttccactaatatcctattggtaaaaatgtagtcacatgggcacaccacctatctgcatggaaggctgggaaatgttgatcggtagggcagccatatgtgtaggaaggagaaaacagaatttggtggatacctagtagtctctgccatacccttgaccagaaatttttcttctaaagaatttaattctaaaagttatagacattcccaaagatatacctgcaagcatcacagctttgtgtataattgcaaaagttgaaatcaacatgaatgcccaaaatagtgaattatttaaacagattattacccatattatgaagaaatactctgcaactcttaaaaataaatgtaatgtgccaggcgcaatgggatatgcctgcaggcccagctacacgggagtacaagcgcaggggatcacttaaa

SEQ ID NO: 233824 - DNA, 568 bp, Homo Sapiens
tttttttgctttatttttagctttgaaatgcatttattttctgattattggaattcatccttcatgaaatttttagagtagtgttttaaattaagctccagagtgtaactgcaaccaaatagcaatacatacaagtggttttccattcaaatttacaaaagcattatttattagtaataaaaatatagaaggaattcagttttccttttatccccaattttttgcttttaaaagaccatttactaacatcctactgtagatatttcgagagacagatgaaaataataataataaagattattatagccaaatcatccagttagccaggagtttgatgactggatatttcagagtctactgcgggttttaaatattttgttagcaaatgaattcatctgtatgatgagagacttacatgttttatagctgaaaacctaaggagtgacaatagtacatgtgacattcttaacagttaaaaactgagtaagtcctgttcattaggtaggtgccatgtggaacaagctttcacctcatcaatgcattttgttttcagagaaacagactaatg

SEQ ID NO: 233825 - DNA, 781 bp, Homo Sapiens
gattagtgcagggtggtttgtgtgctgtgagaatctggttttcttgggagagggtcttaggccagagattagcatttgtgaatcatcagttataggtgagtatgtagaagacatgcagagttgaagaggcttttatggaggtaacccagcgataccgatacagtcctggatcatcgacagatgaatcacatatacaatggtgatctggtagcagagctgaaaaattcctatttgtctggagcgagcgttgtagttgtcacgacattcaagcacaagacattaccttgtctatgtttacatacacgaatacttagcattgtgttacaattgcctacagtattcagtacagtgacatgctatgcaggttggtagcctagaagcaacaaatgcattttcatcattatgcaaacaccatttagtgtacttacacaaacctagatgtatagcctactatagcttaggtgtacagtctactatacaattgtagcctaggtgtatagtagcccatacatctacgtttgtgtaagtacactagaagatatttgcaaaatgctgaaattggctaacaaggtatttctcagaaggtatcaccatcgatgcatgactgtatttagttatggtagtgaggaacagataccagcaaaggatctgggaaaggtgaaaccatgaaccaagacagaactaggaagagtggtttctcagaacccaaataaagcttttcaaagatcgagaagcgataaacccgaccgacactgcttcattcaaaaagaatgaaactgtg

SEQ ID NO: 233826 - DNA, 550 bp, Homo Sapiens
ctttttgttgtgttttggttttttgttgttacagaaattgaaccgtttattagcctaggtctgggtttcaggcattgcggaggcacgtctggggagctctatgaggggaaacaagcccctgactggctccttgccccccaaagacccgctcccccaggctttgcattcacaagaaattactctgaggcatgaggtttccttccccaaggtgagctgcaccccagctctccagtgggaggatgggccagcaattccaaaggggtctgggcaggaccagagctccccgactttggcagcttcaacacaaacatgagcagacaggacagcattcattctgggggaaatgtgacgaggagaggagggtcacagacatcacgcctatgtgcacacgcgcgcgcgcacacacatacacacacacacacataaatatacgtttgtaccgtaacatcccttccattatccacaggtttttgtgaagtccttctggggggttaggggagagtgtccccaggaaatgtccctagccactgccacccccatgctccattct

SEQ ID NO: 233827 - DNA, 478 bp, Homo Sapiens
  misc_feature (20)..(20): n is a, c, g, or t
  misc_feature (84)..(84): n is a, c, g, or t
aaaatgatagctttgacaanttaaggtagcatttcatccacacgatggagtgtgttttattcagtaattgatttaaaaatggantcaacctaagtgtctaacaggagggagttttataaattgttcacagagcatctgttccaaggagaccttgatgttcatagatttgtaaagaatgctgcttacttagcacactgactcctctgcaaatgtctgagggttcctccacttggggcaagttgggggtttgatcgcagagtaaataaatggtgcattttataatgtaatatattctagcaagatgcagcccacaaactgtatagatactcttatgtaccacgtaaagttcatctactactttaaccagaacttgatactgtatgtatgtttttttttagatttggataaaatgacaactcattgttatttccagttcacaaagtaattgtgaggctgaataaattttattattttataa

SEQ ID NO: 233828 - DNA, 242 bp, Homo Sapiens
ggggggtcacctatctagtccatatgtctgcaggaattatactgataaatggacaactcaccatgcaatcaatctcccgctctatcctgttccctgaccggcatggtttctacttcctgtcagcacaactaggacgtctggtttctgctgggctgccctctcatgggaagcctttaatcactctatctcaatatatcctctggggaccatcaacatttcctattaaagataactacacctgg

SEQ ID NO: 233829 - DNA, 625 bp, Homo Sapiens
gggacagagggtggccctcgcccaggccagagagggagaagaggaccagccagagtgcccggcgccctacctgcacagagtctaggtggaaatcagaagaggaagtggaaagtgatgacgagtatcttgccctccccgctcggctgacacaggttggaccggtggccattctcagacccagatgttgaagggcagcttcccaggaaaggaggagaacagggaaaagaatcactggtgcaatgtgtgaagagaaacatggacgtatctggctccaagatgctgattctagttagtaatggtgctgatccaagaattggtttccatggcaggcacgcctcttctgggctgctccattcctacctgcaaggctgggttttctcagcctgtcatttttgatgtcacaccaggctgtggttttcattgctttggcagagggaggtacagagtcgtggagtcgggacagacattttgctgtcagctggaagagctgatctgctggctgtataatgttgcagatgttactgaccacgggactgcagccaggtccaatcttacaagtctcaagtcttctctgcagctttaccgggtaatatgcggtatacgctctgggttgttccctcagaca

SEQ ID NO: 233830 - DNA, 604 bp, Homo Sapiens
cttttgttttgtttgccattttaggtttgtttaccttctctgttaatgacttaacagataaaaaactgcatgatgaaatatattttctccaaatatatatatatttatataatatataatcttagttaactcaaaggtatatacattgtataataaataatatttataaaaagagactttttgaatataaaatcaaaaagatcaacaacttctacaactttttacaaaactttggatacagcaggttggtaggaaatttcggttggatactattacctgactacggcgagaatcattacaatgcactcatgtactattattaaataattacttgtcagctacttgaatacgccccagaaacatgactttatcacttttaatatagaatacatagatatgaaaagattgttttgaaaattcgtatccattctgctgaagtattctcacataaagcaagtattatccagttgacatgatttaaaacttttcagtctaaggtgagatggggaggggcatttcagacttggcggagggggtgagatgtgtatctttagcagggcttgtggccagcagatttagaagtgaaggcgggctcctggacgac

SEQ ID NO: 233831 - DNA, 850 bp, Homo Sapiens
cggttcctcaaaagaaagatgactcaacttgtaactccacggtagagacaagggcccaaaaggcgagaactgaatgtgcccgaaagtcgagatcagaggagatcattgatggcacttcagaaatgaatgaaggaaagaggtcccagaagacgcctagtacaccacgaagggtcacacaaggggcagcctcacctgggcatggcatccaagagaagctccaagtggtggataaggtgactcaaaggaaagacgactcaacctggaactcagaggtcatgatgagggtccaaaaggcaagaactaaatgtgcccgaaagtccagatcgaaagaaaagaaaaaggagaaagatatctgttcaagctcaaaaaggagatttcagaaaaatattcaccgaagaggaaaacccaaaagtgacactgtggattttcactgttctaagctccccgtgacctgtggtgaggcgaaagggattttatataagaagaaaatgaaacacggatcctcagtgaagtgcattcggaatgaggatggaacttggttaacaccaaatgaatttgaagtcgaaggaaaaggaaggaacgcaaagaactggaaacggaatatacgttgtgaaggaatgaccctaggagagctgctgaagagtggacttttgctctgtcctccaagaataaatctcaagagagagttaaatagcaagtgaatttctactaccctctcagtcaccatgttgcagactttccctgtctggaggctcaccttagagcttctgagtttccaagctctgagtcacctccacatttgggcatggcatcttccaaaacaactaactgggatagttaatatatgggg

SEQ ID NO: 233832 - DNA, 480 bp, Homo Sapiens
gtgagcttggccttgaggaattactgagaagtcagaggacactcttcctgcaactaccacatgctcacacacacactttctagagacgctacaggtctagaataggttggcaaactagtctgtgagccacatgtggcccactgcctgtttttgtaaatagagctctgctagaagacagccatgttctcttgcgtacatattgtctgtagctgctttcgtgctatgatggcagagttaagtaattgccacagagaccatatggcccacaaaacctaaaatacttactctctggccctttacagaaaaagttttctgattcctggtctggagtgtctgtctttattatatctttctcactccatcctccatcttccttccttatgtttcccttggttgtagaagagagaagtggcatggaaaggcagctacctttgcagagcaggaccaagtgtaaaactgcactagcatatgtgaacattt

SEQ ID NO: 233833 - DNA, 477 bp, Homo Sapiens
  misc_feature (79)..(79): n is a, c, g, or t
  misc_feature (213)..(213): n is a, c, g, or t
aaaatcacctcgggaccctgatgcaaaactgggattctccttcccggtgttacctttttttcaagtggggccagcaacntcaaactccaatcctttcccaacccctcattggatgtccaaaagtcccaattcaatgttacagaaacccactgccctatgtgcggccccatggacggacaggagtccatggaaccaaaagctgtcctctgagcnactacagcagccaatcccatggcaacagcatgactgagctgaagcccagcagcaaagcacatctcaccaagctgaaaataccttcccaaccactggatgcatcagcttctggtgatgtgagctgtgtggatgaaatcctaaaagagatgacgcattcatggcctccccctctaacggctattcatacaccatgcaaaacagaaccttccaaatttccttttccaactaaggagtctcagcagtccaattttggcactggagaac

SEQ ID NO: 233834 - DNA, 460 bp, Homo Sapiens
  misc_feature (31)..(31): n is a, c, g, or t
  misc_feature (44)..(44): n is a, c, g, or t
  misc_feature (49)..(49): n is a, c, g, or t
aggattggtatggaggagtagtaccttctantcttggtttattnttatntgctagacataatttcttaactaccatatgtaagtataaattcataaaaatcacactgaaagaataggttgatttcaacccattttgagggtactggtaggtaacacactgttggggaataaactaaagaatttctgatttctacaatagatttaagtatgaaatttgagtatactgtgtagctgtgtagatcaacttaatgcttaaaaaattacctccttaatgattagattaatagaacagtgttagattatcaagggaagagtttggaatgtaaacataaacatgctgcataggtggtggttatttgtgagtaggactacttttaaatggtactagtaaagatttatcaaacaatgctgctattatgttgctatatttttaataaaatgaaaatcttaaaatcttgaa

SEQ ID NO: 233835 - DNA, 485 bp, Homo Sapiens
tgaggcagaagaattgctttaaccttggaggcggaggttgcattgagctgagatcatgctagtgcgctccagcctgggcaacagagcgagacttcatctcagaaaataaaaaataggggccaggcacagtggctcatacctgtaatgccagcactttgggaggccaaggcgggcagatcacgaggtcaggagtttcagaccaatatggtgaaaccccatctctactaaaattacaaaaaaaattatccaggcgtggtggtgcacgcctgtagtcccagctactcaggaggctaaggcaggagaatcacttgaacccaggaggcagaggttggggtgagctgagatcgcgccaccgcactccagcctgggcaacagagcgagactccatctcaaacaaaaacaagaacaaaaacaaacataaagttggcacagaaaagggaccaagtttaaaaaagggttttaaatgtaatgagacttgcatagtt

SEQ ID NO: 233836 - DNA, 948 bp, Homo Sapiens
  misc_feature (1)..(1): n is a, c, g, or t
  misc_feature (198)..(198): n is a, c, g, or t
ntgggtgaatttaacgccgcgcgcctttgtttgtggaggtgtgtgttgtgatgttggttgtggtgtaatgtacctgattttttttaggtttgagggggaatgcttcttaaattggtacaattattcgtgaacatccatctgcgatccgaaaaagtactctctttggttgaaccctccggtacaccattcagtttcacncgtaataatctgtaaacaggcctgtagtaccagtgccgggccttgatttcaacaaggtcagtaccacagctgttcctcacagtcctttgagtgattttaagaaaatattctaaagtagaagagtaaagcaaaggaaaacaaaggaagatattaagatccctgtttaagtttgtttttttttaaaagtgcataatttgaattacaaaaactgtcatgtgggcctgctggacactagactgtgttttccatccctttaatgatcacttcacaaaagatcacttcacaaaaagaggactcctgcctattggccagaaaaagtccctttatgattttcaggtgcaatcagttgtccaattcctctaggtcggtctttccatattctaaactggaataccatttccattgtataattacatctaggttaaaattcattgtcttatactgcatcttgaagaagagtcgttagtgtttggagttctcattttaactcctcagtgctggcacattcagtgcatccattgccagcaatggatttggggctaggaaaatatacatcccagtacagaggaactcaggaagaatgggcattctccaacagtggtggtccatctctgtgcatggatgggtgtgtgtgctcccttttgtaagtttttggagggagtttagggatatgttgagaagtgctttgtcgtggaggaacaggcggcccagcaatggaatgaaggtccacttcttgtgtcaatggtggtg

SEQ ID NO: 233837 - DNA, 621 bp, Homo Sapiens
  misc_feature (8)..(8): n is a, c, g, or t
  misc_feature (21)..(21): n is a, c, g, or t
  misc_feature (55)..(55): n is a, c, g, or t
  misc_feature (60)..(60): n is a, c, g, or t
  misc_feature (78)..(78): n is a, c, g, or t
cggtttantccgctcactatnggaattggcctcgagccaagatcggcacgaggantctgnggctccataggagccggnatccagctctgggggtgtcaagtcctctggtggcagttccagcgtgaggtttgtttctaccacttattccggagtaaccagataaagagatgccctctgtttcattagctctagttctcccccagcatcactaacaaatatgcttggcaagaccgaggtcgatttgtcccagccttaccggagaaaagagctatggttagttacactagctcatcctattcccccagctctttcttttctgctgtttcccaatgaagttttcagatcagtggcaatctcagtcccctggctatgaccctgctttgttctttccctgagaaacagttcagcagtgaccaccacccacatgacatttcaaagcacctccttaagccagccagagtaggaccagttagacccagggtgtggacagctccttagcatcttatctctgtgctgttttggttttgtacataaggtgtaagcaagttgtttttcttttgtggagaggtcttaaactccccatttccttgttttgctgcaataaactgcatttgaaattca

SEQ ID NO: 233838 - DNA, 557 bp, Homo Sapiens
  misc_feature (506)..(506): n is a, c, g, or t
catgaaaataacaactatcatttgtagaatcctcagcatttacaaaatactttttcacacattatctcatttactgtaaagaatttcttaactaaataattctattatctataagagtataatgcagatgtttactctaaaattaaagtacaagtatccaaactgtacctacattctttcaactaagaggatagaaaattgttttctgaattgttgttatcacaaaatggtatctatcattttaaaattatgatttgaaaaataaaaattccctaaaaatttttaagttttttagagttttcctcagaatgtagattctagctaagcattaaagtttaaaaaatgtctatctgaaatctctgaatcattctaaaatgagaaaacaatgtagcttaccaatgttaggctttttatttcaaccttggttttaacagaaatctggtgacactttaattacatatttgcatcatcccttctatcacaagaaatatacaaattataatgtnaaagacaacagtgactggaagtcaaactacagcaggctacctggaacatcc

SEQ ID NO: 233839 - DNA, 702 bp, Homo Sapiens
accaaaggattatttttgggtttattttctgaaaaaagtacaagatagaaatgcttgagatatagggatgtattaaaattgggttgtgaattgcattgatatagaaagggagtaaataagaaatgaaaaatgctagtttctcatgcttttgaggaaaacagcatttctaattactctaaggacttacatttcttggcacactttggtagcctcaataagtttttccactgtggagatggaacatgtaaatatcttcctaattatatacccaaatatacttaatggacatgataaatggttttgggtaaggttcacaatttttcaaaagtattggtggcataggaaacacatgccttttaaaaatttattttttcaatgaacgttcttaggcatgtgtaagaagtattgcttcatgtggttgcctcttcccttgaaatgggaaaaaagtacaggtaatttagtttgcttgggacagcttctccataacatttgttttcgaccatattaatcccacagttaccagatgaccttagtataaatttttacaatatatttgttcataaagaatatatccttcaaaatatatatagctttgaaactaccctttaaataccttcattttctccagaatttcctttatctattgcccactgttttatgaataatttttaaagccttagaaatcatacatctttatctgtc

SEQ ID NO: 233840 - DNA, 684 bp, Homo Sapiens
  misc_feature (9)..(9): n is a, c, g, or t
acatatttntaaccagcaaggcagggcttaatttaaatttttctgatctagaagaaataaatgtcattttttctggctccctttgtacttaataaaacttattatggagtgcttagttatgtaagtgagattagattcttacaaacctgagcattttcagacgaattctttttttttttttttttttaaagaagtagcccctagcatcctgaattctagacattttaaaaaattcaagatgcaacaatggaaaggtgaaagacagtacgaagtcaaagtggactgacttagattgagttgtatagaattttccctttgttcacaattcgtggtatctattgaacactccatttctctgaatttcagtttccaatccatatcatcttctccaggaatttagacatacattcctcagtcaatctagtgagactcataagaaaaaggtggagaaaactacttaaaagcatggaatagtggtttaattgctctgagctctctaggattgtttccatgacaggtgtaaaccatcactatttgagggaaacatgaatcattgataaaccatattaaaaatgtatgagtatagtaagagaagcagagtaggagacaactacatttatgcctcgagtattttttaatgttgttgggaatataaccacaaaaaataaaaataaattttgtcac

SEQ ID NO: 233841 - DNA, 457 bp, Homo Sapiens
ggactctacacggcccatgtgggctacagcatgtaccacctgacatagagggtcccaggtcgcccacctgtgggccagccgattcctccagccctggtgctgtacccccgacgtgctcccctgctcggcaccgccagccgccttccctttaaccctcacactgctccagtttcacctctttgctccctgagttcactctccgaagtctgatccctgccaaaaagtggctggaagagtcccttagtactcttctagcatttagatctacactctcgagttaaagatggggaaactgagggcagagaggttaacagatttatctagggtccccagcagaattgacagttgaacagagctagaggccatgtctcctgcatagcttttccctgtcctgacaccaggcaagaaaagcgcagagaaatcggtgtctgacgattttggaaatgagaacaatctc

SEQ ID NO: 233842 - DNA, 645 bp, Homo Sapiens
tttgggacccagatatcatcagcagaaatgaaaatgcaaaagcctattttttttaatgttgagaagaaaatcacaatgtcaaacgaaatgagaaatgagggatctttcatggagtccttacacattggctacgaaagtgtttccctgcaaagagaagagtcttactgggtcatcacaaaatgatggggagtgcagagggaaggtgggatataaggtaatcaacctggataacagtatgcaccttggatgttagcaaaagcgaagctaatagcttataaaaaacacatgaaatatataaaataaaatgattttcatatacatcttaatttaaaataattaatgcatcaaatccctgtttaagactttaacctgaatatcaaatttaagagtccagactagttactgttactgtggcccttccccacatgtaacacacacactatcaaaaataatttaaaaaccttcacattcttacatctaaattagtgagatatttctccagaaatcttccaaataaatagctttaaaaaaagaatttaaaagctgttaactttaaaaaaaatctgttaaataaattattgataattctttaccctaccactgaaaatacatcaagacactaccaacaacaaaataaaattcaag

SEQ ID NO: 233843 - DNA, 622 bp, Homo Sapiens
  misc_feature (32)..(32): n is a, c, g, or t
  misc_feature (43)..(43): n is a, c, g, or t
atcccatggtgtggaagggggtctcatctggntgtaatagtgncataggacaagtcattgagcagtccacacctgcagagtatgtttgaaagaatatgtgtgattgtggaaaaggacagagaaaaacaggagacacatcaaggatgtttaggagaacaaagagctatgacagcctgctgactaccttaattggcgctggaatccgaattcttttcagttcctgccaagaagaaaccgcagatttgctaaaggaactgtctttagtggaacaaagaaagaatgttggtattcatgttccaacagtggtgaatagtaataaaagtgaggcactccagttttatttaagtattcccaatataagttatataactgcattaaatatgtgtcaccagttttcatctgtgaaaaggatggctaacagctcacttcaagaaatctccatgtatgcacaagtaactcatcagaaggctgaggagatctatagatatattcactatgtatttgacatacaaatgttaccaaatgatcttaaccaagatagactgaaatctgatatataatcaagctgctcaagatggggttttcaaagacctctcacaatattaaatgcacttcaataatc

SEQ ID NO: 233844 - DNA, 563 bp, Homo Sapiens
  misc_feature (79)..(79): n is a, c, g, or t
  misc_feature (230)..(230): n is a, c, g, or t
aagttcaaggcgagcagagcagtgagaccacgatagtgattgatactggttcaacacagcgcaacctatagtgccctgnacttctctcctcccctttgctcactgtcctggagtgcaccggcctctgcactgactcatttctggtcttggggccagtctcaggggaagctgggtgggggaggtccctcctgccctaagtgcagctggactgtacagaacactccaagggncaatggcagttcagcgcaaggagagggagggcccacaggtcagaaaaagctccagagacctcacagcattgtagggcggggtggtgggccaaagttaggacactgcgtaaaacaggccatcccaccacctctacctgctcatgccaggagaatccataactgcctagagcctggggccctaccggtcgtgaggtgagtgggcatctgtccagcctggaagaggggcactaggtgactccctcccctgctgttgtaaatactgtaattatcggagaatttaaattattctcatttgtaactgcgtttccgggtcgcgccagagtcatttggtac

SEQ ID NO: 233845 - DNA, 547 bp, Homo Sapiens
  misc_feature (12)..(12): n is a, c, g, or t
  misc_feature (109)..(109): n is a, c, g, or t
tcaaggacagangacccatctacttgagggacaaggtgactcagaggcattccaaagacagtttaaggcggcgcagaagcttgagcaggagtacagcagtacttcacantaggtctgcgtgggcctggagtggggagcaggcagcagggaaggaagcagaggcttcctaaggctgttttcttagccgtggagaagcccgcgctttctacatgctcccaagtgctgtcatgagcacgttcctgacaagtcaggtgttcagattgcagtccctggccaacgtcaggattcttacaggttgaatgttaagctcaccgatcttggcctcaggtcctgcctggcttgcctgctcattttcacacgtgcagtggtgggtctgtctcatagcacaggtgcagtttagtgcagccacagtgtccccaggcagggcggggactggagcagcccccagtgtgccagcagtgtgggcagcggaggctaggggcccatctgtccctagcaccctccagggcagtcccgttttgcagcgggatttggcaaacccccctcc

SEQ ID NO: 233846 - DNA, 471 bp, Homo Sapiens
  misc_feature (5)..(5): n is a, c, g, or t
  misc_feature (42)..(42): n is a, c, g, or t
  misc_feature (50)..(50): n is a, c, g, or t
  misc_feature (57)..(57): n is a, c, g, or t
  misc_feature (78)..(78): n is a, c, g, or t
  misc_feature (140)..(140): n is a, c, g, or t
  misc_feature (153)..(153): n is a, c, g, or t
  misc_feature (160)..(160): n is a, c, g, or t
  misc_feature (168)..(168): n is a, c, g, or t
  misc_feature (172)..(172): n is a, c, g, or t
  misc_feature (174)..(174): n is a, c, g, or t
  misc_feature (178)..(178): n is a, c, g, or t
  misc_feature (195)..(195): n is a, c, g, or t
  misc_feature (200)..(200): n is a, c, g, or t
  misc_feature (209)..(209): n is a, c, g, or t
  misc_feature (212)..(212): n is a, c, g, or t
  misc_feature (215)..(215): n is a, c, g, or t
  misc_feature (218)..(218): n is a, c, g, or t
  misc_feature (221)..(221): n is a, c, g, or t
  misc_feature (228)..(228): n is a, c, g, or t
  misc_feature (236)..(236): n is a, c, g, or t
  misc_feature (241)..(242): n is a, c, g, or t
  misc_feature (255)..(255): n is a, c, g, or t
  misc_feature (259)..(259): n is a, c, g, or t
  misc_feature (263)..(263): n is a, c, g, or t
  misc_feature (274)..(274): n is a, c, g, or t
  misc_feature (277)..(277): n is a, c, g, or t
  misc_feature (294)..(294): n is a, c, g, or t
  misc_feature (304)..(304): n is a, c, g, or t
  misc_feature (362)..(363): n is a, c, g, or t
  misc_feature (369)..(369): n is a, c, g, or t
agganattttttataataaattttttttcccttttttttccnaaaaacanttttatncttttaaaaaaaaaaaaaaanaaaaaggccaaatttccttgggtgggcctgtgtgcccttccaaaacccttgggtcccctttntgtcttcaaagcnacccttntgcttggntttntnaagntggtgcccttgcccaanagttntggcgaagnccnagnaancancaatggnggggtttntttanngggaaaagccggnagcntgcnacctttttccngcnttacctcctactaacanttcctgcccnatttggacccgtaccatggggctcaggacagagggagctagcagctgcctccatggcnnccacanctccttcgaggctgtgctgggtgcagaaccgccagagccacccaaaaggtgtttctcttctgctccctgaacctcttaacttaataaaacgttccagcaaaa

SEQ ID NO: 233847 - DNA, 675 bp, Homo Sapiens
  misc_feature (14)..(14): n is a, c, g, or t
  misc_feature (24)..(24): n is a, c, g, or t
  misc_feature (35)..(35): n is a, c, g, or t
  misc_feature (58)..(58): n is a, c, g, or t
gtggactgaattanggaggtcgcncacatcctcgntgtagaagttcccctttcggggntggagagttatgttggatgtgactcaaggaagtccttaacagtttgttgatgaaggcagtttatatggattaagcattgccacatctaggaatggacagtatgttgcttgtggttctaattgtggagtggtaaatatatacaatcaagattcttgtctccaagaaacaaacccaaagccaataaaagctataatgaacttggttacaggtgttacttctctgaccttcaatcctactacagaaatcttggcaattgcttcagaaaaaatgaaagaagcagtcagattggttcatcttccttcctgtacagtattttcaaacttcccagtcattaaaaataagaatatttctcatgttcataccatggatttttctccgagaagtggatactttgccttggggaatgaaaaggcaaggccctgatgtataggttgcaccattactcagacttctaaagagactatttgaagtccagttgagtcacaagagaagcctgtcttgatatatcatctcagaaactttcctgaatatgtgataatatatggaaaatgatttatagatccagctgtgcttaagagccagtaatgtcttaataaacatgtggcagcttttgtttg

SEQ ID NO: 233848 - DNA, 675 bp, Homo Sapiens
  misc_feature (15)..(15): n is a, c, g, or t
  misc_feature (20)..(20): n is a, c, g, or t
  misc_feature (29)..(29): n is a, c, g, or t
  misc_feature (40)..(40): n is a, c, g, or t
  misc_feature (49)..(49): n is a, c, g, or t
  misc_feature (68)..(68): n is a, c, g, or t
  misc_feature (80)..(80): n is a, c, g, or t
  misc_feature (94)..(94): n is a, c, g, or t
  misc_feature (123)..(123): n is a, c, g, or t
  misc_feature (597)..(597): n is a, c, g, or t
ttttcatcaaccaanttgcnccccttggnaccccctttgnaaaggggantgtctaaaattaaccgggncccagcaagctntttgttgggagaanccagtggctctttatccctgaataaggancttcttcctatgtgcgattcccacacagcagcctgtttttagtaactaatgcctatagttttgagaacttgctgtttttaggacacttgctgggcattgacaatgtggaggttatgaacaagatctccaagggctgatgggcttcatggatgagatggttcttgaactggatccatgaggatgggtgagacagggctgtgaaattagggaaagcttccggggcaggtggaacagcatgaggcttccaacctgcatcagtagaaaatgacactggccaggtgtggtgaatcacgcctgtaatcccagcactttgggagactgaggtgggtggatcacaaggtcaagagatcgagaccatcctggccaacatggtgaaaccccgtctctactagaaatacaaaaattagctgggcgtggtggtgcacacctgtggtcccgactactcaggaggctgaggcaggagaatctgttganccggagggcggaggttgcagtgagtggagattgcgccactgtactccaacctggcgacagagctagactctgtccccc

SEQ ID NO: 233849 - DNA, 839 bp, Homo Sapiens
cgtccggaattcgcggatgtgcggaactcataaccgactgcggagagcccagcggcgggagctggggcgcacgttggggccctgccgagggggcgggcaggcccggtgccagccccggcaccgacggaacgcccttcctcccgtccgcagggcgggaggatgccgccgccagcgaaggagggcgggcgcaagggcccgcgggagcgaagcgggaagagcgcgccaggcacggcgcagggtgaggagcgtgccaagggggcgcccgcgacagagccccccaagccgggctgggccctgacgccgcagggactggcggccatgctccctgcgcagcgccaccgccatctgctcttcggcgacctgctggaggacgtgggcgcggcggcctccaccttcccgtgcgggtcggtggaaccggggtaccgcatgcccgacccgcgcccgtggacgcagtcgctcgagctgcccgccgagcgccagaaccggctcctcggcgtcctcaaggcagcggaggcccgcgggcgagtccgcgccctgcggctgcgctacacccgcatgcgggccgaggagatcgcgctgctcatccagcggcagaagtccgcgcgcgccgccatccggctggagctgttcctgccgccgcagctgaagcccgcgcggatcccggacccctggaccgccaagaggtgcagacaagccccggtaggggcggggaaaggggaggggccctgcccgcctccgcacacgccggaccccagcctctctccccggcagcggaggcgcgtggagaccatcctggaggagaacgtggatggcacaaacttcccggggtgacggcgact

SEQ ID NO: 233850 - DNA, 386 bp, Homo Sapiens
gcacgagggggggtgatattttgttttaaaatatttgggtaaggaaaattttgtctttaatattaattctgtaatccttgaccaggcatggtggctcaaacctgtaatcccagcactttgggagaccgaggcgggcggatcgcatgaggccaggagttcgagaccagcctggccaacatggtgaaaccccgtatctactagaaatacaaaaaattacccaggcgtggtggtgcatgcctgtagttcccgctactccagaggctgaggcagaattgcttgaacccggaaagtggaggttgcagttagctgagaccacaccactgcactccatccagcctgggcaacagagcaagactcagtctcaaaaaaaaaaaaaaaaaaaaaaa

SEQ ID NO: 233851 - DNA, 576 bp, Homo Sapiens
gagggaaactgggtgaagggtatatggggtctctccttttttcatacaactccatgtgaatttacaattatctcaaaagtgaaagttaaatattttttaattgctgacagctttcataaaactatagaattatatgtaggaatattaatgttaaattttagtgtaaaattttaacatatagtgtctgcgagcactttgaataatggactatgcacaagagagggtcgtattggaagtataaagatggttcaaaatgaggaaatctgttaattcaatactaccatattaaaaaaagaacatatgatcctttccataaatactgaaagggatattaacttcaacatccatttctagcatttaaaaaagaaatcttagcatgggcatcatagtgagacccagtctgtatcagaaattaagaagttatctgggcatgttggcatgtgccagctacttgcaaggctgatctgggaggattgcttgagcccaggaggtcgacgcttcagtgaactgtgatcgtgctactgtaccccagcctatgcaacagagtgagacctgtctcaaagaaaaaaaaaaaaa

SEQ ID NO: 233852 - DNA, 584 bp, Homo Sapiens
gcacgagctcagtaaatacagtttaaagagagaataattacttcagagctacccttttaagagaaaaccatcagaaattgataatgtttatataaagtttataaagccattgtgttttgttatataacaaatcagagatgttattttagaatcgattcccatctaaagaactcaattttgagtctgacatttccaggaccagatattgtcttactcacatttcctttgctttgaaatagggctttccttccaaatggctatttttaggctagggatgttaacatcagggatttgtgtgtggaataactggaatgtcatttttgcttttaagccatttctgatgatatagccaaagcaggttgtctgactatgtaggatttttacatcttgaaactaaatcagaaatccagacatgaaaataacctttctagaatgcctaggagcagaaaacaataatagcatgctaaatcacaaaagatgctatgtatgggtatgtaaatatcagtgctgtctgcatttctgggtttattgaagacctcttgttgtatatatcctcaaaaattaatgtattgacatcttcaaga

SEQ ID NO: 233853 - DNA, 639 bp, Homo Sapiens
agggtttattttcctctgatgtagaagggaaagaatgtgaattcaagtgaagagagcaactattacaaagaaacagctgagcatggaagttaactgccgggctatggaatagacagatttcaccttacaccttcttcatcttacgtccttgagcaagtttcttcacttcccagtctcagtttcttcttctataaaatagacataacaatgccccccttttttttgtgaggagtaaatgagaaaattttatgaaatacctaaaactggcatataataagtgccaataaatggtagctattgttaccaacctgccagcacaacttatgtttgtcccatttcttgagagtttataaagactttcttaagtgttactttaagatgtctgcaagcattctgcaggactacagaaaatataaaaatgagtaagaaaatgtcattgtgtcctcaaggatctcataaatcaaaaggtaaaaaaatttttacaaggataaaaattatgatacaaaacttaagatcactttagccctgttgtgagtcaggggtagaatgaagattggaaaactaatataaaggctgctgctcaaaaaacaaacctcaaaaaaaaaaaaaaaaaaaaaaaaactcgagggggggcccggt

SEQ ID NO: 233854 - DNA, 516 bp, Homo Sapiens
gcacgaggttaaagaaactatggcccaaagataataaatattttcaacagctagttactgtcagataggatttaaacctaaatctgaggtgagaggtggctattgtggcttttctagatgtcagttctttgtttcagttagtgaacaagacttgttgactcttccttaaaacattttaaatttattagttccatgcatttggatcacatttatgtcaatatatgtccatattccatacctgattctcatggcgtagcctgcagaccagtctccttcagtgtattccctttctaatgctctctcacttgacaaaataagaagtaccttttaatttgattattagctattcagattatagttctaaagcagtgcttttgtcatgtgacagctacagaattttagaatcttggagatataagcttttaaaaaaaattctagtgggtaaaatacatgttccttacccattcagtgcaaaaaaaaaaaaaaaaacaagaacaacaaaaaaaaaaaaaaaaa

SEQ ID NO: 233855 - DNA, 668 bp, Homo Sapiens
taaaacataatgaaagaaacaaactccagtatggagaagagaaagtttaattatttggttccatctagaaaagcaacaacttaaaggaatccttcactaggattgtcttatcacctttattagataaatcatgaagtgtccctgtgaaattgaagtgaaactatctctgtaggacttaagagaatagctaaaaggtgtgacttgccttattgaactgatactggcatatctgactgtaagcagtaggttgaagatatcattttatgaatgtggagaattctacattgaaacagaaaatacctgggaatgaagattaaaaatgtagctgctgttatttgcttggtgattcccctcttgctcttctttagtttgaaaaaacaaaaacgtggccttggaattttcattttgatgcagaaattttgaaattgaaaatgtgcatgttttggtgcacaaaatccttctgtgggcaaaactttgtttttgttttgcacagtaagaaacaataggcaagcgttatgtttttggtaagttaactatgaaagctttcttatttttattattaaaaatgtaacaatttaacccacaggaaaaaaaattactttgtatgcttgtttgaaccctatgggttcgttttattaataaaaaaattacactaatgctaaaaaaaa

SEQ ID NO: 233856 - DNA, 618 bp, Homo Sapiens
aaaagctgaactacatccttagttttcagtctacttgactctatcaggagctttttaaggaaagtaagtataacatgcaaaggaagctttttttgtattcattttggactcctgtcaataaaaatagaagtttgttgactcgttttatgtttcaatggtgtgtgtctttttactatcaggacataaatagggcaatccacttctttatttttcaactaaagattgaatagtattgtacattactgctaaagtgactgctatttctgtatactgtagaaaaacccaggagtgagagggatttcccctcatagtacaactggaaggatagtgcttgtaaagagtagagatgtgtacatgatgaatcattgagggagggtggatatttttattcctagatatggaggaaacataagtctgtagtattataaaactgattgtaataattctttcctatcaaaatctccataggtcaaaatattgttggaatactaaaatttgcaaccttgtttactttaaaaggttgccactttcagtgcagaatactaccggcatcttgttactgcaatagttggaaataaaatgtaaaattagcaaaaaaaaaaaaaggaaaaaaaaaaa

SEQ ID NO: 233857 - DNA, 345 bp, Homo Sapiens
gcacgagaagaaaagagtggggagagagtaaagtgctttgcttctgtcttagaattgagctagcttgagtcaatttctgtgcctgcaaccaaatgaaaattaatatagtgagttctttcaggagctttctctgtttttctattgatacctctatatatttttaaggcaatgtcactttgttttgtttacaaatatattgaatatgtcaagattactattttgttattgccctttgtgaatttccttgtctattttgctcgcttgttctttcaggtgaaatttattattttattaatgttgccaaaaattataagtaaaatatcaattatagtaataaaatgtttt

SEQ ID NO: 233858 - DNA, 592 bp, Homo Sapiens
tggtttttttattttgtatggtgctttaaatactaattttatatttcaagctttttgcagggtagaaataagtggctgttaaagaaaatatcttcaagaaggattatttcagtgtccctttttaaaactcgatgatggctttcagtttatttaagtcttctgtttttcagctccagttaaaactgacaataggcagctatcaaaaatggaaaaaatcttgtgctctttctggaatattagaggaatcagttaataatagtaaagtggtattaacccaatacttgatttgcagtttttaaagcagtttttaaattgagagaaaaggggctgggcccagctgaggcgggtggatctcctgaggtcaggagtttgagaccagcctggccagcatggtgaaaccccgtctctgctaaaaatgcagaaatcagccgggtgtggtgggacgtgcctgtaaccccagctactctggaggctgaggcaggaaaatcgcttgagcccggggggaggaggttgcagtgagccgagatggcgccgttgcactccagcttgggtgacagagcgagactccgtctcaaaaaaaaaaaaaaaaaaa

SEQ ID NO: 233859 - DNA, 649 bp, Homo Sapiens
gcacgagcacatttcaattacaaaaagaacagaactcttaatcacgttgtgaagattaatttcttgccattttctggattagcacagaagcttgtatcaatgaagagtatttaggaggggaatagggggaaaattgtatttttctgttcaaactctctccttctatttgtgtttccttcacccctctccctccaccacactgtgttggtcaaatgatactattctatgaaaccctgagctatagttgtcaaaagtaactatggattgtgattagtcctctgtgggtgcttccttccctcttttttctccctcactctctttctcagtctccactctggtaaatggaaaaggtgatgtcgaagaattgatgcttgcttggactcatgttgtatctgtgactatgctattagctgtctcctttttccttcctatatgggtagaattcttatgacttatgaagttcccttcttgataagtaggttaaatgcacaatgtggtactgttttatagtttctagatggttgtataaagcaaaaagttaatgtggttatgtgtttttaaagaaaataagtgattggtcactaaactctgtccttttttcattattacaagttctctctgttttccaacaaaaaaaaaaaaaaaaaaa

SEQ ID NO: 233860 - DNA, 544 bp, Homo Sapiens
gcacgagtccaaatccaattcagcaacctccatcaggcagaaaccttctgcaatcctcacatgaggaactggttcacagtgtacacagcatggagccattagtgacgttatccaaaggatgagacaagacaaaagttactgtctaataaaaggaaaattaggaacaggaatgctctttaaactcaggaagatcttttggggtgtcaaactggacagcacagaatcattagaaaaattagcttggcgtgagaagagacattgaggtcttctctgtaaaatttacttagatacttgtgaataggactgaaatttatattttgggcactctttacctcagattcagagttcttaggattatttaaaattcatttgctggatgttttcaagtataaacaataagaaaactgcaacttcaacttaaaaggcactgctgtatttgcaccctatattttgacctgtcgttaggtactgttgaatatttttatctgtaagcatttatgaagtgcaaaataaacatgttattatataaaaaaaaaaaaaaaaa

SEQ ID NO: 233861 - DNA, 533 bp, Homo Sapiens
gcacgagctgttggagagtagacagaggccagattgctatgcttagatacaatttcaaccacctacaaatccatctaattacctacatgaccatcatcatctggtcatgtttctccattttatcattatgtataccttaaagacttgctcacattacttaaaattgagataggttaggcatctatccaatctcccatgccagtaattctacagaaacagattaggttagctagataagcatgtttacaattaaatttatgctgtatccttctaatcaccactttctcatcaaaatgctcacaaatcatctgcatcattgtccattctttaaaaatgtataaacccatctctactaaaaatacaaaattagctgggcatgatggcgcacgcctgtaatcccagctgttcaggaggctgaagcagaagaattgcttgaaccccggagacggaggttgcagtcagccgagattgcaccattgctctctagcctgggcaacaagagcaaaactccatctcaaaaaaaaaaaaaaaaa

SEQ ID NO: 233862 - DNA, 674 bp, Homo Sapiens
ctttgtatatactttggatatatattaaaggcaaaactatctcttgactaactgatggattcatttactaaagcacagctgtatgtatttttgaatacatattatgatcttgagactttataaatcaatttttatgactttatgcagttgtatagggattatgccctttcagttctatagggattatgcccttttataatacataatataccacagagattacaaatgttgaggaatgaaagcacttctttgctttggcaatcattttcagaccactatgtgtttgaatcctctggtatcaatacgtattatagggttttagagatctgtgggtcaaatgatgtccctcaaaacttcctaaaaaggtgaagctcaaagtcacacattcatttataaggcgcatgagtttctcattttcccatgtacgagcattgtaaaggaattcagctgtattaatttctatttcagatctagaattgacattttgccttcttgtttccaggtgtttctattttttgtattctttcagagaaatctcatatttcggtgtatttattgctgttactactatatttactgctgaaaactgtaacaacctgaagatttgtaaaatgttaaacatagttcattaaaaataataaaataaatctaaaatgtaaaaaaaaaaaaaaaaa

SEQ ID NO: 233863 - DNA, 558 bp, Homo Sapiens
tcagagttttattccacatgctccactgatactatatgctgctcccatggcctcattttctatctgctgagtcccgtatcagttatctccagcccagatctctaacaggtttaactcatatttctagttgcatcctagacatctttatttgaatgtcctctaccacaaatgaaaatcaccatgttcaaatctgtacataatcatctttcctagcccccaaccaccagtttcatcccttagtgattgactccgcatttcacctagctacctaagctagaaacttggacatcattcatggctctttttacctcacttctcacatccaggtagtcaggaagttctctaaacaccgtgtcccaaatatctgcattatagcactttctagtacaagcgactgcaaaacaattgaaattaacttaatctggccaggggtggtcactcacgcctgtaatctcagcactttgggagaccaaagtgggtagatcattagatgtcaggagttcgagaccaccccggccaacatcgtgaagccccatctctactaaaaatacaaaaaaa

SEQ ID NO: 233864 - DNA, 701 bp, Homo Sapiens
ccagcactcagaggaatttttaaacagatctttgaggatataatctttgtagctgcatagtttgtagtagtggggatttggagatagcctagctaaatatccatcactggtaaatagagcaaataagaaaaatgaaatgggagtaacaatggtgagatctttaaaactagatgaaactttaaaacatacagttgagagaaagaaacaatgagattcataaatatttaagaaaatagaaaaagcacagtagaaggaaatcggagtagagataataggaggaaagaggaaacaagtttgaggaaatatcacttgctaaatttatttatattatatttctatagatgaagcaaggatgatacagattcttttttctggatgaagcctggcttgaaaaaaaaacaaatggggctgggcacggtggctcatgcctgtaatcctagcactttgggaggccgaggcaggcagatcatttgaggtcaggatttcaaaaccagcctgatcaacatggtgaaaccccatctctactaaaaatacaaaaattaggcatggtagcaggcgcctgtaaccccagctattcaggaggctgaggcaaggagaattgcttgaacccaggaggcagaggttgcagtgagccaagatcacaccactacaccccagcctgggtgatagagtgagactccatctcaaagaaaaaaaaaaaa

SEQ ID NO: 233865 - DNA, 560 bp, Homo Sapiens
gcacgagtatgtctctgggattaatctccaagctgctgattacatcgtgcacgtttgatactgtcactttcatgatgttaaccaatatcacgaaaatgaaaatttcatcaggaaaagcaactcagtcccaagagtttttcagtgagctcattctttaacaaatcgctcctgtgcaggcattgacagctgtgtcatgacagctgcctgaccatagtaaggtgtcatcaattataaaatgcattccagttttcagagatgttttgaaagagatgatggaagattcagaggtagagaatagataccaaatctatagactatttatatcccttaataaaatgctaggaaaaaacagaaatcaaaattataatagaaaataattttaagccaaggaatatttgaaccctaccgatcaaaagtactcttcaagaagcattatttggctctgggtgtctgaggtgggaggactgcttgaggccaggagttcaacaccactttgggcaatataatgagatctcacctctactaaaaaaaaaaaaaaaaaaaaactcgagggggggccc

SEQ ID NO: 233866 - DNA, 482 bp, Homo Sapiens
gcacgagactatctgactaaactgcagatatttatcactttggtaaatgtttacatttaaaccaaatttaagaagaaaaatgtttaaaaaactacacccacatccattgtcactttttgtctatcacctgggcttcaaggctttatcattatctgaaattatctcatttatttatttgtttattcatttattgtctatgtccactcctgtagaatgtaatctccatggcagcagggactttgtataacaatctagttcattgccatatgcctagggactataacatagaagctgttcaattaattgttaatcaatgaataactgtaataagatacttgagaatggttgtctttttgttaggaaaagactaagtactataatcgcaatgtctacataattttaaaaatattcactcctgagtaataaattatttgggttaagagagtaaaaaaaaaaaaaaaaaactcgagggggggcccggt

SEQ ID NO: 233867 - DNA, 878 bp, Homo Sapiens
tgattcttgggttggggcatttccggcccttggtcccacctctttgcctctctgttgctctacagatatcttctcctttctcctggcccatgtcccgtagaggctttcttcaagggggttcccttgtacctgcatgcctccggttccttggtcaagggagccctgcttgggcctggtgcctgtttcacctgtgttttccctatttcccttggtataaacttggagatcttcttagaggttcccccatggggattctcccgagcccctatccgtgtatatagtgatcacttcgtgtcccttttctgcatttcctcacattgaagaaccctctctttaaacttcacaactcttccacccccgggccttttttttttttttttggataatgaccttggtttgaggtgcatgagtgaattttagaaatgaatgtacaatgtatgtctgattcacaccaggggaagtggcacagtgccctttctgggatccctacaaagtcaaattccttagatcctgagaagtggagtgcatgggatgccctgaaaaggtgggggtgtccctgtgtagcagccagtaactgatctgaagggagaggacttggctctggtgatgtaacatttcaagcctctgtgtaattacctagtcttagtcttttcttcctcattcttagtagagacgtggggaactttcatgaaaaatgctaattctgactcctctcagcgtgcaacagatttgttacacttcatccactcagctgcaagatctagagtgctttcagaggtgactggaagagttctctaataccctacaagaccatggatctttgccacttcaggtgctgtggctcaaacctcttaaagtcatcccaggaaaaagtgttg

SEQ ID NO: 233868 - DNA, 617 bp, Homo Sapiens
cgggggcccgggagccgctgtgtgaggtgtgggccgggtggggctgggtcccggcagcgtgaggactgccccttccccggactcactttttggaataaatgatcaccttgtgcatttccaaatcaaaggacaagcggacaaaatgcatcccaagatcaaggaagggacaggccagcttcctccccacacgcctccccggctgcctctgtgggcttctcctggggggcccaccccacccctgccagtctcctggagatgcttgaggatcggtcctccccagaaccaggccaggacgttgcccctggggcctggtgaccctgtgaggtcaggtcccccagattgacgtctgagtgtgggcaagtgtgtcaaaaggggctgccccccaggggagatgaggctgagagcagggagttgaggccgaagaagtcaaggcccctcccgcaaatgtgtacccctgcccgcgccactgcaccccgccgcacccccacctcccccgggggccctgctgcggatgccggagtgggagagtctctgagctgtgagattgatcttgcccctaattggagaggaagccgggcgccaagacacacggggctcctgccttgggagccagggcc

SEQ ID NO: 233869 - DNA, 428 bp, Homo Sapiens
  misc_feature (414)..(414): n is a, c, g, or t
cggctggcccaagccgagtgtgtgctggaacagttcggaaatgaggaccaccatgagttcatctggttccactccatggcctccaggtaataaccttggagagagtcagccagggtctggtggctgcgggcacgggcatctcagctccactggttcctccattcagcttaaccagcgcctcccaagcagctgcccacagctggctctataactgagcctggggaagatagaggaaagtcacgtccctgccttcaagggtctcgcagacaggtggggaggcagatggtgaactgtgggtacctagaacagcagaagttcactcaagctacagaaatactagaggagggtagctcatgcctgcaatcccagtactttgggaggccaaggcaggagtattgctggagccgggagtanaagcacgggccaat

SEQ ID NO: 233870 - DNA, 617 bp, Homo Sapiens
  misc_feature (5)..(5): n is a, c, g, or t
  misc_feature (29)..(29): n is a, c, g, or t
  misc_feature (59)..(59): n is a, c, g, or t
  misc_feature (128)..(128): n is a, c, g, or t
aaatnaagccaaaggaccttaagggaaancatagggtaagctggggtatgcctattttnctcgttagcattatttccacaaaattatgcacaatgtcttatttcatgttactttttgcgtgcaatttntgttggctattccttagttggtcactaaaatgttatttttttaaattgaatgtagaataaaaagttgataaatatttgcctagacggtttatcattatttgctcatcccagtagacattgttgtaccttttactcacattcactaatatgcatttacgtagtgcaggtcctttgtttcacagttactaataaggcagaagtggtgtgactgttgcaaaatatgtttacactttttaaaaagcaaggtacttagaaagggataaactatctaaacaaaaattaattaaaattaaaaattataattaaaaatcagaaaagtcataccaggatacacagacatcatcaatatgtgaattactgatcagaaacaagaaattctggaccattttactttcagttagttcatgtagagctggagataaaaatgtaaagcaaaaattattgccagacagagtggacagaactggctaaaggtaaaccaaatatgta

SEQ ID NO: 233871 - DNA, 462 bp, Homo Sapiens
  misc_feature (93)..(93): n is a, c, g, or t
acaacaaggggaaacattgagcgcaccctgcatagtgatttctcacacagccccccacatgggatatcttgatgctgtcatgcaacaattacnacacatgcctaagacaaatactttgctctagtgaggaaaatttgggaagaactcttatcataaggcttccattagcccctttcattttagggagtagaatttgctgttcccacattaggaatcgattccattctctccaagatcttaagagctaccaattggctgtttccaatgcctagttgtagcttaatcctacatcagtatctcccagaacttgttacagcctaacccagcgatgtggaataggttttatctcgcatatgtactctgatagccatagaaacactgaagcttagaagatgccgaggctgtgttcaagggaagggaggaggaagaaaacttacattaatcattgccattaaagtcttt

SEQ ID NO: 233872 - DNA, 452 bp, Homo Sapiens
  misc_feature (128)..(128): n is a, c, g, or t
aatgtatggggagggagaaagtcaggggagccctgacaagtctttctgtaccttcttcgtaagtctggcattacagattaatggaacattttgctagagggaatttgattctgcatatagggctaatnacaaggaaaggaagcatttgtaagcaatcctgtaaagaccgttttagaaataaagtatatcaatagatctaatagcaggtatccagaagttataaaaatttatggccataatattttgagccttttttttttttttaacaatcttgaatcctgttagttctgaacattaaattattgaggactttataaatcaaaactaggctggacactggtgtcacgcctgtaatcctagcactttgggaggctgaagtgggcagattgcctgagctcgggggtttgagaccagcctgttcaacagggtaaaaccatgtctctaataaaata

SEQ ID NO: 233873 - DNA, 522 bp, Homo Sapiens
taaacagctgtttatagctactgtgacagaaacagaaaagcagtggacaacacatttcaaagaagatcaagtttgtacataacactagaggcatttcttatcaaaaggattggataataaaaataagtttctactgggtatatttcaagcatttatttattactttagttacgaattccaatatactttaaaatggtatttgttttacagcatacataaaatgtagcaaatcggtactgtaaaacatttaacattcatacagttatatataatatccttttttttaaagaatggtatttcacaaaaatgtcttttgaaattggctttggagtttacatatactgaacatgaaagtttataataatgatgatacaactttcaacattgtcattttttcttagaacttcagctgattgcagagatataatgattacattgttattaaatttttttaacacaagtaagtgtcaccattttatgacatgaaataaaaggttatgactgttaaaaaaaaaaaaaaaa

SEQ ID NO: 233874 - DNA, 605 bp, Homo Sapiens
ttttcattgcacttaaaaatgtaaaatacctgcatgccactaatctgtaacattttaccagttcagatgcctgtaatgtgtgactttatgtgtgtctgtgttgttttgaagagaataaaggaaataatactttgcaaactgtttaaacaagtgtttaaacttctattggcaacatttattgggctaagcagttattgaaaactccgcatagttttattttccatttgaaacttcaatcaaatcaagactattatattcattagggaattaaagactaatttgctttttaaatgtgaagttgaacactgtgtggaaagtaaatgtgtgatgaagcaaaatgtataaagtatgaaatattatacttttaccctggataattattcaggaccccagttggcccaaataggtgcaatttttaatcctttgaaattagccagccagacctaatgctaaggtaaatgtaaactgttttaattaattaagatctttctgctttcgaaggtataatgtatctatttctgtcaggaatgatatttccaaatgaaaatgtaaagaacattgggaaataataaactttcctttcaaagtaaaaaaaaaaaaaaaaa

SEQ ID NO: 233875 - DNA, 542 bp, Homo Sapiens
gacccctcgcccaggccggggctggagggattcggccgcggcctccggtcctgggcgcttcccttttaagcaagggcgcctcacctgctcttcaagaaacagcgagagggagacccagggggctgaaacttgaactctggttcttttaaaattaattttggttggtgttgggggaggcgcgagtgcgtgtgagaagaaccgacccaccccgcgcaaggggaagcctcctgtctcccctttccccgcgtccgagaaggcggaaacccacagtgttacctgacttatgaaacttgaaaccgcctctggagccgccattctgcagagtatttggaaaaagaaaaaagggtttatgcttacgtctctggggtcggggggattatgtcacgagcgttcaaactgctggaaatctcaaaactgtactgtctttatttttgtatattgtatttatatataaaaagaaacgtctacgtatgcatgctaaattattatttagcttctcccatcgcccacgatggaatgtaaaataaattggttttgtactg

SEQ ID NO: 233876 - DNA, 466 bp, Homo Sapiens
ttagtagagatgaggttcaccatgtttgccaggctggtcttgaacycctgacctcagatgabccgcccacctcagccccccaaagtgctgggatkacagcatgagtgcccagctaaatgtttattcttaaccaggattgttaataacttaatttactgtcatagagttaaaagtttggaacagtagagagccttatatatacttcatggtgttctttctactgtcagaaggccccagactggaatttttggtgtgtgtgtgtgtgtacgtgtscgtgcatgttttaaagatataaaacaaggttatggctgattgtcgcttcatcagacagttttaaaattttgtttacttttgttccttattatcaaagtaatatatgttcattggagaaagttcatcctcccctcccacattggagaggcaaccgctcttaacattttggaatatttcttttttccttttttct

SEQ ID NO: 233877 - DNA, 451 bp, Homo Sapiens
ttagtagagacggggttctccatattggtcaggctggtctcgaactcctgacctcaggtgatctgcccatctcgacccccccaaagtgctgggattacaggcgtgagctaccacgcccggctgaggatagacatttttaatagaaaatctcattttggctcccttagacttctcaaggtccagatgctacttagcctttcctccctgctctctattgcctgctcttcctcaccacatccctgcttttctgaaagtccttccttgctgtgcaacaaatatgacaaaattcccaaggcaaaaacctttaacacctcccatctaggataacacttatattttcaagattctcacgtcattatagagatccctataaaaaggaataatacaccctcccgacagagatactgtgaagaaacaccagtggctcagcttcagctgcaccccaggcatt

SEQ ID NO: 233878 - DNA, 663 bp, Homo Sapiens; identical to SEQ ID NO: 62756

SEQ ID NO: 233879 - DNA, 669 bp, Homo Sapiens
ttttgggtgtttttggtgggtgccggttttgttttgtgttttttggtttttttttttttttttttgttttttttttttgtgttgtgttttgtttctcgttgtcaaaatcttgtgttatattgctcgtgtaaaacttcgttaatgccccaattttactaacaaaccatttgtttacaagtgtcttaaaatccagataagtttaacaaagtggtttcataaaactataaaaactatgtatatagcatcacaaagaattaacatattaaagcattatattggttatcacataaaagcatcataagtttttcgtagcactctctctagaaaacagtacatgaagccaaaccaagatcttgtctgtccactcacataaaaggtcccaggtctgtcaatgagtttcatttaatttggagagccagtctgccacggagaccaccattctccacagagaaaactgccacatttgtgaggtgaatgaactttcagcatttatgttaaagtcatctctgaagtgacatccacaattttaattccaagtgaatggtttttcccttggctaggcacctttttttagtaacatgtttgcaaagtgtcttaaagtgataagtcgttattcatcccctcaaagtaggtcacaattgtatcttgtcaacaagtggtaaaatatgc

SEQ ID NO: 233880 - DNA, 713 bp, Homo Sapiens
gtcataaactcctgggttcaagtgatcctccagcctcggcctcccaaagtgtgagccacactttgtggtgtatttttcagaagctttgtgaggtgattctgatacataacattggttaaaaaaccagtggcttcaattatccaaaattaccccttattcaaaatatcactcattctataaacactaaataactaagactagtatttctagaattatctggttccctctgtgatctagtctctgctgtgtcataatcaacttcccacaaaactgcagtaatacatatagcatatttcacctgcgaattctttgcacaaaaacaatctattaactctcaacacggctcaaattatgaggtggctcaaaaaatgttgagtgtcatgtagaacgtcactctggacgtcacgtggcactcaaacattcccgtagagtgactcttctgctaaaatcactgccgagtggcactggaggggagttccaagaacctgattaacctcacagtgcagtgaatgtgcacctgtggggcctataaatgcctggcaatatgctacatgcttaattttctatttagaaaataatttttccttaaaaaaatttaaatttaaaatctaaatgtccaaaaccatttatttatttttgaagtcacttttggcaaatatacaactaaagatggcttcttctttctcttcctatctaaagattaaagaaacatc

SEQ ID NO: 233881 - DNA, 457 bp, Homo Sapiens
  misc_feature (448)..(448): n is a, c, g, or t
ggctttcctggtatttccatttcaggtgcagatgcccttcactttccccaccaaaaaaaaccccaacaaaacctaagacctttactgcaactaagtctcccaagtacttttttaacccaatgggatgaacagcctgtggtctgctcagatcaccctgagtgcggtgtgagaaggccttggctttgccaggaaatccaggaaggcagggccgggctgtgttggaagctggcttagctggtggggcagccttatttcaattaaaagggcattgactgggagcagcagtcctggagtttgttgcatttcctattgccctcaaaatgagaaaccaggaaaatagcagattggagccttcgagaaggcagtaaatggctgtttttattgacaaaaggaaaacattttactgccatctcactgatggcatctcactgacttaaaatgaaggcangttgtagta

SEQ ID NO: 233882 - DNA, 379 bp, Homo Sapiens
cctattgccctggatagaatctcaactataacactgattagaagtggtagtttatgtctttctagcaatctgtcaatttcatctaagttacctcaggtattagcacatagttactcataatagtctcttgttttccctctttcatgcttgctttcagaaatttcagccttctctcttttttcttggctggtctgaaggtttgtcattttgttgattttttttttcaaaggaccaactttcagttttgtctgtcttcttacatcttttctattacctatttcattaatttctgctctaatctttattatttccacccttctgtttgctttaggtttggattgttcttctctttgatacattttttttttttgcaaataag

SEQ ID NO: 233883 - DNA, 574 bp, Homo Sapiens
tgctatatatacagtaagattaatttattctaacaatgatcttgataatccccctgattcccagactccttggaatagctccacagctatcagtggttctgccacaggttcagagccttcccagtactgccttcttatttgagaggtgtgctaagagctataaagcagaggcttcaattgtacacagtttggaagtttaggcaaaagtcatttcttccctatattttgtcatgcttatctcctgtctctttctgttttacagattagcaataaactccttaaaacccaaaggtttgggcttctgttcctttcacttgcagtcagacatggagttagtggtagaagaaacagaaggggtaacctgcatggtgacagctactgaggggatggataggaaagcaggctgagtccctggggccagtggttaccaaagccaaggagagagcaaggggagcccagtgggcctggccatggactgctctggaattccgagtgtgaactttcagccaagaaggtagtgtgaaaatattactgtgaggttttaaaagtacacaaataacaattgttttttgta

SEQ ID NO: 233884 - DNA, 725 bp, Homo Sapiens
tgatcaggcccaaaaagcaagggacaaaagggtctccagaagcggaaacaaaagatacaggtggcacctccactcagcgccttggagagcttctgagctccccaaggatgcagcctctgcagttctgcccatgacagaaaagaattggcggggggtggcacagtgctgactccagggaacacagatggagctaaggggccccctgaatcaagtcaagggatcacagaccaggactcccacatgcacataagggtcaaaaggtcagagaggctcaaagtttccaaagaactttggtacagagaagctggcaagatagagcaggcgacaacagttcccacccgaagaatgtcatgcctggagttctcatgtatgtaattcacacttccaggccttccaacgcaagagccatccacagccagtttcaccactaatttcaaggattacactaggaacaagagcaaatctaccactatcaccccagactatgcccatcatctccacctctcccgctggaagaggtgacaatctattgtccacacaggagccagagaaaataccttaaaacggatgtcgggtcctgtcagacctttgctcaaaccctctgaggcttctgatcattatctgaataaaatccaaactccttaccatgacctaaagggttcatagcctggtcccttacccaagccctcctcactatactctgtccacagtacccttctttattt

SEQ ID NO: 233885 - DNA, 870 bp, Homo Sapiens
tgtgggaaccgcatccgtatttctctattcaccaggtgcttcaacatttgggttctactgatcggagtttcccccaatccagtttcaccacacacagaaccaaggattgtgtaagagaagctgataagaggatctatagagagctcgtgacatttctgaccttctccaaggttagaaaccaccagggataacatctctgccctttaccctctaagagaatagatgatgctttgagggttaaaggatacaacatttagaacctctccctgatgaaacaacaacaacccagatgtctgcttagtagcaaaagaaagagaataggaggtaggagttgccgtaaagtagaataaagggaaaaagagaaactcatatttgtcaaatatattattgccagtatcaggccttttatggcgattattccttttaattctcataaatactcaacacttatatgatgtgatatttactgctttcattttataaattaaaaaattgaggcctaaggagtgttagttgtttgccacacacaggcagctacaaagcagttgggcttatccagctgttaccagcaggtctttgttcttagagctcccaagatggtggcaggccactcccaagatgggatgggctgctcccaagatggcggcaagacttttgttctctgacctggggttcttcgcctcacggattccaaggaatggaaccttgggccctgtggtgagtgctatagttctattagaagccgtgggtcatggaagagaactgtggaacccagtgactagtgttcagctcaattaggacgaacccgagcacttagccatgtgggaaccatgacaagcctctagctggatccagagcggcaaagggcgc

SEQ ID NO: 233886 - DNA, 933 bp, Homo Sapiens
gtggcttatgaaggtctctccccagagtcacggcctttccttaaaactcttcccaaagggacatttccccaaagggtctgagttagctacattctgatttgtgaacatacctttgagccattgatgcgcttatcctttgaataccccccatagtttactaagatgcaacatatagaaccatggcttaggacccattctgacttaatctccaggagcccagaacccctctccctgcatacctcctctggcccacccccccttcccccaccccttacacccgatgaatagtctgcattcgctcctaagcatcaagttttaaccattccattccccaatgcaaccactcctaggaagtactgaaaacacaatgcttagaggggtgttacttaagccctctactgttaacctacattgtgcacttttttttttgaaacggagcctcgctctgtcgccaggctggagtgcagtggtgcgatcttggctcactgcaacttccgcctcccaagttcaagcgattctcctgcctcagcctctcgagtaactggggctacaggtgggcaccaccacgaccagctaatttttgtatttttagtaaagatggggtttcaccatgttggccaagatggtcctgatctcttgacctcgtgatccgcctgcctcggcctcccaaagtgctgggattacaggcatgcgccactgcgacaggccgttgtacacttttaaacacctagaaagactagatgtttcaaactggacttaagttttccattatatacacagtagcattgaataaatggtatacatacataacacagactgtaatttgagtgtcttctaaataggaacattctggcctagaacccttccctttcccacctctaccaaccccgtggacagctataagccatctgtaatgcttagggggggtttaac

SEQ ID NO: 233887 - DNA, 532 bp, Homo Sapiens
ggcacgaggaaaatgtgaatagaaagtatttttcctgaagaaccacatcgtcaataaatcacctgcacccaaatctccatctcaggcgctacttctggcaaggcatatcatgaggctagtgaagcacctacaagaaacttataactcaaggttgtaaaaatggcatggtgactcttacaatcatatcacagtgggcctctccaacaatttaaacctcatgacctaggtgaaagctgtgaaaggatccacattaattcttcagaggcagggctaagactttcaagactgaaaagagactagcataaggagacttaacaggaacccagtcaagccattcatggccatgggaccacgcataaatggagaacgagtaaattttgctaagtccaaggacattggagagatagagtcactattactgatatggtgactgagtcaacaacatactgccactatgaagtaataagaaaataaaaagttaaaaaatgtaacagataacagttggagggtgaatatattttaaatcaatcaa

SEQ ID NO: 233888 - DNA, 427 bp, Homo Sapiens
  misc_feature (265)..(265): n is a, c, g, or t
aacctcttccatcgccctgcctagcacccgccagcacaccctcagcctccagcaccccccgcccccgcccaggccatcaccacagctgcagccaaccccatcctcaacacagattcaccttttttcaccccacactttgcagagcttgcttggaggtgaggtcaggtgcctcccagccctgcccagagtatgggcactcaggtgtgggccgaacctgatacctgcctgggacagccactggaaacttttgggaactctcctcganatgtgtgccaaggcccccacctctgtgacccccatgtccttggacctagaggattgtccaccttctgccaaggccagcccacacagcccgagcccttggggagcagtggccgggctggggaggcctgcctggtcaataaaccactgttcctgcaaaaaaaaa

SEQ ID NO: 233889 - DNA, 794 bp, Homo Sapiens
atggatttcttcctctttcagggattcagaggtcaagatctataggaatattactaagcctggcacataagacttttatgtgaagttaatcaggttgagtatttgggagcgggaggatctcagagaggacagaaaactgtttatgaaaactaacaggtgacgatgaaacattccagtggttctgcagatgattctgactcattattttctcttcatgaacgtcatatttagaaaacaatttttttttactaaacaaagtgaatttattaagtaaaaattcagctttcatttatcaacaatatgtaagtgctagattaaaatacctgatcaatatgagatgacaatggtgttctagtgaagacacagaaatccagtgatgaagccttatcatgagtaaatggatggtttccattagattttgtcaaatattgaagacagatatccattaatatctctgggctcgagggtcccaaataaaaaacactcgtaaagacagtcaagaggaaaaggaaaccatgagatatagagaatctggggtaaggcaagttcttgccatgcgcatcccctcttctgcttcatcagcaaattatctgcatgtttttcagagtgtatgttacttgtgtattttgaacctttttcactaataccatgctctgctatctaccaagtttccaatctgtgatggtctgttaggttacaataaatgtttcgatgacattaatgagctcatttgtgatcagtaaataggagcatgaactcagtgtaacatggagttgttctggcttctaggcatg

SEQ ID NO: 233890 - DNA, 392 bp, Homo Sapiens
atcctcatgtaccaaagtgtagcccatcgaaagccaagaattttttgcaggcattaagctacagcctgaattgagcactatatcagaggatgggaaagaatactacctgaggatagaaagcacagttcctattatttgttctgaatttagtgagcttgatcaagaatgcaaaatctcattaaaactgaaaactattgatcaaggtaatatactaactttattttatcttattattagattgcaaacaataatgcttttttttcctgtaggaaaagtcactggagtgtactcatataataaatcatgttgcatgttgacatcaaattttagcccaatcatattactaatactcggccaaactgacgattgccaaagcaattcacatttcttct

SEQ ID NO: 233891 - DNA, 425 bp, Homo Sapiens
  misc_feature (1)..(1): n is a, c, g, or t
  misc_feature (16)..(16): n is a, c, g, or t
  misc_feature (33)..(33): n is a, c, g, or t
ncctagagggcctgancagatttaagaaattgnccaaatgttaaaaattttttagactatctcccccactgctaccctttttcttagaatttgtatttttagaataccatttagcaacggaccggccgtgcacaaatggctcgatgccgcacacaatggctcatcccagaacttcgggagaccaaggcaagtggattgcttgagctcaggagtttgagatcagcctggccaacaggggtgaaaccccatctctacaaaaaatacaaaaattagctgggtgtgttggtgtaggcctgtggtcccagctacttgttgggggcgctgaggaaggaggattgcttgagcttggaaagtcgaagctgcagtcagctgtgtttgcgccactgcacctcagcttgggtgacaacgcgaaccctgtctcaaaa

SEQ ID NO: 233892 - DNA, 433 bp, Homo Sapiens
ctgatgccattttcccagcaactggaagttcactctggctaaggaaagtaactaaatgtgatgttatccattctaattagtgattacaaaagatcaattaatgttataattaaaaacagtgtctagatctgttgtttgtagtgaataaatgtgacaattactttgttcattgacatagatgtgttgaatttcctccctagattttaaggggatgcattttagtgctgatgtgtgcatttaactgtggacagtaggaacaaggcaagcatattaggggaagagtagggcccctaatgtctaagctacagacatattttagcatgcttgacacctttccttggtatatgatgctatatcagcaacttgtactcattggatctggagcctctagcttttaatattttatcactaaatgcttaagtgtttatgttgc

SEQ ID NO: 233893 - DNA, 447 bp, Homo Sapiens
  misc_feature (4)..(4): n is a, c, g, or t
  misc_feature (298)..(298): n is a, c, g, or t
actngaaagtctatgaaggaagatagctgttcccagccttaccgcacattttcttcctgaagtgaaaaataggaacttatgtattgggtggccatcttgacatgaaactacaaagatccttccccaacagtatcatcctacactgaaacctggaaccaaatccattcccattcagcaaatgttgatcaagtggcatgtaggggatacagagatgattgcatacaaagatgaaaaagaaaacgtttctgccagggccaggcgcggtgactcacacctacaattccagcactttgggagncaaggcaggtagaattgcttgagtttgagttcgagaccagcctgggcaacatagttgaccttatctctacttaaataaaaataatcagccaggcatggtggcatgtgactgtagttccagctactttgggaagctgagggccattgcac

SEQ ID NO: 233894 - DNA, 424 bp, Homo Sapiens
taccagctcatacaaaataaatggtttctgaaaatgtttaagtattaacttacaaggatataggtttttctcatgtatctttttgttcattggcaagatgaaataatttttctagggtaatgccgtaggaaaaataaaacttcacatttatgtggcttgtttatccttagctcacagattgaggtaataatgacactcctagactttgggatcaaataacttagggccaagtcttgggtctgaatttatttaagttcacaacctagggcaagttactctgcctttctaagactcacttacatcttctgtgaaatataattgtaccaacctcatagagtttggtgtcaactaaatgagattatatgtggactaaatatctgtcatatagtaaacactcaataaattgcaacatattaaaaaaaaa

SEQ ID NO: 233895 - DNA, 528 bp, Homo Sapiens
gactccgtctcaaaaactaaaaaaaaaaaatacatttagtatagcgggcggtgggggggagaaataatgttatttcctatgcgaatgacgtgtatccctgtacccatggtaaatgtaaatatactgtgtctcttttgggagagccttttagtagaggagtcttatatgagtctctacataagtagtttcacttgagttttgcagtttgaaatcttaaaggagctttaattgacatttattataccaattaagcttggaatggggcaatggatgcatttcccaaaacgtgtgaaagcactaacagcttatattgctgaatgagaatctcctgggtgtaatttagccacttagggaactgcgtgaacactcccaggccattatgatgctgttacagcttcagtgtataaatgcatgagtattctttctgttctgttttgtgctctcttgtacatttatttaccctttacagaatatttcttgtaaatacataaaaatattggcaattaaaagtacatcttgaataaaaaa

SEQ ID NO: 233896 - DNA, 474 bp, Homo Sapiens
gccaaaatcctcccgggacaccccacctggactgctgcgaacgggcctccacccgcctccccggacccgcagcgccccccgctccctcagggttctggggtgaaggggtctgaatagcaccaggggaggcggcagggcgggcctgtcctacctgcgcccgagcactgctgagacgacatcccttccagcgccgccacgtagtccagccccagccagccgcgatatctccccacaaacctaaacaatttcgagagggacttgtgttctgcaaccagtcacagaatatcaggtgagctgggcgtgtcttcactgacccacccgcccagggatgctgcactcctctccaccctgctcagaatcactagaatgaccgttctgtggctacagccctaaaagagctactaaaaagaccagaagtagtatgagttcttatgaatacgaatataaataaaggacatctggagaaaaaaaaaa

SEQ ID NO: 233897 - DNA, 586 bp, Homo Sapiens
gaggggctgtattaatttgtattgccccatggctgacaaaagccttttttttttgttttgattttttttttttttgtaactgttggggggaaaaaggctttttaacccatttttgaagagggtgaagtttggagaacaaatttaaaaaccatcagtcatgtgagcagattttttagaagggataggagacacacgcgcacacacacacacacacacgaaacttgaaatggctttgctttggctgtcgtcttctgccgtgtgccagatgagcttgtgatctgggaagccggggcacccccgttttgtttctctgggcggttgtggcagctgaaggcggacgttgtttcctaaccataggtggaacgaggagacgggagcgagtgggctctccaccagcacatcactatgcatctgttccaggaaagaagaaaagcgagcgaggaagacggaaaagactgcctgccttggaggggtcacatgagggagacctgtgcctgatttcattaggaaatccattctgttattttttggtgctgttggctactttatcaaaaaacccttcaatagcatccttaagatttaaaaa

SEQ ID NO: 233898 - DNA, 542 bp, Homo Sapiens
  misc_feature (124)..(124): n is a, c, g, or t
  misc_feature (175)..(175): n is a, c, g, or t
  misc_feature (189)..(189): n is a, c, g, or t
  misc_feature (504)..(504): n is a, c, g, or t
ataaaaataccaaaattagccgggcgtgatagcgggcacctgtagtcccagctacttgggagggctgaggcagagaatcgcttgaatccgggaggcagaggttgcagtgagccaatattgcgcnactgcactccagcctgggcgacagagcgagactccgtatcaaaaacaaacnataaaacagggganacaggtgagaggcctgtcttggggattcattgtgaattccttgcggcagttgcctccccagacacccagagcttgctggtcatcccagacccttgggcaagggcaagacagcagcgtccagcagtcggcttgtgcagggcagccttccaattgcccaaaatatgcgccctcccggacaccatccttggaagagaacctagttccttaccgatcctttcgtgcctcagtccacccagaccaattccagccttggtgaggcgtttccctctgaccaagcacccacccatgggaggcccgtgtcacccggctcgttcngcatctctgctcccatgaataaatgtatttactctaaa

SEQ ID NO: 233899 - DNA, 714 bp, Homo Sapiens
tcaattcatccctcgaacagttccaggaggttttttttttgtgtgttttaaggcagagcctccttctgtcacccaggccggagttcagtgacgcaatctcagctcacggcaacctccacctcccgggttcaagcgattctcctgccttagcctcctgagtagctgggattacaggcatgcgccaccacgccaggctaatttttgtatttttagtagagacggggtttcgccatgttagccaggctgatcttgaactcctgatttcaggtgatccgcctgcctcggcctcccaaagtgctgggattacaggtgtgagccgcctcacccagccaggaggtatcaatggttaattctctccactgaacaaatggaaaaactgagactcagagagggcaggaatggccttggatgcagtgattccatggtgtggcctgagtcagatgccagggcccctcggacgcccgctccacaggagaggggtgactcagaggtgccgtgtctgtcctcttctcctgaatatgggtggttggtgcgggggcagggggtgagtcactgcactgtttcccatgcctcccacctcggctctcatggttgggagcggctgagggaggaggctgaggcagggagagggaagacccaggagggaggaggcaggcgctgctttgaggggtgcctggagccttggcaatccttttcctcctcgggcccgggagc

SEQ ID NO: 233900 - DNA, 586 bp, Homo Sapiens
agcaaggccaaaaaattagcccaatttaccaactggtttacatggtgtcataattgcaggcacggtggacatgctggacatatgcttagttggttcagggaccatgcagagtgccctgtgtctgcatgcacgtgtaaatgtatgcagttggatacaacggggaatctggtacctgcagagactgtccagccataaaatgttaccaccttaagagaacccttcaagtgtggagctttctagtaggtgtccttcatagctcagaaacatacctcagaacaagccattcatgacttacctgtaatgggaaaataaatcattctatcagatcagcagttttgatgtttgagtgattttgatatgcttcacagagacaaatgctgccaaaataaacatcgaagtatagacatgagttctgttcagcaggttgaaaagtctgatttagaaaaactttctaagttttggttgaaattatgaacactctagaagcagaatttctggaagagccaagaacagactttgagcctatatcttcaaagctgaaactggatatctttcaataaaatatgtgcacttttaaaataaaaaa

SEQ ID NO: 233901 - DNA, 1000 bp, Homo Sapiens
aatgttggacccaaacatttttattgccattatctgctagaaagttagacataggctggaaaacacacttaggaacaatgatttgttttttgtttgtttgtttgtttgtttgtattgtttttctctctgcacatcactgtgaaatgactcctgaaagaccatccatacttatttagaaaataagcctgggctttgataactagacaatttgactttctaagtgtttagacaagccaggtatcaggtgtgtcctgctatgagaacatccaatttaaataaacatcaagggttcagagtagacaaatcagaaggtaattgtttactttacaaaaggttctttttataagatcatccgcaatacgcttgtttttgttgacctttcccacagtataatttgcaaaattataattaaattcaatcttttccaaaaatatatgtttttctttttctttctcaagactttttgtagaaactctgcaggtcagaagatttttgtatggaatgatcttctccaatcaattatttgaatctaaggtgtgctcaagaggagaatcagtttcccattcaaccacttaggattctttctctctgcgtcctaaatttggctttgagaccttggatgatgattctcctaatctggtcaatggaccacctgcaagaatcacccaggactggagcccaggaatctgctcagtaacgtgactggggtgcatgtgagctaacatttaagaactacttttgcagagtctaatatgtgtagactctaatatgtgcagagtctaatatgtgtaaactgtgtagctctctactctgtcatgcactttgcatcatcttctagtcattgtgtcctggagcccagcccaaaaggcctcccaatccctgccctgctttgttttggtcaagaagggtatctctggagcacacttaccatggtagatcttgatttgtatcaggtatttatgaaaaattgccacacataactacaattctttttgaaata

SEQ ID NO: 233902 - DNA, 840 bp, Homo Sapiens
tttctgcgcacgccatcagacaagggcgatcgctccaaccccagacactgtccctcattcagtgatcgtgctttccgtacctgccaaactggtatacagctcctaccgctgaggatcgtgaaatgtaaccctgcccgttacctggaagcgtgagcggcacacagcgttctcagatgtgtaaattgtcgctggtctgatgggtgaatatccgtggtaggtcacaatggtggcccctatttacgatcaggctggggtgatgagcttctgcccagaccactggtgaccacgccagtttctgtaggaggaggatgagtagtgtgtccctcgttaggacaggcgcggcagcaggcggaagctgcaccgtacagggactcgggggacgcgttgcgggagcgcgtggccctgccaggaacgtgtgctgacagggcaggagggctgagcggcagacacaaggcactccgtggtccccaccagctgtggcctctgccaccccatgggtcgccagtcttaagtttcagagcatcacgtggtactcaccctggtcctgcagctcctgggcccagagacaggatttcgtgttagcctcctcgtactgtgctggggtgatgataaaacataacaacccaggactggacgcagtggctcacagcccgaaatgcccaacattcttgggaggccgaggtgggtggatcaactgaggtcaggagttcgagaccagcctggccaacatggcgaaaccctgtctctactaaaaatacaaaaaatagccaggcatggtggtgcatgcctgtagccccagctactcaggaagctgaggcagaaaaatcgcttgaacttcgg

SEQ ID NO: 233903 - DNA, 1000 bp, Homo Sapiens
acggtgtgtccccccaaatttgcacaaaccctcctgggggggttttccttaactgacaacaaacacacgcaatttgttggggacacaacatcatggcgccacacacggggacatctcgtgggctggaggcttaatccacacaggggtcatccctcttacgacacagaacagtgggggtaaatcaccgtacgggccactatgagagacggggggtgtcaacgcgggaaccttctagggcctcatcaatgggggtggagacccacccgccgccggcccactcattggggcgaagtctagagggtgtctatattcttcggcgaataaggcgtctcgctctaaactccaatcacgctctcgttgggggagaaccgattcaggaggagtagacttgtgggtgccacacctggggcaagagtgttcaccgctatggcgccagtgctataaggagttttgcgtgaaaaatattgcgggggtcttgaaagaggtcggaataatacgagagctcgtttaaactggtttaaagatgggaggaaaggagggaaccgggcctcgcgtgggttcacagagctgctatgtcccaaacggctttggtgaaggctgaggcacagaggattagccagaggcctgggaaggttgagggctgcacgtgagactgcaaccacctgcaatgcaagcccgggcgaaaaagagagtggaaaccccgtcgtggaaaagaaacaaaaaagtggggccgggcatggtggctcacacctataatcccagaactttggaggctgaggtgggtagatcacttgagatgcaagagttcgagaccagcgtggccaacatggtaaaaccccgtctctactaaaaatatgaaaattggccaggcgcagtgactcacgcatataatcccagcactttgggaggctgaggcaggtggatcacccgacgtcaggagttcaagaccagcctggccaacatggtgaaatcccgtctctacataaaatagaaaaattag

SEQ ID NO: 233904 - DNA, 545 bp, Homo Sapiens
  misc_feature (514)..(514): n is a, c, g, or t
tgggctacagacctgtacagcatggtactgtattgaatactgtaggcaactgtaacacaatggtatctgtgtaatctaaacatagaacagataatacattgtgctacaatgtaacaatggctgtggcatcactaggtgataggaatttttcagttccattataatcttataggatctctgtcatatgtggtcaattgttgatcgaaacatgactgtatgtcgtattttcagaaaatggaataggtaatcatcacttgtgtgaattttaatcaaatgacttaggaaagaaactggatgtttcaaaagctgttgcatttattacaaatgtcacaaatacagctcttgccttttgagaatgttggagagatgtctttaaaaaatatgtttgtgtgtaaaaatgtgtctgtatgcaatagctagaaaaatgcctgtgtcttaagtcattactcatgttctaatttttgttctttgtactatttatctgtatgcttgttcttcagtatttcagactcanaaataaatttatttttttatgttaaaaaaaa

SEQ ID NO: 233905 - DNA, 587 bp, Homo Sapiens
  misc_feature (35)..(35): n is a, c, g, or t
  misc_feature (59)..(59): n is a, c, g, or t
  misc_feature (78)..(78): n is a, c, g, or t
tggaatttcctccaaagatgttaaaaacgggttcntcctcatgggtaattaaaattttngaatgatttttagctcctnggccacttacgcaactcaatttctgaagccaattagtggtaaaaagtatttttccccactaaaaaactttaaaacacaaatcttcatatatacttaatttaattagtcaggcatccattttgccttttaaacaactaggattccctactaacctccaccagcaacctggactgcctcagcattccaaatagatactacctgcaattttatacatgtatttttgtatcttttctgtgtgtaaacatagttgaaattcaaaaagttgtagcaatttctatactattcatctcctgtccttcagtttgtataaacctaaggagagtgtgaaatccagcaactgaattgtggtcacgattgtatgaaagttcaagaacatatgtcagttttgttacagttgtagctacatactcaatgtatcaacttttagcctgctcaacttaggctcagtgaaatatatatattatacttattttaaataattcttaatacaaataaaatggtaatggtct

SEQ ID NO: 233906 - DNA, 392 bp, Homo Sapiens
  misc_feature (38)..(38): n is a, c, g, or t
  misc_feature (52)..(52): n is a, c, g, or t
  misc_feature (384)..(384): n is a, c, g, or t
gtttcgctcttgttgcccaggctggagtgcaatggtgnaaacttggctcacngcaacctccttcctcccgggttcaatagattctccagcctcagcctgctgagtagctgagattacgggcgcccgccaccacacccagctaatctttgtacttttggtagagacggggtttcaccatgttggccacgggcaaaagaattttgttgagggcaaataatatgagaccacaaaactgccttccctgctcagttttaattttcacagttttaatttttagccttctctggttaccaaaataaccacgctcacggccgttcatttgaagatatttccagttaacgtgtgtgaagtgggttttttgagatgtaatttacaagcaataanatgctcct

SEQ ID NO: 233907 - DNA, 569 bp, Homo Sapiens
  misc_feature (12)..(12): n is a, c, g, or t
  misc_feature (40)..(40): n is a, c, g, or t
  misc_feature (78)..(78): n is a, c, g, or t
  misc_feature (130)..(130): n is a, c, g, or t
  misc_feature (329)..(329): n is a, c, g, or t
  misc_feature (332)..(332): n is a, c, g, or t
  misc_feature (334)..(334): n is a, c, g, or t
  misc_feature (483)..(484): n is a, c, g, or t
  misc_feature (488)..(488): n is a, c, g, or t
  misc_feature (497)..(497): n is a, c, g, or t
  misc_feature (501)..(501): n is a, c, g, or t
  misc_feature (505)..(505): n is a, c, g, or t
  misc_feature (511)..(511): n is a, c, g, or t
  misc_feature (513)..(513): n is a, c, g, or t
aagtttaactgngcatctgaacggtgacattaaaaactgntggcaggaagacccgatttctgagtaacccctgcttgncctctttgtgtgtaacacctttactccttccttgtccttgtgtttctgctgncttggaatctgaatgtttcacgcagtccattttcatttgtctctttttgtatatcatctactcagtggcttggctgaattactgttaccctcagaagtttgggcccccacattaattatgataaaaaatgtcaaaataacaagttatctacaaatttcaatgtaactttctggtagaagtgcttcttcatggatctgtnacngngagtggatatggtatctaggcaatagattgctgggtcatttagaataatgaagactgaactccacagtcgtagtcagtgctgtctgtctgccctagcattagaaatgagagaaatcagccagacacggtggcgtacacctgtaatcccnncaanttgggaggncgangcgngaagantncttgaggccaggagctcgagaccaaccctgggcaacatggtgataccccatctcta

SEQ ID NO: 233908 - DNA, 457 bp, Homo Sapiens
agcagatgtgtcaaagctcttttgtcccaggaataaactgagtttcgtcatcatcttgacagtactttcctggatgagtgttcaggaaacatgaaaagtttttaaacaattcaacaaatgtgtaataaaagtttgttatcttgttttatttgttgttatattgtctcttggcttgagtttttatttgggaagctaatagagagacgggatattagaaaaccagaggcaaactgcttggtttattgaagcactaactgaatgaatgcaggtatacgagtaatccaggaatcccatgcattaaggaaaaatttatttctatcacctctgtattgttgttaccttgtgaacctggcttggttttttcagcagttggtaaactgataagcctgtttctcactctgtcattcatctcatcagtttaccagcccagaaatactcctttcagtctttacaaaaa

SEQ ID NO: 233909 - DNA, 583 bp, Homo Sapiens
gtatatatatgtattatatatacacacatatgcatatatatatatatatatatatataatctcaaagaagtgcggtctgccatttatctgccattttgaggatttaggtactacataaaatattagaaattcatttagaccagatctgtaaactggtagttcacataggccagtttgacccacagttattttattagatgtacataatgtttcaaaaatgtttgaatttgaaaagtcttttgattgggtgtgtgttccccagtttgccacagcctactggacttccctcttatatcagacaacttctctactttgtagttcctgctcagccctgaagacctctaagtttgagacccctgatttagatctgtaattagaaaaaggttctgaatttcatgatttgctaatgtaattactattaagtcattttagcatgtgcattttagagtccttctttgtatttttgtaatgtggtgctttctctcataaagataattgaattgttaacactgtaattgaaattttaaaaatcatttccaaatcttttattatatttcacagtaaaagtctatttaaaaagcta

SEQ ID NO: 233910 - DNA, 541 bp, Homo Sapiens
aaagaagaagaaaagagattagttatatcaaaagcctgaagtggaatgactgaaagatgggactcctcctttatttcagcatggagggttttaaatggaggatttcctttttcctgtgacaaaacatcttttcacaacttaccttgttaagacaaaatttattttccagggatttaatacgtactttagctggaattattctatgtcaatgatttttaagctatgaaaaatacaatggggggaaggatagcatttggagatatacctaatgttaaatgacgagttactggatgcagcacgccaacatggcacatgtatacatatgtagctaacctgcacgttgtgcacatgtaccctaaaacttaaagtataatttaaaaaaagcaaaaaaaaaaaaatccaactcttttttttttaaaccaggaaggaaaatgtgaacatggaaacaacttctagtattggatctgaaaataaagtgtcatccaagccataaaaaaaaaagaaaagaaaaataaaaataatataaaaccttaaaaaaaaa

SEQ ID NO: 233911 - DNA, 560 bp, Homo Sapiens
  misc_feature (551)..(551): n is a, c, g, or t
ttcttttgaattctaggcagagaatgcaggattggcattctaaatatttgtacatgataaacaaatgcttctttaggttacagcaaatagtttacttatcaagatcacgattgttagatactgttgtcaattacagaggttttagatgaggctttctggaatgatttagtttccctgtaagggagcctgtctattggaatagacaggttcacttctcccagtctttcaagttgcatgctttttatatctgattccactggctgagctgattgtgaatgtcctaaccctgttgatagtgtctggccactcatgggcaaagaacagattatccattctttatagttgtcttttagttttacaagttgaaaaaacatctgagtaggttagataatttattctaccactttgtaaatgattagaatatgtcagtcataatcatgccaagagattatggatttatgcatattttgttttgctgtagtaccattcctagttgaatcttaacatccatgtttaaaatctatacagaacaaatattacagttgggaaanctgaaaaaa

SEQ ID NO: 233912 - DNA, 721 bp, Homo Sapiens
  misc_feature (31)..(31): n is a, c, g, or t
  misc_feature (65)..(65): n is a, c, g, or t
  misc_feature (76)..(76): n is a, c, g, or t
  misc_feature (84)..(84): n is a, c, g, or t
  misc_feature (89)..(89): n is a, c, g, or t
  misc_feature (120)..(120): n is a, c, g, or t
  misc_feature (163)..(163): n is a, c, g, or t
ggggaaatggccggaaggaaggacaacgaanatttttcccccggcaggaggtaaaattcccaaanccatgagtggnaaaaaccngggcnactggtcgttacatgggccatatcattattngatccaaggtagggaaaagaacttttggcatttggccaatagnttaaatggcttaaatatcacctgttttctaattaatgttttaaaagtaaatgatgagtctagtacatttcttaatcattaaatatgttttataacatttgtacaagctgttttgaaacatttgttgactttttttaatcaaacgctctgtacttgttttttaaataattgcagaactataagttaaacctaaatattaataaaaatgaaactatatgaaactatatgaaactagatgaatcaaacttgtcttgcagatatagcttttgtgtttattttctgtaaactctgttttttggtgttatagagctatttttgtattcaatttatatgtgtacatgtgtctgcacatgcacacacacacacacacaaacctcaacaaattataatattagagaaacaggacttctggttcatgaaatattttacttaatagccaggaatgacttatgttaaaaattgtgccgggcttataagtatctctttgatctggccaacagctcttcctctcttttctaaaaacttcaaaatgccctcatttctattttttccctttcag

SEQ ID NO: 233913 - DNA, 403 bp, Homo Sapiens
actatatattcaaaagagtatgcaattgaaaacaatgtggttttttttcttgttgttccttagtagaatatcagagagcctaaactatgaacattggtgttactgtcctgatttctaccaccgtctgcatctttggcctgttttcattggaagtatcatagattgtcatttggacagaccattcctagcgaatactggccttttcgcggagcttggaaaaccctgtgggaaaatcagaaagctggtaagataagaggaagaagagatgtcacggtgtcagattatgtttgtattctgttctgtccaaagttctttacatcagtaaatgaaaaacaaaacaaatgatgcatagccacgccctgcagtgaaagatgcaagaacttgttcatattggtatgaatcg

SEQ ID NO: 233914 - DNA, 397 bp, Homo Sapiens
  misc_feature (29)..(29): n is a, c, g, or t
  misc_feature (41)..(41): n is a, c, g, or t
  misc_feature (65)..(65): n is a, c, g, or t
  misc_feature (144)..(144): n is a, c, g, or t
taaggtgcttgaccccgggagaaggaggncaccaggaatcnttttgaagctggggatgtggaggnttaccaggtgagatgagattgcaccactgcacaccagcctggagttgaccaggagtgaggactccggcttaaaaaaaantaatttaaaaattgaatttccacaacaacccaatgagttgtcaataaggaaacaaatacttgacaaaagttaccgccccctcaaccaccccccaccaaaaaaaataataataataattaccctacttgtttaaaatatattagtaaggaatctgggtaaaaatcaagcaaatatccccaatctgacaacactgtacacgagtaaaagacctatggaatgagattctcagataccaattacgaatcatttaaac

SEQ ID NO: 233915 - DNA, 531 bp, Homo Sapiens
  misc_feature (24)..(24): n is a, c, g, or t
  misc_feature (43)..(43): n is a, c, g, or t
  misc_feature (76)..(76): n is a, c, g, or t
  misc_feature (81)..(81): n is a, c, g, or t
  misc_feature (105)..(105): n is a, c, g, or t
  misc_feature (116)..(116): n is a, c, g, or t
  misc_feature (124)..(124): n is a, c, g, or t
  misc_feature (130)..(130): n is a, c, g, or t
  misc_feature (263)..(263): n is a, c, g, or t
agctgcctgaactctccccagcantgttggctcctgggtaagncctagatgggagccgttcatgcctgcaaaaaantgcantgcctcgttgacgggtgtgcatcntaagagtaacntgcttccnacaggntttgtggtggggagacgactggttaactttttggaaaggccaagctggcgtctttctaaatggcatgtgtggtggagtgttccaccacctagaaagactggagtaacgatggagtcactccagaaggtgagantctgcaactgagggcctgcgagctctgttacgaaggaaatcgaaagctgcaatgggcctcgttaggatgctgttagggtttaggagggtcctggcctcattgcacaccctatcctgggtgtcccagtcagagacacacccacaatcacgctccctggcatcatgagggtagagggaggagctctctggatcaactggagcaggaaggggcactgtggacaggtgtggctggtgttggcctgattctggcacattcccaactctggggc

SEQ ID NO: 233916 - DNA, 459 bp, Homo Sapiens
tagatattatgtagttaagagctcaaactctggagaatattgtgtttgaccacacatagtcagggagtttgatctaacctctcaatgcctcatttctcagctgaacatggaaatagtaataataaagttcacatacttctaagtgcttacctaagtttttgagacacatccacttaataaatggtagttacagtgatgataaagaattggggtgtataaaaatacctaaaactcaaaagctaacccatttaattattgtactactggacttttatgatagtaagtagaaatctgttgcttaaaaaagaagtttctttggtggtgtgcgtctatagtcccagctacttcggaggctgaggtgggagaatcacttgaacccaggagatcaaggctgcagtgagctatgattggccactgcactctagcctgggtgacagagcaaggccctgtctcaaaaaa

SEQ ID NO: 233917 - DNA, 490 bp, Homo Sapiens
gtgttcttgatagcatacagacttactcagaatcaacagttgctgcttaatttgtctattttgtaagcttaggctactattttattaaaactggacatagatacttggctgaatacaaatagttttgcagattgcaatataataaaggaaccagtaaaaactagtgggctatgcttaggtttttcttgaaacctaacattgctttaggctgggtgccgtggctcgtgcctgtaatcccaaagtgctgggagccaccgcgcccagcctggtttgaacattattaagctgttgaatataaacttgaaaataattttctatgatacagctttcaggtagaaaaatgaattttcgttgtgtttaacaatgttgtgtttaacagcttatacaaataacacagtataaatggtaattgccactgtcattttaaaaatcagaaaatagtaaataaaaggatgtggaagagtcaaaaaaaaaaaaaaaaaaaaaaaaa

SEQ ID NO: 233918 - DNA, 928 bp, Homo Sapiens
  misc_feature (13)..(13): n is a, c, g, or t
  misc_feature (154)..(154): n is a, c, g, or t
  misc_feature (161)..(161): n is a, c, g, or t
  misc_feature (198)..(198): n is a, c, g, or t
  misc_feature (310)..(310): n is a, c, g, or t
cagcggcattgtncacaggtggaaaccaggcgcccccctttgggaacaccgttttggggcaaaaagggcgggggggtgccccacactctggtgcggccgttcgtgtgagatttcgggcgcattgcggcgtttatttccagcgaggggtgcccanggtaatncgacccatgttccagtccgcgtgaacgacgcatgcangtaatacctccactaaggaatagctcggccgtaattaagacttttttttttttttacaaaaatcggaaggaaaaataactaccaccattctctctgtaccacagagcactanaatctaggaattgactttactgcagccattaacaccagcaccgatgccacttctgtatcatgaacttaacgtgacaaccatgaaaggtcctctgaaagccagatgatacatatggcaaaactcatgacagcatatggacaactgcacacaacttgtgcttcatgttgctgagtgcagatgtttctaattaccgaagttactgtctgcctcctagcagcaaaagagacttgaggaagtaaggttcataacatggaggttcactaaagtatagaaaggccattcaaaaggttgtgggcttccacaaaaatggtaagtattcattacatcctcctagccttctgtggatgccaagagtttgattaagttctaagagagaggagatcttctttaccttccagaggatgcaggcaaattggctttgtaaagcacccaatgtctgcttatgatcactatactctcatcaatacttcccaggtctccagaattaggacagtcatttgttgttaaattagctgtatatttctcccagcgatcatattctcatgaagcctgatcaacgactgacccatttggtcataggactatgctatccaagagaggacccagtgatgccaccac

SEQ ID NO: 233919 - DNA, 515 bp, Homo Sapiens
  misc_feature (33)..(33): n is a, c, g, or t
  misc_feature (256)..(256): n is a, c, g, or t
gcatgtgatatgctccacttgcattatccatgntctcttaccagcgcacaagtcagtgggaggatctaaccacgcctggtggtgaggaagctgaatttccaggcctgcgtcccatgtagcctctccatgaactgcagaaggcatgttctgcatggttaccagtaagtggctccctctcaccgtgttcattgtcaaatgagagcaaactttaggtgttggctccattgtacactctacttgctctgctcccctcccnccaaccagggttcatgtcagtgcacaccccatgtgccctggcgaagctggtgctgtgagtgatgtttcccatacaactcagggatgccaggtggcttaccctgagatagtcattttgggcacataacagtgtaggaatgaaacatggatttcattgatatttaaatctgtcaatttcattttttgttaatgttttcccctgatgactttttagcaatttaacaaataaaatggacaattgtcttaactgttttattagc

SEQ ID NO: 233920 - DNA, 603 bp, Homo Sapiens
tagtaaaaactttgaagatgagctgttcttacttttcatttctccacttatggagaagatggaataatgacaccaaaagtactttggtttttttcttttaaaaataatttgctttcttttgcatgccacaggacagatttctagtttcaaaacaagggtacaacaagaacaaaaaaatcccccccatccccaaccgtctttcaccaatacaagaaatccttctggaaatattagcaagcaactaaacaggtattgaaccactgaatctacaagttaatacataatctgttatggcagaataaccaagaatttttccccaaagaaagattttaattttttcaaatataaaagtgtctaagagaatcatatgtgaacaaacaaaaatctctgattccagatttttaggataaagatgagtaacacactggcagctgaagaaagctgaaactctgactaataaatagatccaaattaagaatttctacaacagtttttttttttagaaaacaggaccagaattctttttttttaaatgatgatcctgtggaatgcctttacttccatattcacctaatattgtaacagtaaaacagacacaagaat

SEQ ID NO: 233921 - DNA, 513 bp, Homo Sapiens
tccacctcagcacacagtgggagcttccttgttccttatttctcaagttgtcctgagcaattcttcctcttaaggaatccttagtgcctgtccttgaggtgcccagcactggctgtgggcagcagcccttcaccctggccatggcctgccccgcccttcatggctgccccttttatggaagtgttgctggtttccaaagctccatctgctttggtggcttttagcttacttgctttgatgcaaaattggtagcacataacacaaagctcctgtaagcaacctgctagcccctttctccaagtccagttatacataggaattggtaaaccaggctgttggaaacgttgacttctttttctgtagtttttttctggggtatctagagagaaggccttatttttctttccacacataaccacaaaaaagttaaaagcactttttaaaagacactttcccctcaattacctgtggtaagaaatgctgttcttatattacattccttcctcacccatt

SEQ ID NO: 233922 - DNA, 635 bp, Homo Sapiens
agaaaaacagccagtgattccaatctggataggtttctgtcagatttagaggaattgattcttccatacaaaaactccatttggcagatgcacaagatgttccaaatacttctgctagctaaaatgaaatgtagtttgctttcttgtgatttgaagagaagcagcagtctttacttttccagccaaatccagtagcagaatcatcttccacaacaaggaattaaagtaattaaagtgcaagttcaatgatcgttttcacttactgcttttagtaaatgtgactcgctgtaattcgccataactggaggcctaggccttgttgaaggcttcatcaggaaatgtgatgcagagattgtgctgctgtgcttcatattgttgccttatgggattatacttgaaatgcattgtgctgatgttcttgacagggcggagggatttctctttcctgagctcaccaaacttattccagtgttgatcgcaagctgttgatgcacaggcgtcttgtggcaagcccagcttcagtttatgttagacaatcagtacacatgctggtgtgttttccaatggccagtgataagaaattaaataagtatttgtgagatttgctattttttaataaagtaattgttttaaat

SEQ ID NO: 233923 - DNA, 658 bp, Homo Sapiens
  misc_feature (224)..(224): n is a, c, g, or t
cttcggagcaagttcggttccctgtacgagaacgactgcattttggccaagtttgaatgtgcctggaacgggagcgacagcgtcatcatgaccggggcttacaacaattttttccgcatgttcgatcggaacaccaagcgggacgtgaccctggaggcctcgagggaaagcagcaagccccgggctgtgctcaacccacggcgcgtgtgcgtggggggcaagcnccggcgtgatgacatcagtgtggacagcttggacttcaccaagaagatcctgcacacggcctggcacccggctgagaacatcattgccattgccgccaccaacaacctgtacatcttccaggacaaggtaaactctgacatgcactaggtatgtgcagatcccggcccctgccacccagcctcatgcaagtcatccccgacatgaccttcacgaccgcaatgcaaggaggggaagaaagtcacagcactgatgaggacagctgcagaggtggcagtgtgtggacacaggaagtttgggccccctccctgccccagctttcctaggccagaattgtgtttggcagtaattgtctgtttaaaaaaataaaaaggagaggaagcgttccccgccgcaaatcataaaaaaaaaaaaaaaaaaaaaaaaaaaaaaacgg

SEQ ID NO: 233924 - DNA, 573 bp, Homo Sapiens
gccgatcctctgctgcgatgaggtgcaagccaggacatcatgagggagggagggcagtccccagaagagagagcacagtgccaggtgcccaggtggggaccacgggacactggaactgccttggtgtgtttatttccaaatagtgtctggcattaccactgagatgaggagacttttttgtttttcattttttgtttttttttcccggggtaggggtgcatattggatttcttcaggagattcagcctcttgaaaaatatgaaatatagacaagtatatatacataaagatatatttgagtattttaaactttatatagccaagtatcttaaactctgcacacttgaatttttaatcctcgtgtatatccattatgattatttctattagttccagtttgaggttggtgatgatattgtcatagaagctttgtcaggcttcacattgtagcagctggtcttgaaggtggggcatatccttgttcaatgtgactactttagttgcctgtccaatatgaagtagaaaagcagatttctggattacagtatttgtcaacatagaatttgccgattt

SEQ ID NO: 233925 - DNA, 392 bp, Homo Sapiens
aaaatgaataaatttagccactaaaagtagtatttcctactctttaagtcttaaagtctggacaatatgttataatgtctttcaaatcaattagaagggtcccatttagcaatattaggcataaaacagctttgtaccacccactgtatgacaccaagcacttaaggcaggaatgaggaattaagacctcacttggcaccaaaatcagatcaaggtctctttgatatctgtcaacttaagattgttctgtttatttataataagaatatgatgggttgaaatactatctactaaaggaaaccaattttttttttttttttacagtgcggtttttgctatttttcattttgactagggtataaaacttaccatgatgcgtagtcacctgcaaa

SEQ ID NO: 233926 - DNA, 455 bp, Homo Sapiens
agacattttaataaccttggctgctaaggacaacattgatagaagccgtctctggctatagataagtagatctaatactagtttggatatctttagggtttagaatctaacctcaagaataagaaatacaagtacgaattggtgatgaagatgtattcgtattgtttgggattgggaggctttgcttattttttaaaaactattgaggtaaagggttaagctgtaacatacttaattgatttcttaccgtttttggctctgttttgctatatcccctaatttgttggttgtgctaatctttgtagaaagaggtcttgtatttgctgcatcgtaatgacatgagtactactttagttggtttaagttcaaatgaatgaaacaaatatttttcctttagttgattttaccctgatttcaccgagtgtttcgatgagtaaatatacagcttaaacata

SEQ ID NO: 233927 - DNA, 449 bp, Homo Sapiens
cttctaaaatatgtgaagcagttatcagtgccatttactccttcaaataacatttgtacaaagttcaccttggcaatatttgcttcagaccatatccccttcaacactgtaattagcttttgatggtcagctttctagtagctgtctggctaaggataaagcctgactgatactcaacagaatctttagtaggtggttggaaaacaatgcctctaaaatttaactcacctttcttctggtaaaaatataaaatgcgagagtccaggctaggaagaggatgtttatacagtacaccttaatagtaaacattagtgtcatcctcaggccaattgcaaagcgtggcctaatagcattcccactgaggacaggaagccctaagtaaataaagctttgagattttaaaaagagtttcagaagctactcaggaagaattagatttaggttaatcg

SEQ ID NO: 233928 - DNA, 616 bp, Homo Sapiens
  misc_feature (2)..(23): n is a, c, g, or t
tnnnnnnnnnnnnnnnnnnnnnnttttgccagcaaacattttattggaaacaaagaaaattagaagataatgaagcaacatctttaaagtactggaagataaacattgtcagctgggaattgtagactcagagaaactatctttcaagatgtaggtgaaataaagattttgttcaggcacttagaacctgaaagaaatcatcaccagtaaaacaacactataaaaaatgttaaagaaaatgtttcaggcagaagtaaaataatatcaaaaggaaatttggatctacatagaagaatgaaaagcactggaaatggtatcaacatggttaaatatataagatccttttatttctgtttgaattcaattgattgtttaaacaaggggtcagcaagctatagcttcatgggtggactgcctgtttatgtgaacaaatttttactgagacacattcatgctcatttgtttatgtattatcaatgggtgctatagaattacaaaagcagaattaagtagttgtaacagagcctaatggcacacaagcctaaaatatttagcttttaagcaaagcatgtccggttctggtggctcatgcctgtaatcagtacccacgcgtccg

SEQ ID NO: 233929 - DNA, 1000 bp, Homo Sapiens
  misc_feature (357)..(357): n is a, c, g, or t
ccgcggacggggtgtgtaaaaagaagggggggggcgcagggggcccccagaggtttataaaaggtggggccccccccaattgtggggggcccccctttttttatccacaaaaaaaactggggtgttacggcaataagaacttggggcccccctcggagagggattttctttagaaagggggcccgccccccaagagagatgagtggataggagaggatgggcgaatagataagggggatgaggggagggagggagattaggggcggtgatggggtgggggatggtgggcgttggggggagaaatttggcaatattcatttttttccaagaaagggcttgatttagccagtttaaacnacaggttaggggggttccaaggttggatttggccttccccagaggctggggccaaccatgggcggggtccctagatgcttttccctggggatcttccactccttggaaactcaaacgtgtgggttaagcaaaagcatttccacggtagcctcacgttctggagtatccacatcggtactgctgagaccacccgtgccactgatggggacagccgagaagtctttagttcatgtcttttgcccagcagtgtcctcttcccactctttttctgttaagctctaaaatctcttccagcctctgagtgagggaaggttggtaagcacacttcatgccctcatcacattgttctcttttgtgtatacctcgttctccatctcgcccctccctgtccaagctccacaatttaaaaacactgagtccatcaccaggtctgtttgtctcagtggtcaaggtggactcagcccctgccgggatggacctcactgtgggagagtgggactggcggttataacacacccaggctttgctttcatgaagggcctgcagtcagtctcaggtccttaccagtgccatggcgaacttggaccatctggtctctcctcttccctttcaatgacacagagcagctggagtttcctaaaac

SEQ ID NO: 233930 - DNA, 1000 bp, Homo Sapiens
  misc_feature (259)..(259): n is a, c, g, or t
  misc_feature (266)..(266): n is a, c, g, or t
  misc_feature (276)..(276): n is a, c, g, or t
  misc_feature (368)..(368): n is a, c, g, or t
tcccaaaaagtttcccccaagaagaaagcgagttttttccccagtccgggggggtttgtaaaaaggcgccggcccagggccctaagttttatataccggccccccttttaggggggccccctttgtcccaagaaaaggtgggtttcgggttagctttgggccccctggagggataatttagagccggccgccctttttttttttttgggggatgagtctccactctgtgttccaggctggggtgcagtggggtaatcantgctcantacaaacctntgcttttggggtcaaatgatcttcctgctttagcttccggagtagctgggatacaggtgtccacacccacatccaggctaattttgtatttntagtagagatggggtttcacccatgttgttcatgctggtcttgaacttctgacctcaggtgatccacccgcctcagcctcccaaagtgctgggattacaggtgtgagccaccatgcccagccagcagccccatcttcaacttgaagccaacattgtgttcctgcaaatatttctatagattaattcctcaatttgtgagacgtacttgtgggtgggctgtgccttcccgccggaggtactttgcacttgaccagcattttcttgctttcaggttgttggtgtggatcaaaagatgaggaggcaccttgtaagcagagaatttctgtacaaagagagtctcagagcaggactcctagggcaggtgtttctcctaagaaggctcacccctgtgaaatgtgtggcctcatcttggaggatgtttttcactttgctgaccaccaggaaactcatcacaagcagaagctgaacaggagtggagcatgtggaaaaaacttggatgacactgcataccttcatcagcaccagaagcagcatattggagagaaattctacagaaagagtgtcagagaagcatcgtttgtaaagaaacgtaagctcagggtgtcacaggagtcatttgtcttccgcgagtt

SEQ ID NO: 233931 - DNA, 685 bp, Homo Sapiens
  misc_feature (5)..(46): n is a, c, g, or t
  misc_feature (48)..(48): n is a, c, g, or t
ttttnnnnnnnnnnnnnnnnnnnnnnnnnnnnnnnnnnnnnnnnnngngatcttaattatacttttattaaaatatacatacttatgcacagagtgaatagaaaaaatattggaaggaaaccaaaatattgacagcagttatctctgatagatagaatgacagatgatgtttattttcttcttacactttttcctagattagttctgcattttccggcattcatatgtattgtttcccagccatcctgtcaagcgctgggattgttctgatctctgggagcctccagggctgactccagtatggctaatctaaagtgagcttgtaatctccaaaatcctgatggtggcttttctattaggcagactaatagattcagatataggtcccaacagtttgtgttttccttactgtcccagttttatatcattattcttagtactaaacagagtgacaacagggagtgacatttgttgaggacctacgatgtgtcagggtccatgctggggacttcacatgagggctccatgaagcccccttggacactcaggtccttgtgtcatccccacttcccgcccgccactgacgctggggtgaacctgcaactcactgtgactaagagaatgcagtggaaaccatgctctacccagtccaggctaaagctttaaggaggcctggaagttacca

SEQ ID NO: 233932 - DNA, 938 bp, Homo Sapiens
cggcggggttagtatgtattcgcgggattggaagggaaaggaggaagaaagggggggagaaagggggggataaggggggggagtattggggtgagttgggaggttggggcggggataagggggggagataaagaatgggggaaaataagggtttttaaaggggatagacaggaggaaataaaaaagaattgggggggtggggtgggtaaaaatgggtttgggggggggcgtaacaggaggggttcaaagtgccgggcagatttgaaagaggaacagggctggggggaggtttatcccgtctgaattggagggcaatgtcagggcatttgcagaaggtggaaaggaccaagcctcagcaccccagggctgcggggctcttgttggccgcacgtggcagtgcagctggagaggaagcctggggcacgtcctgtgcggtgccaccaaggccccacccctgccccttttccttccaggttctgttactcacagaagtgtttctggtgggctctgcgggagaagacactaagggccccacaggcttgtttcatggtgttgcaagccaagctggcccctgcctgttcctgtagctctggggccaggtcagccgtggccccacctaccagaactgtgctctgctggcagctgtgcttttgccaaacccagggcctcagcgaccatgacttctgctaaaaagcaatcatgagtgcgtggctggggacagacctctctgaagtgtctcctgttgtgaggggctcactttggagccactgaagagccgactgtgccacccacttgcgagcctcagtcccttccaagctgcactggtcattgggaattgtgtaaacacctcgggataagctgaggtgactaaatgatatatttatattataagattaaactgactttcttggccttaaaaaaaaaaaaaaagggcggaa

SEQ ID NO: 233933 - DNA, 1000 bp, Homo Sapiens
  misc_feature (308)..(308): n is a, c, g, or t
  misc_feature (359)..(359): n is a, c, g, or t
gagagtagagaggtttatttccccagagtttccagggagggtgtttataaaaagaagaccgcaccaagggcgcccatgggttaataaatatggggccttcccctatataggggccccccttttgttgcacaaaaaaaactctgggttacgcggtaaactctgtggcccccctcggagggaatattttaggaggcggcccgcccttttttttttttttttaattttgaagttttaagggttaggttttttgagaccagagttccagttctgttgccaggatggagtgcagtggtttgagcatagctcantggctgtcttgaacttccagggttccagtgatcctcccaccttcagtttcntgaatagctagacccacaggcatgcaccatcatggcgtggctaatttttaaatattttgtagaaactgggtctccctttgttatccaggctggtctccaactcctgggctcaagtgatcctcctcccttggcttcccaaagtgttgagattacaggcatgagccactgtgccaggccaacattgtttttaatatatgacttgtaaggcaagttggggggcattaattccttattaagatgtactgagttgaataaaagcccctccaaccatcaaccccccaaaatatatgtccaagtactaagctccagaatttgtgaatgcaaactaatttggataaagagtatttgcatgtaattaaggaaagattcttgagattagatcactataaattacccaggtggcctttaaatccaatgaccagtgtccttctaagagacagaagaggagacacagacacagaggaaaaggtcacgtggagatggaggcagagaatgtagtgatgtggccacaagcccagggacacctggagccaccaggagctggaagaggcaggaaggatcctctcctagaacctccagggggagcgcacccctgcccacaccttgatctcagattcctggtctccaatactggaaaagag

SEQ ID NO: 233934 - DNA, 837 bp, Homo Sapiens
cccccccccgctctgggcgggggaacgggaccgggcgcggccacccggggctgaagttcccgggcccggggggcgttttcagcggctgggccccccgggggcggccggggcggggccccggggcaactgtgctgcctgcgggaggatggtgagcggtgcgcccgggcgccaggcaacgccagcttcagcaagaggatccagaagagcatctcccagaagaaggtgaagatcgagctggataagagcgcaaggcatctttacatatgtgattatcataaaaacttaattcagagtgttcgaaacagaagaaagagaaaagggagtgatgatgatggaggtgattcacctgttcaagatattgataccccagaggttgatttataccaattacaagtaaatacacttaggagatacaaaagacacttcaagctaccaaccagaccaggacttaataaagcacaacttgttgagatagttggttgccactttaggtctattccagtgaatgaaaaagacaccttaacatatttcatctactcagtgaagaatgacaagaacaaatcagatctcaaggttgatagtggtgttcactaggagacgtggaattgagactaataacttggatgttaacactgtttactgttttttcacatgtagaaatgttctttgtgtattttttctacagaggattttctctgattttattttctttgtttctgactctaataattagttggaaactcatataaaatgagctttcctaaattaaatctattttaaataaaggttattactattaaaaaaaaaaaaaaagggcggcgctcgcgactaaactag

SEQ ID NO: 233935 - DNA, 1000 bp, Homo Sapiens
  misc_feature (177)..(177): n is a, c, g, or t
tttcaggaaatcccaaggaaagccagggtgttgttgggtagcctgaaaatctagagtgccgtggatcagtcccattgtcgtagggtcagttacggagggatcagggaatctatggctgccagcttatgcaaatgacagcttgggggacataggttagaaaggcatgcattcttctantagggtatgactcatctgctctcccagcagggaattaataatgagacaactactacctttatatgtctgtatcattcaatgactatatttctgtaacatagcctagagctaggcctaatttctcaattcataaagttatatctttaaatttaaaaattccattgcacttaaaatatatataccatgaggacttcccaagggaaaagaaaaaagtttttcatggaaatcttttctatgtcttaagtgccaatgatcacaaaaacagatatctgcattcccaagtaggttttctgccttgatgtcagtgccctgccagtgtttggacaatgaaaactcttctcctcaacctagaaatttgaaaaagtttttcccagtagtgagtatttttatgtcccaggatatgctgaaccaatcagtactgaatttaaaaagttctttatccaaaaagtgaagcataagagatgacgagtcatctcctcaggtcttaattctactatttccaggagctcaagaggtctgtatgaatcatgtcaccaaacatgactttcgctcaaatgctttctctaaaggctcttcctatgcatagaattgcatatacactgtggtgatgcaggaacttgtctttccagtggactgaaggatacttggctctgtttgccttcagttcactcaagcctcagtctctcatacccatttccccctgtacaatgattgcagcaacaggccttcctcctccctgctattagatacctgatgcatacccagttgtgatttccaggtgaagactttctcagtcactggctttatagcgtttttctccact

SEQ ID NO: 233936 - DNA, 957 bp, Homo Sapiens
  misc_feature (13)..(21): n is a, c, g, or t
  misc_feature (23)..(29): n is a, c, g, or t
  misc_feature (79)..(79): n is a, c, g, or t
  misc_feature (236)..(236): n is a, c, g, or t
ggcggcctttttnnnnnnnnntnnnnnnncagttttttgaaccggatttattttactcaggtaaataaaaagataatgnctgaaaggcctgcatcccttagaaccaaaccaaaacccatggaaaggaaaccctctaatattttgtggttctttacgtcacaattctatattacactggtgtcaagaaaccagcagacagatgccagtagacaaatggttccattgttatcccaagnccatgcacgccttaataaactttcttagacttttaactcttaattaatcaggtgctattctaaattagggcatttcaagggtttttactgtatcagaagaatatgaacatttatttttgctttcaaagaaaaagcaaaccctaaattctcctctccattcttaaaattcactaacacaacctgtcagaaatagactacacacctgaagtacagaagacacatagcctacaggtcttgtgtattttagagaactttggtgtttatattaccactcgcagcccctttctcagttggccttgaggcttgcccattagctggtaaacgtttgaaagggtcagtgtgtccagaactggaatttccactttggaaaaagcacagaggtacctgacatatgttcctggagggcctgcactataccttcagacctgcaaaattcctacttctgcttgatggcaggcaggtcaaagttgtaaaacctccagtgggtactcctgcctgcagaatagaacacagtgtccaaagacccctggtttctgactcctagactaaagagtgtccaaaacatgaatataactttaataatactcacgaaaatactaccttggggaaaataaggaaagaagaatctaacactagaggccccagtctcgacccagaatttggcactgcttagacttaaatcatgttagggtggaaatagtttcttcctctttgatgagga

SEQ ID NO: 233937 - DNA, 1000 bp, Homo Sapiens
  misc_feature (447)..(447): n is a, c, g, or t
gcgagaggggcgaacagaatatgtgaaccgcccctttgtagcgccggaaaagaaattgtttgtatatcgcgcaggagagccgtaaaaattcttggggaagggaggggtgccccaatatatgtgccccccccccccaaaaaaatagagttttccctttcaaaaggaaccccacaggtggcacgtttttccaccggcaccgggggggggtaaaaaagggcggccgggggcctaaggtttaaaatagccgcccccctttaagggggccccttttgtcaaaaaaaaactgggtgggggtataaaagtggcgccccccggagggggttttttagagcgggccccccccatagggtgatgagagtgtggagtgtgatgtggacaggcggagggttgatggggaggtggaggaaagcgtgggggacggggaagtaggggtgaggggggattagntggggtgttcattcaacaagtctttattgagcacctactctgtgcccagcactgcactaggtgccatgagaatacaagagtagtataagatgttatccgccctccaggagcttacaaaactagaggcagaaataagatgtacgtgtgactcaggcagcatgtgacacacacaaagtgggcagctctgagacaatggtggtcaagtgaccactgaggcccagagccgttggaacagtctcttagaacagggtggaggacttaaaacttggatgaacaggggctggcagagcacttggaatgggtaaggacaagactgggagatcaatttggctggagcaggggagcttgtgttaaactgtgatgatgaggggcacctggacagaggttgggtccgtgggcaatgagaagacatgttactccctctcttgacatgaagacctggtgggcttgtggcctcctgctgccttcctttccctgtcttcccatctccactctctcctaggaaagtggaacctggatgctggtagggccagagacagaggcttaacaccct

SEQ ID NO: 233938 - DNA, 966 bp, Homo Sapiens
aaaaaaaggttccctttaaaaacagggggttccaaaattttacccgggcctccagaatctcccgaagggaagctggttaaaattacagaaatgctgggcttcctccccccagagtttgctccaaatttgcaaggcccattctgatgtttggggcgggcaccaacactttgagaaccactactttaagatctagtctctagaattcaaactaataaaccaatgcccatatgcctttgctttttctaataataaataaataaaagatcttttcaggtagctgcatcaaactttaagcctttagacttttttttttttttttttttttgaggcagagttttgctcttattgcctaggctggagtgcaatggcgtcatctcagctcaccacaacctccgcctcccgggttcaagcaattctcctgcctcagcctcccgagtagctggcattacaggcatgtgccaccacgtccggctaattttttgtatttttagtagagatggggtttctccacgttggtcaggctggtctcgaactcctgacctcaggtgatccgcccacctcggcttcccaaagtgctgggattaaagccaccacacccggccacctttagactcttgaaatgttacgctgactcacaattattcccatgagttcaaaagacagaactaaaggacagtcctgaataatctatgactacaggaaaacatttatttacatgccctctacaaaatggatttacaaaacatagtaactattagggtacatgaccttgctcctatcttccccattgtgcttcttctctatagaaaatccaatatgaaatgacaaagagtactgtactcagaataagaacttcatctatcataaatgtacacataaatatcagtgaattgtcatactcaagactcagattcaggaacttcttcatcagggcagcagtaatattccacaaaacatatttgtcca

SEQ ID NO: 233939 - DNA, 597 bp, Homo Sapiens
ctttttttttttttttaaaaaaaaattttatttttttttacaacaggtaaaaaaacatacaacagaaacgcttttataagatacaattagtaatacaaatataaaatcttctaaacaatcactggtattgttctactactaactataacacagtggcattaacaatttgtcccactttttatactcattctgcttattagtttaaaactgactggtcacagactgattttgggaaccagctggcaaaatcacaacttcattttggtaatgaataactatagattttcaagagcttagaaagattttttggaatataatttcctaagtatgaaatatgaaagttaatatgataaatgaatgacaaattagtatactatttaaattttagttaaatattctggaaaaactgtttcacttgcttggtgataccacagagcacccacaaagttagcttttaaatttggaagtttaaaatcatgaaggaaatattttaaatagaaaagctcacattcttccatataaatggtttaaaaaatataaaacttattggaactaattctattcagaatttgttttgtttgctagcaggtgtttagg

SEQ ID NO: 233940 - DNA, 1000 bp, Homo Sapiens
gggggtaagacggtgtgggggaaaataaagggggaaaggacagagaagcagtggggtttatatatataggcggcgggggacgatagaggggagggaggggggggtggtttgtagaatagggggaaagcggggtaaggcgggaaatggagacgggaggaaagggggggggggaagaagaagggggaaacgggggggggatgagggatagaaggggggggggggtgccattggttgcaggggggggagcccaggggggggcacttccccgtgtggaaaatttaggggagattacaaatttaatagggggggtggggatagagaccccagccgaaaccattatcacccgcacagcacttcaaaaataatacaattcctttaaaaatgaaataatattctgttattatacttatttttaattcaaagtttttggctacaagtctgctacactgagaccaatttatttctttcccaaatggtgcccaacagactgccaataattaaaactaatttactagaaaatactaagcagcaataaaactgaaggtgtcactgggatatgccagcaccccttaaatttgttgtttaaattagtgttactaaaaactatggcattaatatacaaggtatattgtatgttaatattcaacaagtttcacataatgaagtttgttattaaagtgccttaattttccctattaaatatccaatctgtaggcattcttttcagttaaatacagtgagccagctgctttgatttttccatgtgatgtcctgttacagtattactgtgctaaacacatatcatgggtacattgtaagcagaagggaatggggtgtagacttcctctgaagctagatccacctatctcctctggataattcaggccaagaacctgctcagccatctcagtccactaaacagtccttgcatcatttctttctgcagttatgaagttacaaaatgactagaatggacttcaacagtcctctaagaggacag

SEQ ID NO: 233941 - DNA, 1000 bp, Homo Sapiens
  misc_feature (318)..(319): n is a, c, g, or t
  misc_feature (347)..(347): n is a, c, g, or t
  misc_feature (375)..(375): n is a, c, g, or t
  misc_feature (379)..(379): n is a, c, g, or t
  misc_feature (385)..(385): n is a, c, g, or t
cccctccccgggggttcacaaggggattttttcccggccccgttttcccttaagtagacgggttgccccaccaacggccggggataaaatttttggggtttttaagtagggagccagggttttccacccatgttgtgcctggggtggttcttagattttcttgaccctggtgatacaaccctccttggggcctcccaaaagttgttgggaattacagggcgtgaggccaccgcggccaagtcatttttttttttaagaggccaggggttcttcgttatcaggggtgggtctcgaccttccagtcccctaccaaaattnntccccttccccccaaccccctgcctcangtttcccaaaatgctaaggacgcataanccanccgcgncccggccccaagttttttaaagacccaggacagtttgtggggaggggacaattaaggaggttccttcatgttataaggtagcagttggatagtatttactaggcctgattcaatacttttattttacccaataggaaagtaatggcctcagtgcttgaactcggccacaaatttctgataggtttggagaacagagtgctcagttcttccgtagaaatggtgggtggctctgaaaagagccttttgtcttgtaagtttacatttttaaagttcagcccttacttgcccttagctttgtggtggctctcagtcttcttggggagcagtacggcctggatgttaggcagaacaccgccctgagcgatggtaactttaccaagcagcttgttgagctcctcgtcgttgcggatggccagctgcaagtggcgcgggatgatgcgggtctttttgttgtcgcgggctgcgttgcccgccagctccaggatctcggcagttaggtactccagcaccgccgccaggtaaaccggcgcgccggccccgacccgctcagcgtagttgcccttgcggagcaggcggtgcactcgtcctacaggaaattggagcccagctctagag

SEQ ID NO: 233942 - DNA, 1000 bp, Homo Sapiens
  misc_feature (114)..(114): n is a, c, g, or t
  misc_feature (117)..(117): n is a, c, g, or t
  misc_feature (119)..(119): n is a, c, g, or t
  misc_feature (121)..(123): n is a, c, g, or t
  misc_feature (147)..(147): n is a, c, g, or t
  misc_feature (163)..(163): n is a, c, g, or t
  misc_feature (206)..(206): n is a, c, g, or t
  misc_feature (211)..(211): n is a, c, g, or t
  misc_feature (282)..(282): n is a, c, g, or t
ggcagaaaaaggcgggaacctgggaaggcggaactttcaaggaagggaatttgccccccttgcccccccaaaattgggggaacaaacaagaatttttcaaaaaaaaaaattaanaananannntttggtccatgtcaaagtatgctncaaatccccatgggtnctaatacagtcggaaaatgaaaatatttaaggagccaaaaccnctaanctattaaaaacttaggtactatagctgaaagaggacttagagaattattttctcacataaaacatttattnttgaaagagctggaaaattcacgactaatggggtctgttttacaaatgaggtattgacaaagaccaatatcatacttgtaagatttctctccctggtgtgaattttctggagcattatacatgaattaatgtgaggttaccccattaaagttatagaatttctctttagtgtgtgctctcactggttttagaaagaatgacttggcaactgaaggcttttgagtatgactgacattcgtgggatttctgtcctgtgtgcatcctcagatggttccggaaggaggagtgccacttgaaggacatcccacattgtttacatttgtgaggtttctctccagtgtgcatcctcacatgattatgtaaggttgaggaccaagtgaaggtttttccacattgtttacactcataaggcttctctccagtgtgcatcctcaaatgaccttggaatgctctggaagaggtaaaggccttcccacagtgttcacatttatggagctgctcttgcgtgtgaattctcacatgttctctaaacgttgaggaccaagtgaaggtttttccacattgtttacactcataaggcttctctccagtgtgcgtcctcaaatgacctcggaatgatctggaagaggtaaaagccttcccacattgttcacatttatagagctgctcttgcgtgtgaattctcacatgttctctaaacgttgaggaccaagtgaag

SEQ ID NO: 233943 - DNA, 1000 bp, Homo Sapiens
ggtcccctcccacagagattccccaggttaggcggtttgcccagtgccagagggtttatatgaggcggcccatgtgcctaacttttatatccgtcccccctatagggggccccttttttccaaagaaaaacgggttaccgcctaactttgggcccctgggaggggattttttaaaggggcccgttcgcatatgattggcccttccatggtaggccaatgaggcccatctattgacttctgtggtagaaacctccgatttcgagccccccaaccttcccataccctaacccgctttttaagccaggattgttcctccattcactgctttccttgagatttgatggagcccctgaatgtggacctgacagaattccagaccaacctggtgccttacccccgcatccacttccctctggccacatatgcccctgtcatctctgctgagaaagcctaccatgaacagcttactgtagcagagatcaccaatgcttgctttgagccagccaaccagatggtgaaatgtgaccctcgccatggtaaatacatggcttgctgcctgttataccgtggtgacgtggttcccaaagatgtcaatgctgccattgccaccatcaaaaccaagcgtaccatccagtttgtggattggtgccccactggcttcaaggttggcattaattaccagcctcccactgtggtgcctggcggagacctggccaaggtacagagagctgtgtgcatgctgagcaataccacagctgttgctgaggcctgggctcgcctggaccacaagtttgacctgatgtatgccaagcgtgcctttgttcactggtacgtgggtgaggggatggaggaaggcgagttttcagaggcccgtgaggacatggctgcccttgagaaggattatgaggaggttggagcagatagtgctgacggagaggatgagggtgaagagtattaacctgtgtgctgtacttttacactcctttgtcttggaactgtc

SEQ ID NO: 233944 - DNA, 978 bp, Homo Sapiens
  misc_feature (236)..(236): n is a, c, g, or t
caccgggagccccccctttaaagagtttttataggaaaattcccgtttaggaaaaaaaaaaaaaggaaaaggaattttaacccccacccaccccaattaatcccaggccgtgggcgagcggtaaggggtgagtgaaacacacttgggtgctttgcagggcctccccattccgttgcctgggctggatcttttttctagaagtaagagtgagaagatcgaaaatctttttgtacatntttcttttcctcttttttttggcctttcctttctcttttctgtggtcttgggtgctcctggccccacgggcaggtagatggtcagttggccagcaccacgggctggaactgctggctgggatactgcatggtgttcaggttgtagctgaggccttccacaaagggtgtcttctccaggaagaggctgttggcaccacctccaaatacctgggccatgtcaaagctgctgctgttgcaggtgccagccccactgcctccaaacgggcctggggtgccgctgccctggccatcggccgcatcaaagaagaggctgggtgagccaccaccgttgtacacgaactccttggcattgggtgagagctgggactgaggggccgggttggccgtgatgaagttcagtgaatgcatagacagagagaggctcttgtgcttcagcaggctgttggtgggtgagcgggccatgcgaggctgctgtggtggctgctggccacccgccccactgctggctacacccccaccacttgctgccccgccccccttcttcatcttagtggagccaaatttggtggcagcgaaggaggcggtggtgaaggtgatgggctgagcggagcggggaatgaaggtagggctgggtgactggccaaaggatggcgatggggagttggacagggagctgtcctggctgccaatgggcacgaacacctgggcgtcagggttgaagctgctcttgatctccttgtcc

SEQ ID NO: 233945 - DNA, 745 bp, Homo Sapiens
  misc_feature (1)..(44): n is a, c, g, or t
  misc_feature (67)..(67): n is a, c, g, or t
nnnnnnnnnnnnnnnnnnnnnnnnnnnnnnnnnnnnnnnnnnnnttccaacaatatttgtaccgttnttatttgtaaaaataaccatctgaatgcatttccatagtatattacagttaagtacttcattacgttattagagcattcagtagttgcaaaagtattaaactgtgcttgagaagattcagattgtttcaaagtcattcactgaactaaaagtcattttccccatttttacagtcatgacatttaccagagtcattcaactccaatttacataagaaaacattatagacaaaatcccactgaaatcatcaaacaatattttatgctgttacaaatatgttatgcaaaatataacactggcaccagatttgtatcatcgtgctttacaaagatatattgcacatgctagagcataaaatatgtagacaaaactaccaaataaaagatatttgcattgaatttttagatcacataagaaacgcatagaattacattttatacaaacactcagattgtcactatcttaaaatgcttttcccctataatactgacctatggtttatagtttcgtaagacgaaagcattttagcactgcaaaatcaaacaattcctatagaaaacttaagcattttcatattcatttcaatgcaagtacaaggggaaataggaaaaaagacactttatacattcaaagaaaagttgaaatgaaaactcactggtatcatattgctctgataaca

SEQ ID NO: 233946 - DNA, 984 bp, Homo Sapiens
  misc_feature (25)..(25): n is a, c, g, or t
ttttcggtttttttgttaaggaagntttgggggttcttggcaaattgttggccccagggccttggttttggaactttcttggccttccaaggcaatccctccttgcccttaggcttcccaaaggtggctagggattatagggtgtgaggccactgcactgggcccataaagcattttttctttctttctttcttttttttttttttgacacaggggtctcactctgttgtccagactggagtggagtggtgtgatcttggctcactgcaaccttcacctccaggatgcacataattctcgtgctttagcttcctgagtagctggggctataggcacatgccaccacgcctggataatttttatttttatttttggtagagacggggtttcaccatgttggccaggctggtctcaaacgtctgacctcaagtgttttgcccgcctcagcctcccaaagtgctgggattacaggcgtgagccactgtgccaggccttttttttttttttttttttttttttgaggcagggtctggctctgttgcccaggatggaatacagtggcacaatctcagctcactgcaacctctacctccggggcccaaaccatcctcccacctcagcctcacaagtagctgggactacaggcacacaacatcacacctggctaatttttttgatttttggtagagacggagttttcatcatgttgcccaggctggtctcaaactcctgagctcaagtcatccacctgccttggcctcctaaagtcctgggattacaggcgtgagccatggtgcccggccctagcatttttttaatgatctcttatcccacaagaatggtcaagtcatttagcattaaatgaatagagtacacagtggtttacaatattataaacattataagcgccccataaaatattattgttataaatactcaactgctttattctcagtgattattccctttatttttacataatgt

SEQ ID NO: 233947 - DNA, 787 bp, Homo Sapiens
ttttttttttttttttcatgggtaaaggaggtttattctagaaatgcaaggttggttcaatattaagaaatcattttatataatagtaatagagttaaaaaaaaactgtgtgatttgcagatactggaaaagctttttacagaacacagtccatctttgaaaataatgaatttattaataatacctacgcaaaaaatttagggatgtacagcagagggacacctagaattctgagataatcactaaaaagtttttaaatacatggttcctgtatttagtgccctactataaaatatataagccttactctcctatcatgggtagagatcgggctacattatcaacttgttgacagcttctaaacattctttcctacaggttttagaactgaaaagaataagcaagttacttattagtcttcacaatgtttactatgtgttatctataagaaaaaatatcagtcattatctgtcaataggctatacatgaagtatatttttctatcttaaaaaaacagccgggcatggtggctcatgcctgtaatccctgaactttgggaggccaaggtgggcagatcacaaggtcaggagttcgagaccagcctggccaacatggtgaaaccccgtctctactaaaaatacaaaaattagctgggaatggtggcaagtgcctgtaatcccagctactcgggagactgagacaggagaatcacttgaacctgggaggcggaggttgcagtgagccgagatcgtgccattgcactccagcctgggcgacaggagcaaga

SEQ ID NO: 233948 - DNA, 1000 bp, Homo Sapiens
  misc_feature (7)..(7): n is a, c, g, or t
  misc_feature (19)..(20): n is a, c, g, or t
  misc_feature (34)..(35): n is a, c, g, or t
  misc_feature (38)..(38): n is a, c, g, or t
  misc_feature (65)..(66): n is a, c, g, or t
  misc_feature (80)..(80): n is a, c, g, or t
  misc_feature (83)..(83): n is a, c, g, or t
  misc_feature (94)..(94): n is a, c, g, or t
  misc_feature (100)..(100): n is a, c, g, or t
  misc_feature (111)..(111): n is a, c, g, or t
  misc_feature (118)..(118): n is a, c, g, or t
  misc_feature (133)..(133): n is a, c, g, or t
  misc_feature (135)..(136): n is a, c, g, or t
  misc_feature (234)..(234): n is a, c, g, or t
  misc_feature (236)..(236): n is a, c, g, or t
  misc_feature (244)..(244): n is a, c, g, or t
  misc_feature (246)..(246): n is a, c, g, or t
  misc_feature (254)..(254): n is a, c, g, or t
  misc_feature (263)..(263): n is a, c, g, or t
  misc_feature (302)..(302): n is a, c, g, or t
  misc_feature (310)..(310): n is a, c, g, or t
  misc_feature (312)..(316): n is a, c, g, or t
  misc_feature (329)..(329): n is a, c, g, or t
ggggggngcgggcgcgccnnccgggcggcccgcnnccncgcgggccggggggggccccgggcccnnggcgggccccgccngcngcgcgggggcnggcggncgcccgggcgncggggcncgggggcggggcccngnngggggggcgggggcggcccggggcgcggcgggcggccgggggggggggggggcgggcgggggggggggccggggggcccggcccgcggggccccggcngnccgggggngncgggcccngcggggggnggcggccgccgggcggccgcgccggggggcgggggggcncccggccngnnnnncccggccccttgnggccccccaactaatatagtctcataaaaacttcaacaatcaagataggcataaagtaaaaatattaaaccagggattttctacacaaacataatgtataaagcatgcctaatttatagaaactagatcactcactcattctgctcagaaactcattgattttactctgaagcacccacgaatgacagattcccaggaggggcagagaaggctgagcggcaccacgtggggctggccgcgggttgtgggcatgagcacgcctggagaggccatggggctggtgacaagctctggccagaagaccccaagaaggtctgatcctggggtctgatccaggcctgcggcactgggtcctaggcagactgtctgcctggtgagacgtggaaggagccagtgtccgcagccgtctcaggacgtcagagagctcggtggcctgtctccagcagcatgctctccagatgcagcctgctgtcgctctccacatagggctggtgcagccacatggacaggtagctcagggtgaggtcgggatccccggtgtgggcaagctccttggccaccgtgcgcttcaggagcagctccttcctgtacatctccaagagcttatgcgaaacctcatagaaatgggttgtaggccacgtgtggaacagagggggtcgtttactctcctc

SEQ ID NO: 233949 - DNA, 388 bp, Homo Sapiens
tgagtctagaggtagggatagccatggttcaaaagcagcctaccacattggggtcgccctggcgtgcaccccattaaggtccctacttcaaggagcagattcttcaggctttccatcttggggtctcctagtctatcagcagtggaggaaacctctacagatgctgcactgtgtggtatggaaggcactggccacgcgtgactactgagtatgtgaaatgcatctggtccacactgagaagtgttccaagtacaaaacacacatcagattttaaagacgtagtgaaaaagaatgtaaaagatctcaatcactatcagaattgctcattgaaatgataccattcaattggatgaagtaaaatctgttattaaaattcgatttacccgtc

SEQ ID NO: 233950 - DNA, 319 bp, Homo Sapiens
gccagagggatctttgtggtgacgggacagttctgtatcttgattgtggtggtggttatacaaatctacgtgtaataaagttttatgtgtgcatagaactatgtacatactcaaacaaatgcatgtaaccctggtgaaatctgaataaggtctgtggattgtgccaataccagtgacctggttttgatactgtattatagctatctaagacattattatcaggagaaaatgggggaaaggtacatgtacttttctgtactatttttgcaacttctcgtgaatctgttactatttcaaaattaaaagtatctgaaaatcc

SEQ ID NO: 233951 - DNA, 322 bp, Homo Sapiens
tgtgttttttgtttgttttttaaataacatcattccttagataaaaatgcaatcttacaggaatatacaatagtgtctcacacagagatgaccctgaagctctccttgaagggttgccccttctagattccctggcctttctcgagggtgagaaggcccatcagcgaggcctctgacaatgggattatttgaggattacaaactgtacaatgatatttacaacagtaagactgtgaagtcgtggagcctggaggggagggtgtgggggtgtgtaggggtgtggggggtggtgacaaccggagcactgcccatctttctgtgc

SEQ ID NO: 233952 - DNA, 575 bp, Homo Sapiens
taggaatcctagaagattgcttttttttttttttaactgtagttccagtattatatgatgactattgatttcctggagaggtttttttttttttttgagacagaatcttgctctgttgcccaggctggagtgcagtggcgcggtctcggctcactgcaagctctgcctcccaggttcacgccattctcctgcctcagcctcccgagtagctgggactacaggcgcccgccaccacatccggctaattttttgtatttttagtagagacggggtttgaccgtgttagccaggatggtcttgatctcctgaccttgtgatccgcctgcctcagcctcccaaagtgctgggattacaggcttgggccaccgcgcccagccaatgtcctagagagttttgtgatctgaattctttatgtatatttgtagctatatttcatacaaagtgctttaagtgtggagagtcaattaaacacctttactcttagaaatacggattcggcagccttcagtgaatattggtttctctttggtatgtcaataaaagtttatccgtatgtcagaaaaaaaaaaaaaaaa

SEQ ID NO: 233953 - DNA, 550 bp, Homo Sapiens
ttcccctcattgtacagatggggcaggacccagcacgctgctggcagagatggtttgagaacacatccaagccagtccccccagcccagcttcccctccgttcctaactgttggctttcccccagccgcacgggtcccaggccccagagaagatgagtctatggcatcaggttcttaaacccaggaaagcacctacagaccggctcctccatgcactttaccagctcaacgcatccactctctgttctcttggcagggcgggggaggggggataggaggtcccctttcccctaggtggtctcataattccatttgtggagagaacaggagggccagatagataggtcctagcagaaggcattgaggtgagggatcattttgggtcagacatcaatgtctctgtcccccctgggtccagccaagctgtgccccatcccccaagcctcctgggaggatccagccaaatcttgcgactcctggcacacacctgtctgtaacctgttttgtgctctgaaagcaaatagtcctgagcaaaaaaaaaaaaaaaaaa

SEQ ID NO: 233954 - DNA, 585 bp, Homo Sapiens
cctgtgttgactacttcctggaggggctggcactggggagttggctgggccaacgcctgcagacacttccagccttgccttctctctgctgatatagctgggtcttactggggatctggccagccttgggggcccttggagccctggcccagtggaagctcgtgcctgaggaacatggaggccacgctaatggtgagttagtgctgtggtacagaagcagccaacctgtgcctactcatgtccccagttcctagacttaaggagggaaggggagaaatacacttgaggaaggagagtgggggaggatgtccaaggtgaatggggcagggcactgaaaaaaaaagttgaaggagtcaggggaagcaggaaagagttacagaaggaaaggaggatctcagggaagtctaggaggaaaaatagaatttcgaagaatttcttttagaatgaattgtcgggggggtgctgggcacggtggctcacgcctatagtcccagcgctttgggaggccagggcgggcggatcacgagatcgggagatcgagaccattctgactagcacggtgaggccctatctctactaaagata

SEQ ID NO: 233955 - DNA, 594 bp, Homo Sapiens
tcccaaagcactgggattacaggcgtgagccaccacatccagccagtgatccttaaaagattaagagatgactggactaggtctaccttgatcttgaagattcccttggaatgttgagatttaggcttatttgagcactacctgcccaactgtcagtgccagtgcatagcccttcttttgtctcccttatgaagactgccctgcagggctgagatgtggcaggagctcccagggaaaaaggaagtgcatttgattggtgtgtattggccaagttttgcttgttgtgtgcttgaaagaaaatatctctgaccaacttctgtattcgtggaccaaactgaagctatatttttcacagaagaagaagcagtgacggggacacaaattctgttgcctggtggaaagaaggcaaaggccttcagcaatctatattaccagcgctggatcctttgacagagagtggtccctaaacttaaatttcaagacggtataggcttgatctgtcttgcttattgttgccccctgcgcctagcacaattctgacacacaattggaacttactaaaaatttttttttactgttaaaaaaaaaaaaaaa

SEQ ID NO: 233956 - DNA, 604 bp, Homo Sapiens
ccaagcttgggtgatgaggaatttgaaatcccacctatctccttggattctgatccctcattggctgtctcagatgtggttggccactttgatgacctggcagacccttcctcttcacaggatggcagtttttcagcccagtatggggtccagacattggacatgcctgtgggcatgacccatggcttgatggagcagggcggggggctcctgagtgggggcttgaccatggtaaggggcaagacattgtcaggcttaccccagctaatgggcatggcattaggggagacaaagttactctattccctactacacttgggtattacttgtttctcttcttgtggctaaaggctcaccaacaaagacttaatttcacctgaataaatgaaatttaccatgtaggtagattttacttgaaaaataatttaaaattgtacaatgtctggtttgaaaattatttattgtggtttttgggaaaaagtgttttctgcttttattatggccttcacatcctaggattcaaatttgaatgtgatagctggcacacggagggatttattcaaaaatggcctgaatcacgttgagcagccagcagaacagagct

SEQ ID NO: 233957 - DNA, 601 bp, Homo Sapiens
ccccaaccctggataccagtagcttcccacccagtccaaacctgcaccatccatcattatgtagatgaaaaagccataggtcatagcctctttgctattctattggagtagcctccctaggcagtccctctgaagccttggagtgcaggtaaatgctcattcccaagtagcaaagagaccatggagaaggtgcgtgtaaagagatatatttttgtaagaggaatatgattaatacattccgccccttggaacctggccatgcaaagcaagggcacagggattagacctgtggcacacttccccaattccctcatctgtaggatttgggctgccccaggcccacccagggggctctgaatgtattttgtaccgtgtttctttcccccaggagaatttttagtcttctttcatgaagcagtggaggggttggcctcccttctactgggaggttgactctctctgggagactcttggtccaagacctgggtcagttctttgctggtggtcccctctgaccacaagcttctgcctgaagattcctcaggtcaacaccatcattaaatgcgagttttgttgatgattctaaaaaaaaaaaaaaaaa

SEQ ID NO: 233958 - DNA, 633 bp, Homo Sapiens
gtagcaggaacccctggaagtctagggccattgtggctttggggagcccaggctccttgtttttttctgctgtgttattctgaaggcagctcaggatcccaggatactgtgatagtccttcacctccagcctcagtccaggcagggacaagcaacgcacctgcatcgggaaagcaaaactcagcaattgtggtcgacctccgcttgcagcctattggccagaggcaggtcacgtgaccactaggtgggtggtaatctggaaagcgttgggcgcactgctgtccctggacaaaatccagattcttgttagtgaggcagatgagaagaacggatgctggcaggcaaagagcagtgtctgtcacagctcagctgggctgtggcctccagctgttcacagggatattggggctttggcattcaaggggctcaaaggggaaccccctggggataggtctttgtttttcttttcctgtagggcagtggtattgaaccttggttgtgggttagaatcacctagagaacagtgagggaaaaagtatctgtgcctcacctctgggtcaggagtgagcctgggcaaaggaatactttaaagaacttcccctgtgattaaaaaaaaaaaaaaaaaaaaaaaaaa

SEQ ID NO: 233959 - DNA, 513 bp, Homo Sapiens
agaatatttagatttcatttcctataatcagacacgctgttgtttttactatataactgttagaagatataaatctataacatatgcagcatatacataaaaataatcacaatatttttaaaagtttctgttaatgtcatgtatcttctttttttatccaaaagaaaacttattcaaaaaaatgtacccagaagacacagcctaaggaatacaagcaggaaactgagaaacctgccaacaacagctaaagggacacaaacaggtacatgcaaagttgccagtaagcagcatttaaaatgctgattttcagaaagagagcagcaggtggagttaagggtttaggctctggcgtcagactacttagggacgttgggaaagtttcttaccctctctgtaccacagttttctcatttgtaaaatgggaaccaatccttctttgctttttttttttttttgagacggagtcttgctcggttgcccagccttgagtgcagtggcgcaatctcaactcgc

SEQ ID NO: 233960 - DNA, 530 bp, Homo Sapiens
tgctgctaggtaggcagttttattatgctgttacatagagctctctccatgaaaagtgattttaacatgaactgcccattctgcaaagaggaaaaatatgttgaattagttaaatatccaattcaaaagatgttacagtaaaatacatgtaagacttaacaaaaaaaaaaaaaaaggacagagacacaatttcttatcctcaattctcatctccaaaaagctatgaaaaccagtttatttacaaagcttggtgacaaaacctgaccaaacttgatctgaggctctttatgatctttagttatacttagtggggatgttcataaatcaccacaaaaataggagtatatttgataatgagctgccatcccagacttttttttagtagttttgagtgaaatattttacacagatcctattactttttgaatagctcaaaaattttgatgcaaaacacagctagacctaagttttcaaataaacggatgcaaagcagtactaccccaaactgttaatgatacagtgattctacg

SEQ ID NO: 233961 - DNA, 468 bp, Homo Sapiens
aagttccttgctacttataaagccttttcttgacctgtcagacctaatgtttgatgatgtataagaaaactatcgtcgaatttatgttatgcataaattttatagtatatttaaagtgaaatacacaatttttttctatgcacatactcttactggaaaaaatttgaatgctgacaataaaatggctaagttatggtacatgcatgtaacagaatactatagagcagactgagcaaactatgccacaggccaaatccagcccatggtaagtatttgtaaatagttttactggaacacaattatactcatttatttacatattatctattgatgctttcacactaccgtggtagtgctgagtagccatgacagagacctaatggtctgcaaaacctaaaatatttactaactaaccctttatagaaagaactttgctgaaccctggtatggagaaataaaaacgaatga

SEQ ID NO: 233962 - DNA, 1000 bp, Homo Sapiens
gccggagaggaagaggaaaggagggtggggccacttcaaaagatcagcgttggtgagggggggagggggaggggcagagtgtatggcgagaggcagggaaggagcgcaaagtcctcatgatagttaggggagtgggaaggccgaggaagattgggagagggtaatagcggtgagggcggagacgagggagtgggttggacgtaataaaatgagattgctgagagtacggaccaacactgagataaacccaacggatattgtgggaggcgggaggcgatgagggagttgttcggaagccggggaaggccaaagggggataaggacgcggataagcgcgggccctttggttttccgggctttgggggcaggatgtgaggccccatctcagaaaagaaacgagaggtaattccaaaatcggtaccaagggacatgttgatggagaacaggacagcatttacttctgaatcaataaagtacttaagaacttatacttggggaaaatcacaatgacaatgaatatttcgccaaatagatggtggcaaatagtttggcaacacatattagaaaggtgatttctatactacacataaatgaaagacaaaccgaaccacaattgatgttttactacattaatgtaatttacactatgcctatacccacatggcaaattcagttataactgaaaaactagagcagtccctttttttttactatgatttgcatattttccagtatcctaatacatgcatacttatcttttatagattataataatctacatttaaaattccattttaatattgtggcatgaaaaatacaaacaccaatacagtatgttttatgcttactcaaagttaactggctcagagttttaaaagctttcccggataaagcagagtcaagtctaccctatatccccatcctataaattcctctttgtcgaacctggcaatctcagtgagctatgattgcaccactgcacttcagcctggacaacaaa

SEQ ID NO: 233963 - DNA, 1000 bp, Homo Sapiens
  misc_feature (49)..(49): n is a, c, g, or t
  misc_feature (201)..(201): n is a, c, g, or t
  misc_feature (220)..(220): n is a, c, g, or t
ttgcattttctaggagggcaaaatagtaaataggtggtttataggccancaaggttggatactttgttacagggcttgatttttcaaaaagatgtcagaaaaaggtagtaggattcattctgaatctcccagtaagtggaccaggttttataaaataaggattttgatgaattattgaatgaatcaatgaatgaatgatgnctagaaacaataaccattncttgaggaaaagaacagaagcatgttccttcttttagctgcatagatggtataaaacagtgattactttagaataaggaaggaccgtttaaattaagacttcttttaaggcaatgtgctccaaatgaaaaaggactccactagttgggaaagacattttatttccaagtttctaagagtgttctacaaacaatagaggcttaacgaaaaaataaaaggtaaaaaaaaaaaaaaaaagaaaaagaaaaacaagtattcttaactactgaaaagtaaacagcctttttaaaaaagacttcaacataaaaatgcgaaaatgtagttgtcatctctaatccaaatacattcctagagaaaaggatcatccatggtgacagggttacttacagctgtatacttatttaaatgctattcatattccttttgagttatttcttcattgcaaattcaattggagatctgtgcaaatctagcaaaatattctttggattacaaaaactatataaaaaaatgaacacaacctgcaattatggaagtattgagaatgtgtaatccttcactgagatgaaagattctaaagtgacattgtccacaaaatgtattccattgaagtgttcagcccaatttgatttcaatgcaaagtaaaatggaagtgagcacttcataaaaaacatttctttgtatgcatgttgactaaatcataaaaatagtacataacatgatatcaagaaatgcttgaaacaaactttcacaataaagtcagaaaaaaactgtaaaaatt

SEQ ID NO: 233964 - DNA, 1000 bp, Homo Sapiens
  misc_feature (183)..(183): n is a, c, g, or t
  misc_feature (459)..(459): n is a, c, g, or t
  misc_feature (488)..(488): n is a, c, g, or t
  misc_feature (493)..(493): n is a, c, g, or t
  misc_feature (499)..(502): n is a, c, g, or t
gaggccgaggatgaagggaagagaagttggcgttcggacgggaagaaaagaaggagagcgcgagggttgcgcaatgaggtatggaggtggggagtaatctgtgtgtggcagagaaagaaaggggtgagaaaacaatatgattgttcggcggtgggcgaaaaatatatagcgtccgggatgganggtgtggttgtggtgcggaaaaagaccgcagaaggaatggtaagtgtcgcgcggggatgggtgggtacagaaatgtcgacaggtatggggaaaggataaaaaaaggccggaggtgtggtgggttataaagggtagaatgaaggatagtaagatgtaaaaaagagggcgaaaggcagagaagaagcgtattagagtggggcctcgtgaggcccaaaaaggacccagacggggtaataagaagtccatgagggggattttggagaagtgggggggggnttggtgtgtgtcttttgtgttgggtttgngtttnttgtgnnnntactttgagaagccatttattttgcagtcttcagtccaaaaaaagtcaacattttcagaatttttttatataagttgtaggtcatttttataacaataaactttctattatctatttatctctcacatacatttcatgtatcctgagtattatgttacaacaatctgctcttgatagtaatgttcctgatagattaaaagattgagaaatacttgaagaacgatcaaagatacaatgagcatggtatacttttgggttaaaatgtattctttgataactgatgtcatatagatccctaagtaaatcaaatatttaatttcctacatctgtctaccttagttaactggcccattcctataagcttaacaaaaactcactttacaattatttaaaaaaaacatttaagagatttttagaagttaaatggaaagatacttttggacattacaatatttttaatgagttattattttaaaattagagatttcacataaaaac

SEQ ID NO: 233965 - DNA, 1000 bp, Homo Sapiens
gggtgccgcgcggactaggaacaacgaaaagagggggcggggaaagaaagagaaccggcgaaaaaagaaaggaggcggggtccggtaccggaaggtaacagaaggggacaacgtcgaaagggcgggataccgacggcggaggtagatttggaacccgggccgggttataataaaacctcaagtgggggggtccaatgccccggccccctaccaattgggaggggggaaaccaaagggtattccgggtgggcgcggatttccatgtggggtgggaaaattcccccaaggaattttgctctggaaagaaggccagggctaaggggtggggcgggggatcagggatttgcctttgagagtcttcctaagggccctcctagaacctgataaagctcctagtctaggtctagttagtatctcagtggtgaggctaccaaatgccttcgcagtgcagagacgatggtctgagaccagggagaaggcaccgagccgttagttctctcaagcctctgtcccagcggagttagcggccttatgaccttcggttgcaatgtcaaaagaaaaaaaaacaaacaaaaaaaaaagccaaaaaaaaaaaaaaaaaacccaaaaaggctaacttacagactattatcaaaaaataaaaatttaaaaaataagaacaacacaaataagtcaaaggaaaaataaaagcttttttcattttgagaagttgagtataaaaacagcaggaaaaatggcccaatacattggacactatttgtccttgaaaccactgcagagatacaaaagttcacattgtatgacctggtgggtgtcttccaccatgaaggtgctctggttagattagaggtagcacttccactgtatgctcttgtggttcagacacattttgggaaagtttatttttctgaatcaaataggcgaatgcatctacatgtaaaactcaggataccaggcacacagatgaggtcccacccccacacactgtctccctgttctc

SEQ ID NO: 233966 - DNA, 988 bp, Homo Sapiens
ttacaaagaaccccttggggcccccctgttgaaaaaagggggtaaaatatatttccccagtagcgccccttttgggggggcccaagggggcaaacccaaaaattttttttcccctgggcgccaatttttgtccccttccacggcaaatacccgggtgaagtgggttgccccggaatttttggggaaataaggggtatcaattcccccttaaaagaaccccccacaggttggggaaaaaagctttttttttcccccccttaacattccttctaaataaggggatataaccttttgggggaaatgttatgaattaaataaattcccattccaagttttaaatgaaattttaaaatggtgtttaccaaaaaggtgttttttttcgttatggtgcaccaacagcaggtcatggtgataaatctcattcagaaaccagatttaggagggacaaaaatgctaagattcttttactccataatttaaaaaagcctgttctaactcatacacttttaattaggcaataaataccaagcaaaagaaacttaaaaatcatgactcatttcaaaacttcattacagacataggaagaggtaggggagcagaaatacagccttttgtgtttataaatacctcaaagcctcaaataaccaactggaaaatatacatacagagtaagaaaaggaaagcctttgacttcactgttatgttgagattattttgtaaagacaaaaagcaaaaaaattttaaaaaaataaaaaggaaatagtatatgtataatttaaaaaagaaagttatacaaaccataaaagagtaccataaacacactcctactgagcacattttagaaagattatgaaacaaaattttttgttcattagatgaagtctcttcaaaggtgctttctcttcctttgtgagtgaaaaagcccttaccccaaagccacaaagtgaaatctaccaccaaagagtgctaataaatagcagacttcctg

SEQ ID NO: 233967 - DNA, 1000 bp, Homo Sapiens
ggggggggaggattatctcccccgggaacccccccgaggagagttgggggcccctgtttttttgccccccattgtcctcttcacagtgtgtggaatgaccaaaaggggagccccgttttttccaaaaaaaaaaaaaaaaactttaaaagcccccatttattaatatggcaatttgttggattaggtatatccctttgtaaggtcttaaattttaaaaaatttagatttcagattaaagtcttgcaaaaagggccaggattaggtgccctcaggactataatccccagcattttggagggctgaggcgggaggattgtttgagccccggagttcgagaccagcctgggcaacatagtgagacttcatctccacaaaaaattagccagtgtggttatgctagtctatagtctcagctactcaggaggctgaagtgggaagaccacttatgcccaggaaaccaaggctgcagtgagccatgatcataccactgcactgcacttcagcctgggagacagaacaagacagaccctgtcgccccacacctcccctatacccccggaaaaaaaaaagtgcaaaaaaaaaaaaactagggtgagagccatgaaatagctgaaggactgtctgaagaggggcagaagggagtgttttggggtgacacaaacattctattgcttttttgggtggttactcagatttctacaactcgttagaaggaaacactttatcatgttaattatacctcaatattgtaaatgtgcatggaagaaatctcttgttttcaagagtttttcttttgggttcacctaactatgtacctgactgctgcataaagtaatccatggcacttaataatttgactaatcagattacttctgttcttcattgttagctccagtatttttcttacagctaccttggattttgatgcctaagaacattctctgacaggttggaaataaaattaaataaaggattgattttcaaataatgtggtaagtga

SEQ ID NO: 233968 - DNA, 960 bp, Homo Sapiens
aaagggagaattgtgccctcacgttcccctctttttcaatcgttccactaaaatgggtggcctcccggtttccaaaaaattgtcctggtgaccagcaaaggtggcattgcgaaaattgaatgtgaaggcaaggttggttggaaataattatttcaatgaattgttgaaaagatcattggtaggcaagctgttggtcaataaaatcagaaaacattcaagcaatcgcacaaaatagatcacactaggctacaaatcttgaatattttcaaagaaaaattagggtatgaaatataagttttcatggtttaaacatttattgtaagtcctagatgaaacatactgaaaagattatttttgctttaatcctaatatgctaagaaaagttcattggcacaaatatccagaggtattttacagtttcatttacctttggtggcaaagagtattttgctaaccgtatggatacagtcacatagtttccaatgcacagctttatgctaaagagaattcaaatgtgtctcttttttttgctaaaaaagggatgtaaaaagtccaatatgaaacagaacgagtgcaacacgaaatacaaaatatgcctatcatgtaggcttttgaacagttaatagctctacgtgttatctataaacattttttactagtaacatcactattgtataaatattaaaaacaaaaatgacattaaaaaatagcatatgaactttacaaaaatggctacttttagtcttcctaaactaaaatcggaattcaaatacgcaaacaaatctacactaactaatcaaaacacaccaacagatacagtttttcataagtgttcaaagttacaatgtacagaatgagtacagacagattctgactcatatatcaagtcctatacaaagtcttcagaaattaactgattaattggtatttcaaaacacagatgtttttggcagcataaca

SEQ ID NO: 233969 - DNA, 1000 bp, Homo Sapiens
gggtgaagttcccttatttaccaaaaccattttacctttgttcacttagccccagccttaagtcatctttccctttaataaccgttacatttggcagcttgctgttggcccccatggggaagtaaagcaaaggcctttatacctctatttaaggatataatcacctaagtattcttctctagggcagtaggaacatattagattacttctatagacatggaaattttctgagtcaaaaagaaaacaaaatcttactacattataacaaagtaaagtgaaggggattcattctatagcagcgtttcacatctgcagttcatgaaactctcatgtttcatgaattaatatacaaataaacacataaacccctgaattatgctagtttcttctaaaataaaaaatatatatgaaaaaaaccctaatacatgtatatgttattatacaacaatctgcttttaagaaatggtgtgccatgaatgccagaaatcagaaaaggtatcacctgatgttctaatgcctatctgatctgtataacatttcttactgtaggtttaacattaaccaacaagtcatgttattagttatttaatgattaccagtaagcacttactttatatcaacttatagttgtactattattcaatttgtattgcatattaaagtacttaataaaaatttggtaatttctaatagcaattaatttgtgaaactattttcctgctatacattaaggatacaatatatttaataatttttttctattttattaatactttattttcaaaaatgcttccatagttaaagtagttctggaaactgttccattaggtataaggacaatgactccttttctccatttttatttggcttgttgtgatgtttttctagttgtattagtttttctttaaaaagtagagaaagatggtccagtacatgacatgggtgagagtcatattttttccctacccatttaatgcaagatataaagaagctttcctag

SEQ ID NO: 233970 - DNA, 522 bp, Homo Sapiens
  misc_feature (489)..(489): n is a, c, g, or t
ttttttttttttttttgtagagatggggtctcacggtgttgcccaggttggtctggaactcctctcaatcctcctgcctaggccttccacagtgctgggattatagcactgtgagctgccagcctggcttttaatgaactttttgaaagaggagtaacgagaatttgctttctctttctcttctttacctaagatagaaaggcacacatagattctcaaggcctttgacctttatgaatctagacagaatactggaaacccctggaaatgctgtcctgtgtagaatggagcagcggcctcacttgttgatcaccagcaaaaactggggacatctgcttgccccctgccaagacccggcccctccacaggacaagcctggtcttcctgggtcctgttcctttgccagcaccgtcttgcagccccgtcttcacgggatgcttttgtaactgctgtgatcagccctgacctgggcacctgtttgtctccccnaaccttgtctccaggatgtgtcctgctgtctgc

SEQ ID NO: 233971 - DNA, 1000 bp, Homo Sapiens
agagggggatggggtcaccaaaatggtttttcacaaagcctttttagccccccccggaggaatttttcctggaaatccccccaaaatcccctccggttttcctggaatccagcggggatttggaaagaatttttttacccaagcccaagtaaaagggggcctttttgggccttgaaaataagtgaatgtttttttttccagaaaggggaaatgcagaaatggtcaggacttccatgcagcggtaaaatttgatttccaggaaattacagggaaaactttccaaaagttccatctcccagaaattatttttacaaagaattccaagataggtttagttttatggaagacttttaggggggtttttactccctcttcatctcagacatcaacagaatgattacatcacttatttagctagtaaatttattaatataaaaaactcagagacattccaatatccacattgcttacaccattaggcatagattcagtgtcagctatgacaattgaaaataagctgttttgtgatttaaaggtttaaatttctctaaccaaactgcttgatccagatgcaggactgcaaatgttaatatttgttctggaagaacaatcaaataagacttaagaggaaaaggaatggccacaatccacctgaaatttttttttaaaaagtgtgcagcctactaaatcagaatgaaaatagaagtacaagattataaacaaaatgcaatcaaacttttcttaagcttacctaaagttatttcatctgaaaatttcaagcaactttgttcaacattaaattgacaatctaaactaacaagtcttttgaatttatgcatggtagtaaacattctctctattaactttattacctaaggctaaacctaaaatttttaagcaaaattagaaaaatagtcttcactcatcaaaaaataaagtttgttacatttagtattttcccaataaaattggtcgttcttggttttttatttggagagtc

SEQ ID NO: 233972 - DNA, 747 bp, Homo Sapiens
  misc_feature (2)..(2): n is a, c, g, or t
  misc_feature (4)..(4): n is a, c, g, or t
  misc_feature (6)..(6): n is a, c, g, or t
  misc_feature (10)..(10): n is a, c, g, or t
  misc_feature (14)..(14): n is a, c, g, or t
  misc_feature (19)..(19): n is a, c, g, or t
tntntntttntttnttttntttttttctgtgtaaagctgcctttgcaagcacttcacatgattcactgaacagagcagacagaaacccctgcccttcttgggggcttccatcctagacaagtgccagcggccccagttgatgccacgggcaggcaatgtgcatagccatggcacgtgccgtccctgtggattcggatgcctcctcccctgctggggtgaggcagccaaccaggggccaactgaaaaaatgctggactctcggtcaaggacagggctgggagagtgccagtctccacaaactgtggatccactagagggttcaggcctggggcatcctctgcaagaggatcccacgagagtccattccccaccacaggcctccgctgctcactgctgtgccttgatcggcctggacgagcccgcccacacctccatcatacccagtgtgaagaggggctggggacccaccactcctgagaacagcatccttgggaagacccagctgtgagtgcacagcaggcacagtccctcaggcccaggtgaggattcagcagcagatgggattccaccccatctgtggcctctccagctgtccacaggccctgcaaaggcagggaggtggcaaaggccagcccaacccagccctccactctgggtacccagaggaaggcgcaggccgctggttccacagcccatcacctggaggtgatggaggccaaccccagccctgcctggaggccctggtga

SEQ ID NO: 233973 - DNA, 1000 bp, Homo Sapiens
  misc_feature (78)..(78): n is a, c, g, or t
  misc_feature (147)..(147): n is a, c, g, or t
gggactaaatgggcatgggttacttaggcccctgggcatattttaataaatatgccaatggtactggattacctatanttcagcctttgtggataattatgttaccctactcaaggagatggataaaaaaaaaaacccaaatcaaancagccctttctgaccttcaaaaataaaagggacaaattctgttactgaatacatgtgcacacttttgtgggctttattcatgtatgtacatatgcctgcctgaatacagaaattggcctttaaatgggatacgacaagttattttttttacacataaaaatagaaaactgatcactcagactgtacacactcacagaatgtattgacataccacgaccagctacagtattatgcacgacatattgttcacacattagtacagcagagatacacacatttagaaaattagtaattgctagtatatatttttcttattttcaggctgtgttgacctttttcaaccttaataaaaggtatctccaggggcccttaaaacaagaattagtctttcctctcctctagggattggggagtatgactataatactgcaatctcctgatataccagcatcattttaagacacgatggaaaacattaggaaaaataagttacgtaaagatgtgatctaaaataaatgttaaggaatctcaactaaaatcatcaaggatgccaattaacatgagtaagccctttctactcattttatatagtttgctctacacacagcctttacatgttattaaaagcaatgatatgaatcagaaaaaaaactgtttaactgctcaagagtttttctaaagagagacaatttttaaagcaacaaagaacaatactagcagcaatgtcaaaaagcaagctataattttcaccccagaaataaatgaatgacatctccatagttaagagatcaagaaagctgttagcaattctctcccatttaattctttctaacatcattaaatcactggggta

SEQ ID NO: 233974 - DNA, 963 bp, Homo Sapiens
  misc_feature (189)..(189): n is a, c, g, or t
tttagggaggtttaaggccaggagggatccctgttagcccccgggaggttcaagccccagccttgggccaaggtaggcaagataccgttctttttaaaaaataattaataattaaatttaaaaaaaaaaaaaaagccttgggtgcagtgggttcatgccctattattccaaccactttggaaggctgangttgggaggatcacttgaggttaggagttcgagatcagcctggccatcatggtgaaacctcatctctattaaaaataaaaaaaattagccgggtgtggtggtgcacacctgtaatcccagctactcgggaggctgaggcaggagaatcgcttgaacctgggaagcagaggttgcactgagccgagatcgcaccactgcactccaccctgggtaacagagcgaggctctgtctcaaaaataaaaataaaaataaaaaaaataaaaagagagagacagaaaaggaaactcagggggccagggcttaaggggttgggaagatgcgagagtcttaaatttggttccttgcttctttgggccaggactcagagagccccactgacacatatgcccatctgtcttgaaccttaacaaattgcaaaggccacaggctattctacaggccacgggagcccccccaaatgcaatgtcatgggggtgttcctgaagtagaggaccctcataaggcctctgaggcccagagaggggcagctccgggcctaaggtcacacagccagtcaacagagacctaatccagaggtctgcgggcaggagctatgaaaaggacagggagtggtgtttgccctctgggtgagcagtgaaggcatgagtctcacacccccggcttccgctccacagcatgtccagctgggggcccagggcgctgaatgatggccggtcctgtgggctaggggcccagcacagcttcatgagctcgtgaacctcagcagggcaggc

SEQ ID NO: 233975 - DNA, 1000 bp, Homo Sapiens
  misc_feature (150)..(150): n is a, c, g, or t
atttttttttttccgggatttagggtcccccccccaaaggggttcccttctccaaattttccaaaaaagggtaagggtcaagaagccagaaagccccccccccttttcgcccatgggtggggggggggccaacccttttgggggggtttnggggtccccatttttttgaaaaggaattggcccccacaggggggggggtccccctttggcccttgccccagggaggggcagccagaaaaaaagatcccttgcttagttgaaggggcccgctggggtggttcggtttgtccttcagaggccctgtctgtaacaccaaatggccaacccgttggccactgactggtcacccctgaaggccacggccagtgtcctaggaaagggactcaatttctagctgtgccacctgagattctggggttaggctggttgtgcttctgaagttccactgtgctcaaagtgcttggtgaaagttagcgaaggtgattttacaaaaatagatgcataaaatgtctaggaaacacaaaaaatcctcattactcttctctccaaatattttttaagccccaactggaccctaggcaaaagtgagtggcactcctctgccaggactccaggcaagccccggcatcttcttgctgccgtcccagacaacagaagttaccagatgaacagacttggatgggccacgggggtggagagctggaaagcttggctgtgcctctcgatgatgattaagatttcaatatttacagcaaaaccacaaagcaaatgatagaataaagcaaaacaatggaaaatctgagttcactcgtgagagaggtacgtatgtgagctctgaggaaattacagagggaacgcatgcagcgggacagctctcccaatcgcagcgtgcaaagtagacatccatagtgtcttttgaaaaatgaaaaacacattactttgaacagccaagaaaaaaattgcaatttattaagattcaataaagcgttgtactttcgaa

SEQ ID NO: 233976 - DNA, 545 bp, Homo Sapiens
aaaagaaaaaagaagaaaagaaaaaaaggactggaaagacattggtgaatagaaagatgaaaagggtgaagaaaaaaatgatgatggtcaatagggtggttttaaaagaggcttttgttttattaatttgtttttgtgtgagtgtgtgtgtatgtgtttgttttttgcctaaaagtatttaactccgcattacaccactgatttcaaagaaaaaaagctgaaatgtaagatcatatgatttgtttttaaactgaacactgtatactgtctttttatttttgcaaaattaatgtagtatccagtgtgtctttagataaccctgtccttaatgatattttcaatagccactaaccttgcctggtactgtttcggggtttaaactagaacagaaatttaaggcaggctttattagtgcatagtacaaatcaattacatatatatggagatattatttttccctcttcaattgtttttcatgcagcttacccaatataattgttctgttagttgtacactactctgtgatagcgaaataataataataa

SEQ ID NO: 233977 - DNA, 375 bp, Homo Sapiens
gtagtgatgacagaggtggcatacgcacagggcctaaaatatttaccatttgaaactttccaggaaaagtttgcatactgctcttaaataagcaagaggccattagcttgaggctgtctctgtacgttgagttcccacctaacaatggaaacctacattaggctgtaatgaacagggggctactggccaatcatgggcaaccaactcattataccaggccccacaaggcagcctgcatagctatagccaatcagtttctccactgtgcttctgagtttgcctatcaggtttgctgctcacaccatggggtggacctcactggacctcctctggttgtgagtgctgcccaattcatgaacctgaataaactgtgct

SEQ ID NO: 233978 - DNA, 460 bp, Homo Sapiens
cggtgactataaaactgcaatgtaaagtgtcagcttctcctcacacctttatagtagacatctgagaacctcactcctgtcagcatattcttggggttgaatctcaagtgatccatagaatcttagataaagcagatgaaaataggcttttctgtcttcctaagtaaacagcaatgaagttgagagaaagaagatattgctggaagtcatgataaagtctatcttctgtgaccatatgtttccttagagagttttagacattgaccctcatctaaaaaattgtgaaaaaggactctcaccagtctgttaatatgtatgtatatgaaagaaattactggtaaacttctaaggcaggcattggtgttacttttttttatctttattgtgtctgtgaaatgattgtgtgtattttttctttgattagacaatgagattcccaaataaattttattaaagccaa

SEQ ID NO: 233979 - DNA, 483 bp, Homo Sapiens
actaaccaaccatctgtactttgatcccagaattcattttgattctgctgtttgtttagaactgaaagctttctagcttgtttggatgtggttgtgattccagtgaaactggcactgattttccatctgtttgccattggttgggacttctccaatgtgttaggaaagctgctgtgctgagttgcgaagagaaattcacatgtccatggtcttgcacaagggctcatttgctcacttagaaggttttatgtagagcctctgcctgggtgaaagacatgagcttccctggaaacaattgaaaaacatcttctgcctggccactcagtcttgagctctagtaggttacactgtttttcccttctgggcttctttttgaggaaggggagtgtggatgggaagaaatcttcacaatcagtctcagattcccagcagcagagagtgaattgtatgttgtaataataaaaaaaagaatacctaaagaac

SEQ ID NO: 233980 - DNA, 429 bp, Homo Sapiens
cagattggcttcttgctaggaagctgtggtattgccttagctcttaccagtgaagtttgtctaaaaggactgccaaaaacccagaatggagaaattgtacagtttaaaggttggccccggctcaaatgggttgtaacagattccaagtacctttcaaagccaccgaaagactggcagccacacatctcacctgctgggacagaaccggcatacattgaggtaagtcctaagatgtaaaatatgctttcaggcttttccttgggctttgcttgccacctttcaaaatataaaactgaatttttgcaacgttaatgttagaagatcctcctgctttgtgagatttccatcttttggcttgtaaaatgccttgtagtggatcttctatcctaattattttgatcataagtatacattcaagagaatgacagc

SEQ ID NO: 233981 - DNA, 519 bp, Homo Sapiens
gcccttcaagcaacacacggtgtcgcgggccaggattgcaccatgacctgcgccttccttgggaaccggcggcccacagtgaccctctacaagggcgacgtcaacatcacggccaactccaagttctggtacaactccaccagcggcgtgtgcaccctcgtcatccccacctgcacgctcaaggacagcggcgattacagcgtgctggtggagaacgagctgggcaaggaccgcagcagctgcacgctcaccgtctatgacaaagatgataagtcagttgtagcatccatcaccgagagtctgcagaagaaatcaaagcacctcatgtgagctccagccaagcccaggcatcaggaggctgttatgatgtggagtttcttggcctgtcctctgcatggcccagtgtaggaagcccagtttgctctctggtgtttgttaatgtaaacattcagtgaagggatggggcaataaacgtaactcatcctttcccgttaaaaaaaaaaaaaaaaaaaaaaaaaa

SEQ ID NO: 233982 - DNA, 655 bp, Homo Sapiens
  misc_feature (19)..(19): n is a, c, g, or t
  misc_feature (99)..(99): n is a, c, g, or t
aggggagaggtagaggtanccacgagctgataattacagacaagagatgcggagtatgtgggggctcattatcctgcatagtctatctttgtatatctntgaacttttcaagaataaaaaagcttaaaaagtatacatggcctggtcctaccagagactcacccaatgccagcctccagccagggagagccaagtttgcattttcacacgcatctcacactcctctgcactctcaacttggagagctccaaacagggaaaccccaagccttgctggcttctgccaaccccctgagcagaagcatgggtccccctgatcaccacctcaccaccctcatcctgatctcactgtacactccctttcctggtctgctaagtagcgggtgtttttccttgacactaacgctacagctagaccacggtgggcttggcaacaggtgtcttcccagatgctggcgttaccgctagaccaaggagccctctggtggccctgtccgggcataacagaaagctcgcactcttgtcttctggtcactcctcactgtcccctcagctcctatctctgtatggcctggtgtttcctaggttatgattgtagagcgaggattattataatattggaataaagaataattactacaaaaaaaaaaaaaaaa

SEQ ID NO: 233983 - DNA, 522 bp, Homo Sapiens
gaaacagtagttcattttggttttgacttgtctggatattttagtggaaagaaaaactgctctgggagtcagtccattaaatagtgctgactttagataactttctggacatttaaaataacagctattggtttaagattcttttaagtttatgaattatgactgtatgataaagtattacaaagtagtctatgggaatctgtgtccttgcctccttaaaaaaaagctccaaagagccaaagcaaacctgtcatttttgatagcttctgaaataataagcccctgtacctgttatttttgggctctgggggttgggtggatggccaatgcagttaaataggttcattccagtgtatcttaatagtgtttcaagctgctgttaagttgagcttttgggcaagaatcagtcttctcttattaatttattaaagatgttatccaggaatgtgcagccaagattttaacaattggtgattatgatgtaataaaatatcagataccctccaaaaaaaaaaaaaaaaa

SEQ ID NO: 233984 - DNA, 579 bp, Homo Sapiens
ggcattgacctgctggcctatggggccaaagctgaacttcccaaatataatccttcaacaggacggcaatgccctatggtggatatgagaaggcctccaaacgcatgaccttccagatgcccaagtttgacctggggcccttgctgagtgaacccctggtcctctacaaccaaaacctctccaacaggccttctttcaatcgaacccctattccctggctgagctctggggagcctgtagactacaacgtggatattggcatccccttggatggagaaacagaggagctgtgaggtgtttcctcctctgatttgcatcatttcccctctctggctccaatttggagagggaatgctgagcagatagcccccattgttaatccagtatccttatgggaatggagggaaaaaggagagatctacctttccatcctttactccaagtccccactccacgcatccttcctcaccaactcagagctccccttctacttgctccatatggaacctgctcgtttatggaatttgctctgccaccagtaacagtcaataaacttcaaggaaaaaaaaaaaaaaaaaa

SEQ ID NO: 233985 - DNA, 589 bp, Homo Sapiens
agcccgaagtgggtgggcacagggctccctaggagaatggaaggacatctatgagctgtagcccaagaggaagaggtcactggggctagatgcggcagaccctcgcaggctttgggaagggcttcagaattcagcctgaggacaatggggagcccttttgggatattaaacttgagtaagatatgagcatatttgcatcttgaaaaatcattatgggaagatggctgggaagagaggaggagtggcagaagaaagataggttggagacaattgattgctcgatgatataaaatgttaagtaccatgaatgatgctgttaggctggaatgcgccaagcataaaggtggggcatggcatcaaaaggtaggtcaacatattaaataattccatgtattgaaatatccagaaaatatatagacagatctatagagatagaaactggtctgcccaggactaggggttgtctaaggataaggagcttcttttttggatggtgaaataacctaaaatatattgtgccattgtttgcacaactttgtgaatatattaaaaacctgttaattgtactcacaaaaaaaaaaaaaaaaaa

SEQ ID NO: 233986 - DNA, 668 bp, Homo Sapiens
  misc_feature (161)..(161): n is a, c, g, or t
  misc_feature (648)..(648): n is a, c, g, or t
aggccaggaacacctgtgttagattgtagccagtggcaaccgtacccatctgtatccccaagtctacacggatccctccagcacttcacgactccattatccagctaccactaattcctttgtgggcagagtccagccacgggcagcccctgccctgcctntggtcaggacaacacctgcccaaggagagcaagggcctgtgacctctgctggcctgtgcgccctcacctgtcacccagctcagccctgtgtctggcctacccagggaggaaggaaccagatttatcagcctgaaaggaggtagaagttttggagaaaagacactgttcgggtgtcaagtaatgaactgactttattcgaacctcatctccaatccaatcccaccgtggtctctctctccctcagcttttctggggcgggttgactcgtgtgtcactttatcacaggggcacatggggtgagaagaggaaccttggcagtaggagatacctttgtaccaggttttaatttccagtgtacatctcagtcccctcccctaaccctcaacacagcctggggaaagcccagcttgcaacaccagttctcagcccagactgacagccagatagatcttggccctgagtttgccaattaaagatgccgtgattnttaaaaaaaaaaaaaaaaaa

SEQ ID NO: 233987 - DNA, 635 bp, Homo Sapiens
  misc_feature (10)..(10): n is a, c, g, or t
  misc_feature (98)..(98): n is a, c, g, or t
ggtttcctgnccaaccccagggtcacttgtctggaggcccagctgggcactaatgtctgccaccgactatgttacagtgtataaatgattcctctatntgggagagatcttccaatccagaggagcccctcttggactgcctgggttaaatctgcatagcagaagtggttgatgagttcatctgaagaaattcaggccccacctccccaccctgcccctccctgctcccttttgatggtggcctctgggtactcgggcagagtccttgggacaccagcctctctggggttctcaggccatcccgttggggctgtcgcccaggcctaagtgagtcgtgtgcctctattggaggatggctgttcccctggtggttgcatccaagtatctgtctttctttatggaccacgaagggaagcccaccttcctggaggcaggaccttcggcctaagaaacacaggccctggtgctatctgacctggggtccagcgaggtgggaatcccagtgtgtgagcgacaggccttcttctattgacttacaatattctagaaggacctacgtgtggggacacagttttccaaactgaggaaaatgttgcaataaaagaatatgttgtaagaaaaaaaaaaaaaaaaaa

SEQ ID NO: 233988 - DNA, 521 bp, Homo Sapiens
cggggagcgtcggcagaggccgaagcacgagtcagactgcattctgctgtagctctgccccagtgccaggctggcctgccccttcttccagaggctatggctagttggcttgctcccccgcctccacccctgagatgtgctggataacttatttatggactgttggggatgagagcaggcaacaaatgccaaggtcagacttggtaatgtccttgacctcacgtgctgctgccttctctgcctcccacccagggcaacactaggattggtgggtttctggttctcaactcccggtccctgaatagtcacacgtatgtacagactgaggctctggggtgaggtccctatccagaatgcatctcttctgcttcccatccctgctgcctggatgctcctgatcacctaggcaggcctgtctccagttgtttcagagcttaatttgggtttctatctcttatttgtaatgccttcctggggtttggaaataaaacttctggccgggcaaaaaaaaaaaaaaaaaa

SEQ ID NO: 233989 - DNA, 627 bp, Homo Sapiens
tccacgctctgtagtttcatttcttcttcgtcgggggtctcaggagttggagccgagcggagacccaggcccaccactgtgacggcagtgcactctggaagcaagtgactggccctggaggtggggcccggggtcggggctggggaaggggagccccagggtcgccagagccgcgagccactccagcgagaccccaccttgcatggtgccccttcctgcataggactggaagaccgaagtttttttatggccatattttctactgcaattctgaagtgttcatttctcacaaactgtactgactcgaggggcgctgatttcataggatctggtgctgtatatacgaatcttgcaaagctctaactgaacggaccttcttattcctctcccctaacaccatcgtttccactcttctcagtgtaggtaaccgtctatggtgtgttttttcattaatgacaaaaaaaaaaagggtttcaactggattatttaaatattggtaaatattgtgcattagggtttgtttttccttttaagaagtatgtcctttgtatctctaagttacatgacctatatcttttcctctttaatagtagttttatgttaacctttaaaaaaaaaaaaaaaaaa

SEQ ID NO: 233990 - DNA, 595 bp, Homo Sapiens
ctctttctaataatggccactgttgcttttacactattcccctggcaaagcaagacagaaaaatttgcatttacaataccagctatcaatattgaaaggtcagcttgccgatttcattggaaagtgcttcctcaaggaatgctaaacagtgctgccatgtgtcagtatcatgtaaatcaagctttgttccccagtagaaaagaatttcctcattgcaaggttattcattttatggatgatattctactagcagccccagtggagccagtgcttttaagtttatatacctctgtcataaagaatgcacagctaagtggtttaatcattgcacctgaaaaagcacaaatgtcctctccttggaagtatcttgggtacatacttcctggtcagtaagacctcaaaaggttaaattaaatactagcaacttacacaccttaaatgattatcagaaattactaggtaattttaactggcttcaccccaccttgggcattcctacttataagctgcaaaacctgttttctatcttaaagggtaacacagccctggattctcccagatatttaacccctgcagcaaaaaaaaaaaaaaaaaa

SEQ ID NO: 233991 - DNA, 662 bp, Homo Sapiens
  misc_feature (83)..(83): n is a, c, g, or t
cgcaggctcgtgtgaaggtcaaaagagaactcctgggaaagagcttagtcagctgaaaggctctaaacaaatgatagttatancatcgtcctctgtctccccatgcaagagaccagaacaaaacaatatacaaaagagagagaaaatcccacacctcttggtaactggaaaggctgaggccatgggtgagagcacctcccatttccctgggaaaggagaataagtaaaacttgaattccttcaattagagactcatctaagaatcctttctatcttcccactctgttttgaagtaggacagggggcccagcatcacagacgacaaggttcttaccttgtagttctggtctcatttgtttctgtatttatcaagcctggtacataaacacagtaggtaggtggatggatgaatttgctgtccggtcaagacttcagctagcacattcctaattgacctgcctttacatatatggtttctaaaacactttcacactgggatgatgacagagttctggagatggatggtggtgatggttgcacacactattgggaatatacttaatgacgttgaattgtacatttttaaatggttaaaattgtaaattttatggtatgtatattttaccacaataaaaaattttaagaagaaaaaaaaaaaaaaa

SEQ ID NO: 233992 - DNA, 671 bp, Homo Sapiens
caggatatatttactatttattatttacctttgaatttttgatttgggggatttttacctattgccatcctactatcttaagtatcctgtacaatgaaatatcttagcaaggaaacacttttaaaacttcacaaatatccaatttcattcttaacatatgggggaagcagtaaaagaaaaagcacttcaccacgtagaagagaaagtgatcattttaattaagataatttcaattcattatcaacatttaatcctctgcaaacaagggaacacttactagcagtacttgaagacttgtgagttggaattgcatgttacttgaaagatctaattaagctaaattttggtgcacagcaggttgtacatgatttcatgtttatgtagcaaaatgcattgaaatgtattagtgttgaaacatacatgtaaaggtagttgtggaaattgttatattttccttgtgtgtcatttatttagagcataaaggttttttttattcagcctaactgaataaggctaaatgaatactgtaattgaaaatatattttaaatctttgtcatgagtttttttaaaaaaaactattgcaaattgtatcattcctgattacacagaactttgtgggtggttttaaataaattttatacttctattttgcaaaaaaaaaaaaaaaaaa

SEQ ID NO: 233993 - DNA, 604 bp, Homo Sapiens
tccaagtacctatcgatgaataagcaaaatattacacacaggaatattattcagccttgaaaggaaattcggacacgtgctacaacatagatgaatcttgaggacggtatgcaaagtgaaataaatcagacacagaaggacaaatactgtatgattccacttatataaagtacctagattagtcagattcatagagacaaagtagaatggtggttgctagacgctggagggaggggagaaaggggagttattaatgggtgtagagtttctgttacacaggatgcaaagtggcctgaagatggatggtcgtgatggttgcacagcaatgtgaatttaatgacactgaagtgtacacttaaaagtcattaaaatgctaaattttgtatgtgttttacaattttaaaaatggaaaaaaagtaagaccaaaagcaacacctctccagaatgtgtgttatataccaaattttgacgtatgtgagattgctgactatattttacttatcaatttgaaattatattgtttttatgttgacactccatataagccattattttgaaaaaaacattttccttattaaaaggttggaaaaaaaaaaaaaaaaaa

SEQ ID NO: 233994 - DNA, 538 bp, Homo Sapiens
acgactgtccatgtgtctactccttggcaccttccccgcatggtgggtagatgggcagggaggggtgggaatctgtgtaaccgtggaagggaacggccctcagacccagagggtttggagcctggggtattgtcaccgacagtggccttagcctagctagcacagttagtgctgtgcatcacagcatagcttttagaggcaggatttgtagtcagtatagttgggaggcaccatggagcagggatcaccctccacctcacttgacaaggagatacaaaactatcagttcatagacaccatctgatagggaactggctcagcataggccaactgggacccaggttgccatcttgaagactttccatcacccaaatatcattcagctcttccaggtggtgagggagtaaaccagaggaggagagttgcaccaccagatataccactatggccacatcgaggaggaagaggaggcccggaccatgttcaggcagattctgtcagccctgcagtactgccacttaaaaaaaaaaaaaaaaaa

SEQ ID NO: 233995 - DNA, 603 bp, Homo Sapiens
cagggcaccctaagaggggaaaaaagtgaattcaaagcaaaaataactatttgactataatataggccacaaaaaatcttgatataactcctagttataattttgatgcaaccaagttattttttatatattttgttatttattcttttaataatggaatttttttaaaaagtattttgtaactgaggaattttgataatttggggattttgttttcccttggtctaatggagagaaagacattttggttttctttttccattttgggttccttttgtttcaggcacggataacagcaaatggaattctgtatttattattatttaagtgtagcgcagatgtgtgtgcttgggcgtgtttctcgtgtcgcgtttgcgtgtcggctcttgcggtggagtcctgttgctgtgagggagtgctggccgcaggcagcctcgagtcaccgccaggctcacaggctgtgccacccgtccctccgacagctccaatactgtgaccctccttcctcaggaagcgcgttgaacccacagcactccgtggtgtgtttgcagggtgatttcctaataaaagtccactctgactgtgaaaaaaaaaaaaaaaaaa

SEQ ID NO: 233996 - DNA, 720 bp, Homo Sapiens
  misc_feature (671)..(671): n is a, c, g, or t
tcatcaagtgagacacgtttagcttaaaaacagctcattctcctaatgtttccttcagcaaggacaaaggtaatagcagcagttagaattctttgcaaatgtaccttaagacaaaataattaaacatttggaacatgtgaatttgaaactttaaaaaaatgttgtacgaaattttactacgtgtgatttaactgctatttgtatgaagttgtattggattacattaagttggaattgtgattatgtctgttttagttgtttaaaagaattttcctattatatggtagacaaggatgtagacacattagaattataagaagacatgaggagcaaatcatgaagagcggattggtctttgttcaacaagagctggcagagtagttaagacaaggagttcaaaaattccatgaatcttggccaggcatggtggctcatgcctgtaatcccaccactttgggagggtgatgcaggaggatcacttgaggccaggagttggagaccagcctggccaacatggtgaaaccctgtctctactaaaaatacaaaaaaaattagctggacctggtggcgcatgcctgtaatcctagctactcaggaggctgaggcatgagaatcgcttgaactcagcaagtggaggttgctatgagctgagattgtgccagttcattccnaccctgggcaaccagggtgagactctgtctcaaaaaaaaaaaaaaaaaa

SEQ ID NO: 233997 - DNA, 655 bp, Homo Sapiens
  misc_feature (18)..(18): n is a, c, g, or t
atggtaaaggtcagcctntaagcctcaatggcggtgtggttgtaggtggggtggggtggaggccccgaagacaggcagactaccacagtagccccgatggaagcagtgagaatgaactggaaggagcggctgtgggagcgacaacgtgatgagaataaacccggcttggctctgccctgtgcacacacaggtgagctgtgtgctcccggatgtgtcagctggtatatgcgtctgtcagaaggcagctggggagcactgttagctcagagactaagaggcagacccaggaagcccttctttgcattggtcagggtttgctgcattttcccaagcccaggaaatggaacccagttcttcttctttctgtgtaaaataataagcatcacaataggctgtgctcatgagaacgcattttgtttccacagaaatgttttttctcactctgtcctgattttgatttctgttaaactcagtaaacacattaccaaattttaaaataaggtgacttgttttccccaactcacagttcaccaaaggtatttcatctgtttgttctgaaaatgcagctgctgtctagatttatgtgtgctctgacaagaaatgttttgtgtaacaataaaaatcatttcctttgatgaaaaaaaaaaaaaaaaaa

SEQ ID NO: 233998 - DNA, 753 bp, Homo Sapiens
  misc_feature (34)..(35): n is a, c, g, or t
  misc_feature (121)..(121): n is a, c, g, or t
  misc_feature (189)..(189): n is a, c, g, or t
acatcccattaaggagactatgacgtcttcacgnngagcatcacaaaagtgctgtgtggctccagccgcgcctggttctcagtggccacacgcacagcgcctgcgaggtgcaccacggggnccgagtccccgagctcagcgtcccatctttcagttggaggaacagaaacaaccccagtttcatcatgngaacagatgcttagttgagcatcaaggggcaggaagacacctttccctccttgttcctcgctgaccgatgaccctggaactccacggtgcctctctgaatctctgttatggatcccccactatatttgatgggaacccagtgagccaggggccagttttgacagggtagcatcacgcccacagactacaccctctccaagtgctacctcccacgtgaggatgtggttttgatcatctactgtggagtggtgggcttccttgtggtcctcacactcactcactttgggcttctagcctcaccttttctttctggtttgaacttgctcggaaagcgtaagacaagatgaagagcaggcgccattataaatatcaaagcccaagaaatggaactttgggcagagatcatgttagaatcaagtggatgatgagaccaattacaggccgtctctctgcacagcacagaaattctcaatcactgaaatgagtaactgcaaaataaatagttgattgtactgttctcatgctataaaagtggacaggtactctaaaaaaaaaaaaaaaaaa

SEQ ID NO: 233999 - DNA, 661 bp, Homo Sapiens
tggggtcgtcctccggtccccaggtatctgcgggatggtgccatctcctggtacgccttcaacatcacccgggacttcttcgaccccttgtaccccggaaccaagtacgagctgggccccgccctctacctggggtggagcgcctcactgatctccatcctgggtggcctctgcctctgctccgcctgctgctgcggctctgacgaggacccagccgccagcgcccggcggccctaccaggctcccgtgtccgtgatgcccgtcgccacctcggaccaagaaggcgacagcagctttggcaaatacggcagaaacgcctacgtgtagcagctctggcccgtgggccccgctgtcttcccactgccccaaggagaggggacctggccggggcccattcccctatagtaacctcaggggccggccacgccccgctcccgtagccccgccccggccacggccccgtgtcttgcactctcatggcccctccaggccaagaactgctcttgggaagtcgcatatctcccctctgaggctggatccctcatcttctgaccctgggttctgggctgtgaaggggacggtgtccccgcacgtttgtattgtgtataaatacattcattaataaatgcatattgtgaccgttaaaaaaaaaaaaaaaaaa

SEQ ID NO: 234000 - DNA, 618 bp, Homo Sapiens
  misc_feature (140)..(140): n is a, c, g, or t
cgaggacttcctgaccatcatgtcctacttccggcccatcgacaccaccatggacgaggaacaggtggagctgtcccggaaggagaagctgagatttctgttccacatgtacgactcggacagcgacggccgcatcactntggaagaatatcgaaatgtaaagtggtcgaggagctgctgtcgggaaaccctcacatcgagaaggagtccgctcgctccatcgccgacggggccatgatggaggcggccagcgtgtgcatggggcagatggagcctgatcaggtgtacgaggggatcaccttcgaggacttcctgaagatctggcaggggatcgacattgagaccaagatgcacgtccgcttccttaacatggaaaccatggccctctgccactgacccaccgccacctccgcggagaaactgcactttgcaatggggccgcctccccgcgtagctggagcagcccaggcccggcggacagcctcttcctgcagcgccggtacatagccaaggctcgtctgcgcaccttgtgtcttgtagggtatggtatgtgggacttcgctgtttttatctccaataaaaaaaaaaaaaaggtttgttaaaaaaaaaaaaaaaaaa

SEQ ID NO: 234001 - DNA, 692 bp, Homo Sapiens
  misc_feature (18)..(18): n is a, c, g, or t
tgtcacatgatgaataantagatgaagtgagatacaaagctgggtttgattcaaagcccttactttcctaattaaactatgatgcgtatttatttttctgcaccttcctttcttccacaaacacatattgatagatgcaagagactcttatttagaaggcgtgggggacaagaaggatacaaggtaagtttcagtggagctcagaggacggggagatagaactgtggcacttaggggagatgacatttgctttgggcagaggcagctagccaggacacatttccactataattttacaaagttaaatttataagctagcattaagtaaagtgaagtccagctcccttgctaaaaataactagaggtaataattggtattcaggtaactcatttacagtcataatgtgttgtgaaaatttaatcttaaaaattaaatttttaaactatgtgggtctgtgaatttctttaatgtctaagaaatccagcttcataatttccatgatacaaagatcttttttcaggtggatttttacctttgttccttttgctctgatagacaaaatcagtttaggactattaaagaatgttttggaataaactgtctttttcctcaatgaatgggatgtctaatgtatttcaaaatcacccaaaacttttggcaaataaaagcatttaaaaagaaaaaaaaaaaa

SEQ ID NO: 234002 - DNA, 654 bp, Homo Sapiens
cgaggtcgaatggaggggtcagtagacctcctgcaaaccaggtttgcccgaatcttggctgagtatgagtccatgcagcagaaactgaaacaaagattaaccaaggttgagaaatttctgaaaccgcttattgacacagaattttcaagtattgagggacctggagcggaaagtgggcccatcgactctacatagaaccgaaaagctggtcattaacagggacatgcctcatgatccttttgatcctatgactgacatcaactaaaatttaaaagaagaggaagactcagttgggaaatttttccatgaggaaaatgtgctttggtgcaaggtacaaggcccacaccctctctgagagatactatgattaaaaaagctttatatcttgggatttttcacaactgataatgtgcaaagatataaactgattaacttgtcagtgtctgtattttctgattttttcacatacgctcattttatgtaatattcttcataaaaatgaataagtagccctcactttcatgccatttccattgttgagtgaagcgtatttgaagtaactgagaattaccatgtacatcatatttgggataacatttttaaaaattagactgcaataaagtaaaattaattatgaaaaaaaaaaaaaaaaaa

SEQ ID NO: 234003 - DNA, 457 bp, Homo Sapiens
agacttgaattatgtcaactctattaattgatatcttaactacaaagagagaccttagaattctttaactttgtcatccacctctcgtcttacatacttttgttgtctggtgttatttcatgtaatgtttgctcagattcaactatgtgtttacaatttctttgcccatcacttctatctcagactctccttctgaagtaatttttctttctgaagtacatcttttagaacttcctttaaaaagtgtaggtagatgttaaattcagtttccatgtacctggaaattattttatttctatactttaattcttgaaagataattttgctgagtgcccaattctaggttgatggttattttctgccagcattctgaatgtacaattctactctttctgacttccattgttttattgaggaatcaattattggtctgtcatttgtcattaaaataaccaag

SEQ ID NO: 234004 - DNA, 551 bp, Homo Sapiens
ggcacgaggtgcactggcgttttacagagctaagaatcctactgacaaaccagtaattggaatttctacatacaatattgttccatttgaagctggacagtatttcaataaaatacaggtattgtcttccaggcttcaaagctgcacagagtctacgttttagagagttggcacctttgatgtggtagtgagctgatcatccactttcttctaaaataaagagaagaaaatggccagtattcatcctgtccttctctttccccattccttgataactctcttgtctttactgggaagctggagagtcacagtctagtagaagaaagattagaaaaatttcaactgtaggtgcctttgcaacctatcctgggagaccctaaaacatatttagttttagtgcctagagattttcactcctctaacatctctggatacagtgtccctggtcaacatgaagaagttacagaagaacgctttctgatcctggcccctaaagaatttacttgtgctaagtaataaaattcctattgatcaaaaaaaaaaaaaaaaaa

SEQ ID NO: 234005 - DNA, 674 bp, Homo Sapiens
agagactgagagggatgacaggcttaggggaaaactcagagaggagagatgcacattcctagtgaaattgcacaggcttccagcatgctggagggaacagaaaaggcatgggcctgaattcaggctgcagagcctgactccttccctgtggctacttttgggacctaagataagtgactttcctgaacctccatgacctcctcatatgtaaaccagggacaggacccaccttgtgtagtgcctgacccaaagcctggccctgcacactgtctctgactcacagcaatcatcagcacctctctttgcctcctacttgctcagtctctgtcacaagaactggatctccatccccttgatgctctgagcatcttcacccatttggtcgttgagacatatctgtccatgtctgtctaaaaggggaggagatgagggagaaaaaagggaatctactcagagcctgtgtgtgctgcccagtctaccaaataatttatatacatctcagtcctcacacaaccatccctgttttatagaggaggaagtggcttagagaatgtaactgaccaaagtcacactgccaggaactggaagcactaggatttgacagcatatccaaatatgtcagcaatttcaataaacatgactgtactcaacaaaccaaaaaaaaaaaaaaaaaa

SEQ ID NO: 234006 - DNA, 623 bp, Homo Sapiens
tcggaggcggtggcgtggacggctgcattcatcgggccgccggccccctgcttaccgacgagtgccggaccctgcagagctgtaagactggcaaggccaagatcaccggcggctatcggctcccggccaagtacgtcatccacacagtggggcccatcgcctacggggagcccagcgccagccaggctgccgagctccgcagctgctacctgagcagtctggacctgctgctggagcaccggctccgctcggtggcgttcccctgcatctccaccggcgtgtttggctacccctgtgaggcggccgccgagatcgtgctggccacgctgcgagagtggctggagcagcacaaggacaaggtggaccggctgatcatctgcgtgttcctcgagaaggacgaggacatctaccggagccggctcccccactacttccccgtggcctgaggctcccgcagcccaccctgaccgggactgacccgccttcgggaccccgctcccagctctgagaggtcgccaaagcctgcagcctggcctgggcctggccaccccttctttccctccgcgccccgcccccgaggagcctaataaagatctcgttgtggcaaaaaaaaaaaaaaaaaa

SEQ ID NO: 234007 - DNA, 614 bp, Homo Sapiens
cgagatctgctcagactacatggcttccactatagggttctacagtgtcagccggttgcctacaaggagcttatcggacaatatctgtgcagtctgtgggcagaagatcattgtggagcttgatgaagaagggctcattgaaaacacctaccagctttcctgtaatcatgtctttcatgaattctgcatccgaggttggtgtatcgttgggaaaaagcagacttgcccttactgcaaagagaaagttgatttgaagaggatgatcagtaatccctgggagcgcacacattttctgtatggacaaatcctggattggcttcgttatttggtggcctggcaacctgtggtgataggaatagttcaaggcattaactattcactagggctggaataggacagcagaccccagaagcaacatactgcatggttgaaatccttggtccaacatttaatattaatttttttaattttagagatgatcccaagtgtttagaaaactaagtaaactttgttgtcaagcaatttgtccatgtggaaagaatttaaagagaagctgaacaatggaataaacaaataaagcatgttttttcatctttaaaaaaaaaaaaaaaaaa

SEQ ID NO: 234008 - DNA, 624 bp, Homo Sapiens
caagacgtcacaggtagcaagaggtacttttacctggctccaaatctgtgttctttccactgacaaatgagatatgggatatggtgcatctttacagtactataataagtattggcgtataacattattttcaaggaactccaagggccacaggagctgacaggtttttcaattaatattcccaacatgaatgagatgcctcattcctcagtttcctcacgtgtactataaggctagtacctgctttgttggggtatggttggctcgtgtgcattaagtcaacaaatccctagttgatagggtttggctgtgtccccatccaaatctcatcttgaattgttcccgtaatccccacgtgacatgggagggacccagtgggaggtaatttaatcctcggggcggctacctccgtgctgttctcgtgatagcgagtgagttctcacgagatctgatggttttataaggggcttttccctcttgttcggcacttcctgctgccacgtggagaagggtgtgtttgtttccccatctgccatgattataagttttctgaggcatccccagccatgctgaactgtgagttattaaacttttcctttgtaaattaaaaaaaaaaaaaaaaaa

SEQ ID NO: 234009 - DNA, 370 bp, Homo Sapiens
agttccccattcctgaggtcaaaatcctagaccctgatggtgtgctggcggaggccttggccatgttcaggaagacagaggaaggagattgatgccagagaacacaaacgcttcaggagaaattcaagcctgtgtcacccgatcgctcagaccagtgcggctctggctggaggagtcagcagcagctccaggcatgaccccggcaccctcatagggcccctcactacccccagcactgggtcatttcttgccaataggaaggctggtgcttctctcccaggctgtcctcgggaccctcttcattctctgatctcatcctggaatgcatgagaataaagaataaccaagtggtataaaaaaaaaaaaaaaa

SEQ ID NO: 234010 - DNA, 684 bp, Homo Sapiens
  misc_feature (125)..(125): n is a, c, g, or t
tgtgaatctgggatgtaaccctgagtgaggagaaaagggcattgagcccagcataaatctgaatgggcagaagccacaaacaaaatgggagcagaaaagaagggcgagctcccccgcgccgcacnccgtgtataatccagtgttaacctctgaggaacacctcggctctcccaactgaggagagacaaaagagggattctttttacacccaggctggcgcattttcaagtgacaatctcgggctctagttgcctttgagatatccactctgctctttctcccaggcctcagaccaagaaaaacatgctctcaagattagcccataggcagttcttgtgacctggctgaagaaagaaaggagacctgtttgttttaaaagtcgggcgcaaagtgtcaggtggctttgatttatgacagaaagaggaagaagaaagttggagtaatagcactatccaaataaccctgcccaggaaacttgggggtcaagagagcttatcaagagccttttataggtaagctcttccgtgtgaaagagaaaaggccggaaagagggagagagcccagagagcaggctgcgaactcacttccaatgggattggagtctgttgtattcttaagagatagcctgatatgtggtttataggtgaatcaataaacaccaacaacaacaaaaaaaaaaaaaaa

SEQ ID NO: 234011 - DNA, 669 bp, Homo Sapiens
  misc_feature (589)..(589): n is a, c, g, or t
gaaacacccatcgttctctgctaaaacatgtggttgctactgtgtagactcagcttaagtcatggaattctagaggatgtatctcacaagtaggatcaagaacaagcccaacagtaatctgcatcataagctgatttgataccatggcactgacaatgggcactgatttgataccatggcactgacaatgggcacacagggaacaggaaatgggaatgagagcaagggttgggttgtgttcgtggaacacataggttttttttttttaactttctctttctaaaatatttcattttgatggaggtgaaatttatataagatgaaattaaccattttaaagtaaacaattccgtggcaactagatatcatgatgtgcaaccagcatctctgtctagttccaaatattttcatcaccccaaaagcaagacccataaccattatgcaagtgttcctatttccccctcctcccagctcctggaaacccaccaatctactttgttgctatggctttacctattctggatatttcatataaatggaatcatatagtgtctgtcttctttcactagtatgttttcaagtctcctcncatggtgtagcgtgcatcagtacttcattctttttatggctgaataatattgcattgtcaggaaaaaaaaaaaaaaaaaa

SEQ ID NO: 234012 - DNA, 653 bp, Homo Sapiens
  misc_feature (14)..(14): n is a, c, g, or t
  misc_feature (601)..(601): n is a, c, g, or t
ctgtggaaagctcntaagcagcagccataatgagccatgaagagcagatctgaagactcccaactactacccaaaatgtgatttagtctatcctgcccaaggccactcttctcactggaaggcccaagtaatttccatagatgttctctctgcctcacctgcagcatactgaggacctaaatcctcaacggacaaccaaaacctatgaactcagcctttcaggctaaaaatcagcaaccctaataggggtttctactactaaacataaacatcaatcttcttttgtcccagcaacagaaccatagccattaactaacccaaggtcctaccttctcttccctatacacaacaaaaattctatttcatgcaaaaacattttggcagtttctcagttcctgaaatctctggctactttatccaggttccccaacccctcccaggcctcttctcaacacagcaagttggctcttatcattgccactatattaggttacacaaagaaactcctcacctgggcttcattgaaatcttcaaggatatagccagctcctgctcgaagctgggattctgtatactgcttgttgaaaggaggaatttccanaaaattctatattaaaaaaaaaaaccaagataataaaaaaaaaaaaaaaaaa

SEQ ID NO: 234013 - DNA, 616 bp, Homo Sapiens
  misc_feature (33)..(33): n is a, c, g, or t
  misc_feature (63)..(63): n is a, c, g, or t
atacacctatatgcaagagtgtatccaaagctnaactcagtgatctttccatttatctattcntggattagtggtgcctttgctctttccttctgtaaatgtgaatagttaagagttgactgcagaagtgtttacactttggcttccatgcctctggaatgtttgtgctttggtggtgagatgtgagactatatttgtatagtctgcatctctcaggctgccccagaatgttgtacagtgcagtgctgaagaaagcagcaggtacacacagaaatgcagcctttcctggttaaccctgcttggatctgagttacactttgtttcctgacttcttgggacttaggtaatcagtttgccttctactctatctcattttgtactcgcttacatactacattcttgtttgggctttcgtttcttcttgtaagcagagattttttaaaatccaatatgtgaaaatacggatgcactacaattaaataaataaaatgctgttgtgtttgttttgctttaaaattgtaaaggataaacaataagatagttttatctatgtggttttcccgatgcagttaaaataaaacctaatctgctaaaattgaaaaaaaaaaaaaaaaaa

SEQ ID NO: 234014 - DNA, 690 bp, Homo Sapiens
tccgctggccctttccagcctgtaaactggacagtttcattcctctgcctaacatccagtcgtagcagcccatcctatctctttaaggataaaacccaaattcttggtatagtaaagctaaaccaagcgctctccctggaagggctcctgtgtttcaccaaagctgacttacgtactttccccatcttcccaggcatcttgtacgtcgttacatttatcatattggaaggtaataaatgatcttgttttcctcttttcctgggctccttattaagagcagggaacctaatttatatcctcagggcagaacaggtattcagaaaagaataatgcaagaggaaaaaagtttaatataaactagggagatcgtaacattggctaatcacgagcaaatatttatagaagacccactgtgtgctaaatggctcctaatatatacttaagatattctcccagcttggaaattctgctcacttcttgctcttgcttgcttctctggtgggcttccatccaaatttggccatgacatcagatcatatggttaatattaacaaatattgtataaattgttttcatacttaatatccaacaggttgtcaatttacgtactactggtgccttatctgtttttactgtcccatacactgcccatctggaataagcttagtgtttaaaaaaaaaaaaaaaaaa

SEQ ID NO: 234015 - DNA, 639 bp, Homo Sapiens
  misc_feature (73)..(73): n is a, c, g, or t
ttccttccgaaactcactctacaacagctttgtgggctccctactatttactagagtcaatcctgattttgtntggcataatgagacctgatatgctatgactctccctatcctataaagccacagctttcagcggtccccgtatactaatgaaatggagtcgccagtatccaaaagttccaagtgattatttagaacatttccattaaccataaaggcaaagtggtatagagaaaataatacagtctttgaagtcacacaggcctgatttcaaatcccagctctgtcatttacaaactgggtggtcctggataaattacttaacctctgtggtcttcagtttcctcccaactttgtagggttattgtgagcattgaatgataccaagttataagtgcataggtattcaatcagtgttcattcccttctgtatcaaagacttataatggccttttcatggaattgtctctacctataattatgtgactgtgccttcagattatcaaaattatatgaattgtccatgtgcccttggttttgaatgttcaattctgtattgcaggaatgcctactcagttgcttgaatgggtgtttggagttaataaaatggctgtacaattgaaaaaaaaaaaaaaaaaa

SEQ ID NO: 234016 - DNA, 706 bp, Homo Sapiens
  misc_feature (378)..(378): n is a, c, g, or t
cagcatactcagcgtgccgtccgggagcggaaaaagatgacgcgctctgaagcaggagattcacgagctgcgaggcgcttggagcggctggagcaggtgagccaagcctgctgggtggggcgaggccagacgtcactgtcaataccctgaggcatctcttcctttctagtgggccggtcaggctggggcttgggtcagagcggtgctgcccgtgccgcctgaagagctgcagccagaacaggtggctgagctgtggggccggggtgaccggatcgaatctctcagcgaccaggtgctgctgctggaggagaggctaggtgcctgctcctgtgaggacaacagcctgggcctcggcgtcaatcatcgataagaagcctntacagcacccctgccccctaatttatacagaaaccggacccactaatcctctgggattggccgactgtgagctgcagataaggctatcagccaccaaagagcaatgaacaatggaaacttcagagagctgaagaaagggggaggcctgtgttcttggcctgcccctgagtcttctggctgggggcaggttgcctgggcaagaactgcttcaattccttaacaaatgcaaccaccaacacccagatctctctctctctttattttcagtttttttgctgttatccagataattaataaaaaccaaccacgcaaaaaaaaaaaaaaaaaa

SEQ ID NO: 234017 - DNA, 696 bp, Homo Sapiens
  misc_feature (85)..(85): n is a, c, g, or t
  misc_feature (130)..(130): n is a, c, g, or t
tctgtctctgtctctctccgtctctgtcgctcttgtctgtctgtctctgctctttcctcgccctctctccccagacctggcccgnccgccctgtctccgcaggctagatccgaggtggcagctccagccnccgggctcgccccctcgcgggcgtgccccgcgcgccccgggcggccgaaggccgggccgccccgtcccgccccgtagttgctctttcggtagtggcgatgcgccctgcatgtctcctcacccgtggatcgtgacgactcgaaataacagaaacaaagtcaataaagtgaaaataaataaaaatcattgaacaaatccgaaaaggcttggagtcctcgcccagatctctctcccctgcgagccctttttatttgagaaggaaaaagagaaaagagaatcgtttaagggaacccggcgcccagccaggctccagtggcccgaacggggcggcgagggcggcgagggcgccgaggtccggcccatcccagtcctgtggggctggccgggcagagaccccggacccaggcccaggcctaacctgctaaatgtccccggacggttctggtctcctcggccactttcagtgcgtcggttcgttttgattctttttcttttgtgcacataagaaataaataataataataaataaagaataaaattttgtatgtcaaaaaaaaaaaaaaaaaa

SEQ ID NO: 234018 - DNA, 569 bp, Homo Sapiens
  misc_feature (62)..(62): n is a, c, g, or t
cttttataaggcgcacttcactcaatgctgtagccaaaaaacgaggggccccagggagaggngacccagatggccacacacggaacgcgcctccacagccccgggaggtggctcactctgtacaggtcttcggaggccgtgtttgtatctaactgtgactgggctgaagcatgatgtttgcctaatggttcgtagcatggtttttatttcttacgcattcttggcacacagtgtagctatcctcctgacgagcaacccgtctgcgtacctaagtgtggctccccgtgggtcagcgtcctggtagcatggatccagtctgaaaggtgaggacaacgtggaaactcatgagctgagcctgcccgctgggacacgtctccttcccgcgtcaccttctggtttagggagccgtcaggtccctaaacgttccctacaactttttctgaaattgtgcagaaaaacagatctcattaaaagaaaaaaagaaacaacttgtaggaagacagagaggtgctatgggtacaatttttaataaaaacattattttgttccttaaaaaaaaaaaaaaaaaa

SEQ ID NO: 234019 - DNA, 386 bp, Homo Sapiens
aaggacctccccccatttctggcagccaagccattaatctggagacagaaatgggtttgctatcgattctctggccactttttctttcattacaatttgtaccgtgattcttctcacccttctctgcgtccatgcatttaaagagttgtctctttaaatgttgaagcttccggaagcctgatgctattctgtgtctcctttcaaaggaagaagggggggcccagctatgggtgaggactcaagttattagtttggaaatagagcaactatgtgtacagcccaccttagaggtcatgttacccccttcctgttaaattttacaattaattttggttcaggaaatgtaaataaatttgttaattacaaataaaaaaaaaaaaaaaaaa

SEQ ID NO: 234020 - DNA, 426 bp, Homo Sapiens
cttgtgaagatgccttggttcctcttcactgtctgccatgattgtaagtttcctgaggcctccccagccatgtggaacagtgagtcaattaaacctctttcctttataaattatccagtcttgggcaattcttgatagcagtgtgaaaatggactaatacacttgtgtttatctgtaatttaaatttcatgtctttttctccttgccttacatagggtaaagaccaagaaatgccaaacgtgaactaaaatatgtagggccttcaacttttttacttcctccagtatcttaggaccatcgtaattcttgttagcatctctaaccaggaggcagctgagggaggagggaaagaagactgtaaaaatccccctcactaatgatcaactttggaataaagtgatgcccttcaaaaaaaaaaaaaaaaaa

SEQ ID NO: 234021 - DNA, 451 bp, Homo Sapiens
cacttaggttaaagtgaatcttgtccataaatatgttaaaaggttgatatagaaacagatgaccgtggcatttagagttttggggtgttgagggagtcaggggtaactccagaaaggattgatatctgtgaattgtcctgaagggtaagaaggaatcagcaaaactcccaaattaaaaactttaccaaaaacatttcatcttagtgctaagtctactattttctacaaaatacatatttctaaatttttcatttactattttaaaattcttagcttccctcctcatccctgattaaaaaaaattttttttttgccctttggcttcttacatttttaatgaatgtgtttatgagtactttggactccactgaaaaaaattagaagaggccaagagagtaggatgaagggccttccagacagggggaatagactgaaaaaaaaaaaaaaaaaa

SEQ ID NO: 234022 - DNA, 697 bp, Homo Sapiens
ctttattcctttaaaattcgcctggcaaaaaataaataaatggaactatcactttataagaatcattttctagtaatgcaaacaaattattttttacaaaaaaacaaaataaataaaattagacttccttccctcactatatatctttatgcagtcagaatatttccaacagtgttttttgcaaattagagcaggacaaacttttatgtttacagggcacgtctgttgtaatgcaaagcatatttggcaagcagttcatcaccaggacactagctatgattctagaagtcaaaaggtgtctatagaactagtggggcttctgcatgtgaaaaacggttttccataggcattaaagtgctgaatgctcagtctgatcaacaagtgggcacctgcactaccactttttagaggaaattcactccctcgtaagcattggaaggtcaaattattttgaagtgatttttttaaaaaaaagtcttctgtttattaacaggaaaatttatttatttgacaggattttgagtaatgtaggaatacaaaaggtaaattagcagcacatataatttttttttaatttatgatccattttgtatggtctcaaagttggatgacctcattactaatatttgttgtaaaagtgaaacttgtttgccaaccaataaacaactgattgagatttagaaaaaaaaaaaaaaaa

SEQ ID NO: 234023 - DNA, 637 bp, Homo Sapiens
ttgaagatgtggcatggagagcagccaagcacacctgcaaaaagacattgctggaggaggtgcaggagctggaaaccaagtctcgagtcctgggaaaagcggtgctgcgggatagcaatggaaagaggctgaacgagcgcgaccgcctgatcaagaggctgggccggaagacgcccccgacgctgttccggggcagctccctgcagcagggcgtcccgcatgggtatgctttttctcaagaagaacacggagctgttagtcaggaagaagtcatccgtgcttatgacaccaccaaaaagaaatccaggaagaaataagacatgaattttcctgactgatcttaggaaagagattcagtttgttgcacccagtgttaacacatctttgtcagagaagactggcgtcagcagccaaaacaccaggaaacacatttctgtggccttagccaagcagtttgttagttacatattccctcgcaaacctggagtgcagaccacaggggaagctatctttgccctcccaactcgtctgcagtgcttagcctaacttttgtttatgtcgttatgaagcattcaactgtgctctgtgaggtgtgaaattaaaaacattatgtttccccaaaaaaaaaaaaaaaaaa

SEQ ID NO: 234024 - DNA, 664 bp, Homo Sapiens
acatccagaaaagacaaataaaagacttagaagaaaagtttctgtttctattcttgttcttctctcttgcctttattctatggccttgatgtcaaggtgcctcttaaagagtaaccgaaaacatggataagatcccaggaagacaagtgcttctaaaccttcaaagatggcaaaattgtttacaccagtgagagggagatcaaaagctaagaactaccctgtagccaggactacaactgtgtattttaaagccattattcaaggtttcttacttgacagttcctacacaaccctgttgaaaatctacaatatatgctgcatttaatgaaacatgtatatgtcaaatcagaagagaagaactataaacatatattgtgtaaagaaaaagttcagcaatggaactagtttctgcagatcaagcaaagatgtgtcttgggcatggaaccaaagttacaatgaaatattcaacccctgctgtgcaggggggtcattttaatgtaacaccacaccccatggaaacactagtcctgataataaacatcattttaaaagatcaaaacaaacaaacaaaaaaaacaagggtgggtggggagtgaagcacgaggaatacctatgaagagctatttacaataaaatgtttcatttgaaaaaaaaaaaaaaaaaa

SEQ ID NO: 234025 - DNA, 584 bp, Homo Sapiens
tcatcgttaatgttaatttatgacaactcagggggaaaaacataacaagcctagtttggttacaggtacacacaagcttgaatatttctctgcactgaaatgaaagtggcatagttcatcaccacctgctacattttgtagagcatcttatcagccatagaaataggacaatctataaaactttggggagggtgggggaggaaatgacaaagtgtctgtcaaaaacaggcataatctaaaacaaggtggatgtagcaaatctctgtcactgcttgagaactttgagcttgtggcagttttgcagacttacatgacttcagcactttacgacatattttttactatgaatgttcaatacaatttaatatttataactgatttctgagggatctgctccatgtctattctgttatctgcatgaaaacaaaatgtatgccaatttcagtatgtcaataatcaaggttttaaatgtttggaagaaaatacaaacaagattgctgatctgttctgtattagtgacattctggtacttctagatttgcaataaatttatggattttttatttaaagaaaaaaaaaaaaaa

SEQ ID NO: 234026 - DNA, 720 bp, Homo Sapiens
gaattcggcacgaggaccttgttatctggaggctatgagctagttgaaagctctagacaagacagctgacaaagatggactggaaaggagtctctgagagagattttataggtcacatgaacggactcactgttaagcagagcctactttaggtcttacccaatcaaatgtgtgaccagtgtagccgattaatacacactcaattagattagcaaggagtaacatgctgtttcaagtaaaaaactttggttgtgaaattgcagctgtttggagccatttagtagaggcagagggcatgcagcatggtcagtacagggtcctggggagacgctgtaggagagaaggtgcatcccctcagcatgctcctgcagtgcccagcatcctaaagtactcggtggccagcagcctgctccagagactctctcaaacggttctgttgtgtgaagtctcccatgaaatacctccccagcacatgggagtacaaataccatgcaagttcgtctggtgacataccacagcaaattctcggccactcagtgagcaccgttgttccctttccaagaaggccagatctcagccctgaggatgagtgagtgggagcctcttcctttggcactctatctcagcaccaaaggagagtagctgctccttctatctgtggttcttttgtgctttgtttttgagacggagtcacgctctgtcaaaaaaaaaaaaaaaaaa

SEQ ID NO: 234027 - DNA, 661 bp, Homo Sapiens
tacttcctgtcttagtaatagaccaatacatggctctatttagcaaagtttttatactgaaacttgattattgctgccctttataatttcctcttcaatgatatttcagcagtttccctcttggtcctagttttgtgcacatttttttgaatgtggttcagattaattatatttctctcactttcttagctggtcctattttttcacattctggcatgtggctatcaagttagattgctgtaggcatcatattgtcatggtaactactgaacctaatgatgcagatggatggcacatcagtataataaatgatggaaaacggttcctaaaaattcatccctttcataagaggggaagaatgagtgcctgatattgttaatacctccctttctacctcaggcctttgcaaattgatgttcagagggtcactggagtgagagggaggaggggggcgtcttggaaatttccatttctcttttcaaacccaaaataggaatgactcttgctgtttgtcagatttgctgaaaattgctcctcacaaagaacatttttttttgtacatgtaattgtaaatacaggtttagtacgttaatgttctatagttctgatgttgataataattaaacccagataattttatagcaaaaaaaaaaaaaaaaaa

SEQ ID NO: 234028 - DNA, 706 bp, Homo Sapiens
ctcctcacaaccccaagagcccccagcccggtccatccacgtttggagtctggggagaggagcagggtcttaggactctcagctctgagcatccctggcagggtcttcaacctctaatctcttcccttaagccctgtggccacacagccaggagagacttgccgctggctcccgcctcatttcagcccagggtgctcatccaggggcccagaacagtcccacctgtgctgctatgcccacagcacaaagccaggcttcactcccaaaagtgcagccaggccctggagggtgatcctgccagcagccctacagctccacaccctacccacccatcggcagcccctctgctgttccccagggacctctcatacactggccaggaggctgcagaacgtgtgtctccccctccctccaagaggtcctgctccctctgccagaaccgtgtgtgggcgggtgggagggcgctcggggcccggcccctccctctccctgctggttttagttggtccctatgttggaagtaaaaagtgaagcactttattttggttgtgtttgctcacgttctgcttggaagtggggacccctcactgcgtccacgtgtctgcgacctgtgtggagtgtcaccgcgtgtacatactgtaaattatttattaatggctaaatgcaagtaaagtttggtttttttgttaaaaaaaaaaaaaaaaaa

SEQ ID NO: 234029 - DNA, 701 bp, Homo Sapiens
  misc_feature (71)..(71): n is a, c, g, or t
gaaccaaggttcagagaaactagagcacttgcccaaggtctcacagctgatatacggctgggcaagaaccntaccctggggggctctctatccccaaagtgtctgctttcaagcaccacacccacccagatgacttagtccatgggagaaacggaggccaccaggtgtgcagctccccaccaatactaaaaacatgtccacaggccaggctctatgcttctcatttaggcctcacaacattccagtgaagcagaggcttagaaaagtgatctcagttggcccaagatgacatgagtggtaaatgaagccactggagttcaaagtctggctctcacgtcagttaagcacaggccagattccctttctctccctccacatagctctcacctcctctggcctttttgctgatggcagaggtgtgctcctctttcttctttccaagggtacttcctcaaccctgctacagtccttatcaacacagcattcattctcagggaattgaaagctccaagtcacccttgttactggctccttccatcaagcagacacctcacctaacctggaacatcctttccaccatgctctccccttcatcaagctaactacctctgctcttttccattgtttcaaaacctcttgaaatgcagcagaaaggaaaaggaataaacatttattgagaacctaaaaaaaaaaaaaaaaaa

SEQ ID NO: 234030 - DNA, 520 bp, Homo Sapiens
agaactgccccatcgatgtgcggcgtccgctgtataagatggaacaaattccactgagctatcctcaaggtcacggattccatcctctgtcacctccatttcattgagatgatatattgagcccatgcgtagccttttatttgagatttccaaggccagcaatgttctcttcctctcccttttctttgtataaaaattcattctcaagaaaaactctcatatcaattgtttacatgtcactatggctaagacactaaaagccctctccctgcaaaactggtggcaaagctctctagagaaccacaaactgttgcatccttactacgtggggcagcagcaagcccaggtgaagatgtgcatgttcttggagaaagtattaataacataccgacacttacatctgggtgaataatttcatcaaatctcttaactcacgcttgcacaaacttcacctggagagagagagggaaagctgtgccagaaataaatggttattgaggtcaaaaaaaaaaaaaaaaaa

SEQ ID NO: 234031 - DNA, 744 bp, Homo Sapiens
  misc_feature (27)..(27): n is a, c, g, or t
acatgtcatgaactgtttcttttttanaaaaattcttgatgtgaattccactgttacctgaccatgtatattcagatgaatgtactctttcttgttccttgttaccagattaatctgagagaatgtggattcatcctgtcatctttctcatactcaaatacttaaaatggttcttttgcccaaaagtctcagagtcttcattttggtacagtggagtcacaacttgtaaggtggttaggttttaaagaccgtgcctaaggacaaaattgagcatgctcagaatggtccttgaaaatctcctaaattaccaataaatttctctttgtagtcttaaagtttaaatccctgtggagtgatatgtaggtatgaatatattatgcttatattaagtacaaaaatacaaactgcatatcaagagattcttatagcattaataatttccatgcatgtgtctttttccagtaggtatggttgaatttatgtaaatttattgctaatcccatcccttacgatctagagtataagctgcgcaagggcagaagtttttatctggtttgttcatggatgtattctaagagctgagaacagggcctggacacaataagcattcaataaatatttactgaatgaatgaactcctacctatattcctatttataatttggctccactttatcctactttagctcccattcaattcaataaaaaaaacatttttttgaacacataaaaaaaaaaaaaaaa

SEQ ID NO: 234032 - DNA, 714 bp, Homo Sapiens
  misc_feature (37)..(37): n is a, c, g, or t
gcacgaggtcaacgtgcctgaccagggcatggccgcnatgcagaggaagcgcagcgtggggcaacggccagtgcctggtgtgggccgacccaagccccagcctcggacacatggtcccaggtgccgggccctataccagtacgtgggccaagatgtggacgagctgagcttcaacgtgaacgaggtcattgagatcctcatggaagatccctcgggctggtggaagggccggcttcacggccaggagggccttttcccaggaaactacgtggagaagatctgagctgggccctgggatactgccttctctttcgcccgcctatctgcctgccggcctggtggggagccaggccctgccaatgagagcctcgtttacctgggctgcaatagcctaaaagtccagtcctttggcctccagtcctgcccaggccctgggtcaccaggtcactgctgcagcccccgcccctgggccctggtcttcctccaacatcacacctgctgcccattctccatttctgtgtgtgtcaaaggggactaacagcagaatctacctcccaactgccatgtgattaagaaatgggtcttgagtcctgtgctgttggcaaagtgccaggcacagttggggaggggggggtccttaacaagcgtgactttgctcattctgtcatcactaaggcaataaacctttgccaggtgaaaaaaaaaaaaaaaaaa

SEQ ID NO: 234033 - DNA, 706 bp, Homo Sapiens
  misc_feature (107)..(107): n is a, c, g, or t
gaaaaaggagaagcagatagagcagcagaagaaaatcctgatgtccaccatgaggaatcaggcgaggctgaaagtcctgagagcccgaaatgacctcatctcagatntgctcagtgaggcgaagctgagactcagcaggattgtggaggacccagaggtctaccaggggctgctggataaactggtgctccagggtctgctccgactgctggaacctgtgatgattgtacgctgccggccacaagacctcctcctggtggaggctgctgtacaaaaagccatccccgagtacatgacaatttcccagaaacatgtggaggtccagattgataaagaggcatacctggctgtgaatgcagctggaggtgtggaggtctacagtggcaatcagagaataaaggtttcaaataccttggaaagccgactggatctctcagccaagcaaaagatgccagaaatacgaatggccttgtttggtgctaacaccaacagaaagttctttatataagcctctgggaagtgaagctagtgttgaaccactaaaccataaaagtttaagttttttggggaaaggaaactagtagtgtttcctcctctttgatgctctgatactgttctgtttttcttcacgaaataccctttggatagctaaagtgttaactttgaaataaagcccaaattaatgctcagaaaaaaaaaaaaaaaa

SEQ ID NO: 234034 - DNA, 592 bp, Homo Sapiens
  misc_feature (44)..(44): n is a, c, g, or t
  misc_feature (113)..(113): n is a, c, g, or t
cggaacgagcctcatgtaggcccttaccaatatatgacataagntgagagtgatcccttaggactggaacacttcaagctcaaccaactgactcagttgtcattcttcacaanaagaatagtagaggatcatgtaaacctgagcctaactcttgttccagtatgaaagttgggggagagcaccagccacctaggaaaactgtatgttacctttttactcaaaggagtcccccctgcccagtaacagtcctattagtgtttaatttcagagtttgtgtctggtagacctctacctgattcagatttggttttgttgtttcaaccatagttagagacaaattctcatgtactttcagaaatcaatatctgcagccactgttacttttaattgacattaagagacacttcataggttcccacaattcagtatgggataggctttttaaaaagcacatacagaccaggcgtggtggctcatgcctataatcccagcactttgggaggctaagacaggcagatcacctgagctcaggagtccaagaccagcctgggcaacatggcaaaacaccgtctctacaaaaaaaaaaaaaaaa

SEQ ID NO: 234035 - DNA, 697 bp, Homo Sapiens
gaagtgatggattacaggcataaaccaccacgcctggccagaagtgctttaacaccaaatgtgaaaattgttcagaagagaaacattgagcatgaacaccatctgtgcgagtcatttacttattgcccctcacctctaaatctaccttctgtactcttcttccctgtaatgatggggctagttgtcctcaaactgtttctcagacttctttttaagcttgcttcctgttcagttctgccaataggggtcactagagagagactgggaggcagaaggagagaatatgcttcctgttttttctgttcttgttaatgttgcttacaggaccagcaatgcttcttcacctagagacacttctcccagcagtggcagtgccacttcagcttctttcagcactactggaatcagcctcagtgattccccctgtacccgctcagagattatccacagcagccagatggttctaccttccacaaagattgtggttgcaattctgggcttctaagttctggttacttcatatttttccttttgttcctccagccctagaggtggtagctgctttctgaagttattatttctagatgacttttggtttttcagcctttgtattttgcttttcagccctctaatgcctgtataaccaatttccctgtaataaataaatttcctccatgtgaaaaaaaaaaaaaaaaaa

SEQ ID NO: 234036 - DNA, 726 bp, Homo Sapiens
tgacgtgcatgaggaaagtgggaagggcagcctggacccagagagcatcttcgagatgatggagactggcaagcgtgtgggcaaggtactgcatgcctccttgcagagtgttgtgcacaaggaagaaagcctggggcccaagagacagaaagttggattcctgggatgatttgcacatcaactgctcaactgtggattgttttttacttttccttttaaaccggggaactgaaactcctaaatcttaaaacaccctggggaaggagctgattcacgaaggagagcgtttcaaccgtggcatttgctctctgcattccagttagcaaatggggtaaggcgttaggaatttatcaccaaatggaaagaacataatgtgagctgaagcccttgggactgcttccagaggtcctggtgtgggcgttcctcccagcaaggccaggtccatccctgtggagagaagcagctgcctagacttgggcttaatgggggagcttctgccctgttgagagcatagcctgggttttcatcttttatgtttcttcagtgactatctacaggcaccatgacagtgttcccaacaaggcagaaatcagcctggtctctccttccctgctcctggttgactgcccgtgacatgacaaaacattggcagtggtggcgcagagatgcaactcgagtgtgaataaagtttagaagcatttgcttttgaaaaaaaaaaaaaaaaaa

SEQ ID NO: 234037 - DNA, 611 bp, Homo Sapiens
ctaaaaaccgaaaactgtattgagaacctagaatattttcaacccatctatgtctacaaccctggtgagaaaaaccagaagcttgaagaccatagtgagaaaaactggaagcttgaagaccatggtgagaaaaaccagaagcttgaagaccatggtgtgaaaatccttgaacccacccaaatacctgctccaggtccagttcctgttccaggtcccaaaagccatccttctgcatccttgggcaaactgctgcttccacagtttgggatggtcatcattttaatcagtgtttctgctataaatctctttgttgctctgtagtttgatgcattgtttatctttcttattctttacttgaaataactatagggatacacaggagatcaaaaggaatgatgtattttttacgtgttggccaaagtcactggataaaatgagaattgtatatttgttattcattttgcaaattcagaaagttggtccagatatatgtcacagaacttttcacttgtatactactcttacaatggaaaaaaatcccgaaaactgtatacttctgattaaattcaataaaagattttgattagatatttaacaaaaaaaaaaaaaaa

SEQ ID NO: 234038 - DNA, 685 bp, Homo Sapiens
tagtaattggtgcttagtactatttatgcttaaatagatcttccactacaatgttgaagtcttttttatggataataacgtgtttgatggagtaacttattatttttttttggttggtggtttacacgttaatagaggtagtacaatttctttggaaaggtgtcttttgaagccagctgttaagcttcatacattacctcccttctcaaattcggtaagacagtagttttggggaacttttttgcccatgtgtcttttaagtgtgattttaaaaaaatgagtcgttcagttcattcccctaaacagaagaaaaggccaaataattaccttccattcctcttcatgtgggaatatagagagggttcatgtggcattttagagaaaagataatttatcctcattcaacacaggcccagaaaattgtgtcccagaaggatgtcagtaattgtgactaggccaggccttttagcattttgctaagacttgaaacaaaaaatgtaaatacaaaagaaatcaagttttgttttgaaagatgccttttagaacttactgtgtattaataaattgtcactttcattgtctttattgtaactccattgatcccgtatcttaacggttcacgtttagccaaataactgttttggaataaaaaccttggtggtgggggaaaaaaaaaaaaaaaaaa

SEQ ID NO: 234039 - DNA, 742 bp, Homo Sapiens
ttcctctcccgaaaagaggatgcctaggatggacattaactcagtccaagtatacaactggggtcctagaaattgatcaatttgatctgctactccatagggattgtctaagagtggtttgagccctttttaggcttcggacttctgaactggttaacagggcgttcacaaaacaaatgccccctcctcctagaagcacttcccttaagggaaagatcgttggagcagattctcgaggtagtggggaaaggaaagttttggatatcttttttacactgttctatctcacgttgaagtcttcctggggaagggcattcaggctagggagaccccaagtcaggattataaggggaagaaacaaagtgagctggggaagggtctggggcagttgcagctactggagggggagggaagttagtggtgtttggtgggggaaggtggtctaaggggtcccacgtgttggttgactttttgggatgagggatattaatttcttgagaagaagtagcttctggcttgtcccccgtatcctttagggaacagaggacaggcccccaccaccaacacagggcatagtctatttcctcctgggagacaggacttttgttattgacataccctattaaaagctgacaaatccaatcctcactagatcgaaacttttggccaaaagactgaaggtttgaggataggttttttggtccaaataaaacagcaatattttaaaaaaaaaaaaaaaaaa

SEQ ID NO: 234040 - DNA, 706 bp, Homo Sapiens
atgcccctccagggcaccagctcagggctaagcgaaggaagataggagcagctcagagctgccaggctctgccttcctcacagacctggtggggcaggtcctgttcacagcagcaggagtgaaggcctggccatcggtggagagggcagctgtcagagggctgggggccagggcacaggattgaagagtttcacatatcatcacagcatacactgggaatttggtgggggcagaagaacccagggccactccctcaatatgaagggaaaccaagctgaatgtgaccaccggcacactgctgccatgtcccatgtccacctttctccccgggaataactggccctgagacccctagacccaaggaggcctgtccatgccaagcatccgggaagcatggctggccttatccacccatgggtcacgtcggttcccaggggcagcatgggagatctttgggggcaacagggagagtctgggtggggagacgggacttgtccaagcagaaggcaggaccctgggaaatgcataatgtaaggacatcaataatagtattattttttttgtaagggaaaatcaatatgtacattctgaaatcattttctctgtaaatggttggatttcatttcacccttaaagggatgcttaaaggagaagataatattaataataaaaacagctacaaagtctgaaaaaaaaaaaaaaaaaa

SEQ ID NO: 234041 - DNA, 608 bp, Homo Sapiens
acaaaagagttggaataggcatgacttgttgaggccgttaagcgggttatttttacccttgtactgctaaaccaaaccgatccagaggacaacaaaagcccattttttgcctttggagagtctggttagagatagttttctccagggtaacactttacatttgttttctgtgtgccatcttcaagttcagcagccattttggtggttgtcttgatggattgtaacatctggtcatggtggtcatgaattggcaatccaaaccttgaggaaaatctgcagaaacttttgaaatgctttggttttttcccttttgtgtagattagaatcatatgagtctgtttaactgtttagatacaaaatctgagccctaaatttgaatttatttgtgtcctttaaatggggaggtttagaaagcggcaagaatgaagcctggcctaattcactgaagagaatccagatgctgctctggttttgtgatcttattatattcaaacattctgcctctacagatgtggagcctagtgctgtgtgcaggaccagctatagaatttgtggggcccaacacaaaacgaaaacaagggcctcttgttaaaaaaaaaaaaaaaaaa

SEQ ID NO: 234042 - DNA, 580 bp, Homo Sapiens
  misc_feature (71)..(71): n is a, c, g, or t
gtgcagttcccctttccctgggagccccaagaacagagtcaggcaaggggtgggagtccagggatcttggngacccctcctaggagagctgcagtctcttccctcaggggaacatcccagaatgcatatcgatcagctctcagccaggcttcgacaatctcgcagcccccactaggtggacacattaatgatttggtttctcccctgggcagccaacctgccccagaggcaccagacctgggctttcagctttgggaccaggctgcccaaaggtactcctttatacacccggcaccttccacgaaagatggtacttcccaagcaagcccctatgatttgtcactatagatggaaatgtgtggcatgcacatgagttgaaattcttttatgcatttttttgaagaaaaaaaaaaaaaaacaactctgaggacataggggatgtcagtttcctatggaagagacacctctgacccgttattcttataatcaaaatgaagggaaaaaaatgttttagttctttcccccactcgttgggttcaactagattaaaaggctgattttcagaaaaaaaaaaaaaaaa

SEQ ID NO: 234043 - DNA, 722 bp, Homo Sapiens
  misc_feature (73)..(73): n is a, c, g, or t
agaggacgggtggatatttcaaatttttttagtatagcgtatcgcaagggtttgacacggctgccagcgactntaggcttccagtctgtgtttggtttttattcttatcattattatgattgttattatattattattttattttagttgttgtgctaaactcaataatgctgttctaactacagtgctcaataaaatgattaatgacaggatggggttcccctgtgcttttaccagtagcatgaccccttctgaagccatccgtagaaagtactttgtcctccaaaaagctaacatacggttttgaagcagcattgaaacttttgtagcaatctggtctatagacttttaactcaagaagctaaggctagacttgttaccttcgttgaatgatgttagttgactgtactgtaatgttgtatcaactgaattgaatgtttgcctttaaacaatgaattttctttttctttcctttttttttttttgttgtaatagttaaagaggcttagaacaagctaacaggcaatagaaatatgtatatcagattttttaatgtaacaaactacatgttaattgttatcttattctttttatctttagtagacacttttaaaagaaaagacaattttgttgtgtttaactcaccaacacgtggtgtataatgaagacagaactataataaattagttttgttctgattttttagaaaaaaaaaaaaaaaa

SEQ ID NO: 234044 - DNA, 651 bp, Homo Sapiens
agacggagtctcgctctgtcacccaggctgcagtgcaatggcacgatctcggctcactgcaagctccgcctctcaggttcacgccattctcctgcctcagccttcccagtagctgggactacaggcgcccgccaccatgcccggctaattttttgtatttttagtagagacggggtttcaccgtggtctcgatctcctgacctcgtgatccgtccgcctcggcctcccaaagtgctgggattacaggcatgagccactgcgcccagcacaatgtgggaagctaatggacaagcagtttagcaacgttacataaatattaaagaagtaagcagtacgtataggttaataaactcaaagacacacctactaaacatcaaatatattttgtatgctgatagcaatctgtcttaaataagcagcagttgatacaattcagtactgtatataaaacatttataattttgtacacatacaatttttattttgtatgttaatcttatagttacgaaacggtctttaaattttagaaatgcaatctgaagactttatgcctttaacgaaatatctgattataaatccacatggggacagatgaaacaagaacaaccatgaattgcttgatagtttatgctgaaaaaaaaaaaaaaaaaa

SEQ ID NO: 234045 - DNA, 604 bp, Homo Sapiens
agggaggaaggaaggagaaaatggcaactatgtgaggtgatagatatatcaactcaattgtggtgagtgcttcacaatgtatacctatatcaaaacaagttgtacacctaaaatatatacaatttttcttgtgaagtatacctcagtaaagctcaggggcaaaaaaaagagatgagtcgatgttaacccaaactgttaaaaacagatgtcacctagttgaagctgcttccctatgtcatcaaaaggattaaaagagaattgaagaaaaagagcacttcaggaagaacaaatgataggctggaaacaaatacacaggggcctctagaagctgtgcctcttgatgaagaaggaatccctcgaggacaggagaggagctgggatgacacttgtagctctttgtgctaaaatgactcaggcagctcctgcattcattttgggtgctgaagttttagaactgttttccccacccccaccaacaccttcttatccctcctcctgggtctttcttagacttctcccagcaaagcagagtccgtatcctagtgtgtgctatggaaagaatggcaacatcacttgtgagttcatgaaaaaaaaaaaaaaaaaa

SEQ ID NO: 234046 - DNA, 614 bp, Homo Sapiens
tcccctcccgccccactttcccccgttgcccgagatggccaagttcaggcctgtgcaatgccgcttccctttgagcctccctctcaagggccacgcaggcagctgcagcagggccagctgcaggatggggctgccggtcactgaattgtcgttcaaatgcatcatctttgtggcgtctttctcatgcgagcaaagccacgtgctctcctgtctgctgtcacatctgtgcctggattgcttaaatattgtttgtgatggggaggttttaatctggtgatgcagagggaagcagggctgtgggggcacgtttaattggctcccagcagcgtggggggtgcttctatggtgtgtggggttttttgttgcctccctctagaagtgttaccgttttcacgtcctattaatgtcctctggttgttaaattacagcagcacattacagtgcactgggttccctcctggagtgaatacaaacggagggcatctacttgtatttctagaagttttgggagaatttagtgatttgtggctttgatcaatcctgttgactggtgtatgtctgcgcaaacctgtttcaaataaatcttttgttaaagtaaaaaaaaaaaaaaaaaa

SEQ ID NO: 234047 - DNA, 675 bp, Homo Sapiens
cactgttccctagcatgggtcttgggtctattggcatgtccatggccttcccaatcaagtctcttcaggccctcagtgaagtttggctaaaggttggtgtaaaaatcaagagaagcctggaagacatcatggatgccatggattagctgtgcaactgaccagctccaggtttgatcaaaccaaaagcaacatttgtcatgtggtctgaccatgtggagatgtttctggacttgctagagcctgcttagctgcatgttttgtagttacgatttttggaatcccactttgagtgctgaaagtgtaaggaagctttcttcttacaccttgggcttggatattgcccagagaagaaatttggcttttttttcttaatggacaagagacagttgctgttctcatgttccaagtctgagagcaacagaccctcatcatctgtgcctggaagagttcactgtcattgagcagcacagcctgagtgctggcctctgtcaacccttattccactgccttatttgacaaggggttacatgctgctcaccttactgccctgggattaaatcagttacaggccagagtctccttggagggcctggaactctgagtcctcctatgaacctctgtagcctaaatgaaattcttaaaatcaccgatggaaccaaaaaaaaaaaaaaaaaa

SEQ ID NO: 234048 - DNA, 756 bp, Homo Sapiens
  misc_feature (62)..(62): n is a, c, g, or t
cgtccggtgaaggggcagcactgaatacttaccaacgatcgtcaacgatgtgaaatggtgtntgatcccaaagagctcagcaaaatgttactgaaattcatcctcaatgttcccatgggcttgctgaccatccagaaactctactgcttgatcgaaatcgtccacagtgacctcttcacacagcatgactgcagagagatcctgcttcccatgatgaccgatcagctcaagtaccatctggagagacaggaggacctggaggcctgctgtcagctgctcagccacatcctggaggtgctgtacaggaaggacgtggggccaacccagaggcacgtccagattatcatggagaaacttctccggaccgtgaaccgaaccgtcatttccatgggacgggattctgaactcattgtaagtgcttggtgacatatgtttggatatttaactggggctgacagcatccttctccaactgctgtttgaacatagcttattatactgcaatgtagtgagcagttgagatacagcttggtatataaaatgtcctcattttccaaatgaatgtcaaagttgaagggtaagcaaaccaactttaaagatggaaacatttggctcttgttttctcattacttacttatagcaaaagacatgtattttctgctgagtcgtcattcttctggcagtttctccatagtgtttacacttaaggtgccattaataaaattttatgaaggaccctaaaaaaaaaaaaaaaaaa

SEQ ID NO: 234049 - DNA, 689 bp, Homo Sapiens
acagaaaagacagttaaagcaaagaagagaagtgattttcctggcctctcccagcatgccctgggctgagatgagatggtggtttatggctccagagctgctgctcgcttcgtcagcacaccccgaatattgaagagggggccaaaaaacaaccacatggttttttataggaacaacaacctaatctcatcctgttttgatgcaagggttctcttctgtgtcttgtaaccatgaaacagcagaagaactaacataactaactccatttttgtttaaggggcctttacctattcctgcacctaggctaggataactttagagcactgacataaaacgcaaaaacaggaatcatgccgtttgcaaaactaactctgggattaaaggggaagcatgtaaacagctaactgtttttgttaaagatttataggaatgaggaggtttggctattgtcacatgacagactgttagccaaggacaaagaagttctgcaaacctcccctggacccttgctggtgtccagatgtctgcggttgtcagccccttcctttcccccgacctaaacataaaagacaaggcaaagcccgcataattttaagacggttctttaggacattagtccaccatcttcttggtttgctggctctccgaaataaagtccctttccttgctccaaaaaaaaaaaaaaaaaa

SEQ ID NO: 234050 - DNA, 705 bp, Homo Sapiens
  misc_feature (58)..(58): n is a, c, g, or t
gcaaaatgttcccagccactgttaaaagatgagcgacccccctccaccaccaccacangaaaggcaggggggaggagctggggctctacacaaaatcagaggctgagacgggcactcggcccctcctcttcctctgtgaggcctcgtgttcagctctatgtgctggtgtccttgctcccgcagcgagttggaagactttgttgaagacttgaagaaggactccacggcagccagccgattggttactctgaaagacgtggaagacggggctttcctcctgcgtcaagtgggagaggctgtagctaccctgaaaggtaaactttctgctgggtcgggggaggagtctgagctgtctttcctgcggtgtttaaaaatctgccacatagaggattcattcatgtatgcaagtatttattaaacgtctacatgtgccaggcattgttctggacacttgggataccccacagcacaaagtaggtgcacatccccctcttcttggagctggtattagagtgggtgctgtaagatttcacactaaatgattccagtaacactttctatttgctaggctcttacagtgcaccgggatgcatgtgccaaacccgttaaaacacaaggtgggaggatcacttgatcccaggagttcaagaccagcctgggcaatatagagagactcacatctctaccaaaaaaaaaaaaaaaaaa

SEQ ID NO: 234051 - DNA, 446 bp, Homo Sapiens
acccaagataattggttgaaacaatcacttcttttaaactgagtgacccttcaaatatcccaattctgatttctcttcttgctggcctatgtgaagcatcatttattttaactacatttctctctggctgctaaagttacttctcttactttgatcttagctctgaatattaagtctctgcgctcactgtgggtatctcaggacattcccctgggttgccatctttggtgttcagaccccagggatcaactccagggaattctctgggggctggaactgtccctcttatgggagaacttctgtgttgttcttcatgtaacccagatgaggatcaattacttggtgacttgtttaatgaccctccattcaccgttccacctgatacttgtagatgaggaaatggacaaagagaggctagatagcctgcccatgataatccttgatta

SEQ ID NO: 234052 - DNA, 678 bp, Homo Sapiens
  misc_feature (77)..(77): n is a, c, g, or t
gtcagatgagaacaaagctgttaaactgttagcactgttgatgtatctgagtgccaagacaaatcaacagaagcatntgtattttgtgtgaccaactgtgttgtattaacaaaagttccctgaaacacgaaacttgttattgtgaatgattcatgttatatttaatgcattaaacctgtctccactgtgcctttgcaaatcagtgtttttcttactggagcttcattttggtaagagacagaatgtatctgtgaagtagttctgtttggtgtgtcccattggtgttgtcattgtaaacaaactcttgaagagtcgattatttccagtgttctatgaacaactccaaaacccatgtgggaaaaaaatgaatgaggagggtagggaataaaatcctaagacacaaatgcatgaacaagttttaatgtatagttttgaatcctttgcctgcctggtgtgcctcagtatatttaaactcaagacaatgcacctagctgtgcaagacctagtgctcttaagcctaaatgccttagaaatgtaaactgccatatataacagatacatttccctctttcttataatactctgttgtactatggaaaatcagctgctcagcaacctttcacctttgtgtatttttcaataataaaaaatattcttgtcaaaaaaaaaaaaaaaaaa

SEQ ID NO: 234053 - DNA, 708 bp, Homo Sapiens
attcctttgtagagctcataggcagtacagagaggtaagtcctgcctcagagggccttgtatcttggtgtagtttttaaatagtgcatagtgtatagtgtatagtgtacattgtgttttgcacatagtttgttgccccgaatgggttttttaccaagcctttttttctttcatgtatttacagtccggagcacaagattctcttctttcaaatacaatgtaattcgctttactttacaacactaaatctgggctttgaatttccagtgcattggactgattggattgttgggagttagaggctgttccaaccatccttagtttgggagagtggctccttctgcttgttttctaagcgtacagtcaacgggtgccatttgtggtatttaacatgttaggatgattgttccaaatgctgagttgttttatttctagatgtaattagttcactttatgtaatattcttctctcagactgactttaaaaacaaagttttatcattttcattgtatttgtatttattacagagtgttttagctttgatattctttgtattttcattcatttgttacatgagctttatcagtaacatctgtataaatggtttttaaaaattaactatgtatgtgcccatgccgaagtcgagcaataaaatcaatgctgtttgcactgtcacagcatcaacgtttttaaagaaaaaaaaaaaaaa

SEQ ID NO: 234054 - DNA, 744 bp, Homo Sapiens
  misc_feature (13)..(13): n is a, c, g, or t
  misc_feature (58)..(58): n is a, c, g, or t
gaataattgagtntgcagaaacctactgtgtgccttcaggtaaatggagagtggggtntgtctagcaacgaagcatctagaaggtctctttggccttaccggctctgttttaggtaagtccacgtctgagtaccagtgactgcagctcttccagttgtgctgtcatgcttatatgttagaaatgatcatcaaaggactcaaaagttttgccactaattgtattaccggggactgtcacaaccaagatttctcttaatttattcaccttacttatctcctggaagggcatattgaagtgctcttggagttctctaaaagggtttttgttggttgtgtatattcacttgggtgccagcgattgattccaaataagtaaatcttttttcccaaaaggatgtaagatggcttatggttataagtacaacaggctaacaaagtacaagtagatgagaaagtaaaatgaagaaataaagtcataggagccacagaattaacccaggaatgaataagtgtgtagtttggtgctgatgttatcatcctttatttgtacattgcttgtacagttgctctgagaaggtaagtcttaaattttcaaaagtgaaatgtcaccgagcatggtggcttatgcctctaatctcagcactttgggaggctgaggcaggcggatcgcttgaggtcaggagttcgaaaccagcctgacttatgtgatgaaaccctgtctctactaaaaaaaaaaaaaaaaaa

SEQ ID NO: 234055 - DNA, 600 bp, Homo Sapiens
cagaagtggaaagggtttcaaatccaagcccccgggttcctgtgtgcgttctacgcagcaaggcttcaaagtttcaaactggtttggaactcaaccaggtcctccaaaggaaaccaaggcaggcacaggatgggggcaggctggcttggcaggcagctgtgcggatccacccagagtgccttgggaggcagtggggttggctgtggctgctgtgagctgcagccaggcctctcccgcgtccccagggtttggaaggagggcctctgcacattttataagccacagactgcgaaggcctggagccccaccttccacccataacaaagaaagggatagtttcagaactgcttttatttggataactgactgaaggagtctcatttgtaaccaagatggaattcacagtatgttgttacattcacacttaaaaaatatatctctatgtacaggaatttgcaaagagatgtaaacatacattaatttccaagtacatttctccccttctccctggaggaaaaaaaaaaagccatccaatgaggcaaccccttcaaaataattttaatacaaaggatgcaaacatctaaaaaaaaaaaaaaaaaa

SEQ ID NO: 234056 - DNA, 720 bp, Homo Sapiens
ctgctgggggtgagctgccagacacacccaaacagtgccttggcagcagctcacagtgcaggaagcccaggtgatcactcttctgctgggcccaggctgcaccctgaggactcagtaactcactctcaacagaatattctgtgcaggctctccaggctctgggcgtcagggtgcaaggggcagcttgaactgtacggtccgtcctgcactcacccgatgcagaccttgactttgatgttgaaatgaacacacttgttttacccaagtctggtggaacaaatgcccaatcatgtgaccttaaagtgtactgcaaagctgtagctttaagtaattgctgttctgccactgcttactctgaaatctaccatcaaagaaagatagagaaaaggggctgagccttggaatatatggttataagcagatctttctttggtcagagaccagggtttgagccaaggctgtaaatgtgaacaatagctgtgcaaagccttttaacctgacttcttcattttgtaaattattatgcattaagtagcagcccaataatctgatttctagttttattttcaaagtaagtagcttcttttgggaaaaacctaagttaaactagtagttttgccataataactgctgatttatgtatttgctaaaggtacttttgtatctgctgtgtattatagcaataaaataatcattttgttagaaaaaaaaaaaaaaaaa

SEQ ID NO: 234057 - DNA, 653 bp, Homo Sapiens
atgtgtccaccagagggtatttaattcatgccaacttgaaaactctccagtttgtaggagtttggtttaatttattcagtttcattaggactatttttatatatttatcctcttcattttctcctaatgatgcaacatctattcttgtcaccctttgggagaagttacatttctggaggtgatgaagcaaggagggagcactaggaagagaaaagctacaatttttaaagctctttgtcaagttagtgattgcatttgatcccaaaacaagatgaatgtatgcaatgggatgtacataagttatttttgcccatgcctaaactagtgctatgtaatggggttgtggttttgtttttttcgatttcgtttaatgacaaaataatctcttaatatgctgaaatcaagcacgtgagagtttttgtttaaaagataagagacacagcatgtattatgcacttcatttctctactgtgtggagaaagcaataaacattatgagaatgttaaacgttatgcaaaattatacttttaaatatttgttttgaaattactgtacctagtcttttttgcattactttgtaacctttttctatgcaagagtctttacataccactaattaaatgaagtcctttttgactaaaaaaaaaaaaaaa

SEQ ID NO: 234058 - DNA, 640 bp, Homo Sapiens
  misc_feature (61)..(61): n is a, c, g, or t
aaaaaagattgtaaaatgaaaactgaccaaatgaactaattctacccacctatggtctttntaaatgtcgagtttcaaaacccatttgccgtatactagagtgagcttggaaacttacctgattacaggaattgcttgggttcaggcagattcccactttcacctctagagatttagattcagaaacactggggtaggccctggagagcagtactcttaacaagctcctcagtgcttcttaccattaggcaaattagggaaacactgcattgggtcaaagtgctgcctttaatcgaccattagagggagttctctaaataacaaagttattactctaattcaaaatgctttaaagaattttccaaggaatacaagccatctggttggtgttagttatagcagtgatttcattagagtgtacatttaacattttagttttatcaaaattttttgaaattaagaattagaaccagagctcctatcagtatatatgtacacaggtgtgcatgccagtgttcaaaacagattgtgtaaaagttcaagcccgttttagaaagccaacattttatgttataatatgctgttaatcaggactttattaaataaaaacattggctcttccaaaaaaaaaaaaaaaaaa

SEQ ID NO: 234059 - DNA, 742 bp, Homo Sapiens
  misc_feature (54)..(54): n is a, c, g, or t
atctgatttagatgatctactttttatgcctggcttactgtaagttttttattntgatacacagttcaaacatcattgcaacaaagaagtgcctgtatttagatcaaaggcaagactttctatgtgtttgttttgcataataatatgaatataatttaagtctatcaatagtcaaaacataaacaaaagctaattaactggcactgttgtcacctgagactaagtggatgttgttggctgacatacaggctcagccagcagagaaagaattctgaattccccttgctgaactgaactattctgttacatatggttgacaaatctgtgtgttatttcttttctacctaccatatttaaatttatgagtatcaaccgaggacatagtcaaaccttcgatgatgaacattcctgattttttgcctgattattctctgttgagctctacttgtggtcattcaagattttatgatgttgaaaggaaaagtgaatatgacctttaaaaattgtattttgggtgatgatagtctcaccactataaaactgtcaattattgcctaatgttaaagatatccatcattgtgattaattaaacctataatgagtattcttaatggagaattcttaatggatggattatcccctgatcttttctttaaaatttctctgcacacacaggacttctcattttccaataaatgggtgtactctgccccaatttctagggaaaaaaaaaaaaaaaaaa

SEQ ID NO: 234060 - DNA, 721 bp, Homo Sapiens
  misc_feature (74)..(74): n is a, c, g, or t
actttttaggtaaacagtcatataattatgcaaataattatagttgtgtctctgcctttctaatatttatactntgtgtatattatcatgttggccaggactcaagcgtctttctcttgtttctgactaatgcgaatgattctaatgcaggggtttccaaactggtggccggggggccaaatccagccaatggtctcttcttgtaaataaagttttattggaacacagttacacacatttttctacatattgtctgatggctactgtcacgccacagcaatggtgttaaatagtccagacagaggcggtattgcccgaaaaacctagaatattcaccatctgagcttttacgggaaaatttgctaatatctgttctcatgcattaaatacaatgtttgttacaggttaaggaagtttctgactatttttagctttctgaatatcttgtggttgtgtgtgctttaaaattaggactaaatattaaatttaccagttgcttgttaggggcctatcttttgagatgcccaaagtttcccttttttagtctcttcatgtagtgagttgtactaacagattctctaatgttgaaccgtctttgctttccggagatagactttacttgctcctggtggattggattctgtttgttaatacttttatttttgggtaattacatccctattataaataatatgtcagcatcaaaaaaaaaaaaaaaaaa

SEQ ID NO: 234061 - DNA, 732 bp, Homo Sapiens
  misc_feature (96)..(96): n is a, c, g, or t
tcccagagagataatgagcctggagaacataggtgattgctcaagacccagcacaagcatccatgattcctgtaataaggcttccctctgctgttntcactgcagccttaccaagtatggttgggtgtgcaaagtttacattttaaggacctctgctgctgccactgtcattgtggttaatgatggctttaaggtttattcttattcccgtatctttgagagaggaagagagtgggattgctacccacattttaatgaaggtggagctgagccgtagaactctctgggagccatccaacctggctgtggctcataacaaggtattgatcacttcctttggcctgagtgagtccagggtgcctagacaagaggtagcagcctgtggatgtccagcacctttgcagggaatacagggcccaatctggcacatgccccttttcctccaggcccagagcaggggctgttgccgaaaggctgtggagcaacaagttgacatctgacctgacatttgcctatgaacgtttgtcacacttccgctgtgagttgctgaggtaagcaagctgtggggccttcgcaaggcggagcaggccagatccagggctggggaaccccttagagagaggaagacaataattaacaatagctaacacttacagaggcttatagtcagccctcatccacggattcaaccaactgcgataaaaagtattcaggaaaaaaaaaaaaaaaaaa

SEQ ID NO: 234062 - DNA, 733 bp, Homo Sapiens
  misc_feature (16)..(16): n is a, c, g, or t
tgcctgctcttcattntgggccaactgtacagctcattttgagatagtagctgatcatttttctgatcagttaactttgtcttattaagcaaaatggagaatataatgttgggaaataagtgtgttgattaaaagaaagtatccccttctaccatcttccatttgtgtctgggttgtgctgggtaaagttctagacttactaacgcagacttcattttggtccggtttccacagcatgcctcgggcatcagtgtccaggagtagctgtatttgaggtttccttcactctggtaggttcctgattcctgatgaaaataacttgaaaaaaaaaataattatactactgatcctcttttgggataatgaaattgcgaaggaatgttgttgattataacttttattttttaatgtacagatgtactgtctctcattgagcactgatagaatttatttttctttcaatagtttaaaatcacttatgtggagacacatacttaagtgtgttcaactcgttttcttcccacatatctagtgtgacctttaaaaaccacaactttattttggacattaaatgtgcaatattcactacttattcattgttccacatttttcctacttgtacaaagggtaagtttttatataatggtgagaaacaggaagaaatgataactggttaagtaaaattctgcaaataaactagattcgaatttaatttaaaaaaaaaaaaaaaaaa

SEQ ID NO: 234063 - DNA, 728 bp, Homo Sapiens
  misc_feature (12)..(12): n is a, c, g, or t
  misc_feature (182)..(182): n is a, c, g, or t
  misc_feature (197)..(197): n is a, c, g, or t
  misc_feature (255)..(255): n is a, c, g, or t
tggggcggtgtntgagacttggaatcaacgcttccgttggtggcagtaaatcctgtccctaaccctgcagtacagctgtgccgtgtacaggagggtgctgtctgacgccagacacctggactacagatcgcagcctgattcctggtcattgctccactgaaccccagaccccagcctcgttntgggccctcatcccntagatccagggaccccagccccatttcagcccttgggcccttgtaggatgcgaggccntgggccccagcccccagcccatccgtggcccaggcactggggggctgaggtcctctgagaagggacacagggcctggggggctctctcagcccatcagcaggagaggactgactccagaaaaatcagcgtttgtacccactcaggctgccaagacctgtgtccgtccttccaagctcaaccttcagagttcatgaggccccttgcccagaatgtccacagagttcatgaggccccttgcccggaatgtccacatttgaaacctcccaacaccgagccccatttcaagtataaccaggagggaaaatggtgcttgaaataagcatgccacaaaggaaaacctgctttctcgaaatgggccctggccgcccaggccctgacctccccggccaggatggaacgttccagagacccattagtgccaaaggcaaatgaaaacacaccctgtgaaaatgtcaaaaaaaaaaaaaaaaaa

SEQ ID NO: 234064 - DNA, 671 bp, Homo Sapiens
  misc_feature (108)..(108): n is a, c, g, or t
taaagttggatagacctgggttcaaatcatagttcagctttcaataactgtatgtatgattttggctaaaggatttgactttctctcaactgcagttttcttaatctntgaaatgcaaataatgtttatctcagaagactatttctaggattaactgagagattaaaggaacagcagcacttaggctcaaaatcgcccctacaaagcagtagttgtttcttaattgctaagtaatctgtttgcactctaggaaaagtaaatggagaggtaaaagaaaggcattggggacaaatgaaagagatgatgtagatttttcggatgggtgggtatattttattttccagtttattttcatatttctttactgtgttatttctggaaactttaatgttttaaacctcttttataaaattcaatgacgactactagaattctattcttttcaaaagttaacttatctccaaagtggctgaaaatattgtttaccattacatgattatgaaatgactgtgaagaatataaaattaaacttagtgacttaattagtcactgccttgctaactttgctgtaatttttttaaacgtcttgtttttaatatagcaaactatctcaatactggctggattaggttaaataaagaatttttatgttcaaaaaaaaaaaaaaaaaa

SEQ ID NO: 234065 - DNA, 698 bp, Homo Sapiens
taaatgggatgatgtatgtgaatgcttagcttggtgcctagcacagagtaagtggtcaatatgtggtagttgtcattattaatattttagatgatcttattagacttatacatctaattatagaaatacatagacttgatagaattttattttcaggcatgaagaaatattctttggaaaagctaaatttttggtgattgacataaagatttacttgctcatattaactaaaaattatagtactctccaagaattaatgtgccctaaaaattttcctccaaaaacttatccttatcatgtgataatgaagaacatttgatttcttgaaaggaaactgctgtaggcagcatctgggaatgcaaatcttcaatcacatttctattctcaaacacttggagaagtctataatttacattcagacttcaatgcaaattttgtattgtgaacttcacatttccaaaaagttactttaaaaagactttaagactgaaaaaaaaaagtttatcaatgctaataattttctagtatgcaaatggacatgtgatgcctataaaacacaaaaatttctctgaaaacaattttgttcttatttttttctttatagttcactgagattggcatgtgtttttactttgtatctaagcatgttaacatgtcttcttaataaatattccttattgaaacaaaaaaaaaaaaaa

SEQ ID NO: 234066 - DNA, 683 bp, Homo Sapiens
  misc_feature (22)..(22): n is a, c, g, or t
aaactagtgtctaatgctgctntgaatatgtttgaaagtctgaaaatgtaaatagtttatcaaaaaaaaatcttgtacagtccagtgtaaagtttttaaatgaccttaagggttgccatcacatctttctcacactctcctcttgataataataataataaaaagtttgctaaggattaaagaaatgggaaaaataaaaaaaatctcttcaaatttacaggaatgaatcattgttcttagctttgttgcatacacaaacttcttggattttgttgtgcagtattgacgtgagataaagctcaacattgaataatctttcagtggtacttttcaaagtcttcccctcctctgcctcataattaagggaaaagacaaaattgaaagacacactgtctttatctatcctggtgtatgttggcaccttagctactttttttttttcctttttgcacaaggtgctttcctgatatgttcaacatgccatctttgggtgataatgtatatgccgtgatggggctcaggccccttaggggagtgtctataagaactgcctatttatgctcatttacctcaagactgtcctctctaccctaatctagttgtcatcactccatcttttgtactgctgttgacacttacaaattaaagataaattttgttttatgaaaaaaaaaaaaaaaaaa

SEQ ID NO: 234067 - DNA, 692 bp, Homo Sapiens
  misc_feature (12)..(12): n is a, c, g, or t
cttagcttgtcntgaggagaaatagaaatgatgtctatgaagctgtcagtaacgtgtgaaagcgctgtccctatgagcatatatgtgttaaaccttctgttattccaaaagagaggtttggcacatcaactcgaggaatatttacttaagtggaggagaaacaaagcaactaaagtagccaaaattagcagtgaacagaagaaaattctcaggaggaaaatggttcttcagctggttttgcaaggattagcaacatgtgtgtcccattccagagcagcaaatcacggcgtaggccctagccattttgctcagggaggactgcgctcttcgggaaaagttctgttgcaagtcacagattataggtgtgtggtagaaggccaagcctgagctgtcacttcctcagtgtcaaagggtctcattacatttcattacagtgattttctttttgctgaaacattaggaaccctggagcactgagccaagatcatggaacagaatcaccctctcctgcatgtttttgtttctgtctcctgcttttctgttctttttccactttctctatgtgtgagttgacttggctgcctgtagcttcatcgtcaaagctggtccacgtgggttcaacttggtgctctcactctcctcccagcattgtttttgtcatcaaagctaaaattaaaaaaaaaaaaaaaaaa

SEQ ID NO: 234068 - DNA, 728 bp, Homo Sapiens
  misc_feature (34)..(34): n is a, c, g, or t
  misc_feature (37)..(37): n is a, c, g, or t
  misc_feature (594)..(594): n is a, c, g, or t
tgatggcgggatgtacgtcttccagctgtttgantantactcggccagcggcaccaccctgctctggcaggccttttgggagtgcgtggtggtggcctgggtgtacggagctgaccgcttcatggacgacattgcctgtatgatcgggtaccgaccttgcccctggatgaaatggtgctggtccttcttcaccccgctggtctgcatgggcatcttcatcttcaacgttgtgtactacgagccgctggtctacaacaacacctacgtgtacccgtggtggggtgaggccatgggctgggccttcgccctgtcctccatgctgtgcgtgccgctgcacctcctgggctgcctcctcagggccaagggcaccatggctgagcgctggcagcacctgacccagcccatctggggcctccaccacttggagtaccgagctcaggacgcagatgtcaggggcctgaccaccctgaccccagtgtccgagagcagcaaggtcgtcgtggtggagagtgtcatgtgacaactcagctcacatcaccagctcacctctggtagccatagcagcccctgcttcagccccaccgcacccctccnagggggcctgcctttccctgacacttttggggtctgcctgggggaggaggggagaaagcaccatgagtgctcactaaaacaactttttccatttttaataaaacgccaaaaatatcaaaaaaaaaaaaaaaaaa

SEQ ID NO: 234069 - DNA, 635 bp, Homo Sapiens
ctgctgtggcaaaaaaactattcagtgccaaagctctttcaatatttgtgggtctctttaacatagaagagacaaatgataatattcaaattgttattaaaatgtttcagaatatcagtaacattataaaaagtggaaagatgtccttaattgatgatgatttcagtcttgagccgcttatttctgcatttcgtgaatttgaggagttagctaagcaactacaagcccaaatagacaaccaaaatgatcctgaggtgggacaacaaagttaatatgattaaccacctgccgctgatcagccttatgttcccaaagagccctgagtagtgctttggtgttcacagtctgtttttttgttgtaacttatattttttaatgctgatgttaactttgtcaaactcttgttttgagctggatcattttgtggatgccaaatgaatatcaaaactgaaaacacatttgttgatatttgtcttgctgtccagattgcggtatttttcagtattaagttttcaatgaactgtgtcacctaagtaagctaccctgctattcgttgtttaaatatatggttctctatttgagtctgtgttttcaataaagttctatgttaaaattggaaaaaaaaaaaaaaaaaa

SEQ ID NO: 234070 - DNA, 623 bp, Homo Sapiens
atatgtttaaagttgactttaacaaggggttaattgaaatcctgggtctcttggcctgtcctgtagctggtttattttttactttgccccctccccactttttttgagatccatcctttatcaagaagtctgaagcgactttaaaggtttttgaattcagatttaaaaaccaacttataaagcattgcaacaaggttacctctattttgccacaagcgtctcgggattgtgtttgacttgtgtctgtccaagaacttttccctcaaagatgtgtatagttattggttaaaatgactgttttctctctctatggaaataaaaaggaaaaaaaaaaaaaggaaactttttttgtttgctcttgcattgcaaaaattataaagtaatttattatttattgtcggaagacttgccacttttcatgtcatttgacattttttgtttgctgaagtgaaaaaaaaagataaaggttgtacggtggtctttgaattatatgtctaattctatgtgttttgtctttttcttaaatattatgtgaaatcaaagcgccatatgtagaattatatcttcaggactatttcactaataaacatttggcatagataaataaataaaaaaaaaaaaaa

SEQ ID NO: 234071 - DNA, 702 bp, Homo Sapiens
  misc_feature (207)..(207): n is a, c, g, or t
  misc_feature (256)..(256): n is a, c, g, or t
  misc_feature (683)..(683): n is a, c, g, or t
gccaagaatcggcacgaggcgtggagagcagaagtgatggcaggaagactctcgcttttaaacatctggtttgggagagaccatcgacttggccagtgagactgagaaatggggagaacgctgctgttaggaggaagttgtgtccagttcagggtgccctcgggagccctgtccctgttgctgtggcccctctcacgccgccatctntttgccccgccccgcccctccggcctccccacaccccccttgccctcantacctgtatctcaccggcgtgtgttcaccctcccgggtggctcacacactctcattcacacacacaaatctcaggaacaaacggtcccagagtcctccggacccctgcccagggtctctgcaggtctctgccccacgcgttcccgtcgctgacaaagccaccagctgcctcctttaagcttggtgctccggctctgggcctttcttgcgctctttctattttttttttttttttttaagaaaaacaacaacaacaaaaaaagacaatgaaaaaaaaaacgtcatgtgagtgaagagatgtcactgtctgtggtcttggagaactagtctcgtagctgaggggtggggtccctctgtctggggcactggcacccacagcaggactccgccagtctgatgccaggactgaataaagtgtatttgccccngaaaaaaaaaaaaaaaaaa

SEQ ID NO: 234072 - DNA, 742 bp, Homo Sapiens
  misc_feature (70)..(70): n is a, c, g, or t
tcattaattttcaaaacttccaatatccttccaaataattcccttttgcttacgttagcgagtactagtntgttagccagtgttagtttctgttgatcctaaccaaaaaaccctaactgagatatcagtctcttagcgcaaagtttgtgaatacggtcatccctccatatgaggaggggagtgggaattggttgtgggacttccgtggatatccaaatcagtggatgctaaagtcccttacataaaatggcatagtatttggttatcatcctccccatacatcatctctagattatttatagtacttaatacaatgtaatgctgtgtagtcatactgtattttttacttgtatttttgttgttttgtgggatttaaaaaatatttttattctgaggatagttgaatccacaggatactgagggccagctgtattcacaacccaaatcacatacaaagcgacaagttcatacacaataggcctattagaacaggactgttctctcttgtttatcattgcagcctttctagcacaaagcctgggacattctggacatttagtatgtgttaaatttctcttactacattatttccaacagtatttactgcaatctgcaattaccttccttttgttttgtaactgtgtcccccactagaatgtaagctctgtgcagatagtgtctcatttattgatgtatccctggcatctaataaaacactgacaacacaaaaaaaaaaaaaaaa

SEQ ID NO: 234073 - DNA, 513 bp, Homo Sapiens
  misc_feature (15)..(15): n is a, c, g, or t
  misc_feature (52)..(52): n is a, c, g, or t
taacaactattagcnagtgataagaaaaatccatttggcttaaagtaaactntaataagtgcctagtattgcagatgcagtttatggtgaacttagaggattaaaaaccaaagggggcttcattgagatattcacatgccataaactctcccatttaaagtataccgtttaatggttttagtatatccacagagttgggcaagccattaccacaatcaatttgagaacattttcattaatcacaaaagaaatcctgaaatgaaaccaccaccaccatcgctccagccctgggtggccactcctctactttctgcctcttatggatgtgccataagaaatgtggacatttcatataaatgagattatataatatgtggtcttttgtgacttctttcacttagcgtattttcaaggttcatccgtgttgtagaatgtgtcagtactacatttctttttatggccattccattgtgtgaaatatatcacattttgtttaaaaaaaaaaaaaaaaaa

SEQ ID NO: 234074 - DNA, 447 bp, Homo Sapiens
  misc_feature (409)..(409): n is a, c, g, or t
caaggtcatgatgttggattctgttgcctgggtaccaccagagggaaagctggggcggtaaggaaggcatatgctcttttccctttttgctggccagtaatatcaaggattcttttcttgctcactctttttctttgtgcctgttgcaatgcttaaatgtgaataagcctttattgtttaagattctatatgctgcactaacctttggtatccttttaatagtactgataagttcgtctttcaaagtaatccttgagttcaggccccagtgctggagacgtcgtaaatatttacatgattttgcctattgtgattatcgctatcactacatcccctgactaagggaaaccatgatgtctgagtaaaactaattggtttatgctgttaacaatcagctgtttttcccctntaataaatgtttgaaatttgaaaaaaaaaaaaaaaaaa

SEQ ID NO: 234075 - DNA, 581 bp, Homo Sapiens
  misc_feature (266)..(266): n is a, c, g, or t
cgcacccaccggcccaagttcggccaaattgtcaacacgctagacaggatgatccgcaatcccaacagcctcaaagccatggcgcccctctcctctggcatcaacctgccgctgctggaccgcacgatccccgactacaccagctttaacacggtggacgagtggctggaggccatcaagatggggcagtacaaggagagcttcgccaatgccggcttcacctcctttgacgtcgtgtctcagatgatgatggaggacattctccngggttggggtcactttggctggccaccagaaaaaaatcctgaacagtatccaggtgatgcgggcgcagatgaaccagattcagtctgtggaggtttgacattcacctgcctcagctcacctcttcctccaagccccgccccctctgccccacgtgccggccctcctggtgctctatccactgcagggccagccactcgccaggaggccacgggccacgggaagaaccaagcggtgccagccacgagacgtcaccaagaaaacatgcaactcaaacgacggaaaaaaaaagggaatgggaaaaaaaaaaaaaaaaa

SEQ ID NO: 234076 - DNA, 641 bp, Homo Sapiens
  misc_feature (21)..(21): n is a, c, g, or t
ggtgggcaccagcatgcatcnctggagacaggccctcaggcaccagcccggctgtttactcactgaagagctgcgtgggtgtctgctacgtgctgggccctagagatagagcagtggccaagacgtaccttagtacccaggtccttggggtgagcagaaaccttcaccctccccagtcccatgggctcctcacagcaaccccacaagggcagtgccgggatgctgaacgttcacacaaggacagggagggtctgagtttaggtctcaggttcttccagtgcgcccagggctgggggccacctacacagatggtgaggtcggaccatggcgcccctgcccccgggaatgggccccaggcagggctgctgtgagggccaaggtctggccacgctggccagtacccatgtccgggcctgaatgcacagcccctgcccccgaccccacagctcactccactaaccagctctctctcttttgactttcagaccagttgttaaattgcccgcctccgccaagggccccctgggtgtgtaatgtccagtccccagccaggctctgtcccctgccatacctagactgtgtgtttcatatttttttggaaagagaagtgaacatccagccccaaaaaaaaaaaaaaaaaa

SEQ ID NO: 234077 - DNA, 735 bp, Homo Sapiens
aggggcctgagagttctggctttttttttttgtttggttggttttgttttgttttgttttgttttttctttaaagctctcctggtgattctaatagccagtattgggtaatcaatgttttagctaaatgtgacactggtttgagagtaggcaacaaaattaaagttcaccagacatctctttgtggtagagtttttttttttttaaactgggaccagatttcacagagcttattcaagatacatggaggaataataaagaagattaaggctactgctcattatcatttttgtctttcatattttttaagggtttgcatttctaggacttggaatagttgaccatatacatagctaaaggacatgtccctgaatgagaccattatatatattatctgtaaaatatttcactatttttttattttataaatctttgtagaaataagcaatgaaatactactttcatcttttgaaatgggatttttcaaggcagtgtccttttggcattaaggtaggggggagttaatattctctctgccttgtttccacgtgaatcaatattaaagtcatggacattttaaaatctcaatttaatttcttcttatttactatgcagtatagccgtgaacaagtaatgtagatttagttttctcatcttcaaatgccctgatcaccctacctcaccagggttgttgtggggataaataaaacttttatggaaaaaaaaaaaaaaaaaa

SEQ ID NO: 234078 - DNA, 693 bp, Homo Sapiens
tgaccttagttttgacctggctttatcctgagcagcctctgtgaattcttaatgctgtgctctttaacaggggtactttttccagatgtttttgatactgtattcattaacatataataaagttatcagtgtccctgaaggctaattttttttttctgactgaatatgagatatggagcgtgcaatttgtacttattggtattaacattaccaacaaggtttgtctttttcttatatatcattactttcttggctgagagctgtagtctgtggtagttgttttgttttgttttttgttttttttttgtagttttcttgatcgtgatcaattaagcagaaagtagaatttcagtcaggtaacctgtctatattagctaaattatcttttgcttattacatagagtgctagaagtatgctgtcatggcatatgtcctagtttctcatcaaatggaccaaagtcagtgattttatttgaagaggaaaaattgaacgtcattgtaaattaagttgcaagtttagtaaccatattgtaccactgtttgataaatttgaacgctttatggtatttcatatttagaatgttcaaaatagtactgaagtattcaaatacatacaaccctgagcgatattgaagtaaaataaacatgtatttaaggaagtgtcaaccttcaattataaaaaaaaaaaaaaaa

SEQ ID NO: 234079 - DNA, 721 bp, Homo Sapiens
  misc_feature (12)..(12): n is a, c, g, or t
  misc_feature (53)..(53): n is a, c, g, or t
aaaggtcaagtntgttaactttaaaatggctacacgattttctgagaatctcntgggtttaattcataaattgcatctttcctcccagagtctatatttagctctttttctcttcaggaaatattacacttctaaagaatgtaattgaatttgacatcttaaagatttagtagttctctaaggctactcgattctttctcctttatatgcaaattaaatgttatattttaatcacagaaaaccatcttagaactcggaggaaagtaactaaatattattatccctatttaacattctaggcattcagtaaacatttaataatgagccctttgctgattcattgtgcatattgcttttgctttatcctctcaacttgcatggagaaacatgacaagaaataactttttaaaaatcataaatgggccaggcgtggtggctcatgcctaatctcaacactttgggaggtcgaggcgggcagatcacctgaggtcaggagttcaagacccgcctgaccaatatcgtgataccccgtctgtactaaaaatacaaaaattggccaggcgtcgtggcatgcgcctgtggtcgcagctacttgggaggttgagacgggagacgcgcttgggcccgggaggcggaggttgcagtgagccgggatcttgccactgcactccagcctgggcaacagagcaagacatggtctcggaaaaaaaaaaaaaaaaaa

SEQ ID NO: 234080 - DNA, 590 bp, Homo Sapiens
tgccctagacctactgaaacatactctgtgggcggggcccagcaatctgtgtttgaaacgcgattctgattatttgacaaaagtttgcaaaccactggtctagataagtagctcttagccttggctgcacattaaaatcatctgggcaacttttataacctaccaatcctggcctcttcctccaaagattctgacttaaatggtttcagatggggaccattgttatgcggttatagccgacgtctaggtgctacctgaggtcttcaaagctaaaggtcagtgtttcccagccgtaaatgcatacctctagacctggccttctcaagccactaggtgttgctataatagagaagaaaaggcattttcagaaccgtctttggatatggatgaggaggaggaaaatgtatttcttagcttctgataagagattattttgttattttaatctgagtgcaatttgctaaatattcatttgcaacttgttaaatttattcaaagaaattaaatgcccataaatgacagaaagaataaagaattgtgatatatatttacaataaaatctctttagcaataaaaaaaaaaaaaaaaaa

SEQ ID NO: 234081 - DNA, 748 bp, Homo Sapiens
  misc_feature (27)..(27): n is a, c, g, or t
catactgttcagcgaccccactcttcntagtggacagaggtcgagatccccactgctgaagttgtcgagcagcccactgagaacaaagcagatcccaaggatgggaggctcagaagcaagaagaagatgaaagttgtgccgctgctgaggcgttgacagcgcctgaggatgctgggaggcccgctgtcaactccccagcaaatcagagccgcgggaaccaatgcaagctctttcatccttcattaccccagttaccttctgaggaagaagtaaacagccttgggagggaaataattaaactgacaaaggaacaggcagctgcagaactggaagaggtcagaagagagagtcccatagaaggtcagaggagtgagacggggccagccccgccaggcctggccatccagggggagctccctaaatctcacctggactccttcgaggccagccggccagcagccaaagcttccacaccggaagacggcaaagggatcccagagggcggaggcatgaggagcaccgtgaaaacctgaaggggagagggatctgacacaatgacacattgaaagccccagagagggtcaagaatgaagcatcggaatggtgcgctcacgtcgccttctcctgaaatacctccgagtctgcaagtgagaaaacgcgctgatcctgttgcaaactgtgaatattctgatgatgccagtacagtttgatttattaaatgtaggtcctcaaaaaaaaaaaaaaaaaa

SEQ ID NO: 234082 - DNA, 717 bp, Homo Sapiens
aaacaatttaagtatctagcacattggattggttataaagcaaggaatgttcacacagtaggatattataagtatgctgatggaaatctatattgccaggaaaagctattcattatgcgttgtgaagtcagaaagtaaaaaagggtagatagaagtattcgaagtatagttccattttttgagactaataaaacatatgtttaaaaggacactaaaaactggagttatagatatccagatagaaacagtagttatctttgggtagaagaataatgagtgatctttacttttttactttttattcatctttgtgtttttatttatctaaaatgggtattgatttttaggacggttttgaaaaagaaaagtgttgggaatgaagcaagtgattgattggaaaacatactgaatggaagaaatatttagattaaaaatgaggtaggttgaagtttcttctctgaaatgatagataaatggtgaagataaggcttattgtgaggattcagtgaggtaatatatgcaaagtacttacaatgttctggcacatagtaattaattaagaaaatcgagcacccttaattacctagaatgcagggttgttagttttttggttgacttttgttttgctggggcattctgccatgttttagtgtcatttaataaataatagtaacaataaaggttaacatttattaagtgaaaaaaaaaaaaaaaaaa

SEQ ID NO: 234083 - DNA, 558 bp, Homo Sapiens
  misc_feature (14)..(14): n is a, c, g, or t
aaataaagcaattnttttttgactttctcaaataagttttcaacaaccaactgacctacagctccctgtgaatgaaactttgactgtagagaagttaaagttttgtattttaatactttcttaagtattttaagggttttttttattaatacatttttacctttatctttattcagggttttttgaggtttagtatatcttagttgacccatttatttatttattttcctgaagaactaatttgctttgcatgtaacttacaataaaattcctctgtgtgattagagtctggctttcaggaatatgtaacacccacttttctttcttttttcttgggaagtcattgctgttcatcactttttccatcaagtgaaatatacagccttaaaaacaataggcctgggagtgtttgtttatatttgcttaagcaggtaagagtggttgcatttattataaaatcttatgtagtttttaaatgtgaaaatgtcatcaataatggtaatgcaaatcaaataaatttgattttagagctcaaatgccaaaaaaaaaaaaaaaaaa

SEQ ID NO: 234084 - DNA, 768 bp, Homo Sapiens
  misc_feature (24)..(25): n is a, c, g, or t
  misc_feature (41)..(41): n is a, c, g, or t
  misc_feature (96)..(96): n is a, c, g, or t
tgcgagtccatcatcaccgacttnncaggtgatgtgcgtgnccgtgggctcggctgccctcgtcctgctcctgctcttcatgatgacggtgttctntgccaagaagctctacctgctcaagacggagaatactaagctgcgtaggaccaacaaattccggaccccatctgagctccacaatgataacttctccctctccaccattgccgagggctctcacccaaatgatgatcctagtgctccccacaaaatccaggaggttctcaagtcctgcctgaaagaggaggagtcatttaacatccagaactccatgtcgcccaaacttgagggtggcaaaggtgaccaggctgacttggatgtgaactgtcttcagaataatttaacctaaagcagagcaagaagagaggaagcgggggtagtgggtggggggtaggggaagaaccattatctcctcttgtacagagtctatttcttgtaaccatttgttaaactcttttctttttctgatctcatggcatgcttttatgtattttgtacaggaggcaaaaaaaatacttaaaataagcaaagaaactgaacagaattgcatacattgggttgttttttctgtgctgtctgtacattgcttctgctgctgtgatttctaaacctgtgctgttattcaactgacttttttttgtactttgacccacgtttttttgaaataccagtaaaaaacaaagttcttgaaataaaactttttaaaaagttaaaaaaaaaaaaaaaaaa

SEQ ID NO: 234085 - DNA, 732 bp, Homo Sapiens
  misc_feature (100)..(100): n is a, c, g, or t
gagaaatatggaaaccgtcttaattttccattggctatgatggaattaatattgtattttaaaaatgcatattgatcactataattctaaaacaattttntaaataaaccagcaggttgctaaaagaaggcattttatctaaagttattttaataggtggtatagcagtaattttaaatttaagagttgcttttacagttaacaatggaatatgccttctctgctatgtctgaaaatagaagctatttattatgagcttctacaggtatttttaaatagagcaagcatgttgaatttaaaatatgaataaccccacccaacaattttcagtttattttttgctttggtcgaacttggtgtgtgttcatcacccatcagttatttgtgagggtgtttattctatatgaatattgtttcatgtttgtatgggaaaattgtagctaaacatttcattgtccccagtctgcaaaagaagcacaattctattgctttgtcttgcttatagtcattaaatcattacttttacatatattgctgttacttctgctttctttaaaaatatagtaaaggatgttttatgaagtcacaagatacatatatttttattttgacctaaatttgtacagtcccattgtaagtgttgtttctaattatagatgtaaaatgaaatttcatttgtaattggaaaaaatccaataaaaaggatattcatttagaaaaaaaaaaaaaaaa

SEQ ID NO: 234086 - DNA, 630 bp, Homo Sapiens
  misc_feature (49)..(49): n is a, c, g, or t
gagaagggggcatgtggtatcctggagcattgtgtatagaactggattntcagacctgctgaggaccgtaaggcctgatggaacacagaactgaactgaggttcatggattttccaggactgtttcaaacatgcccattactaacggcaaaagggggattccctgatggaaccataatacccttggaaatactgtatggttttgttttgttttgttggtttttaaagatttttgtttgtttattgaattcatttcactgtagctctaaaatctgcttgtattccaagcatataaaattttcccccttagtgaattagttttaaaatgatattgttatatacatactatgaaatatgtataactttaacttctgttttaccagcatacccacacaaataacaagaatactacttatgaaatgtgcactttatcctcattccataaatgttggtgcataccttatgtaagggagcagttcaataatccatgaaagaacttaaggcatttgttggtttatcagactcggaatctattttttcattgctctgaatatgtcatcactctaggttttacagatttattcctttgttacttctctaattcttcctttgtaaaaaaaaaaaaaaaaaa

SEQ ID NO: 234087 - DNA, 709 bp, Homo Sapiens
ggcaagagggagactgcagttgcagttgttccgtgtaggctgtgttgactctcgtatgaaagcccacgcgatccaagtgccctgcaggttttggtccagggaaaagttggtctctgcagatgactgtaaatgactacctggaggtcgattaaagtgcggtactgcgggattcagccgatttccttcttcctctgactgcccggaaatatcagccaaaggccagcgttctaaggacatatggaattggctatggataattcatatgctttcaatcaacgaagcacatgtaatggaattccatctgagaagaaaaacaacttccttgtatcagaagatcatggacaaaaaatcttaagtgtactacagaattttagagaacaaaatgtcttttatgatttcaaaataattatgaaagatgaaataatcccgtgtcatcgttgtgtgttagcagcatgcagtgactttttcagggctatgtttgaagtaaacatgaaagaaagagatgatggaagtgttaccattactaatttgtcctccaaggcagtaaaagcatttctcgattatgcctatactggaaaaacaaaaataacagatgataatgtggaaatgttcttccagttgtcatcatttcttcaagtttccttcctatccaaagcttgcagtgactttttaataaaaagtattaatcttgaaaaaaaaaaaaaaaaaa

SEQ ID NO: 234088 - DNA, 531 bp, Homo Sapiens
ggcacgaggcctaaaagggtttcatttttaacttcatctgttttgttaacatccagtccaattgaggtgatctcagaggtgcatcaggacatctagcactggggaggccaccttgcccagatagttgaaaagaaaattggtctgggcagcctgttgtcttttgtcttcatgtaatgttttttctttgttttaaaggactaatgtttattacagtgttaaataaaagtgtaagatactaagtgtgtagaataaaagtgcaataacaaaagacaatgactttggcacacacttcagtctttatcctctctcctttcttgtgctacctggctctttccataatattgttacagcaggaccgtcttaattgtgtgcattttgaagagatgcgactctgggttaatcttcattagtgtaatattgaagggttgggtttggttttatagagtattctgtatacttgttgggatacacaaataccagatgtgctgtataataaagatcacattaacgtttaaaaaaaaaaaaaaataa

SEQ ID NO: 234089 - DNA, 668 bp, Homo Sapiens
acaaaagaagaaaaattaccctttttgcttgtgttgtgacaacttcatttaatatggtttaaagatttatgagactgtcagctaaaagtcttttcacaagaatgtcaacagagaatggcatctcaaaatatatatatttctttgcacaatttgtgaaaccttataagccattttccccaggtacaatgtagttcctgctgatagaaaggaaatattttgtcaagagctttcatttaaaagctactacctccacaatcacccccaaacccagaaaatccccactggctcttgccagtctggttttcgtattgcagttattccaattgtatttgatctccctgataacgtattttcatgggtttgggtagaagatgctaatcagattagaagcaggaatagttatttgctgtctgtgaaattgagccttttggtgcgccacgtggtgccagatcaacacttctatccctctgcactgaccacgttgtgaactgggagaccaaatgcaagccatttcatggacatagcaatatacaaccaaactctgttccttggagttatattgtaaactcttgcaggtgggagagcagttcacctccttagctctgtttgccagctcttacagggtaaaataaacctggcaatttatcctcaaaaaaaaaaaaaaaaaa

SEQ ID NO: 234090 - DNA, 748 bp, Homo Sapiens
cagcaggtgactccccctcctcgcctgccgtgtcctgctattctcaggcagctctaaggagaatcttatcacagttcaagtgatttccagaagttccagggcttctgagagaccatcaagggaactttaacaacttgacaaatgtccttgaagtaagatgcctcatctttagggaaaaatggggtttggatttctgcttaggcaaagtctcctgcagttcatccttctctgtcctcttcttgcttcaggcttggggaccgtccctgctgtccccactgtggtggcaatcaggacctaaggtgaagcaaacttgaagttctatctgacaagtttaggcagtaagagaaggagggaaatcggagcaaagctccctcactttattgttgagaaactggcatctggaaagaggaaggaatttgcccaaagtcagtcagctgggataaaaacctgggtgtcctgtccagaaagtgcagggtgctttctgctctgtagcaaggcagcagacatctctgagccaggcccaccaacaggcccttatctggtggttggatcatgatcccattttgcttggacatgctctcaggaagataaaaaccatggagaaacactaggccattgacaaatgatctgagacaactttagaaaacaatgtaggatgaatggaaagagaaagaaaggaaagaaagaagaaaaagaaagaaggaaagaaagaaagagaaaggaaggaaggaaaaaaaaaaaaaaaaaa

SEQ ID NO: 234091 - DNA, 587 bp, Homo Sapiens
ctcttggagtgttttctccccctgtcttcaaagggtctacttgagagatagtggtgtttactgctgcagcatgtatcacaagataagaaatgaaaaatcaatctttcttaccaccctgttctctttcccttttttatcttttcccttttgtcaattatagaattatagggacatttttctctgatagctggaagttgatcctcaaccaggtataaaagatgcataacaaccttttagcagtaagtgtcaagtgagtgagcactatgattatcaaggtgactttggaaaccttttaaaaatgcatttttgcaaaacaagataacatatattgataaaaagtgactctcagattggtaatgccagaaaaaattttaagaggactcaccaaaagtactagatctatgtaagttgtagaatagagtgaagtttttttatataattgtggtagcctccatcttttaaactttttgaactcagtagaaaaacagactgaaattttaaagacatgcagtatttgtatcattttaaattctgtaacactgggaattaaatatactcaactttagaggaaaaaaaaaaaaaaaaaa

SEQ ID NO: 234092 - DNA, 560 bp, Homo Sapiens
ggcacgaggacagccacagcccccgccccctccaccttgtacataatgtataggaaaagtctatgtatggctggggggggtggggtggcttcagagagctgggggaccccttccccccaagtcccccctgcaggccaagatctttgctaaaggccattccctccgcagggcatttggcgtcgggtgggaggggaaaacgcatcttgttaattatttttaatcttatttattgtacatacctggggcaggggcttggggaggtggaggggggagaagggtcccctctctctgcccctcccactccttttctacggcgatttgtctgtgtctggcccccacccactgcccatcccccattgttgtctggatgtggttctattttttatcggtctcctttcccctcctccccgttctcgcccccgccccaccccctgctcccactaccctttgtctcttgctctttcttgggcttctgtacaactcaacttgtatacactgtgtacacacaaccagccaaacgaaaacccaacggcaaacactttaaaaaaaaaaaaaaaaaa

SEQ ID NO: 234093 - DNA, 750 bp, Homo Sapiens
  misc_feature (62)..(62): n is a, c, g, or t
gacatataggaatattattttccatatgatctggtgtatggtgtatatgctatgtgttcatntcgtgtgcaagttcagagtgtaatagatttacccagagaaggtgtttctatacaatgcccctacctatttgaaattacatgcttgcccaacacactgtgaaatagttaccaaaatttgtacaaatgcagcatcttcattctttctgagaagacaagatggttttctttacatgaacaaatgaacaaaagagatcctagatccataacgtagctaaggcatctaagagtttgctgttgataatcttgctgaccaaaaactactggagagtaacacaggttatatgccatcacaaatacaatgctcatgaagaactgatttgtagagtcaatgaacctgtgtccagaattttaataggctctctattggaaggagaaagaatttcaagttaacagtatctaactttatcatagttgatgttagtaaattttaaaaaatgattttatatgtatgacaaaaatctttgtaaaatgcgcaagtgcaataatttaaagaggtcttaactttgcatttataaattataaatattgtacatgtgtgtaattttttcatgtattcatttgcagtctttgtatttaaaaaacatttactgttatgtttgtataatagaacagtaatcatttattataatctaggcaagttgtaaataaattcataattcaaacagccagtaaaaaaaaaaaaaaaaaa

SEQ ID NO: 234094 - DNA, 630 bp, Homo Sapiens
  misc_feature (353)..(353): n is a, c, g, or t
catgtccttttgtagcagtctgtaacttaactatagtataatgaaaagaatgacctataatataggtgttttgtagattcttgtgtcactgcaaacaatatgaactcctttttcgtattgccatcgggttgcatggaagttttattctcttgttttgctggaaaccaagaggatccaaacttcctgcaacattttcttagaggagagagagaaatattaaaagagaaatgaaacaatagagtattttgggtttttaattaaattattgttaataatataacatataagaatacttttattaaaataaccatgcaacaataacactatcggtctatctgacagtttttcccccnagggaagtgcttttgccttttcctttcttttttttttttttttttcatcttttttgtctctctcttttttccatccctttttaatttttttaacagcaatggaggaagttaacaatttttaatggaaagagcatgttagagcaaacaaatgcataagcaagactgagcagcattataattaattttcagggttttgaggctgaacataatttcattatccctcaaaaagttaccaccacatcagaaaaaaaaaaaaaaaaaataggtgcgcctcgtg

SEQ ID NO: 234095 - DNA, 525 bp, Homo Sapiens
acacattatgtattgcttttatactagaaaaaaagtgtgagggatgcataggcccagtgggttcagtttttgtgcaggagactagaatactgtagataccacagtgatcaccagataaaagacactgatttttggtgttttcccccatccccaaaatacctgaatactactacaaactgccaacagtaacaactactacaatcatgatttatcttgagaatcactggcatacaaaatattaaaagttgtggaggaattctagaattacatttaagtaagcactgaaaataactagaatttaaaaataaaacttgtatggtattattctacaaactagaactgttttaatgtatagaagataatattcacagtaatcttatattactaggtggatgattaactattttctgctcctattacagaaaagattaaatggcttttagtgttaggagggtttcagctacaccatcagccatgtcaagcccagaaagatatgaactgaaaaataaaaaaaaaacctcgttc

SEQ ID NO: 234096 - DNA, 461 bp, Homo Sapiens
catttatctcaatgttatttagagttgtcaactggagaaaaacttaaatgaccattattaacagactgaataaataatgaccatctatacaataaaatactgtacgccaattgtaagagtaaatacagtgtgagggtaaaattttttacataagtaatacatggtacattctgttatacaaaaggaaaccattacaaaaagggtaaggcccttttgtcactcccaacccagaagatcactgtaaaagtttcaggtgcatttttccaggctttttctatacatgtatacatctacgtgcatatttatatacacataaaaatatataataatttttttttttgagacggagtctggctctgtcgcccaggctggagtgcagtggcgcaatcttggctcactgcagcctctgcctccctggctcaagctattctcctgcctcagcctcccgagtagcctcgtgc

SEQ ID NO: 234097 - DNA, 509 bp, Homo Sapiens
ttgaaatagttacacatgaagttttaatgagctatttcatattaagatacatattgagaattcaaaccagagagtccagttaattgatattttcccaactctgttttagggtgatcatagaaatgatatccacaagttagtcacagtggcctgcatccattttgatatatcagtgatgtattttgattggccagtgatcaaccatactgactgttaaatatttttgttatcactcctatgcatggtgaatttgagttctggttttctttagccttgtgttatttatgtgtaaagttgcattatggaaggcaaagaatctctcgtgtgtcattcacgctcaagtaaatggcagtggggtagggatgtaaatgaaactgcgtgataagccctgcaagtcattctgatgtatcaattttgcttactggtgtttaattgcagacattgtcatattaatgcaaccactaatacattatggagtaagatgcaaaaatcacatggtcttcctcgtt

SEQ ID NO: 234098 - DNA, 641 bp, Homo Sapiens
tatattatagcaaaattaaaatctacccgtattctaatattgagaaatgagataaaacacaatattataaagtctacttagagaagatcaagtgacctcaaagactttactattttcatattttaagacacatgatttatcctattttagtaacctggttcatacgttaaacaaaggataatgtgaacagcagagaggatttgttggcagaaaatctatgttcaatctagaactatctagatcacagacatttctattccttttgcaagttggcacacagtaaatgcccgaatgaataaataaattgcattaacaaggatgtcttcatgtgtaaatcagagataataccacctaccacacagaatgtaagggaaaagagaacaaataagtaccaaagtgctttatacgattctgagttattttaaaaatctgtgttaataggtttgttattttacacaaaatatcaaatttcaaatgaactccagtgctggatttcgatgtagtattttatttatagctatgttttccttttaacaaagataccattaacacatttgttcagtgttcattttaaagggtaaaaatgttgtcttatagctcattcaataaaacaccataattcaggtcaaatgcccctcgtg

SEQ ID NO: 234099 - DNA, 544 bp, Homo Sapiens
ttgcgcccccacctattttttttttttttttttttaagaagacaacctagagaacatcttgagacaaggtgttcagggaagagttcttttgagaaggtgatattaaagcgagtttggggaagaacgtcccaggccttgcgctcagggtcgtcaactctttgatttctcttccttttgaagcagggcagggaggtcatcaaacaacagaaggacaattataactgctggtatggcaaagccaggactctgaattcaaactctgctccattctcaggaatcccgtctgttaagcaggttctggggaagcgatgtgagtcatgaaatcacaggtcggaggaggcatcgagaatatggtcagttctcaactttcagggaaatccatagctgaggaatgaaggacaacgggcttctcgtgctctcactaggaagactggttcaccggaggctggaacacttgtctaggtggcacgttccttaaaagcgaaaggaccaggagttcttcctgcctcgtctcttccgagatccctcctgcaccgccctcgtg

SEQ ID NO: 234100 - DNA, 676 bp, Homo Sapiens
  misc_feature (15)..(16): n is a, c, g, or t
tatacgccagctgcnngaaaggggatgtgctgcaaggcgattaagttggtaacgccaggttttcccagtcacgacgttgtaaaacgacggccagtgccaagctaaaattaaccctcactaaagggaataagcttgcggccgcacctattttttttttttttttttagattaccttgtttatttaatgtgagtttgtgcctttttgtctcaatcttccaatacaggtatattgagaaaaaaagcagtctaataaaatcctagacagaactttctggagtccagtttggtgatgtccattttccagctgtatgtatcctcaaacttgcactgataaccgccattttaccagggcaggattaggaagaggtacaaaggtgtgtctgaaaatttttgcacgtggatttctgcatataatagtcccgtgtcagtttacttatgcaaacattgcacatctgaattgtaattcggccgtttcctactgacaggatgtccttttgcttttgtctgcctcctcttcacatcttcctctttatccaccctgcagccggggggcgggggagaccggatcccaggcaggacagtggctaggctgcgtgtccccacccccgaccctcgtttgacccctgggagccggggcgaagacagcacaaggacggagccctcggatcccctcgtg

SEQ ID NO: 234101 - DNA, 642 bp, Homo Sapiens
acccttttacagataaggaacctgaggctcaaaaaattgctgagggtcccagctcacatggctaatctgtggaggagtcagaattcgaactcagttgtaacttcttcacttcacttcagttttaatagcctggccattacattcatctgcaagctgtgctgatggtgcaggctgatatattttagttagggttcagaagtactaccactcctccactttcctggtttccaaacagttgcagaacgttggatcacgggcactcaattttctcccttttgtgtgcctcaaaattctcaaatcattttggggagagacttgggacttgctgtgtgagtgggcatattagtgtcttagtgagcatcagtctccttatctgtaaaatggaatgttatggggttaaattaagggagatccaggacgcaaacgacacacctttcaacccgacttctctggcctacttctcctgttccccagatcccgcagggcacactggtgacatcacaagctcctcgggtccaaaccctctcacgccctcattcaaggcctttccacttcttccctccctcttactctttcctaatcagcatcagtgccagggggaaaggcctctgtagaaagccttgactttccagtctggtttca

SEQ ID NO: 234102 - DNA, 602 bp, Homo Sapiens
cagcacggggagcttgcaagagacagggacatgaagttgtggcgtctctggcacgcaagtgtcctgggacagagcaatggaaacctacaggcatgagaatgagggttgcttgatggcaagatttcagctgctctgctcacactacctctccagcaactggcacaacgcaggcacctggcacatcccagcatgccatacatatctgttgaagccacaactcaacagtttaacctggactcacctgagagaggcctcctgcatgtgaagccctgccaatgacacagcctggagagcacctaggatgggtgttctctaatgggggaggaaggtgggcttaggaggctgctggctgaacatgcgatttgcagttattaggcaaggtggggggcctgaactcaattatagactctgtcagggctgtttgactaaagtggctaagggatcccatatcaggtctgctgtgttgaaaccaaactgcccttttaccaacgtttctgctgtgcagcccagagaagtgtcagggaaggagagggagaaatgggggaaatacatattttcaaaaacactgtctcacttcctaagggtaatcaaaagcaaccacg

SEQ ID NO: 234103 - DNA, 623 bp, Homo Sapiens
  misc_feature (14)..(14): n is a, c, g, or t
cccactcccatgcncaggaaggcctggttgctgatgctactttataaatgagttgcttgcattttcacagagaatgaaggaagacgtaacatggctccagaaacttttcacatgatgattgggatcgacaaaaaaatgctaccctctagactagacacatttcatggagacaagcaaaatggtgccagggctgggctgactgtgggatgggatttggtactgcagacagattttgatttccacagttgagctggaaacaaactgtgccttcaaaaaatgacttttctaacttaaggttggttatatgttaagtgtgctactaacttaaaaaatagtggctgggcgcggtggctcatgcctgtaatcccagtgctttgggaggccaaggcggggggatcacgaggtcaggagatcgagaccatcctggctaacacggtgaaaccccatctctactaaaaacacacaaaaaattagctgggcgtggtggtgggcgcctgtagtcccagctactcgggaggctgaggcaggagaatggcatgaacctgggaggcagagcttgcagtgagccgagacagcgccattgcactccagcctgggcaacagagcaagactccgcctcttgc

SEQ ID NO: 234104 - DNA, 467 bp, Homo Sapiens
acctattttttttttttttttttttaactgataaatatgggagcttttaaataagtagtaagtcctcactcaggtaactagcttattctctgagaaaaggttaagcatgttagaaactcgtccgtccgtccgtccatccatccatccatccatctgtccacacttctcccatcaacttatcctctttcttgtttatttcattaatcagtgccctctatgtacaaggccctgtgctggagttagaacaaatactatggagtatatgatatagtttctgcccttgaggagctaaagtcaatcgggatagaagaagtagacacctgagaatggtttccccaaaacagtcctggtttatccctgatgtcccagcatattagtaagattccctttcagctcataaggggatggccatggctaggtttatagatagttgggtggttggtgtaaatgagtgaggcaggagtccg

SEQ ID NO: 234105 - DNA, 538 bp, Homo Sapiens
agtgtttttttttttttttttttttttcataaaatctatttacttcctgtagaattaacatccacacaacacacactttgggtaatgtgctgtccatttggtggcacagtccatgctcttagtgactatgctatgccaagaaccaagaaaagtggcccagaccctatcacggaggcagtgggagtcctcgagggttcctgagcagaacagcggggtaaacgagcgggaggcttggggaaggggtaggggctgcacgagacagaaagggtctatccctaagcacctgcccacagcccaaagtcccagctgcaggggactcactggaccacttggtagtagcgctggaggaagagggaccagccctcgggggtgaggtacagcggggcctccaggtccttgtcgatgtccatgtgggccaagttgctaaggtactcctcgcacgcacacagagcttcatccacaaactctggggacaccaacactgggtttttctcctgtttcttgggctgcttgtctcctgcacatagggaggggcctg

SEQ ID NO: 234106 - DNA, 572 bp, Homo Sapiens
  misc_feature (68)..(68): n is a, c, g, or t
tcggcccgtcctccggccccggccccgcgcggctgaggaggcgcggccaggaccatgtcggcgggcgnccgtgacgaggagcggcggaagctggccgacatcatccaccactggaacgccaaccggctggacctgttcgagatcagccagccgaccgaggatttggagttccatggagtgatgagattttattttcaagataaagctgctggaaactttgcaacaaaatgtattcgggtctctagtactgccaccactcaagatgtaatcgaaacgctcgcggagaaatttcgacctgatatgcgaatgctgtcctctcccaagtattcactctatgaagtgcatgtcagcggagaaagaagattggatatagatgagaaacctctagttgtacaactgaattggaacaaagatgatcgggaaggcagatttgttcttaagaatgagaatgacgccattcctcctaagaaggctcaaagtaatggacctgaaaagcaggaaaaagaaggggttatccagaacttcaagagaactctctcaaagaaagaaaaaaaaaaaaaaaaaaaggacgc

SEQ ID NO: 234107 - DNA, 480 bp, Homo Sapiens
caagacactatttaataagggtcaagaatgtaacagtcaaaacaggtcactactgaaaacataatgttccacttgtacatactcctaaaggtaacagatgcagcgaaccgttatcttttttatacatgattattagactttaaaagacatgtcaaatgacagagccattcatccattcatttaccaaagcatgtatatattacataagtgtctgtaaaaacgtagttttcaatggcacaatgtgtacaaacaaatggttaccactattttcgaactgtgcacgaaaaaaatagtcaacagttatagcaatacaattaaaaaataaacaggagtaagctcaaacaagtactcaaatagaacaagactactcaacacaaagtgtcctataatcaaacttgtagcagacgaatatgctcggtaacctattgattgtaagctccatgagagcaggaacctgccttgctcattactcgtgtttcc

SEQ ID NO: 234108 - DNA, 585 bp, Homo Sapiens
accatagtttatttaatgactcccccactgatgggcactgggggtgtccagtctttccattacaaacaatgttgccgtatcatcacacagatgtgaactcccaggactttggtgggctttttttgaccatgagtggtagaaacatggttccaccagccaaacgtgtgcacacaccatgctgcaactgctgggccacctgtctgtcctcccaacaggacacaagcttcatgggggcagggactgtcctcattccccatcgtgggctcaatggcacatgacaggtgcttgattaataaacactttggaaggactgagtaccatggttacagcacaggcgtaccagctccccagagccacagtgccatgctttgcaagtatttactgtagatgatcccactcacactctcaaaacaggcattcagcatcaagcacagctaggctcccactctccactgtggagcgaaggccgaggcgaggttaggaagacggcgcggctcctgcggtctagctcttccagctggactagccaaggggtttcactgcttctctagggggcgggtgaagggctggatttaaagaagccgc

SEQ ID NO: 234109 - DNA, 558 bp, Homo Sapiens
gtccttttttttttttttttttgtcaaatatcttttctgtttaattaaaaaaaaaaaaaaaacaatgtcacaagaggcttcagaaatacatgcttttgaattccagccacgaagaggacaaaaggagacagtggtatctgcaaatatggctgctttccatagtaaggtttgtgccttggagagaagcccagctcctccaccagtgtgagaacacgtggcccaccaggcacctgctgtggggacagtgtctttggttggccagagcttcatccagagctcactggaaggtggcttggcaggaagagggaatcttcctacagccctcctccaagggggacagaggctgggggcagagaaggaggcatttaagctttgctagcctcctgctgcctctgaggctgtaggacacgtcattcaaacctaccatcaaagtaggcttctgatttcaacttggatctcacggtagcccagtgacaccgcagcagccatgatgggatgtaggcaggagagcggtggcctggaaaccgcttctagacaatcctgtattatttagatcca

SEQ ID NO: 234110 - DNA, 663 bp, Homo Sapiens
  misc_feature (651)..(651): n is a, c, g, or t
cttttagtaggataattctataaaatgtaacttgcatagaaaggctgtattatgggttctgtctgtcacaaatagcatcaaatcaatcatctcagttctggaatatgagattcactacattaaattaatactttcattccaaaatagaaattcatattttaaaccactgaaattgatataaaccactgctttaatattgtaaacctaaatgtccaactataatgaccaacttatctaataatgaaaactgcagtagcagaactattaagcagatctttataattaacttatgaagactatttaacatagaaaaatatttatatgtaaaaaacacagacccaaattacatattctctataagtatatggttaaaaaacctgcaagaaaatatacctaaatgctaatgttcattgcattcagatgatagaattatggattttatccatagatttttcttctagattttatagtttttaaaaattatgatgccccttatatttatattgggaaatatacatttaaacaaactattatttggctaccatgctaatattcacaaccatgtggcactagcctaaaataaacttttcagaagaaactaaattattctatctaaatattctgggaaacgtttaagtgatattggaatcntgtatcgaaaat

SEQ ID NO: 234111 - DNA, 696 bp, Homo Sapiens
  misc_feature (28)..(28): n is a, c, g, or t
  misc_feature (59)..(59): n is a, c, g, or t
  misc_feature (623)..(623): n is a, c, g, or t
  misc_feature (678)..(678): n is a, c, g, or t
agtatgtatgagcaaaatactgttgatntcacactcaactaatcctttaataatttctntcagccagaatgaaaaaggctagtattaatttcctaataaaattttttttcaaaagttatcgaggatatgactataaccttggaccagtttcaatttctttttattttttctgagaatacaccaaagattaatgtcaatggcaagtgagaaattgtccctagagaactattcaaggactttttcttactacatttgattggactggagtgaactgacattatagcatctttatcatcacctttaaaattctattttctcttagtagcaacagtgaagactttagaactattacttactttaaattattaaagtatatcacagacaaaatattcaattttacattaaagcaacattaagggtctcaatttcattgaacagaaacaaatgctgaagaaatttacaggtatgatttaattttagagagtgttctttctttagggaacaaaatgaaactagatctctcatttgtctgtatgggcaagatatggtaaacctcatgatcaaaacacatgccagttagaaacttgatcacagaaatgatgctcagtgttgaaacccaacanataaacaaacaaacaaaaacccccactctaaccagaggcatttaagcctctccanctgaagttcctgtttccc

SEQ ID NO: 234112 - DNA, 315 bp, Homo Sapiens
ccgcgtttttttttttttttttttcttttttttctgagagcttttaaaatggaagctggttctttgcccattgaggggaaaggcccactctcttctcagaggatctggcggcatacgaccagagaaagagcaagtctgctaggaagactgattagtgctcatgcaggtccatacactgttctcagacgcaagtacgtgacagccatccggagagagcacacaggatggcactttcaacaccacaatccagaaagcatggttacgcagccaagtgcctgacagctcaatttaggcgcattcttccatccattttgg

SEQ ID NO: 234113 - DNA, 737 bp, Homo Sapiens
  misc_feature (16)..(17): n is a, c, g, or t
tgattcgttttctctnntagaagtttgatttccacagactacaaaagctaaggaagttttatgtccttgctctggctacactgcagtgttactgaatatcacctgcacaacctttactgcttgcagttttttttttcctgttgctttgtacatgatccgttattcaaatggccttataggcattcaataaaggtgaaatgttaaatacaaaatcacttgtctattaaattttattcaaggttctatataagatctgataaatggaactttgtgatggaaatgttttatatggtagccactagtcacatatagctattgaacctttgaatcatggctagttttagagttttatattttaattttaattaaatagacgtgtctagtggcaccatattgtacaatgcagttctcattcaataaatcttaagtacttaacaatgcatcgtgtactcttctatgtactgggtagacagcagtgagcaaaacaaagtccccgttctcatggaactaatgttctaatgacaactattaattacataccatgaaatgtctcaaactcctgggctcaagtcatcctcctgccttagcctcctcaagtgctgggattataggtgagagccactgcacctggccagaagcacgaacttctaacttaggcttttattaattatcttccttgcagaataatcaacagaagaccctttagacaaagaacttgcactatgaggtttaattgg

SEQ ID NO: 234114 - DNA, 595 bp, Homo Sapiens
aaaaggaaaaatggcagtgtcagttgtacattacatatatctctctttctttttagtgtttaatcttagcacctgcacagcagagatctttacaattcattgcatatgctttctcccttctcccccaatacagcacctgaggcctaagaagcaactccctcaatgctccacaaaaggctgagacccttcttcatgacagagtgagtatagaaataacaaacatgcccaacgcttttatacagttgctagaacgttttcatttccaacaaatgaagattttcctccttttctttgaatattaattacattttacaaatttttgtgggtttttttgttttgttttgcttcattttgttctgttgtgtgtgtacaacaacaggaaaagtccatggcaaggagtcccgggttagcagagtttggctgtcatctggtccgactgtttgaggatctccgtgttgtacaggtccaaggcgtggttcaccctgatgatctcgctgttggtcagtttcaggcggtgtttcagcatacaggagaacaagtccagctggggtttccccggggccacaggaggggccaggcgattaattcggtcccg

SEQ ID NO: 234115 - DNA, 638 bp, Homo Sapiens
  misc_feature (53)..(53): n is a, c, g, or t
ccccatcaaattattttattaggttaattaaacagcttaaagatgattccttntgtgtggtacccttctagaaaatatttcaagtttttaagtgaacttccaatacataaaacaaaattactttagcatacacaaatttcagatcaaaatacaacactctgtttctgttttcttacagttataaaatccagtcaatacaaactacataaaaaagataaaacactttcactgatccttggtacaagagaacagcatgatggcaaaatgttccccaagcacaggtcctgggttcgtgagaagggaccaaccccacaatatactgaagcatgtaaacaaagtgcgtgctacttaatttaggttaacaaatcctttttgcatcagtattacttgtaaaccataaagcaacttttaaaaagaaaggttattaattaaaaattacttctgactgctaaatttcttatcagcaagtgaacagaaaattattccacaaaacaaactagtacctttggaccacaggatgtgagacgtgacatttcaatgaaatcaacttagcacgacttctctactatcctactgaacttggggagtacaattttacaagttgcagccttctagcacttccaatattttgaactttc

SEQ ID NO: 234116 - DNA, 629 bp, Homo Sapiens
  misc_feature (25)..(25): n is a, c, g, or t
gcgtccttttttttttttttttttntgaaaacagcaatcagaaattttatttcttaaaacaacaacaacagcaacagtaaaaagctgaattggttagcataacaactaggtaaatataaaagctaaaaaagacagtcaattggagtttggaagcattgattgttacttttattattatcctctcccaaactgataagtcttacatagatttaggcttcaaaaacactcttgcattgcccagtttgattcccaacacaaatgatatcatcacggtatggcgttgctactaccaaagtccatttactcgagacagaaatgagtcaagtagtcctttaaatgtgggtgaaactgatccttgatttattaatctgctccagtgaccatttatagcaacagtgacccagcagtacctacagcccagcacccattcaagccccaagttgtctcatttagttttacagcattaggttttagactggtaaataccttgctccatcttgacaaatcacttttctgctccttagcctaagggcaaaggtggggagagacagggtaggaaagttgtgctgaaccaaatgttggcaaataaaagtcatcatttatcttcttactttctttgtcctatttgt

SEQ ID NO: 234117 - DNA, 704 bp, Homo Sapiens
  misc_feature (15)..(15): n is a, c, g, or t
  misc_feature (31)..(31): n is a, c, g, or t
ttttttttttttttntcgtaggcgtgtttanggagggtgcgtttattagacaaacgctgggagacaggcctggtggggacctggctgggggatgatgcagcccgcgatggctgctgcttcgtacttggcttgccccggaccacagcctcgtaacggtaacccctgctttccaggggcctggcacccccccctgccagggtccacacgcagggttgtggcgggaccacccctgcaggtccagctctgtctcccaccttttgcacagagcttcaagggaagcctccagaagtcaggggtgagaacccgtcttgctctgcctcaggcaaccccgggacaggctgaagcccctcacgcacttgggtgcccgaccagcagcagcaagggcagcacctgtgggcctcggcccagggccaacggaacaggctctgggacctcagggaaccttctgctgcctgggccaccccaccccacctgggcagagccagtgggaacccagaggcacccaactggaggtgacgaggcggctgcgggtcctggctagtcctagctcctactcgggtcccagcacaccctgcagctcactcagaattttgggggaagccctggggtcttggggcatgtggttctgctgtcacacatggacacggcctcctgggagtcctggtcctgcagcccctaccaccggatgcccaggccagtgctgg

SEQ ID NO: 234118 - DNA, 706 bp, Homo Sapiens
  misc_feature (68)..(68): n is a, c, g, or t
ctttttttctaaaggtgaattactttgtaaaatcctagaataatgtagcaaaatcatttccgtatacntttaagatgaaaatttttacttggaaattttattttaatgatgtaaatattctagtcatggcttaaactttataagtcaaatttccaaaaataaggaaaatatgcatccactgagttacttaaaaatttaatattgaaaattattttaagagaacatttaactgatcctgatttttatagtactaacaatgttctcataatgtaatagatttataaaaattgttatctctatcctgagattaaggagtgcaaccatgttgtagttctattattgagtacgtaaattgatagatctcttccgtaaaatgagggaaatataagtagtcaataaataatgtaggttatattctttcctcttcactacctaaacattttaagctgtgaacaacctattattattgttttgtagcaattttgatgacgtattcgctgatgcacagacattggaattcattacattatctagccatcgtaatacaaatgacctttggatttctctatcacggcgcttatcctcctattaaggatcagaaagttaaactttacggaccacgtacgtccctgtctcatattcttctttgttggtttctgtttaatactttaaagctgtaaaaaaaaaaaaaaaaaaacgcgggcgg

SEQ ID NO: 234119 - DNA, 767 bp, Homo Sapiens
agtacagatacataaaaagattattttaaaaaatactttcttcattagataaattcaattcaattagaaattgaatgactgtactttcctttatataaaaaaatcagacatactttagcttttactataacaacattcatttttgtctttataactgtataaagtaggagggaaattggtttctttattttaaaagcgaatgaaccaagctttgaaaggttaaggcttattcagggttttgatattagttctctttgtactataatttgtaataagtttaaaagagaatttttaaaaattgatacattacagccagaaaacgctaatatttttataggcaagacagagagatccatattaaaaaacccattttattggtggtgtaatactagtaggtattcatactcttaatttcacatcaggcccttgtaaagaagggtttcattaaattttttttttttagaatataaaagggaatttagcatgtcaaagattatttcttcataaataggcacagggtcttacagaattaatatttgctagctccttagctgttaaatcatatacctatttctacagacacaagaaccctatagaaactatgtctttgggctggcttaagagacagaatggaaaggagagagaatacctccagcaaactttagtttttataaaaaggtttctacttaatgcatttcttttaagcaatatttgtatgaacaatctattaagcatactttggaaaatttctacaaatggaaatcatg

SEQ ID NO: 234120 - DNA, 497 bp, Homo Sapiens
cgcgtataccttttttttttttttttttgagaaacgtaacatctgatggctctcaaaatgtcacacgattatccaagccttgtgaatggccaacaaggaaaagaatggcacaggcagtaaatattaatagaagaggttaaaaatgacagaagcatcaaagccatggctggagcatcagcacattcgtcagtgtaatgtgtaaccaggcgcttgttgtgaacaaacaacacattacatgtgaacagcaatgatacggtagtggaaaaacagacatatacagtgcctctttggacaagagtgtaagacccaaataagcaggatggtgtcccctgttcacagggttcccatcttttcagcgtgatcacagaacagattcaaaggcgcccaggatttggcatccccctcggagcacacccaggctatccgtacacaccctcgtgggccttggcatgtcgtttcagcttgctgggtgatgcaaagtgtttcccacatccctc

SEQ ID NO: 234121 - DNA, 500 bp, Homo Sapiens
ttttcaaactccagttaaactttatttgcaaacacagatggcggccacaatttgccacctgctggtgtagaacgtgtttttccacggttttgccaagaaatagtgtccaactgttaccaccatctcccttttttccccgattttcctgttggtggcttttaagtcccccgtccctgctttgccatgagagcagggactcccagtgtccctggcgccctgcagcttccatagccattcggggtgtgcgtgggtgctctgctcccagctctgtgagctcgcaggtcgatgcttctgacactgatctgtgcacatgtgtgtgcacacgcgtgtgctcgattgtgagcgcctgccgtggccctgggccgcggtgtgctgagcgggccagttcgctgccttccactggttgaaggaaggagacgggtgtgtaaagaaccgcaccccagagggcaggagggtgagagggcttggtctggcagcagctaagtgccttcggagctcta

SEQ ID NO: 234122 - DNA, 497 bp, Homo Sapiens
ttttcacagttataactgcctttatttctcctgatcactgttacatgaaacttactgaaattcatctcctctctggtgaacaaacttcctttctttatccattcattcacccatctacccatcctacagtgagccaggtactgagagctaggagacccacgagcctagagtttacaaagtagtagaaattctatttctggcattttcttgctattgttttgactccctgcttaccaggaaagagaacaaaaaagtgactgtgctgatcaaaacacagaccaataaaactaagaagaaaccagggctgccgggtacgatggctcacacctgtaatcccagaactttgagaggccaaggccagtggatcacaaggtcaggagttcaaggccaagatggtgaaaccaggtctctactaaaaatacaaaaattagccaggcatggtgggggcgcctgtaatcccagctacttgggaggctgaggcagagaattgcttgtat

SEQ ID NO: 234123 - DNA, 660 bp, Homo Sapiens
  misc_feature (65)..(65): n is a, c, g, or t
agttcactctgctgcttcagatgaaaattttcaggtctgtctgccactgtagtgaaggactgctntgggtagtgtctgccttggcttctccctctagttgttccttctctgtcttctgtgggcttcttattgtctgctcactccttcttcagtgtcctcacatgggcttccttcccttctcagctgatgccatcaccaaaaagagtccaggaccagatggattcacagccgaattctaccagaggtacaaggaggaactggtaccattccttctgaaactattccaatcaatagaaaaagaggaaatcctccctaactcattttatgaggccagcatcattctgattcctttccatctttagtgcttccttcaggaggtcttgcaaggcaggcctggtggtgataaattccctcagcatttgcttgtctgagaaggatttctccttcacttatgaaggttagtttggccagatatgaaattctaggttagaaattcttttctctaagaatgttgaccattggacccaactgtcttctggcttgtagggtttctgctgagaggcccacggttagtctgacgggcttccccttgtaggtgacctgcccttgtctctggctgcctttaacattttttccttcattttgatcttggagaatctg

SEQ ID NO: 234124 - DNA, 1000 bp, Homo Sapiens
  misc_feature (30)..(30): n is a, c, g, or t
  misc_feature (48)..(48): n is a, c, g, or t
  misc_feature (210)..(210): n is a, c, g, or t
  misc_feature (232)..(232): n is a, c, g, or t
  misc_feature (298)..(298): n is a, c, g, or t
tcccaaaaccaacccaagccccagggtttncacccagctggtgaaacnccaggttcttgagacactcagccccagtggttcccacctgcaaatggcaccttaagtgaggaggggggcctcagagatgaggtggtcgacccttaccatgttggatattctccatgctttctcagagcaagtggctgatctctttcgtgacagagaactcanccactaccaaaggcagcccatntattaagtctaactttaaaaaagatacttatgatgagcacaatctgtctctctcatactctatganaacgaccaatttctgacctctatgtcacaaagagtaagtttagttcttcacataatagccctccaaatatttgaaatctctagtcatagccagatatattgcatcaaaataaatggctattttctgcaggagggttggtccaaatgtcctagcctaccgttacctgaagcaagaagtcctccctattttttgaagaactatatttatttgctcaaatcatatttattaggggcctgctatctgccaggcagtggggatgcagcgatacacaggtcaaataggcatttggagtgtggaagtgggtgcccaccctagtcggggagcatctcaggatgtcctcctcaaggagatgacatgtcaactgagcccagaggacaacaggagttgacagggaagagtatttcctagagcgagaaactggaggcagctgtagtgaggtgctgatgggttctggccaccacctggaccacctagatttgatgtttctccacccccacttagttgtgtgaccctggacaagttcctcacccactacgtgctttagaaccctcactgtgaaatgggagatgtgataggaatgttgtgaggattgtttgagtgaatacatgcaaaggacttaggacaagcctggcacatagttaatgctcaatcaatgttttctctcgcaactggagggaaacaaggtagtgggcaggaaggggg

SEQ ID NO: 234125 - DNA, 1000 bp, Homo Sapiens
  misc_feature (438)..(439): n is a, c, g, or t
cgagagaatgattgttgtttatccccgggagggggtaataggctgcctgaaaggggattttccccgaaataggtccccgcccccacaagagggtggtcctcccgccaaaaaaccccccggccaccactttttccccgccgcgcaaatttattaagaaagcgccccccgccgcagtttttaaattggggccccctcttggggggccccctttttgaaaaaaagaagggggtgcgcaaaaatcggggccccccgcggaggggtttttttggggggcccccccccccggaaaaggggaaataaattgtgatagggggaagaagggggggagggtggggaggaagggaaaggggataagggggagggatgaatgggaaaaagagggggaaagggagaggggaaaagggggaagaaaaaagagggggaaaaaggggggagggnngaaggggtgtgttaaaacattttatgccttagagatacattttatttgtactagacacatatttgactatatatacactggtatgggatgagcagacctttgtctgcataacatttggctccacacataggttttattgttaactaggtaaaacagaagttatttttataaattatatgcagagtatttatcattgtatagaattgtatatactcatagaaagctgaaagctgttattactggattatgaactcaaaacctatgatccagacatattggcttcaagctaaaatgattttttaaatatctatttcagaaaattttatattcattcatttttaatcctgtgagttatccaccatttcttgacaaccaaggagtgagtgctgagatcacatagcagcttcttatctaatagaataccattgtatatgaaccagtaaaaacaccaggaatgggaataatgacaaatatctaagtaagttgtgaaatctaagtacctattataggtgtttttaagaactctttgtaagtgaatgctagaagtagacaaattattta

SEQ ID NO: 234126 - DNA, 1000 bp, Homo Sapiens
gagttttccccgctgtttgaaggggaaaagatttggggaaataccaagtgtttggcctgtaggaagtgacgtttcagccgccctttttgggggaagggggatttttttttggaggtaattcgctggaaaataggggagggaccagggcccaagggcccaggagatttggaaggaaatatatttcgggcccaggatatattggaaatgaaaactgggaagccatcctgggccagtatggtcttctaataaaataaaaatttattagcagccaggagcccttactatggtaataagttgctgaactaagcattttatttgcattatccaggaaaaatctgtttctaatatgttatttttgccataaatactttgacctcaagtatcagcttaattttattttatattaatatagcccttttatagttttcaaataacttatcttccaggaccctattataaaaatagcttcagatgtgcaaataagactgcatcttggtaagtttgttttataaatgtgcagttagaatttttaaattataaatagattatgcttctgattatacagcaggcatatgaaaagtaaaatgttttctaatttcacaaccattttgtggtattaaaacattgggtgttttactgaatactaaattgttcagataaacatacaaagaaggaaatattataaacacatgcattatgtaataggtaaatacctaaagttatatcaattgggtttttaaaaatgaaatcatttgccaggcatggtagcaggtacctgtaatcccagctactcagaaggttagggggaggatcatttgagcccagttcaaggctgcagtgaaccatggtcacacatataaatagatactacactccaatatagcaagaccccatctctaaaaacttaatcatttgaccaggcacagtctcaggttgcaatgagccgagattgtgcctaggcaaactccatcccccgacaaaaaaaaaaaaaaagggcggc

SEQ ID NO: 234127 - DNA, 1000 bp, Homo Sapiens
  misc_feature (1)..(1): n is a, c, g, or t
  misc_feature (144)..(144): n is a, c, g, or t
  misc_feature (158)..(159): n is a, c, g, or t
  misc_feature (168)..(168): n is a, c, g, or t
  misc_feature (220)..(221): n is a, c, g, or t
  misc_feature (238)..(238): n is a, c, g, or t
  misc_feature (245)..(246): n is a, c, g, or t
  misc_feature (251)..(251): n is a, c, g, or t
  misc_feature (255)..(259): n is a, c, g, or t
  misc_feature (261)..(268): n is a, c, g, or t
  misc_feature (270)..(274): n is a, c, g, or t
  misc_feature (277)..(278): n is a, c, g, or t
  misc_feature (280)..(280): n is a, c, g, or t
  misc_feature (283)..(284): n is a, c, g, or t
  misc_feature (286)..(287): n is a, c, g, or t
ncggggagttcggaagtaggaggtgaggagttgaggaggaaagtgggaggaagggggggggggacgcagaggtgggagacaagcggaaggggaagagggaggcgggcaacgggaggcagggggcgcgcgggcgccgcgccgcangggtaggggggggnnggcgccggngggggggcgggggggggggggggggggggggcccgggggggggggggggggnngggtggggcttgggggnggggggnngggtnggannnnngnnnnnnnngnnnnnggnngnggnnanntttagagggtggcccgggactttccacagctgggccacccgaggagagactgtctcaaaacaaaagaaaacaaaaaaagttggtctcttctgcaaagacttgaaaccctaatctggtggaaagggctccctttccctcgttttctcttctactaatacctgtcttccaaattctctttctctggtcccttgaaggaccaacaggatgtgcgatatttcaggaacgtaatgagcaactcctctttcacaaaggtgaataagcaatctggcatagcttggagtctagtattacggaaatacagtgatatactgaagactacacaccaaaatacatccattcctttagctgaagtctcaaacatgttgggactgttgccatggaatttcataaaaccttttttcctgagacagacgccatgccacaaagaaggataagccatttgtgcagtctgaggtggaacattttaattactggcagcacatagacgagttgagttggagccgaatgcataagccccttagaaataaaacactaatctaccaggaatttgggattcttggctctggtagaaatgttacaaattaagctgactcttaatttgtaaataggctccatgaagttgtccctggaagcagaatttattttccctaacataatttcttaaaaagtaaaaaaaaaaagaaggctttggcaaacagctgcatgtgccaatt

SEQ ID NO: 234128 - DNA, 607 bp, Homo Sapiens
agtgtttttaatatttaagtaacaaaacattcaggttaatactcaatgcatatacaataagatagagcaacaacaacaaaattacaaagcacaatctaactatatggaggctttcaaacaattaaatgttggatagagaatgcgctaattaaaaacccagctgagccacaccgcactacctgagacctgaccagggactttctggtggtagaagggagagctcattgtgccctgtggccttcaactcaaatggatgctcttcaactcaaatccagagagcacttaacaaactccatgctctagattgctcaaccctcctccttgcttttcttttttctttagttgacttgtctgctcatcctttacccaaactgaggcagtgagttccacaaatacttcctctggtttggtttaaatgttgctgtctcagtgagaagggcctctgagctcactgctctgactcttgaacacaacttgttatttaatggggcataatccgttctttccccagacatagtctgttcagcctgaagatccttatgagtattcaccaatccccttggaggtcactttcatatgtactattgatgtgaggactttcctctca

SEQ ID NO: 234129 - DNA, 417 bp, Homo Sapiens
ttgtattttcagtagagacggggtttcaccatgttggccagtctggtcttgaagccctgacctcaggtgatccacctgcctcagcctcccaaattgctgggattacaggcgtgagccaatgtgcccagccagttgcatattcttgacccaaacacagacagttcccccaagttcaaaaccacaacgagcagcccacacgaaggcatactctgagggttgtttcactgttacagcagtacatatttcgaagagacaacagattccatttcagatgcttctcaagaaagaaaaagttctttgacagaatctctactccaggtctctctctctttttttttttttttttttctttgagatggagtctcgctctgtctcccaggccagagtacagtggcacgatctcggctcactccaaca

SEQ ID NO: 234130 - DNA, 578 bp, Homo Sapiens
gagacactgtgacccgggacgattttcaatcacagttttttgttacgagtggaaaatgcgtatttataagaatgaagtagtacagacatgaatgtgtagaaatctctataatcctgccatccaaggatggcacctgttaatgtgtatatcagggatgtccaatcttttggcctccctgtgccacactggaagaagaagaatcgccttgggccacgcataaaatacactaacactagcaatacctgatgagctaaaagaaaaaaaatcacaaaaaaacctcgtactgtttgaagaaagtttacagatttgcgttgggccgcaggttggacaagactgctatatgtatattctaggttttcccctataggtatacttatgtgaaaatgattattgtgataaattttgttttgagatgaagtctcgctatgttgctcaaggtggccacaaactcctgggcttaagccatcctcccgcgtcagcctcctgaggagttgggaatataggtactcataaccatgtgtgggtgattattattagtttttaaacaaaaatggggttgggcgcagtagctcacgccc

SEQ ID NO: 234131 - DNA, 667 bp, Homo Sapiens
tttttttttttttaatggatgggatcttatgaagtccaatctgaacttgaactcctggcctcaaacagtcctcttgccttagccttctgtgtagctaggactacaggcatgcaccactgtgcctaatttaaacatttctttaaatgttagctatagcaaaccttataaatcaagcctacttcaaattacacaaacacagatcctacatgaaagtcagtaaatctgtggggagactttttttttttatttttaaaacaagcaactggcgatgaatgtgtaactttatttatacacgaagttgttggactgtgtcctcatgcctgattttgtatgggctgttgcatttatccctggggaacaggtttagctgaagtcaccaacacagatgtactccacagtgagaaaacaagtgtgggaacatggctctgaagagtgctttccacagtgacatacgacaggataaagttagtgccttttaggctctgcaattttgaattctgtggatatcataaaaggacacttggccgtagtgctcctctgtcttagaaaatctttttgacactgataatgcatatcagaatgcatggttaaaagcagatgttggccgggcttacgcctgtaatcccagcactttgggaagctcaagcaggtgaatcacatgaggtca

SEQ ID NO: 234132 - DNA, 695 bp, Homo Sapiens
ttttttttttacatagaaaaaaaatgtatatttatatccttaaaaggcaatacagaatttataaccaaaccatgtgtgagaactgttaaattacattccaaataccagcagtggaacaaacagaaacacagagatgttttaaaaaacatgcagcacgttacaaagaggccgtgtaataattcacaacttttgttagcagccgttaagtttgattagtattaagcagcaatggtttaagcaattttaaatcatgatatgatagttacatatatgcattttactgttccaattatagtttagtaataggtcaggggtttgagcaacattttaagcattataattttctcctaaattatttactatgggaaattggcttccacttaaggttttcatagaaactgatggttattttatgagggagatgtctggacgtatgtgtgtatgtgcatgtgtgtgtgtgtatatacacacacatagataaattagaatttgcagatattatgtgtatatatatacacacatatataatatatatattatatatatatataattttttagtcatgtttttagtcatttgcttttttttttagtcatttaccggtttctcataagacatccagtcacttcttttcccttgccctttcctaacactgttcctaacatttgggtaccaccccttagctcctgcgaccc

SEQ ID NO: 234133 - DNA, 417 bp, Homo Sapiens
ggcgtggctgttgggggcttcatcgtggtcttcgctgaggttgtgatcttggctaaggtgctgttcgtccctcggctgctgttggttgtagtcggagggacagaaggaagagggtccctgctggtggggaagggccccttggttgcgatgtccatggtcggtgtctctgaaggggtgaagttcttgagggcggcttccgaggggctgtaggaggaagcagagctcccagcaaaggaagttgttttgcccactgctgacccagcctctatggagaccggagctgctcctgagactttgacgtaacttggtgtctcaacagagagggctgaggtttcttcaaggggattcctgctaactgtgaccagagctccactgagggtcgtggccccgggtgctgtcacttctctttctgtggcg

SEQ ID NO: 234134 - DNA, 579 bp, Homo Sapiens
gacttcactttatttcaaaaaatataaagcacatatgacaaaacattaacacatgttatttctgggcggatggtacttatattttatacttttctgtatttaaatttttcaaaataaaataatgatcctatatacttttaatacaaaatcacatatgtagggcatcactttatacgcagggaatctttacaaaatgaactatgtgctatcacaacaaactccttagaacaatagtttataacaaagcagaattccagacaagaactacaggtcagaaatggaagggatgtcggaaatctaatctaaacctctgactttctagactaggaagctgcttgagtggcttttcaaatttacatccagctagttaatgccaacgccaacagaaacaccctgatcctagtttcctaaaacggtatttagtataaatacacatgaaaatttttcttatttttgaaatttcaaagtccaattttataacacaattttacaatgcaaattcttgctgtttcactttctggattcagctgaatagttttgtgaaaatactgacaaacttgccttcacgaactgacttcc

SEQ ID NO: 234135 - DNA, 430 bp, Homo Sapiens
taagtgtgagattgtttatattttgtaaaatgtcttaagatacaatgaaatggagaatccctgagtgtttttttgatttcctaaactctgatccacaattatagatgtttctgaaggttcaaaaatactgaacgtgatttcagttgtttctagaatttaaaaaaaattaataatttttaataatgacactttaaatgaggagaaggcttttaaaaccaaatataaaaatctggagagttcagattccctgtctctcctctttcaacctttaatgtataaaacaaatccttttgattcagccactgtgtattgataatggcttatttattacaatcagaggaattaaacaaagatatgtagatactttgtcatcttttcttattatagaaacagtttgattttaagaatttttattcagaacgcagattcg

SEQ ID NO: 234136 - DNA, 532 bp, Homo Sapiens
agtcatgaggctgtggtggatctttctggtaagggttttgtattactcttgctttttgtttgtaatgacattctagaagagggggatatgtatgtcttccacacacggactttatgccaaagtaagagaagcccactgacaacagtagactaagctgtactgaaaaggttctttttagcaagatttctgtggtagagttatggaaaagggtgtcatttcctttcactacgtcttaagtgagacaattatagcagaaaaagaatttctaggatttaaactgttaaaaacagtttgagtgaaatccataagtgcaacaaaattattacattaaatgaatatgttatttaaaaattgattgtttaagctaggtgtggtggtgcccgcctgtagtcccacctacttgggaggctgggatgtgaggatctgcttaaggtcaggagttccaggctgtggtgtgtcattgtacctgtgaatacccactgctctccagacggggcaatataacaagaccctgcctctaaaaatctcgtgc

SEQ ID NO: 234137 - DNA, 489 bp, Homo Sapiens
tcccaaaatgttgaaattacaagtgtgagtcaccacacccagcctcttgattttttaaaacagctttattgagttataaatgacatacattaaaatgacatacaatgacctaaatgacatgcaatgacatacactgtacatatttaaaatgtacaatttgataaatttgacacttgtaaacacctgtgaaacaatcactataataaaaaaagaacatatctgtcacacccaatagtttcctcatgcccctttgtaatttctacttcttgtctctccttgcccccgtctttccccagcaagcacttatctgctttctgtcactataaatttgttagttccttaaacttttaaatattatctctgatctgttctctagtttccttaaatgtattactccaggagtaggtaatatttaccagttccaaacaaagatattattcccttatccaatattttatcttagcagaaacctctcatgttcatttttgt

SEQ ID NO: 234138 - DNA, 530 bp, Homo Sapiens
tgaagtcctagaacaagcgaaactaagatatagcagtagaaattgtatcagtagttacctgggttgaggtgggatgggagttgactgcagagaaacacaagggaagtttctggagtgatgaaatgttctatgtcttgattgactatggttacattggtgtggacatttgtcaaaactctgaatttcatatttggaatttgtatattttgtatataaattatacctcaataaatatgtacatgtatatatatgtgtatatataatacattttgatatgtcatgatgtctatcacttcacagcatattatatttctatcataccatatttacataatggaaaaagatgaaaaggatgctgtattttggggaaatcccaagagattatcccctttatttattttttatacaaatacatataaatctttcccagtacaatacaaatgtcaaaatgtggtattttcattgctctataaattcttatatgttctatatatgtaataaatgttaaaaaccgaaaaaaaaaaaaaaaa

SEQ ID NO: 234139 - DNA, 441 bp, Homo Sapiens
agtagaggggtgcccacacagtcattcagggcccagctgatgggggctctgacatctttaagatgttgcttccatggttcccttggataagaaactgagatggaagcagaagtatgtgcaaactaataatgaaagcctaagaagcgtaagaaacaacgtcgtcctaggattgtattcagaaaagattgaacattatgtatgttccttttatttgattatgcatgaatgagataggagaaaacaatggaaggatccacactgatctgttgacttcactagctgggagaccagagacagaatagggtaggaaaagagagctttggggttatatacatttgcattcattggtcttcttatgacaagcctatattgctttcttaatttgaaaccacccaatgaaatggatgatttataataaatacatatttttcccaaagttaa

SEQ ID NO: 234140 - DNA, 498 bp, Homo Sapiens
atgagcattaagtaattatatagattaatgtacaactgtgatgagtgcaacaaaagagaggttcatggcactatcaaacatgcaatggacggattttgtttttgcctataaactcttgccatagaaagcttgaaaatcagtccagggggacagcattaatcaccatgttctttccttatccctgtcttccccaaaattcatgtgttgaaacttaacaagaggtgggaactttaggatgtgattaagtcgtgagggcacagctcttatagatggggtcacggtccttctaaaagggcttgagggagtggttttgtttccttccatcccttccgccacatgaggacacagtcttcgttccctctggaggactcagcaacaacacaccatcttggaagcagagagcagtcctcaccagacacggaatctgccagtgccttgatcttggacttaccagcctccatacctgtgagaaataaatttctattgtctataaaaaaa

SEQ ID NO: 234141 - DNA, 789 bp, Homo Sapiens
  misc_feature (31)..(31): n is a, c, g, or t
  misc_feature (78)..(78): n is a, c, g, or t
  misc_feature (787)..(787): n is a, c, g, or t
cttttttttttttttagagctgagtgacatntaatgtgtggcaaagaagaatgacatggtaaaagactgatatggatntaatgacaaatattccatattggttgctgaacaccagaatgctgtccaaggaaccatcgttaaataaaacaacctgaaaataaggcaaatctcacgtatacaagcacactcacacgaaacctgttacttttaggatcattaaattattcactattttaacaaacagctgtaaaataacattacagtgaagaaaaatgtgcacaaacttcagaaacacagtttagattgtctatgaacacaggtccttaatttgtattttttcacatatgtacagtctcttgattgtaaagagaccacatggctcaaggggttaacttctcattttctccttccaactcggagctcaagatttaatcaaaaccatttagcctatttaaattgctccaggttttgcttagtaaagggcagcagaggaagactgctcttcatcaaattctccaggaaacaaataatacacttgcttccaccatcattaatgagttggtggaaaaagtcctcagattaacgttttcaagggtgaaccgcagttagcagggtttgccgaagaaatattattctaaaactagatagaagaaacaaacaacctcctgaatgcatttaacctcacttaatgcaggtaagttccctgaagaattgtaagaaaaaatggaatcacattttaaatgcaccaatagagtcgggtgttggtagttggattgttcggacgcgnga

SEQ ID NO: 234142 - DNA, 1000 bp, Homo Sapiens
ccaagattcccccttttggttgccccccttcggtttccctcctttttcctccctcgggagtccctgttccctttttcctctttcttttccgtttccaaaaggaaccaagcccaaaacctcaaaacccggccgcccctggggggccggggcacactacaagccagggcgccgggagccagctagctgcccttccccccagcccgaggactcgggggccacagggtgtcttccttcagcccatgcccacctggtccagcaggggcagcagccaggtctctgatggcagccggtctggtcacaggggaggacagcactcccccgtctagcagccaggcagggcgatgtctgccatccgtggccatttgcaaagaccccaaagacccctgttctggttccctctctcccccatgaatatcctctcacacacatgtacatgcgaacacacacaacacgcacctcgtgagacccgggacctgccccggacccccagttcctgggttgaacgaccacatcatgccacggtgcttgctcaggggaagccacgctccctctgtggggcctgctggggcctgggagccccccactgagcccacaatgccacggaaatccttgttggctgcccccgagaggggccttcccagctgggaagagctcagagctgacagctgcctcctgccatgtcaaggccccccaaagagcctcaggggctctggggccctggagggtggggttggggggtgggactctcctcccccactcctgctccctctcccttttcactgttgctttctatgtatagctccctagacctttcacttttttaaaaacgcgttttgtgtagagaataaggaacgtggatctttttattttgcaatcctgggccagctagaagccaggagctgattgaccttttaacttttttcagtggccacattttggttatcgatgtacctagaagtatgtaaattagattaaatttctcttctggaaacacaaaaaa

SEQ ID NO: 234143 - DNA, 1000 bp, Homo Sapiens
  misc_feature (379)..(379): n is a, c, g, or t
gaaaaaggattttttaaaggcgccagaaaaaggaaggggaagaagaaaacctccatggggccaggaatttttttataaaaaggaggtgttcatatttccacgcccatttaaattgggaaaaggaggaaggaggtgaagattcccaaaggttgcctttatttaatttgtgccccggtgttttttcccttttaaccaatccagttttgaagctgctggctgttatgattttttccatcaaggatggaaggcctaattatgtaaaggtcaaatccgatttaaaattttgtgcttttatagaaagaaatttctttcatagacgtggtgatatatcatttgttggacctgctaatagtaggtcaaaggggagcactccttgccncctgttccctgggtttatgcagttttctttttagagtttatatagggcaagtggttctttttctctgaattacaggatggaaaaaggtcatatcctttgtcaggaaatataaacttgaaagtatgtagtcagctcttgtaatactcatatttatgattgtcctatatgaaaaacaacttcagttaaaactataatgtgtgattctgtataacaaggtgatgtctgtttcccagggctcagacctaatccagttataataaaatcaattaaatgaaatattctatagaatcgatctatgcccttgttaatctccatccatataggagtcacgttctttaagacagatggtggtagttatttttgtggcatggttagatttgactggttttgcagaagattacagttatgtactgcataatgacatatacaatagtggtcccataaaattataatggagcagaaaatctattgcctcatgatgttttagccgttttaatgtcatagcctagtgcattactcacgtgtctgtggagatgctggtgtaaacaaacctactacactgccagttgtataaaagtacagcacattcagttatgtacagtatgtaatactgataatgac

SEQ ID NO: 234144 - DNA, 1000 bp, Homo Sapiens
ttccgaaggggaatttggcaaggggggctttggtggaattaggggggtttataaaatttgcccaccaaagagaaagccttcccgttcccccaaaagccctgttgcatggggtattggattcccattctggggccacccattttgtgtgtcagggccaggggccttacaggccccgagaaaatttcagcccttcgcctcttaaggttgattaaggaaaccaaaccggaaagatttctttctgaaagaagcagccagcctcgtgaaggagcgggcccagccgccgggcccgagggtcgccttttgttcggagtggcacgattgtccgttcccagacattctcgcctgaagcacgaagccagtatgtttgcagactttatcgtagtgacagcgacagttcaacgctgccccggaagtccccctttgtccgaaatactttggaaagacgaacccttcgctataagcagtcatgcaggtcttccctggctgagctcatggcccgcacctccctggacttggagctggatctccaggcgtcgagaacacggcagaggcagctgaatgaggagctctgcgccctccgtgagctgcggcagcggttggaggacgcccagctccgtggccagactgacctcccaccctgggtgcttcgggacgagcggctccgtggcctgctgcgggaggccgagcggcagacaagacagaccaaacttgactaccgtcatgagcaggcggctgagaagatgctgaagaaggcctccaaggagatctaccagctgcgtgggcagagccacaaagagcccatccaagtgcagacctttagggagaagatagcattcttcacaaggccaaggatcaacatacctcctctcccagccgacgacgtctgatggagtgcattgtgcacatgaagtatttatccacctgttttattttcatgaagttcttagactagctgaatttgtctttaaaatatttgtgcaaagctattaatatacacatt

SEQ ID NO: 234145 - DNA, 1000 bp, Homo Sapiens
  misc_feature (156)..(156): n is a, c, g, or t
  misc_feature (343)..(343): n is a, c, g, or t
ttggattgtaacccttcccaggcttttaattttggttaaagtctttttggggaccggggccagtaaatttttagtaagctgaaagaaacgtctagagtggtttgcttaataatttggtgaccatttactggccagggatccacaaaaccaatattnccttgtattttctacaccgccccttaatatgcaggcaaggagtaaaaatggtttactagattcggggtagtgcattttgtccactgaatctggaccttggagaaatgtacataaattccttatattttacataatgtatgtgttgtttaagaaatgtataaaaaaacctgaaaaaaatgagtaaganctggcagaagttaaaaaccctttgtatcaaaagatctttattgggtagagcactggttatcttctggatactaaaaagttgtattacaaagccaaacacttgcattcacaactttaaaaaaagatccaaggaactattcataatgatgaaatttcaactacatacaaggaggagaaaataagaacccagtcataacagaggaattctataggagtctgcatcaattcattcttaaggttgcctactctctgttatgtgaattagcgtctgtgtttcacccattgtctgtgtttagtccttgttcaccactaaggcaaggaattcttaactaggcctctgtttaccaacttctctttctcctcctttccctcttattcctccttctcctcttccttcttatataatgctagtatattctcaaaattgcaaagctgtgagaatattaaaataatcatggctaatgttccaataatgaggtctttgtgcatttagttccgcatatgatggttttttttttacattaaagagtatatgtgtcttaatgcagtcagattgtaaaaaacaaaaacaaagaaactaagaatcttactaaaaatcgataatgtcagttatctgttttgtccaatattggtagtacttttttgcctcttatgattc

SEQ ID NO: 234146 - DNA, 1000 bp, Homo Sapiens
  misc_feature (364)..(364): n is a, c, g, or t
  misc_feature (409)..(409): n is a, c, g, or t
ggggtgatatttatggtccgggtgggcgggtcgggatggagcgattcttagcctctacaagaggtgtatttggtgatagtgtatgtggtctaggagtgcgacattcttatggggattttcggttgctccctgtgatttcgaggggaaagggagggcagggttaaacgggttaacgagcttgggaggggtggcttcccttccccttcgggggcggggtataaagtggtgggagttataccggtagaggagaggagtttcactttttgttcccccagggtttggaagttcttgaagtacaaggggtgcaacccttaggctccaattggaaccttcccacttccccgaggttcaagcaaatttttcntggcctttgccctcccaaagtaggcggtgacttcagggggtatgnccgccacaccctggctaatttcttttgtattttagtagagacagggtttcaccatgctgcccaggctggtctcaaactcctgagctcaggcaatctgcccgcctctgcctcccaaactgctaggaccacaggcgtgagccaccgtacccggccacccttgggttacttgagaccctactttcatttggatctgagctgtcctacccactcactgcaatctggcttttccttctttgagtataaagtcgatacgggatggctcgcctacagcttcagtgtttgaagtaaagaaagctttatgcagattctggcttttaatgggtctcctctgacagtagaaagattcaaaccacagccaattccaagaacccttctaagaacagagacagagtcacttcaaaggatctgacttgctatacctaaatataattcatggtgcttttcctatgacacaccataatattttgtccaaaaatcttgcaacatgttattaactttgaagaaagaataaaagcagccactttagagactggagacactcaagcactcatctattcataaagtttctacacagctgaagaagtttgcatc

SEQ ID NO: 234147 - DNA, 1000 bp, Homo Sapiens
  misc_feature (14)..(14): n is a, c, g, or t
  misc_feature (95)..(95): n is a, c, g, or t
  misc_feature (194)..(194): n is a, c, g, or t
gtaggcggtcggtngaacataaggggtgaatcactcgtcaccggtaggtgtgcgatatgtgatcgtggccccgtcggtagatgcaccggagcatnaggcgttgtcccaagtatgaaacgccagccccgggctggtggcgacatacaatatcagtgctcgcctgggagggttggtggagtacacgcgcgggtaanaaccgattggggccgtgcgggggggattgtatgtctagagggaaacctctgcaattttttgttgtgggggggagacctgtaatactccaatggttaaaggccaggtgacctgggagtaaaatgcccaacccttttaaccagggctaattcagtgaagagggtttttacgggtcccaaataagccataaatgtttgtgaggaaatattatgtatataaaaccattgtcagctgggcatggtggcatgcacctatagtcctaggttactcaggaggctgtggcaggaagatggcttgagtcctggagttcacggcagtagtgcaccctaactgtgcctgtgaatagccattatattccagcctgggcaacatagtgagaccccacctctaaaaaaaaatagtaatcttttaaaaagcccatgtcatcagatcaaagtaaggttagacttctgggaagggtttggaaatgcagggctggcttgcttaactcattaaaatgctagagtgactctcaaatgtgagaaaaaaggaatactttgagtacttctgaacagtgtatctgaggtcaccaacgaaagaggcatctgttttgaagagatgagccaagataagaattaagtttccaggacaatcttaggttggaagtcccctaatcagtctatatacaattttagctggtgcttttggtgactgagaagcagatacagcatggtgaaaataatatactggtcaaacagcagagctggctctgatattaactggttgagtggccttgggcaatccaccgagtctatgcagaatcaaggtt

SEQ ID NO: 234148 - DNA, 905 bp, Homo Sapiens
  misc_feature (13)..(17): n is a, c, g, or t
  misc_feature (28)..(30): n is a, c, g, or t
  misc_feature (33)..(36): n is a, c, g, or t
  misc_feature (39)..(39): n is a, c, g, or t
  misc_feature (41)..(41): n is a, c, g, or t
  misc_feature (44)..(44): n is a, c, g, or t
gcgcccggccccnnnnnttttttttttnnnttnnnnttntnttnttaccacttaagtctgtgcattttattacatgtaagtaacacctcaatctgaaaagtatcagggcaacaccacacactgcagaggggcagggctcctccggcagttactcacttcccttgaaacagaagctcaaacatggagtagtcttctgtgactaaacttgttttccgccctcccaacttccaggaagaaccttcttctgaataggatttgaggtaacttaggaaactgctctcaatacggaattttaaagttggtgaggaagtcgacagaaggggaagtcacagtaggaaaatcaaggtactatcaggatgaagtcagcacgcagagcaaggccagcgaggcccaggcgccaggccttggtccctgcccacctcacccaggccagccagacagcacggactgccctacaaggtcacctcagagagatgggggtgttctctcactgctggcttttgatgagcccaggagggctcagccttcactatcctccctaacaggcatttggggtgcagagatgctgacgcctgaataaggttgggattcggggcccttgggaacactgggcacctggtgggtgggtggaggggcaggacgggctgcagccatgtttcccttagaaacagactgctggaattaacgaactaaacaaatgaaccaaggtgcttcaccccccaaaaaagtgagttttgttctgcgtggagcgattgcctttgggaagccaccaaggccacctgccaacaggcaaatgctgtgctgccgtctgcctggctgactccggccctcccagtcctgcaagctcatggccaggacgataacgatgacaggggcaacaccatgtcctcgcatcccgaaaattc

SEQ ID NO: 234149 - DNA, 563 bp, Homo Sapiens
atttttatttttgtagagatgggggtgtatcactatgttgaccaggatggtctcgaactcctggtctcagcaatcctctcattttggcctcccaaagttctgggtttatgggagtgagccattgcacctggccactcctccccttgcttttaatgctcagccccttcactaaagatgccctgtatctgtgacttcctgggtctcacgagcagaaaagttgatttgtgagccaagctctcacttctcaattccatggccaccaaataaagcctgcactgcttgaggctcactttcggttttgcatattggcttcatggcaccaaacagggaaagaccccattttagggaaagtggctttgtcagtaacaaggacacagaaggaaagaaatggaggatgatttagggcagaagtcagcaaactatggtctatgggccaaatctggccactgcctgtttttgtgcaactcataggctaagaatgttttctacatttttagatggtaggagaagaacaaaagaggaagaatgttttgtcacaaaagtatatgagattcaaatttcag

SEQ ID NO: 234150 - DNA, 584 bp, Homo Sapiens
gtccttttttttttttgcctgttacaacgataccactttgatcagctaaaccctgaaaacaaacatgcacaaaaagagaagtccaataactgactgcacagcagggctctctggaagaaaccagctcttggctgagttgaggatgtgagggaaaagcctggcagagaggagctatcagagcagggtgtggcagacagcagtggcagagtggactgaaggagaggggcctgcacagtgaagggcccagcttatcattcaaggcaccccaggccaccatcctggccctgcttttcatgaccttcacggatatgggaaagtcacttgacccgttagacctcggttgcctctttgatcaaacgggtatcagaaatccaaaattccaaaatccacagatccaaagagctccaaagtcaagccatccccaagctcattgggcaggaaaacctgacctgtgttggtgggagatgacttacagacatgactgacacgcttggtgtgaacgttcacatacttccctgcagaaaagttaaccaggctgctgcacactgctgtgctgagcactgagggtgccgtgtgccctgtgg

SEQ ID NO: 234151 - DNA, 666 bp, Homo Sapiens
gtcctttttttttttttttttaatgatatttactctcattctcttgggattggccctagtgtctttctccagcggaagcatagacagattccctgccacataaagagtcctagacagacactatccaatagccctgaagcagatggctccgtcctcccagagtccaatcttctagtggctggagaaggtcatgcttactcagagagactactatcccacagttttcctgcatgacatattctccataaaagtctgtctgagaggggtccaggctccgccactcctcctgagagaagcacagtgacacatccttgatggttaccaggccctgaaacaaaatgtagcatcttctgtcagcagctgttttttaaggaaaatgtgattcagtatgaaaggctaagttagtagaggagagagggtgagaaatgatctgagaaaagagctgcccagaagtccctgggtagggcacatagttttggtaacagggaaatgaggagaggagtaaaggtagatggtcaaggagtgagtgagtgtaatgttactggaggaatttcccaagtggggccatgagaagctggaggcaccataaactcatcaccacctctgtttagctacaggtgtctactcagtcacttctccctggccttactctttttatgaagaaat

SEQ ID NO: 234152 - DNA, 557 bp, Homo Sapiens
  misc_feature (28)..(28): n is a, c, g, or t
ccgcgttttttttttttttttttaggtntgtaagggaggcttccttcatgatatgaccgtaggatgctgtcaccctgacccggttcctgatgcgtgatgtttctaagtgctcagtaagtaccaatctactcccacactgcagtatgtgggcgtgtgatgctgaacagagagagcacgatgtgatcatagttaattccctctggtatcaaaaaaataaaaacctatcaaaaaataaaaacgtatgttgctctcgtctgcgtcatcattgttgttcagacttttacataacatgccgaaggagaagactcagaaagccaggcagaatcatgaagaaataactgaatagttctgattccaagaactgtgtgaccttatgacatttaaagagtgaggaagagaaagcaacaggttccaagtattatagcaagcataccagctttacttcaggaaggctcgtggagaagctgtgatcacattgtggttatttagatacttccaaatggaaatggcattgataactattcagctgtgatatgaaggtacaaaaaaattttcca

SEQ ID NO: 234153 - DNA, 611 bp, Homo Sapiens
  misc_feature (564)..(564): n is a, c, g, or t
ccgcgttttttttttttttttttttttgcaaggaaactgcatgggtacaaatttccaattcatacttaacaaggtggggaaacgggtcattcttggcctgctccagaacaaggggcgagtctatgcactcctggagcagcaggcgcagggagggttaaatgtgaggccagaaccaaatctcctgtttccaggagctgaggatttagaagagtctctttggttgatttttacaggagagaagaaggagtgaccagcaagtgagaggaggcctgcaagggtagaggaaggaggatgaataataataatcacaatacttctagtccttttggaaaatatgttctcatccttcaagtcgacgtcaaatgcttcccactttttgaagcttccctgcctcccccactaacctgggtgtgaaggttctttctcagatgtgtctgtctactttgtgccaggctccctggtagaagcttgattaatgctatttcatttcattcttacagcaggtattgttgtcatacattaaaaaagatggaactaataccaagagtttagtttgtctgccanaaagtcatacaagctagtccagtggcttccaaccagggacggacaat

SEQ ID NO: 234154 - DNA, 516 bp, Homo Sapiens
  misc_feature (496)..(496): n is a, c, g, or t
ccggcggtgtagatggtacgcttgcttgtacgcagcaggggaggctctgacttgcactggctggtggtccgcttccggggagagcgcccagtgcccacaggtggcaggagcctgtccaggaactctgcattgctgctgccttctgctccaagggcccggcaccctgagatcctgatgccagggtaagctggggggctgctcatggtcgaggacacgggtgggtgctcctgaacagcagagtggccccaggggtggatgcgtgggggctcaggcgcaggcagccgtgggggacatcaccacctcagacccacagcagtcccctagggcagctcaggagctccggccacctgaactggcccttccatgggcaggaccactcctgtgggcagcacagtgggtgcagagccggggggctggggtgagacccttggctggcagaagctgcctgccaaatgtcagcagaggcacagcagctaggaggcccttggagtccccnaccgtacgtgagggaacagc

SEQ ID NO: 234155 - DNA, 404 bp, Homo Sapiens
aggctctgggatgcccggctcaggacaggggaggattgcgagggaagccaggggaggatcgcgagggaagccaggggaggatcgcgagggaagccaggggaggatcgcgagggaagccaggggaggatcgcgagggaagccaagggaggatcgcgaggggagccaggggaggatcgcgagggaagccaggggcagagctggggctctgggaagaggctgacgttatggtggcttcagcttcactaggaatgggacacagggtctgggggcctctgactcccccaccccgaggcctgggtagggacagggtggtggtccctgggtgggtcaggtagggcacaggggccagggagggacaagcagacctcagagcgctgcccagatggaatattaaattatttttg

SEQ ID NO: 234156 - DNA, 393 bp, Homo Sapiens
  misc_feature (44)..(44): n is a, c, g, or t
  misc_feature (72)..(72): n is a, c, g, or t
  misc_feature (97)..(97): n is a, c, g, or t
  misc_feature (197)..(197): n is a, c, g, or t
gttggtatttttttaagtaggagacagggtttcacagttgttancccaggatggtctcgacctcctgacctncgtgatccgcccgtctcggcctccnaaagtgatgggattagagccgtgagccaccgccacggcggaaaacgagattttttagatcaactttacattgccaatgcccatggtattccctccacaanaaactccacaagagtgctcagaaaagtcaaacttgttatcaggtgatctttagggacccaaagactactcttcctaccctttccagtgttgcccaggctggaattgcactagcgtattcacatgttcctgcagtctctagcccgagagtttaagctatcctaccacctcagcctaccgagtaaatgatagtacaga

SEQ ID NO: 234157 - DNA, 623 bp, Homo Sapiens
gtgggcggagatatgtaaatagaaagtgcgtacagttagaacgtccggcacgtaactgatcggagcattctgggaagaagtaatttattccttttcggcagccgaatgaaaaaaaaatttaaaaaaatgtgcgagctaatatggcaaaacaactggaaggacgctaaataataggattgctcataccagcgcgttatgaactcaccctagcttgtaacggaatctttttcactgagtgcagaatgtcggcggtttgcctgtatcgtcaggtgggataatccttacctgttcctcctccggagggcagattagaacatgatgattggagatgcatgaaacgtgattaacgtctctgcgtaatcaggacttgcaacaccctgattgctcctgtctgattctttctgacgatcacttacatttgtgttacgctgattagcagatatccacaaacatagctatgaagttctgactgggataaccttgctgtttgtctattttgccgtcttgctattgctgtttgtctattttgcagtcttgctaaatttgtttgttcttgaaaattgtgatttggtttttgttgctttctggaatttaggcagtgaaataataaaaaaaaaaaaaaa

SEQ ID NO: 234158 - DNA, 526 bp, Homo Sapiens
  misc_feature (67)..(70): n is a, c, g, or t
gcacgagggttggagcggccgcggctgtaggcctttttttttttttttttttttttttttttttttnnnntgagacagagtcttactctgtttcccaggctggagtgcacaaacatggctcactacagcctcgctctcccgggctccagtgatcctcccgcctcagcctcccaagtagctgggattataggtgtgtgccactgtgccaagctaatttttttattttttgtagagatgggatttcaccatgttactcaggctggtctcaaactcccagcctcaagcgatgctcccacctccacctcccaaagtgctgggattacaggcgtgagccaccatacctggcgcatgcatattttttaagagtacccactggagtctaatatatagcctgggttacctgggatgaagaataaagagagcaaactaccacaagcaatggttgagcccctgtcaagtgccagtcatgatagtagtaataataataataaacatctattgggccaggaaaaaaaaaaaaaaaaaa

SEQ ID NO: 234159 - DNA, 748 bp, Homo Sapiens
acgaggccaaacgacgctggtcgcatgcgctggctgtgtctgtctgctgaattctattttgtctcctgacgagacgtgaggaccatgcccttgatccctccgatggaccagaaacccccttccttgcaaaaaaaaggcaattgaattaggaaaagatagcccaacctagctcagatccaccaagataagcacagcaaagcttggctgcatttttgaggaataaaaacctgcagaaagcaccgataaccttcaagatctgaatgagattctattataacccgtctaaacgattgcaaaattcctcctttggttttggaagcagcgtttgctctcccgtggctcggattctctgaggaccagggagttgacacacaaaccccgccatgggtccgagccagctatttctcaaggctcccacctcgccaagctcccaagggcctgctggcagtgcctacgctgtgccaactaccctgtctggtacagaccacggctgggtaagcacccttaaaagcaacagaaatgacgtctggaagctgaaatgtgaaactgtcaagatggcttaggagaggaaggagtggacccgctggtctttggcattttgtatttagaattattctaactttatacataatgtataggccgatcttttggaagggataaggttttcattcttgtgcaactcattattctcattattggccttttaaataaaaagttgttttgcagtgtgaaaaaaaaaaaaaaaaaa

SEQ ID NO: 234160 - DNA, 753 bp, Homo Sapiens
cgtgcatgcaccgggtgctggcccgctgagcttccccggcaccaggtgccctggacctcgaggtcctgagcctgacccagggctggtctgaccgactctctgcttctggctcctggcacttcttctcagctcagggcgtgctctgtcaaaacccaagtcctttcttggctctgtgtcaggcggggtgttcagcaggggtcacctggctcttctgtctttgcagggccccctgctgcgctggctcaaggtgaacttcagtgaagccttcattgcctggatccacatcaaggccctgagagtgtttgtggagtccgtgctcaggtatggactaccagtgaacttccaggcagtgctcctgcagccgcataagaagtcatccaccaagcgtttaagagaggttctaaactctgtcttccgacatctggatgaagtagccgctacaagtatactggatgcatctgtggagatcccgggactgcaactcaataaccaagactattttccttatgtctacttccatattgaccttagtcttcttgactagaaaggccagctggcacctctgtctcatgttcgtgcagattattacagacacctctttcctttagccagagaatggttcaaatgtcttacagaactaagatctttttcagagaaattgctcacaaaagttagtgacagttgtatttatttttttaagttacaataaaatgctctcaagtcctttgaatgttcaaaaaaaaaaaaaaaaaa

SEQ ID NO: 234161 - DNA, 692 bp, Homo Sapiens
acatcagcctcagccaacagagccaaagctggacatgactgaacaggtgccagccatgagttaaactcagccaggccctcctgatatgtgaactagagagcaataaggaaagtttcagtatggggcacacactggagctgaatagttctgatgtagggttaggaatggctaccatgcaaaaagggaagcttgtgagcagaaaggagaaaaatgagaggcaagagatcaatgaccacagactcctcagagggaaagaacagcctccattcccaacactctggtgcctgtcctgtgaggcccagctatctgttatttcacaacctaagacggcccatgagattgctccctgtacaggatttacgatgagaccatctccacttgagctggcctgaataggtactggtcctcataaccaaaagttttgcctaaaattaaactatagcttaaatcgaaaaccagagtccctagaatctaggataagatgtagatatacaagacccctagcaaaataagaatcttcaactaccaacaatttggtctggaaggtgctgccatcacctagggtaatatgaacccaagggctggagtcggccataggaaatggacaaggccaggtatagcgaatggctttgctcctgtagagaaccgtcactcggtctggggaggtcaaaagagaggaaaaaaaaaaaaaa

SEQ ID NO: 234162 - DNA, 641 bp, Homo Sapiens
agaattcggcacgaggtggtgagtgacaagaatcatatgcactttggggctatcacttgtgccatgggtattcgcttcaagtcttactgctccaaccttgttcgcactttgatggttgatccttctcaagaagttcaagaaaattataactttttgctccagcttcaagaggagctgctgaaggaattaagacatggtgtgaagatatgtgacgtgtataacgctgtcatggacgtggttaaaaagcagaagccagaactgctgaacaaaattaccaaaaacctagggtttgggatgggaattgaattccgtgaaggctccctagtaatcaatagcaaaaatcaatacaaactgaagaaaggaatggttttcagcatcaatttaggattctcagacctgactaacaaggaggggaaaaagccagaagagaaaacctatgccctgttcattggtgacacagtgcttgtggatgaggatggcccagctactgttctcacttctgtgaagaagaaagtgaagaatgtggggattttcctaaagaatgaagatgaggaagaagaggaggaggagaaagatgaggcagaggaccttttgggaagaggttctcgggcagcattacttacagaaaaaaaaaaaaaaaa

SEQ ID NO: 234163 - DNA, 582 bp, Homo Sapiens
  misc_feature (59)..(59): n is a, c, g, or t
  misc_feature (506)..(506): n is a, c, g, or t
tccatacacacgtgcacacatgtacacacggatacacacacacacacacacacacacantgcatatctgagcgcgcccctcgcactgggtctcaccttgcaccttcttcaggattttatatgtgaagagatttttatatagatttttttcctttttttccaaaacactttatactttaaaaaaaaaaaaaaaaagcaattcctggtggctgtgtgcctccaaccctggtccccctctgtctccagccaccctctgcttgggcttctgagctggtggccctggcccagaggtctggcggaggcccaggcagcagccatggcggggtgtctctacaggggagaggcgggagcctgccaccctcttcctgccctacctcctactaacacttcctgccccatttggacccgtaccatggggctcaggacagagggagctagcagctggcctccatggccccacagcctccttcgaggctgtgctgggtgcagaaccgccagagccacccnaaaaggtgtttctcttctgctccctgaacctcttaacttaataaaacgttccagcagcaaaaaaaaaaaaaaaaaa

SEQ ID NO: 234164 - DNA, 581 bp, Homo Sapiens
atcacatgaaaatcagcgactcttccttcttacaaaactcggagcttctcaggataacttggtgaaacgtcccccgctgtgaacctcagtgagcccacctgtaatatacaggtgagggagaagaccagaaaagctcagtcagagtgacactgacccctgaaatgatgggcacaatggagtgtgtggcttttcctgtaggacagggaggtatttagttgtaatttgaactttaaaggattccagtcctccgaaaaacaggattagactcaaatcaccttgaaccttatcatctcacggctttgacccacctacatggctccgtgtcccctgcaggcctcgccccggagctctacaatcctgtgtgcagttgtctccgcagctctctgctgggacatcaaacaggcatctccaccttcatgtgtctataagtgacttcctaaacccccaaacacattcccttacagtcctacacctctcagatgagggtgacagtgtacttctgggtgcttagctgaggttgacaccatgtattttaaatatggaaaataaattacattatttgtaaaaaaaaaaaaaaaaaa

SEQ ID NO: 234165 - DNA, 598 bp, Homo Sapiens
ggcaactgtggcatattgtttcactgtatctttatatgtcataatattgaggcagattctttgtaattcttgtttttagaattttcatagctattcattctcatgcttctcagtgtattctgaagtcattcatcattttctagaaaatttatgattggcattttgattggaatcccttggaattcatcagttagagttgactactgtaggctattaaaacgtcttcctataagaatgtagatatcagactggtgaaaatttaaggagctgaagtaattttaaattttaattgtaagattttcgtggaggtgatttttcaaaaaggtttagttactgatgttggttcctgtgttatttctggtagatgaatcaattatattaggtaaaagtattatcattggcatgattaaaaagatgttttagcttaaaacctaaatgatgggttgataggtacagcaagccaccacagcatgtgtatacaacctgcatgttctgcacatgtatgtaacaaacctgcatgttctgcacgtgtgtttaacaaacctgcatgttctgcacatgtatccccaggacttaaagtaaaaaaaaaaaaaaaaaa

SEQ ID NO: 234166 - DNA, 707 bp, Homo Sapiens
  misc_feature (51)..(51): n is a, c, g, or t
gaattcggcacgaggttaaaagatagtttaacctcagcgatctctgatgtntgcgctaatacccttgtaaaggctttcagaaattttaaagaattgctatgaaaggaaaagtaacattctagtttttctctgtaaaagaggttcacaaacggcagatcgctgttatgaaaaggaggggtggaagtatttaaggaattgtggcaaacaaagtcacagaagaatggatataagcaaaagtagcacactgaaaaaaatggggaaaagtggagtctagatcacaaactggtaagcttggtgatgttctctagccaaattcgaaggtaataacattgtattatggctttctgtttaaaagcagtttcgcttatttgattattcaacaaatctttattaacacgcattacgtgtaccagaaactgtggtacacttaactgtggagctggggaagcaaaagtgaacatgccgccttaagtgagttcagatggcttatcttccggttggggaggcatcaagtacacaggtccgttgtaaaccagtgtcttaagtgctaaccttatcacatttgctattagaggatattaaacatgtcagacttcttggagaaagttgatattttcatgttccaagtttgggaacatcattgaattcagacagatctggattgaaacagattaaagtgcctacactttaaaaaaaaaaaaaaaaaa

SEQ ID NO: 234167 - DNA, 687 bp, Homo Sapiens
  misc_feature (105)..(105): n is a, c, g, or t
ccagtggtcaataaactgtaaagcgaagaggtaaattgtgatagagaattttctatgtcatgggaaattgaaatcacatttattttgattaccagcaatatgatntgttaactctgtgccaagttttaagtatattttttcacaaagatagagtgccatagtgaaactaaacactgtgcataaaggtacatgaattattccagttttaaagtattatgcatgtttgtttaataaatgtggcatggttttaatacaaatgctatgttatttaaaagttagaggaacatttctattgacaaaaatatgcttcatttacatataatgttaccatatggtgttaatgattaaattagatctttacatagttcttacaaagcatcagtctaggaaatatgacttattactgatgcaaacgtgaacattttgtagtagttttgtaaaagaacatccttttcaaatatctgtgttaatgtacccttgaaattaaatgcaagcacatagtcagtttgtctaattttgtgtgaaattttgtcgaaaatacctaaacatttcatctatatttgtgcctaccatgttataaatgttcataagtaccttcatgtgtctataaaaaatgttatatttaaataaatgtgaattaaaataaaatttttgattattttcagatccaaaaaaaaaaaaaaaaaa

SEQ ID NO: 234168 - DNA, 693 bp, Homo Sapiens
aatatttctattaaaatttccttatttccatatgcaagaggagccccagagctgcatccttatggtagctaccatgccgtgatgtaagctgccattcactggggagctttggcaatagaattggctagatcaggaagcctatgtcaactatggaacaacaacttgcagctcatctctattgatgatacactgcctctaggactgggacagatagccactgagtacctgcttcaaatcaccctgcacgttttctctttggaaagataagcactggagaaccatctcgttaccttcagcagaaatggaaacaaatcaagacattaagaatgccgcagtggacagcagttatgcaaggttcagcagaggaagttttcaagatggtgtgcctcactagccagaaatcagaaaagatcgaagctagccttttcatctcagctgctccttaaatcagtgcaacccctccaaattaatgtgaattgaaacttgcattgcttttcaacttaattgaatacttactatatgtgaaccactgcacaaaataggggaagaagatgtgggagacaaagatgtggagcctgtcttcaataaatttacagttagtttcagggtacattgtttttcttctgctgttaattaggtgtatccccaagacaataaatacatgaatggaaaagtaaaaaaaaaaaaaaaaaa

SEQ ID NO: 234169 - DNA, 703 bp, Homo Sapiens
ttaaacgtaggaggtataccaaatagcattttctcatgttctctttctggcctgtacctccctgctaagcttccttcagtgttcatcctcacctcatagagagatgaagtgaagagacaaacagaagtcattttcttccttactttagtggtttctggtttagttagtttgggccaaactgtggacaagtaccttttcaggtaacttttttttcttatttctatgtcctcaacacctagtggagtacgtagccaatagtagatgcttaataaacatttcttaaattaatattgttgaccttttctgaccctgttcttgacagtaaggtacataatctgccttcatccctttagtccttaggaacagataaagtcatggatatgaaagtgatcactgtcattaatatccacattaaaattgctcttgattttagtttctccataatcattttccctaaacaatgaactctgttcacctttttttttaaaatatgcacagtgaatattactggtagcccaaatcttctaacataaaatttccattttgtaaaagcttctgataagcatatatgttatgaattgaatgtttgattattatactttaatattcttgaaaatattgatacctggactggaaagaaaacagacaaaagtaaatctcagaataaattactgctttaaacatgaaaaaaaaaaaaaaaaaa

SEQ ID NO: 234170 - DNA, 594 bp, Homo Sapiens
aaaacgggtgaaacggcatgatttaagtagcataccagatgcgtttctgcatggcatggctcttgcttgatgaataatgttctgtatagtagaagaggaaaatacagtgagtgaaggagctggcagaaggtgggctgggggagttggggaagagtgaaatgagtatggagaggtgagagagctgactgcaaaggcatgtggggtgtggattttaaaaggaaagccctgaggtggaaatcactaacatggtgcctggctacaagcagagggagctcaggacttgactgtgctgggggtggcctgcccttttgtagtgcagttgaggagagctcaggggctgtcagaatgctgtgtgggaaggtggaggacgaaagaggacctgggagcagcaactttgttctggtttgttgttttctcttccctacctcgtatgtactcccactcaggaaaagatcctgagacctctctgtaccagatcctcttatacccaggttctccttaatcccaatcaactttaatctataaagttacgatttgtttacttataaatttatttttaataaagttgtgaaaccgaaaaaaaaaaaaaaaaaa

SEQ ID NO: 234171 - DNA, 594 bp, Homo Sapiens
gtttttacactgaaagcaaagattatagcaattgtagtccatggtatttattttcagtcaaaccaaagttacatataattctgcctctgcttatacgggatattaacactaacaatacactcccttcaaagacttgcacaggccaaattgttggaatgctggttttcttgacaattccaaaccccaaaactatgataatgagttatgatgtagttgaaaatagcatagtcagatgtttgcttaaaacctagaaacttaacatgttgcttttcatgtgctgtgccaagtcttgataatactttttcccccaaccaagggacctcataacctgattatggttattgctttacaaacagttttgacagaaggtggctgctagagcttaacatacgttcccgttccatgtgatggaaccggttcttgcaaactaagctcatcattgattctttgctgaagtcagcaaatagagttagagagatacccagtcatctatcacaccaaataaaaggacataacggctttcaaaagggttttcccacttaccccaaaaggctttctgaaagcttctacctctgcaaaaaaaaaaaaaaaaaa

SEQ ID NO: 234172 - DNA, 543 bp, Homo Sapiens
atttttagcctgtcattttaattcttcaacgagattttactgctggtattttttaatgcactcctctttgtaatttcattcaagccatttgtctaaagtcatttctttgttttttgggagatggagtcttgctctgttgcccaggctggaatgcagtggcgtgatctcggctcactgcaacctccacctcccgggttcaagcgattctcctgcctcagcctcctgagtatctgggattacaggcgtgcaccaccatgcctggctaagttttgtgttttttttagtagagatgggttttcaccatattggtcaggctggtctcgaactcctgaccttgtgatacacctgcctcagcctcccaaagggatgagccaccgcgcctggcccatttcttctttttttgacccatacttaatgttgcagaaactattcttgtcataacattatctctcatgtacagtaattatatgtaaattaattgaagcaaatatggaaactttacaatagaaataaagataggcagccaaaaaaaaaaaaaaaaaa

SEQ ID NO: 234173 - DNA, 555 bp, Homo Sapiens
gagagccagtctttcctgtatagacaggtacggaggatgacggctgtgctggtggccgtggggctgggggctttggcacctgcccaggtgaagacgattctggagagccaagatcccctgggcaagcaccagacacgtgtagccccagcccacggcttattcctcaagtcagtgctgtacgggaacctcggtgctgcctcctgcaccctgcaggggccacagttcgggagccacggatgaccctggacactcaagccaaagttaggccacaccaggcccaaccctgtgctggtcaagccagggcagtcacagctgcttggggcccacagcactgctgcctggtctccacagtagcctccctgcccgggtcccagcaccctggatgcccgtctctgtcccaggcgggatggggcacagtgcaggacacagccatgtacaccaagaagagagtaccaagtagtcttttgttcagcttttactggaaactgctgtctaggaccacctgccctaaccaggaataaaggcaagacagccgggaaaaaaaaaaaaaaaaaa

SEQ ID NO: 234174 - DNA, 641 bp, Homo Sapiens
tcacgagagaggagtgaccaagacgatctttaacaattcaacctcaaatttctaatttcaccaacaactatttattgagggctaggtaaaaagttctttttgttgtaatcgtccattaattcataagttttaaagggcatggtgctcccagcaccagaaaactatcagtgtttttaaagataaattacacaagggaggagaaagatccctgtgctaggactgcagattctatacttgcgttggcctctaactctccaatccagagcctcctgcctctggcgtcagtcttttccctcatccactcactggggagattggactagaggagtcctgagaggacacttccaacaagagacatttattctctgattttacctgaaaatggtagtagtttacatttatacagtacagtttatgaagcactttcatacgcaggcatctcttgttacctacatctaagctgttcccgaaagagtgttacagaacacaacagtattgtacaatattcgataagcatatcttcactgcacttgttataaaaatgagtggtgaaataatgtttggagacataatgaaagcgattaacatttggcaaaatataataaagcctttttgtaattggtaaaaaaaaaaaaaaaaaa

SEQ ID NO: 234175 - DNA, 652 bp, Homo Sapiens
aagatgcgaggcagagcggagaaccagaagcaccacttctctcaggctgatgctctaatctcggctccccccgcccctacaatggcgtagacggcctccgccgcccgactcacacacaccctcccccgggaacggcaagtctcctcgggttccaaggacagggtcaaaagacaagaggcccgaggcgctcccgccgtgatttgcagccagataccgttgggagcgcagccagagagcgttgggagcgtgcgtacctccagcccaacatggcggcggcagcggccgcccccgaccccaagccctccctcagggcccgaggcttctcctcagggccttccggtgggcgggaagacagcgcaaccccgccaggcctttctcgtcgctgcgcctgctcgctgaaggagtcacctacccgacgagactaacggctgcggcgcggaagccccacagcccgccgagaaccaggaatacgagagccaggcggcgcggcggcgggacctgtactgagcaagaaagaagatttcaaagtaatttattgttatgagatccgtgcttttatcttgtctcagactcccaatgataggcacatactctcctctgtacatttaatgaaactactaaaatatttcgatttaaaaaaaaaaaaaaaaaa

SEQ ID NO: 234176 - DNA, 768 bp, Homo Sapiens
gaatgtacaccatatggaaaatgtgtgatcctcataaaataaaatggaataccatgatccagcaatcccagtcgacatatatactcaaaaaaaattaaaagcagggtcttgaagagatacttgtgttccatggtgatagcagccattgttcacaatagctaaaacatagaagcagcccaatcggccatcagtagatgaatggataagcaaaatgtagtatatccatgcaatggaatattattccacttcaaggaagaaaattctgacactggctacagcatgaatgaaccttgaggacgttatgcagttttacaggatgagttatggagctggatagtggtgatggtggcacattaaggatgtatttaatactgttcttaaatggtacacttaaaaatggtaaattttatgtgtattttacaatctttttttaaattgaagaaaaatcctgtagataaattagaaaattcttcccttcataggtttatctgcatttgattctcccatacttgtacaaggatttatttgtattcaaatggacaaattacgcaataggaaatatttgaaaatatttatcatgggtaattgctattttcattgacttcctaagattttatgtaataatcatttgagtcaatattggtagctaatgtactaatctaatattgaaatcagattgatcatctttgttacttaaagataatttgattggatcagcagttatttcaaattgattaaacaaaaaattataaaacaaaaaaaaaaaaa

SEQ ID NO: 234177 - DNA, 677 bp, Homo Sapiens
gctttcctgctgaaggccctgaaatcacctgtgttccaggccacctgctaacaataaataatgctgccctgatgtggggaattagctcaagtggtagagcgcttgcttagcacgcaagaggtagtgggatcgatgcccacattctccaagctttattatttagacatcgtgtctccaaacactcaggtctccaaacccaagttagtgtctgagaacaggatgctgctttggttcaagacgtaggagcagcaataatagagggctggtgatggctccctcttggcattcagtatagtgtagatctaccatgtaattaattctctgtttctttgaggagctgtgaaaccaagggacatatacaactgctcttttctccctgtttctacctgcagctttgtcctaaatgtgagacaattatgaaaagtgcagcgcagagccacttgggtaaatacagccccggctttctgctcaggggacagagtttgaggcactgcagaggaaccggccaaagtatgagacccatatattgagagtaacagagtgtaaagttcaaaaaaatcaaaatatttaaagatttatcatgggtcttgatgacatgatggaatctctctactctctggacttattatgtgtggtaataaatttactttttaaaagccaaaaaaaaaaaaaaaaaa

SEQ ID NO: 234178 - DNA, 755 bp, Homo Sapiens
gcagcagtgcgaggacaagagatcatggagtggtcaaaatattcagatgagacatttggcatgtcttcctttattcactgatattttctacccatggtcttatatcaccgtatgaaatggaaacttacaggacttaaatatcagtgaaatattttgagatctttgaataattcctttagaggaattatacaaaattaatatatatgagtcctttgtaatttatttttttttgagacaggatctcacttttaccgcccaggctggagtgcagtgccatgatcacagctcactgcaggttcagccttctgagttcaagcaatccttctgtctcagtctcctcagtagctggggctttaggtgggcactgccacaccgtactaatttttgtattttttgtagagacgaggtcccaccatgttgcccaggctggtgtcaaactcctgggctcagtcagtccccccatctcaccctccccaagtgctggaattacaggcgtgagctactgtgcccagccttacggacatccttttgaattatctttttcactcatagaatatgaatacatttatttagactttttctagaactttcctgttttcatgtctttgcttcatctggaattggcttaacacccttttataaagtttgtgtttgtaaaatttccattgtgacatcaatacgcaatatattttgtaatataggagtttctatttttttattaaaatggcaatgaaagcaaaaaaaaaaaaaaaaaa

SEQ ID NO: 234179 - DNA, 579 bp, Homo Sapiens
gagccggttggtcgcattatgtttcagctcttctcagacatatgtccaaaaacatgcaaaaacttcctttgcttgtgctcaggagagaaaggccttgggaaaacaactgggaagaagttatgttataaaggttctacgttccatcgtgtggttaaaaactttatgattcagggtggggacttcagtgaaggtaatggaaaaggtggagaatcaatttatggtggatattttaaagagaatgtggtcttttgcaaaatgaaaagatgaaaactttattctcaaacatgacagagcgttccttttatcaatggcaaatcgagggaaacataccaatggttcccagtttttcataaagagtgttacaccgtgcgctccaaagtaccacaaagcctgctccacacctggatggggtgcatgtagtctttggactggttatttctggttttgaagtaatcgaacaaattgaaaatctgaagaccgatgctgcaagcagaccatatgcagatgtgcgagttattgactgtggagtacttgccacaaaatcaataaaagatgtttttgagaaaaaaaaaaaaaaaa

SEQ ID NO: 234180 - DNA, 666 bp, Homo Sapiens
acaaggcctttatttatggctcacaacttagtgaacatcagagaattcacagaggtgaaaaaccttatgaatgtaaacacgtgtgggaaggcttttattcgtggctcacaccttactgaacatctgagaactcatactggagagaaaccctatgaatgtaaggaatgtgggagggcctttagtcgtggctcagaacttactctgcatcaaaggatccatactggtgagaaaccctatacatgtgtccagtgtggtaaagactttagatgtccttcacaacttactcaacatacaaggcttcataattgagaaagccttgaatgtgattaaatttaagaaaatcttcatctatttcatatctataatgaatgtagaacatcttgcttctgctcagaatctgctcattcttagaaggcctacattaacatggatgcagaataatttcagaaaccccttaaataattccttaacatctctataaacgctagaatataatgctgaattatatcctttattaagcatcatctccatttcaccatatcctaactgaaatcctatatatttcttgtgtgttcttttctatttgtaaaatactgtaattgtattacaatgactaaattataattaaatacatataattccctttcgataaaaaaaaaaaaaaaa

SEQ ID NO: 234181 - DNA, 706 bp, Homo Sapiens
  misc_feature (20)..(20): n is a, c, g, or t
acctggagctgcagagggancggcaagtgacagtgccccgggcctggctgctcttccttcgaggttcgcttcccactttccgctccagcctcttcctgtgggtacggcctaatggccgtgtggggcctctagtggcaggaaggaggccctcagctctgagtcagggtcgtggtcaggacctgctgagcacagtgagcattaggtactctggccacagcctctgagggtgggaggtttggggaccttgagagaagagcctgtgggctctcctattggaatctagttgggggttggaggggtaaggaacacagggtgataggggaggggtcttagttcctttttctgtatcagaagccctgtcttcacaacataggcacacaatttcagtcccagccaaagcagaaggggtaatgacatggacttggcggggggacaagacaaagctcccgatgctgcatggggcgctgccagatctcacggtgaaccattttggcagaatacagcatggttcccacatgcatctatgcacagaagaaaatctggaaagtgatttatcaggatgtgagcactcgttgtgtctggatgttacaaatatgggtggttttattttctttttccctgtttagcattttctagttttccactattattgtatattatctgtataataaaaaataattttagggttaaaaaaaaaaaaaaaaaa

SEQ ID NO: 234182 - DNA, 665 bp, Homo Sapiens
accatctcatgactttatacaggaatcggagacatccaaggccattccatttctaaatcacacttatccctcaatcaagtcagtgactggatcatctcctaaggtttcacctgctttgcatcagtgagttggactatggatcaggtactgtgctcagcatcagaaaatgggatgacaatgaacagagtaacaggactatatttctgaaaaaggatgaacttactggaaacaggattgcgtgcctgaaatatacccaaatggatataaatgtcaactcagttctgggctggagatatagatttggaatgcaccaacaatgcagatggtaatcctggcatgcgagtaggtgagatcatccagggagatggcctataatgagagcctacaacatgtcagggctcaagcacctcttactgcctcctcactctggaaccaaatgccttacttgacaggatcacagaatgtgaattttgaacagatctgaaaagttattaagttcaactccacagaggttcctaggagaatgttaacagtccagacctttttcactacatcaaccacggatgattggcatataaaatcctacttaacctttacataactgcaataccaggaaacaaatatgtcaataaaaggaaacatcattcaaaaaaaaaaaaaaaaaa

SEQ ID NO: 234183 - DNA, 672 bp, Homo Sapiens
aaacaagcaaacaaaaacccctgctgcagcatttcaggtgcagtatgatatttcctaatctttcctatttcttaacaaaagattttaaagtacttctctagtcattgaagtttttttttctttacataaatattgatatattctttttctactcaaagtgccaaaggctacagtttttaatgacttaacaaattgtaccacattgttaaggacatataatgatagacactagaactcagacctctgcatgtatatttgataacatgtcttttgtaaaacaaaaattacaaaaaatttgtttacattccactggtaccttaatttaaaataaatcagactaaaaggtggtatctcttcttagtgttctatttatcttatttgctaatgggagcacttcttcctttgttaggctgtgctttactgataaaaccaagtattgaataaagagagttaattatctttttaaagtaaataaaattatgaaaatatatatagtatatataaagtactgtgtttaaaaaaatgttatgcaatgttttccaaactgataaagtttgtaaagtgctataaatgtattttgttaagtacagataaaagctattgtgtgagtatattgtgctaaaatcatagaaataaagattagatttcttcatcaaaaaaaaaaaaaaaaaa

SEQ ID NO: 234184 - DNA, 668 bp, Homo Sapiens
  misc_feature (26)..(26): n is a, c, g, or t
cactgaagcatctctcatcctcgtcntgaaaccctgaatctcaaagggaacagcatccacatggtgacaggtctggaccccgagaagttgatcagcctgcacacagtggagcttcgggggaaccagctggaaagcaccctgggaatcaatcttcctaagctgaagaacctctacctggcccaaaacatgctgaagaaggtggaaggcttggaggatctgagcaatctcaccaccttgcatcttcgagacaaccagattgacaccctgagtggcttctccagagaaatgaaatcattgcagtacctcaacctgaggagatcaaagacgctggccttcagacctgatcagactcccaggggcagccaccacatgtatgacagagaacagaggatgcctgtttttgccccaaagctggaaattcatcacaacctgaggcccaggatctgctctgtgccggtcctctgggcagtgtggggtgcagaatggggtgcctaggcctgagcgttgcctggagcctaggccgggggccgccctcgggcaggcgtgggtgagagccaagaccgcgtgggccgcggggtgctggtaggagtggttggagagacttgcgaaggcggctggggtgttcggatttccaataaagaaacagagtgaaaaaaaaaaaaaaaaaa

SEQ ID NO: 234185 - DNA, 602 bp, Homo Sapiens
gagcccccacatgccccggcccaaccaaaccatcctggtggacgtggcccggaacgcggcgaccatcacagtgaccccacctcagagcaaccacagctgggcggtgctgttcgacgggcagagcggctgcatctgttaccgccctgaggagcaccaggtctgcttcctccgcctgatggaggacagtgatcgggagaccctgcggctgctggtggatacctccaaggtccaagaggcttgggtccccagccaggacacccaccacacccaggagctgctggcagtgcaggggagcctcgaagtggaccccgcccaggcgggggctttggtgcagcgcctgtgcatgaggacccccatctactgggcccggcgagcagaggggccccggagacagcggctgatttatctctgcatcgacatctgcttcccgagcaacatctgcgtgtcggtctgcttttattacctcccagactgagcccccgacctggcccagcctggcccgtccccaatccagtgggctggccaggccacctgcaccagggaggacagctgctggcagggactaataaacccttccaccgggcaaaaaaaaaaaaaaaaaa

SEQ ID NO: 234186 - DNA, 630 bp, Homo Sapiens
taactattcagatgatggacaagcttctttcataaaagattacaaagaaggcatccgaatcactgtctgtgatactgggtcacatattaatcactgcagctaattgtaaatctttctatgaaacactgaaaagcctctttgtgaattaatacagttctgcttgatgcacttgatttgaaaagacatttctctgtatgtggcgcatgtcggctttgctttgaaaaataacaaagttagcagaatatgttcaatatattttcttggggaatagggtttttattacatgattcattaaggatttgccttaccctgacatttgtgatataaaggaaaatcagaaaaaaagtaattttcttgatcaagatatgtttttacttaatgcaaataaatgtagtctgttgcttgcaaggaaaaaaaaatggcttctgatatctggtataaactgctaaataggataatacgtgcctcttttgttaaaccggcatttaaatgctggactgcttctaaatctgtttgtttcttttcatctgtgccatacactaaaaaacaactgttgccttcatactatatttgttagagcagaatacaaataaaatttgagaggataatgtgaaaaaaaaaaaaaaaaaa

SEQ ID NO: 234187 - DNA, 593 bp, Homo Sapiens
gcagagggcccccgtctttacttccagtcatgttctgtggaatgggcgcttctccgacttctacaagctccggtggctggaggccattctcagctggcagaaacagcaggaaggatgcttcggggagcctgatgctgaagatgaagaatcatctaaagctattcaatatcagcagcatttttcgaggagagtgaagaggcgagaaaaacaatttccagatggctgctcctcccacaacacagccacagcagtggcagccctgggtggcttcctatacatcctggcagaataccccccagcaaacagagagccacacccatccacaccgccaccaccaagcagccgctgagacggacggttccatgccagctgcctggaggaggaacagacccctttagtcctcatcccttagatcctggagggcacggatcacatcctgggaagaaggcatctggaggataagcaaagccaccccgacacccaatcttggaagccctgagtaggcagggccagggtaggtgggggccgggagggacccacggtgtgaacggatgaataaagttcaactgcaacggaaaaaaaaaaaaaaaaaa

SEQ ID NO: 234188 - DNA, 621 bp, Homo Sapiens
gactcccagattaacataaagtaagagaaagctctttggccagcataatcttagatttcatttgctgtaagatgtacccatgccacgggaatcaagcaaattagggttccctctcactcatggagaggctttcaaaaagatcttataaatccccaaaatgtaataactcctaaagcctctttgtaatttcccaattctacctcatgtcttttactgtggtacaaaagggctaagatgacgagtttctgataatgtcttttttttttgtagagactgggatcctttgaaaatccaacatgtgtaccaccacttacaggtttaagtttgtgctctgcaaactcatttgaggagtaatagatagagttaggcttgtagagatcagtttacctgtcaaatggatgggctttatgagaggagttataaatctagaaagaagaagtaaaagccaatacactgatctttgatcactcaaaccatttttcccaagggcagggactaaacaggggtttccagtcttttggcttccctggggcacattggaagaagaagaattgtcttgggccacacataaaataaactaacattaatgatagctgatgagctaaaaaaaaaaaaaaaaaa

SEQ ID NO: 234189 - DNA, 711 bp, Homo Sapiens
caaagaggttatgtgactgctcccccaggacattaaaactggaggagcccttggcagtcgttgctcgtgttcccatcagcttatagatcaggaagccaaaggccagagaagtgttaccacttgccaaggtcccttggtctaggcatccctaaattatatagaagatgaaatccaaaccagtggctctggctggttgagaagctgggtcaaggtctgaagaagagaagaggttgcaactagtcattaaaatgaaggtttgaggatcacgaccttcaattaaagtccagagaaacagctctgagggatgggcagagggacagcttcaatccttcctgcccagccctggggcctcctgaaagcttaacctcttggctccaaggtggagaggtgttcatctcctccactcctttaaatatggagctcattcctggaaggggcttcctcaatccggaaggactgatgctggggatggccatagaggaatttggccgcaccacgaaaccccgtcagtggcgtgagagtcacacacgatgggcttcctcaccaggcctgcaacatctgttgggggaagaaaggaattaaaacagggggaggcctggatttttgaaatctttccagtgtcattcgagcgcattctgtgggaagcccgggagtttggagaggctgccgcggcctggattatttcctgattggaaaaaaaaaaaaaaaaaa

SEQ ID NO: 234190 - DNA, 656 bp, Homo Sapiens
taagaaaaagtatcttcattggatagaattgaatggtggtcgctgataggaatagggcgtcctctagctcttatctctgtctcgtactcttttctctttctctttttctctgtcatgagactgtgtgtgacagggccacctgtctttttttttttcttaaattttttttttttttatgtgtaggtgcatgtcttggggatttaaaaatttcaaggctggtttacttatgcaaagcatgcctacgtctggaatacttagggaaagaaagcgactccatgttgtccgaattcctcaagggacagaaaaaaaattggagactgttgagatgcagatttgaagtaatttttttaaaatattattttgggttctgcgacattgtgaaaaattaaagttgttgtgcaatacttaattcagacatgtaccacaagttaatggtagactaacactggggggtggggtctaggcatcatgcttttgtcagcatactcttgagcttttaagtctactatgtctgaactgtggtttcttgtttatccttttttccttagttggactgtaatgtatggtctgtcaacctgtgaatctttaaagtatgattcaggtattgttgtattctttactgtgtaataaaaaagttgaaaaaaaaaaaaaaaaaa

SEQ ID NO: 234191 - DNA, 639 bp, Homo Sapiens
atccaggaaaaacaaaggaaagcaaggacacagcaagcaacttacatgtaaaacaagacttgtgggttattatggaagaaattcacaaccaaacttggggttagcccgtattgttttccaagaactctatgtggacagtgacaaaaaacagacctaagaactagcagactgggcaaagctttttcacataacaacaacaaaaaaagcaattcctcaggaaaaaatggtcaatgggtcattgtgtgtagacaaaactacaagttctgctccagactctggggaaaccatgctgccatcttcaagctgtggccattctgtaatacagactacgctaaatcacatgttgtcatcaaggcagaatattttgttcctttatgggtcagcctgggatacaaaattagagaaactttgcaatgaaaaatcccttgtgtctcattgaactttttccttaattcaaacctttcctttcacagttttgattagtgcctttgcccatgtggacaatattttatgatcaggttttaagagtaatccatccatggctgcttggctgcctggaacttaaaacaacgacaacaacaatgtccagataaaccccaataaaataggtttttaaatgtgaaaaaaaaaaaaaaaaaa

SEQ ID NO: 234192 - DNA, 609 bp, Homo Sapiens
gcacgaggggtgggtggattgcttgagcccaggagttcgagaccagcctgggcaacatggtgaaaccccatctctacaaaaaatacaaaacatagctgggcttggtggtgtgtgcctgtagtcccagctgtcagacatttaaaccagagcaactccatctggaataggagctgaataaaatgaggctgagacctactgggctgcattctcagacagtggaggcattctaagtcacaggatgagacaggaggtccgtacaagatacaggtcataaagactttgctgataaaacagattgcagtaaagaagccaaccaaatcccaccaaaaccaagttggccacgagagtgacctctggtcgtcctcactgctacactcctgacagcaccatgacagtttacaaatgccatggcaacatcaggaagttacccgatatgtcccaaaagggggaggaatgaataatccaccccttgtttagcaaataagcaagaaataaccataaaagtgggcaaccagcagctctaggcgctgctcttgtctatggagtaccattcttttgttcctttctttcttaataaattgctttcaccttaaaaaaaaaaaaaaaaaa

SEQ ID NO: 234193 - DNA, 710 bp, Homo Sapiens
caaaaaattatagtactaaatttaacttctaggcgtttcctggaagcagatgctctataatttgtgatagcattctcataaatggagtcctacacataattggacagagatgtggaaatggtggtttccttctgataagggatacagtggaccatgtcgcttatatatcaccctactaggggatataattttcccttctaagcaagggaaatggcagtgctaaatagttttgtaaagtttttgaatgagaagcttttaggtaaagataaactgtcataatatttttcagatgcatttgcattgactatgggagaaaaattagggggaaatgacagtcatggtgtttttttttaattttaaggactgaaattctgttacatgatgtatgacaatataaaaacatacttagttttatactaatctttttttaaggtcttggcatttaatataaagcaaattcacacgttttctatctttccataagttccaaaaagggaaagaagaaacctcagtcttgaaattttgatttttaaaaatcatgacactgttttaccatgaaattgagtagctaacttttggtaacaccttttgtttctttgtatgtttgtaataatggacattttaaaacacaggaatgttttggtttgtacagactttgacaaatgtgtgttaataaaaattcatattgactcaaaaaaaaaaaaaaaaaa

SEQ ID NO: 234194 - DNA, 575 bp, Homo Sapiens
tagagaactgagttaaattattgccacttaaaaacacaaagtgatatagccactttgtgaattaatcagtcagcagtggctaggttatgcttagtggtttataaccaaatcttagtttataacaacaaatgtgtattgttaattcccactacaagtttataacgacattgctggatgctacactccatgtctctttgtgggacccaggctcatgggacttctgttatctgcattagagagagagaagacaacaaaatatgcactggttcttgaagctttggcccagaagtaaaatatgtcttttacctgttcacattgcattgggccagggcaattatcatggctgcaagtaacttcaaaaggatggggaagtgcgatcttggcatgtgtcagaagaaatgaaaacatttggtgaagagcattaatgactgtctttacaggaaaaaagcaatcaaatagacatgatttcttgtttcagtttcatcatttcctactgtgttacctaaactttctgagccccagtttcttattactaaaataaaataatgataaagatgaaaaaaaaaaaaaaaaaa

SEQ ID NO: 234195 - DNA, 695 bp, Homo Sapiens
acataaacagtgataattgtctgaaaatgttgtgtgaagtagctatccctcataatagaagaaaagaatgtggacaggaggacttggactctacatttactatatgtgaagacatcaagagctcgaagtgtaaattacccgaacaagaatcactaccaaatgataacaaagacattttacaacggcttgatccttcttcattctcaactaagcattctatgcctgtaccaagcatggtgccatcctacatggcaatgactactgctgccaaaaggaaacggaaattaacaagttctacatcaaacagttcgttaactgcagacgtaaattctggatttgccaaacgtgttcgacaagataattcaagtgagaagcacttacaagaaaacaaaccaacaatggaacataaaagaaacatctgtaaaataaatccaagcatggttagaaaatttggaagaaatatttcaaaaggaaatctaagataaatcacttcaaaaccaagcaaaatgaagttgatcaaatctgcttttcaaagtttatcaataccctttcaaaaatatatttaaaatctttgaaagaagacccatcttaaagctaagtttacccaagtactttcagcaagcagaaaaatgaaactctttgttttcttcttttgtgttctaaaaaaataaaatttcaaaagaaaaaaaaaaaaa

SEQ ID NO: 234196 - DNA, 637 bp, Homo Sapiens
attcgtagacattgacatcccgaagaactgtcaaggaagcaagatatgctttcttcatctgcaaaagaaatactaacaacaattttcttatacagtttggcagaaagatgttaacataaaaagtttatatacctcaaaaatcactaaactttccagatctctgtcctattatttgtaacacaaggggcattggataaaatgatttctagggttccttttgcttcccaaattctctgattctaaagcagtttttagaatcattagctctttggaaacatatatgcatacatgtttgttaagcctattgaactaggtaggacatataaacaatttaattttagtgtcattgtttaatcacagacttagtgtttgaaaactgtgttttaaaaacagaaacagattgatgggtaacaggtaaaatatgacatgtatagcttacatgttattatttgttaaattttctttgtatacatttcaaaatctgggtatacttataatccattagaagtaatggttatggactaaaaagatatgttctttagtatgttatatatactcatattacatagcagtatgtttacaaaaggcttataaaaataaaatgaactatcagttacatagaaaaaaaaaaaaaaaa

SEQ ID NO: 234197 - DNA, 680 bp, Homo Sapiens
  misc_feature (181)..(181): n is a, c, g, or t
atttgacgactacggggacattcacatccctgccgtgatcctgaagaccttcctgcgagagctgccccagccgcttctgaccttccaggcctacgagcagattctcgggatcacctgtgtggagagcagcctgcgtgtcactggctgccgccagatcttacggagcctcccagagcacaantacgtcgtcctccgctacctcatgggcttcctgcatgcggtgtcccgggagagcatcttcaacaaaatgaacagctctaacctggcctgtgtcttcgggctgaatttgatctggccatcccagggggtctcctccctgagtgcccttgtgcccctgaacatgttcactgaactgctgatcgagtactatgaaaagatcttcagcaccccggaggcacctggggagcacggcctggcaccatgggaacaggggagcagggcagcccctttgcaggaggctgtgccacggacacaagccacgggcctcaccaagcctaccctacctccgagtcccctgatggcagccagaagacgtctctagtgttgcgaacactctgtatgtttcgagctacctcccacacctgtctgtgcacttgtatgttttgtaaacttggcatctgtaaaaataaccagccattagatgaattcagaaccttctaatgaaaaaaaaaaaaaaaaaa

SEQ ID NO: 234198 - DNA, 614 bp, Homo Sapiens
taacattggtaaaatatgttatgtgcattgtgaaaacagaaaacaatttgcgttggcatgtacgtgggtgggaagaaaaagaaaattaacaggatttacacaattataatcaccagcagtgtgagtttaaaaaacttcgttgtttttacaccaaattaaaattttcatgtcaaacttcaaagccagaaagctgctaaatacgtgtctggcaggtaaaagctggaaaattacttaaaacaggaaagtgtcaataaaaaaacttgagcaaccccaacatattttttcttaaaatgtcacgttatcttcattttgggaaactaggttctataaaatatttatcctccctgttatactttggagcacagcacagccagaaaggggctgcatttgtgcccaggtcaggagcaaattgaaaaaaaaaataaagtaatacaaaaaaatcaaactataaagcaaaaacatttatttaacctgaattaatcctttttggagggaggagtagagatatataacctgaaaatacttattctttcttatcgaattttggagcctaatatagccaggagctgctgaatttgtgcccctggattggaagcaaataaaaaaaaaaaaaa

SEQ ID NO: 234199 - DNA, 698 bp, Homo Sapiens
  misc_feature (16)..(16): n is a, c, g, or t
  misc_feature (20)..(20): n is a, c, g, or t
ccttgccatttaagcntgcnaaagttagagcaatttggaatggctatccaaccaatgtgttctacttagtaaatactctcttgtttttcaggggatagttagctaaaggtagggttatctccaatatgttttgggatggatcgtgaagatcattccctttttattttgagacaggatctctctctcttgcccaggctggagtgtggcggcgtgatctgtagcctcgacctccccaggctcaggctcaggtgttcttcccacttcagcctcctgtgtagctgggactacaggcgcacgccactatgcctcactaatttttattttttgtagagatggggtttcgccatgttgcccagcctggtcttgaacttttgccggcctcccaaagtgctgggattataggtgtgagccaccaggctcagccattataattgattttcaaaaaaaatttagtttcttaagcttcatggattcaaattgagtgccatttggattttgaggcccctcagtggaaataatttgtttttagcaagtaattatgatatttctaaagtgcaaattcactgacctactttctgtgcttctggaaatgctgaatcgaataatctttttttttcctcccaataatccctctgactgtgaaaacattctccatatgtattcggattgggatagttggtaaaaaaaaaaaaaaaaaa

SEQ ID NO: 234200 - DNA, 644 bp, Homo Sapiens
  misc_feature (28)..(28): n is a, c, g, or t
ctaacaaagtgaggaactatcgcatttntgagaaggactctaagttctacctggagggcgaggtcctgtttgtgagtgtgggcagcatggtggagcactaccacacccacgtgctgcccagccaccagagcctgctgctgcggcacccctacggctacactgggcctaggtgatggcagtccatgtggctgccaggccaaggcagtcacaggggccctgaccccaggccacacagacggacatgggcccacatgggagggtgagcaggagcaaggctgtgcttgcctagggcctctgtgatggacatctcgtaggacccagccagtctcatccagcaggttgggttctagggctgaaccaggcgccaggctccagaggacgaagggactctgttgccccacactaacttgccctgtcccaatcccagaaacccaggaccaagctgtgcctgggctccaaggacaggaacactggtccccccatcacactcacccctaagtgggctgggagccaggcagggccagggcagctgggtgggggccggggctggccctgggacccccaggaacgctaagacacaggctccagtaggggctgttgcctccaataaagcagcagtgagctttaaaaaaaaaaaaaaaaaa

SEQ ID NO: 234201 - DNA, 689 bp, Homo Sapiens
agaattcggcacgagctttgttaacactacctatatccattagctgcctaattagttttatctgttccatgtggatgcagtgagtttataagagaatttcacaaacaagtagttttttagtgaacttaaaataaacagaattttaaaggagacctatttttatactcaataaaagcacaaaagtgctgaaagtataaaacggcttacaaagggagacacaagctcataatgttccatgtataaaagtaataactttattgggtagagatattcttacaagatctagcacctctgccagtgcacagataggactgttttaaatgatttgggaacttttggttgcctgcagttgtgaacagagaacttctctacagagaaacaaaccactaaaagcaatatgaccgagttgagatgtggtttccaatgagcaattggtgaatttaagcaacctggatgtgcatatgtggaggctcccgtctcactgtttgatcaaacttcttttatgtagtcacgtagacttgattttttctgctgtgaaaatgaaaaaataaagcaatatgacaaaaagtttaaaaatgcataaaaaataggatttcctctaggctcctcgaagagatttttttaatatgatgcttgtcttactttcttagacacgttacatttccccttccaaaaaaaaaaaaaaaaaa

SEQ ID NO: 234202 - DNA, 636 bp, Homo Sapiens
acaaacatgaatataaatgctttagtatgaagaacccattgatagttgtaataactttgcattgttaattggtatcttacaaattacaacttatgcaaacaaaattatgttggtctataaatattggttaaatgaacatgtttcctgtacatttataaattctccatatgaaaaatactcatctgaaatgctaaaagcaaaaatgttatcagtagaaaagcagctattttatgactttttaaagcaagttatgtctgttatttttcacctgtttcaaaggaatgcataagatgcttttataagtgtttttgttcatgtataacatacttagcacttactacagatgaatgctgtagactacttaatttcaaatgcctacattttcaaaacaatgaagacatattactgaccataaaatggaaatagcaaccattcaaaatagttgaacatttattgtgtcatttactctacggaggcaatctcattattaaagaagttatagccagtttatgtgcatatgtaggtgcaagtatctataatgtacattataatttgtaactatcaaatatgtaagtgtaatgaatatcggtttattttgaatacaagcttatgtaaaacaaaaaaaaaaaaaaaaaa

SEQ ID NO: 234203 - DNA, 701 bp, Homo Sapiens
  misc_feature (25)..(25): n is a, c, g, or t
aaaaaagagaaggactcttgggttntgtgttgccatgttaagcatggagagcgatgcttgacagcatgctaattgaagccagagcaagtatgtccttcatcaggtaatcaggaactcttcagttgaagctgaggaactaactgattagttgttgatcataatataattggttacaaagtggaagtgccagctggcttaagtacccaaagaaaagaatgcagcagcctaacttagtgttaccatatgttactgaatttgaaactgaccttttttcccaccctacttcacacacctaaaactcttttcttgtcagaccaaagagcgaaaagaaaaaaaaaaagtaaaacactttaccaatctgtcactcaggtacaattttgtggtgagatttttgtctgttctctttgtattgctcttaagagtcctttctcagcatattattctgccattgcctctgtcttccttggggcacctcagctctggatgctacccctgggatatctactgctgttatgtgaatgataggaggtaagtgaccattatagtaagggctctttgtaaaaaaattcaaaaaatttaaaaaggatgtatacattttatagtctggctatcagtttgatatcttgctgtcaagtatgtttctcaatctgtatttatccatcccatcaataaatgttaatggtaaaacaaaaaaaaaaaaa

SEQ ID NO: 234204 - DNA, 669 bp, Homo Sapiens
  misc_feature (64)..(64): n is a, c, g, or t
ctctattaaaaatacaaaaattagccgggtgtgatggcatgcgcctgtaatcccagctactcgngaggttgagacatgagaattgcttgaacctgggaggcgaaggttgcagtaagccaagatagtgccactgcactccagcctgggtgacagcaaggcgccatctcaaaaaaatgaaaacaatagaatacaattgtgggagactttaatacatcttgaaaattaaactggtttatcagttaaataggaataatgaattttaactgtaaaataaataagacttgattcattttcatagaaatgtatgtatttggccatcttttataataatggaaaaattaataaaaagagctatcattaaagcaaggcaaacaacaataacaaaaagagaaatggtgtccagatcctggtttctaaataccactctccactaaaaggaatttggagaaatggctgattctggggttgtgataggtaagacacagaatgagtatggtatcagaaacctagaaaatgttcaaaaaattaagagtgcccacttcaaaagcacctgtactaaaattggaacaatagagagatgattagcatggatgacacacgaattagtaaagcatttcatattcttgtaaactgtgtatgttttatcacagtaaaaaaaaaaaaaaaaaa

SEQ ID NO: 234205 - DNA, 646 bp, Homo Sapiens
agaaactgcattgtcaatttcactgtcccaaaaaagccaaattgtggcaggacttctttctgcggaaatgtgtgtgtatacttatgtgtgtgtatgtgtgagtgtgaatatatgtatatgtgtacatatggacatacacatttacatatatataaagtatatatatacatatatatatatatatgtatgaaacccgcatggaattatctgtatgaaatcaaggtgcgctgtggaaacaaaaattcacccagtttagtgggtggtagggtacgtggccagacacagtcacccagtttttgttcataccagggtcatgcgttgagctactgacaaactcaggcggaggtgaccatgcccttcaccaaagctgcctcccagtggccacacagaactctccgtgctggactcacctgaggaaagaggctccagcatggggtgggtcagagatgtgcttgcaaggtccagggactgcgtggtctgccagctgagatgctcctcgggctggcccaggtgctgaccttgccacaggcagatgaatgtcttgaaagctcccgggcctcagcctcccatctcctctccttcccaggaatccttgatctcatgactattaaaatgttgctctggttttaaaaaaaaaaaaaaaaaa

SEQ ID NO: 234206 - DNA, 746 bp, Homo Sapiens
cgcaaatgtgctctagtcagtccagctcatctgccaaaatgtagggctaccgtcttggatgcatgagctattgctagagcatcatccttagaaatcagtgccccagatgtacatgtgttgagcgtattcttgaaagtattgtgtttatgcatttcaatttcaatggtgttggcttcccctccccaccccacgcgtgcataaaaactggttctacaaatttttacttgaagtaccaggccgtttgctttttcaggttgttttgttttatagtattaagtgaaattttaaatgcacagttctatttgctatctgaactaattcatttattaagtatatttgtaaaagctaaggctcgagttaaaacaatgaagtgttttacaatgatttgtaaaggactatttataactaatatggttttgttttcaatgaattaagaaagattaaatatatctttgtaaattattttatgtcatagtttaattggtctaccaagtaagacatctcaaatacagtagtataatgtatgaattttgtaagtataagaaattttattagacattctcttactttttgtaaatgctgtaaatatttcataaattaacaaagtgtcactccataaaaagaaagctaatactaatagcctaaaagattttgtgaaatttcatgaaaactttttaatggcaataatgactaaagacctgctgtaataaatgtattaactgaaacctaaaaaaaaaaaaaaaaaa

SEQ ID NO: 234207 - DNA, 698 bp, Homo Sapiens
acatgacctggcagcggggccggaggagcttcatcttcaagggccaggaggcaggagccctggtgatggaagtggaccatgaccggcaggtggtgcatgtggagacactggggctcactctgcaggagcccgaaacactgctggccgccatgcggcccagcgaggagcatgtggccagtcgcctcacctctcctatcgtctccacccacctggacactcgtaatgtggcctttgagaggtcggtcgggtcctggcacaccgtgggtgggatggggacggatagcaagagccaccattaatgagggcagggcgatccttgaagatcctggttcaggcctctgggctcactcacaaggggctgctcaggggcaggtgggttgctgcagcccgtgtctcactcagactgccggggtggttgggctcctgtggccacctttgtggggaggggtcaggtcaagatgtccccagtttcttgacttctgacctcatatgttttcccattaagacaaagatttaggctgtggttcacggcagctctttgcaccaatgttggcttgtcattggtgcggctgtgttgggggcagaatcctttgtgggtagcctaggaacctgacccttccagcaagagtttctctgacaacacatgccccctcttgccttaacagtcagtggaaacacttaaaaaaaaaaaaaaaaaa

SEQ ID NO: 234208 - DNA, 579 bp, Homo Sapiens
gcacgaggggagtaggtccggcctttcgggtggtcaggaagatggcggcctctggggcggagccgcaggtcctggtacaatacttggtgttacgaaaggatctatcacaagctccgttctcctggccggcgggcgcactggtagcgcaggcttgtcacgcggccaccgcggccttgcacactcaccgcgaccacccgcacacagccgcttacctccaagagctggggcgcatgcgcaaagtggtcctcgaggccccagatgagaccaccctaaaggagctggccgagaccctgcaacagaagaacattgaccacatgctgtggcttgagcaaccagagaatatcgccacttgtattgctctccggccctaccccaaggaagaagtgggccagtatttgaagaagttccgattgttcaagtaactgctgctttgatgtgtttgaatacgcaggccacccattccaaagcatcatgtgttccttgcagtgtcagcttgctcccgtctttcagttgtgacaatttcttgagggttaagcacatgttcatattaaagttgtcattaataaaaaaaaaaaaaaa

SEQ ID NO: 234209 - DNA, 713 bp, Homo Sapiens
  misc_feature (26)..(26): n is a, c, g, or t
  misc_feature (29)..(29): n is a, c, g, or t
  misc_feature (60)..(60): n is a, c, g, or t
  misc_feature (67)..(67): n is a, c, g, or t
gaaagttcacaaccagattcaggttngtntgtgccagattctaattttacatgtttcttntgccaanagggtgatttttttaaaataacatttgttttctcttatcttgctttattaggtcggagaccatgagaaacagcgtcaaatcatcttttcatgatcccaagctgaaaggcaagccctccagagagcgttatgtgacccacaaccgagcacattggtgacagaccttcggggcctgtctgaagccatagcctccacggagagccctgtggccgactctgcactctccaccctggctgggatcagagcaggagcatcctctgctggttcctgactggcaaaggaccagcgtcctcgttcaaaacattccaagaaaggttaaggagttcccccaaccatcttcactggcttccatcagtggtaactgctttggtctcttctttcatctggggatgacaatggacctctcagcagaaacacacagtcacattcgaattcgggtggcatcctccggagagagagagaggaaggagattccacacaggggtggagtttctgacgaaggtcctaagggagtgtttgtgtctgactcaggcgcctggcacatttcagggagaaactccaaagtccacacaaagattttctaaggaatgcacaaattgaaaacacactcaaaagacaaacatgcaagtaaaaaaaaaaaaaaaaaa

SEQ ID NO: 234210 - DNA, 691 bp, Homo Sapiens
ttgaaaacatataaagcactatacagattcgaaactccattgagtcattatccttgctatgatgatggtgttttggggatgagagggtctatccatttctcatgttttccattgtttgaaacaaagaaggttaccaagaagcctttcctgtagccttctgtaggaattcttttggggaagtgaggaagccaggtccacggtctgttcttgaagcagtagcctaacacactccaagatatggacacacgggagccgctggcagaagggacttcacgaagtgttgcatggatgttttagccattgttggctttcccttatcaaacttgggcccttcccttcttggtttccaaaggcattttattgcttgagttatatgttcactgtccccctaatattagggagtaaaacggataccaagttgatttagtgtttttacctctgtcttggctttcatgttattaaacgtatgcatgtgaagaaagggtgtttttctgttttatattcaactcataagactttgggataggaaaaatgagtaatggttactaggcttaatacctgggtgattacataatctgtacaacgaacccccatgatgtaagtttacctatgtaacaaacctgcacttatacccatgaacttaaaatgaaagttaaaaataaaaaacatatacaaataaaaaaaaaaaaaa

SEQ ID NO: 234211 - DNA, 625 bp, Homo Sapiens
gggcattttgaagacttactgttggccatagttaattgtgtgaggaacacgccggcctttttagccgaaagactgcatcgagccttgaagggtattggaactgatgagtttactctgaaccgaataatggtgtccagatcagaaattgaccttttggacattcgaacagagttcaagaagcattatggctattccctatattcagcaattaaatcggatacttctggagactatgaaatcacactcttaaaaatctgtggtggagatgactgaaccaagaagataatctccaaaggtccacgatgggcttttccaacagctccaccttacttcttctcatactatttaagagaacaagcaaatataaacagcaacttgtgttcctaacaggaattttcattgttctataacaacaacaacaaaagcgattattattttagagcatctcatttataatgtagcagctcataaatgaaattgaaaatggtattaaagatctgcaactactatccaacttatatttctgctttcaaagttaagaatctttatagttctaatccattaaatataaagcaagataataaaaattgttgcttttgttaaaagtaaaaaaaaaaaaaaaaaa

SEQ ID NO: 234212 - DNA, 754 bp, Homo Sapiens
  misc_feature (124)..(124): n is a, c, g, or t
attcggcacgagggtaatgaatgtggaaaagctttcaggcagagctcagagctgattactcatcagagaatacatagtggagagaaaccctatgaatgtagtgaatgtggaaaagctttcagtntgagctcaaaccttatcagacatcagaggattcatagtggggaggaaccttatcagtgtaatgaatgtggcaaaactttcaaaaggagctcagcccttgttcagcatcagagaattcattctggggatgaagcttatatatgtaatgaatgtgggaaggctttcaggcacagatcggtccttatgcgccatcaaagagtccacactataaagtaatttgtgaatactgtgaatagtgtaaatacttcagtcagatttttaagtttgttagtcaaaagagtttactttggagcaaaactccataaaggttataaaatactaggtcttgagtctagcttgctttgtgcagcatttcccagtgctaatgtaaagtgtcccttgaaagcttttcctgtgactaatcagaacagaatacagaagaatcattacttccagctcttctcttattaggaatactcaggaaatacgaaaagtgggaatgtaacattgaaacctcattttgtatgaaagtgtcatgaatatagcaacccaggctctgtcactgcatctgattgttagtgtgccaggttatggggcttgtgtggactgtgtgaggcacttcgactcaggaactaaaaaaaaaaaaaaaaaa

SEQ ID NO: 234213 - DNA, 748 bp, Homo Sapiens
cagcagaagcgtatgttccagtaaaaggagaccatgtgattggcatagtgacagctaaatctggagatatattcaaagttgatgttggagggagtgagccagcttctttgtcttacttgtcatttgaaggtgcaactaaaagaaacagaccaaatgtgcaggttggagatctcatctatggccaatttgtggttgctaataaagacatggaaccagagatggtctgtattgacagctgtggacgagccaatggaatgggtgtcattggacaggatggtctgctttttaaagtgactctgggcttaattagaaagctattagctccagattgtgaaatcatacaggaagtgggaaaactctatccactggagatagtatttggaatgaatggaagaatatgggttaaggcaaaaaccatccagcagactttaattttggcaaacattttagaagcttgtgaacacatgacgtcagatcaaagaaaacagatcttctccagattggcagaaagttgatataggtggacttttttacaggtcagttgaggcaaaaaactatgggttttttcaggtgaacctcccccatttaaatactcagaagataaggtgtgaatgtatgtattattagagtccgaaagtatttttataagttactggttttcacccacgcttttgtgggagagaaaatcattgcaaaatcattttttttgttcggtacaataaagtttactaaaaaaaaaaaaaaaaaa

SEQ ID NO: 234214 - DNA, 779 bp, Homo Sapiens
  misc_feature (119)..(119): n is a, c, g, or t
atatacagtgagagtctagaccagctaaaaatgaagttgggtgttaccaacaagtacctctttatggatgcagccccagtaagctggctttaactctcagctccttccctgtctcctcntaatccaagcccttttataaaataaagccccttctgtcccactgctcacatacttatgtgctgctagtctctactcgaagttcgtgcaggactaatgcttttaaaatgaggtctaaaaaataattactagtcgagactattattctttaaacagaactgcctttttctactctttatgtaaactctttctattgtgttggtctaacaaggcactattttaaaattttttaatttttcccatagcacttaaaagagattttgtaaagaccttgctgtaaagattttgtaataaaatggtctaagggctctttttccaacattaccatttttaaaaaatgttttaaaagctagaagacaacttatgtatattctgtatatgtatagcagcacatttcatttatggaaatatgttctcagaatatttatttactaatatatttatcttaagccatgtcttatgttgagagtgtgacattgttggaataatcattgaaaatgactaacacaagaccctgtaaatacatgataattgcacacagattttacatatttgcagaccaaaaatgatttaaaacaagttgtagtcttctatggttttgtaacaaattgtacacatgactgtaaaaaaaatacaattttatcaaaaaaaaaaaaaaaaaa

SEQ ID NO: 234215 - DNA, 718 bp, Homo Sapiens
  misc_feature (50)..(50): n is a, c, g, or t
  misc_feature (69)..(69): n is a, c, g, or t
atatgaagaggtatccaagggtgtatcgaggctataaaagcacagtttanagagagattcctttttctntggtccagtttcccttatgggagtccttaaaagccctctggtcctggaggcaggatcatgtggtggattcttggcagtcagcagtctgtggagcttttgcaggtggatttgccgctgcagtcaccacccctctagacgtggcaaagacaagaattacgctggcaaaggctggctccagcactgctgatgggaatgtgctctctgtcctgcatggggtctggcggtcacaggggctggcaggattatttgcaggtgtcttccctcgaatggcagccatcagtctgggaggtttcatctttctgggggcttatgaccgaacgcacagcttgctgttggaagttggcagaaagagtccttgaagcagagacaagcctcacctccacttctgtcaagagaggggcctgcagtgcaaaccctcttccgctgagcagctgtctgaactataggccccagtgctgaagaccagttgtgctaagataccggcatggagattgtgccatccgtggtataggctggctggtatgaagtcattggcctgtatgccagagagctaagagaagaaaacggggtctgtggcggtactctgaacaatttcctcagaacctcttaataaataagtttggtaatgctgaaaaaaaaaaaaaaaaaa

SEQ ID NO: 234216 - DNA, 772 bp, Homo Sapiens
gaagcgctcttggtaaagaataacccacaaacacctgatcttgattggaaagcattgtaggtcattagggaaaactgatgatgctgactgttgctccagctgtgttggcaattcaagatgaccttgttactaactgaaagttgctgtcaaccttagcaaacaaaccagctaacaccattacagcactggttaagtagatttttactggcactggctggcgttcagctgaggaaggctaggatacagactttaatgaccaagagccagactagctcgagctagaaatcagcaacaaatacctccttgtgctatttgaatgctaaggtattagttgcaataggcttacgccttcgctcctctagtgaggggaatgagcctgatgacactattactgtttacctgtcaaaccagggtggaaatttagagggatgcaagtacagtatgtctcattaagcagtctctgttgctgattatatgaagataaaattgttgtatatgctgatctgtatgttatgtacattttcacagtgattgaatcattgtaaaaagaaaaaagacaaaaaagaatcaccactgtctattttatgaagatgataaagcagctttattaaattattacagttatgtttcaaatggtgttatctgccacattgtttccttttatctggtggttctctgtttccccctttaaatgtgttttctctgcttcaaaaatttaatgcattttagtattaaaggctattatggaaaaagtaaaaaaaaaaaaaaaaaa

SEQ ID NO: 234217 - DNA, 651 bp, Homo Sapiens
  misc_feature (111)..(111): n is a, c, g, or t
  misc_feature (248)..(248): n is a, c, g, or t
  misc_feature (609)..(609): n is a, c, g, or t
gctttgcccatctgtaggtagacacacagatcgctcagggcactgagagatcccagaaggtaacgttaatgttttcagtcattgtgtgtcctttgttgctgccaatgtctntggactgtaatcagtgcatccacacctcccaggatccagtgctccctctcagctcagtctcccctctctccctgtcctgcattccatcccagctcctcagcatggcctcagtgggcgcacccatgcctcccgcagtncaggtgagcaggggagcaactgagcaggaagaggatggatcaacaagggtcacggggaataggggacccacggggtgtgacctgcttgctagagaactgtgaacatgtggctctggatagagtgactgctgctccatattagcttccagagggtgagtgagggacagaatatttccttcataatggtcatgggtgaatgctttctgctgtaagtgtcttttagagtaggaatcagcatagtgggatgcccagcaggcacaaactatgggtccagggagtctcagcggggaacttctatcagtatcaataaccattggaaggagaaatgattcatgtgtgaaaaaattctcagatccatcanataaattttttccagagccattgtaaaaaaaaaaaaaaaaaa

SEQ ID NO: 234218 - DNA, 714 bp, Homo Sapiens
actgtatttaccatctttatttcttggtgaaacaaaagttttaaaagtagttttaacaactttacactggaatgatttagctttgttattgcatgtcttgtgttaagtgttttgtatatgatattgcagttttactaggcaaatcttcaaaagatgcactttaggaaacgaaatatttcctaaataaccaggcttccacattgtacagaatgagcagtcatgtaatgaatggctctactcagattgaccatatgggttttttctttttctttcttttattcttctccttctttttttttcagaggtgggatgggtggagattttttaaaaatcccacgtgtgaaagtttactggctttattagcaagttcctttttacttcaagctactttttataaaaaagaacatttttccagtgtggtttttaacagataatacatttcttccacattcagattagtattcggacatgaatccattctataaaacacatcgtgttcatgatagtgtatattttactactttttgaatgttaattttaaaatagaagatgtcccacttgccattaaatatagaagccaactttttaccttttgaaatatggctacatttaaaacaaaatctcacagctcggtttttcttatttgttgagtgctattaccaggagaaattcaaataaatattcaatttccttttgaaaaaaaaaaaaaaaaaa

SEQ ID NO: 234219 - DNA, 799 bp, Homo Sapiens
  misc_feature (39)..(39): n is a, c, g, or t
  misc_feature (107)..(108): n is a, c, g, or t
tgcgtcacctcccctgctcagtgctgggctccacggcanggggtcagagcactccctaatttatgtgctatataaatatgtcagatgtacatagagatctatttttnntaaaacattcccctccccactcctctcccacagagtgctggactgttccaggccctccagtgggctgatgctgggacccttaggatggggctcccagctcctttctcctgtgaatggaggcagagacctccaataaagtgccttctgggctttttctaacctttgtcttagctacctgtgtactgaaatttgggcctttggatcgaatatggtcaagaggttggaggggaggaaaatgaaggtctaccaggctgagggtgagggcaaaggctgacgaagaggggagttacagatttcctgtagcaggtgtgggcttacagacacatggactgggctgggaggcgagcaaaggaagcagctgagactgttggagaacgcttacaagacttcatgcaagcaaggacatgaactcagaacactgaggtcagaagcatcctgctgtcatgacaccgctcgagtgaccttgaccttgaccaagtctgtcctgtttaggactgatttttcctattaggctagggtttggacctgatgttctcaagatgtctagaattgcatggctggccttgtggaatagatggttttgcattccagccaagtgtgctgtaaactgtatatctgtaatatgaatcccagcttttgagtctgacaaaatcagagttagtatcttgtaaaggaaaaaaaaaaaaaaaaa

SEQ ID NO: 234220 - DNA, 794 bp, Homo Sapiens
tgtggagaccgcagcgcaggtggacagccacgtgagtgttcgagcgcagcagagctggcgacacagcggcaacagcggcaaggtggcgcggacaggcccaaaggcgaggcggcagcgcaggctgacaagcccaacagcaagcgctcacggcggcagcgcaacaacgagaaccgtgagaacgcgtccagcaaccacgaccacgacgacggcgcctcgggcacacccaaggagaagaaggccaagacctccaagaagaagaagcgctccaaggccaaggcggagcgagaggcgtcccctgccgacctccccatcgaccccaacgaacccacgtactgtctgtgcaaccaggtctcctatggggagatgatcggctgcgacaacgacgagtgccccatcgagtggttccacttctcgtgcgtggggctcaatcataaacccaagggcaagtggtactgtcccaagtgccggggggagaacgagaagaccatggacaaagccctggagaaatccaaaaaagagagggcttacaacaggtagtttgtggacaggcgcctggtgtgaggaggacaaaataaaccgtgtatttattacattgctgcctttgttgaggtgcaaggagtgtaaaatgtatatttttaaagaatgttagaaaaggaaccattcctttcatagggatggcagtgattctgtttgccttttgttttcattggtacacgtgtaacaagaaagtggtctgtggatcagcattttagaaactacaaatataggtttgattcaacaaaaaaaaaaaaaaa

SEQ ID NO: 234221 - DNA, 724 bp, Homo Sapiens
  misc_feature (97)..(97): n is a, c, g, or t
tagaatcaagttaccatgattggctcttaaaagtaatttaaattaaatgcagaaatctgtcttttaattggtgagtttaatcttcttaaattcatantcattactgagctagttgaacctatcctgccaacttattcctgttttccattcattgtaatttttaaatacatccttcctgtttttcacagaaggattcagtttctctcagaatgctcaaaagttaaatgtttaaaatttaaaagctaaactttgaaacattaaaagttaaacagaatgtttaacacatcatttatgaaaaagttaaacagaatgtttaaaagtttaacttttgttttattttttgttataaaaaaatttttttttgtaataagaacaaaagtggcagttgcctcctacttcagatccacttttatgtttatttgtccttcagatccacttttatgtttatttgtccctattgatttcttaaatttattgatagctatattttctccttagaaaacgaaagcattagtgcattttgatttctctttgatctccttaagggccacattttggaaaattaaatataatataaatggtgttttctggacttgtgtaatcatgttattttaaagatattttgttttgtgttgttatggatgaattttctccttttcccagctttaagaaaattcctataataaactttacccagtatttgattaaaaaaaaaaaaaaaaaa

SEQ ID NO: 234222 - DNA, 703 bp, Homo Sapiens
attaacaataaggaaatgaggatgaagcggtaaaaatgttttggtacatttatactctcagaagctatgtgtttagagaaaagggcccccaaccacaaaagttagtggttcttattctgtctgcttcgtactaggtatatggtaactgagaaagtcacttaacctctctgaaccttaacttcgtcatctataaagtgaatctaacattttccccccggcctacctcacagggttgttgtgaggatcaaatgaaataatgtacatgaaaagacatatataaaatgtataatacagacaaagggtcctgttacacagttggaagtcattccctcagattttgggcctaggaaggtaggtgatttaaactcactgaaagcatgtaccatgtccaggttggatacatggcaacaaggctatgttaaattttttttctctgagttgagtccctaaaatactatcatgggctaattctaagaaggagcacgaatatatattcccctaaaattatagcttagcattgtcaatgctttagagcagttatgggagttatagattataacatattagtgatttgtgaaacttttttactaaaatgtgaccctcatttttctttacatgaaagaacatagaatatttcacaatgcatcccacgtggtaagaataaaaaattgttttagttatatgtaaaaaaaaaaaaaaaaaa

SEQ ID NO: 234223 - DNA, 658 bp, Homo Sapiens
ttcggcacgaggcacagatgttatgatggctttatgagatgataaatgcatagaacatattaggatgtctagcccagaatacaacactcaacagatattagtttcttccatctatattttcttagttaacataattttttaaatctatgaaatcttacctgactgcagattcatcaggaattccaacatctattaaagaaaaaggtaaaatgcattttaaatcaataataaatgtacagaatattaaaatcataagaatgcacagtgatgcatgcctctaatccaaactacttgagaggatgaggcaggaggatcacttgaggagcccagaagtttgagaccagcttgggcaacataataagactctaccttcataaaaaaattgtgcacacttgtgtgtatgctttagatcctgtttgttgttgttgttgttgttgttgttgttgttgttgttttggtttggtttggttttttaaagcataagactgacgctttgttacaaagcattcctttgggagcatgcctgggatcttattagaattaacattcattatacgtattggtaggtaattaatgcagtaagaactcttccctctgtgtttattagatgcaaagaagaataaatttattaaaatttggtaaaaaaaaaaaaaaaaaa

SEQ ID NO: 234224 - DNA, 671 bp, Homo Sapiens
attcggcacgaggggtctgggtgttctgggaggacccctaaaagggagcagctctgccaggtcagagcttgaggtagcatgtgtgccgcttccaggaggccaggatggagacagcagttcgaggaatgcccttggaatgccctcctaggccggagcggctcaatgcctacgagcgcgaagtgatggtgaacatgctgaactcactgtcgcggaaccagcagctgccgcggatcacgccccgatgcgggtgcgtggacccgctgcccggccgcctgcccttccatggttacgaaagtgcttgctcgggccgccactactgtctgcgcgggatggactactacgccagcggggcgccctgcaccgaccgccgcctgcggccttggtgccgggagcaaccgactgtaagatgtgtacctccctacgagcaccggcccggaatgcagtgtgctgttacaactcccccgccgtcatactacccatatccgaaccttagatgggacacaagtcacttcaagaagtctggtggtccccagagaaacaactatgttatccatcctgagtttgtgtctgagacctatcccgactatcgttgctggtagagcctgggcttgctgtgccaagggggcagagcaataaataaactcttcaaccccaaaaaaaaaaaaaaaaaa

SEQ ID NO: 234225 - DNA, 675 bp, Homo Sapiens
acagtgagccgtgatcatgccactgcactccagcctgggtgacagagcgagaccctgtctcttaacaacaaaacccatgagcggcagccccccagtcctggatggtggtaaagaatcctcaagatcaaacccacgcagtgctgagagcttggcctgattctagggctggggctggagaaactgctagagatgatgccgatagccagtgtgatccccctgccctgatggtcaagggcagagtgcagactggaaccctcccctccccaaagattcagacctgtggggctgagtgggctcatagtgtccccaagtcctgagaggctggtgtctggcttcagcctccagcttctcaggttctgatgcagtcagctgagttccctgcctattcttgcaagcactaggaggagggtggtgggttgctgggaacagcaccgagcgccctccccacccagattcacagagcacactccccggggggatactttaatccggaggccgtgacgcctggctccgccccgagacgagctgaatccaaatacggatctaggcttgagcttggttgggtttgcttttttcttcttcttctttataaacaattctttgtaactttttgtattgacagtttcaaacttacagtaaaattgcaacacgagtatgaaaaaaaaaaaaaaaaaa

SEQ ID NO: 234226 - DNA, 707 bp, Homo Sapiens
  misc_feature (156)..(156): n is a, c, g, or t
gtaaggagaattacctgttcactagaggccaaacatttgatgaaaagaccctagccagagatttaattcaggcagcacagaagcagatggctcatgcagtgagaggtaaggcaatccgtagcagccccgagcttttcagttctactgttcttcctntgcctgcagacagccccacccaccagcccctactccttccacccctgcaaaccccgaagttgtatggaagccccacccagatagggccaagctatagaggcatgatcaatgtctccacctcatctgacatggaccataactctgctgtaccaggtagccaggtatctagcaatgtaggtgatgtcatgtcattttcagtgactgtcactaccatccctgctagccaagctatgaatcccagcagccatggccagaccattcctgttcaggcgttctccgaagagaacagcatagagggcacgccttcgaaatgttactgccgcttgaaagccatgatcatgtgcaaaggctgtggcgctttctgccatgatgattgcatcggcccctccaaactgtgcgtctcctgccttgtcgttcggtaatgagactagaaagagatacactgtaaaggagggggaagggaagggttgacccagttgggttttttgcgtccttttggaatcacagaaataaacaagtaggtttcagttgtcaaaaaaaaaaaaaaaaaa

SEQ ID NO: 234227 - DNA, 775 bp, Homo Sapiens
gaagtgaaggtttcccgtgagctgagatcacaccactgccataaacatgacaggcttttggactttgtattacctgtatgttttataatggatcatgcataatttctcaggagaataaaatgagaattcatatatacgttcatctttcaagtcagagcaatgagttgggaaaagaggtggcatttctgatcggataatggaatactctcatttattttatgacattctctgtctactcagatcatagtgaaaactggaaacaaaaaaaaaaacagcctcttcttggaaagtgacagcagaaggtggcatggagcttgtgtccttggacaacaaatctggatatactaggattaattatcagaagacagctcaggccaagttttgatcgttccatacagtaccttgtttatctgcttcttaaagaatcagccgagacaccataaaagaaataggctttttgtgccttttgctgttaatgtttaatttacaaactgttttggtaaatctcttaatgtaagtagctatttgactttggaattttgcattcgaggtatactgtcatttcttgaaatctttttctcgtttagttgctctgtgggaaatgtgaggaagcctaagtttgtatttgtaaatttcttatgccatcctctagtcaaattttttttcattgtttaaaaatacggaagtgttccaatataattttttcctgtactggatggctaggattctagagaattgattataaaatattttcaatacaaaaaaaaaaaaaaaa

SEQ ID NO: 234228 - DNA, 746 bp, Homo Sapiens
tcagcctcccgagtagctggatagagggtgtgcaccaccaagcccagctaatttttgtatttttagtagagatggggttctccatgttggtcaggctgctctcaaactcccggcctcaggtgatccacccgcctcggcctcccaaaagtgctgggattacagttgtgagccaccgcgcctggcctctcctgaatcttttatctatgccttaagccttttctgttcccttcaggacctaggcttttgaaacccaaaagccaggaaaacatgcctttgttatctgctttctgcaatcacgtctcttccatggggcactgagcagagaatggtgtggccaagtgagtagtgagaagcagtgaggaggtgtgagctaggtgtctgttcccattttagaaaatactgttcctacatcagaaataccacattaagacgtatagagccaggtcactgggatgcttgaacccaaatagctgggattctggacagagtcagcagagtacagaaggctctgaagtgggagacggagctggggtgcatccctcccagtgaggaggggtcatgaggggcgtctgggaagagggacatttgaactaggattagctgagttgccatgatgctaagataatgggagagtgttctttgtggtcaccagtgtccacatggcatcccttccctgagattttcatcactccctgtggtcttcagtcagtaaagctcttagaacacttaaaaaaaaaaaaaaaaaa

SEQ ID NO: 234229 - DNA, 750 bp, Homo Sapiens
aaactcaataaaagaaaaactacatttcatgtgtgaacacaaaaattggaattaaattggcaatagcattgggattgtgctcagagtcacagtttacatctgaccacaatttctatatgaattttttaagataaaacagtaagaattttaaagaaggtttctgaaatttaaaaattataataacataattaactttgatattttaattccatgtaatttaaaacatttaatagatatataatgttccactattaatttaactagaagtataaaaataaaacatatataataaaaatattctacttatttttaaattatctatattatactgagtaaaagaaaatttaggaatataaataaatgagcatttttgaacatgtaaaaatattttcttgctgtttttaggagacttttagcaggacaggagcttacctctcatctacctctgcttggacaaaccagtgatgtgatttgcaaataggctgtaacttcaccgaaaacacatcacagtaaagaaaggtagtgactttcagagaatttgacctaacttagaatttgtaaaagagaaaagcattgtccttatgcctaaagtacatgactgtttctttttaagttacatgtatatttacctgaccaatttgttttactctgtattttaagttatcaggtgaaatggttttagaataaattaatgagttgtttcttctgaataaatgtgcatgttacaaatgcaaaaaaaaaaaaaaaaaa

SEQ ID NO: 234230 - DNA, 728 bp, Homo Sapiens
  misc_feature (25)..(25): n is a, c, g, or t
  misc_feature (111)..(111): n is a, c, g, or t
atacagttgcattaaaattaccatntgaggtttcaaaattgttatttgcctaagctgtacatctgagctttctgattcagtgtgcgtggaaggggcccaggcatatatatntggacaaaactcacaggtatgtatacctctgaagaagaaccatggttgtacaatgaaatgtgttatcttgaggctattaagtttctttctcatcaatcatttgatctttgtgtctctgtaggtttttcaataaaatgggcttgacattaactctctgcctacataagttggagttgtgggctctttcctccatctctcttcgtattacttatatactcctcttctgatttcaggctaaatttattgtgaagaaatcagaagatgaagaagacgccgctaaagatacttatattattgaatgccaaggaattgggatgacaaatccaaatctatagagtatttgcctcttaaatgatacctcattgatatattgcactatttcataaatactataaaataatgactaggaagtaacttattaaaggctatgacttaaatttgaagatgaagtacagtgttctaggtttgctgagaaggcttcattaaattaatctcactttgaatatctcctgagagatggacaatgaaatatcagttggtggatatgtgtgatagctgatttcaatattgaagtattgaaataaaatattctttacacctgaaaaaaaaaaaaaaaa

SEQ ID NO: 234231 - DNA, 683 bp, Homo Sapiens
cttttcaaagcctcatgtatctcccagacccttctcttgaagtccaataacaagaccaagtaagatgtttcaacaatgcgttggcaagagatgtgagatgacaacaggaacatacaagatactgtgaatctagatgttctgacccaaagatgtagtctacatagccccagcttggggtccaatccatctgtccctggcatgtgccttcatgtagtaggtgctttcctgatcccctttgcgagatgctgtgggtgctaacacctcagagctgtcctcttctctagagtgaaggttttcagagtgcatcatcagcattacctgtgaacttgctggaaatacaaatcctcaggccccacctcagacctactgaatcagaatctctgggggttggcacagcattctgatttaccaaaccctccaagtgattttgatgtattctaattttgagaccatctctagaaaagaattgctacctcttgtatggaggtacaaaagactgacctcttacatcaaggaacttcctttcccagagctcctcatggaatcaagctgaagtcagtcttcttctgagagcacattcttactcagttttttttcctctgtcctacgctgcttccctcactccccttctcctaagagcactccatcaataaaccacttgcacgagaaaaaaaaaaaaaaaa

SEQ ID NO: 234232 - DNA, 765 bp, Homo Sapiens
  misc_feature (38)..(38): n is a, c, g, or t
  misc_feature (63)..(63): n is a, c, g, or t
  misc_feature (182)..(182): n is a, c, g, or t
caaggacccaccagcagggagcagacggcagctaattntgtaccacttaaggtccccccattntggcccccatcctctccctcaccccaattctttctcgctggagctgttatttcccaagaagccgcatcgcccaaggttggcacctctcctaacctgccacacgacagctctcacctctntaggaattgggggctgtcaggtcacaggtgggatctggcatttttttatgacagtccatttctagatggtttgcctattaaagaagtgggggggaaatactgttttctccttaacctcaagctaccagtctctcctcttccgcgtagaggaagaggggggcagacaaaaaaaaagctgaagtataaaaaccctcctcctcccgttattatttaagctactgccatcaaccccacccccataaagctgtgaagccctttgcctcgcttttgacagcgtgggggggccccgtgggcagggacttcggatttgcatttctgggttgtttttccttccactctggggtctcgttcaggcattggggtctcctcaccccagccacatgtttctttaagaatcctttggtcaaccaggaccttgatttttcaggcattttggtctggggtatttttgtttgttctctctgttttttgttttcttttttttctttccatcgtggttctggaagcttctagcgtgtggcatctgaccaattttgaattggtcctttctataaaatcaatatttataaaaaaaaaaaaaaaa

SEQ ID NO: 234233 - DNA, 697 bp, Homo Sapiens
  misc_feature (56)..(56): n is a, c, g, or t
  misc_feature (68)..(68): n is a, c, g, or t
tagccagtttattactagtgaccttgacttcagtatcatgagcattcttttatatntttctttataantcctgagtctgtaactaaacaattttgtcttcaaatttttatccaatatccattgcaccacaccaaatcaagcttcttgattttcaaaaataaaaagggggaaatacttacaacttgtacatatatattcacagtttttatttataaaaaaaatttacagtacttatggagagccagcagaagacatcagagcactcacttcttcccatctttgttaaggttagcgaattacccatggacactgttaggtgaggctcattcggcagccctgaaaacaaacctggtcacactgtctttaccctctcccttcagataaagcacttcgattatctattgatctgcccagttttcaagtcatgcgaatactaaaaaggttacatcatctggatctgtaccttggctatataagcatgttttccccctattctatgtttctttttttggtgaacattgaaaaacaggaggtgacttattactgttaattaaaactaaatgaaaaatgtcaagtctttaaaacagtgagcttgtaactctttcatgtaattttattctctatgaatttggctatcctactgaatcttaaaataaaggaaataaacacttttttttttaaaaaaaaaaaaaaaaaa

SEQ ID NO: 234234 - DNA, 678 bp, Homo Sapiens
  misc_feature (56)..(56): n is a, c, g, or t
gtctgaatctgaatttctcctatttaatctatgcaattatgcttgttttatattantaagcacttgactcactgggtgtggtctttttactgtgttttatttcaaaacgttgttttaagtgatagtgtccttaaattttagtgtcatttggtcaacttactggtaacaccagaacaagaaagcaaaaaagtaataaattctgctggcacagaactaacatatcatttggtaactgtaaaacctatttgcagttaaaggttgatttattggataagggactaaaagaagcatatattacctttgcctttatattttttcttcttttaagaaggagcattatggaaaaataaatataaagtcttagtgaatttttgttatggttctcaattcagcaatctactggctgcttgcgaaactgtgaaatcaaattgttcttaacctttattcagtttagtttatagcattactgttttatgaaatgtgacattttaggagccaatataatagagctctaaaaggatagtatatctttaaattctgactggggagtaagaagagaagatattcttaccctactaaataaaccaacttttgagtagtatgcaatattatgaaatgttacaacactatattaaaaataataaaatattttaaaattgcaaaaaaaaaaaaaaaaaa

SEQ ID NO: 234235 - DNA, 685 bp, Homo Sapiens
gagcgaaagtgatggaattgaacagctggaagaacgactgaaatataccgaatactcattgataagctctctgctgaaatagaaaaagaggtaaaaagtgtttgcattgatataaatgaagatgcggaaggggaagctgcaagtgaactggaaagctctaatttagagagtgttaagtgtgatttggagaaaagcatgaaagctggtttgaaaattcactctcatttgagtggcatccagaaagagattaaatacagtgactcattgcttcagatgaaagcaaaagaatatgaactcctggccaaggaattcaattcacttcacattagcaacaaagatgggtgccagttaaaggaaaacagagcgaaggaatctgaggttcccagtagcaatggggagattcctccctttactcaaagagtatttagcaattacacaaatgacacagactcggacactggtatcagttctaaccacagtcaggactccgaaacaacagtaggagatgtggtgctgttgtcaacatagttccaatggctcctttctgacctgctttcatgttttaatgtttgtttaatttaataggaaacctcattttaaatataacactcaaaaaaaatgtaaatcatattgtagtattcaatagttaataaaaactcgagaaatgaaaaaaaaaaaaaaaaaa

SEQ ID NO: 234236 - DNA, 661 bp, Homo Sapiens
ctagttcaagatttagccaaggctgtggcaaaggtgtaacttgtaaacttgagttggagtactatatttacaaataaaattggcaccatgtgccatctgtacatattactgttgcatttacttttaataaagcttgtggccccttttacttttttatagcttaactaatttgaatgtggttacttcctactgtagggtagcggaaaagttgtcttaaaaggtatggtggggatatttttaaaaactccttttggtttacctggggatccaattgatgtatatgtttatatactgggttcttgttttatatacctggcttttactttattaatatgagttactgaaggtgatggaggtatttgaaaattttacttccataggacatactgcatgtaagccaagtcatggagaatctgctgcatagctctattttaaagtaaaagtctaccaccgaatccctagtccccctgttttctgtttcttcttgtgattgctgccataattctaagttatttacttttaccactatttaagttatcaactttagctagtatcttcaaactttcactttgaaaaatgagaattttatattctaagccagttttcattttggttttgtgttttggttaataaaacaatactcaaataaaaaaaaaaaaaa

SEQ ID NO: 234237 - DNA, 735 bp, Homo Sapiens
  misc_feature (36)..(36): n is a, c, g, or t
  misc_feature (59)..(59): n is a, c, g, or t
tacataaggatgtcctttacccaaaatgaggagatntggaactgaaactaatatccagngacacaacattgggtatcatcaaaggcccacctttaacatcaaggacaagttgatcactgagataagagctgatagttccatttttattcagtctccacttctgcctgaattgcccatgttcagtccatagagctactttagctccaggtgtgtcccggccaccaatcacatcaagacatgtatcactggcctaaaagggttaagaaatgattaattggcagtagtatgtttgctaaagtaagttgaattaggtcccttttatcttaggtaaacaagtcatagacatgaagtgtgtgtgtgtcttatctaaaaaaatactatatagtataatttcagtaagccttttttaatgtcttctttacggctgtgggtaggagatggtacagaaataaaccaactgaaatagaggtacttgtttttaataggatgtctacatctgacaacagatgttcaataaagatttggtgaattggaattaaatgttaaatccctgtttgcttaaaacgtattatgttgagcttggttttcttatgaaaacattgcatgatgggctaaagatatccagacaataattacttttaaaagtttttcatttttgaagcatgagaaaaagtagataatccattggtgatacaataaaacacagcttgaatgtttaaaaaaaaaaaaaaaaaa

SEQ ID NO: 234238 - DNA, 680 bp, Homo Sapiens
  misc_feature (36)..(36): n is a, c, g, or t
tgacaaagccccatttttttttctttttttttggcntaaaactctgtatggctgccttgtgctatagaatagggtgcttccctagcctatagagggtgagtgttgattagattctgtgccaatcatggtaattggcttacttgatcatttgatggaatctaggctaacgagacaaaggaagtctgaaggctttgaataagaaattttctgttgctcttaacaattgatacaagttagggatttgccagcatccctcttctgcttctcagtgaagatatgtgatatggatgtttgaagctaatctgcaacagccttctgatggccatgaaaggacaagtatggagatgaaagctatcacactgagaatagtgggatgtagatagaaagcacctgaattgtgcttctgaattaaccaatccaggaactgctttacctttggactttttgttatgtgagatattctttatattgttccatttgctttgggtatatgtatattgttacttgtagccaaaaagaaacctctcttagtagaaacaaagggagagttaggttattcaaaaattagtatgggacaattgaatatgcctttttctgcgggagtaggtggggagaaacttaaaggttcacttgtaaaacaataaagtactaaagaaaatgtgaaaaaaaaaaaaaaaaaa

SEQ ID NO: 234239 - DNA, 704 bp, Homo Sapiens
gctgatggagcaggtcatttataaaagccagctgccttttaaataagttattacagtacattgccagggtgagcccatgttgacctgagaagattagcacatccatcaaaggctggtgaaaagatttagtattgacatgtttctctctaagaacagttggcttcacattcagcccctgccctgagacaaatgcattattttcatcagccctgggtgcttatttttctaagctctcattttattactggagtcacaatttgtgtgtaggtgttgccgacaaaaatgataattaactttcccttgaggtgacacataactaaaatttcaaatctttagtatttctccctttcattttaaattcatatgcctaactataaaataactgtgactgagatacaagtacaaaccaaagcctggaattgcagcaggtgctgaggcatttgaaagtgaaatgtttctcttcgcaaaggactcttataccctcccctaaagaaatcaccatgccggtctcacccctactggctttgttacctaaggcttcacctctcagtgcttctggttccttccttatccttaaaatgagtgttaataattctctcgtggggtcattgtgcggaccacattgagtagtgcctgtaaaacagtgctggctacacggtaaatactcaataaatgttgacacgtttaaaaaaaaaaaaaaaaaa

SEQ ID NO: 234240 - DNA, 627 bp, Homo Sapiens
  misc_feature (8)..(8): n is a, c, g, or t
gcacgagngaaacagagttccctggttgtgatagaaagagaagatgatagggttttaggagccactggcaacaatgaagaggtaaattctgtgacaacagggtaagaaaaggtaagaatacttagtgacatcagcagtagcagaggaaaggctggaaaactagcatcagtgaggaagagacaggtattccagttcatcagctacagaaaaggggttacttttggtggctttataaagaggagaagccctttggctagatttctcttttgtatgtaacaggtatttttgttagtggttcataaatgagcgaacatgtataatagtaatattttggctgggattacgggtgtgagccaccacactcggcctgatattatgttttttcttagaaatatctatctatataaataagtatgttttctatatgagtatgtgtcagttatattaaatatatatttatatatgtgttatatagagagtaagataactatgagcaatatatatttctgttttaaaatttacataaataatgtcatctcattctgtgactcaacaataactttttttacatctgttaatgtgaatatataaaactttcatttaactcccaaaaaaaaaaaaaaaaaa

SEQ ID NO: 234241 - DNA, 716 bp, Homo Sapiens
agctctctattgtcctgaccccacagttcctgtcccatgaccagggccagctcaccaaggagctgcagcagcatgtaaagtcagtgacatgcccatgcgagtacctgaggaaggtgagtgagtgcagacagatggggcctggtgcccttgagcagttcccgggtctcagctgccacacatctcatagccggtgatgctgggggaagcttacgcagtcacagtactggcttcttcctctttttctttccatacaagtggcttagggatggggtagagtagttgacttatttggatgaaaaccactatcttctgtcagaaactcaaaaggaatcattgctggcatggtaacctaaagaaaaacaaccagacaagtgcccaacgacacttaaaaaggtgatttattatcttgccaagtttaggctgggcatggtgactcatgcctctaatcccagcattttgggaggctgaggctggtggatcaccggaggccaggactttgagaccagcctggccaatatggcaaaacctcgtccctgctaggggtacaaaaattagccgggcatggtggtgtgagcctgtagtcccagctgctcaggaggctgagacaggagaattgcttggattcgggaggtgggggttttagtgggccgagatcacgccattgcactccagactgtgcgacggagcgagactctgtcaaaaaaaaaaaaaaaaaa

SEQ ID NO: 234242 - DNA, 734 bp, Homo Sapiens
  misc_feature (64)..(64): n is a, c, g, or t
gcatgaatagttcagactttcccataccacagccaagcagtaactaaaattaggatcttaattntcaatgataaaaggtctaaggttcatttaattatgctcctttaacactgtctttctagatttttcacccagtattttcaaaatttgggaatgtaaacaattgatatatttattgtatgttggctagcagttcatccttctgcaaaatatgcattcagagaaatgtgaagcttgttttaatgaagacttaaaccatttgtgtcatttgtgttttcatattcaaatacaccaaattaaaattctgaacctatatttttcatcattaacttcctaatataccagaacatatacctttttcatgtaaagttggcaatgggatatggcagttttatttttgaaaaatatgtaacatgactttaatatttttatagttttcagaattagaaacataggaagggaaaatgttttaattagataagtcaactttttatgtgtctgtagtggtgtactataatagcaaattataaagcattattaaatgtttataataatttttaatattacctacattatgaatttaactaaaataaagtgtgagttgtatattttttaattgggttgtttcaatagctggaagcatcctgaagcattatattgatttttgaactatttgaactcaaactgagtatgatttgaaaataaattaataatttaaaaacaaaaaaaaaaaa

SEQ ID NO: 234243 - DNA, 661 bp, Homo Sapiens
  misc_feature (98)..(98): n is a, c, g, or t
gccagtgctccttgtcaagctccccccgtcactccaggtggagccaccccggtgagggggtgtgccacttgcccccagggcactcctctgggcatccncgggtgggggattttggggccgtggggggcagtctttggtacctgtgttcgtcagggatgctctgacaaccaggtgtcgtccacgggcgggggcatgggcatggtgacagtggtcctgttgatgtcaccgatgatgctgagcgcctccttcagcgcgtggtgcatgtgcagcatctcgtcgtgctgctgtgcctgctctgccaactcctccatcagtgtgttctggttcccacatgagtacatattggccagcggctccgagatgatgaactccggggtctgagagtgggcaaacagggaagaaggttgggacctggtgcctgtgccgccctggctgccttgctgggcccttctgggactgtgcgctggacttggagccccttggagtatggcttttcacacgggcttctataccgcttcgactggaagatccacctccccactgccttttctcactcagatggggacaccgaggtccagaggaaaagacacctgtcaaatgtcacagatctgggaggggacttaagacttatcatgccaagaggaaaaaaaaaaaaaaaaaa

SEQ ID NO: 234244 - DNA, 622 bp, Homo Sapiens
tcagaatgcaagtctgtctcttatatcctcgagaaacacacctttatatcccagttagtactgacaaaaattaaactagggactggccaaaaacagtgcctttcctcactttaatctcactaaagtagataagactcaagttattttgttcttgcaatggcattgacaaatgtttgcaccaaaaaccatgttgaagttcattaaggaaactgtgatccaagatccaaggtcaaaaaaacaaattcatcaattcagcacaccaccaactcacaggctaagcatcttactgctaattcattgatgctgccatttgtcaagtgccaaattgaattattgatttgtcaataatttccttctgttggttacttatatagtatattgcaattcttgttgctgaagtcagctacactttttctatttgaaaaacaatttcttgcatttgggatttcaggtatagtgattgttacaaatatgaaggacttgaattaacagcaagttttcaagtaaaactttacttatgtataactgaatgagttcttaaagacatttactaacaattttccacaaactaaaaatttataaaacaataaataaaatagactttaaaaaaaaaaaaaaaaaa

SEQ ID NO: 234245 - DNA, 721 bp, Homo Sapiens
  misc_feature (59)..(59): n is a, c, g, or t
  misc_feature (79)..(79): n is a, c, g, or t
gtgcccaatgcaggtcccaagaggcagggcgggctccccaaaggagcaaagaatgcagngaggcggtccaggcccctgngaagggagctcggcaccctccaggtccgtgtggaccccagccgctgttggctgggaatcgaagttagaggtgacttccaaaggccccccgagccggcagtgccccccaccacccccccagcgactctgcggtgccagtgccttgttggcttttccggctacgcaccctgcagtcactgagctctcggtctgacgtctgatgtttgtggtttttttataacacggggccttacctggggaattcagctggtttgaatatttgtagcccgctcccagaatgtcttattttgtaatgactgaactacatttagtaatagttacacatgtatatggttaatacatatggaaattcaatatattttgtagttaacgtattctgaagtaacggatgtttctcgccaatcgtagtgacttcagctaacgaaatgttcttttgtagtaccacggtcctcggcctaacgaaggacgtgaaccttgtaagaggagagctctgaaacgcggtcacctttgtttagtggaagggaaagtgtgttcccggcatgaggtgcctcggaattagtaaagaattgtgggcaatggattaaccactgtatctaagaatccaccaattaaagcatttgcacagacaaaaaaaaaaaaaaaa

SEQ ID NO: 234246 - DNA, 666 bp, Homo Sapiens
gcgacactgtgaaccgtgcttctgcctcggaacctccctagttatattacttgtgccacatggatttctttaggattattgattcaaacctagagttgtctggaaaatgtgggttctcttctttgtgattgtctgtagtatgctttgaaggtgctctgcagtggtagacacactggttctggcctcatttaatgaaattaataacacatgcccctatttctcttttggatgatgtgtgggtgggtgggtactgaggtttcctggccagctgtaaggcagattttgacattcttgtgccagaaacagaaattagagtagtccagttacccagagagctcacttaacattgcctctttacttccccagtactgaaacatttcttcaagtataacataaaattaccgtaacaagcagacccagaatactgaaaataactccatttgttcattataggtatctttatttgaaaagtgaaaaatgctttgacacattacagatctgggtatttggattttgcctatggagtgcatatatgatttcaatgatttacaggctaaatagattttagaaataatcatcttaaaattgaaaacaaaggtaggtcctggtataatattaaacataaagttattaaacattttaagcattaaaaaaaaaaaaaaaaaa

SEQ ID NO: 234247 - DNA, 690 bp, Homo Sapiens
  misc_feature (49)..(49): n is a, c, g, or t
gaggcatctgaggagaggccacatcttgtgtatgccctttccttctgtntgacaaggtgactgtgcttgattctatacattagcaataaaaacataacttatttaacttcttgcacttcactggaaaatgccaaatagctctgttctgtggctttagtgctgaatgtttattgtaaaagagagtctaatgttaagaatagtcttgggaaggctgggtccgtggaagatttatttggggatgtaaagctgaaggtcagccttgcacctaaacccaacctggaatgttaaatgaaataatatacttgaatgcaattttgtaaaagtggattcctcaggatatgtgaaacctaaaggaagtggttctgttgcaaatggactataaacagggacattatattcttacactaaaaatccttgcattttaaagagagatgcacttaagaatagagtgaactgctcatatgcttatttaagcttggacagttttcagagacaaaccccattaagaattactcttttcacatggctgaatcgaaacatgtgtaatgtcaatgtaaaaccaatcacagctgtgaactgcatgaaatgtattgtgaaacgaacacaagattaagctttgtcaggttaatgtagcatgttaaggactctagaaaaaaataaactaaggagacgaaaaaaaaaaaaaaaaaa

SEQ ID NO: 234248 - DNA, 677 bp, Homo Sapiens
aggagagagacggtctcgggtccagggagtggaggggctgcccctgccgtgcaggtcttggccgatggcgccttaccctgctgccctgggcttttggcctgaagcaaattcctgagtggggggtactggggcctgccgcatcctgtcctgtccactgcccacccccgtgtgctggctccctcacttctggctgcagtgggagccgccagtctgacccttgtcaccgcacgctttgcccccaccccgttgcaagaggtcacaccatgtcagcagccttgcactgaccgcagccggcccccaggcctcagagttttggatgcttccgtgcggctccaacaggcatcgtcttcccttccgcaggtggaggggccgcttcccgcaggcatttgagctctgtgccggggccgtggccatgggaagatgttccacgctgcctcctcctcgagttttcctcggaaacactcttgaatgtctgagtgagggtcctgcttagctctttggcctgtgagatgctttgaaaatttttatttttttaagatgaagcaagatgtctgtagcggtaattgcctcacattaaactgtcgccgactgcaggcgcagtgactgctgaatgtaccctgtgtggcgacttggaatcaataaaccatttgtggatcctgaaaaaaaaaaaaaaaaaa

SEQ ID NO: 234249 - DNA, 782 bp, Homo Sapiens
ggaaaagccctgatctaagagtttttagatgctagcaaccttgtttagatgtagatcttgtttagatgtagcaaccacttgacatttaatttatcatcttaaccttgaatgattctttgttttgttttttgttattgagatggagtctgcactccagcctgggcgacagagcgagactccatctccaaaaaaaaaaaaaagtgaggttgagatttgcatggtaccaaggcttacatgcttcagaatagatcaatggttattgtataagtaattttatcctaaaacattatgacattttttgtttcttattgagggtagataatgttaatattaaactactaataggaggcccttatcacttctcttttcattttttccatgcagtgataggtattattagaaaaaagttatttcttgagttacacctaagaggaagaagtaacatgatggaaagtggttggagatagcacccaattaacatcgacagccaagtcttctatttcagaatattgatttatttcgctttggcttttgatgccatcatgagatttaagtctgcagtttcaaaagctcatgctacttagaagagatgatttttgcagcttaaaaaattgcttgtgactgcagtatgtacacagttaaaaagctgttcactgcccctttcaaccttttcattttgagctttactaaggagaatgcttttaggaaccagaattcctaaaagtgtaattttttatgtataaataaagttttatctatatctgaaaaaaaaaaaaaaaaaa

SEQ ID NO: 234250 - DNA, 686 bp, Homo Sapiens
atttggtactttcacgtactacacatcatttacgtggacaactttcatattactaatctcttttcatttcaaatcacctatgtaaaaaaaaagtcctctctcaagtgtattccgtcttccaagttaccaatcatataaacaacttggaattcctatcaacaataaccacacttcctttaagggactgtatctttagttcatgacccatcatcagctgcctttttaatacctgaacgactagtttcatccaattgttatcaaaaagttacatgaaaatttattttttataaatccaatctatagtaaatataccaggataatttttctctttacagaaaccccatgctgttttctgtaacataaataatccattcttattcactcctttgcctcccaaatatgtctgtatgtttatattttgatatcaggtcgcagacactcaaaacatccttcaccatgcaattaatgtttgttgctgataaacggatttttctgtatggttctgtggcaagagatttcataatttctactgcacttacattcaacacttgatgattcactattatagtaaggatatatgaatttcaaaaaatgcctcataacctcaatttttaagtcatgttagctgagagactttcaaagttttgataaataaaaattgacaagtcaaaaaaaaaaaaaaaaaa

SEQ ID NO: 234251 - DNA, 774 bp, Homo Sapiens
acgcacatgctcagagacccttgcagagtcccgcacagctgtcctccagcagagaagagctgctcagctacctggtggccctgctgcggcaggagagcagagggcgtcgccaagcaaagccaggctcaaggagttcctccagcagtgtgaccgggaggatctggtggaattggctctgcctcagctggctcaggttgtgaccgtgtatgagtttcttctgatgaaggttgctgagtcattaggaatcacagaattcctacggaagaaagaaatacacccagacaaccttggacccaagcacctcagccgagacatggatggggagcagctagagggagctagcagcgagaagagggaacgtgaggctgcggaggagggactggcctcagtgaaaaggcccagaagagaagccctgtccaacgataccactgaatctcttgctgccaacagcagaggccgggagaagcccaggcccttgcatgctttggccgctggtacaatagtgtctcaggaggaggacattgtcacagtgactgatgcagaggggcgtgcctgcggatgggcccgctagaaggagttcctctagaagctgtggagtcggtcgtcaccgtggagccagagccctcacagtgaagtggagtcagatcctagattcgtctgattttatccagagaaggtctatggcaagcaatgtatatttttctaatgtgaatattgcacagatgaaccttttatttataaagaataatgtctttcaaaaaaaaaaaaaaaaaa

SEQ ID NO: 234252 - DNA, 793 bp, Homo Sapiens
  misc_feature (124)..(124): n is a, c, g, or t
caccgttagaccaagctgtaagccctactacagacagtgttaacaaagtaaactacaaagaacccaacacaattcccagaaagtaacaatagccagaggttgaagggcggggtagaagaggggngaatgttgcagcgtaatccttcataccacctggttcttgatattctgccgcctgttcaagttcaagaataaaagcgacagcaggacccaaatgcagctcccaacccactccccaggctagacatgcttgtgtccacacagcacaccaatgtgatacttccactgaccggctgcagctctgcatgaaggactcggggtctggatgccatggaatcactgtggctcttgttgcagttttgtactctatacttggtttttcaattaagcttaatggcttttttaaaacatgacttgaagctctagttttctagatcttttacagtgtacagtattttacataactaagctgtattaaaagcttgttcatttacttgccaggaccctggctctacttttagagtcattgtaagaaactctaacttgcatcaaggtactaataagcttaattttaataacccaaagtttaaaggttccgatctttctccttggggtggagtgatctcattctcaggacaaccgtttacttacctgattcctcggagcattatcaacttctgctctgttgtcctgaccatacatatgtcctagaactacagttaagtgtgttgtggaattttagttttgaatcctgtataaaagaactccaagacctaaaaaaaaaaaaaaaaaa

SEQ ID NO: 234253 - DNA, 673 bp, Homo Sapiens
atgcaccccccacctggggtctggcttctccatctccacacccccttgagggcttctgtctccccctgccccttcgatcgcaggaggcagtgcctggccggggtcgcaggcacctgtcaccccagctcctcactcctcacccactcacatccagtccgtttgtaaaatacacccaggatgagacctgcacgcagtggctcacagcagcacgatttgtgacagcccgaggcggagaacaccgaacacccagtgaaggtgaggggatcagcacggcgcggccacccacgcacccacgcgctggaatgagactcagccacaaggaggtgcgaagctctgacccaggccacagtgcggatgcaccttgaggatgtcacgctcagtgagagacaccagacacagaagggtacgctgtgatcccacttctatgaaatgtccaggacagaccaatccacagaatcagggagaggattcgtgggtgccgggactggggagggggacctgggggtgactaggtgacataatggggacagggctgccttctgggtgatgagaatgttctggaatcagatgggatggctgcacggcgtggtgaaggtactgaacgccacctcactgtaagacggtagattttgtattttaccacaataaacaaaacaaaacaaaaccaaaaaaa

SEQ ID NO: 234254 - DNA, 716 bp, Homo Sapiens
  misc_feature (50)..(50): n is a, c, g, or t
ctgatagcgaaggatagcaatgtggaaaattgcttagtcccacctgtatntggggagtgggatgtacatgggcgtttgataccaccattgataggcaagcgactggttggatcaaaagccagtatttagggatctgcagcgagagggccctcaggaagactcttgtaaccatgtgcaatatgtttttattctgactcgcagcttgtgctcagcatgttctttggtttagtttggggttgggggacacattgttcacccagcagaactgggaggtgcaaaggaccgtggaagcaatttttgttttgtttgaggaatacctgtcttggattccttagccccttgccagtcctggagactgtggcaggggccgccaggaaggcagctgtctgctgctgagtcagatcggaaggtggtgaatctttccagagcagctgaaaatctcagcatggagacagtaagaaaagagacggggtgtggataagactctgccaccgtgtcacactagcataggaggctgcacgttcatttgttgttgtttttttttcctttgccaacctccgttctatttatgtgcaagcagtttggattcaagttcttgtatctgtctgttctgggacctggggattgtgagggttccctcacagccagcacgacccccagaaagaggcgtcccacaataaacacgtcacctgctcttgaaaaaaaaaaaaaaaaaa

SEQ ID NO: 234255 - DNA, 717 bp, Homo Sapiens
ttggagccacagaagcagtgcactcattggatgtctgttcttaacacagcttctctttctacattaaaaaaaatcattattgcattttggaaagcagtgctcatcaaaagcaacttttaaaacctattttattgttcctttaaatttctctcccgctgaaactgccctggagaggctatctgctgctcttccatttacccacatcaggttattctccatgtcactcagtggagatgactccagatgtgtttaaagactggacaattcacctatactgtgtaggaaattacctccttaattacctggtagaattgtcagcagacatgttcatccgatgatagtactgcagttttctattaataatttgcagacttttatctaacctgcactcatgtacagattattaaaagttttaaaatgtaactgatcagtattgatcaatcattgtcttgatttttttttacagcgtatatttctaatcatattttttaaagccaagagaactggttgaatgaatgtttattttcctgaaggtatttttaagataaagcttcctaatggcgtgtaaactttgcatatgtatgtagtttgatacatattgtcacatttgaaaatcttgtgggttgtaactggttttatacaaaatatcgaatagtggaaattgtataattacaatcatgtaattaaaagtattaacccaaaaaaaaaaaaaaaaaa

SEQ ID NO: 234256 - DNA, 780 bp, Homo Sapiens
  misc_feature (83)..(83): n is a, c, g, or t
actatatgtcagtaaagtctgaaaacttatattagcagtagcacccaaaaccaagccttaaccccaacaatgtgtgtatcttntgcacagcaaaaactgcgaggccagaactagttttacagccatttctgttcacacttttcaccccacaacttggggatctagctgagacatttctacctcgaacaagtcacatgtaccacaggttcctgaataattcctgcagggctggtgacagacataacagctctggttttataatatcttgggtatctctaaggccaataaggataacattatctacccagagagtttagaagaaaagtaggagtccaaaggaagagtaaacaagaatggagctgtgttcacactgaatttggggtcaatctatttcccccaccctctctcctccccaacccttcaggaaccctttagtttattaatcttatacagaagaaactaacttagaaacaaaggattcaatatttgcttatttattctttgttaacatgagagtcccatgtctgaaaaccaaagtccaatttctgtctggccttttgtctcatccttcttggcaaaagtagcttttgaactgatataaaaaaaaatgctgagtaacagaaaagtattaatgtgcttgacaccatgactgaaatactatgatcttgtttgtcaataaaaagcagctatctgtgaaccaggtaactgtgtgttttggaagatctgtttattaacagtaaataaataagccctgtacagaacacaaaaaaaaaaaaaaaa

SEQ ID NO: 234257 - DNA, 779 bp, Homo Sapiens
  misc_feature (33)..(33): n is a, c, g, or t
tgcgggctccaacagacccttactcagcttgcnacagggagatgtcatcacgctgctcatccccgaggagaaggatggctggctctatggagaacacgacgtgtccaaggcgaggggttggttcccgtcgtcgtacacgaagttgctggaagaaaatgagacagaagcagtgaccgtgcccacgccaagccccacaccagtgagaagcatcagcaccgtgaacttgtctgagaatagcagtgttgtcatccccccacccgactacttggaatgcttatccatgggggcagctgccgacaggagagcagattcggccaggacgacatccacctttaaggccccagcgtccaagcccgagaccgcggctcctaacgatgccaacgggactgcaaagccgccttttctcagcggagaaaacccctttgccactgtgaaactccgcccgactgtgacgaatgatcgctcggcacccatcattcgatgagaggacagccaaggactctcccgggcctctccggttctcccttgcggaatgatgggcgcatcctgtctgccacgtgctgacggtcgggaagcttcagtggagaggcctaactctaatgtcgcctgcttaagcaaatcatgcttctctgtttcacgtagttgggttgacaagtttctgcctttaagataaatgagtaatagtctaatgaccagctcagccatttaaaatattttcttcctattctgttcaagaaacagtaaacttggtttcaatctttaaaaaaaaaaaaaaaaaa

SEQ ID NO: 234258 - DNA, 735 bp, Homo Sapiens
  misc_feature (79)..(79): n is a, c, g, or t
ccaggttgagtgtcacccatacctcacacaggagaaactgatccagtactgccactccaagggcatcaccgttacggcntacagccccctggctctccggatagaccttgggccaagccagaagacccttccctgctggaggatcccaagattaaggagattgctgcaaagcacaaaaaaaccgcagcccaggttctgatccgtttccatatccagaggaatgtgattgtcatccccaagtctgtgacaccagcacgcattgttgagaacattcaggtctttgactttaaattgagtgatgaggagatggcaaccatactcagcttcaacagaaactggagggcctgtaacgtgttgcaatcctctcatttggaagactatcccttcgatgcagaatattgaggttgaatctcctggtgagattatacaggagattctctttcttcgctgaagtgtgactacctccactcatgtcccattttagccaagcttatttaagatcacagtgaacttagtcctgttatagacgagaatcgaggtgctgttttagacatttatttctgtatgttcaactaggatcagaatatcacagaaaagcatggcttgaataaggaaatgacaattttttccacttatctgatcagaacaaatgtttattaagcatcagaaactctgccaacactgaggatgtaaagatcaataaaaaaaataataatcataaaaaaaaaaaaaaaa

SEQ ID NO: 234259 - DNA, 748 bp, Homo Sapiens
accaagaggttttagttaattgaacatgctttgcatatttgcaaaggattttacctataaagtgagtcatcattagagtcttgcagtggtacaggagaaagatccataagcttttgttgttgttgttgttgttgttgttgttgtttttaatagagacgggctttttaccttgtcacccagactggtctcaaactcctgggctcaagcaatacgcccacctcggcctcccaaagtgctgggattacaggcttgagccaccgtgcttggccagtccatacacttttgttgagagttatggcattggtcttctggcaagggaagacttaatttaactggtaaacttatagactattccaaaaacatattcaaaccttttaagcagtgaaaatgaaatttatttataaatgttcaaatggtagattatggttattacatatgagttttcaaaaatgttgagtctttctggaaagatttattcttcagtatctgtgcaaagtttgaagtaatttgtctttgccatttggtttgtattttgttacataaatacatactcaagtctggagatggtttcaggcaacatccagtagcctaagaccattttaaggtagctggtgatctttttctgttttgtggggaccttttttgtaatgaacattttttttaaattcagaatttagattaatcggttgtcaagagaggagagaaagcgataaaacagtttaggaatagtaaaaaaaaaaaaaaaaaa

SEQ ID NO: 234260 - DNA, 579 bp, Homo Sapiens
ctctctcggggcctcatctcagatcagatctactaaatcagatactctaggggcaggggcaggggcaggggctagcagttgtgtttaagcaaactctgcaggtgtctttcttatcctagtttgagaaccaatacccaacaacctacgtgattttggtgcaagtagtgtttgaaacacactgaagattactgccctattactaagacatttttcaaaaagcatgttttaaatcagtgtagtccaggatcacactatattaaatataaagataacttaaaggatcattggatcattcattttggccaaatttttagcttctccaaagtgactaacatcagggcctacaataaaatctgtaattctccaagtttagtaattttatattgaggcaggaagggctcattaagtactaataagtacataatttattaaaaacatacataagtgtcatcaaaaaggtccacaattgttagtaaaaaaaattaaattgaagtagtaaatgctgttttataacatacatttttctgctaattcattctgttttgtgtgacctaataaagcaaaaaaaaaaaaaaaaaa

SEQ ID NO: 234261 - DNA, 696 bp, Homo Sapiens
cgtgatggaggaaaaggccaactctgtcctggtcttgctgtggcaccccatcgccccacagctcgtaccttctcaccagattcccctgaatccaaactcgtggtgcaaacctctaccttttttacaaaaagatcttattgttaatttattgtttctggcacttgggcaaaccctgtagttaatactcctcccacactagacactgggtttcaggaggagggagactgccctgctttggtcccagagaggccctctgcagataggcgtggcccctcttcagaggacactaccctagggcactttctctttgaggtggagagacccataaagccttgaccacatcactccatatggggaggagaaggatccctgtcaccttctcctctcttcacggggcccttttgcagccctaggcctcatctgtgggaagggagtccctggctcatactgcccccaccacagctccttgccctggccagaactgctgtcgaagaaaatcaggccggaaggccaagaaggcgctaagggggatgggagggcaggttttccaggctggagtcggttccacccactcgcctgtccacaggcttccttgtaagcaagtcagcagcacagctactcacgctgccatctggacttattttatgtcaatctgtttataaataaaaaccaatatagataaaaaaaaaaaaaaaa

SEQ ID NO: 234262 - DNA, 702 bp, Homo Sapiens
  misc_feature (74)..(74): n is a, c, g, or t
gcacgaggtgacccatcatctgctaccattcgttgtggataattcatgtaatctctaacctgtgggcaagtctntacccttcagtagtcaagattacgttagagacttcgtccacgaatccacaccacctttcccatcagttctcaccggaaatatgctgccaaaaagaaaatcagcttttctaagatcaagccagagttgcttctcttacaaccttacggcgctaatgcattaagttgaagtcgactgccaaagaggcccagcagagggcagcacccccatcatttttttgaatttctcccttaggaattttgccttcctttgtcttctgtccaccaggccttctctccagctggacacaaacctcctttgaagggaaataattgccgttaggcttcacagtagtgctttttcctttcacttggatttgcattttaacctgcatttcgaagatttttatacatgttttctatttccgacaatgccaggaggcttcattgacgttgtagtctgtgttaataaacttgtgtatcactctgctctgatcttttaggaattaacttgcaaatgaaatgaatatgttgggactttggcataatttgaatatagcattgtgtgagttgtgattgtctcttcctaattgtgctgtaataacctgtgtatgagaataaaatgatttccaccaaaaaaaaaaaaaaaaaa

SEQ ID NO: 234263 - DNA, 720 bp, Homo Sapiens
gcatcggggacgagatggacgtgagcctcagggccccgcgcctggcccagctctccgaggtggccatgcacagcctgggtctggctttcatctacgaccagactgaggacatcagggatgttcttagaagtttcatggacggtttcaccacacttaaggagaacataatgaggttctggagatccccgaaccccgggtcctgggtgtcctgcgaacaggtgctgctggcgctgctgctgctgctggcgctgctgctgccgctgctcagcgggggcctgcacctgctgctcaagtgaggccccggcggctcagggcggggctggccccacccccatgaccactgccctggaggtggcggcctgctgctgttatctttttaactgttttctcatgatgcctttttatatttaaaccccgagatagtgctggaacactgctgaggttttatactcaggttttttgttttttttttattccagttttcgttttttctaaaagatgaattcctatggctctgcaattgtcaccggttaactgtggcctgtgcccaggaagagccattcactcctgcccctgcccacacggcaggtagcagggggagtgctggtcacacccctgtgtgatatgtgatgccctcggcaaagaatctactggaatagattccgaggagcaggagtgctcaataaaatgttggtttccagcaaaaaaaaaaaaaaaaaa

SEQ ID NO: 234264 - DNA, 671 bp, Homo Sapiens
cttcacatcccggggtccttctgaactgaccttgacctctgatctcttcacacatctccccttagcatctccacttacctacttttttttttttttttgagatggcatctcactctgtcacccaggctggagtgtagtgacacgatctcgactcactgcaatttccacctctcaggttcaagtggttctcctgcctcagcctctcaagtagctgggattacaggtgcacagcacctcccccgactaatttttatatttttagtagagacgggatttcgccatgttggccaggctggtctcaaactcctgacctcaagtgatctgcccaccttggcttcccaaagtgctgggattgcagacgtgagtcactgcgcccagccattccatgtctcttaagtctcagaatctcccctagctccctccaggtgtctgcagtggttgtcccctcaaagctgtcccacaccctcctccgaggaccctttgtgtatctcctccagctaccgcagagcccacaaacccaggcatctatcaaagtccctcattcatgagggtggtgaggacacagactgcgaccagaacagaaatatgaaaatgtgaatgacagcgtccccccgtgtgtggaatgtggggattaaaagcatttatcaacctctaaaaaaaaaaaaaaaaaa

SEQ ID NO: 234265 - DNA, 676 bp, Homo Sapiens
accacttcgacgaggccatggctgatctgcacaccctcagcgaggactcctacaaagacagcaccctcatcatgcagctgctgcgagacaacctgacactgtggacggccgacaacgccggggaagaggggggcgaggctccccaggagccccagagctgagtgttgcccgccaccgccccgccctgccccctccagtcccccaccctgccgagaggactagtatggggtgggaggccccacccttctcccctaggcgctgttcttgctccaaagggctccgtggagagggactggcagagctgaggccacctggggctggggatcccactcttcttgcagctgttgagcgcacctaaccactggtcatgcccccacccctgctctccgcacccgcttcctcccgaccccaggaccaggctacttctcccctcctcttgcctccctcctgcccctgctgcctctgatcgtaggaattgaggagtgtcccgccttgtggctgagaactggacagtggcaggggctggagatgggtgtgtgtgtgtgtgtgtgtgtgtgtgtgtgtgtgcgcgcgcgccagtgcaagaccgagattgagggaaagcatgtctgctgggtgtgaccatgtttcctctcaataaagttcccctgtgacactcaaaaaaaaaaaaaaaaaa

SEQ ID NO: 234266 - DNA, 693 bp, Homo Sapiens
  misc_feature (16)..(16): n is a, c, g, or t
  misc_feature (32)..(32): n is a, c, g, or t
  misc_feature (96)..(96): n is a, c, g, or t
agaagatacgattttnagaaacaaatattcantgaatgtctgccctgtgagatactcactagagtgaacatgaggaggcttatgtagcaaaatgcnacctacctgcaaagaacttagtccctaatggagatgaatatataataagggatcataaatgtgctaagtggatttactagtaatatgtgagccaaggacgataaagctcctgattctgatgggtatcaggaaaggcttttcaggaagtgttacttgttataggtcagaggtcagcaaactacaggttacaaccccactgcctgcttttgtaaaaaactttattggaatacagttatgcccacttgtttatatattgtctgtggctgctttcacattacaacagcagggttaagtagctggaacaaagcctaaaatacttggtcttttacagaaaaaaatttgccaacctgttctaaacttttaaggtcaggagaactgggggaaggagggagtagaaagaacactgtcacccagactggagtgcagtggcaccatcatatagctcactgtagcctcaaactcctgggctctagtggtcttcccacttcagcttctggagtagctggggctactgcacctggaattgtcttaatctgttttaatactattaaaattttttttgtttcatctctttcagtgaaaaaaaaaaaaaaaaaa

SEQ ID NO: 234267 - DNA, 699 bp, Homo Sapiens
  misc_feature (16)..(16): n is a, c, g, or t
  misc_feature (114)..(114): n is a, c, g, or t
tgaatttaatcccttntgtggaaactgcaatggtttgctcaattttaaggcagtgtgtgaagaaaccctgaaggtcgggcctcaagtaggtctctttctagatgcagtcgtttntggaggagaagactttcgagccagcataggtgcaacaagtagtaaagaaaccctggatattctctacgcccggcaaaagattgttgtcatagcgaaagcctttggtctccaagccgtagatctggtgtacattgactttcgagatggagctggcctgcttagacagtcacgagaaggagccgccatgggcttcactggtaagcaggtgattcaccctaaccaaattgccgtggtccaggagcagttttctccttcccctgaaaaaattaagtgggctgaagaactgattgctgcctttaaagaacatcaacaattaggaaagggggcctttactttccaagggagtatgatcgacatgccattactgaagcaggcccagaacactgttacgcttgccacctccatcaaggaaaaatgatctgttaaatgaagctgtcatcaggctaaagggtattgaagctgcagagggatcaacttgtgcttgccagaggacgccaatgaagtttgaaacaccaacaatcagagattttgtttctgttcctcattaaatcatgagcttttgtgccgagaaaaaaaaaaaaaaaa

SEQ ID NO: 234268 - DNA, 751 bp, Homo Sapiens
actagtaaatggcagagctaagagtcaaatccaggtctatgtgatcctcagagattggaggccaggatggagaattggttgagtagccaaggaaggtcagtgtgaaaagcttgctatggcaaatatagcgaaatctctccactgccttctgtccaccagcatttagtgccagcctaggcacaacttgtcctggtccaagtccttattctgcttgccccaacttacctgcagacactccttttgctaccactcaaggaaggaagtcaccagtggccttagtgcaggaaactcagccctggtggccctgcagaacaatgcatctgacatgtgcgatgcatccccatggagagacagcattgctccccagccctccagaaaccttgagcagatccagggatcagtgagaggagtggtgtgtacccctaaatcctcccaccccagcactgcccatctgtaaaatcttgtaaagcccagtttcctgtgtgcatgtcatggaccagtgagctggagatggctgaatcttccaagagaaacaaggttggataagcgcttccttttttttagcccaggagaggtggatgtttgtctgagaaaacaatggcctcaagggaggggccttgggcccaccctcacagggggtctctgtgtgatctcttgggatttctccttgtttttgtgagtacctgggaagtgttgtttgttttcttattttctttttaattaaaaaacaaacaaacaaaaaaaaaaaaaa

SEQ ID NO: 234269 - DNA, 757 bp, Homo Sapiens
gggagcggcatgggcgatgtcactcagccccttcccggtccgcccgcttccctccttcatgatttccattaaagtctgttgttttgtgactgctgccagtgtggttggccctgcccctgcaggccacatggtccagggagggagggggacatggaaatctgccttagagacaaatggagtagggcagcccggagctggggcccaagggacaggacaccactgcctgctcttcgtctggggcctggggccttgcctcccactgaggagactttgggtggggtggggggctgtcccccaaagatgctcctgagtgcaagagcaggcaaggcagagtcctggggcacagccacgaggtgacctccctgtgcagagactcccgagccctactcgacccagcaagctccagtccgccccatctctcccgtctaccctgacctggagatccagaagtatggcccagaagagcccttgccccgcctgtctgcccttggtggcagtggccatggccgacgccaggcccagccaccctgggactgagcctgactgcttcagacagccgacccctccttgtccccgctccacgcccgcagcctcctggtggcgctccgccctctcccgcttcctttgtgtatctcagccctacaaagaaaaacactcccactcttgtcatacctaattgttcctgctgtggtttggggaattttttttattaaataaagttttttattataagggtaatataaaaaaaaaaaaaaaa

SEQ ID NO: 234270 - DNA, 700 bp, Homo Sapiens
aactgggggtgtgtatcctagaatcctcgacccattagaaagtatattgtagacatcatactctttaccctttaacactacacatgcacttcataagaacaagcatgctgtcttacccaagtacagctatcaagttcagaaatttaacattgccataatactttacagtccatatttcaatttcatttgctgttttattggtaatttttttcagctccacgatccagcctaggatcatatgttgtattgccataaccctctaatctggagcagttcctcagcttttctttgttttttataatagtaatatatttgaaaaatacaggacagctaaaggatagagtatccttctatttgggtttttctgatgtttcctcatggttagattggggtagtgcagtgagggttgaaatgctgtaagtgatatgtattgcaggtatacatccagatgcacagaatgtccatttgtcccttattggtgatgctaattttgatcacttgggtaagatgtccagtttctccagtgtatcgttattgtttttccttttgcaattagtgggtaatttgtgaggagaaactttgagaccttgttgacaattctgttcctcatcaaatctacccctcctaggtttagcatcctttgacgattcttgtctgaataaatttttactaggatgtttccaaaaaaaaaaaaaaaaaa

SEQ ID NO: 234271 - DNA, 613 bp, Homo Sapiens
gcaagaagaaaggactatgagttcaactttagagggagccatggggactaaacaaaattctgaggccccctcaaccatctaaatggacttccttctgggccaggacactcgaaaattaaacctgaaagactggttcaggccatgatgggaagtgggagtcgaacatgcctcatcataccctccagcattaacatcaacacagaccttaaggctgataagaagcatttacaatctattctctctgaagtcttctacctggaggcttcatctgcatgataaaactttggtctccacaacctcttacaacccaggcattcctttctatcgataattactctttcaaccaattgccaatcagaaaattgttatatctacctataatctagaagcccccacatcaagttgttttgcctttctggacaggaccaatgtatatcttaaatgtatttgattgatctctcatgtctccctaaaatgtataaaaccacgctgttccccgaccacctggagcacatgttctcagggtctcctgagggctgtgtcacaggccatgttcacttacatttggctcagaataaatctcttcaaatattttaaaaaaaaaaaaaaaaaa

SEQ ID NO: 234272 - DNA, 629 bp, Homo Sapiens
  misc_feature (82)..(82): n is a, c, g, or t
ccccagctccgccctctgggtccacatgaggacagggaagctcgggaaggggaagggagactggccctgcccagccggtctntagcccctcagcccccgctgggcactctctgtcccatccctctaggacagggaagctggcctggtccagggcactgatggtgcttggattccagcctaaggaaggctggccgtggtccaggagttaagggcttgggtctggggtttaagtggccacccatccaggccctggccagtgtgggaccgggacgggaaggaagaaggaggctaggagcagggggaaaaggtgcacttggccagtggcgcctgccaggagtgagtccatgcgttgtctgcccacccctaccacagtgtttgtgccttcagctgagggggcagcctctgggccctgaacccctgctggggctccacgaccctgagagaaggggtgagaagaatcatctctgcacctcgggtctctgccagaggaagacttaagcatccctgcgacctcacattctagacagagatgaggtccaggggttggcccctgctgccttctcacaatttgcaatagatgtaaataggaccaataaatcctttggaagagcaaaaaaaaaaaaaaaaaa

SEQ ID NO: 234273 - DNA, 596 bp, Homo Sapiens
gcacgagggttaccattctgatgttggagcgcccgcggctgtaggcttttttttttttttttgatttttagtagagtcggggtttcactgtgttggccgggatggtctcaacctcctgacctcgtgatctgcctgcctctgcctcccagagtgctgggattacaggtgtgagccaccgcgcccggcctggaactgcaatttctaactcatacatcattgctataaaccttatttgtttactgtttctcttccaaggacggtcagtcatcctttaaaattcatttgaagttatgaaaagatagtttttgttacatgggcaatttacttttagtacagtaaaatgttatgtgaatttctacagaatgtttgctagaatgaattatatctaggatatgcttaacaatatattctggaggcagctttcatttgaaattaggttcatcttctgagagtattaaaaagttaatgggtttttgtgcctgaagattttgatgttgcatttggctacatttaatccactttcacccataaggtttagcatctaaaaaaattaaatcactgctaatgcaattaaaatgaaaaaaaaaaaaaaaaaa

SEQ ID NO: 234274 - DNA, 582 bp, Homo Sapiens
gatagtactaaatattgactttattcgcccaaaagttttaacccaatcttattattcaaagaaagtcattttgtaaacttaggtatttttccttttgtaaaaaaattaagttgacacatctatgctgtaacctcccctccccgcccacacgtgtacttcacactgtgcaccacccaggctctcaacttgaaggaagtgacccaggacccccaatcagaattgtggccatgtggaaacaaccactctgcagctagaaggctcttacggctctggtggagggatgtccacagtgcagatgtcctcagctcacgactgtgacagcgacttctcggcaagagtgccccccacccccaacccacttgagacaggtgtgttttgtagaagagactgggccatgcacagcacacacccggtcttccagccaaaagcaaatgagtgctggtggagggggcttgcagtggaacacccactctgctttaattgaataaccccaacttaaaatgtatgcactaggctgactttaggcacttttctaaagcaacatggcattatcccaaggaaagtgacagaaaaaaaaaaaaa

SEQ ID NO: 234275 - DNA, 562 bp, Homo Sapiens
gcaagaggtttgttggcagcctatacactgttaagttatgaagtgcactgttaagtacttagtatgaacgttgatgtcaaggtcttgggctacttttaattcatgccttgccctcgctctacttttacagtaactagctccaagtataggacaagtccaagtccgtctgtgcttgctccagtccagctactttttctaccctaccagtgtctttgtggacttgagttgattcattcactattcatatgcaactctgataaactaaccgtgtaaaaataaaacattggcctggaatctcaacactttgggaggccaaggcgggaggattgattgggcccaggagttcgagattagcctggacaacacagggagaccccatctctacaaaatataaaaaattagctgggtgcggtggtatacatccctgtagtcctatttacatgggaagctgaggtgggaggattgcttgagcctgggaagttgaggctacagtgagctacgatcgcatcactgcactgcagcctaagccagagtgagatgtctcaagaaaaaaaaaaaaaaa

SEQ ID NO: 234276 - DNA, 637 bp, Homo Sapiens
ctccttctcccaccgctccatcgccgtgaaggacgggatcctcctggccaccgggctgcacgtccaccggaacagcgcccacagcgcaggggtgggcgccatctttgacagggtgctgacggagcttgtgtccaagatgcgggacatgcagatggacaagacggagctgggctgcctgcgcgccatcgtcctctttaaccctgactccaaggggctctcgaacccggccgaggtggaggcgctgagggagaaggtctatgcgtccttggaggcctactgcaagcacaagtacccagagcagccgggaaggttcgctaagctcttgctccgcctgccggctctgcgctccatcgggctcaaatgcctggaacatctcttcttcttcaagctcatcggggacacacccattgacaccttccttatggagatgctggaggcgccgcaccaaatgacttaggcctgcgggcccatcctttgtgcccacccgttctggccaccctgcctggacgccagctgttcttctcagcctgagccctgtccctgcccttctctgcctggcctgtttggactttggggcacagcctgtcactgctctgcctaagagatgtgggtcaccctcaaaaaaaaaaaaaaaaaa

SEQ ID NO: 234277 - DNA, 641 bp, Homo Sapiens
  misc_feature (20)..(20): n is a, c, g, or t
  misc_feature (38)..(38): n is a, c, g, or t
gcgtgtatcatgtatgtatntgttggcaaactattgtntgttgattaaaatagcactgttccagtcagccactactttatgacgtctgaggcacacccctttccgaatttcaaggaccaaggtgacccgacctgtgtatgagagtgccaaatggtgtttggcttttcttaacattcctttttgtttgtttgttttgttttccttcttaatgaactaaatacgaatagatgcaacttagtttttgtaatactgaaatcgattcaattgtataaacgattataatttctttcatggaagcatgattcttctgattaaaaactgtactccatattttatgctggttgtctgcaagcttgtgcgatgttatgttcatgttaatcctatttgtaaaatgaagtgttcccaaccttatgttaaaagagagaagtaaataacagactgtattcagttattttgccctttattgaggaaccagatttgttttctttttgtttgtaatctcattttgaaataatcagcaagttgaggtactttcttcaaatgctttgtacaatataaactgttatgcctttcagtgcattactatgggaggagcaactaaaaaataaagacttacaaaaaggaaaaaaaaaaaaaaaaaa

SEQ ID NO: 234278 - DNA, 583 bp, Homo Sapiens
gagacctgcgtgggataatcaacaggggtctggaggacggggagagctgggaatatcagatctgactgcgtgttctcacttcgcttcctggaacttgctctcattttcctgggtgcatcaaacaaaacaaaaaccaaacacccagaggtctcatctcccaggccccaggggagaaagaggagtagcatgaacgccaaggaatgtacgttgagaatcactgctccaggcctgcattactccttcagctctggggcagaggaagcccagcccaagcacggggctggcagggcgtgaggaactctcctgtggcctgctcatcacccttccgacaggagcactgcatgtcagagcactttaaaaacaggccagcctgcttgggcgctcggtctccaccccagggtcataagtggggagagagcccttcccagggcacccaggcaggtgcagggaagtgcagagcttgtggaaagcgtgtgagtgagggagacaggaacggctctgggggtgggaagtggggctaggtcttgccaactccatcttcaataaagtcgttttcggatccctgaaaaaaaaaaaaaaaaaa

SEQ ID NO: 234279 - DNA, 674 bp, Homo Sapiens
agaattcggcacgagggcggtcgtggccaggactggcgcagctgccgtttcaggcgaggggcgcagaatgcagcggccgccagcctggagcgcgggccctggggccgcaacccgcgccgggcgaggtggcagcacaccctgggccccccactccccgccgcaagtcctgaggatggccagcagagaaacaagaaaatggactccctggctgctggagagttgaatgccagccaccagccatgggtgccagagtttgtagcctattggaggaaaacacaccaagatcacctctgcagcctgcacagccgggcctttggactcctggatgctagagtgacctgggcgctgaggagggcccccgagccagtaccaggaaaggatagactcctgcttgcagcattcccagcagaggcatcgcctgtggacaccgcgtctgtgtctgtatatggcagagctcccagatatatgcacaagggagtgaaaaaatgtgtttgcaccccagtctctaaaaattcaacagcctggttacttctgggtggtatatcgtaggtggctttaatacgtgttatttgctcatctgtatttcttactctttgcacaattaaaccatgttccttttacttatgtacatttttaataaaagaaagttgttaatgaaaaaaaaaaaaaaaaaa

SEQ ID NO: 234280 - DNA, 739 bp, Homo Sapiens
atagatatttttcaaaaatacagtgatgtcattgcaggacaattttatggacacactcacagagacagcattatggttctttcagataaaaaaggatatgttgcagtattacttgaatctgacagaggcgaatctaaagggagagtccatctggaagctggagtatatcctgacccagacctacgacattgaagatttgcagccggaaagtttatatggattagctaaacaatttacaatcctagacagtaagcagtttataaaatactacaattacttctttgtgagttatgacagcagtgtaacatgtgataagacatgtaaggcctttcagatttgtgcaattatgaatcttgataatatttcctatgcagattgcctcaaacagctttatataaagcacaattactagtatttcacagtttttgctaatagaaaatgctgattctgattctgagatcaatttgtgggaattttacataaatctttgttaattactgagtgggcaagtagacttcctgtctttgctttctttttttttttctttttgatgccttaatgtagatatctttatcattctgaattgtattatatatttaaagtgctcattaatagaatgatggatgtaaattggatgtaaatattcagtttatataattatatctaatttgtacccttgttgaaattgtcatttatacaataaagcgaattctttatctctaaaaaaaaaaaaaaaaaa

SEQ ID NO: 234281 - DNA, 717 bp, Homo Sapiens
gaagagctgcaggaagatggtgctaagatgttgtatgcagagttccaaagagtgaaggcgcagacacggctgggcacaagactggacttagacacagctcacatcttctgtcagtggcagtcctgtctccagatggggatgtatctcaaccagctgctgtccactcctctcccagagccagacctaactcgactgtacagtggaagcctggtgcacggactatgccagcaactgttagcatcgacctctgtagaaagtctcctgagcatatgtcctgaggctaagcaactttatgaatatctattcaatgccacaaggtcatatgcccccgctgaaatattcctaccaaaaggtagatcaaattcaaaaaaaaaaaggcagaagaaacagaataccagctgttctaagaacagagggagaaccactgcacacaccaagtgttggtatgagggaaacaaccggtttgggttgttaatggttgaaaacttagaggaacatagtgaggcctccaacattgaataaaactcagtttgcatcaaactagatgtatttaatataatccttacttaaaattcttccgttaccacccttgaaacaattagctttttctttaggactgacctgttaggggataaacatcacaataatctgaattccaagttattttgtattttgtttttaataaatacaacctgatttaagaaaaaaaaaaaaaaa

SEQ ID NO: 234282 - DNA, 588 bp, Homo Sapiens
  misc_feature (572)..(572): n is a, c, g, or t
tgtcaggtgccctccataatacctaaccgcattaaacagggtcatgtggggctaatgtgtcttcctcacaaatgctctatttaaaataaagccttggagaaagcacccagtaatagcagaggctttgcattgactccacctcaagactccctcttctctgaggagtaattttgcaggaaaaggggaacctcacctcatattcaggcacacgtggtaatcattgacagagggcgaggaatgcactgaagcaaactatatttaggaaatagaatcaaaatgcctgagagattgattcaaagtgtactatgaaagtagctctaaggatggtgccggtatttccggcttagctactgtataaaatgtggatccagctccaaggcggagggagtgagagtccaccgtgccttccattttagatatgtctaatgcttgatagagttatcaagatcaaaacagaagcttagatcatttaatctaagaagcaagttgctggtagctagaggtcacagctggaatcctgcttccaccaccacctgcatgtctaaggcctaacacaagttctcctccaaaanacccctgccccccggc

SEQ ID NO: 234283 - DNA, 792 bp, Homo Sapiens
actacgagattactggagctttataatttctgcaaggctcttttccagccagcttcattaacttgaaggtaatcaaatcatgcagaattctggctcagccagaaagcaaccccagtgagatccaacatgaagaaaaacagacaccgggatgataagatttagaatctttggcatttttcgtaaacattttgtttgaagattattaaattacaacccagagacaaaaaaaaaaaaatagtgaactcactattaaatgagatctttttaaccttaactttttttataatacatacatacataaaaactgcacaaagtatgtgtcaacaaaatacagtctttaaaacttaaatatcatttaaacagacttaattgcatacattttatatacgcacaaagtcaggatttttacatggcagggaaatactgtggaatgatgaggtctgcaggagacagatgctatcaaatgaggactctggggtggtattttctagaaatggggttctgaaataaatttttattgtatgtagcttattttacttctaagaggaacaaaagatacatttgggcagccaaagtatttctacttcctgcttaaaacattcaggcaaatgaaatgattataataattaggtaagcagccttattagtctctcggtcttcagtttcttatctttctaaatacctagagaatttattcattcatttctctcctacccccacctgcctttctgaaattatatgttgacattttataatatttgaaaataagcaaaaagtaaaggagaagaaggg

SEQ ID NO: 234284 - DNA, 783 bp, Homo Sapiens
atttctttttttcctttgggacttttatgtaggatcaaaagtttctaaaatgaacatataacccctttgtaattagaatatatatataggaaaatccagaattaattgatgcatatatctatatgaatatcaatctattccgtctttcaacatttttcatcaaatatttgctgaggcgggtggatatgtgtcaggttttgtgctaggttccaaacacacaaaaatgaatgaagcaagatccttcttgagaactttagtccaatgagtacaattatggtttggcctctgttttagggatggaggaaaaaatgaataggggttgacttatccggagaccacctgatcaggccccatcatgtaccctgttccactgccctccaactcacacagtggcagcagctcaggattattccacagcagctatggtttcagattccatagccttcaattttctgtaattctggaatggattggaaataactgcccttaatttgcaatgaagacaaataatgactggcggtcaaaggaagaagaccaagaaagtatgtttccttgctacagagtcagtatatcacatacaaagtcaaatgcacagacaagaactggccttgctttttaaaacctatccacaatcaatgtaactgcccactgaacaacacaggaaggagaagaaagatattaccatgggtttgggtttctttaaaatgtgtgagatctgtgggaggcctcatttcctgcactgctgcttctggctctatctctggctgtggcctactgaggctt

SEQ ID NO: 234285 - DNA, 714 bp, Homo Sapiens
tccaaatatttaaggcactatgtgtaggaacggtttacaatgcagctgagattattagaacaacatttaagagcaaagtctaggcaacattttgcccatgcaaaagacacatgcaaatgtaaagaacaatagctcaatttcttaggtaggtgacccaacatttatacactaagacacggataatacaattcacttgtatgctgtaattctgacatatgtgcatctgttgctctaagtctgtacacagaatggcttcccaaatgtagacgtgtcttgcactagttagaaggcaatttataaaaaatagcaggagcaaaactggacttctgctcccataagtcacctgtctagagttactacataagaagataacatgaccaaagacaagttataccaaatgtgcaaaacacatcaaaagtgagtttttaaagctcaaagttgtttaaattgcacccaagtctacatgattcaaaaataattttcttgtgccatggctaatattaaataccatgtttttatttttaatcaaatgtttgtatcattgagcttccccaatatactgtttttcacatatatggatactggctgagttttgttggactcagtggaaatccagtatatgcaggtgatgctgcaatgtaagaatgtggtgggaagattggtttgtactgagtctgatgaatggttggggatggtaacagacggggatttaag

SEQ ID NO: 234286 - DNA, 645 bp, Homo Sapiens
cagtaaggatgagttggtatctagctaaccatcttgatccgttataccttttataccatcagtcagcatttatgagactaccaggtgtgcttaaggcacaattgtttgttttagaatataatttttttatttatgttaaactagcacattgaacccacagctttgatttcatagaagcagagtatactttcctccacaaacttagacatgtttcttgggttctttctctctaagcagtgattctcccagccttcacatctacttactcggatgctccattgactgctcaaagcctgttaacttatgaactcaaaagcataatatgggattccaagtttggatgggcattgctggccttccttttaagatgtaacgaagggaatcttactgtcatcttcagggttttctgtttgtttgccttacgccctacggtattcttcaaaggctagtcccttgacagcataataaacctgagaaggtacaaagaaaactatcagttaaataagcatactgacaatctattgagcaaagaaggaacagcagtacatctttgtttccctatttaatttaaggcttctactagttgttcccctttgtattagaaatcctaaatatatatcctctataaaaaaaaaaaaaaaaaaa

SEQ ID NO: 234287 - DNA, 338 bp, Homo Sapiens
ggcaatacaggagaccctgtctctactactaataaagaaaattaggccgggcgcggtggctcacccctgtaatcccagaactttgggaggccaaggcgggtggatcatgaggtcaagagatcgagaccatcctggccaacgtggtgaaacccgtctctgctgaaaatgcaaaaattggccgggcatggtggcacacacctgtactcccagctattcgggaggctgaggcaggagaattgcttgaatctgggcggtggaggttgcagtgagctgagatcgcaccactgcattccagcctgccaatagagtgagacttcgtctcaaaaaaaaaaaaaaaa

SEQ ID NO: 234288 - DNA, 493 bp, Homo Sapiens
  misc_feature (410)..(410): n is a, c, g, or t
aatcctcccgccttggccttccaaagtgctgggattacaggctgtttttaacgtgtattaccttattactagtatatattacttgttgccccgtctgcccaaaaaagacaccactgaagtgtatatatgttgcaagttcctctccagtgaccctcctaccaactccacagagtcagctactagtaacagcatggtgtatccttcctagaactttccacaagcacacacaaccgtgtaaatatgaaggctacgcagacacaaccatgcacacacagtattttaaaaaaaaaagtgggaatttaccaacagtcctgctttgcaacgtttcccctcaacatgactgatacatatgaaaggagcttcattttaacagcagcctattgagccaaggtatggagaaaccctaatgnacttactttaaccacccccgcgatgagaagggcctgtaggctgcctccgttttttcactctctgttttgttgttgtttttgag

SEQ ID NO: 234289 - DNA, 425 bp, Homo Sapiens
  misc_feature (61)..(61): n is a, c, g, or t
  misc_feature (209)..(209): n is a, c, g, or t
  misc_feature (412)..(412): n is a, c, g, or t
cagagagaaatgaagtccttttactggaaattttcatcccttaatgtgttaattgattganttttacacatttcattttaaacatggaaatgatgaaggttcctaattgtaatgagtagttgtttttggattgttcaggtacactgcctcttttcttcagacactggggctcttttgtggtcactgagtattactgttttttcaagtcntcaagcacgtcttgctttgtgattttggcccatgcattggggattttacctttacctgcaaattttttctgatatttttcttctagatttgatctgaagtgagagacaaaccatttccagtatagctggatggaggtatctggggtgatgctccacatggcataatcccctcctgcttgtcgatagttcttaaatgggaaatncctgccatccctc

SEQ ID NO: 234290 - DNA, 853 bp, Homo Sapiens
ttcaagtccggatcagaaggaaaatctgttaaaaacaaaaaccaaaaacccatgattcaacagaaaatgtgacagattccttaggtgcaactttagaaacctaagtttcaaaggagaaaaacagtagttactccaggaattttaactcactaaccacagttctatcatggctctgtaagacagaaaaatggaacaaaatgtatatagctgttggcgatacgagccttgtggctcaaattgcataccaaacatgggatggagtaaggctgatggctagaggtaatcacctctaagagaaatgaactggaaatgatttataatctaccctacaaggatataatgctaggttccatttcagagtagtcacagctttccctatggaaggcccaatgggaggttcatattgcaacattacagtttctcccttactccatttttcagaagtattaagtaagcaatctccacaatgtattatatgacctttttacctggtcccactgattagtctttatgcagagaactcactgagaaagtacactggcttcacctttggtttaaataaaaaagacattgttaagaaggaaaaaaaatcaagtcatcttgatcatttgtcactaaatgaaacaagagaaagcaatgagcaaagactgttttcaccataaatgcatttgcttcataaccacttaggtcacttgagtgttttgtgaaggcagcataatcagaatgccacaatactcggatgcatcttcccaaaagagcctctaacccccaaaaccaagaaaggcgagcttcctttaattagaaggctatccaaactcctattccccactccactactaaatgaattttgttt

SEQ ID NO: 234291 - DNA, 595 bp, Homo Sapiens
aaagaacacatatgtgggacctcctgctaagatatactctttctgcagaccaagtacctggaaagctaaatcataacaggatggctatttgataagctttacggcctgaatgtatgacgggcatgaggctaagagggcttattataaacatctccacaaaaggcagagacctacaagggccagagttgttacaccagggcagaggagaagaacacaaccattgctggtcttttacaatctcttctttctttctatacatgtatttttttctaaataataattaatggctgaaatgtattttgtaaattaatacttactcatttcagagactttagcaatcacagaaaagcatttttcaagtataagaaaaaaattctcacaccttgctgtgataataaaaaaaatagaagtatgagaaaaaaaaggaaaagaaaaaacaatcttactatgaaggtttccatccatggagatgtacaggtattaaagagtatcatgatttttattctattaaacagcacactgtaaacatgtctcatgatattaaatactctggagatacatttgttacttggtttttatttaaaaccatgtttta

SEQ ID NO: 234292 - DNA, 650 bp, Homo Sapiens
taggtcacacagaacttgtttgtgatagctgattttttttttttaactacaatatgtaaggaaggaatcaatgctgaagggaaagatggagagaattggcatttcatgcttcataactttgtctcctgttagctgcaatttacacattgctctaagccttcatttttcttttttcttcatcttttatttttccatttaataaatgacagattatttgctccctatttgctataaagtttcagaagataatgagtatgaaacctagcaggcatcaataaacactgtcttatattgtgaccaattttgtctatttcagagaaagtgatgagaggagggaggaagcatcactaagacaaagctgtaatgaagtttgaactcttctgcgcctatgtaccttccatctttaactttctctgtgtctctgggctaagagaacacaaaccttagtctataaaaaataccctccaaattatttcacataggtatccttccttgaaaacacaggaaggaagaggaagaaacaggctcagttaggcttttttggggccttctgcctgattttcattaaactcacaacccaatttcatttggctccagagttcctttttaaaagcttctgggaaatgaatctactttctaggcggtttcag

SEQ ID NO: 234293 - DNA, 578 bp, Homo Sapiens
  misc_feature (25)..(25): n is a, c, g, or t
caaggaggctgattttttttttctntgagcaacatcattccccccattttcaaccaccatccctccctggtactaaagggaatgctgcaaggaggaaaagaagggagaagggaagcagaggtggtggagaaggatctgaaatgctacttcctgcacgcttttttttttcttggaggtggaaggagtggaggatgatgatgaaaattcaagcagcatgtactagacggcagagcagcatgagctacatccacactgtgcaaagtccttaatgtgcacacctagaggagcaagggccctgttctcagttaacagttgtcaagagacaaagacaggttgtcctgctgggttaactggcaaggaaagttttagggactatgatggctctctattctccacataatgcagactgtaaacagactaaatcagggctgccttctcttccaatagaaagtagcaacgatagttaggcatggtggttcacacctgtaaccctagcacttcgggagtctgaggagggcggatcacttgtcaggagtccaagaccaacctggccaatagggtcaaaccctgtctctact

SEQ ID NO: 234294 - DNA, 568 bp, Homo Sapiens
cagggaaaaacagagattggcacaatctttgtaaatatctggcagtctttattgaaagcctgaacaatgttcatacctttggctgtggtcatttcgctcttagaaatatagcctaaagtacaattgcaaccaagatgaatgtgccagagacgttcagcacaggggtattgcagcatcaaactggaaataaactgaatatcaaaagggaacaattaaatcaagcgtagcttgaagaagctacatgtctaaggtgtatatgaaacataagtgaatttcttgtcagatcctcaaattatcttattatatatttatgagtattccaaaatccaaaaaagaaaaatccgaaatccaaaacacttttggtccccagcattttggataagggattctttccctgtaatagacacatagacggactgggaaaaagtaaaccaaaatgttaataacaagagttacttctggaaagtaggcctgcaggtgatttttattatctactctatttactgatgtattttccaaaatttctgtaatgaaaattatttttagaaccaggtaaaatcccccggcc

SEQ ID NO: 234295 - DNA, 648 bp, Homo Sapiens
ttttgagatggagtctccctctgttgcccaggctggagtgcagtggcgtgatcttggctcactgaaacctccgcctcccgggttcaagtgattctcctgcctcagcctctcgagtagctgggactacaggcacgcgccaccatgccttgttaatttttgtatttttagtagagatggggtttcgccatgttggccaggctggtcttgaactcctgacctcaaatgatccacccgcctcagcttcccaacgtgctgatattacaagcatgtgccgctgcgcctgggccatttttttcaatgtgagcacagttattaattttgtgcttcactgaggtatttttaaatattttaacatatggacaacagagttgagaatctcaaattcactaaatttgaaaataacatttaaaatatcccaaattattcaactcactgcccattctaaaacaaatttactaaaaaattaaataactcataaaaaagtatgacttcatatttccaatgtggttacattcctactcttttattaatcaaattgatttagcatctagaagaaaaagtactatgcatactggtggacccttataaaaccccaagaattcttcagctaaaataacattcatggttcaagaaagaaagaatccccta

SEQ ID NO: 234296 - DNA, 563 bp, Homo Sapiens
  misc_feature (154)..(154): n is a, c, g, or t
actttgattagcaggaaaaagcaagccaagtggctcgtccatgctatagtgacttctatggagccaccacacttaaatgctgccacaaagctttggtaacattgaagaggtccctttctgtatggcacttgtttggctctcacacaagtggganacattcaatttgttgaaaatagtctgcttcgtatccagctgctaaaagcatgttcatttaaaattcaaggaatgctttattctagactttttgtttttacatttctgaggttcacatctcatgtcatgatacagataagagaacaggggaaggaaaatcagcctgagaaatggaaatatagaagttcctttatttcctttcagcttacattgaggtctaaaacataacttttttttttccactcctgaattcaagactactttaataaaatatatggtcagcctaagagaaaattcagtgcccagcataagcaaataattagaaatagctttgtagggagttagaaagagaaagtggggaagaataaaaaaacctcccctccaagtagcagatttcttttacctgaatt

SEQ ID NO: 234297 - DNA, 520 bp, Homo Sapiens
  misc_feature (23)..(23): n is a, c, g, or t
  misc_feature (53)..(53): n is a, c, g, or t
ttttttttttttttttttcctanatgagatgggttcttcccatgctggccagnctgttcttgaattccttggctcagatgatcctcccaactcggcctcccaaagtactgggattacaggcgtgagccactgcacgtggccaaagcttactgatttttaagcatgctttttttcttccaatggagtcttgccaaaggtctattcaccagtgcaggactggtgaatagaggcctggccttgttcatcaaatagagccatccacttcccaggccaattttccttggggaaatatcctattatactgccaaaaagatacactgtaaactttcctcttagctttccccaaagggatctacagtcacttagcagggtaactatgcaacagagaaaatgtacccaggcttctcaaggatactagactttggtccagaattgactcattttggggaccccaaacgccactgtgatccaccaggctaggtgataatcagttttgactcaggtcagctcacagtggtgc

SEQ ID NO: 234298 - DNA, 455 bp, Homo Sapiens
cttccccttcccctcccttatcagtttcacttaatttcccgtccttcctgtaggaaccctctcatcccagctgtacatggtcagcattcaaagccttcttcaaatccttcctatgcctcaaagtcaagttttcccacagtcttccctggcactctcctccacaccccagagccccacagtgtccaggcttcctcagtctactctcagaggctgactgcctgttctgcaaggctagaccagcagcccttgaggagacatttcaaaatctgtgtgcctgggtcctgcctcccctcccaacccagggagtctgatacctgagatctaggaagaggcatctctggatacgttttgctggaggttttttttgtgtgtaaaagttatatttttactgaaaaagcaatacatgtatgttggtttaaaaaaattcaaacttggttaaaaaaaaaaaaaaaaaa

SEQ ID NO: 234299 - DNA, 642 bp, Homo Sapiens
aaagagggggttagagagagcaagacagcacttgagtgcactggcaggaagcagagataagacttgaatttcagtttggtagaccaccttctttagcagcccaacctgtagcaaatctagtttagcctgcatggcagggagagggattctcttcccaccctcaccatttgcaagtggcaggagctgagaatgccagtacgagagtgtagccaaagtgagaggctgagagcaaaggagacatttttttcagttttgagtcgagtatccagacagaggcaaatcattttgtttaactttttattaaagtgtaactatagaaacacatcaatgatttttcacaagtggagcacgtgcatacaatcggcaccccagaagccccccgtcagattcccttccagttaactacctctccaagggaaaccactatcctgagttctaagcgcatagattagttctgtctggtttggggagatatataaatggaattatgcattcttcgtatctggtttcttttcaccaatattatgtttgtgagatttttgttgcatgtatttgtacatggattttcattctcatggttgtataatatttcattgtgtgaataaaccacatactgtttatctgaaaaaaaaaaaaaaaaaa

SEQ ID NO: 234300 - DNA, 686 bp, Homo Sapiens
aggatggatggggcccctctgtgaccaacggaccaatgacccttgccttggaaataaatgcgtacatggcacctgcttgcccatcaatgcgttctcctacagctgtaagtgcttggagggccatggaggtgtcctctgtgatgaagaggaggatctgtttaacccatgccaggcgatcaagtgcaagcatgggaagtgcaggctttcaggtctggggcagccctactgtgaatgcagcagtggatacacgggggacagctgtgatcgagaaatctcttgtcgaggggaaaggataagagattattaccaaaagcagcagggctatgctgcttgccaaacaaccaagaaggtgtcccgattagagtgcagaggtgggtgtgcaggagggcagtgctgtggaccgctgaggagcaagcggcggaaatactctttcgaatgcactgacggctcctcctttgtggacgaggttgagaaagtggtgaagtgcggctgtacgaggtgtgtgtcctaaacacactcccggcagctctgtctttggaaaaggttgtatacttcttgaccatgtgggactaatgaatgcttcatagtggaaatatttgaaatatattgtaaaatacagaacagacttatttttattatgagaataaagactttttttctgcatttggaaaaaaaaaaaaaaaaaa

SEQ ID NO: 234301 - DNA, 713 bp, Homo Sapiens
tggtcctgtctgatgcatcttgatgcaagcttcaaatctgatttgtatcaccgaggaaaccttgcccccatcactcagcattgcacttagatacagaatgagttagataaacttggcttgtctagagacccatgtcatcttaacctaaagggaaatcttattgcgttatcataaaattgatgatatcttagggtcagaattgcccttttttttttttattttgaatgggaagttctcactaaaacaatcctgagatttcttaatttcatggttctttaaatattataaacacagagtcaacatagaatgaaattgtatttgttaaaatacacacattggaggacaagagcagatgactacttttcgaagtaatgctgctccttcctaaaagtctgttttcaatcctggtaatattaggggcactgcggcacctaagaagccttaaatgagagctaatccaatctagagagcgatggtgtcagcatttcggtctgcatatctgtgtgtccgtatctgcgtttgtgtgcgtgtacgtgtgcccctgtgtgtgggcccagttttcaggcatgtagaataagcatggagtcatattgaggaggactcacttcttgaagatatgcttgttgctttacaacatatgtaagctattctttagcataaatgcattcattctttaataaaaatatgtttgcattaaaaaaaaaaaaaaaaaa

SEQ ID NO: 234302 - DNA, 653 bp, Homo Sapiens
agacaatttcacaggaaagcaagaaattagtctattgtgaaatgttttacaaactaacttggaatatactgcaaatcactagtaagtagagacacatttaagataaaatgattaataaaacaattggtaattctgaataaggatctgaataaatccagatcacagactgttcctttaccaatatgtaaaagaatgtgcaaaattagtaaaaatatacccaaaaatttaccagcaacagagaagcaaagaatggagttcaaccttacactataaacatctaatagatatgtatgaaaatttaaaaactagaaaaggttgggcatggtggctcatgcttgtgatcccaggactttaggaggccaaggtgggaggattgtttgagcccaggagttcaagaccagcttgagcaatatagtgagaccctgtctctacaaaaacaaacaaacaaacaaacaaataaataaataaataaaattagctgggaatggtgatgcacacctggagtcctagctactcagaaggctgaggcaggacgatcacttgacctcagaagtctgaggttacagtgagctatgatcataccagtgcactccagtctgggtgacagaacaagaccctgtctccaaaaattaaataaataaaacaaaaaaaaa

SEQ ID NO: 234303 - DNA, 733 bp, Homo Sapiens
ccatatatgtgagcatttctctgagtgtattaccagacggatagcacatttatatgtcagacatcttaacatctgtgttatctgtagcaggtgtgtagctcagcagatacgtgtcattgtgtatatagctgagtgtgtgagggtgtctgtgtttctgcagtcccctgtgtttgagagatgacttaataaccctgtgttttgagaggtcgctctaaaccagtgacttttccctcccctgctttattcctttccctcactgacactggcttctcccgctagagtaaatggctttagcacagcactgtcttctggggagcctgctgtcctgcaggcaagtccattaaactctttcttgctttaggactctgaaaacagcaagaaacaaacaaacaaaggtcaagctctaagaaaattactgctcaaacttcactaccctggaagccttactagatatttcttaaggtaacttaaaaattgggctttatttttaaaaagtgataggttacttacagtagcacagaaatgttagcatatttatttaaatagtcctgcagcagagaccctgcgattgtaaagtgatttaagtatttctgggtagtgtttgtgatttacggatttgttactgaaaaacaaaaaaatcactactgtgaatttactactatgtaaccttgtggtcgtatttcattataaataaaataagaatgctcttctgcccaaaaaaaaaaaaaaaaaa

SEQ ID NO: 234304 - DNA, 668 bp, Homo Sapiens
  misc_feature (35)..(35): n is a, c, g, or t
ctataggcatgcaacaacacgcctggctaaatttntgttgtagagatgggtctcactatgttgcccaaattggtctcaaactcctgggctcaagcgattctccctcctcagccttccaaagtgctgggattacaggcctgagccatgcgcacagcattttgttttgttttgtttttgagatggggtctctcggtgttgcccaggctggattgcttattcacagatgcagttacagtgccctatagcctcgaactcctgggcctaagtgatcctcttgcttcaatcccctgagaagctgggactacaggcatggaccaccacccctgattgatcttctttagtttctataacaaaatagtacactgtttccacaaacttgggaaggctagtatttgggggtggggggcgtggaaatcactaaacaacaaagaaaatctgatgaattggacagcataaaaatattggcataaagatgaacataacataagcaggaatatttaaagcacatactttttatagagtgtctcccctgtaatgtctctggttaaatgaaagggtttcaaatgtgaagacaaccctaaccatactcattatctgtaaaagatgtagcattgtcatggactccttaataaacgtgaagactttaatccaaaaaaaaaaaaaaaaaa

SEQ ID NO: 234305 - DNA, 727 bp, Homo Sapiens
  misc_feature (169)..(169): n is a, c, g, or t
attcgggacgaggtttttttttttttgatacagagactcactctgtcacccaggctggagtgcaatggtgtgatctttgctcactgcaacctccgccggggctcaagtgattctcctgcctcagcctcctgagtagctgggattacaggcacacaccgccacgcccagntaatttttttgcatttttagtacagtcggggtttcaccgtgttggccaggctggtcttgaactcctgacctcaggtgatccacctgcctcagcctcccaaagtgctgggattacaggcgttagccaccgcacccagcaaaatttttcaaatatactttattgaggttgaatttacatacaataaatgcattcattttatgtatataaattgatgagtttgacaaatgaacatacccccttcaccaccatgtcaatcaaagtaaagaatattttcatcacctggaaatctcccctctcccagcccaggcaacatgatgtactcttttacagttctgcctgttctagaatttcatataaatggggtggaagcacatggtacatattctcttgtgaacggcattttggctttcttcactcagcatggtttttttgtttttggtgagacagagtctcgctcttgaacccaggtggcagaggttgtagtaagctgagatcaaaccattgcactccagcctgggtgacagagtgagtctctgtatcaaaaaaaaaaaaaaaaaa

SEQ ID NO: 234306 - DNA, 721 bp, Homo Sapiens
  misc_feature (48)..(48): n is a, c, g, or t
tcataactacagagtagtttgatatttcagggagaaataatatatgtntgtttcccactgctttcacaacaaccctatgttgtaattagcactgttccactggcacctaaagacacggaggctctgggagatttctggccctaggccacgaaggcccacttgggactcaagctgaggtcctgtgattccatttgggagcaggaggagggatttgcaggtgatcttcctgggcctcctgagagcagctcaggtgcccaagatggactcaggcaggcagctctgctgtatgtgaagcccagtgaggggcagtgggggggccatgctgcaggtacaagttaatctccctgtatcgcctctgcccacttacccttactcctttttctacccagataaggagggttcctgcccccaggtgaacattaactttccccagctcggcctctgtcgggaccagtgccaggtggacagccagtgtcctggccagatgaaatgctgccgcaatggctgtgggaaggtgtcctgtgtcactcccaatttctgagctccagccaccaccaggctgagcagtgaggagagaaagtttctgcctggccctgcatctggttccagcccacctgccctcccctttttcgggactctgtattccctcttgggctgaccacagcttctccctttcccaaccaataaagtaaccactttcagcaaaaaaaaaaaaaaaaaa

SEQ ID NO: 234307 - DNA, 700 bp, Homo Sapiens
gatcagataaatatagaaaagtaaaatggaaaatgatactcaatacctagttaaactcatttcacttctcctgggagacgtattaagactggaagtcctattttatttaatcagtatcagtaaaaagacaaaaattacagtgtgaacaagagaaaaacaggaatagaagaaaaaagttgcaggttgaattatctatctggatattactagagttgtaaaacacaacttggaaactggaatttatgtgaagaaccaaacaacttaaaccagcatcacttttgtcttcaatttgccttccagtgattttagtttacaacctgcgttttgttatttgaaacacacacacttatatataaacacatgtaattttactattttattgtctttcctttaatcgatgaattgattaaatttagacaattaaaacatttctaaagtgagactgaaaataatatagaaaatctcattgctacttgtgattatcaaaaaaagtatgtattttctttctaaagttatctataaatatgtttttgatatgttggacatgaattaccctgtcatgaagcgtttaaattgttaaaatgctgattttcttattagtttgttaattgcctgttactagtacttgaccaatacattgtgctatatgtaaatgtgtaaataaatattgtaattttctcacaaaaaaaaaaaaaaaaaa

SEQ ID NO: 234308 - DNA, 747 bp, Homo Sapiens
gaaaccggagtggggccgtgtggtgagaacagtgagcttggaaaggaccagtatgcttggactgaagggttctcacagtgggagccagggctgtcttcgtattcccattagaccaagcttatccaacccgaggcccgcatgcggcccaggatggctttgaatgcggcccaacgcaaattcgcaaactttcttaaaacattatgagtttctttttgctattttttttttttttttagctcatcggctatcgttagtgctagtggattttacatgtggcccaacacaattcttcttccaacgtggcccagagaagccaaaagattggatacgcatcagacagatggaaaagggagattcagactgtttttcagggaggtggctgggtttacacgctaatcccgattcaccctgtccaaactgcctaagccctccgccattctcaagccctgcagtcacagctacacagatcacagcttcagccaggagctgggcagaaggccaagaggctgttcccaccaggctgctcagggctggtcttttaggacccttcccttgagccctctatggtgtggcaaagccttcattgccttaactggagccccatcagctccagctgctctgtcttctttgcccacaatgctttgcccctgagacaaatggaggcctgtcctgacctgtctcaccatgtacatagcttgataaagggccaataaatatgatgttatggtgaaaaaaaaaaaaaaaaaa

SEQ ID NO: 234309 - DNA, 693 bp, Homo Sapiens
cgcaccgcgctgggcgcctcggagatcatgcatgccccgcggtccagggacaggttcacagcgccgtccttcatccagagggatcgcttcagccgcttccagcccacctacccctatgtgcagcacgagattgatcttcctcccaccatctccctgtccgacggtgaagagccacctccttaccaggggccctgcaccctgcagctccgggaccctgaacagcagatggaactcaaccgagagtccgtgagggccccacccaaccgaaccatatttgacagtgatttaatagacattgctatgtatagcgggggtccatgcccacccagcagcaactcgggcatcagtgcaagcacctgcagcagtaacgggaggatggaggggccaccccccacatacagcgaggtgatgggccaccacccaggcgcctctttcctccatcaccagcgcagcaacgcacacaggggcagcagactgcagtttcagcagaacaatgcagagagcacaatagtacccatcaaaggcaaagataggaagcctgggaacctggtctgattccttccaacgtgcacttcagctggagaaagaaaccaagaagggaagcggccgctgggcccctcctgcgcacagtgttgttcagtttcacatggtacaaataagtaaaaccaaatgagcaaaaaaaaaaaaaaaaaa

SEQ ID NO: 234310 - DNA, 636 bp, Homo Sapiens
gaaaaagggctgttggaaagcagcaaggataaggtgcacagtcttgcagagcatgtcaacaaaatttattggatgaagaaattaaaatggttaaatagaagaagttctcaacctcactaatgatcagataagtgcagattgtaaaagtcctcatccccaccaacacaaaccagcagaaattttatgtgaatgtgaagtttggataatatccagtattgtcgcaggtgtgagaaaccgtattttcaaatattgagagggtaaattagaggaaagccattttagagggcaatgtggtgttacctgtcagcattttgaatataattaccctttgccacaattctacacctagtcagttatgttctcaaaaagcacaagtgcagaaatatagatgcataagcaaatgtgttgcagaattgtgaaaaatttggaaaaaatgtttagtgctattaaagttatgggttacttaagttacagaaaatcagtttagtagatcactgtgtagttacggaaaatgagatggatctctactcaaagatgtcttgcagtttatgaactgagatgtaacttcatgactaacatgatgacatcgttattaactacataaactttataaagcttaaaaaaaaaaaaaaaaaa

SEQ ID NO: 234311 - DNA, 706 bp, Homo Sapiens
  misc_feature (124)..(124): n is a, c, g, or t
  misc_feature (296)..(296): n is a, c, g, or t
gtgctctccattcattctctcaacatctattgacagttgctatatccaaagtacggggagtgcaacaataaacaagacctggccccatggggcttccagtcctctgaaagagactgtgatagcncaggaaatacacatccagtcacagaatggcaagtcacctgcccaacagaaatgcgggcataggtacggactcatttgagaacctttccctagagctgctgttgtaggtccaatttaatatttgtttgagaggtgattctcaaacatctgacccccacaccacccccagcctntgggctgtgagctccccaagccctgggatgtcttcgtttgcctccgaggcaaacctatatccttagggcctgtgtccacagtccattccatactaatgactatttgtagactaagcgatgaatgaggtgggctgttcttcctgtcttcctgtgactgccccccagtcgttctcacacatgctggaaatgcaggggcacctctgactcttcccagccctccatcctgagctggtcacaagctcatgttgactctatctccaaatccatcaatgtctctctgtttcttgcaccatatctgacatagtacaagtaactttcatcctgccctggaacactcctttagcactccctgtcccttctccatacagctttcagagtgacatattttaattaaaaaaaaaaaaaaaaaa

SEQ ID NO: 234312 - DNA, 757 bp, Homo Sapiens
gatgatgtaatcaattatttacttacttgtctggatgttgctcctcatctgtaagatgtaaatgtggatatggcttggattactaagtggtttatttcttaattcacctgacatttgttgtgtgcctgctgcaagtcaaatacatggcatggtattgtttccttgttcacaccacagcaaatgagaaaatgagacattatagccaggtgtggcggcacaggcttgtggtcctagctactcggaaggctgaggcaggagaattgctccagcccaggagtttgaggttacagtaaggtatgatatcaccattgcatttcaacctgggcaacagaccctgtctctgaaaaaagggaaaaagaccttgtgagctgtctacgtgtactctatgtctcaggagactcatatcctgtaatttttctaaatggcgtctccatgtggtctttcatgaatgtttgtctggtattctctatccttttactttcaacttttctttaccttctactgaaattatgtcttttgtaaacagcccatgattatttatttagttatttatttttacccccctgcactatttgtcttgtaattggagtgtctgagtccattatgtttaatgtaattattgacctcattgggtttaagtctgtccattgtcatttgctgccttctaatattatctctttcttgctcaactatttttcttatgttaccttctttagatgaataaaaacctttgcattataaaaaaaaaaaaaaaaaa

SEQ ID NO: 234313 - DNA, 614 bp, Homo Sapiens
ctctcccagtgaaaaaatgggttcagggtcttgtccttagctactagctctagaaaagtcccaaaagcagcagaaggtgaagcaggaagcacttggttttctccttcctgatatagtcacctgttggaagtgttaaaatttcctcgacaggccttaaatttactactacattagggtaccacattttaacttaccatgactttgctccttcctttcctgagaaaatatttccactggattttttccaccagtccccttacagccctcattgttttaggaatctctctcaggtttttttctgacctaaaccagcaggaagtcgtcctgggctgtaagcaccatcacttgctttttttttttttctgatttcacaagtgtggtgttttcccaaggctcccttcccaagctcagtgcaaacctctcactcccaagtttctttgaggccacttgcccccaagcacttcacaatagaccctcgagggcttgtgtccatttggccttttacaagtgtaatgccaatttcattgatttttgtttcttttggcctgatttgtatctctggaatgcatttattcttgaaatatttgtgtgattttaaaaaaaaaaaaaaaaaa

SEQ ID NO: 234314 - DNA, 632 bp, Homo Sapiens
cattctcagtgatgttttttgcttgtagtatttttagttgacattgttttctgttcagcagtttccttttagcttacgtatttcctgatgagaaatctgcagtcattcaaattgttgtttccctgtatgtagtgtgtcatttttctgtcagatttcaaggtatttttctttatctttagtttttagccatttcattatgttggggatgagtttccttgttttattccctttggaatttgctccaattcataaatttgcagttttatgtcttttaccaaacttagaggttttcagcctaatttctaaaaatactttttattagcctgattttcatctttataggaaatagtttaagtgatgacaagttccaatagcttatatgcccagaaggccttcaaaataagaattttgaaagaatacagaaaacaaacttttatatccttctcatgtcttctactgtaaaattcatatgctttgctactctaaacctagtttgaaatcaacagtcttgagaatagatgaaaattttgatgaatagtggaattcttttaaatggaaacctcttacacgtgattttccttgccatctagaaataaaccatagtatttatgttgaaaaaaaaaaaaaaaaaa

SEQ ID NO: 234315 - DNA, 629 bp, Homo Sapiens
aggcaggacccccaggactgtcagctccccttcccacagagcacccacctggaggtgtcacctgccggcaagcgtgggccattcatccacctgtcagtcaacaacacccgctgagcatcggcttgtatcaaaaggtccagacctaaggggaaattttatctctttctttctttctttcttttttttttgacacagagttttgctcttgttgcccaggctggagtgcaatgacacgatctcggttcactgcaacctctgcctcctgggttcaagcgattctcctgcctcagcctcccgagtagctgggattacaggcgcccgccatcacgcccgggtaatttttttgtattgttggtagagacggtgattcactatgttggccaggctagtcacgaactcctgacctcgtgatccgcccacctcggcctcccaaagtgctgggattacaggtgtgagccaccgtgcccggcctctttttatttattcctaaaatattaccttgaggccaaattctgcgcttaaggagaatgtgcaccaagtgctggggtgggggctggttataaacgaggccacaaatcatgcttgttaataaattgtgtggttcaaatctgaaaaaaaaaaaaaaaaaa

SEQ ID NO: 234316 - DNA, 578 bp, Homo Sapiens
  misc_feature (11)..(11): n is a, c, g, or t
  misc_feature (43)..(43): n is a, c, g, or t
gagtgctgctntgagcaaggtgcaagctaggttcagagagggnagggcacgagagccgtatttatctcaccctggagctgcttaaatctgcaaagcaagacacaagaaaatcatgacgttacatgtctatacaagatttagaaagctccagacgagactagtagagctgtcactgtccttcggcaggtgtgtagcctgtctgtgcttctttccttatcagtaaaacggggacaaaattgtactcacctcatgaactcttactgaggtctgatgagatagtgcatataaagtgctcatgccaacacccaggacgttgtacgcactcaacacatattcacagccattactgttgtcatcattgtggccatgagtactgtgcccgttgccataggaagcacattggttgaagttcctgtaggagtttagaagtgagcacttctggagttgggcgtggtggctcatgtctgtaatcccggcatattgggagactgaggtgggggatcacgtgaactcaggagtttgagaccagtctggcaggatggcgagactctgttgctaccaaaaaaaaaaaaaaaaaa

SEQ ID NO: 234317 - DNA, 701 bp, Homo Sapiens
gggctgacgccctgcattcagcctgtgcctttcctggggtttcttttctgttcttttcggaggagagggcccgagaaggggccataccagggcgcggcgctgggttgccacacttgggaaagcagcccggagctgggtgctggggaaggcggggcgcgtagcctcccgccgccctgcggttgggccggtggaggcccaggcgttgctaggattgcatcagttttcctgtttgcactatttctttttgtaacattggccctgtgtgaagtatttcgaatctcctccttgctctgaaacttcagcgattccattgtgataagcgcacaaacagcactgtctgtcggtaatcggtactactttattaatgattttctgttacactgtatagtagtcctatggcacccccaccccatccctttcgtgccactcccgtccccacccccaccccagtgtgtataagctggcatttcgccagcttgtacgtagcttgccactcagtgaaaataataacattattatgagaaagtggacttaaccgaaatggaaccaactgacattctatcgtgttgtacatagaatgatgaagggttccactgttgttgtatgtcttaaatttatttaaaactttttttaatccagatgtagactatattctaaaaaataaaaaagcaaatgtgtcaactaaaaaaaaaaaaaaaaaa

SEQ ID NO: 234318 - DNA, 715 bp, Homo Sapiens
attagtgataatatacaatgaatgtgatgtgctcccagagaagccaggtgaaggccaggggaaattcagaggaccatctctggctgggacatcagggcaggcttcttggagcaggaggtccctcaagactggagaggacactttcaggaagtcaaccaagactgaggatgtgactgacattcctggaaaatatcaaggtggaatttagtatcttccagtgttcttacatggaatcatttgttcatttctcctgtggagattaaaaaactacaaacctcacattctttaccataaaaatctcccatttttaaaattcttatatttagtcctagatttctgtgagtcttcctcatttgcccctggctatcatcatcctacataaaatcagggatggttggcatcctaactggcagctactaggaaaaggaaactgagagaagataggattctaaagctgccactgcctggaaaatcttgttagataatgatacaagttaggagcattgataacaacacgtttttcacttactgaggtctaagttttgggtcatccaattgtcatcctactctttaccttgtcaccacaaaaatgttcttgctgggtgagtcggaatgtattaattacctatcaaacaattgaatattatatcaataaattatgtaaatattaatattttaataaatagcaatacaaattaaaaaaaaaaaaaaaaaa

SEQ ID NO: 234319 - DNA, 535 bp, Homo Sapiens
gcacgaggttttttgttgcttgtgctttcagtcatatttgtgaaaactttgcttatcccacattacaaagatttactatttctaagtgatttataattttaccacctacctttaggtctctgatccattttgagttaatttttatgtgcgaggagggagtctaacttgattcttttacatgtggatatttagttgtcccaggaccatttgttgaattaagtgcccagaacaagtacatctatatatagagaaagtagattagtggttgtcagagactgtaagaagtggggaattggagagtgactgcccataggtacaggcatgctttttggcattatgaaaatattctggaattaggtagtggtgatggttgcagaacttttggaatatggtaaaagacactgaaatatatgcttaaaaatggtgatttttgtgatatatgaattatactatagaactaataataacagtaataaagcaaggtgtctttccacatctccatgccttgtattttcattaaaaaaaaaaaaaaaaa

SEQ ID NO: 234320 - DNA, 637 bp, Homo Sapiens
gaagggggacaaaggcattcctggagacaaaggagcaaagggagaaagtggcttccagatgttcttctctgaggcagcaggttgaggccttacagggacaagtacagcacctccaggctgctttctctcagtataagaaagttgagctcttcccaaatggccaaagtgtcggggagaagattttcaagacagcaggctttgtaaaaccatttacggaggcacagctgctgtgcacacaggctggtggacagttggcctctccacgctctgccgctgagaatgccgccttgcaacagctggtcgtagctaagaacgaggctgctttcctgagcatgactgattccaagacagagggcaagttcacctaccccacaggagagtccctggtctattccaactgggccccaggggagcccaacgatgatggcgggtcagaggactgtgtggagatcttcaccaatggcaagtggaatgacagggcttgtggagaaaagcgtcttgtggtctgcgagttctgagccaactggggtgggtggggcagtgcttggcccaggagtttggccagaagtcaaggcttagaccctcatgctgccaatatcctaataaaaaggtgaccatcaaaaaaaaaaaaaaaaaa

SEQ ID NO: 234321 - DNA, 614 bp, Homo Sapiens
tgttttcttgtggcatcagaactagcacctttgaaaagtaaaatgatctatacaagctccaaggatgcaatcaaaaagaatttcaaggcataaaacatgaatggcaaacaaacggaccagaagatctcaatcgggcttgtactgctgaaaagttaggtggatcctttttttttttttttgagatggagtcttgatctgtcgcccaggctggagtgcagtgacaggatctcggctcactgcaacctctgcctcccgggttcaagtgattttcctgcccagcctcctgagtagctgggattataggcgtgcgccaccacacctggctaatttttgtattcttagtagagtcagggtttcaccatattggtcaggctggtctcgaactcctgacctcgtgatttgccctccttggcctcccaaagtgctgggattacaggcgtgagccagcatgcctggccagtggatccttaattgtagcctttgaaggatgccctgtgtagatcatcattcagtgccacaaattgaaagcttccacgtttaatgttatcctcttgctatataaataaagcaaatatatttaggccagggtctcactgaaaaaaaaaaaaaaaaaa

SEQ ID NO: 234322 - DNA, 529 bp, Homo Sapiens
ccctgacctcctcgggcacctaccgctgtgtggccaccaaccagatgggcagtgcatcctgtgagctgaccctctctgtgaccgaaccctcccaaggccgagtggccggagctctgattggggtgctcctgggcgtgctgttgctgtcagttgctgcgttctgcctggtcaggttccagaaagagagggggaagaagcccaaggagacatatgggggtagtgaccttcggtgagcaggagggctggggggtggcgcaaggagggaggaaagggcttgagttaaaagcgggtgcctgcaaccctcaaactccgacatcattcagtgtgtttaggggcaggaggtgttgttcagccgtggaatttgctggtggcagcagtgtaacctgtgtatttgagggtacaggcaagcggtacagggtggagtggctggtccacaagctgtggcagggaagctgtttgcaggactgccctgcccctcctcatatttaataaagtttacttttctgttccgaaaaaaaaaaaaaaaaaa

SEQ ID NO: 234323 - DNA, 559 bp, Homo Sapiens
cttgtcgcgatatcaacgcgacctccgcctcccaggttcaagtgattgtcctgcctcaccctcctgagtagctgggattacaggtgggcgccaccactcccatctaatttttatatttttagagagatggggttttaccttgttggccaggctggtcttgaactcctgacctctagtgatccacctgcctcagcctcccaaagtgccggtattaaaggcatgagccaccaggcctggcctaaaattttcttgattaattttgatctcatttgtattttgtaaatgacttatctgttgaggcttttgccattgagatgtttgtctttttcttactaatttgtaagaattcttgatgggtttctgttagtcatgtattttgctaataatttccctagtttgtagtttgccacttagtgctatttttgacctaaatgatgtattttaatgtagttgcatgttgacctagtccattatggtttttgtatttggtccacgtggattggaaaacctttgctttgattatattttctttgggcactttaaaaaaaaaaaaaaaaaa

SEQ ID NO: 234324 - DNA, 685 bp, Homo Sapiens
tttttgtatttttagtggagacggggtttcactgtgttggccgggatggtctcaatctcctggcctcatgatccgcccaccttggcctcccgaggtgttgggattgcaggcatgagccactgcccctggacagatctaattttttaatagtgtaagagagatacactgtgcattccatctatgtcctgagttagtaattcaagtaccaaaaagtaatttaatatgaaactccttgaaaattcagagcttacacttgaattcaaaatgcctatttttgattgtttaaaagttacttaaacctgagctttaggacctttaaaatctcagcatgccttttaagctagtacttttcctgttttgagctctagcaaaccttcagcaagccaaggtggtagccctttttcaacacaatcaaaatagagaggtcaccagttgtttactaccttatggtaaaatgcccggatcaagatccatgtatcccccccatattgtgatgatgcaatcaaagcatagtttttttctactttctgaaatattactgatgaaatcactttacatttaagaggagaaaacagactgccttggatttttttttgtcttgagagaaaaaacaaaatatttagtattgcaagcataaacatttggactcaataaatgacaaattatgaaaaaaaaaaaaaaaaaa

SEQ ID NO: 234325 - DNA, 681 bp, Homo Sapiens
gcacagatatattatgtgacttgtccaaggtcacacagctagcaggtggaactgggatttgaacccatgcaatctgacacaagagttcatgtgtctaatcattatctgtggtttgggggacaccattacattaaaatgaatgagtcactaagtgagtcactgtatataaaatacttggaaattgtaaagtaatatacaaaagatattaacaaagtattattcatggtaaacaaatcacatcagtagcaaacacagggtgggaactcaatcttatgttatagcttactcttaagaagaatatgtgaagccaggaacatggttaaaggtacagaccagaaaatttctgacatgtgataaatatttcagtgacttttcagatttatttcttgttagccgctgtgtctatttggtgctacaaaaactgaaagaaacaaaatccctgatgtaagggcttataataaatacacagtttggagatgaactaaggatattttacatttacgggaaaggattggacaatagtatcattttctcaccatttgcatgtacatcatgtctttccaattgttttcattatttttctgaaagagctgcaaaattgtgcagtggttcaacctgaccaaagtggtattatgctgctgggaagtaaaagtattagaccccaaaaaaaaaaaaaaaaaa

SEQ ID NO: 234326 - DNA, 649 bp, Homo Sapiens
  misc_feature (92)..(92): n is a, c, g, or t
gtgcaggcagtgtgggtgcatggcagcgtaactgtggagtggatgggctctgcatgtaaggggtgatgcatgatgggcagatgctggacatntgaggagccgtctttcttggcctgagctatgcctgttgaggcatctggagactgagaaagaatcaaaggcagagaagaccagccgtgctcctgcattccgtcactccatgacttcatctcagtgtcacagacagctgccatcagagggctggcagtagggagttccaggagcggggacttctcgggaaaatcctataacttgctttactttactttgtcccaggttggagtccctaccctcccacctcccacctgatatgcagtgcttttgactatcttatgcatggtttattcctctggcttggatgacaacaatacccatagtcaattttcctatgtaactatagatcaaatgatgcaacaacaggccttgggaggcctcaggtgtgcgagtgcctctgggaggcgcagatgcccacacagccagcactgacttgtgttcgagcacagaacggatataatcagtctggcctctacaacaagttttgcattgtagaattgtatttagctttgccttggatgaaataaaaattatgtttaataaaaaaaaaaaaaaa

SEQ ID NO: 234327 - DNA, 703 bp, Homo Sapiens
atgcccggcctggaattttctagtaagaagaaaaacatacagaatatgtcttcactgttgggtaactctcaaatttgtagcaatccagattttttgtaaaactgtgctaatgggatatttaatgtcagagttattgtctctcacttcaatatctagtactggataatgtttctcctgggagcacgtatttttttttcaagtcctcttttcctggacttaacatgttcttctagaagacaccagaagtcatgaccctaagccccctcccttcaggaccactttctaccatcggttttcaaaaaactatccacatgttaattctgttttatgttctgtgattctgtggtagactcagtgctttcagagtccagagcttgacttgggttagtggccttaatgaagtgctaaatttgctctttaccgcgagactgatcagaagaagcaaaaggggaaagggggctagaggtccactcgcaccttttacatcagacaagaggaggactgtgccagaaatctgtgcatgaaacaccatctgctcttcatgcagggaggggtcaaccgtgtgaacgtgcagagattactcgagccttctttgccaaaaatatgcattcttcccagctgtaagcgtgtgaagcccaaatatgtcttttagcatgaaacaataaaaacatgtttattttcacttaaaaaaaaaaaaaaaaaa

SEQ ID NO: 234328 - DNA, 606 bp, Homo Sapiens
ctagttattctgtcccccaaatcaaaaggcatgacctttataagaggcgctttactgacaatagctgcaattttaactttgaaaatgattcagaattatcaaagatagtagattcgaatgacatgattgtctataatctcgctagccttgtactgtgtgtgcatagcaattacagggaagtaatctagctcctgactattatgttgaactatgtcgctgctttttacaaacttgtcttgatccaaagcagtcacaatgataaccctgcatatctgggaatcataagtcaactatgtatctctgtgtgtgtatatatatgtatgtatgtatctattttcaaactgtgatttaatatttaaatattcctactgccatttttgtgactgaaaaactacacatgaggaaacgtcttagaattttccaatagaggaaaaataacacttgggcaatctgtcatgtttcacaacagttctcatttttctcatgatttgtgtagcgtggaatgtgtttgctcaatgtgaagggttttcattgctcaatttctctgtgtaagtcttttccttaaggtaataaaccatcagcaaagtcaaaaaaaaaaaaaaaaaa

SEQ ID NO: 234329 - DNA, 591 bp, Homo Sapiens
catcattttagttcattgaggttggcagggattgcctaactgatcttccaaagtgagcagtttatttctaaggtataacgtctttgatgcttttagaataagaacagtgtcaaatcatctgtcttctggaaaatcatggattttcatatttctgttaacagaatttctcaggctttccctttttaaaagtattggactctacaaataggttctatatttgggatctcatcctaggagaaaacccaaaactggattcctcttaagacctctgtcaaccctcctgccctttgtggtcttaggtatggtgctataggttgcatgcgtctttatcttgtttgtttggttaatattttgttgttgaggtttttatttttgtttacttcagatacgtaattctgagctatggctgcttttgtagcctttccgagaagcactaacctgaaataagattagataattgtgagggtgtgttactatattaaaatacacacacaactgatctagacatcaagaggaagaaaaatgatggatgatgccacctgcttcaactgtatataataaacacttatgatgacaaaaaaaaaaaaaaaa

SEQ ID NO: 234330 - DNA, 565 bp, Homo Sapiens
ctcctcctctactgaagtcaactggggaagagagagaagcaccactcctccctcacagcacagcaaggccaccactaggagggggtctcaggttggtcctcccaaaccttgtccaaagactggagttattagttggctgactcagccacataatgggcccaagaaatgccagcgtcctagcagttcccttggttctgggtcagctgaaagagcttggctcttttttaggaactttggtgcctgaacattaagagtagatcactgctttattcttgagctgttcaccctccatgaagctctcaagtcctgcatcctgaggatccagatggatgacaaggacacaggactgccattgagaaatgaagatgaactgtgtcacagatgcagtggattactgactgcccttgtaatagtccattttgcatctgttggtaattcattgaggcactcttggttttctatgagtttgtattttttgaattcaagaattgtaacatcactgttagatccctccttatttaatgagagaaataaaatatttgacccgagaaaaaaaaaaaaaaaa

SEQ ID NO: 234331 - DNA, 667 bp, Homo Sapiens
caaagtgactgtgtgtattcttgtctcagtctccttgatagccacttcactctgctactactcaactttctcctaaaaatacttcatctattttcagtcctttctttctgtctactcaaaatggttctattaactttgcagtcatgagcttgttccagttacagtccctttgaagttcagggtgataaacagaatattcttctgtagaggaagagaaaggagtgaaagtttagcccactgagacctagagctttgtgatttcctaaccttgaaactctgtaatccctaaagttaaaatctccgcaagtggcacaacttcagaactaatagtatcactttgatttttctttttcctcccttagaaagtttctctagttctatagtttatttgttgaaggtactatgaccaaagaatcagctgctctacaggaatagcatggttccagtgaattagagaaaacctgctgtaaagccatggtagtgtctaagtggtatgttattatgatgtactagcatttatttacagaattatttattaacgtttacttccttcccctctgtaaatgtccatgactgttgcccagagaaggcttacccctctctagggttgcagttgctttctttgtaataagtattttgccacacctgtaaaaaaaaaaaaaaaaaa

SEQ ID NO: 234332 - DNA, 598 bp, Homo Sapiens
gttctgatgatagagaaatagctaaattagaaaagaaagatatggatagatgcttttaggaggaaaacctttttagaatggcaatgaccacttggatctaggtcaacatattccaaaatgtgtgaccttgggctttgtgtttactgaactcactctagaaaattctggacctgattcattaaccccgcttttcttctctaatgtgtcctgaagctgagctagatgatgagtaaattctttgctgactgttgctcatcactttctctcaaagttagaacttttcagtataaaaataattagcttttaactgattattaattttctttaatagtttctgtcaaaacttgtctaaaatttgtgttgtgccaaattggaaatacccactataatatggtgcattcagtttactccacaagtggttaacattttaagtcctagatttttgatgtcttgcctttgtataagcatcgctttggggaataccaagatgattcattattcagtgattattttcttgaaagataactatgatgattggctgtaaaatcttcaccctaataaaggagtgagatctctgtgtaaaaaaaaaaaaaaaaaa

SEQ ID NO: 234333 - DNA, 680 bp, Homo Sapiens
cacagcaacagaggcacagcttcaagggggaggagtgtccagcaggatctcatagatcagaacatactggagcctgtaacccgtgcacagagagtgtggattacaccaacgcttccaacaatgaaccttcttgcttcccatgtacagtttgtaaatcagatcaaaaacataaaagttcctgcaccatgaccagagacacagtgtgtcagtgtaaagaaggcaccttccggaatgaaaactccccagagatgtgccggaagtgtagcaggtgccctagtggggaagtccaagtcagtaattgtacgtcctgggatgatatccagtgtgttgaagaatttggtgccaatgccactgtggaaaccccagctgctgaagagacaatgaacaccagcccggggactcctgccccagctgctgaagagacaatgaacaccagcccagggactcctgccccagctgctgaagagacaatgaccaccagcccggggactcctgccccagctgctgaagagacaatgaccaccagcccggggactcctgccccagctgctgaagagacaatgaccaccagcccggggactcctgcctcttctcattacctctcatgcaccatcgtagggatcatagttctaattgtgcttctgattgtgtttgtttgaaagacaaaaaaaaaaaaaaaa

SEQ ID NO: 234334 - DNA, 563 bp, Homo Sapiens
gctaccttattaaggggcatggatcagcttcctgaaaggagggcctgcctctgtaagatatgggaagtcgctgagaatgttacagaacggccctagagatggggcagataacggcccccatttgtgagaagtgagttgggaggcatgtttggggcctctgatgtttgggaggctgtgggtaattaacatgagttttggggtccagcagcagaattcaggtttcctcttccactcagtaacctcagcatccgtatctgtaatgggaatgatacaaaacctatccccaagttgagggaaaaatgagattgtgtaaagcgcacttggcacatgacagtcacaagcatggggacagtgagtccagaaggattttcttatgccagcattgtaagccctaggatcacagggctctggcttgtttaaccatcgtgtctctggtccctagcctgcaaacctggtgtgtagggatgcctcagtcgcttacatgttgattgagtgaatcgtcggtttctttctggacactgacttcaaaaataaaataggatttgaaaaaaaaaaaaaaaaaa

SEQ ID NO: 234335 - DNA, 633 bp, Homo Sapiens
cagttgtcgcttatgtactgttgtcacctttcagttacatgcctttgatcctaaaattctctacttttgttgccttatcagttctttgcaatctgcctgtggttatcagcacttaaagcacaattttgaaggggaaaaaaatgataatcaccttagtcccaaagaaataatttctgtcaaactgccttattagtattaaaaacagacacactgaatgaagtagcatgatacgcatatatcctactcagtatcattggccttttatcaaatggggaaactatacttttgtattacatagttttagaaatcgaaagttagagactctttataagtaatgtcaaggaacagtaatttaaaaacaaagttctaacaaatatattgtttgcttaatcacaatgccctcaacttgtatttgaataactaaataggacatgtcttccttggagctgtgggcattagttcagaagctctacctgcatcttaattttcaaaacttaagttttattagcaaatcctcttctctgtaagacttagctatgaagtggttattttttccaaatatttttctgaaaacatttgttgttgtaactgcacaataaaagtccagttgcaattaaaaaaaaaaaaaaaaaa

SEQ ID NO: 234336 - DNA, 706 bp, Homo Sapiens
gcagcagctgtatgacacactttacctccattaccaccctgggcatctgaatgttggagatgggtggtgtcaccggccggtgggggtggggagggattttttccaaactgatggccatttcacccggatgtcggtggatgccccgcactagtgtgcggaagaagtcaccctgtgctcccccacgcaggtgctggacgtcattgctcctccttatacctctgacttcgtgcaacttttcctccccatcctggagaatgacagcatcgcaggtaccatcaaaacggaaggcgagcatgaccctgtgacggagtttatagctcactgcaaatctaacttcatcatggtgaactaatttagagcatcctccagagctgaagcagaacattccagaacccgttgtggaaaaaccctttcaagaagctgttttaagaggctctggcagcgtcttgaaaatgggcaccgctgggaggaggtggatgacttctttacaaaggaaaatggcaggcgctgggctcccacgacccctcaggacagatctggccgtcagccgcgggccgctgggaactccactcggggaactcctttccaagctgacctcagttttctcacaagaacccagttagctgatgttttattgtaattgtcttaatttgctaagaacaagtaataagtaaatttttaaaaagccaaaaaaaaaaaaaaaaaa

SEQ ID NO: 234337 - DNA, 523 bp, Homo Sapiens
gcacgaggcgcccacgaacccccctggcctcactggggtgagcttctcctcctcgtcgtcatcgtcctcctccagctcgcccagcaacgagaacgccacatggtcccctctggggcgtccccagcctccccgtcctctgtctaacctcaccctctaaacgttcagcggtggaaagatttttataattttaaattattactgctttgaaataaacggacgtttgagctcacgtggcggccatgcatggtttgtggcggaagacggggcccagcggctcccccagcgctgaagcacggggttcagcggctcccccagtgctgcaggtgctgccaggacgggccacgtgggcccccagcctccccctcggccgcctccacgacccggagtaggggggctcgggaccatgaggatgaccagcaaaattcaagaacaaaactgctccaacagacttttttaaaggaaaaaatatgtgtatcttgaaagctatttaaaatacactacttacaaaaaaaaaaaaaaaaaa

SEQ ID NO: 234338 - DNA, 624 bp, Homo Sapiens
agcggggacgagcagcccctggagcatgtttgcaggagtgcaagactgcaagcctcctccacggccaccactccaggcctggataaagaattcgtggcatatttcagggaacagaatgtcccctggggcgaaaggggatgaagtcattctacttgtaccaacttgagtgcctcctaaaagtgtaaccttgggggcggggatacagaaggatgatgctgacaatggaatttaaaaacaaacagcaacattttgtggtgtctacaggcgtgggggtggaggagctgcagcgtcaccatgggaacaaaagtctcccacgcatctcaggcccgaggaatctttaaagagggagagtgggcatgggaggaggacttaagctattagtcatattttatttcgaaaactagatcttaagtaactgtagcaaaatgttaacaattcttaccttggaataccggttacatgggattatgttactctattttttcatcatgtgaaatattttatattttgacaattaaaactaaatagtagctttttataaaagtggcatatgcactgaagtataatgtgctaatttgggattcgtttaaataaaacagctttcttagaaaaaaaaaaaaaaaa

SEQ ID NO: 234339 - DNA, 653 bp, Homo Sapiens
tgcatcagagtactcgtgacaggtacctctccgtggagaggggctgtcctctgcccttgcctgctcctcctattgcaacagtcctgtggactagctcaggctctacaggggctggtgtgtgtgtgtgcgtgtatggtgtatatgtgtctacctacacacaatcacatgtgcacacatgcacacacatgcatgcaagcacacgcacacacacacatgcacacacactcacatggacacacacatacacacacatgcacacacatacatgcacacacatgcacatggacacacatacatgcacacacatacatgcaggtgtgcagacttggctccaggcgtgtgtttgatagtattattctatgatatttccctcatctccatagaataccagcttctgaatcctcaatcagcctttactgcaagaagaaaagaaaaacctctctcattccaggtctgtggtgcagatgggaagagtatagtcaaaacccattaaggccttagtcaaatgccagccgaattagaacgcaatgaacgttagacaaaacaacccaactggccaggcgggggaggcgcagagcgtataaatataaagttagatacttataaagaataaagactctaataaaatattttatataaaaaaaaaaaaaaaa

SEQ ID NO: 234340 - DNA, 656 bp, Homo Sapiens
  misc_feature (40)..(40): n is a, c, g, or t
  misc_feature (94)..(94): n is a, c, g, or t
taaaagttcaacttttgtagagttattgttcagagaggtntaatcctatgtggtagtctatataagtgatgtatgagttgagttatgtaaattntgtcattgtagtgtacatggagtgatcattttactaacataaatattttctatgtgtgtttcagtggatgacaatcgagcagcagaagaatggtgtgcctaccctttaatgctgcagtttaagagaacttgtattgtgtcatttcagattgtaggctgagagttgtaaatagtgaaaatttgagtacttctattatttgttttggttagaaagtgaatttaaaaaacaaaccaaactctaaactttctcagattaaaagtcctgagacctgaagattgtaatattcatgtctgtgaagcttttaaacattacacttgagatcagtcatgacttgatattcaggtaaattttcttttccaagaagcttttgaataagcatatttcctccaaaggtctctctctttctctctctttttttgagtgtagattattttaaagcactaattgcattacattggtaactgcaatataaaatagccattattgttttgtgaagcatggttgaaattagctagtggtcccttttgaatttcatgagcctctcaaaaaaaaaaacttaaaa

SEQ ID NO: 234341 - DNA, 504 bp, Homo Sapiens
caacatgaaacagaaaaataccatctcaggctccatattccatgtccctgttgaatacagatccccgaactgagaaataagaaacaactacatacgaagtaatacttgaaaatgtttctcttgtaatacttccatatccaaagcatttgaatatatttattttattgatgtaggtctgccaactcttccttctcaggaaggactgtttttattccaaacatgtatatataaggttaaaatgtattttttaaaataagataattattgatagttgtttttaaaatagccttgcttagcaaaataaatgttggcaaccctaagtttgttctattataatattattgaaattacattgaattctgaaatccatgtcaacttgaagttaccaagttttaaccactgttagaaaataagcaggaatgaaatctgtttcaagcgtttcaatttcaatacaatttaataaacaggctttgagcatctacccccaaaaaaaaaaaaaaaaaa

SEQ ID NO: 234342 - DNA, 653 bp, Homo Sapiens
  misc_feature (84)..(84): n is a, c, g, or t
tccatcagattgtgattttgtgcgctatgaggattgtagctggggtaatttaaaaatgttggtatgtggatagaactgccagcncaggattttgataaagatcaaaatatatactgtatctaaagtttcttttgtaaaagttatttcacttataatcaaaaggtttaaataagtttagtgtatattttatgattagtattattttgtatcgattcagagagaggaaaactgcattcccatagacagggagacttggtgcattaatatccaaagcttagtttaagctggtgatgattagaaaagtggctttcatttgtgttctctggaagattctcagtagtcctgtgggcatgtgaacaagagcatgtgtaatcttcataatgtatgtcttgttagcagaaatgtctgaggcattgctgagatgtaggatgagctgaggtactggttttgtctttcatggttccctattatgttttttgagaaactgagcttttcctgacagtgtttagtttttcttggctatttactatgctattaatagtaacagtttccattatggagcctcagtaggttcttgacatacattaacccattgctattatgtaattttctaataaaatgatgtgataaaacgtaaaaaaaaaaaaaaaaaa

SEQ ID NO: 234343 - DNA, 599 bp, Homo Sapiens
caccggccgagagcaggaagcccaggtggagcagctgctggggatggtcgagggcttggtgctggagcacaagggcgcccattactccaacgaggtgtatgagctggcgcaggtgctgcgctgggcaggccctgaggagcggctccggcgggtggcggagcgcgtggcagccagggtgcagaggaggccatggggcgcctggctgtcggcccggctgtggaagtggctgaagtcccccaggagctggaggctgggcctggccctgctgctggggggcgcgctcctgttctgggtgctgctccacaggcggtggtcggaggccgttgcggaggtcgggcctgactgacagcgcaggtcctaaaactgaaggcaacttggttaagggaggctgaattcttggagctgaagggaaaacttcattccaacggaaggaatcctgtagtttcaggcatagttttaatgacacagaaaactttgctgcatcacctttgcaactttgccaaagctcagagttcactttttaagtttttaactcattttaaatgatgtgtatgcagagttttaaaataaattcgtctaacaataaaaaaaaaaaaaaa

SEQ ID NO: 234344 - DNA, 489 bp, Homo Sapiens
cggtttttttttttttttttgttctaaaccagggttttttaaccttaacaccattgacattttgggctgggaaattctatgttgtgggggcctgtcctgtgcattttaggaggtttaagcagctctggcccctaccagtagtatatgccctttaccccctggggttgtgacaacgaaaaatgtctctagacattgccaaatgctctcttgggggacaaaatagccaccaatcaagaaccactgttctaaaccagcagtctcaaagcatggtctccatggaccactgaggtcctaagaccctttgagggaggagtgtagatgaagtcacaactgttttcataaaaatcaaagttaactgtccattttcaccgtgtcgacatttgtacttacggtgcataggcaaagtggataaaatttgctggggccctagcaggatgcaagggcaccacactgtattcttcactcacagttaaaaaaaaaaaaaaaaaa

SEQ ID NO: 234345 - DNA, 645 bp, Homo Sapiens
  misc_feature (19)..(19): n is a, c, g, or t
aagagtaaaaggagctctnactgataacatgctgcaacaacagatgtgactaggaacggccggtgacatggggagggcctatcaccctattcttgggggctgcttcttcacagtgatcatgaagcctagcagcaaatcccacctccccacacgcacacggccagcctggagcccacagaagggtcctcctgcagccagtggagcttggtccagcctccagtccacccctaccaggcttaaggatagaaacgacacataacaccgggaaaagccatgctgtcaagcatctcagaatctcaaccccagaggcagtctttagggactggggtgggctcaggaagctgtattatttcaaaggacgcagtgtttccacagctcagcccagagctgctggagttcacacggcccaccagaacctgctgacttcaaaatcatcaccaccaaggggccaggaggtggcgctgtggggcaacagaaaacagaaaacagctgctccttgaacttggattcccagcagctcccccaagcgcccacaggggctgcattcctccctgctggacacctgtaactacaacattaaaacagggcgcaagcaaggaacacaaacactgggaaagctgtgcctttaaaaaaaaaaaaaaaaaa

SEQ ID NO: 234346 - DNA, 666 bp, Homo Sapiens
acatcatgaagatagctccagagagcatccccagtcttgaggctctcaatagaaaagtccacaacttccaggccaagcccgcagtgcctacgtctaagctgggccaggcagaggggcgagatgcaggctcagcaccctccggaggggacccggccttcctgggcatggccgtgaacaccctgtgtggcgaggtgccgctctactacatctaggacgcctccggtgagcaggtgtgatcccagggcccctgatcagcagcggaggagcgctcgggccacctgcccgggctgtggaggagcgctcgcgctgaccaggcgctggggcgtccactgaagcggggtcatccaggcaactcgggggaggggaagctcacagaccggtacttcccactcccctgaattctctctgtccatcctcaacattcctttgcttcacagggtcagtggaagccccaacgggaaaggaaacgccccgggcaaagggtcttttgcagcttttgcagacgggcaagaagctgcttctgcccacaccgcagggacaaaccctggagaaatgggagcttggggagaggatgggagtgggcagaggtggcacccaggggcccgggaactcctgccacaacagaataaagcagcctgattgaaaagcaaaaaaaaaaaaaaaaaa

SEQ ID NO: 234347 - DNA, 695 bp, Homo Sapiens
  misc_feature (3)..(3): n is a, c, g, or t
  misc_feature (13)..(13): n is a, c, g, or t
ctntagtagctgngaccactggtgcacattaccacaccttgctaatttttgtattttttatagagatgggtcctcaccattttgcccagtccaggtctctaactcctgaggcaggaggatcacttgagcccaggattttgagattaataatattatttattactattattcaagctttgttaaatcaaacctaaagctcttggaactttaagttattctgagccttgacaggaattggtctctgcagcctgagtcatggggcatgcagctgcaacttccacctatttttttttttttctgtaattacttaggaagaccaaatggcaccagagataagactcccttagatccccacttagatcaccaccctttctcagggggtaataaagtcatcttccttggaatgtagcaatctataaccaatcaaagcactgtaacatatgcactggtcttgtatggaaaatgttgtaatcctgctaaaattcctctctctttgcctgtggaagtgaaaccttaacttctccagtttggaatgctcaccccattcctttggagtcaatgcttactgggtggctattctcaaactttgcactcaaagaaactctatacttagtcttattttctgaatctcattatttaaggttgacataataaacaactaatagtaagtaaagtgcaaaaaaaaaaaaaaaaaa

SEQ ID NO: 234348 - DNA, 701 bp, Homo Sapiens
  misc_feature (28)..(28): n is a, c, g, or t
gcaagcataatttttaagtgtgaagctntgcatcaagaaattattaaaaagctttttttctccagtattttctgtattatcttaatgtttatggcaaataaaatgtaaaggaacatgcaacagccctcatcttccttgattttatggttttattgtttgtaatttattgatttatttttaagctagttataatcatgtaggtataggaaataaagtcatctataatatttctataatatggctataatatggctataaatctataatatggctggaggcagtgggcagtggttcatgcctgtaatcccagcactttgggaggccgaagtgggaggattgcatgagtccaggagtttgagaccagcctgggcaacaaagcgagaccctgtctttacaaaaaaataaaaattagctggcgatggtgtcgtgtgcctgtagtcctagttacttaagaggctgagttgggaggatcagttgaacccagtggttctgggttgcagtgagctgtggtcacaccactgaactccagcctgtgcgactgagtgagaccctgtgtctaaaaaaataaaaatataatgaatgtgatttatgtagataaattgataatatagtaaataggtaaatgccttaaaaagcatttttaaagaatttgtaaattctaaaacaataaaaatttggtatacataaaaaaaaaaaaaaaa

SEQ ID NO: 234349 - DNA, 694 bp, Homo Sapiens
  misc_feature (32)..(32): n is a, c, g, or t
cttttcctgacttttcctttctttagaatttntgatggtctcacctggtgggtggggctttcagggtatgcccacaatgtacatttctcggcatctgtgcctcagtttcctcatttataaaatccctatgatctctgtctcacctactttacagggttgctgtgaagatcgcatactacacacaggaatgctcatcagtttttaaattttatttaatttttatttatttttttttaaatgtaattttttcagagagataaggtcttgctatgttacccagcctagtcttgaactcctggcctcaagtgatcctcctgccttggcctcccatgctgctgggattacaggtgtgaactaccatgcccagccagctcctaagtcttaaggctctgtgttagtgatagatgtggccatggtgtaggcagtgcaatgtcttcgagtgagagtgaaggtggtaactcattgcatggattctagagttctgtttattctaatccaagttcttccacttaaaaacaatgttcttcctctcattgagtctcattcctcatctataggatgggaataagagcatgtacctggcaggttgttgtaaggattaaatggtgtaaaaaaatgtcaagtgcttgcaactttgaataccaaacttgagtgaaagctcaataaattgttacttaaaaaaaaaaaaaaaaaa

SEQ ID NO: 234350 - DNA, 696 bp, Homo Sapiens
  misc_feature (73)..(73): n is a, c, g, or t
tgtggcaggagggcactgggcagaccccagccaagcaggccgtacgcttccgggcctggaatggacagatttntgaagctgggggtcagttccggcccgaggtgtccatggatggctgcaaggtccaagatggccgctggcatcagacactcttcaccttccggacccaagacccccaacagctgcccatcatcagtgtggacaacctccctcctgcctcatcagggaagcagtaccgcctggaagttggacctgcgtgcttcctctgacctctgacctcgtggccactctaggcctcatggaggagggaagaggaagaggcaaggggagggtactgaggggcagatggctccaggagaggcagctcccctgcccaagggtccttgggcagaccccagctgttgtctgcccagtagaagtgggtgggggtaggaggggatagggtgtccttgggaacaatggatcccagcttagccccaaagaccaaccaaagagccagccagagtaagctggacctgcaacctgcctgagccccgtggcctctcagctctgcggccaccccgttccctccccagcttcctgcccaaagagccccacattcaagccaacttgagggaagggggcgtctcgtcagctggtccctgctagggagctattgatgtgcaatattagaaaggagacatgaaaaaaaaaaaa

SEQ ID NO: 234351 - DNA, 607 bp, Homo Sapiens
  misc_feature (193)..(193): n is a, c, g, or t
gcaagaggtgattttcagaaatggggaaattgcagattttgacaagcttaatgtgtatatgtagcaaaatggtttttaagtacttggaaaaggaggtaatcgccaaatagttccatttttttttttttttttgagacagagtttcactcttgttgcccaggctggagtacaatggcgtgatctcagctcactntgcaacctccacttcccaggttcaagcgattctcatgcctcagcctcccgagtagctgggactacaggcacaagtcaccatgcctggctaattttgtatttttagtagagaaggggtttcaccacattggccaggctggtcttgaactcctgacctcaggtaatccgcccatctcggcttcccaaagtgctgagattacaggcatgggccaccacgcccagctagttcctcttttgataaggctgttaacattacaaggtcagagagaggaatggaatcgacagtataaattggttcctgagagggtttcctaacagctttgtaataagaaaaatatggccttgatggtgtagtgcatggacatctaccccagataaacaaaattgttgactgctgaaaaaaaaaaaaaaaaaa

SEQ ID NO: 234352 - DNA, 785 bp, Homo Sapiens
aggcagcagaaatctgatcctgctactggagcttaaaataacaagtaaagaaaagtttagaaacaaagctaaaattttaacatgattaataatagagaagttgggtttggttctgttgttatgattgttttgtcgtggtgcttgtgttcagttatattctctctctctctcatttcaaatactgcttgacaattcgaaaatgaaccaatgatgtgctgtggaatgtgatggttgtcttcatatagagtcacatggtttctctttttatgcagatatttataatcttcatcctatatcagtaggaataactataaggtgcactacaaaaagatgtatgcaaacaaacatgttttaaatcaggtcagatatctgatgaaaaatacgaactaatgttaagagcaagtagtttcaacatactccaggaactgagaaacaaaacaaagcaattgtgggttttgagctccatatactcttagcaagtaagggggcgtcttgcccctatatatcatcttcccggattccactccctgttgtgggaatcgcgcccacccccatccgtgtgttgtagccactcacggtttgcatcaagagtgttttttgtaactgcctctggacttgggacagtgagtaggatcaaaaataaataatgtacatgacggggaagggaaaaacctgttggagttgcttccagccagccacgctccgggccagcatgttggaatccagcgtggagcagatgcagtaaaaatgtggttggtttctgtgtgaaaaaaaaaaaaaaaaaa

SEQ ID NO: 234353 - DNA, 775 bp, Homo Sapiens
  misc_feature (67)..(67): n is a, c, g, or t
acagttattgtgtcatatatacaatattcaattgtgattcacatagaaaacattaaattataatgtntgactattatatatgtgtatgcattttactggctcaaaactacctacttctttctcaggcatcaaaagcattttgagcaggagagtattactagagctttgccacctctccatttttgccttggtgctcatcttaatggcctaatgcacccccaaacatggaaatatcaccaaaaaatacttaatagtccaccaaaaggcaagactgcccttagaaattctagcctggtttggagatactaactgctctcagagaaagtagctttgtgacatgtcatgaacccatgtttgcaatcaaagatgataaaatagattcttatttttcccccacccccgaaaatgttcaataatgtcccatgtaaaacctgctacaaatggcagcttatacatagcaatggtaaaatcatcatctggatttaggaattgctcttgtcatacccccaagtttctaagatttaagattctccttactactatcctacgtttaaatatctttgaaagtttgtattaaatgtgaattttaagaaataatatttatatttctgtaaatgtaaactgtgaagatagttataaactgaagcagatacctggaaccacctaaagaacttccatttatggaggatttttttgccccttgtgtttggaattataaaatataggtaaaagtacgtaattaaataatgtttttggtaaaaaaaaaaaaaaaaaa

SEQ ID NO: 234354 - DNA, 583 bp, Homo Sapiens
agcccagccaagacctctagctcagccgaagagggtggtcagctgtcggaacttctgaccagtgctgttgcccagccctccagaggtgaggccactgagagacaggctttgggcaccacttctggggctggccgctccaacttcacaggccttcagaggcgatggctgggcgacagtgacgaaagcaaagcaaagcagggctgtggagacactcctcgcatttgtctcttccctccaaggattatctgagcaagtcgacttgttcattcaaaggcggggtctgccaagccctgctctatccaatggggatagcttctacgtaacggattccaattttaaaactgatccatctctgatggaattattaaacttagacgatatagaaaactaaaactaatctctagagtggaaagggttaaagtgaggaaggtgtacgtgaagggtctggggttgctggaaaacttctatttcataacctgggtgatcgttctaagagtgtttgccttatatgtttgtgtggtttcttttacctgttgtcttacaataaaaaaggcagactcatggtaaaaaaaaaaaaaaaaaa

SEQ ID NO: 234355 - DNA, 545 bp, Homo Sapiens
ctgtgcctccatctggctgtttctgagttatattattttataatagactgatgatagtaaataaagccctttcctgagttctgtgagctactctagcaaatggtgaaatctgagaaggaaatcatgggaacctctgctttgtagccacgtcagatagaagatgtgagtaactttggaacctactgcttgtgactggtgtctgaagttgggggagatcttatgggactgagctcttaacctgctggggatctgcacttaatgccgattaatgccagaattgaattgtatgatatccagttggtattggagaattggccagtgtgggagaaaacccacacagttggtggcaaggagtgttcagtgttgagtgtgaatgtcaataaaaaaaggtttgttttttctacgtacaatatctttgggaacttggaggtgcagggtcagacgtctgtgtgtgtatgtggcagggacagaacagggattagggatgtgagggggtagagttttcagaataaagggagagaaaattcaaaaaaaaaaaaaaaaaa

SEQ ID NO: 234356 - DNA, 594 bp, Homo Sapiens
  misc_feature (89)..(89): n is a, c, g, or t
ggacaacaatcagctgggggacgaccttgtgttgccagggttacccagactgcataccttaaccctcaacaagaaccgaatcactgatntggagaacctgctggatcacttggcagaagtgacaccagctctggagtacctcagtctgctgggcaacgtggcctgtcccaacgagctggtcagcttggaaaaggatgaggaagactacaagagatacagatgctttgttctgtacaagctgcccaacttgaaatttctggatgcccagaaagtaaccagacaagaacgagaggaggcgttggtcagaggagtcttcatgaaggtggtgaagcccaaggcttctagtgaggacgttgccagctccccggagcgccactacacgcccttgccttctgcttccagggaactcaccagtcaccaaggtgtcctggggaagtgtcgctacgtttactatgggaaaaactcagagggcaacaggtttatccgagatgaccagctctgaagccaacttctgtataccttcacccatttcatgaaaataaaatcaaaagggaaatcaaaaataaagaaaacgctaaaaaaaaaaaaaaaaaa

SEQ ID NO: 234357 - DNA, 731 bp, Homo Sapiens
  misc_feature (20)..(20): n is a, c, g, or t
  misc_feature (73)..(73): n is a, c, g, or t
caaaaacagcaaactcattntaaagactcattgctgaggtgatagagagaaaccttatcctctccaacctgancattcacaaaaaccatccttgtgtacttgactgccctagacagtggtgactcttaggtttcattacgaatgtggaatatcagagtgtgggaaggcccaggcgagggccaatgttgtgtttcttaccccctctggaatgccaaaggcaaggtactaggtgacctcctggtccccaagaaaatgtgatttattctgagggcgaacagccaagggaggactagtctggagcacgctcggccgtcctggcaggagctgagcctcaggtgtctggcggtgccccagcagccctggattcacccaacaccagaatcccacttttctaaatccacctgttgttctgagcacctctgaacccgcagcttcggcaaaaggagtctgtaccaagctgcttctggatgaccaacactggagactctggccttaccatgtggaaatcattttcctgaagtctggaaccaattttgagaagtttttttctcaacacttttgtgtttctaacactgtatcttgactgtgtaaataccaacaaggctgtaaataaatgcagatgtagataccttctagaaaaaaaaaagcataaaaacaaaaccagaagtgatcccgtgtagccttcgttgacaaataaagactattttgtgtttaaaaaaaaaaaaaaaaaa

SEQ ID NO: 234358 - DNA, 778 bp, Homo Sapiens
catttcaccagtcactgccaacaacaacgaggttcctataattgtctctgagtaaccctttggaatggagagggtgttggtcagtctacaaactgaacactgcagttctgcgctttttaccagtgaaaaaatgtaattattttcccctcttaaggattaatattcttcaaatgtatgcctgttatggatatagtatctttaaaattttttattttaatagctttaggggtacacactttttgcttacaggggtgaattgtgtagtggtgaagactcggcttttaatgtacttgtcacctgagtgatgtacattgtacccaataggtaatttttcatccattaccctccttccgccctcttcccttctgagtctccaacatcccttataccactgtgtatgttcttgtgtacctacagctaagcttccacttataagtgagaacatgcagtatttggttttccattcctgagttacttcccttaggataacagcccccagttccgtccaagttgctgcaaaatacattattcttctttatggctgagtaatagtccatggtacatatataccacattttctttatccacttatcagttgatggacacttaggttaattccattcaatttcattcaatttaagtatatttgtaaggagctaaagctgaaaattaaattttagatctttcaatactcttaaattttatatgtaagtggtttttatattttcacatttgaaataaagtaatttttataaccttgaaaaaaaaaaaaaaaaaa

SEQ ID NO: 234359 - DNA, 604 bp, Homo Sapiens
  misc_feature (20)..(20): n is a, c, g, or t
aacatggcagggagtttatnagacatggataagaagtccactcacagaaatcctgaagatgccagggctggcaaatatgaaggtaaacacaaacgaaagaaaagaagaaagcaaaaccaaaaccagcaccgatcccgacatagatcagtgacgtctttttcttcagatgatcctatgtttccttcttcctcatcatcgtcttcaggaagccagacagattcaagtattgaagatgctgccaagggaaaaattaagaagaagagaagagagaaaacaaataaatgggaaaaaagaaaggacaaaatatgaaaccccaagaaaaagagaaggaaaaaaaggaggaaacaaccacatatgtcacctttccaagagggactgaaactgggctgacccttttgatttccaaactcagcgttttggtgtaaggcggccaaagaaggatgcggagcccagcactgtgaagcctacaaaaacattgatgcgctggcttggggatttgaatttgaacatctttcacactaagttcagactcatgaaaccaatcttcagatgctctgtaaaccacataataaagagtttggaaattaaaaaaaaaaaaaaaatt

SEQ ID NO: 234360 - DNA, 734 bp, Homo Sapiens
  misc_feature (115)..(115): n is a, c, g, or t
aagatgaaaatatagtcagctctgttctagtgttcatttagttagaaaccatagtaccggaactgtattatagtagaagttaatggtacctaaactctaaggaatgctttttctntgaaaacagaaatatttttacttatttctgtccactatgtttgtgtgtatgtgtgtgtttgtgtgtgtatgtgtggttttgatgccagcaatgcaaacaccaatatatctattaagaagtgattgaatttagattggaaaaaataaaatagttacatgtaaagacataaactctttccttcttaaatgtgattttcaactctatgatagaaactccctctaaaaaacaagcagggcaagaacaaacttacttgtaatgggtgagagaaaataagcaaatctcattggctcattcctgtttttaggaagttgcagtgggattaatgtcaattggaagggatgcagcaagtttagagaaggtgttggcactaacgctgcttgtttggcaaatcatcatcactgaggtattccacccagagactttttcaaaaaagtcaactaaagtgctaagtcataagaggagagccattatacccgttgtctttctgggctccttgagtttatctggattccaacagcacttggaaagtaccgccctccactacctcaaatgcaaacacaatctctgccagtagacattggaattagacttagtgaaaaccaggaaaaaaaaaaaaaaa

SEQ ID NO: 234361 - DNA, 639 bp, Homo Sapiens
aatatttgacttctggaataatgatggcctaaaaactgggtaaaaaccaaaaggactgaagtaaacacaaagacctcaatagcgccaaaataggagattgctgccattaatttggggtaaatggaaggaagccaggagttcacagctcccctctcagcagaacagagtagtgttagggtaacaagtgtgcagtttccagcccatgcccgctcctttcctttaatttcaaggaaggggcatggcagcttgggcaggatcaccacagatcaatagctttccaaggcatgggccacagactggaagaaaatgtggtggctacatctttctgtttttttggtgacctggtgcctagagtttgcttcagtgtcagggaaaacccgtcgcttcaggctctagatgttcaagcaagggtagagagtgagagccgtgggggaaatggaaaagggtataaaatgatgtatgaaatctaaaatacataattatgtataaaatctaaacatacaaaattaagaaatttggacaggtgctgtggctcacgtctgtaatcccagctactccagagcctgaggctgggggatcccttgagcccaggattttgaggctgcagttttgagcccatctaaaaaaaaaaaaaaaaaa

SEQ ID NO: 234362 - DNA, 705 bp, Homo Sapiens
aaaagacagccagcatttccatcgcagaccccttcttcaggagcgcccagccctggatcgcagccctggcagggaccctgcctatcttgctgctgcttctcgccggagccagttacttcttgtggagacaacagaaggaaataactgctctgtccagtgagatagaaagtgagcaagagatgaaagaaatgggatatgctgcaacagagcgggaaataagcctaagagagagcctccaggaggaactcaagaggaaaaaaatccagtacttgactcgtggagaggagtcttcgtccgataccaataagtcagcctgatgctctaatggaaaaatggccctcttcaagcctgggcctcccattggccaaacacagcagcaaaccagaggacaagggagcccagtggcactgtccatagaggacagattcctggggtccagaagagggtggagaaagctgaaggctggagagtgaatctagggcatataaggccccacacagagcccagcacagagacggccttgcagctatcaggaagatgaggagcttccttcatggcctgctgtgggctgagtaaataatatgattgccttctacagcgctagagattcatatgtttatccccatttttcaggtgaggaaatgcttcagatgaggctccaccttgttaaataaattggatgtatggaaaaaaaaaaaaaaaaaa

SEQ ID NO: 234363 - DNA, 729 bp, Homo Sapiens
cagagagaaaacatgtccactctgcagaactgtgatttcagaccatataaacaaatggaaggatggagccacttcatcacaccttcaaatatattaagttgtataaactatcaaggccacaaaatactaatgtcatttggtcataatgactactgataaggcatcagaatggattttcagggctaccagaaaaatgtttccagatggttttagaatgtaggacttatgatccaattcaccaaaagattaaatgaaaccaccctgtgttttaaaatatatataatgttcaacctaatgtatatgcaacatttattctattctaattatttgacaggtaactgcagtgttaaattgtaaatgtgttttctttatgttaccaaaacagcaatttgaaattagaactagtggttttagagaactcaggtattctttcctgacattgttttcagaataaagaatatttttcataatattttaagatacatactatctaaaagtagaattttgttcagcattgacttttataattcccatcctaaaaattcttaatattttcataaaatttgtatttttaaatgaaaattctaaatgttgtattttatcagtaacattttctaagtgaagattaatttactgaggatgatacattatagtattgtattattctctgtagtaagattagtaataagtgaaaataaatgatttaaattcaaaaaaaaaaaaaaaaaa

SEQ ID NO: 234364 - DNA, 739 bp, Homo Sapiens
  misc_feature (51)..(51): n is a, c, g, or t
atagtgagcttacttgaaggatttaagtaggtttaggaggtgaagaagccngatggagaaatttacagattaattttggaagctctactctagctatcgaacaatcaaaggaatgcacctatcagctacaaagaacagctagacagctgttttttttcttttataaatgtttctgtgttgtgtcaaaatgatttctggtgatttaaactaacagataatcacagctgctgtctaaattcatagtgttgaaaattacaaaatgaaaaaaaaaaaaaaacttcattacctgtgaagactgtgtctgtgtttttaactatttcttgtacaaatatatgaaaacttttatgaggagactggtgccaagtagctgaataatggggaaagggatattctgttcgtaaaaatcttagcagtgttaccaactctacgatatatatataaaaaaataattaaaacgttacaaagcgacagctatggtacatttgttttgtgtgaagctaaccggacctaacttcctgagtgcctggcttattttgaaacattttttttcattgaccattgataatgctgcaaatcagaaatgtacatacttcatttacaacagggttctttttatacttttgtagattctcatacatgtcacatacatggttgtctttatgtaacttaattttttcatccgcaggtgccattttcataataaacttctcttggatttgttaaaaaaaaaaaaaaaaaa

SEQ ID NO: 234365 - DNA, 692 bp, Homo Sapiens
aagaacaacatcgacaagctggagggagaccatcagctcatccaggaggcccttgtctttgacaacaagcacacgaactacacgatggagcacattcgtgttggatgggagctgctgctgacaaccatcgccagaaccatcaatgaggtggagactcagatcctgacgagagatgcgaagggcatcacccaggagcagatgaatgagttcagagcctccttcaaccactttgacaggaggaagaatggcctgatggatcatgaggatttcagagcctgcctgatttccatgggttatgacctgggtgaagccgaatttgcccgcattatgaccctggtagatcccaacgggcaaggcaccgtcaccttccaatccttcatcgacttcatgactagagagacggctgacaccgacactgccgagcaggtcatcgcctccttccggatcctggcttctgataagccatacatcctggcggaggagctgcgtcgggagctgcccccggatcaggcccagtactgcatcaagaggatgcccgcctactcgggcccaggcagtgtgcctggtgcactggattacgctgcgttctcttccgcactctacggggagagcgatctgtgatgctgagcttctgtaatcactcatcccatcagaatgcaataaaagcggaagtcacaaaaaaaaaaaaaaaa

SEQ ID NO: 234366 - DNA, 697 bp, Homo Sapiens
taattaaaaaaaaatttttttttttagagatgggatctcactatattgcccaggctggtctcaaactcttggacctgaagtgatcctcccaactcagcctcacaaagtgctgggattataggcatgagccaccatatccagcccaaaaatcttttaatattttttgcatattaataacctagcatcaggctacactacttgaatgctgaaaagagctaaagttctcttcagcacagtttgcaatattgtgtgttcgaggagtcagttgaagttgtgtggtacatggcattaaacaaaaagggaacgtgtcaatatcatctaacatggttgtgttaaagaggaaaagtattcagtctttgctttcacacctctcttagataatgaacagttactgaacaatgcatttgtaagtaagtgtgctgtatttgttacacccaagacagctctagctgtgttcaagcccagctggatgctagaactgcgagccactgtgaccttgccgtgtgagggtaagtgctccacacaacctggcagttgattattttaatgttgtagtatcaggactcttcccctagaagagtcagaggctttcttcttactttcagatgacaacagaacaaatttttacgagtaaagcaaacaaacaatggtccgattagaaaatcaaataaaaatttacaagtaaaaaaaaaaaaaa

SEQ ID NO: 234367 - DNA, 564 bp, Homo Sapiens
gaagttctggtttcaataacttgttcaaggtcacacagaaccctaaatagagccagaaactaactcaaatcttttgagtccaagttaaatatattttcattggactcctgctgtccatttactgacaatatatgatggggtaggatgaagaggtggggagaaaagtagcaattttagttttttcatttttattttttaccatattctatgacatggttttaagattaaatgagctaacatccatagagtgcttagaacagtatctggcacatggtaattaggtgtaacggttcaacgaataagtctccattgtccagtcatggcattcactttgcctggggttacattaggtaacattttattggatatcgactttttctatgaagaaaaaaatgtatgtaaataaaggtggaatctttagcctttatttgtcatggaagccctgaatttgtatagctgaaaatatttctatattgtttcttttcatcttttctgatatattaagaaaatgttaatgatatacttattaaataaaattgtggatgtaaaaaaaaaaaaaaaaaa

SEQ ID NO: 234368 - DNA, 523 bp, Homo Sapiens
actttagaataaagaagttcttttgagacttcagttactaacgtgctttaagaggtatgtactttataactgaattctatgtcgttcatacgtagagttacagtaagggtctagtatgtccaaatcttaataataaagaagaaaagtaaaggcttcaagctagcaatgtattcgaattacagttttcagattgtggctccaggccttgtgtttctcatttaagtagcaccttttaataaaaaccgtttctttgtgtaggcaaaagcacaagtgtttcaaatgtaaatagcaggaaaaaaaaagagtttacagagatagcattgctgcagagaataattgctactgagtatttcttatagaatttgtggaactgaaagatgaggtttattctgtcaagttcaagttcattctgttcaacactgttttcttattgtttgtgtatagcaaccgggtattattgttttatcatttgtaaaattgtaaaataaattaatccctttttttcaaaaaaaaaaaaaaaaaa

SEQ ID NO: 234369 - DNA, 666 bp, Homo Sapiens
  misc_feature (108)..(108): n is a, c, g, or t
gtcacagatgtgaagtcgatttcactttataactaaccagtcctacatattaagacttctaagtgtccatatgcctcttttttggtataatatataaagtcagcaggnactcccctttcccttagggcatactactgtcagtcagaactgcaagatgtgaatgaagctcttaacggcttggagtgtctttctggaagaaattgcctttttttttttttcatgttagcaggtaaaaaatcattcacccaatttgaagcatagaagaaaatagttgctgaggttttttaataaccattcctactatctgtgttcccttagatactcctgtaattcttaatgtgaatagtttgttaatattgctgtaaagtattatattgtatgatttgaagacagactatatgtcattttattatactccatcaatctataatatattagactgatgctttatctaaaatgctttgagtttgtataatatatcttgacaaattttactaccatatgttatgtaataaatgtgtatttttgtacttgcagaaactgctgctaacttttaaagttgtttggttttcaaggcactgataatggatatgtatgaagtccatgctgtctgttaaataaaatgccattctgcagaattaaccatccaaaaaaaaaaaaaaaaaa

SEQ ID NO: 234370 - DNA, 703 bp, Homo Sapiens
  misc_feature (21)..(21): n is a, c, g, or t
  misc_feature (613)..(613): n is a, c, g, or t
aagaaaacagactccaaactntaaaaatgaccagaaatctcctaatatgacttgtgcttcttatgaattagtgttagtgccactctattctttctgcctcctagataagaactattagaattttccaaggatggaattgagttcacctaacagcatccaatacaaacacctcactttgttgaatggcaatgaaatcacctaaaagaaacacaaatcctataagaagtcctcttgagcaccctcttatggataaccctccgtcattgatgctttgtgttcatccttattacaactctttacatgccactctttgactataggtgtgattctagtggtctctggcaagatggcacagacaaaagcatgctttgttcctgtggtattctaaatgagaaattagattcatgagaaaaattgtgaccatgtaagaattttaaaaaattttttcctttacattttctttaacattttttaaagaaaaaaagtacttggacttatatgcaaatggtaatactgactcattatttagaatgtataatgaataacctgacaaaattacaaagttgacctgaaaatgcataattgcaatgggatattttaatatatattctcnaggtaatggaaaatattaatacaatagttgttagtatacaagttgttttaaaagagttaataaaatatttctaagaaaaaaaaaaaaaaa

SEQ ID NO: 234371 - DNA, 631 bp, Homo Sapiens
cttttttaggtactattctgagcgtactcaacaaaacccatgcatttcataaactaatagaagttgaggattgttgaatctatttcacttattttggctgtggtttccatctgaaagtagaggttgtatacaccatatactgttcttcattttattaatatttttctccttgacctctcataaatttactttacacaattcttaccctgtacatatgtaaacataagtgtacgattcttaaccatggagtagaggtactagaatgcttacggccatctctttgtacaggaactgcattgactttcagtaaacataaagccacaactcctacatgatgttatgtaccatatgatctgttttgtatcttaaatttgatttacatatattatttatttctggtaactcactcagtttatgctgtgctaaatatcaatcaagccatgtataaatgtgatatgattggcaatatgtgtttactttaaacttgtcttttcaaaatattactcagtttatgttgtacaatgtagatggcctcttactaatgtaaaatgatttgtagtggaaacatttatatttttataataaacataatgaaaatttttttacagattggaaaaaaaaaaaaaaaaaa

SEQ ID NO: 234372 - DNA, 752 bp, Homo Sapiens
  misc_feature (58)..(58): n is a, c, g, or t
tgtgaataggctttttcattttaaagaagtttgtctagctgagattagtgctggattntctcccacttctgaaatgttcatttatactggttgcattttaagatcatgaaacaattccagttacattgtaaaaaggatatcttacgagtaattttattgaacaagttagaggcataagcttaagagcatttccatgaaacaacacatgcagcattccaggaacttgattgttaaattcaataagaaatttgctttattaatgaaactaagctgcatttcatcaaaaccttgtgacattcccttggtacataggacataaaacacagaggcattgctatttggtaagttaagcttctgtgattgtaattataaaagagcaacattgaccaaacctgggaaacaagagcacagtcttgtttggagagtctacataattactttgcactaacatttgcaggatgttcacacaattttaaattgtactgtatgtggctttttgaagtcttcccttgaccctagtaaaatatagcttgaaacttgtaaacaactgtgtttgccagaaacatcattcatgtgaactaggcaagttaccttttttccccccttcttttcctaattgtaaactaggccaacctgaaagccatggctgatgctctagccatcaggttctttcaaatgcatctttacactcttgcacaaaagttaaggaataaatgtccactgcttttggttttaaaaaaaaaaaaaaaaaa

SEQ ID NO: 234373 - DNA, 720 bp, Homo Sapiens
  misc_feature (54)..(54): n is a, c, g, or t
  misc_feature (62)..(62): n is a, c, g, or t
attacaggcatgagcccagctgtgtttcttatatcatactggtaagtgtacttntaaagctntaaaaagcagtgttaaccctttcttaaaacagatttcagggaagacagacgtttaaaacattagccttctctccccatctggagtatggtttggaagtcattgctttgtagtaaggcattattttcctggtacattgccaaggaccaacaactgttaaatcaacaaactaagattttcttctagatttgtatcggattgtgactttgctttctccctttcaccacccattaatgcttagtaaagccactatggacctcacgtatctaaacccttccctgaaatgcatctctcttttcataccactccaatgggaactcctgttgatttgtttctgggccctgacagattagcaggaaaagaaagcgctttagaaaagtgagaggggagttcagaggttagaggggaatcagaaaattaatgtcatgattatcaagaatgtttccagaaggcagggctcatcagtccttgacaaaaaggctgatgaaaaaaatggagttgagtgcagccgatcacctcaataatcctagcagtttggcaagctgaggcaggaggatcacttaagtcccggattttgaggttgtagtgcgctgtgatcacaacactgcactcggcctgggtgacagagctaggctgtctcttaaaaaaaaaaaaaaaaaa

SEQ ID NO: 234374 - DNA, 666 bp, Homo Sapiens
agggtcctgcatctgggccaggctggggtgcacccagccaaagacaaagctgcctccacgtgcccaaggattcagatggtgcactggccccgggaggagtctgaccaaaaatggagcccgctctgtggggaagccccgactcccccacgagaaacggtcccacggtgcggatctcccccttcccttgtggggcacagctggcctgggcctccaatcctgcggagctttcctgggtgtggctttgacctcagaagtggctctggtttggcctcaggagtgtggcctggcccagcctgctgcagcctcctggggggcccttgatgccactaatcccccgaccccccgcatctgccaaactgcacagacacacgcattgtaaggccgcttgtggcctccagcgtgcactcttgtttacgtcattgtcatcttcaagaccagtcctttgtgattagttttgcttcgcgagccctggtgtggactgtggtctgtatgaatcgtgtgtaactgtggtgaggggcttgtcctgtatgtgagtctgtacccaggtggggtctgtgccctgcacaccgggcccctctgtatttatcgctgcctgaatgcaacagtaatttatatccaggacaaatacagtctgggtgtcactatcctaaaaaaaaaaaaaaaaaa

SEQ ID NO: 234375 - DNA, 708 bp, Homo Sapiens
ggccaggtgcatgcagttatgtctgggttacgtgtgaaacgtacatctggtgaactgtatacttggctcaaacttctcaaaatttagaggtgctggaaaggattgtcacttggagcctttagtagacaaaaggcagaaagtgagcatcatttcagaaatgctttagtatgcacacttttagctgatattttgatatatagaataataatatacacagtggagaatattcaaagagtggctgaagggagaatacagagccagtagggccaaaatgaaacttctaggatgtcttctgaattttcagcacatggggggaataagtgaacaaatttcccaacatcgtgcaatgctttatagcacaatgatctagatttcagactgtgttaaggttttttctttgttgatgttgttgttttaattctaatgtgcacggtgtgactggcagagtgagtttaaaagctttacgagtgattaattgcttggcaggcacccacgctatctgcatttccagaactttactgatgcatccatgtacatttccactgaggaattttggtgggtggggggaggttgtgctgcctcacaatgtcacgtgtattaaagtctaagcagtcacttctgattcacttgcactgtttgggaaatgtcaggtttacaaaaacatacatgtttggaataaaaaatggctgcaaacaaaaaaaaaaaaaa

SEQ ID NO: 234376 - DNA, 653 bp, Homo Sapiens
gaaagtggcatgaaggactctactgtggtgtggccccctctgcaaagtgcatttggagaccaggttccatgccaacaaactatgagctgtactatggcttcacaaggtttgctattgagctcaatgagttagatccagtactaaaagatctccttccaccaacagacgcccggttccggccagatcaaagatttttggaagaaggaaatttagaagctgcagcatcagagaagtaaagagtagaggaactccagagatctcggagacgatatatggaagaaaacaatcttgaacatataccaaaattttttaaaaaagttattgatgccaatcaaagagaagcctgggtttctaacgacacctactgggagcttcgaaaggaccctgggtttagcaaagtagacagccctgttctttggtagactgggaatgtagagctagccaacatatcacattctgaatgaataaataactatgcacaattatgtttcttatagctatgtgtggtttctgggtcaactgaaaacctaccatttgcttttctattcatctttataatggactttcagaagtgcattagacaaggcccctaaccactttgggatcctttctgttttgctgcaaccatattccttaaaaaaaaaaaaaaaaaa

SEQ ID NO: 234377 - DNA, 713 bp, Homo Sapiens
  misc_feature (33)..(34): n is a, c, g, or t
  misc_feature (57)..(57): n is a, c, g, or t
  misc_feature (83)..(83): n is a, c, g, or t
tacgaaaagaagttgggaaaacaaatatttatnncagagaattattccttaaagatntaaaatgtatttagttgtacatttantatgggttcaaccccagcacatgaagtataatggtcagatttattttgtatttatttactattataaccactttttaggaaaaaaatagctaatttgtatttatatgtaatcaaaagaagtatcgggtttgtacataattttccaaaaattgtagttgttttcagttgtgtgtatttaagatgaaaagtctacatggaaggttactctggcaaagtgcttagcacgtttgcttttttgcagtgctactgttgagttcacaagttcaagtccagaaaaaaaaagtggataatccactctgctgactttcaagattattatattattcaattctcaggaatgttgcagagtgattgtccaatccatgagaatttacatccttattaggtggaatatttggataagaaccagacattgctgatctattatagaaactctcctcctgccccttaatttacagaaagaataaagcaggatccatagaaataattaggaaaacgatgaacctgcaggaaagtgaatgatggtttgttgttcttctttcctaaattagtgatcccttcaaaggggctgatctggccaaagtattcaataaaacgtaagatttcttcattaaaaaaaaaaaaaaaaaa

SEQ ID NO: 234378 - DNA, 746 bp, Homo Sapiens
ctaacagtaaccattcttaagtttttgccttgattaggtgccctaatttgagggttttaaaaaaaactatatttttgttaattataaaactgtaaagagctataaaagctattcccatttggttagtcaaaagggttttattgctaaatgtttggtgtaaagttgagacccttttccattttggtgacagatttctttggggaaaaaaggcagctttctgttttataaatgcagacttctgtttattgaatgaagcatatctcagtgtttatctgtcaggttttgaaacatttcatatatgtccaaatacttggcaggatttaaaaaaaaatagtgaatttggtgtaaagttgctattttatggaaatgcctctaactttacattttcattccatctgtagatttttctatctttataaaatattggagttattttttaaggaaaaatagaaaagtagcttgtgaatagctcaaactaagcttacaaatcgcatgtaaaaaagcaaaaaagttatttgtgtctgtttatattgcttccttttttgtagcctttgtacctgtacagggtgacagtaagggccaagcaggagaggcgtaatccttgtataaaataggatccagcgacactcttgtatttatctgttctctttttagtcagtcacttcaaaaaaacaaaaaacaaacaaaaaaaagctgtacattttaacataaaataaattatgatgagccaaaaaaaaaaaaaaaaa

SEQ ID NO: 234379 - DNA, 634 bp, Homo Sapiens
tagggtaaatcctccattattcctttatttctttgttttccttgtagtatataatttgtaataattttgattactgattgtcattctgccaccctggagtatataatttttaattatctgattactgttattcttccatagtaggggaggtgatatccatttgcctgatacatagtatgtgttcaatacacatttgctaaagaataaatgaatcaataatacctaacatctctaatttgcagtcattcccaagagtaattattaaatatgtggcaaatttctttgcctttttacttttaaaaatctaattttgacataactgctgtaaccatccagaaacggcattgatgttgcttcacgttgctgatgcttaagcaatgtatattgtgtaatatacaatgtagtcttcaaactaatttcaacttctgcctttctgtgtactcccttatcccactgggtgatattatttggcatggtcattgtcattaaaatcatacaggatagtaattcctttccatctgctaccatgcctagccttatttaatttttcagattttctgttctattgaaggtaattgattttttctttttttttaatgcttgaaataaagtgttgaaaaacaaaaaaaaaaaa

SEQ ID NO: 234380 - DNA, 589 bp, Homo Sapiens
agtccacatccagcaaaacatttgagtaactggaaagcaataccattctcatgccagtgtacaaattacatgaaagagcatcatttttctagtgtctgaggattggctgcttatggccaattttggcagcaaaacgataggattaaaaatagcttgaagatgatctagtcttaaataatatatttcatgatgaactttccttgggaaagtgcatctttctgcctacaagaatcacatgacccctttcaataatttatgtagtagagaaaaacacactatttctcatagagttttcagtcatgtgctgtggtgtgattgtttctggacattcataaaattttatagttaactgagttctcttttctgttttgttgctatttaacgtccattgaaaacatggctttcttttgcgcattctgttactttcagctgtactttctaataagaatggattgccctttttagcaatctttgattgaactggtacatttcagattacttaaatgtcatcaggccacacagcataccaggtaacagaaagccataaattaaaaataaaaaaaaggaaagcaaaaaaaaaaaaaaaaaa

SEQ ID NO: 234381 - DNA, 677 bp, Homo Sapiens
cacagggtaggtgctcatgacgtgtagaatgagtgagtaacttcctgcctcatcaggatgtaatgtggttcacttcccctgtgttcaacactacaaagctactcctgccagaagagggcagagttctttcttgggtttgaactggcttttttgggttgaaccagatcatcccacatccttagcactacttaaccttcttttcctgaagattacatatcagtgtcctgcgtttttatctaatattagagctgaggttcctaggaaaattttgaagtggggaagattatggagaaaatgaaatggaaatttggggagggtggtttgtcagtataaggccctgtggggtaatcatattttagttattacttgttaaaagggtaacagaacctctgtttctttaccaagtcgctggttggccatttctccaattgatgaactaccattggttttagctctttctcatttgggattcccctcaattgcttacatgattctggtacttagagtctaatagagttgctgtgaatatgtagtgctgtacataatggcagttttgtaaatgtgagataaccttgaatatgttgtggtttgtatacagagccattagtattgttattttggccacttttttattcaaaataaataacataattatttgtaaaaaaaaaaaaaaaaaa

SEQ ID NO: 234382 - DNA, 686 bp, Homo Sapiens
  misc_feature (76)..(76): n is a, c, g, or t
  misc_feature (85)..(85): n is a, c, g, or t
ctcatgtaaaaacaaacaaaaagtcaaccaaaaaaaaattgagtttttcttgtttctatctagttcatgctttctntgcggtgtntgaacagtagtctgttaacttagtaggtggtacctggaaaggtattttaagtatagtgactgtttaataaatacttaattggatgatggaggaggagaaattgttttcttcccaggattctctttgggggtcattttgtgtgacagatatattttagacatttggagaaacagtttcagatcctgccaggatatttttgtaaaaaaggaaaatggaagattccaataaactagaaacagtacgtatctaagatgctgacacagaagctaatgtgacttttcagcttatcaagaggatggccaataaaacttaaaggtgtggttagatgttttctcacttttgtgacattaatttatcactgagtctcattcaaccaagtaatctaaaatactgtgcaaattctagcagtatgtcttcgataacttggatgttaggatagccaatatgtacaaaaaattaaatcaagtattttgtcctatgtataacacaaattaattttacacagagaaagatgtttctaggcaagtgaaattctggtaattcatactatttctttgtatgaacaaataaaatatattttgccaaaaaaaaaaaaaaaaaa

SEQ ID NO: 234383 - DNA, 640 bp, Homo Sapiens
gggctgcgtggggccggagcagaggtgagcagcaatgcactggttcgggagcccccatcagcctccttgtgcaaactgggcccccatgccacagtctggctttccctccatctgccccaggacaagagcaagaaggacatcagttgcccagtcatgtgatcccctgccatcttgccttaggaacagccttcccccaccagcagccatggctggctggggcgttagccaagccacctactgccaggaattggagcctcagttccctcctgtgtcaagtagctaactgcagcagctggactgagggcagagtctgtgggtgcagagaccctgcatgtaggtcacaggttgaggcccagccactctccctggggcctggtgggtaggcaagtagctctggggccacctcaagtgaccaaatgctattaatttccatcctttagcaggctgggccctaggcaggaagctggcttctgggagaggagtgagaacgtgcagggcctgcctagcttgcgtgcttgaggaaggtggcattccgtgcttgcctccttgaggagggtggcattctgtgtcttctgcttatgaagcgcctttcttaaagtttggcaataaatccatttttttgaaaaaaaaaaaaaaaaaa

SEQ ID NO: 234384 - DNA, 696 bp, Homo Sapiens
tttcactacatatgttttaaagagtagcttacagtgatttagaatggtttacagttaatgctgatcttatattataaatgccaacactttgtgtcactacctcctctaatggttagtatgatatgctagcagactgtatgaggtctttttttaaaataccacttttagtgtcagtgaaccaaattctggaatgtcttaacagctctaaatcttacttgtcttgaaaatgattggggtttaataccactgctggtggttcacacatcatcccatccttaatatgcctgacaggcatctgagcaaaggtttttagtaattgaatttctctgcagtagtccttcaagcacttgaatgtaaacctttagcatttattcgtttaatgactactgatacgaatctcaagcagatttcttgctcttaaaagttatgtttcactgagttctggttttgtgtagctatattttatatagctagatattcctcacagtgaacatgaattgtaataattggttatttccttaagtctttagattataataatttcagattattgcacgtctgtgatttgagaggtgagttatttaagaggccagttttcaggacatgggaatttgaattgtaaacctgttatctctgtgaaacttttaacatgataaaatataacctttctttgtgcttaaaaaaaaaaaaaaaaaa

SEQ ID NO: 234385 - DNA, 464 bp, Homo Sapiens
agagatggacggagcctctcgcgttttgctctcagatgtgttaaaggcgcacgtgtacctgctctcagcggcagtgcggcctccccatctgctgggtgcccatggccctccctgcagcctcagtgatgacctcgtctgccagggacacaggttttcatcatttacaggctcttatgtgctagttttgttggtagcacgttatttaatgcataaaggcagaattcttacaagtttttttttttaatgtgaacatagatgcagcaccgactttttaaacttgaaaaaactggtataatgttaacttttaaaaataacatttggacacactagtaattgatttttgtttacagattgttttgtttacaaattgttagtctttgtttctatgagatacttttagtgtgactttttaaatgtcttagaaattaaaagttgtacaaaaagtgaaaaaaaaaaaaaaaaaa

SEQ ID NO: 234386 - DNA, 486 bp, Homo Sapiens
ctgtaaacaaaacagacaaaaatctctgccctggtagacattgcattataataatcagtagatatatgtattttatgcattctgcttttttcatgtatatttcaaacatttccccatttttactttgtcctcataaatactttaaatggctgtgtagcatgccatcttgtttttgaactgtaatttgcttaagctttctgcattgggcatttaagtgagtacctatgtattacagttgttgggggactggttacattgttgtgaatgtctttatggatatgacttttatgtctgttgggccttgtccagagtctgggctagtggtcagatgattgggttccagtcccattttttccatttaatataatatgacctcagataagtctgtcagcatctctatgcttgagtttcctcatctgtaaaataatgataacacctccttcacaacattaaatgtgatgataatgcaaaaaaaaaaaaaaaaaa

SEQ ID NO: 234387 - DNA, 592 bp, Homo Sapiens
tctcccttctgtgtatatgagcctgcccttaccttttccctgcctctgacttggtatttccaggtccgtatttctctgtagcccagggtctggggtagagctgactgctgttcaccctttgaacaactcatggacgtgagggatgggtgctgagcagaaccaagagaggaaactttggcgctgttaaaatggaatttctcatctgccggcattattaagggtgggctaggttggatggaaggtgaaagggatgaactgccttttgctggaagctgtcttaggctgtgagacaggagcaggggaaccacagcctatggggaactgcccttgactccacctatgttggagccttagcccaaggccattccttctgtgatgataaagcccagttctggaattggagccatattaaggaatgattctcttccagcgctgctcctcaagggttgggggtccttctccctcgcagccaccacatgtctcagggctaccttctccgattggatttgcatttgtggcactgtctttgatgcagtgatgtacttaatggtgcaataaagctgcttcgatttggaaaaaaaaaaaaaaaaaa

SEQ ID NO: 234388 - DNA, 742 bp, Homo Sapiens
  misc_feature (58)..(58): n is a, c, g, or t
atcagtgctttctgcactacctcctgtagatagccctgactgatagcacttacaaaangactgatagatgccaaatcagtcatttattaaccctctaatattgttgtcccgatcatttggtaaacgctaagagagcttagttttacattcacaaaagtatttgtatttgataagtcttaaaaatgatttaagttgaagcctaacagaagtacttgttcattcctcagttacctgcaaataatggaaataatggtgcagtcagttttatttgattgtgtaatgctttatactaggggtctcaaacccctgggtggcattagattcttacaggagcgtgaaccctattgtgaactgcacatgcaagagatctaggttgtgcgctcattatgagaatctaatacccgatgatctgaggtggaacagtctcatcctgaaaccatctaccccaacacctgtgtctgtggaaattgtctccacgaaaccggtccctgttgaaaaaaggttaggggaccactgctttatacagtgtttgaagtaggcacacttacagttactatttctggttctttatgactgttgaggggggcagaattctatgtttgattcacagtaaaacttttcatgaatcattgagggttaactgttatcacttgccaatggaaactggatattgaaacatttttttaagaaatgcacttttacctgaaataaaactataaaaactaaaaaaaaaaaaaaaaaa

SEQ ID NO: 234389 - DNA, 687 bp, Homo Sapiens
  misc_feature (102)..(102): n is a, c, g, or t
aggaattatctgaagccgaaaaccagtttaagaggattattgaacactaccccagtgagggccttgattgcttggcctactgtggaattggaaaagtgtatntgaaaaaaaacagatttctagaagctctcaatcactttgagaaagcaagaaccttgatttatcgtcttcctggagtgttaacttggcccacgagtaatgtgattattgaagagtctcagccacaaaaaataaagatgctgttagagaaatttgttgaagaatgcaagttccctccagtgccagatgccatttgttgctatcagaagtgccatggatattctaagatccagatatacataactgatccagactttaagggttttatacgcatcagctgttgccagtactgtaaaatagaatttcacatgaattgctggaagaagttaaaaactacaacctttaatgataaaattgacaaggattttctacaaggaatatgtcttacccctgactgtgaaggtgtcatttctaagattatcatcttcagcagtggtggtgaagttaaatgtgaatttgaacacaaggtcataaaagaaaaggttcctccaagacctattctgaaacagaaatgttctagcctagagaaactaagactgaaagaagacaaaaaattgaagagaaagatccaaaaaaaaaaaaaaaaaa

SEQ ID NO: 234390 - DNA, 714 bp, Homo Sapiens
  misc_feature (12)..(12): n is a, c, g, or t
gatggtcttacnacagtctgtgatgtctggtggcccccctgccctggactcaataattgatagattttcctagagtaacagtatgagagctccagccattccattaaaagtattagttctgctttgagctgaaaccagttgagcctaatggaagactggatgtctttcttcttcatccaagcaccctaatgactgtttagttacatccatagatgcagacaacataacacctgtgacttacttgaattgggataagccattccagaagtagcttatcctagacttggaaataagatttttttcaccactaacttccatgcttcagagatgacattcaaagccagattcccaagtgcctgatcatacctcccagtctcaggaagatatttgcttaccccttagaccaagaatcttaagatcttccccagctatgaagcctatcttggaatgggaaaccatgaaatttgtcttttaaaagaaagggaagaaatagccttacagcccctgttccctccaagtgcacatttagccttaaaatcctgggagtcgggagacaccgtggagtccttacatccacagtgtctgctggtcgtggtcagaaggcagtaatgcaagagtccttttgtgaagagtgtttctatgtagagatgtttatatttaagtagttcttttataaataaaagcatttctaatggcaaaaaaaaaaaaaaaaaa

SEQ ID NO: 234391 - DNA, 699 bp, Homo Sapiens
ctcagaacatgtgcctttggagccctgagctgccatggaagaaaaccacctaccctgaagccacaacactggaaagaccatgtggaagaaccacagagagagagaagaggaccaaatgtgtgagccttcccagcccaggctccaaatatgcaagtagtaagccttcatttctttttggttttaatttttttttttaaataaatcgaaatgggttctcactatgttgcccaggctggtcttgaactcctaagctcaagtaatcctcctacctcagtctcccaaagtgctggaattgtaggcatgagccaccatgcccggctgcaattagtaagtcttcagatgcttccatcaccagccaccatccgatgacaaccccatgaatgaccctcagcaagaactacctagctgaatccagccaaactccagacccatgagagagaaataaaattgttgtttgagtcactaaatacggagtaatttatattatcaacagataactggaaccacaagtgtaattgttaaaggtaaaactttgaatacatttatatttgccttctgccacattccataattgacttttgttcatgaacctattggcaagtttgccttattgcttttccttcttccctctttttttttttgtaacttaaaaaatcatataataaaacaacacaaaaatgtaaaaaaaaaaaaaaaaaa

SEQ ID NO: 234392 - DNA, 751 bp, Homo Sapiens
atggaagatgaggaagaaataggaaagcagtaaatgaccaatgagaatctgttacccaaactgatataaactccctcagaaagaaagatactactccctaatcctggaagtgttaagtggcaataatgatcaaatgttgtaaaggggattgttactacagctaatatgaaatgggaggctggactaaatctaacctttctacccttgatttcaattctaaaaggacacgtaataccattgcagaaagaaaaggcagttccaaatgataaattttagagttgttttgctaggatgcaagagaaattggataagtggaccactcatacgttgctggtgagatatgaaatagtagagccactgtggaaaatattcttggcagtttcttataaaactaaacatacatttaacatataactggcatttgtactacttgacagttatccctgagaagttaaaacttaacattcacaaatgttacatagcaccttcatttataatagccaaaacccggaaacaacctggatgtccttcaaaaagagtgaatggtttagtatgtccacaccatggaatactaaatagtaatatgaaggaacaaactactgatacatgtaacaaattgcatggacctcaagggaattatgcttgggtggtttggggggacaatcctaaagttttacacactgtatgattctgtttttgtaacattcttaaataataaagctatagagatgggaaaaaaaaaaaaaaaaaa

SEQ ID NO: 234393 - DNA, 687 bp, Homo Sapiens
  misc_feature (33)..(33): n is a, c, g, or t
cgggacgagagaggctgagggtgtggcggcccntgaggcagaccaggccaggcttcccctcctacctggactcggccagctgcctccagggaccgcccgtccatatttattaatgtcctcagggtcccttctgccatctaggccttaggggtaagcaggtctcagtcctggcaccatgcacatgtctgaggctgagcaagggctgagaggagaggcttgggcctcagtttccctctgtgaagtggggggaggcaggccttcaaggagggatagaggtacaaggcttcgtctcatctgctgtctgagcatccaggcccaaaggcactgagggagtcaggagctggggctcggcacatgcagagatgacagggcagggggcagtcttcctccccctccccgaccaaacctcggggagccctcctgtgcccctccctccttgttgtccagtgctgggttccccaccccgaggtcaggctgcccaatcctctgactggatcaccgggggcttcttgcctcagttcttccctctgagcccccaggccctcccgcatctcaggttggggatggggacatggagaggaaggggccgcctactcctgcaaatgcttgtgacagatgccaggaggtagatgtgtgctggccaataaaggcccctacctgattccccgcaaaaaaaaaaaaaaaaaa

SEQ ID NO: 234394 - DNA, 671 bp, Homo Sapiens
ggcccaagggcaagaagggggagccaggcctcccaggcccctgcagctgtggcagtggccataccaagtcagctttctcggtggcagtgaccaagagctacccacgggagcggctgcccatcaagtttgacaagattctgatgtacgagggtggccactacaatgcttccagcggcaagttcgtctgcggcgtgcctgggatctactacttcacctacgacatcacgctggccaacaagcacctggccatcggcctggtgcacaacggccagtaccgcatccggacctttgatgccaacaccggcaaccacgatgtggcctcaggctccaccatcctggctctcaagcagggtgacgaagtttggctgcagatcttctactcagagcagaacgggctcttctatgacccttactggacagacagcctctttacgggcttcctaatctatgccgaccaggatgaccccaacgaggtatagacatgccacggcggtcctccaggcagggaacaagcttctggacttgggcttacagagcaagaccccacaactgtaggctgggggtggggggtcgagtgagcggttctagcctcaggctcacctcctctgcctctttttttccccttcattaaatccaaacctttttattcatccaaaaaaaaaaaaaaaaaa

SEQ ID NO: 234395 - DNA, 693 bp, Homo Sapiens
gattgttttcttttcagattttccctttggggatattctgtatgggatgaggaacagtgaggtgagaggatggtggataacagcaattgacattttcagcttaccttagcataacaaggctgaaagcttttataaagcaagctatgtaaaattttggagaagtacttttattttgcccagattggatcacattccgttcctgagctaatcaagagaggaattcacccaaaggagggggaaatttttagaagaaagccagaatgtagggagcaggtgaggaaaggtagttactgggaatacgaaagtaacacattcattgcaccctgtttgaatttgagtagcaagaagtttctgatttgtactaacagaaggagtaaagttcagatttaatctgcaagtcttgattgtttttaactagagattttaatctcttcttcttattattgctgctttgagttgccattataggtttttggattttttttttaatgccatccatttttatttgacatcatgttgttgctagtttgagcagatgcacatagcatatgtttccattaccaatttggaaatttttcccagtggcatcagcatttgagagatactgattttgaaattagagtactaggggaaaatgcttcaaaaatgaagactacttaaataaaaattggctttaaataaaaaaaaaaaaaa

SEQ ID NO: 234396 - DNA, 796 bp, Homo Sapiens
agtgcaagtattcatcaatactcattgtgtccatatcaagaagatccctattctatttacaagtaatcaaagagccaataacttgtaaacaagaaaagtaacttgtcaacagtcataactagtaattatgagaccttgtttcataaccagtcttcttactcaaatcctgtgatgtttgaaataaccaaatgtctctccaatgtctgcataaactgtgagagccaagtcaacagcttttatcaagaatttactctctgaccagcaataaacaagcactgagagacacagagagccagattcagattttacccatggggataaaaagactcagactttcaccacatttggaaaactacttgcatcataaatatataataactggtagtttatatgaagcagacactaagtgctatagacactctcagaatatcatacttggaaacaatgtaattaaaatgccgaatctgagtcaacagctgccctacttttcaattcagatatactagtaccttacctagaaataatgttaacctagggtgaagtcactataatctgtagtctattatttgggcatttgctacatgatgagtgctgccagattgtggcaggtaaagagacaatgtaatttgcactccctatgatatttctacatttttagcgaccactagtggaagacattccccaaaattagaaaaaaaggagatagaagatttctgtctatgtaaagttctcaaaatttgttctaaattaataaaactatctttgtgttcttttctgcaaaaaaaaaaaaaaaaaa

SEQ ID NO: 234397 - DNA, 762 bp, Homo Sapiens
agagctcataggaaaatgacttgatttgaaatggagccagagttactcgtgttgttatctattcatcagcttcctgacatgttaagagatacattaaagagaaaatatgtttttaatcctaaaattttcttccactaagataaaccaaatgtccttacatatatgtaaacccatctatttaaacgcaaagttgggttgatgtcagtttacatagcagaaagcattcactatcctctaagatttgtttctgcaaaactttcattgctttagaattttaaaatttcaccttgtacaatggccagcccctaaagcaggaaacatttataatggattatatggaaacatcctcccagtacttgcccagcccttgaatcatgtggcttttcagtgaaaggaaagattctttttctaggaaaaatgagcctattttattttattttattttattttttgacacaaactgtagattttagcagccctggcccaaaggaatttgattacttttgttttaaacagtacaaaggggacactataattacaaaaacatccttaactgatttgagttgtttttatttctttggatatattttcagagtggtaaattgtgtgtgagaattacaaatgattattcttttagtggtttcttagcctctcttacagcccacggggatagtactgtacatcaataccttcatatgaaatttttatatgcaatgaaaataaaagcatgggttgattctgcctaaaaaaaaaaaaaaaaaa

SEQ ID NO: 234398 - DNA, 622 bp, Homo Sapiens
  misc_feature (4)..(4): n is a, c, g, or t
  misc_feature (24)..(24): n is a, c, g, or t
cttntgaaagtgtccctggccttntgagaaagcagtgtggtggagggagatggttctggcaggggccgtgaatggttgttttctacttgggatttctttcctgctttaggagatctattgggaaactgattataaccactcgggcaccatcgatgcccacgagatgaggacagccctcaggaaggcaggtttcaccctcaacagccaggtgcagcagaccattgccctgcggtatgcgtgcagcaagcttggcatcaactttgacagcttcgtggcttgtatgatccgcctggagaccctcttcaaactattcagccttctggacgaagacaaggatggcatggttcagctctctctggccgagtggctgtgctgcgtgttggtctgacccggggtttcggacatcagtgacactccctgccccactgcttgcttcttgtcaccccttctctacaattttgtgaacatttatgctccagtggcattcactggttgttcatacctttcttgccctgggtctatttcagcagcactgagctatgagctatgtaagccgacccggtgggcccagtggagggaaagcaatcaattaaagttgtgagccagaaaaaaaaaaaaaaaa

SEQ ID NO: 234399 - DNA, 694 bp, Homo Sapiens
gggctcaaagaattattcatctctaacatgatattggaaaataatggatgaaaataggaaaaatgattgttaatgctgactgtgggtcttaaaaggttctggaaagcagtaagttcatttttctaaaaactataacattctgttggagtattttcttccttacgtcaatacttttcctgcattatttgaaattgtgggctggggagaaacagtagtcaaagctttctgaattgagatactttgaaattccaagtgtagatttttagaatgtcattttataaatggcagtttttggaattacttgataagaacttttgaaaatggaaggattagtatggcctatttttaaagctgctttgttaggttccttatgttttattaactgtcttttctcagtttccatttcatttttttttttctagttttggtgacttagtgattttgtcattttttacatcaacttcatggtcttgtttttacatggtaattgcatgtacttaggatctatctaataggggctttaaataaatttggtcatatttatgtgtaagcacattttactgtaaatgtttgggtttctgaatttaaacagatctgtttatttcagtatgtagtaaacaatatcttaaagtgtccgattcactacttgttaattaaaaaagttatgattaatgtgaaaaaaaaaaaaaaaaaa

SEQ ID NO: 234400 - DNA, 685 bp, Homo Sapiens
gataggcattgcggctggatcaagtgataagattgcaccagcagtctccaagttcagagacgattcaaggcaatgatggcatctattggaagactttcacatggtgagagtgctgatctgctaatcagctgcaatgcagaatcagccataggttggatcagctcaagaccatgggttggagaattaatgttcacacttctatttggagactttgaatcccctctacacaagctacgcaagtcaagttagttgccaagaaagcacagatgacaacctattaatgctgtgagaatgtttctagatcagtgcatggatggctccattgctctacgggccattgtgtctgagatcccagtctttgaggagaaaaaaaacaatggttaaaaaggcattggggaaatattttgagtttgggggtgtactttgccaccccattattggggagctgtcaccacgaatgttcccaaacttagcaacagcggcaaactactgggccaagatgagcaaccccacatttttgggatttaaagctcctgatgttataccaggatcaaccatcacactccctttgcttcaaatggcatctaccccgtaagatcttgaggggggagtgttgggtggaatcatagatccatgcactcctaacatgaactaattctcattatttaaaaaaaaaaaaaaaaaa

SEQ ID NO: 234401 - DNA, 722 bp, Homo Sapiens
  misc_feature (23)..(23): n is a, c, g, or t
  misc_feature (67)..(67): n is a, c, g, or t
cagtcaagaataaacacagactntgtaggttcctgctgaataaagcaaatcccagaaacccagattntggaagaatcagcaaccccagcataaaataaacccctatcaaaatgtcagaggacatggcaaggtaaacttagcattttcaactttagaaccgggtcagcttcagggggactgctttcaaatcagccaaagagcctgtcagatcttcttagaaggaagaggttggtagttccctgctctgttttgaacatgctctagtttattaacctggggacattcccattgctgtcttaagtaagtctcatagccagctcctgtcacgtgactctcatatggattcattttcgggccagctctgaacaaagcatcatgaacatatgtgcttttggtcgtttgcaatgtgatggtggtggaggtaggtattggtttccttggaaggcatgataagaaagattcacaatggccaacagtgtgtatgaacaaaaaactgattggagcatcagctagtactgaaggtccttgctttgtgtcagaggcaaaggaacccaaggcgccaagtcctcagccttgagtgtactgctgacaactaaactcacaggctgcaaagcagacctctgatgaagatgcctgttatttcacatcactgtctttttgtgtatcatagtctgcaccttacaaatattaataaatgttccaataataaaaaaaaaaaaaaa

SEQ ID NO: 234402 - DNA, 730 bp, Homo Sapiens
  misc_feature (34)..(34): n is a, c, g, or t
aaactccctagcggtggtatgtgtgtgtgtgtantcatgtcacactacatgcaaattaaaaaatgaaagtgtggtcatgctttgtcaactcactatatttttactttattaactatattctgtatcagccatctgaattgacccaatctttattggtgactgcatgaaattccaaggcagggatgtgtcatattttctttagctggtcccataatcatgaacatttaagtagctccaatttttcatcaattacagacattgccgccatgaacatgattgcatggcgtgcaagtatttctgcgaggtagatttccgtacgggatttctggggcaaagggtatgggcattcagtattctgagagaaactgccaaattgctctctgaaatggtggtgtcaatttacatttctcccaagagggtaggagactgattatttttttacaccttcaccaacacttggcattctcagacttttggttttttttttggcctatttaggaggaaaaccgattttaaaagctgcatttccttaatcatgaatgaagtcatctttccacttatttgccagacatttgtattttcttttctgcattgtctttttgttttaagatgtttgccctttgcttgttaatttgttggaaatctttgactctaataagtgtgatcaatcttttctctgctgacttggtataaatgttttcttccagcctctaaaaaaaaaaaaaaaaaa

SEQ ID NO: 234403 - DNA, 608 bp, Homo Sapiens
acacagccatgtgtgcacatgacacagggtcacagtctcacaagccacactccaaatgccacactctcaccacacatccacacacattcttatttgtttcaaacgaaacctggattaagtcactcggtttcactttccagctttcctcattggccgtcatgccttggatcattaaggacactttggaacggagctttgctattctctgaagatacacaaaatcctccactgctcacgtcataatctatttaccaactgtggaaaattccgcggtgcctgtggtttttaaagtgatgctgaagcgagcacctttgtgcatatgtcttgatccacgcctgattttaaaatttcagataaaatcctagaagtgaaatggctggagagagagttacagcagagccaggttctccgtcctgcgcggtttctaagtgaaatggctggagagagagtcacagcagagccaggggctccatcctgcgcggtttctgcatttggtgttgagttgtcctttctgcatcggaattctgactcctgaaatcacatttctcaccgtgtctaggtcatactttcaataatctttcaataaccttaaaaaaaaaaaaaaaaaa

SEQ ID NO: 234404 - DNA, 699 bp, Homo Sapiens
tggctgcaaatcaaagtggagagttctctcaggtcaggtctgcagcagagctcgagacagggatctgaatgcacttggttattgttgggggtgctctcagaaggaacctgtgaaagcctttatcagtcatttattggctgtgagaagttctctgggagtgtgggtacatttgaaggcaagtgacttcagttgagggcaagtctctggaaaagaggctgtaggcatctggcagctaccatgcatggtagtgtgttgggggtgggggtcctgggcactggctgtgtgaagggatctggcagggcaccacagcgccccctactgaaccatcagcatgtcagtggcatttaaagccatgcagctggaggggccactgagattgtctctgagtattactgagaagcaacagaaaagagccatggatggagcccttgggctctctgggaaatgggaaatcagccaaaggactgagaaggagttaccttaaggtcagagaaaaccaagagagtgtggtgttctggaagctgagctttctttattcaacctcattcccttctccaaataagccacttgtgtagttgggcccctccagggttgaaggcaagaggagaaaggcacagcgtttgggaaacaagacttttcctgcaatagcctgggaaggaataaaaggatagagtgtttgggaaaaaaaaaaaaaaaaaa

SEQ ID NO: 234405 - DNA, 739 bp, Homo Sapiens
aaagtgagatgttaaagggagtgaccaggttgactgtgtgaccatgagtatgagtaaatgaagtagaatggaaatggtcaatgtagttgagaaagtcaaataatggtgagtattttaggatatagttgtgatttacaatttcaggtgtgggtcagtcggagtttgctgttgctgacatggttgacatgtttgttttactactgccaccagcaggaggagatgagctgcagggtatcaaaaggggtataatcgagatggcagatctggtagctgtaactaaatctgatggagacttgattgtgccagctcgaaggatacaagcggaatatgtgagtgcactgaaattactccgcaaacgttcacaagtctggaaaccaaaggtaattcgtatttctgcccgaagtggagaggggatctctgaaatgtgggataaaatgaaagatttccaggacctaatgcttgccagtggggagctgactgccaaacgacggaagcaacagaaagtttggatgtggaatctcattcaggaaagtgtgttagagcatttcaggacccaccccacagtccgggaacagattccacttctggaacaaaaggttctcattggggccctgtccccaggactagcagcagacttcttgttaaaagcttttaaaagcagagactaataaaattcatcctgtataataattttacatatcatttcataaagtattttaatagaaaaaaaaaaaaaaaa

SEQ ID NO: 234406 - DNA, 721 bp, Homo Sapiens
ttccttagtattaattatctcattgggaagaaatttgtagttaaaactatttaatgtaatttgaatttaatttctgtaattgggaaggagggtaataatgaacaaaaagtttgagaaaaaaatgctttaatgggttttacaggcatgctacaatccaggactgtggtgttctatgtgccgtgtatggtcatattagtagctatttgttgcaagatacttgaagccaaatgtttgcagtataggttcctggctactgtttatgctgtgatttcactctgtctatcatgggcagtattagaaaacacactggttttcactatctggtttacaaacactatcattattttacctggattgaagtgcagaatttggcatatcgatgcatgcaatggaaagaaaaaaaatttgttaaaatttgtaaatgttcagctaaatctcagatatactgtgggatgagtatctcagggtaagtaacaaaaaaacaaacaaaaaaaatcactgaaatttttccctcacagtcagtagctttgtttgatatttaacaataagtatatggtgatatacttgaaatttatgtccagaatgtcactggaatattacaatgagcataaataatcaagcttaggactaaatgaaagatactatctcatgtatgctttaaatagagaatttatttcttttaaaaataaagctatttttccttaaaaaaaaaaaaaaaaaa

SEQ ID NO: 234407 - DNA, 738 bp, Homo Sapiens
  misc_feature (718)..(718): n is a, c, g, or t
cagggggagccacatcttcatgttagggctctaacctgtaccaattattaactgttgtctctatttcatcatttcttaaagggaaaaaaaagcactttttaaagagcatgagattttaaatttttcaaaagaaggatgctggatcattataagtaaggcatgttttaaagatcttcttatcaacagcttaaaaattagccagtatatactgaacatccactgtataaaaagcacattatggggtgctccagtaggtacagcagtgatcgagacagaatcatagccttcagggaagaggtatatgcaatgttctctccttccaaagattacctagatagagaactgttcataagaaatatcttggtactgtctacattactcttgagatataaaatatatattatttcttacgtctgaaatgagtcagttgtttctaaaacaatttgtattaaagtattcacattaaaaatttgtaaaatacagaaaagtagagagaaaaaatcatgaatttttaacatggtaatgattatatcagtttcgttcttggcgtttctttaacttgatgggatagctaatgttttttgtcattgcatagctttgtaaacttgtcctaaggattatataatttcagcatgagttagtttctaagtatgtcagaaatctagcttttttgtggtaattgttgttttacacaaaatgattaataaaagactctaanctaaaaaaaaaaaaaaaaaa

SEQ ID NO: 234408 - DNA, 731 bp, Homo Sapiens
agagcttggaaattataatagagttgggctttgacccgaaagtcagcagttcttttcattttagattttcaggcaagtttcagtagtttggagacttcttcagtagtgaccccagcttaacctacatataatcactttgcacacattttaagttaatcagatgcttccagagtcttggatttggttacccctttgttagataaggagacagattctaggttgggacaaacatcttaatttattctctaataataaagtactgattaaagagcaagttctcagagaattcacaaaatttctagaatccatgaaagatctagagaacataacaaatgaaactctagaaatttgaaagaaaaaaaaacacttagctgtaagtgctttgacctattttttttaaaaaaaaaaaaacctgtcttaattctgtgactgcattgcacccttcaccagcactaagagaagtcggaatggaagaaattaccgtatgtaattcttattcacttaaaatctttgtgcgcataggccttagcactttgacaaataaactctgccttttagctcctcactattgtcttctttcctgtcacttttaggctgtttcattggtcgtataaaaacaaccttcttcgaagttgaatgtatgtttctgcacatagacaaaccatattttactgactcattctatgttgaataaaggcatacagttttaccctaaaaaaaaaaaaaaaaaa

SEQ ID NO: 234409 - DNA, 792 bp, Homo Sapiens
  misc_feature (27)..(27): n is a, c, g, or t
agtatgtgtaaatgtacaatatttttntgctgttgtactcactgctaatagtggatgtataggtggtgtttttatttcatttattgtagacaaaaataatgaatttagtatacacatacccactaattcaagtatgtcagagcacaaagttggcagctggttatatttaattcagcccctctgaaaagcacatacagtctatactttgtttataaatatcctaggtcctccctgcccctaaatatatattttggtgaagctgtggtgcactattaattttctgtttcaaaatgcaatctaaagatgcaataaatatgatgaccttgatagttttaatgaaatcttcaattcttgcagctgtgttttggaaagtgattaagcaatatttctcaaacctgatgattcttggatatttagctattgtcctccaaagagtcatcgtttcacgttttcaaacatgtgctttgtgctgaagattcttgtcagatatcctgtgcttccagagtatttttatcttcaattttatttaattttgtttcattttgttttcataagacaatgtttcagatatgtaatggggcaaaccactatagatttctgttggatagaaaaatgaaatgttactaataagtttaaattgacccttcgttgactatcagtactgttgatacatttattagaatgtatgtctcagaagatggtttctgtttaaatttatggtcaagttacaacaactgaattctaatatggattaaaaactccacataaatatttaaaaaaaaaaaaaaaaaa

SEQ ID NO: 234410 - DNA, 759 bp, Homo Sapiens
  misc_feature (30)..(30): n is a, c, g, or t
tgatatggagctgtcactctagagctcgtncagatggaagacactatagaaccaggttggacagatttggggtcagggttggaggctgagttcttttgaggactggttggagtggcagccagatggtggctgctgacaaggcaagaggaatttcagagattaaacattgtcctttgaggaagggagaggaggtgaatgaactcccagaggaggtgagtggcttgttgggaggaagctcagttccagaacttacctcagtgcacttgggaggggtggagtcctgagcattccatgatttctgccctggccccacctatcctaggatggggtgggatggagagtgggttcagttttcttgtactttagcctggctgaacatgaactttgtgtttacctggaagtggtaggggtgggagagattctcatctttagttctggtgcccaaaatctttggtagatggagggaactggggattcagaagatgtggtaaaggtctatttctgtagtgtggcagagatgtgtttttctaaagtgtttgcagggcatttttccctcttacctcagattaagttatttatatattgttgattgaaggttttttaaaattgcttttaaacttctatttctcgggtaaattttttggtgacatgatatatttaacaccctatttatatactcctacctcttttcatataaatctcttactaagactactgaccaaaaaagaacattttaaaattaaaaaaaaaaaaaaaaaa

SEQ ID NO: 234411 - DNA, 685 bp, Homo Sapiens
  misc_feature (187)..(187): n is a, c, g, or t
tgcctggcgcccactggagacagacagacagacgcctgtcccccgggaccgaggcctgtgccgtccccacccgccccaacatggtgctcatccttgccgagacccctgcggtctgtgcccgcgcccagcccagctgccccggctgcacgcctgctgctcccagctcgcccggctgccacaagctctntgcgggtccatcctccccaccggggtccgtcctcgcaggccctgcccggcctctctgcagaccctcaagcgtcgtctgcatgagtgagcaggcgtgggtggactctggccgcggccacacttggtgctcaccagctgcttcggccttcaggtgacctccctccccacggcatcctgctctccgggtggaagagcagctttctgtctcccagaaggcatcgcttttccctcttgagcagatcggagcccctgggaggtttggaagctgcctccaagcctaggacacggaccggtggccggggcggcctctggcccctgacgctggctgagacaggcccgtggggcggggttttggggcgtgaacaaggctggcagtaagtggacaagctgctcccctggctaaggccctgccctgccctcagccagaggtgcctggccatgcctgcacactcctccccattttaataaatggtcgcaacttaaaaaaaaaaaaaaaaaa

SEQ ID NO: 234412 - DNA, 726 bp, Homo Sapiens
gtttagacacagatatttggaattagctatcttagtgccaactgctttttatttttttacttcatcaaggtgatgtaagtgactcacctttaaagtttttttagtgttattttttatcactactctgggaaatggtttgtcttcaagatgcaatacttttcttagtaaaggaaaaacagcataaaaagatacctggtctgccttgtacaagaaaaggcaatattagaggaagaaaatttaaagaaaagctagaggaaaaaaaaattttttaaaaaatacttattagaagcaaactgcccttgcatggaaaactgtttatttttttcagtgaaaaggaattctgctttcgtgtttttgggaaagcaggaactgagttcattacatctttaatttggcagaaattagcctttctgtgaaccagatgtggtttggggcagatctgtagtaaacaatggtgattttatttatttttactctctggaaaaggagataatacaattccagaaagtgaactcatatttctaaggttaagattcccttttattgcacctagaatagtgctatgcacagagcgggtgcttgagttgttgtcgttttttgtttgttttttaaatgtaaactggtaaattttgtgcttatcttcaaggctggcttaagtataaaattgttttttaaacacttgaaaaattaaaggatttgttttatattaaaaaaaaaaaaaaaaaa

SEQ ID NO: 234413 - DNA, 686 bp, Homo Sapiens
  misc_feature (87)..(87): n is a, c, g, or t
  misc_feature (135)..(135): n is a, c, g, or t
caaccctctaaaaatgtaaaaaccatgtttagcttgcagctgtacaaaaactgcccaccagccagatgtgaccctcaggccatcatntgccaatcactgagaattagtttttgttgttgttgttgttgttgtttntgagacagagtctctctctgttgcccaggctggagtgcagtggcgcaatctcagctcactgcaacctccgcctcccgggttcaagcagttctgtctcagccttctgagtagctgggactacaggtgcatgccaccacaccctgctaatttttgtatttttagtagagacgggggttccaccatattggtcaggcttatcttgaactcctgacctcaggtgatccacctgcctctgcctcccaaagtgctgagattacaggcataagccagtgcacccagccgagaattagtatttttatgtatggttaaaccttggcgtctagccatattttatgtcataatacaatggatttgtgaagagcagattccatgagtaactctgacaggtattttagatcatgatctcaacaatattcttccaaaatggcatacatcttttgtacaaagaacttgaaatgtaaatactgtgtttgtgctgtaagagttgtgtatttcaaaaactgaaatctcataaaaagttaaatttttgtctgaaaaaaaaaaaaaaaaaa

SEQ ID NO: 234414 - DNA, 754 bp, Homo Sapiens
gcgagtgtatggagttagtgtgaacttaagagctggaagacagctgtagagcaaagcacatccaggagccccagttgtcactgcagtctgggcaaccccagcaatgaaaaggggtgagataacgctcattgctcttcagagagagtggttggagccccccccgccccgtatgcttacattattgctcttttagtttgacatggtgtttgggttttgtttttttgaaaggtctgaaaaggtgaagccccctacccaatggcaatatgaaaccttttgtgcttctcttcagccccttccctgtgtccacctttctctcctcttcccaagcctttttcctactacctttacccagtttgtgtgtttgagctctgcattcaggcagctgcaacattccagtgtttgaactgtcactgattcttgcgccctagacaagctaaccaggtttaccatctcactcccagtaatacccagctcctatctaaagccccattctgcatgagaatttggtgtttggaatgttttctgactcttggggcgggattcctcgccttatcatcctcactgtggagtaatgagggggaggagaatctttatcagaaactggttttgtgtagtaaactttcttttgtggttttttgttttgttttctgggttttgttttttgtttttgtctgtgcaagacctgcagctgctgaaaatcagctttgcctttaattaaaccatgttctctccaaccaaaaaaaaaaaaaaaaaa

SEQ ID NO: 234415 - DNA, 815 bp, Homo Sapiens
gaaagaggacagtagccataaaagtgttagcagtgttatgctatgtctatataaataagcatgggccattaaaaatagcaaactgaaaacagttcatgtgtggggggcaagtttagaagtaattttaatgtatctaagaagtgatttcctttattgttgtactcaggtacgaagactaaaaatcaggatgaatccagaaaattaacacaaaaaagtatgtattaggctacttcctgtcatagtgaaattaaacactcaaagtaatgtaatctcagctgggcgtggcggctcatgcctgtaatcccagcactttggcaggacaaggcaggaggatcacttgaacctaggagttcgagaccagcctgggcaacacagcgagaacttgtctctattaaaaaaaaaaaaaggaatgtaatttcaatctttttcttgatatatggcttgagaatgataatgtaaaaggaattcttctcttacttcaataaaatgggttttaacataactttaaattcagttaaatatacaatattgaatacctatagttgactttgggatggggactttttcaagtcattaagagtgtttgtttaaggtgatctcattgatggtagttctcagccgtctcaaaaactgcaagctaatcagtcagacattctttaatgaccccaattttttcactttaattgttaccatgttttctatttttactgatttttgctaaagcatgtaagagtgaatttattatagcagtaatcttgtgtttctcctgatgtgcaataaatcaataattcaccagcaaaaaaaaaaaaaaaaaa

SEQ ID NO: 234416 - DNA, 729 bp, Homo Sapiens
gccgtctgccatcaacgaagtgtaacccgagaatacaccatcaacattcacaagcgcatccatggagtgggcttcaagaagcgtgcacctcgggcactcaaagagattcggaaatttgccatgaaggagatgggaactccagatgtgcgcattgacaccaggctcaacaaagctgtctgggccaaaggaataaggaatgtgccataccgaatccgtgtgcggctgtccagaaaacgtaatgaggatgaagattcaccaaataagctatatactttggttacctatgtacctgttaccactttcaaaattttttttttaaggtgagttgaagtcttgggaatagactgaaaactaacaaaaccggccccatcgctgaggaccaggtgagcctcttcagaatgcatcatttccacccatactaaatgactacatcatctctttggacatcccaattcacaaaagtctgaagtagttcccagtaactgcagggttcttgaccatttcaatgtcctctgtccacaggatgggacaaaaacaagggcagatgctgtagtctgcaagctcatatcctcaaagagaccaaaatgccatttataattttactgtcatattcactgcagccatgttatttaaatagtcattacagaatcatgaaaataaccacaagaacttttaagtgtgaaataaaggtctcataaatttctgttccttaaaaaaaaaaaaaaaaaa

SEQ ID NO: 234417 - DNA, 753 bp, Homo Sapiens
agcagggttggaacatgtggtggtatgctggagctcacaccacgaagctcttggggcctgatccttctggtgacacttcacttgtcccattggttaacatctgggtgggtctattacttactgtgatgactgctgtctcagtgggcatggtgttgatccacggggtactgtgataaccaccatggatacattttggtggcccactgggtactgtgaggactgctacattgatggatgttattggctaatccactgcatggtttgatggccaccatctcggttggccctttgggtgtgatggtgatagcatttcagtgacatcttctttggccccccccattaggtgctgtgcccacttcttttttggtgtacttggcacagtaggtgccaagttggccaccattctgtgtaacaccttttttggcccattgggtgctttgatggacatcatactgggtaggtgacaacgtcagtgggccaccatgtgccatgatggctgctgcagccccgtgttggccatgtcgtcaccattctctctggcatgggttgggtaggggatggaggtgagaatactccttggttttctctgaagcccaccctttcccccaactctggtccaggagaaaccagaaaaggctggttagggtgtggggaatttctactgaagtctgattctttcccgggaagcggggtactggctgtgtttaatcattaaaggtaccgtgtccgcctcttaaaaaaaaaaaaaaaaaa

SEQ ID NO: 234418 - DNA, 717 bp, Homo Sapiens
tgacctgtccttttcccacaggcctctgggggcaggtggcaaggcctggccgggccttccttcctggccttagccacctggctctgtctgcagcaggggcaggctgctttcttatccatttccctggaggcgggcccccctggcagcagtattggaggggctacaggcagctggagaaaggggcccagccgctgacccactcactcaggacctcactcactagccccgctttgggccccctcctgtgacctcagggtttggcccatggggccctcccaggcccctgccccaactgattctgcccagataatcgtgtctcctgcctccactcagctgcttctcagtcatgaatgtggccatggccccggggtccccttgctgctgtgggctccctgtccctgggcaggagtgctggtgaggaggtggagccttttgaggggggccttccctcagctgtttccccacactggggggctgggccctgcctccccgttaccctccttccctgcaggcctggagcctgtagggctggactgaggttcaggtctccccccagctgtctcacccccactttgtccccactctagagcagggaggcagtgggggaggagttgtgtctcgtcttctgtctccatgtggtttttgggtgtttttcttgttgtgtcctggattccgataaaattaaagaaattcttcctcaaaaaaaaaaaaaaaaaa

SEQ ID NO: 234419 - DNA, 761 bp, Homo Sapiens
  misc_feature (93)..(93): n is a, c, g, or t
gagggtggacgatgtgagcaaccagacctcctgccgcatggccggcctgaaacccggcaccgtgtacttcgtgcaagtgcgctgcaacccctntggcatctatggctccaagaaagccgggatctggagtgagtgagccaccccacagccgcctccactccccgcagtgagcgcccgggcccgggcggcggggcgtgcgaaccgcggggcggagagccgagctcggggccggtgcggcgcgagctcaagcagttcctgggctggctcaagaagcacgcgtactgctccaacctcagcttccgcctctacgaccagtggcgagcctggatgcagaagtcgcacaagacccgcaaccaggacgaggggatcctgccctcgggcagacggggcacggcgagaggtcctgccagataagctgtaggggctcaggccaccctccctgccacgtggagacgcagaggccgaacccaaactggggccacctctgtaccctcacttcagggcacctgagccaccctcagcaggagctggggtggcccctgagctccaacggccataacagctctgactcccacgtgaggccacctttgggtgcaccccagtgggtgtgtgtgtgtgtgtgagggttggttgagttgcctagaacccctgccagggctgggggtgagaaggggagtcattactccccattacctagggcccctccaaaagagtccttttaaataaatgagctatttaggtgcaaaaaaaaaaaaaaaaaa

SEQ ID NO: 234420 - DNA, 676 bp, Homo Sapiens
atgaactttttaatatgcaatactcaattgtaaataaccattatctttactgaatcagatgtttcattaactgttagcagttatttcgagttatttatatatcacagaattttgaactaaagatcatctagctgaatttcctttatattaaagaagaggagaaaatcttaatactaagtatgtgtgagcctggagctgccatggagcatgtagagagagtctcctagttgataccaactcaggaaagcagaatcaagcaataaagagacattttgggcctgatgacatcatttcagcacctggatccagcgatgcctaaagatgtgactcctagacttttcacttacatgagccaaaacggttcctttgcatcaataaatcgctctgtgatgcattttataatgtacaaccaagaatctcaatatttattattttgcattaaatatcagtaagtttgatataaaaagctcagtaaaattcattaatttgagaatgtgtctatatcatagtaaagttttaaacctacataattttcaatatttataccttttactgcaaaaataaaaatgagtttatccttgccctaaagctgtaaaattaaactctgtacaattctagttatttgaaatataaaataaaattattggtcatttcatgtataaaaaaaaaaaaaaaa

SEQ ID NO: 234421 - DNA, 677 bp, Homo Sapiens
tggctctccacctcagccttggataatgctgttgcctcatctataacatgcatttgtctttgtaatgtcaccaccttcccagctctccctctggccctgccttcttcggggaactcctggaaatatcagttactcagccctgggccccaccacctaggccactcctccaaaggaagtctaggagctgggaggaaaagaaaagaggggaaaatgagtttttatggggctgaacggggagaaaaggtcatcatcgattctactttagaatgagagtgtgaaatagacatttgtaaatgtaaaacttttaaggtatatcattataactgaaggagaaggtgccccaaaatgcaagattttccacaagattcccagagacaggaaaatcctctggctggctaactggaagcatgtaggagaatccaagcgaggtcaacagagaaggcaggaatgtgtggcagatttagtgaaagctagagatatggcagcgaaaggatgtaaacagtgcctgctgaatgatttccaaagagaaaaaaagtttgccagaagtttgtcaagtcaaccaatgtagaaagctttgcttatggtaataaaaatggctcatacttatatagcacttactttgttgcaagtactgctgtaaataaatgctttatcaaaccaaaaaaaaaaaaaaaaaa

SEQ ID NO: 234422 - DNA, 721 bp, Homo Sapiens
  misc_feature (18)..(18): n is a, c, g, or t
  misc_feature (94)..(94): n is a, c, g, or t
ttttaagaaaatcaatancatatgaaagggcattctcacattccagcagatatgtggcacagcctacccaacatatgcataattgtctcttctntgctacaagatctccaaatttgagtttctgtcaacagaggcagaagaacttattgaatggggaggcagagggttgccactggctgctagatttgttcttctgcattttatcctaagtgacggggaaaaattaaatgactgtgtaggcaatggattttgctcaggctgattagaggcttacatagtgtgagtttaaagtttctgtgtacctaatgtaaaatgctttcgatcacacctctgtagagatgtttgcctttccctgtcattcaagaatatgcgacctatagagttacgttgacttttcagtgtttgctgaagtacagagattagcaatgccttggaatagtgttgctttttaaatccagaatattactcggtttatttaatacttgagcccttgctaaagttgctcctcatattcttttgaaaatgtacaaaatgagaactctgattcctaccccctagagtatacagaatctccagggagtgggcccatcgaacccgtgtgtgatatagaggactcttgataaaaactgtgtttatataaagatggtgtcaacctctacattccaagatttcaaatgtggattaaaaaataagttttaaagttaaaaaaaaaaaaaaaaaa

SEQ ID NO: 234423 - DNA, 676 bp, Homo Sapiens
tgaattttacactgcctctcaatgatggtgtcagcatttaaggttatttaaaaaatacaacctgaaggttacataaagtttcatttaaaaaataagaccttataagtctacttttatttccagtggacagcaactacttaatcgtcttaaaactttcttcttacaatattactttacaatattacctgttggatttattatctgtgtacaaatcagttagttgaagggccaaagaataaaggcattttgtgaattatgaatagctattttgaaatggtcatggagactagctactctagaaaattgggagaatatactgtattaagttactatctggtataacttcaattaattgtgaaaattgtagcagagatctagatatagtttatgaacttctaaagagacattaaagggaattcaagtacttgtgtaaagatgaaccaaggtagagatgattgtgaattggtgatctgctgtatgttacagttatgtaatttgacttgtttcaaaattattaaagttttaagtgtatgcattctactggtcaataagtaaatatattcaggctctgaatgtagacagataaatatataaatatagaaagtacatttgttagaatacaaacaagaataaaaattgagtacagaatgaaaaccttaaaaaaaaaaaaaaaaaa

SEQ ID NO: 234424 - DNA, 682 bp, Homo Sapiens
ttgcaacatgcccagttcttcttgtgaagaaagtggttcccaaagtatatagttccatcccaggacttaaggccctataaggtaaatatagatccttcttcagaagctccagggcattcttgcaggagcaggccagtggagagcagctgttcctccaaattttcctgggatgaatatgaacagtacaaaaaagaataaattctaccagaagataaagaaaaaagcaagtattgcataggcacctgagcataggtatgaccttgggaagacattggctccataagcaatgccaagagaatgatcaatagtgagtttgggtgatgcagataaacaatctggataattccatttcttttttcccaaaccctcaaacagagtgccttaaaaaattgttttatcaggataattgtctcatgaccaaatccacgctcaattagagccattcaaaattccttaagatcatgggttctgacttcagccaaacaaaacaatcaaaacctaccaaaaagggactggattgtaatgtcctctccatcatcctcagtgtgagtcctcagagcctccatctgccaagaacattcagttggattccatcgtttggtttagcttgcttgcacgggttgtaggaaatgtctaatttgtaaatgttaatagatacctttggaaagaaaaaaaaaaaaaa

SEQ ID NO: 234425 - DNA, 697 bp, Homo Sapiens
agccatatgaatgcccaaactgcaagaaacgcttttcccattctggctcctatagctcacacataagcagtaagaaatgtatcagcttgatacctgtgaatgggcgaccaagaacaggactcaagacatctcagtgttcttcaccgtctctttcagcatcaccaggcagtcccacacgaccacagatacggcaaaagatagagaataaaccccttcaagaacaactttctgttaaccaaattaaaactgaacctgtggattatgaattcaaacccatagtggttgcttcaggaatcaactgttcaacccctttacaaaatggggttttcactggtggtggcccattacaggcaaccagttctcctcagggcatggtgcaagctgttgttctgccaacagttggtttggtgtctcccataagtatcaatttaagtgatattcagaatgtacttaaagtggcggtagatggtaatgtaataaggcaagtgttggagaataatcaagccaatcttgcatccaaagaacaagaaacaatcaatgcttcacccatacaacaaggtggccattctgttatttcagccatcagtcttcctttggttgatcaagatggaacaaccaaaattatcatcaactacagtcttgagcagcctagccaacttcaagttgttcctcaaaatttaaaaaaaaaaaaaaaaaa

SEQ ID NO: 234426 - DNA, 697 bp, Homo Sapiens
ctggagggctgggcccacctctgtctgcatcccgtccccattccccgccccgggtggcaggggctggagaggaaggagcttcaggcttgaaaaccatcaaagcaggtttcttccgagatggccagtggtcacctgagatggagcagagagcacctgtggcgggcatcttctctagaagccgcctgtgagccctacggaggccctgggcttcgtgccgtaagacagacggtgtcctgcaggtacgtgggggaaccctgtaggcagggactttgcctgctttctcagaacaggacagaggagtttggctggggcagcccgaggtgaccgggatgctgtcgccccagctctgggccaggctgatgtgggaagggaggaaggagggacagttacgggccaggctgacgtgggaagggagggaggagggaggtaggagggacagaggcctggctgctctgcagggctgggctccgtggcatctcctggtggctgtcaggtcctgcctggccccacgctgaggccagtgtgatggaggggcctggaagcctcatccttcttgattgccacgtggtgagggccacaggcatgcgccaccgcactggactccccctttcatcatcaaagccaaattttcttcttgtttcatctaggcctcccagtggagacaccagtgtgtgattgtaaaaaaaaaaaaaaaaaa

SEQ ID NO: 234427 - DNA, 604 bp, Homo Sapiens
gctctgtgctcaatcccatgaattattaaatttacaatgtttgtccccaaatgaaaaccaatataaatgaatgatgttttaatctgtactttatgggaagttgcctatttgtcagtagatgtggttaagtgagtcctctggtgcagtgacatccttttaagccatctcatagggatttaaagaaggccaataggaatatagatattggtttttctttctctgacttgaactaagtaggagaaaccaaaccataaacctattacaaactacccaggcagaggcatttacttaattcatcaactagtgcaattaaaaccctgaaaacacatgatccttgttgactctgcttggttgaagcaggaaagaatggtcttgatggtcagaaagttttaaaattaatgggcagggcctttctggaccctgttttccaaacacgttagatattccgtcttgaggggattggagtaggctacagtgagggggtaatttttggatgtatctggacttttaaaaaatgtgcctatatttatagcaccatgaatattatgtaaaatttatatatgaattaaataaatattcacctctgaaaaaaaaaaaaaaaaaa

SEQ ID NO: 234428 - DNA, 727 bp, Homo Sapiens
tcatcatcaactgtgtacaagaatctctcaacaaacaactgtagtgccagaatctgattcaaatagtcaggttgattggacttacgacccaaatgaacctcgatactgcatttgtaatcaggtatcttatggtgagatggtgggatgtgataaccaagattgccctatagaatggttccattatggctgcgttggattgacagaggcaccaaaaggcaaatggtactgtccacagtgcactgctgcaatgaagagaagaggcagcagacacaaataaaggtggtccttttgtttgatgaagaaataaacttcagctgaagattttatataggactttaaaaagaagagaagagaaagaagaaacaatgcatttccaggcaaccacttaaaggatttacatagacaatcctataagatcttgaacttgaattttatgggttgtattttaataatgtaagtaaattatttatgcactcctggtgtgctatgaatattattccagttagccttggattatttcagtggccaacatatgcagacatttgtactcctcaaccattttctcaaagtaatgggcattctatgatttagacttcaaggaattccaatgatgaagattttaaggaaagtattttatattcaacaggtatattctgctgcatgtactgtactccagagctgttatgtaacactgtatataaatggttgcaaaaaaaaaaaaaaaaaa

SEQ ID NO: 234429 - DNA, 704 bp, Homo Sapiens
  misc_feature (21)..(21): n is a, c, g, or t
  misc_feature (34)..(34): n is a, c, g, or t
agtttacttgagggcagcctntgtggaagtcagngaggttccaaaggcctgtagattgcctcctgacaaggtcttgattcctggttttctagcacccatttgcattttggtcttcagcacaaagccttgttccctgtggccggacttctgggcaataagactggggagtgactgttgagcagtctgctgtcaggagagatggctgaaaaggtgatcatcttggtgctaaacaagtaagaggcaactgccctgtttttgtttgttttgaggcacaatgaaactttagccaaactctgcaagagggtcccatctcctgccatggccaggtgtgagagaccaaaccgagaaaacagcatactctatcacttaagccttgggtagaatgggaattctttaccctgggtaaacgttttaacaaaaaaatggaacttaacttcggtttggactgtggtcgtgctgaggcaggagtggggttgccctcttggggctgaatctccaggcctcacgaggtcccctgtggggatgctgctatttctaagatgcaaattgcacatttcctagattttgtatctgtggatttggataagggaggggaacacggacaaattgcttgtacaatttgaaatgggcctcaatggtacttcaaaccttttgattattcctaaataaaaacataaatatatttcaaaaaaaaaaaaaaaaaa

SEQ ID NO: 234430 - DNA, 647 bp, Homo Sapiens
caaggaagcagaatttcgggagcggctgacccagttcctggaagaagagggccgcaccctggaggacgtggcccgcatcatggagaagagcaccccgcacccgccccagcccaccacacacaccatttgattaaaaaaaaaaaaaatactgattccttgtagcaacccaaaaaatgtaaagaaagaattcgacacaatggggttgcgtcacctatagttttcatttcctcaaatgcaactcaaggtgctcagcttgataaagggagagagggagggcaggggagaaactgactcctttttccatctcttttttgcctgcacacttaatgtggactgcctccttggacttaaaaagagggcttgagccaacatgcaaatcaaaaaacatttatgaactgatttcttagctttggacttgacaactgacgaatgctctgggggtgacctggcccttgctgtccgttccactcccatccttgatgatggagacacctgtgtttatgttgtcacttcgcttgccatcctcatgccccgggctctgctggtttggaggggacagggcccttggtttgcacacctcacccgatcttggttataaggtacagtaaaagcgtctgaaaaatgcattcaaaaaaaaaaaaaaaaaa

SEQ ID NO: 234431 - DNA, 697 bp, Homo Sapiens
tagtaatgcttaagactgttttaaagaaaaattgctttctgtttaattaatgtttactgttattaatgctagtgatacttaatcttgaagcatcaagttttcagaaacctatagtgatcaataatgggtctcagatgagaggatgattatttttttcatggaatttataaggctcatgatataggaaaaggaatatagggctaaaaatagttttatttctgatataaattctggtacttgacaccaaagtttgaagtcaagtcatgccaataaattttaacatccaaatgaaatagatgattttctatgaagatgaaaaataccaaaattgactcaagaagggagagaaaatggaagatgttgaaaaatagcataggaattcagaactgggctctagaatcagatttcctgagagttgaattctagatctgccatttattagctgtgggattttgggcaaatttcttgactttctgtgcttcagttttcttagctgtaaaattggaagagttgttatgaaaattcactgaaagtatatttgtatacatcataggatagtgtaagaatatagtatggctttgagaaatgttcattattattactcccagaggagttttaggtattaagtgatgccaaatataatttgttaattgtataataaaaatctatattcttactgaaaaaaaaaaaaaaaaaa

SEQ ID NO: 234432 - DNA, 662 bp, Homo Sapiens
gtgaatgacaggaatgatctattaccaggtgactagtcggaaactacacagaggtgcactggtctgcatttgggggctaaagtgtatatattccatttaaaatggaatttgtttgtatttggggcagtcttcagtaaagcctttctcctttcttttctccattgaggacagttctgctcagcaaaattgttgagtacctgttctgggcaggtcccacgctatatgcacaaagttaagaaaaacttggtcttagcccttgggagctgacagcccatgggcattaaggcaaagtagttccagtgatttaaaatacggttccaaatacgctaaaaccaacttgtgccaaccagatttacagattggaaatactgcagatgatgtgaagttatcagttggaggagctgtgattaagctggataataagagaacgtgccatctgtaaagcactcagaaggcagccatccctagatgttggtttcatgtatattacactatctactactatccataaatgcaatgatatgcatgttaacaacattaaaaacagcaaacagcaatctaagtacagaaaagctttttgtgtgtttgtttaaaaaaattgaagaaaattcaggaagaaacgtgttaataaacattgtactgttaaaaaaaaaaaaaaaaaa

SEQ ID NO: 234433 - DNA, 561 bp, Homo Sapiens
  misc_feature (40)..(40): n is a, c, g, or t
gaaaacctttaccttcagtatgtgtatttcattagtattntcataaagaatcagtttttagatccagttaaccactgaaaccagaatatgcctatatgtcaggcatgatttactacatgtgtattctatttattgagttgatttaattttagtgggtttgtggacattaaaaaatacatgtttaatatttcccaccataattacatttacacctttgtctttctttttcttcagtacttgagttgtcagtgttttgtgactcagtctggaaatctgtttaaactaccttgtctttatacaactaccaacaggaggattggtaatttgggctctgggtgagacatacataggttcagtttccatgtctgcagctgaatgcatgacagggaaaatcatttagcctccctgggcctcagtttcttcacgtgcaaaatgtaattaacacaacctacctcatggggttatattgaggattagagataatgtaggtaggatacctacacatagtaagctattatatattggcaacaataataaacttttaaaaaaagaaaaaaaaaa

SEQ ID NO: 234434 - DNA, 493 bp, Homo Sapiens
ccacccgagaaattggcatccaattctttgattcacttttggacacaaagaaaatagaacgattcaaccctcccagcaatgtcaccgtacgttgcaacacgacgcactgcctcgtacggtggaaacagcccaggacctatcagaagctgtcgtacctggactttcagtaccagctggacgtccacagaaagaatacccagcctggcacggaaaacctactgattaatgtttctggtgatttggaaaatagatacaactttccaagctctgagcccagagcaaaacacagtgtgaagatcagagctgcagacgtccgcatcttgaattggagctcctggagtgaagccattgaatttgggtctcactctgtcacccaggttgtagtgagccgagatcgcgccattgcacaccaacctgggtgacagagcaagattgcatctcaaaacaaacaataataataaataataaaaacctgaaaaaaaaaaaaaaaaaa

SEQ ID NO: 234435 - DNA, 496 bp, Homo Sapiens
gttaaggaatatatttactaatttccaatgtagtctatgaggttcatttaatgtttttaaattttctatgtgtgtggctagaaggcatttgtagatatgcaaatatttgttataatcctgatcccttttataatttgagttattttcttgccctgggggtttacaaggacacgagtgcaacactctttatatggagaagacaggaaatagaccttgagctctaaacctttgcctgaccccctcttctgtgggcctgtgtttctggacaatggggaggtttacagccagtatgagcagagcagactgggagcacctcaatcctcatgcttatattagaaaatgccttagcaatgttgatgggctccttgtagcactggagcatggggagggaacaagctcactgatgtcatttatgcctattgtcttcagtaacttagaacttattatggtatattaaatcaataaaatgttggtgatgaaaaaaaaaaaaaaaaaa

SEQ ID NO: 234436 - DNA, 441 bp, Homo Sapiens
agtctccggtgtccacgcgttgactgccgtgtgtgactccagtcggcgtctcaacagtctccggtgtccacgcgttgactgccgtgtgtgactccagtcggcgtctcaacagtctccggtgtccacgcgttgactgccgtgtgtgactccagtcggcgtctcaacagtctccggtgtccacgcgttgactgccgtgtgtgactccagtcggcgtctcaacagtctccggtgtccacgcgttgactgccgtgtgtgactccagtcggcgtctcaacagtctccggtgtccacgcgttgactgccgtgtgtgactccagtcggcgtcttaacagtctccggtgtccatgcgttgactgccatgtatgactccaggtattgagttcatcttcaacttctcccaacaatgaactggagttttctgtgaaaaaaaaaaaaaaaaaa

SEQ ID NO: 234437 - DNA, 536 bp, Homo Sapiens
acttgtggtttagacttcagtcttcagagccccactcaggtgcctgactgttcttgggatgaaacaataaagatctatgaccctgcttgtcttactattcatgcttgagatacactactttggtcagaaacagaggatgttggctgaagaactgcctaacagcaaataaattaactatggaaaacatagacattatgcttttatatgctattcagatttcaaatctttccaatttaccctggaatcagttttgagggagctgataaagactttagctgactcgttaagcctgatacataagccatatttaaaattctaagaaataattaatgttatgatatatcttgtagtatctattaaaatgtagtctctgggtcataaaatggattaaaatatgggagatcagtaggttatacgtatatagatagtgatatatttcatttttaatttgtcatttttgatgtaaaatataatcactgctgtgataaataaactatctattgatcatttatcattttaaaaaaaaaaaaaaaaaa

SEQ ID NO: 234438 - DNA, 384 bp, Homo Sapiens
cccccatacaccacctaagaagtcaatgcaaactttcacccctttgactaatataaaatgagtattcctggaggcagtcatccccaaagaaaatggggagtggcaaagcaacagggcaaggtgttcctgtttcaaagcggtgaagaacaaaatcgcacggacaattttgagctgcaaaaattggccccaggaaacttctgagcttgggagataaaaggcagaacctggaattgtagcatccaaggacaaaaagaatgtttgccagcaaatcttggctgtcaattttaaaggggccgtgggcggggcggaggggggcgggtaggattccaacaaaaaatgagtataataaataaaaaataaaaggggaaaaaaaaaaaaaaaaaa

SEQ ID NO: 234439 - DNA, 555 bp, Homo Sapiens
  misc_feature (532)..(532): n is a, c, g, or t
cttgccctcccaaagtgctaggattacaggcgtgagccactgcacctagcccactgatcactcttctgcttacagaatatcagaagtcattctagaggcaaatttgaagagtggaaaaatcactttttctgaatgatcttgtttttggtgtagatgtttttattgtgtgggttagtttaatgaatacataaagactaccagtaccattctgtctttactccgtggcatctgtggaataaccctgctaatgtaacacgtgagaaagcctttggtcatgccacccactctaccagttgtccccaccatcccccgccctcctccctgtgagacactgggccaaaggctcactacccctgtgcgttgtccagcacacagacactatgtgcattatttgtacataaggataatcacatctacctgagactgctatcatggaaattaaatgtttggtacatgtaaagtctttgaaagtgtaactggaatattgtgtaattttaataaataataactattgttgtttttatgatcattnctcccaaaaaaaaaaaaaaaaaa

SEQ ID NO: 234440 - DNA, 537 bp, Homo Sapiens
  misc_feature (114)..(114): n is a, c, g, or t
gtgcatagcagatcatcttcacctattcctctgactcctagcaaggaagagagtgctgtgtttgctggctttgaagggagaagatctaatgaaataaacgaggtaaagaatgtntgatgtttgttcccaatggttccttcatttgtgattacttcaattctataggtggaagtcaaggttcttaaagcatcatgttgctgctattactgtaaacattatcaaaattgtacgtaattttatgcttaacactgtgggttttggtttctaaagtgagaaaattgttaggattccagccctacactgacaatcatcttttaaataagtgcaattattgaaataccagtatttttactttatagaacagatgtcaatttccacagagggccagagggtaaatactttcggctttgtgggccatatggtgtctgtcaaggctacttaactccaaaagtagccacagatagtatgtaaataaaatgagtgtgctatattccaataaaacttgatttatggacactgaaaaaaaaaaaaaaaaaa

SEQ ID NO: 234441 - DNA, 460 bp, Homo Sapiens
acgcggcagcgcgggtgctgttggcacaaacacaggcagagggggccctcctccccacgctctgcgtgcttccggcgagcaaagccccgcccaaggtgtctcctagctggggaaccagtaccggcccctggtgcactgtccagctctggagagataaaaggaagagctggtgccttccagtggactacttcatcctagaagccctcgggatgcacgtttcactggaagaaaggcctagcttgggtaggtccctagaaagaggggatacccctggaggagggggtatcctattacccccactctctaaaaggaaggatggaaatgtacatgctacccaaggacattcttctagaagaagcctggctctttatatatgttgtcattttatcctcacagcaactccaagagatgttttacaaataaaacaggtctcagcaaggctaaaaaaaaaaaaaaaaaa

SEQ ID NO: 234442 - DNA, 515 bp, Homo Sapiens
aatattaaattaaaaataagtagtacagtataatcacatccctgttataagtgaggaaataaagtatttttgaaaaatagttttcctattaattattgagtttcatcttttattggggagaaattaaaaataattttttttaattataagaaacatactttgtcagcagctgtctcaggaagagactcttcaatgccaagttctcgtcgtctttcagccctaacttctgcataactacaaatggaaaaaataatcaaattttagtgtctggtcattcgtttaaaatactgcacagctgtaactattcagtgttgttacgtgtctcatctgttcatctagactatttgctatgtgctacacaaacctaaaatatacctataatgtcttaatttaacttgcatttttctaggtatcttaaagtttcatacactgctgtaaacgatccataaccacacaatacttaaattaagaaaaataaataaaggaagtgtatgcttaaaaaaaaaaaaaaaaaa

SEQ ID NO: 234443 - DNA, 640 bp, Homo Sapiens
  misc_feature (51)..(51): n is a, c, g, or t
  misc_feature (141)..(141): n is a, c, g, or t
cagaaaaggaaacattggaatataaaacagttagaacattctctgaatctntgaagtcagagaaaacagaagattaccttagagaaagtataattcaacaacatatgtttctccagagccagcttcccttaaggagaaagngaagtcaaggagaaaaaaggatcaaactcatgcttgtccaaatgttaggaaagccaggcctgtgtcctatgatagaacagaaccaaaagatgatgatgtgataagaaatattattaggctacgagaaaagcttggttggcaaactatattaccgcagcacagtttgaaatacggaagctccaaaattgcaattcagaagattactttaaagaaacctttggaagatgatggagaatttgtttattgccttcctcggaaaagtcctaaatccctttacaatccatatgatcttcaggtagtatcggctcatactgctaaacattgcaaagaattttgggttattactgcttcatttatctcaaagagatacttggtcatttgtggagcagtttatatataagaatctccttgggagcatgttatttaatagtgaagtttttccttttgtgtagagatttaggtttgaagattcaactttaatctctacaaaaaaaaaaaa

SEQ ID NO: 234444 - DNA, 623 bp, Homo Sapiens
  misc_feature (35)..(35): n is a, c, g, or t
gataacagagtttgatcctgctattgtcatctctncccagtgggaagtacaatgctgtcaagcttggtaaatatgaagattcaaattcagtgacatgttcagttcaacacgacaataaaactgtgcactccactgactttgaagtgaagacagattctacagatcacgtaaaaccaaaggaaactgaaaacacaaagcaaccttcaaagagctgccataaacccaaagccatagttcataccgagaaggtgaacatgatgtccctcacagtgcttgggctacgaatgctgtttgcaaagactgttgccgtcaattttctcttgactgccaagttatttttcttgtaaggctgactggcatgaggaagctacactcctgaagaaaccaaaggcttacaaaaatgcatctccttggcttctgacttctttgtgattcaagttgacctgtcatagccttgttaaaatggctgctagccaaaccactttttcttcaaagacaacaaacccagctcatcctccagcttgatgggaagacaaaagtcctggggaaggggggtttatgtcctaactgctttgtatgctgttttataaagggatagaaggatataaaaagaaaaaaaaaaa

SEQ ID NO: 234445 - DNA, 720 bp, Homo Sapiens
taagtcctaagtcactacaacttaagtagcctaactgtatgttggtaccccaaactttttctataatggttaaggaggaggcacttactgagtttattttaaagttatgctagaaatgtttttcttttgtagagatgctctctctctctctctcttttttttttttttttttttttccgtgagggcattaggctgctgattgtaagttatttccaataccactgatcttggtatctgccaagggcttccttgccttccctgggcagttttaggatttcaccctagtagggggtatgaggcactgacccctttattctggacccaaactgctttagagcagagttaatacctctccctccctcttcaaaacagctacaggaactgcaggcaccacatatgtgtgaggccacatcactgcccctgaggcttcaactatttccaccatgcactattactagctactaacagccattttaagagatctcctagcctgcaaggtagaattctgggatcagttccaaaaccagaactgccagtaatggtgacttgaatattttatttgatttttggtcagtaaccttgtcatttaaattggactttccaatagccttaacatggcctctgagaagtttcctccagaaaggtctttaagctttcgcttttcaataagtaagttctttactgcttttctactgctactttaaaaaaaaaaaaaaaaaa

SEQ ID NO: 234446 - DNA, 734 bp, Homo Sapiens
gcactggggtcatgcactgagcgacccccaagcccttccttaagcctgtgggtctaagaacatccagagcatattagcacatcactccaagcaacaacctccgccagaagaaagcaaatgctgttttacttcaaatgatggatgctgcaatcatatgatatttgctaagctgccaaacatgtttatttagcagatactgtatggaattttctgaacacctctttaacgtatgaggaaggttgtcctgctacggatgcaattcaattcttccttttttattactatttcaaacacacacacatatatatatatattaaacttagatgataatcaaaatcaaaaagtcaacgtaaaaactggtttcttggtttggttgggtcttatttgagttagtttgtttctcagtttctcgtatggattctttggggtactttggtagcctgagtggtctttttcatctctttcgcgtccattactcaaggagacagcataacagatgcagaacaagtcatatttgaagaatgttttgtactaaacttcatttaattattcagtttttaaagggaaaaagggcgtgagctcacacagtgagctgtttatttaaatatcattaaggagaaaaaaaaatatggtgagaagctcgctcctttcaacttgtttggtactgacagctgatagaagctattttctaataataaacatccagtgtgtgaaagacaaaaaaaaaaaaaaaa

SEQ ID NO: 234447 - DNA, 732 bp, Homo Sapiens
  misc_feature (35)..(35): n is a, c, g, or t
  misc_feature (88)..(88): n is a, c, g, or t
acgataaagattctgtcgatgccatccagctctcntgtgtacacaacatagtggctgtcattcctcaaatggcaaaaccagcccctgntgaggagtagctcattggcatgaagtagacttaaatcttgatataacttcaaagccgatctgggctgagtcttttggacctatttttttaaaaaagtatttacgtaagtgtttgattctaagaattgtttgtaagtatttttaatatattgtaaggagttatttacccaaaacacttgctccaattttgccccttataattgccaaattgtaagcatcaataagtaggtaagaacaatttatataaaaactgatagaaatgacaaattcggggtttcggcttgtccgggagtcaataagtacgcacagtgctctgctacattgtagagtttctgtagagatcaaatttgactccactttaggagtcccaaagcaaatgtccatgtctaagatgaatatttaacttgcatagtcattctgtgctatattgtaactgccagatggccagaaagaaggcaacagtggactcagacttctgaggaatttgggtttgttcccctttgtagactaatgtgtaggttgctgttgtgcgaagatcgtgtaactttagcagacatgtatttcttgcacagctaatagaagacaaagttgaaaaaaaggatgcaaaataaaaagctgcctaaggtgaaaaaaaaaaaaaaaaaa

SEQ ID NO: 234448 - DNA, 710 bp, Homo Sapiens
  misc_feature (39)..(39): n is a, c, g, or t
aggagctcgacggcataaatcagaagcaagcacagagtntgtcaggtatgaagcccctatgatggtgtgtgtcaaatcagttgtagctaatctgtccagggagaatactggcttcattacacttgtacagccgagagttcttcccgcattactgctgtttaatagaacgtgattagtcatcgccgagaagaaagcatattagccgaggaggtagtcacgcggcacgcgccggtgattgccacgatgtgattgcaatactcttagaagcaccatattatcccagacatgttctttcaagcccttggagccctctctaaattcactgtcatcatttagtatctgtttaatttttcagtccaaagagaggaaatcagtcgctgagtattatttgactccggtctccttggtgcaaaaacaaaatgggaaaaataaataagaataactcagaaactcaaaaggaaaccacaaattcagctaataatagcatttcgagtatatttcgtaaactaaggaaatacacaaaaggctgttttttccgactgtaagagatatttgatgtccttttgccgaggtggatgtgttagtctcaggccctcctggaccacgttgcccaagtcacacaggcttctgtgttatgtatttagataagatgtgtgaaaatatatttgaataaaagaagttcataaatatgcaaaaaaaaaaaaaaaaaa

SEQ ID NO: 234449 - DNA, 705 bp, Homo Sapiens
  misc_feature (46)..(46): n is a, c, g, or t
ggcctgcccccgagaagcctgggtgtccctgccggagaggccagcncaggctgcacaccgtgaagatgtggagggcgtagggtgggggcagtgaggaatgggtccgtacagcctctgtctgcaacatgcttggggtcccttaagctccctccgacctcccagaagcctccagtccccaccaggccccactcccagtcctcctgggatcctgctggcttgggcccggctctggggcccccaaggccgaagggtgacaaaatacaggcccccatgcctggccctgcctgagccaggtgggtggagggagggagatcatgagggacttggagggagctgggagttcatccacgggagaccctgccccgatgagaaggggcagggactgggggctctgctttgcgtctaacctttgtgggggagggccagcaaggcagtccccccacgcccgagaaagcctgggggacccagacacctgtccccacagtcaaagcctggggacccagacatcctgtccccacagtcagcctcctgtccctgctggtgcccccacacccacctaccctgtgctttttgccgtcgggcctctgcacctgggtccatggggtctgcggggtctgcggggtctgcctggcctgtgggttctgccggtggggcttcaggagtaataaagtgtcaccctatccttgtaaaaaaaaaaaaaaaaaa

SEQ ID NO: 234450 - DNA, 740 bp, Homo Sapiens
aggcatgagccactgcacccagcccagttctttcttaaaacagctgagagttggttttcttcagcgttcaccttccttgtctccagttccgatgctggcagtggttcctacctctgttgggtttctagatagtttgggaacggggttgatgggtttctgtgaaacacattttccaagtcttgggctttctctggaggggaaggtggatgctggcgggtgacttgcagtgggcgcctggcagtgggtgtggactgtaactgacaggtggaaatgagtagggacactattgttccctccatgccagctttttttttgctggaaatgccccctccacacccctggtagctctgtgtcctgagaaatccagagtgtgggagacatcactgcatctgtccccccagcttctgtgaagggaagctgtggcctcttttgaatgtggggaacaactgaagactcaggggtcacccagaggtctggtggaaagcaacttcaggtttcatcttgctctattcctcaaaggtctggtctgtgggcctctgaggagaaaacaggtctagccaagacagggacaaaatggggaagggggtgtgccaggcctgaactgagctaagcacctgccccgggctccacacttccatctttcttttgtcttcatttcacctctgtgtttaaagcactgtgtgacatagctccttagagatataacctattgtctgctcataaataaaaaaaaaaaaaaa

SEQ ID NO: 234451 - DNA, 761 bp, Homo Sapiens
  misc_feature (53)..(53): n is a, c, g, or t
tacatgcatattttaacatctactaacaagcccaaaaatggctggaagacatntatgaatcgtaggactgctgtgaagaaaattaattcacttcctgaaataaaaggagccgcttacaagaaataaatgatgtatgtgcaatctgctatcatgagtttacaacatctgctcgtattacaccgtgtaatcattatttccatgcactttgccttcggaaatggctgtacattcaagatacttgtccaatgtgccatcagaaagtatacatcgaagatgatatcaaggataattcaaatgtatctaacaacaatggatttattccacccaatgaaactccagaggaagctgtaagagaagctgctgctgaatctgacagggaattgaacgaagatgacagtacagattgtgatgatgatgttcaaagagaaagaaatggagtgattcagcacacaggcgcagcagctgaagaatttaatgatgatactgactgatgaaaatagcatttattaatgattgaggtatttgtttaaaattcagttcatccaaaatggagtaatatccttcaccttcagtgtgtaaccaagcacaaaaacagtatcaatgttgaatctgtgaatggttttccgtttactgtgatgtgctactgtaaatatacctctttaattacttctggtctctttggtgacctgtttaaatttgtgtacattattgtacatagaataaaatgttttcacatttttatgacaaaaaaaaaaaaaaaa

SEQ ID NO: 234452 - DNA, 734 bp, Homo Sapiens
caaacacatgtcacgcacaccggcgtgcgcgccttccagtgcgccgtctgcgccaagcgcttcacgcagaagagctcgctcaacgtgcacatgcgcactcaccggcccgagcgcgcgccctgccccgcctgcggcaagtcttctcgcaccgcgcgctgctggagcgccacctggcggcgcaccctgcgccctgatggcgctggggcctggcctcgcccacggtggatccggggcctcccgcacagtcggccacgcccgctgcgggacccgtggttcccgccactagaccacgctccctcctgagcgcaggtcctctctctcccttcaccctttctccataccagggcctaagtccgccttactcctctcctccatgtacttgaaccctccaggtggtgccgggctggggctggggctggttagaccacttctgagaactggactatttcctgcgtaaaccgggcgctcaggcgcttggacccggcccaagatttgactccggttctcaccccgccctctcctggggtggtggtgggggctggggggccgcttgcctgccccagggtcaggctgggcaaggtccctagctctctacccaagctgttactccctcatggggcgcctaaggagactcaagtggacccatcatatatgggggctgggcctcgggactctcgctctaataaaggactgtaggccatggggcctaaaccacgaaaaaaaaaaaaaaaaaa

SEQ ID NO: 234453 - DNA, 619 bp, Homo Sapiens
ggggcgattcttacccgaaggctgccgagctacaggcggcggtcggtccgggcgtctgctgtaatccactaggcgctgcccggctgcgctcactctcggacgcagagacccgctcatgttggtgaagaagccgcgccagaaccgcgcggctgcagtcacctcgagcaggccggctgctcctggcaggcggtgtcggcgccggcgggggactcggcgcccagggccccttccaggccctccctcgccgggctccccaccagctccggaggtggcggcgatgcggaccgagtgagcggcggtggggccaggccgggcgccgggcgggagccgaggccgcggcggactccgcaatcccgcagccggtgactggagcccacctctgcagagacaaaggaactgctctggtgaactccccctgaaagtaaatgtccttggctggcctccagcattcccctcatgggcatagccatgcagccttcagaaccttcctgaaagagatgcccaaggattcagcaaacacgggggaagcagaggacacaagaagcttggatgtgaaatagcacttccttctgtgttacagaataaaacaatattttaaattacaaaaaaaaaaaaaaaa

SEQ ID NO: 234454 - DNA, 620 bp, Homo Sapiens
tcaccatcacgctgaccctgcaggaccacgccccctgggtcccctacctgagtatcgtgggcattctggccatcatcgcctctttctgcagtgggccaggtggcatcccgttcatcttgactggtgagttcttccagcaatctcagcggccggctgccttcatcattgcaggcaccgtcaactggctctccaactttgctgttgggctcctcttcccattcattcagaaaagtctggacacctactgtttcctagtctttgctacaatttgtatcacaggtgctatctacctgtattttgtgctgcctgagaccaaaaacagaacctatgcagaaatcagccaggcattttccaaaaggaacaaagcatacccaccagaagagaaaatcgactcagctgtcactgatggtaagataaatggaaggccttaacaagtttcctcctccacgttggacaattatgtcaaaaacaggattgtctacatggatgatctcacttttcaggaaacttaaaatttacccattattgggaagcttaaatgaattgaagctatgcaagtcttttatattattaaatatttaaaagtaaacctgtactaatctaaaaaaaaaaaaaaaaaa

SEQ ID NO: 234455 - DNA, 781 bp, Homo Sapiens
  misc_feature (7)..(7): n is a, c, g, or t
  misc_feature (53)..(53): n is a, c, g, or t
  misc_feature (70)..(70): n is a, c, g, or t
gtgattnaacaaatgatataaacacaaactacaatgcagacagacaaactctntgtatgcaaattagcantacataccaacagttcttgatacacaggtacctactacatgcagctcatcattgctgtcctcttcccatgctacaggtgagaccagacacaaagtaaatgacctaactcaattacaaataacaaggacccctctgcaatatgtctaaacatatattagaagaaagtatttgacatccttcatagggataaatgcccttatagacaccccatatataaaacacaacagagatacacatttacataaatctcagtcatttacaaaaataaatcttgtcttaatttaaaccaataaacagacttgcaggggaaaaagaaaccagcaagtagggctaattatcagtaacaaatagatgggggtgtttgctctgtgtgtgtgtgtgtgtgtgtgtgtgtgtgtgtgtatatgtgtgtgtttgtgtgaagtgaagtgttgctgctgtaagtagtgtccataagcccatttgactgtattacaagttagttaattactcatatagttggccacatattatgggatctatgttttctgaaaataattggttaatggaagttatctaatatattttaactgttcctgttaaaaacaataggcttcaagatgacataacaccaaatcaaaaatgaccaaaggaatcattttgtttgttagatttgtaatttagcatcattggcaataaatctactcaaacgttaaaaaaaaaaaaaaaaaa

SEQ ID NO: 234456 - DNA, 612 bp, Homo Sapiens
  misc_feature (231)..(231): n is a, c, g, or t
acccccactcccacggacagtaaaacgctaataatttattagatctaaagccccttcctccccagcccctgctttcattaaggtatttaaacttgggggtttcactgctctcccccatgatggagggagggagccccccaacctcagtgaggagagccccgagccggccccggggcaaagaggggtgcagagggagttcccccagatcagtaccccccacccctccccagntagtagcatgaccaggagagggttaatgagagccaagaggagtacctggtgcacctggtgccggtggctggagacctggggggcaggtggatctggggctgttcccccccctccgttttttccaccccacagttcctcctgggatctggccctccagggaagtggagcctccagcccctaggggatgcatgaggggggagggggtgctgagtgggaggaagagtcaggctcacagctggggtggcctgggggtgggggtgggcaaggctgacactggaaaatgggtttttgcactgttttttttttggtttttttgttcttttttgtttttttcctttaaaataaaaacaaagaaaagctctgaaaaaaaaaaaaaaaaaa

SEQ ID NO: 234457 - DNA, 693 bp, Homo Sapiens
  misc_feature (98)..(98): n is a, c, g, or t
ggtgctctctctccactgggccttgtgctggctgagtgcaagactagccttaggggctgtgagagagaggctgggtgcctgggcggggctgggagtgngacctgagatccctgcccactctctccccttcattggctgcccaggccactggccccagttctcagtgtcccttgggtccaggctccttgggccctaagcatcaccagaagggagtaagcagggagagaagcaatattactccctcccctacaccagggacttgccccagggcagctacctatgggtctttgcttccccagccagcctctcctcactgtgacccacccccatgggcccccgtcccaggcagccagcaccatgggcaggccctgccatggacagaaaaagagtttttctcttgttcagcctgcacgtggcctgaggaaggagtagaggctgggttggctggagccgtcctactgggcaagatggcgccccacttggagggcggtggtctgttacagggtgtgcaggggcagagaaggaagggaccaggggactgggccagtatgtggaggatggggcctgcgtgttcaaagccaaggcccgccccttccttgtgctcaaatggccaaagctgttcacgtctgtgctcaaccatctgcttcaaattgaagtaaaagccctcaaaatgtcaagaaaaaaaaaaaaaaa

SEQ ID NO: 234458 - DNA, 618 bp, Homo Sapiens
tgatgtggtccaggaactgctcaaatactcatctgataaagcttacgggagaaaagttctgacctgggatggcaagatgtcggcggtcagtcaggatgctattgaagacagcagacaggcccggactgagaccgtggttgatgactgggacgaagagtttgaccgagggaaggaaaagaaaattaaaaaatttaagagagagaagaggagaaacttcaacgccttccagaaacttcagactcgacggaacttctggtctgtgactcacccagcaaaggctgccagcctcagctatcgccgctgactgtgcccctgtggaaggagatgatcaagcggtgctgattcacgagagtggaagcctccagagcttggggctttctggctgctcttcattgacctgtgtgttcccagcacacgaacagcgcccctaacggagatttgttcagcgactgaatatacacctgtaaacgagtagcatgtatacattgattttgattacaaatggttctgtattatataccaccgttctgactgcttttttcacttatagcttggaaattgtcttctgttggtaatacagaaatctgtttcagtcttttgaaaaaaaaaaaaaaaaaa

SEQ ID NO: 234459 - DNA, 702 bp, Homo Sapiens
  misc_feature (47)..(47): n is a, c, g, or t
gaaatatctgtgcagtagatactaaaattctgttttattaacctaanccacaaagaggttaattaacttgcccaaagccacacagctcgtaagtggggtaggtccatcattctcacccaggcagtgtgactccagagcttgtgacattgatgtaaaactctgacaggaataaaggatttattgatatcattggttctcaaactttttttggtctcagggcctctttatactctaaaaaaattattgaggatccccagagagcttttgtttatatgggttataattatcaatactaacagtagaaattaaaacaaatttctaaaatgacttttctaaaaaagctgagaagagtagcattttacatttttacagatattcaacatgtgtcttaaggcaattttacttaaacacatttgattgctgtggcggatcattttggtggaggtatatgaagacaatccaaagtcacaaatagatgaaaaaagggggccttacacaaccccctcccaaaaaggactctggaatccccagtgaatccgtagaccacattttgagagccactggtttatattaagtactttctagcgcagggggtccaatcttttggcagccctgggccacattaggagaattgtcgagggctacacataaaatagacttaataccaaccatagctgatgagctaaaaaaaaaaaaaaaaaa

SEQ ID NO: 234460 - DNA, 602 bp, Homo Sapiens
  misc_feature (581)..(581): n is a, c, g, or t
gcacgaggggaagagcttcagatggtcctcatatcttttgatccatcagcgaatccacagtggagaaaaaccatacagatgtgaggagtgtgggaagggctacattagtaagtcaggtcttaacttgcaccagagggtccatactggagagagaccttataattgtaaggaatgtgggaagagctttagccgggcttcaagtattttgaatcataagaaactccactgccggaaaaaacccttcaaatgtgaggattgtggaaagaggcttgtacaccggtctttctgtaaagaccaacaaggagaccacaatggagaaaactcatccaaatgtgaggactgtgggaagcgctacaagaggcgcttgaatctggatataattttatcattatttttaaatgatatgtaagttgtacatatatatgggatatggtatgaaattttaatatgtgtatataatacgtaatgatcaaattgatgtaattagtgtattaccttaaacaattaacatttctttgttttgggaaaattcaaaatccattgttctagcgatttgaaaagaaacaataaattattgttgnttttaaaaaaaaaaaaaaaaa

SEQ ID NO: 234461 - DNA, 626 bp, Homo Sapiens
tctccagtgcctaggaatatcttctctgagccctaggattgattctatcacacagagcaacattaatgtaaatggtttagctccctcttttttctctaaaaacaatcagctaataaaaaaaaaatttgagggcctaaattatttcaatggttgtgtgaaatattcagttcagtttgtacctgttagcagtctttcagtttgggggagaattaaatactgtgctaagctggtgcttggatacatattacagcatcttgtgttttatttgacaaacagaattttggtgccataatattttgagaattagagaagattgtgatgcatatatataaacactatttttaaaaaatatctaaatatgtctcacatatttatataatcctcaaatatactgtaccattttagatattttttaaacagattaatttggagaagttttattcattacctaattctgtggcaaaaatggtgcctctgatgttgtgatatagtattgtcagtgtgtacatatataaaacctgtgtaaacctctgtccttatgaaccataacaaatgtagctttttaaagtccattgtattgttttttctttcaataaaagagtataattaaaaaaaaaaaaaaaaaa

SEQ ID NO: 234462 - DNA, 647 bp, Homo Sapiens
agatgtgcagcctcaggagataacagtggatttgcacaggacagaaaccttgtgaatgcagtgaatgtgttgtgcctcccgtgatcaattatgtcttattttatgttacagaaaacccataggaagaaaactcagatctatgtggaaaagggttgagcaaaaatttgtagttcattatgtggccgaaaagcatacactgagagaacatgtataaggctgagatagcctgataaactcatcctattaaaatgtatgctgtgatacacaggcaaatttgatgttaacctaagcacatacacagcaattgctcgactgtgtcaattaaatgagtaaaggaagcccaagtacttttaagtggaggaaatgaagtactgtgaatttttaaaacagatgagataattggtgttgggagtgttgcagtgactgaaaagcttcataaggggcagttggtgggaaagggctaatactgtaatggtggaatgtgggacacatatgtgtcaattcagtttccttagaccagtgccagtgtggaggattaattgaaaaccaggaccataaactttcagaactttgtattatgcagagggatctgtgaaactagtcaatttgtttcattaaacaaatattttaaaaaaaaaaaaaaaaaa

SEQ ID NO: 234463 - DNA, 655 bp, Homo Sapiens
tgggtggcgtagcccaggatggtgtggcagagctgagagtccggcctggaggaggccctgtcagcgtagagctggtggggccccgaagccatcggctgagactacacagcttggggcccgaggatgaaggcgtgtaccactgtgcccccagcgcctgggtgcagcatgccgactacagctggtaccaggcgggcagtgcccgctcagggcctgttacagtctacccctacatgcatgccctggacaccctatttgtgcctctgctggtgggtacaggggtggccctagtcactggtgccactgtccttggtaccatcacttgctgcttcatgaagaggcttcgaaaacggtgatcccttactccccaggtcttgcaggtgtcgactgtcttccggcccagctccaagccctcctctggttgcctggacaccctctccctctgtccactcttcctttaatttatttgacctcccactacccagaatgggagacgtgcctccccttccccactccttccctcccaagcccctccctctggccttctgttcttgatctcttagggatcctatagggaggccatttcctgtcctggaattagtttttctcaaaatgtgaataaacttgttttataaaaagcaaaaaaaaaaaaaaaaaa

SEQ ID NO: 234464 - DNA, 655 bp, Homo Sapiens
agaattcggcacgaggtctatttctctgtttatctttctgtccttcaatctgtgtttttgtttctggctctccgtcagtgtctttttctctcctctcctttgctctgccatggctatttccactgctctatttctgactctcatttttggtctctgtgtgtctcctagtcactttctttctcactctgtctctgtctctatttctgtctctcctctgctgtgtcctcaatctctctgtctccctgaggctctatttctgtctctcctctgctgtgtcctcaatctctctgtctccctgaggctctatttctgtctctgatgctcttcttctgtgtctctatttctcttcctgtcacttaatcttttccttctctatctctcttatttagtcttccttccacacccttcactcaccatcttttcccacaatcaaatatcactccctggtacttccagcttccaactctagggattcatgattctggtggagattccttcttccagggcctgggaggatagggctaatcccaagggtgcctgcttaggctatgttagctgtgacaggaacctgccatagatttgcactgttctttcctaaagatcaattattttcagcaataaatacttctcagcttttaaaaaaaaaaaaaaaaaa

SEQ ID NO: 234465 - DNA, 693 bp, Homo Sapiens
gtgacctacctccgtgactgctctttttcctctgtctcttaagtgtgatggttttccagagtccaatcctcaggactttcccgtccacacacaggcctggtagtcaggtggctctaaaccattaggtgggttgtagacctctctcaagctgccacctccttgctgtcgccagatcgtatttcagtctgtcaggggttatctgtatctggaggttcctctgttgcttcagtctcagttacttagaatggaacccagagtcctgcccctttccacctacatgctcttacttgaaagcacctgagacttattgggtccctgattcctgcttcgtctgtatccgcagagtagttgcatgtcatttggcctgttttctaaataatcccacatcatgtcctccctgcacttacattgccactgctctgatttgggctttttttttttttgggacaatgcctctgtcccaattctgagtaacagctctggttcttgccactaccagagttctctagcaaatctgagcatctgacagggtgaaaaattctgaatggcttcctgatgcctgactttatgggatcaaattcaagttgcacgctggcactcagtgcccttctggtatcatctgccaagaccagggcctgcttcaccacagccacaataaagtcctttcaagccctgaaaaaaaaaaaaaaaaaa

SEQ ID NO: 234466 - DNA, 639 bp, Homo Sapiens
tttctatattacctcaaaggggagatactgctatactgtctcaaaactgagctggattgagaaaaaaatggctgctactctgtttggaaaaataccatcttcaactgtacaagaagctttacacaatttccttaaggctgaagaactatgccctggttattctaatcccaattacatgtacttagcaaagtgttatactgatcttgaggaaaaccagaatgctttgaagttctgtaatttggctttattgcttcctactgttaccaaagaggataaagaggcacagaaagagatgcaaaaaataatgacttccttgaagaggtaaataaacgaatttactcttcaacaaatcagatgtggtctaccaaaatttaaatgaatcaaagttgtgcttttattatccttcatttttgatgtaagggtattgtgcttagatttgaaggtaaagccatgtttctgcagaatgcattccactagtagcactacaaaattaattatgttatttggagaatctatatactataatgtcaatacataatctataaacatgtatgctttatatttttcttatcaataaactgcagccttaagaatatttctttaaataaaatatttaaatccaaaaaaaaaaaaaaaaaa

SEQ ID NO: 234467 - DNA, 685 bp, Homo Sapiens
  misc_feature (25)..(25): n is a, c, g, or t
cctcaccatcgccctcttcaccatntatgtcctctggacgctggtctccttccgctaccactgccagctgtactccgagtggagaaagaccaaccagaaagttcgcctgaagatccgggaggcggacagccccgagggcccccagcattctccactggcagctggactcctgaagaaggtggcagaggagacaccagtatgaatgctgggctctccggaccctgcagcagagaggccagaggtagctggtgataccctgtcctgtggaaggacttccacttcaacacttccacttcaacagttcccgcacggcctgaacgcttcttaggccaagagacaccatgcggagcctagtctgtgatcctgtgtgaagatattttcagggtttttttttttttttttttgcatatggaggacaggtggacatggtcctgagctctggacggagcaggcaccctgatctcattctgaggtccacatggcaccttctgggccagcagctgtggccggtgtatcaagggcgcccttaaagctggaacattccagcaagcttcttgcgcttctctgcacccggcaggcccactttcctggcaccctcgactttatataaaagttgcactgcgtttcaaaaacccacccctgaatgaataaaaggagccctggctggacaaaaaaaaaaaaaaaa

SEQ ID NO: 234468 - DNA, 707 bp, Homo Sapiens
  misc_feature (65)..(65): n is a, c, g, or t
agaaaggagtggaccgaggaaggaaggaaggcaaggctgtctgtccatccgtccgtctgtccacntacctgtcagtccacataggctcctggcgtggacaaggggtctgtgaagggcgggaactgggtgagcacctggggcaggtgggtggttaaggtccttcccacttcgcaggtgtcagaacctagggctgggctctcggggccaggcaggccagcccagcccacgccgagctgggcagcgtctgctctggtaggactgtcagacgcacacgcgcacgcacctagacacacccactcatgtacatgctcacacatgcagacacacctgggcgtcccgaggtcacatgttctggggatgatggccttcaggggtcatctggcaaacagcccctgggctgtgcctggatccccctctagctcctgctcacccacgcccacccagtagtcctgcctgtctgcacaggagaggggcttctcttcctggctggggctggggtgaactggaggctggttaagttgcagccgctgggtcctcgggggcttactcatctcccttttttaaacaaaaagcaaaaaagtaaaatgctgcactgcccagcagcccggttagggctcctggagccaccttaggaaagggcttctcatgagctctgctgcggcagcttcagctggcagagaggctttcccagaaaaaaaaaaaaaaaa

SEQ ID NO: 234469 - DNA, 647 bp, Homo Sapiens
  misc_feature (595)..(595): n is a, c, g, or t
ctcggggggcaaagagggactcgggaaactcagtgtaccccagatgcctcacccattccgtgtcatcacccatgtctgccacccactgattgggcaattgtgggcccatggggtggaagcccccagatgactgagcagttctacaaaaaatggccagcacgagcggggactagagggtcctgattttgtgtctgtgcctcttcatctctctggactctgatctccttctcccttcccatctccaggccttctgtctgtcccagataaaggcgctgttctcccatcctccctaccccatcctctccaccaaatcgctcccaattttgagagccaaaggctggcgcttctgacttcaggagcgaaaggaggaggcctagtttgggccgatgtattttaaagcagagtggacagcagagagtcaatttccctttcgttgggagtgggcagtggggtggctaattgtcttcggccaaccaggggcctgttgcccaggcaactcaccagctccgcctctgctgattggctgccacggtgggagtcagccaagatttaaagggatgccagcgattgctcttttcaaaacctaccagtcccnactgtgggtggagaaataaatggtctttctcctcaaaaaaaaaaaaaaaaaa

SEQ ID NO: 234470 - DNA, 717 bp, Homo Sapiens
  misc_feature (28)..(28): n is a, c, g, or t
tcaaagattattactgtgaagtcccatntgatgtggtaacagtgacaattggagtggaaactcctaagtgtctgtgcaaggtgcacctgtacgagcaggcagggccaagctttgccagctaccctctgggcttaggaatgaacaaaatctcaatatttgttgtggatgaatctccagcacacggtgagactctgatcacgtacaaactcaccatctatagagaagaccgcccaagtctgcccttgtttgaggccttcacagcatgtggttttgtgcaggattgtggtttgctgattcatccagaggaaacctgtgggttacagcctatttcttctgactacattgaagccattttacagtctgaactaaaaagatgtccatctggggacatgaaaggccagtggattgtgccttgccttagttgttcggacaacaggacgtgtgactggagagaaataacctggcagccccacaactgccaatatggtgtcctaactaagcctcaactccagcagtgcctgggaggaaggaagttgggtgtcgatgtccagagagttcctagaagccgtaattgaagacacaatccagtcatcctgggaccctaaatgacctccctgccccacccctgcacataaacctgacttgaatcacctggactatttttctgagagagtaataaactttaattgggtttgacctaaaaaaaaaaaaaaaaaa

SEQ ID NO: 234471 - DNA, 674 bp, Homo Sapiens
  misc_feature (77)..(77): n is a, c, g, or t
  misc_feature (127)..(127): n is a, c, g, or t
atatgctatggagctatttttgttaccacgttataacgtgaatatgtatacagtagcctcttcaggctttgtaattntcattccaaaaatgcccggtgtgatgctttacactctacaaagtatggtntaaaggcacaaggtcatggcctttgtcatagcagttgaatgtgcattgacatatttttctatgattttttaaaattacaatagaaaaataagctgttgtaacgtgtaaggtcatgacaatttttgtatttatatttgaaatcagatttctataactcgtatttgtgtacagaattctcaatggatttatatattgtgaaatttttatctgagattgggatgtggattatgcttaacagtgagagctgaaatgagaccatttactttgtttaaaatgctgtactgtgcaagtttggaaatgtaaattaatttactgtatataatatcttgagtttgtttatacctccaagtttttacactgaagataaactagctttaattcaaaactttttttttctttataagggaataagctgttgagctaaacctgtatacttgtgctttttattttctggatgcacaatgaaagtttatacttgtatctcactgcatcatatctgattgcagaaattaaagcacaatttacaagcaaaaaaaaaaaaaaaaaa

SEQ ID NO: 234472 - DNA, 567 bp, Homo Sapiens
tccctaccctgtgccagaagcaacagaggtgccaggcctcagcctcacccacagcagccccatcgccaaaggatggaagtaatttgaatagctcaggtgtgctgaccccagtgaagacaccagataggacctctgagaggggactggcatggggggatctcagagcttacaggctgagccaagcccacggccatgcacagggacactcacacaggcacacgcacctgctctccacctggactcaggccgggctgggctgtggattcctgatcccctcccctccccatgctctcctccctcagccttgctaccctgtgacttactgggaggagaaagagtcacctgaaggggaacatgaaaagagactaggtgaagagagggcaggggagcccacatctggggctggcccacaatacctgctcccccgaccccctccacccagcagtagacacagtgcacaggggagaagaggggtggcgcagaagggttgggggcctgtatgccttgcttctaccatgagcagagacaattaaaatctttattccagtgaaaaaaaaaaaaaaaaaa

SEQ ID NO: 234473 - DNA, 636 bp, Homo Sapiens
ttagattcagtgaaatacagtaattcattcaattatgatagtatctttacagacattttaaaaataagttatttgtatatgctaatattctatgttcaagtggaatttggagacactatgttctaattttaagaactgtttcagtgttattagattagtagtagggctgtagatggggtctttcgaggtcctttgcctacctcagtaacagaggctgggtctgagccttgctcgagattagctcttcaccaggtctgtgtggtaatcatatcgtagttaccgtaggtcacgctgcaagtgtaatttacagtgaggcatagtcttttccagtgattggaatacttgtgtcaccgatccagggtttctctttcctgagtctgaaatacctgggaaaccagttagaaggtgactgggtagcctaggagtcaaggatcagaaagggtacttcatatatatatggcagaattggtgcaggtgatcctttgaaaaatgacaagaattgatgaaattttgtttacttcctccaattttttgctgaataacatctcctttctacctgattggagtaggcttgctttctcttacttaatttctataaatttgccattgttttgtctcaaaaaaaaaaaaaaaaaa

SEQ ID NO: 234474 - DNA, 619 bp, Homo Sapiens
acggtctaagttatggtgttctcagagtggatacttaagaaaaggtgtcagtccttactgttccaggacgttggtcacgtgatgcctggagctaatgtatgtgttgtgaagttagaaggtaccccttatctgtgtaaaactgatgaagtgggagaaatatgcgtcagttccagtgcaactggcacagcgtactatggattgcttggaatcacgaagaatgtgtttgaggcagttccggtcaccacaggaggagcacccatctttgacaggccattcaccaggacaggcctgctgggcttcatcgggcctgacaacctggtcttcatcgtgggcaaactggacgggctgatggtcactggagttcgcagacacaatgcagatgacgttgtggccaccgcactggccgtggagcccatgaagtttgtctacagaggcaggtgatgcgctgcggacccccacgccgggagtagattccttcatttgcagctcgggaagtctttgtgcagtagatggaaagcccagcaaacttgaattcacaaagcctaaaaattgttgtacatcagaaaactcctaaagtaaaaggaaaatatttgcagcaatgaaaaaaaaaaaaaaaaaa

SEQ ID NO: 234475 - DNA, 569 bp, Homo Sapiens
gcacgaggtaaatctacaaagggaagccttactacaattccaaaaatcatcatggttggaaatttgggaggagattatttgtgaacttgttacccttttggtaatggtggactaattgctgtatagttatttttgttttattattactgttacattaatttaacatgcatttatagaagaatacattcaaagcactgatgtaggagatacacggtacttggagcagtcagccaaaaatcacagatactgctttcacttaaatggaaacaattctccgataatgctttgctttttttcttatgtcactcttgtgtactatctatttttctcctctctgggaccaagtttctttttataaagcaataatatctctgttttcatttcagaacattgtgctgtctgtcagcatatgtatatcagctacaaaatatatcaactttgacttcttttgacaaaggactttaggaaaaagaggaacaaagacattatttgagaattaaattatatatttttaatatgactgtgaccttgactgataataaagatgtaataagaaaaaaaaaaaaaaa

SEQ ID NO: 234476 - DNA, 688 bp, Homo Sapiens
  misc_feature (57)..(57): n is a, c, g, or t
cccattgttcacttggtcacaagtttcctacctgtgtttctggatgagtcaaagccnaggaaggcagttatggagagctcctgcacctccagctgccccacagaaaagcctgcaagagtacttccaggcacaggccctctcccaccctattccatttgtaagcaagggaggtcgaggaaaaggacatctccaaaagggagcataagaatagccatatatacaggggctgaaaaagtgctcatgagtccatcttttctggaaagcaaagaccagcctgaagcagtgggagctgctgcccaagcggtagtgaactggagagaaacaggccctggattttcagtgaggatgtggatctgaagagtcccccaaatgcctctgaagtctgacatctctgcttagccctaggagtctggttccctgccttcagttgcagagtgatgtgtttgtgtcattgttgatgtcacctcctaaaaagaccttcactttctggctgccacaaagccatatgtgttgctccccatatacagcctgacagagtaaatggagaggaagtgctggatttgtgtatcactggctatcagttcctcatgttgttaagcctcacacaggtgtgctagcattgaactgtagagtgtcacatacctgagtttgaaaataaaagcacatttccaaaaaaaaaaaaaaaaaa

SEQ ID NO: 234477 - DNA, 696 bp, Homo Sapiens
cagttctctgttctctcctgctggtgatggactaggccttttagaactagcaagatccctcacacagctgggagaacacacacctttcttactccagacccattggtgtgtctccagtaacaaaattattggactcagcctccatatttgacagcaaaagtggccagagggagttgaaatatcttgaagaaaaggaattttcactaagatatgtcctctccctctcccagagtttagctgtttattccttttttttgtttatattgttctcatctgcataaaaccagtctcttgcaataagcctgccgcagaatcaaagtctgtacttcaaaaggtaactgcaccaagggatgggacagtgtgcatcaccctgatctaatcattgtgacgttggtagcttcctaaatactgtatgtaccttgaacaagggttttatttttgttttgttctgttttgctttttgtttttattggtaggctaaggtaattaaattttttaatttgctgttactttggttgtattttctgtactataactgcctacagtatgtcttttgcataaaatgcataagggtttggggatgtaaatggaattttattcatattttgtccaaatacctcttgtaatttgtatcaaaattcttgtacaatttttatattaaagatttatcagtcactgaaaaaaaaaaaaaaaaaa

SEQ ID NO: 234478 - DNA, 642 bp, Homo Sapiens
agaaactgaacaaatctctcaaaaaaccagatctgaaatagctcaactcagtcaagaaaaaaggtatacatatgataaattgggaaagttacagagaagaaatgaagaattggaggaacagtgtgtccagcatgggagagtacatgagacgatgaagcaaaggctaaggcagctggataagcacagccaggccacagcccagcagctggtgcagctcctcagcaagcagaaccagcttctcctggagaggcagagcctgtcggaagaggtggaccggctgcggacccagttacccagcatgccacaatctgattgctgacctggatggaacagagtgaaataaatgatttacaaagagatatttacattcatctggtttagacttaatatgccacaacgcaccacgaccttcccagggtgacaccgcctcagcctgcagtggggctggtcctcatcaacgcgggcgctgtccccgcacgcagtcgggctggagctggagtctgactctagctgagcagagctcctggtgtatgttttcagaaatggcttgaagttatgtgtttaaatctgctcattcgtatgctaggttatacatatgattttcaataaatgaactttttaaagacaaaaaaaaaaaaaaaa

SEQ ID NO: 234479 - DNA, 651 bp, Homo Sapiens
tccaggtgagactttcacaataagagcagaggatggaacacttcagtgcattcaagatgaagtgctgaagagagcctgcgattgaagattttttcatctcagctttttcccccttaccttgttctctctcatgtttcatgatctgtgtcatagatatttcttcattacgagcacttcgcggtgtggcttttcaatgtctgaagtggattaagtggcccacagtcagttctgtgacttgagtttcaaaagtaaaattaccatcaacaatgtgattcaattttattttctatactagctaaaagcaaggaactatattattaacaatcttggctttactgtagtttaaggcaggtgatgatgatgcttattagtccacctgaaagagtccttccaggtttttggaagctttattcctgcttattaccttgcccttgagaagtccttcatggaaagtggaaacactgggttgacttcttttccccatatcctagttgaaagggacagcttatatgtatgttagactgtccaaaagtgtttgtagaacctcattttaaaaaatcaactgtattgtactttttaaaaaatgggatcttaaactctttattaaaaataataaatggaaatgtgttaagcaaaaaaaaaaaaaaaaaa

SEQ ID NO: 234480 - DNA, 691 bp, Homo Sapiens
tatataattatgacccagtgatgtcttttggtgacttaagcttatgaattcaggttacaattgagttgattctagatggttactaccttgaaaaggatgttggtgccttatgtgacacgagccagagcctgctgggaataaacaaagcagattcatgccaacaccaactcgtagctttagtggcagatgggagtggtcacagactcccaaaatgtggggctttggatttccacaccatcccacgtgtgtgtcatcttcctctttcacactcttgatgataatttgaaaatggtgaaatcacctctgaatttgcctatagcatgagcacattcttatgacaacataacaaatagttcataatgtgaatattagaaactgttacagcctgcagttaccataattttccatgtttgtggaattgatattgaaatagcagggctaaggaattactggcaagttttagcctgtgggtaataccttagggttatttaaatatttgtaattttatttaaatgttcatgaatgtttgaaaggaacaaaattatcagggatggctctttgccatgggtcttattttcaccctcttttctgtaagaaaaaagaacaatgtcttaatgtatttttaaagtttttggtatagtttctaattccaattttaataaaagttttatagataaaaaaaaaaaaaaaa

SEQ ID NO: 234481 - DNA, 731 bp, Homo Sapiens
  misc_feature (104)..(104): n is a, c, g, or t
  misc_feature (163)..(163): n is a, c, g, or t
cgtggtgccaagtacaccttgggctccatgcaggccccatgaatttacgggctgccttcagcttggtggcagcagtggcaggctttgtggcctacgccttctcncaggattctctcactcatgccgtggagtcctggctggaccgccgcacggcctccctctntgcagcctatgcctgtggtggagtggagttctatgagaagcttctgtcgggcaacctggccctgcgcagtctcttgggcaaagagggggagaagctgtatacacccagcgggaacatcgtccccagacacttgttccgaatcaaacatttaccctacaccacccgccgggactctgtgctgcagatgtggagggggatgctcaatccgggccgctcctgatgggctcatcacaaggacacttccagcttgtgcagacaccaccctgccattgagtctggagggccctgttggagcctttggacctatagctcaaggccagaaaaatcactggctttggaattaaatagcttagattgtactataaccactacttatgaactcagggactatgaggtactattcaggggctatgaatctgagcctttgtttcttgaactgtaaagtggagatgatgtaaaccgccttgcaagattgtagagttgggtaaggtcatgaacataagggcctggcacaaaagggtgcactgtaaataaacagacatccctccttaaaaaaaaaaaaaaaaaa

SEQ ID NO: 234482 - DNA, 518 bp, Homo Sapiens
caaaaggtgtcatttaaaaggtaaaataagtttatgtagaatgtatgttcatggtgcttatttttaaaatgtaattcaagtttacagtattacttaatgcttctttacagaatttaatagagaaacaaggctagaacacatctacatcctgaagagccgtttataacttcatattatatgatgacaaagttcattattttccttaaagttgagcaattgacttttatggtccaatgatgaacttattattaataaatgattgagttaactgtgaggcttctcattaaaatacaatattgcagctatcagttggagaatatattataaaattttcagacagtatatcagaaaaatgtttttatttgtactgtatagaaaatgtaattttgctgttaactctgtactttttaaattgaaaatgttttataaatttgcttttaaattttcttatgaagccatttgcaaattacatacttaatttaataaaatactttagccccaaaaaaaaaaaaaaaaaa

SEQ ID NO: 234483 - DNA, 618 bp, Homo Sapiens
tgggcactggcgtacactggtatccctcctaaagaagtgactcacctgactgatcagcaagaagcctagattgcaggcctcaccatggatggtcttcctagttgcctggggaaaccctggaatgggcatcaggagaaagcaacaagaatccagtccttcacactcacactactctgttcctcttcccagagacatcgattcacttcaaagagctgtagggaagatgcagtcagcactgcactgtattttttatttattgcctaggtgccattaaagacacaaacctagaagcctagaggccattctgaatatgggggtggggtggtggagggagcaagtgaagagatgggaatccagggctcagggttcaacgccttcacctgagatcacaagcccatggatgctgtgacatctgggagcttcatcagtggtctggctaaagctgatactttcacagtcaccatcttcacctttggactgggaagaatcaccatttttcttctggcagatgactgtattccttataggacaggcaaggtttcattcatctgttctcagtaagtttgttgttgaactgaaatgaatttcattatttcctccaaaaaaaaaaaaaaaaaa

SEQ ID NO: 234484 - DNA, 708 bp, Homo Sapiens
  misc_feature (21)..(21): n is a, c, g, or t
tgaaatccagccagtgttttntgtggtatgagaacaggcaaaaagagatgccccgagatagaagggagccttgttttctttcctgcagacgtgagatgaacactggagtgggcagaggtggcccaggaccatggcacccttagagtgcagaagctggggggagaggctgcttcgaagggcaggactggggataatcagaacctgcctgtcacctcagggcatcactgaacaaacatttcctgatgggaactcctgcggcagagcccaggctggggaagtgaactacccagggcagcccctttgtggcccaggataatcaacactgttctctctgtaccatgagctcctccaggagattatttaagtgtattatcattggttttctgtgattgtcataacattgtttttgttattgttggtgctgttgttatttattattgtaatttcagtttgcctctactggagaatctcagcaggggtttcagcctgactgtctccctttctctaccagactctacctctgaatgtgctgggaacctcttggagcctgtcaggaactcctcactgtttaaatatttatttattgtgacaaatggagctggtttcctagatatgaatgatgtttgcaatccccattttcctgtttcagcatgttatattcttataaaataaaagcaaaagtcaaatatgaaaaaaaaaaaaaaaaaa

SEQ ID NO: 234485 - DNA, 659 bp, Homo Sapiens
tggaactccacaggctccagtgttctctggaaaaagtactcatcctttcctgaattcagagcccttcaagctcaggaaaccacgcttcactcgtgctgacctgaaagttaatctttaggtcgattttgaaaaactccgcctcctctctcctttttaatatttctttcttcctttttaatcatgtttaagtgaacttactcttagttataaggaactgtcctgctttgtggggaagagggctgttgcttgtcaggcaaaaaagttttctcttcctacccaccatccctctctctgcttcccttgcatttggcaggctgtatgaagccaatgagctgcgaggtgttttgacaggggaggtctgcatgcagcctcttctttgtcctaacaattcctttgttgatcttgcctgtgatgaatcatagcgcctgcattgctctggtctaggcattatttgcaacacacagtatcgtaagcgagagattgttctgcctatattcagtgttttccatgcagcaattcttcttgttgacgttcacagtactgtaacgagtaacagacttgatcacagtctcctcgtgcctgtgcagggctgcacaggcatgatcttatcagggttccaatctgttagattgcctttaaccaaaaaaaaaaaaaaaaaa

SEQ ID NO: 234486 - DNA, 636 bp, Homo Sapiens
tgctctgtctgcagcaggggcaggtgctttcttatccatttccctggaggcgggcccccctggcagcagtattggaggggctacaggcagctggagaaaggggcccagccgctgacccactcactcaggacctcactcactagccccgctttgggccccctcctgtgacctcagggtttggcccatggggccctcccaggcccctgccccaactgattctgcccagataatcgtgtctcctgcctccactcagctgcttctcagtcatgaatgtggccatggccccggggtccccttgctgctgtgggctccctgtccctgggcaggagtgctggtgaggaggtggagccttttgagggggccttccctcagctgtttccccacactggggggctgggccctgcctccccgttaccctccttccctgcaggcctggagcctgtagggctggactgaggttcaggtctccccccagctgtctcacccccactttgtccccactctagagcagggaggcagtgggggaggagttgtgtctcgtcttctgtctccatgtggtttttgggtgtttttcttgttgtgtcctggattccgataaaattaaagaaatgcttcctcaaaaaaaaaaaaaaaaaa

SEQ ID NO: 234487 - DNA, 587 bp, Homo Sapiens
atggaaacaacccaaatttccattgaaaaataaatggacaaagaaaatgtgcatatacgtacaatgggatattattcagcctaaaaaaagggggaatcctgttatttatgacaacatgaataaacccggaggccattatgctatgtaaaatgagcaagtaacagaaagacaaatactgcctgatttcatttatatgaggttctaaaatagtcaaactcatagaagcagagaatagaacagtggttcctagggaaaaggaggaagggagaaatgaggaaatagggagttgtctaattggtataaaattatagtatgcaagatgaattagctctaaagatcagctgtatagcagagttcgtataatgaacaatactgtattatgcacttaacattttgttaagagggtacctctcatgttaagtgttcttaccatatacatatacacaaggaagcttttggaggtgatggatatatttattaccttgattgtggtgatggtttgacaggtatgtgactatgtctaaactcatcaaattgtatacattaaatatatgcagttttataatatcaaaaaaaaaaaaaaaaaa

SEQ ID NO: 234488 - DNA, 626 bp, Homo Sapiens
  misc_feature (56)..(56): n is a, c, g, or t
aagctctgaaacactggctgggtgcagaggctcacacaagtaatcccaacacatanagaggctgaggtgggaggattgcttgaggccaggaattcaagaccagcctaggcagcatagcaagaccccatctctacaaaaagtacaccccaaaattacctgggtgtggtggcacatgcctatagtctcaattaggaggctgaggtgggactattctttgatcccaggagtttgaggctgcagtggggtatgatcgcaccaccgcactccagcctgggagacagattgagaccatctctaaaacaacaacaggccaggtgctgtggcttatgcctgtaatcccagcaatttgggaggccgaggcaggtggatcacctgagatcaggagttcgagaccagcctgggcaacctggtgaaatcctgtctctactaaaaatacaaaaatttagcagggcatggtggcacacacctgtaatcccagctactcgggaggccgaggcaggagcattgcttgtacccaggaggcagagattgcagtgagctgagatcacgccattgcactccagtctgagcaacaagagcaaaacttcgtctcaaaaaaataaaaaattaaaaaataccaaaaaaaa

SEQ ID NO: 234489 - DNA, 706 bp, Homo Sapiens
agctcattccttcctcattttctcagaactttggtgttaacagcctgtttcctatttgtaggggctgactttgacttagcagatgcctttcgtgatggaggaaataacgacccagcacctcttaattcacccaagctgaagccaaatgcgaaccctgagcagcctggattcattggggatgactttgacttagcagatgccttacatgacaaaggaaactacgagccagcaccactgaacccacccaaaccaaagccaaatccaaaccccaagcagcctgattccaccggggatgactttgatttcacagatgtttcttcatggtgaacgaaacagggagttgcgtcgattctgatgtgtttgcttcggtgctctgtgtatcgtattcatcccactcttcaattcataaactctggagattcttcaattcactgggcaaaccatatgcctaagtctatcctctgatggaggctcgtacatgcaaaatccaatagcaacctgggaagatttcagtcaagacccaagaggaggctggcatcaggctctcggtcaccgatcttcacattcaggtttcctgatgcactttgcgactctttgggcaacctctggactccttgttcccagggtccacatttagttttatctttactgcattgcttttatgaaaaagaataaaattggatgaaacagaaaaaaaaaaaaaaaa

SEQ ID NO: 234490 - DNA, 695 bp, Homo Sapiens
gaacagaaaaccgaagagctagaaggtcaaattaagaaactagaagctgatagtcttgaagttaaagcaagcaaggagcaggctttgcaagatctacaacagcaaagacagctgaacacagatttagagctcagagccacagaattgagtaaacaacttgaaatggaaaaggaaatagtatccagtacaagattggatctacagaaaaaatctgaagcccttgaaagtatcaagcaaaagcttaccaagcaagaggaagaaaaacaaatcctgaaacaagattttgaaactttaagtcaagaaacaaagattcagcatgaggaattgaataacagaattcaaacaacagtaacagaactacaaaaagtgaaaatggagaaagaagctttaatgacagagctttctacagtaaaggacaaactatcaaaagtttctgattctttgaaaaactctaaaagtgaatttgaaaaggagaatcagaaaggaaaagccgctatattagacttggaaaaaacttgcaaagaattaaagcatcaacttcaagtgcagatggaaaacacacttaaggaacagaaggaactgaaaaagtcacttgaaaaagagaaggaggcttctcatcagttgaaattggaactcaattcaatgcaggaacaacttatacaggcccagaatactttaaaaaaaaaaaaaaaaaa

SEQ ID NO: 234491 - DNA, 693 bp, Homo Sapiens
  misc_feature (21)..(21): n is a, c, g, or t
ccgcaaagccctgtgagcgtntacagacagctcaccatttttgtcctgtatctgtaaacactttttgttcttagtctttttcttgtaaaattgatgttctttaaaatcgttaatgtataacagggcttatgtttcagtttgtttcccgttctgttttaaacagaaaataaaaggagtgtaagctccttttctcatttcaaagttgctaccagtgtatgcagtaattagaacaaagaagaaacattcagtagaacattttattgcctagttgacaacattgcttgaatgctggtggttcctatccctttgacactacacaattttctaatatgtgttaatgctatgtgacaaaacgccctgattcctagtgccaaaggttcaacttaatgtatatacctgaaaacccatgcatttgtgctctttttttttttatggtgcttgaagtaaaacagcccatcctctgcaagtccatctatgttgttcttaggcattctatctttgctcaaattgttgaaggatggtgatttgtttcatggtttttgtatttgagtctaatgcacgttctaacatgatagaggcaatgcattattgtgtagccacggttttctggaaaagttgatattttaggaattgtatttcagatcttaaataaaatttgtttctaaatttcaaagcaaaaaaaaaaaaaaaaaa

SEQ ID NO: 234492 - DNA, 653 bp, Homo Sapiens
  misc_feature (624)..(624): n is a, c, g, or t
cttccctgatattgcttctgtgtaatgtgtttgacccttaaaaattatttttcttaacatgttagtacttctacgactttggagccactgatgggtccactcatggcctcagctgagaaaggagacgatgaacgtgtagctgacatgcacgaagtttaatttactcatgtccacgggggacgtttagagggcacgtgggaaattttccagcaatcaatgccttgagaaacttaaatggggaaatattattcatcgagaaagtgaaacaaaacactaggaaatgattatgaaatgttagtgattttcaaaagatgggcttcaaataaaagtctgcagagttttttttaaataggagggaaaatcttattttctagtatgtctcaggtatttttatgacttctactaaaattcacactgaaactttatcttctaaactggaatcattacttaattttaactaaccaacaaccacaaaagcagcagctactactaaatattggattactgacaaaggaattcagttttgtggaatctggtgtttgcactataggttaagagttgccatttaaatgtttcttattcataattaggttttgttccgctttagaaaaaaataaattcccnaaatgaattgcaaaaaaaaaaaaaaaaaa

SEQ ID NO: 234493 - DNA, 649 bp, Homo Sapiens
gcacgaggagatgcggcactgcagcagcttcgggcagccgccctaattagtcgtggactggaatgggtagccagcggccaggataccaaagccttacaggacttcctcctcagtgtgcagatgtgcccaggtaatcgagacacttactttcacctgcttcagactctgaagaggctagatcggagggatgaggccactgcactctggtggaggctggaggcccaaactaaggggtcacatgaagatgctctgtggtctctccccctgtacctagaaagctatttgagctggatccgtccctctgatcgtgacgccttccttgaagaatttcggacatctctgccaaagtcttgtgacctgtagctgccacgttttgaagagcttgagctgggtccccagtgggctgtctctctgtggggagggctttctgcttcaccatcattaggaatgtgaccattcctatataattcctggactggtgagattggtggtaggcctgtgaaatttgccctagttactaccattctcgttttggaggaaacaatctctgccaccaccaagtcattgactttgctcgaggcaccttttttcctgtttctccttttctgttgtcgagtaaaatttcatatttaaaaaaaaaaaaaaaaaa

SEQ ID NO: 234494 - DNA, 566 bp, Homo Sapiens
gaacgaggacagctatgacatttcatttatttctctatataatgcaataaagtagatggattaaccgtgacgtttacagatggagcaggggagaatgaagaggcgtcagtttgggcatcaggctggatcttcacactctgacctcactctgctctatcctgcccagtgttgcttcacctgatatcaggggtgcaaggcaaccagatctgacaccagtttcagtttagatcctgcctttacctgggtgtgacccgggtccatctcttcagctcggcctctgctttctcttcataaacttttggggttagtcctcggatgatctctaaaacatggcccaggtgctccttgccagtagagtgtagccggatttggagggactggacactcagtgtgaacaagacgaaggcctcaggaggcagtaaaagctgacaagaggagagaaaatgaagcgcctacgggtgcatactggactagcgggcgaaaggccatgactccttagtttggagaaagaactggggccgagattggggaagtttcccagtgcaattaaaaaaaaaaaaaaaaaa

SEQ ID NO: 234495 - DNA, 657 bp, Homo Sapiens
  misc_feature (20)..(20): n is a, c, g, or t
aggaccctcagcaatgagtntgagtgttcaaagcccactttagaacctaaagcattgtgggttaataaagcaaaattttgcttatgttatttggtggtgtcaccgcagcttataccaagacaccatggctcagacatgggatcaggacacacctttgagatcccactgttagcaagaaaaggctgtccaaggcaggcagtgtggtagttgtctgattttgtttaccacacgccaggtcccagggaagtcttgcacagactcttagcagacaagcagggaaaagagagggtcctggtgggtggaaggattgggaaggggattctgggcctggaagcctgctccttcccctctcagcagtctcaggactactgttggattgcaaacagcatctctgacccagtcttcggactcattctgtaaatggaggagctgaggtcagaggggggctgtgaactactcaagaccacatgcttgcagtcctacaggcttcccgacccacaggccagctacggattttgcacttttgctccaggccacttgtgtgtgtatgtgtgtgtgtaccactgccatctgaacaaactatgcaataccacctgctcccttccaggagcattttaataaaagattttttttaataacagaaaaaaaaaaaaaaaa

SEQ ID NO: 234496 - DNA, 529 bp, Homo Sapiens
caaatatgtaaggagactgctttagactaaacttgatttaacaatctctacccacttgtactcttccctgcattattttgaagcgtcatctatcagtattatgtttcatctgccaaaattttaacatgtatgcctaaaaggtaagacatatggtagtttcagtgttttttctccttttaaaacataaaccacaatatgggttaatgtggattatgtgggctaagcaggttgatgtgggttaatgtgggttatgtgggctaagcaggttgatgtggttaatttttaacttccaaagatgtttataagttattatgagtagactttttggaataaaggtttcctcatattgcagtattttggaaagtgattttactaaaaaataatacgggccaggcatgtggctcatgcccgtaatctcagcactttgagaggcctaggtgggaggactgcttaagccaggagttctagaccagcctgggcaacaaagtgagaccctacctctacaaaaaatacaaaaaaaaaaaaaaaa

SEQ ID NO: 234497 - DNA, 530 bp, Homo Sapiens
attcggcacgagggttttgtttaatccttaaccactctgtgaactaggtgttattaactccattttagagatgataaaactataaatgagtggcttacttttgcttgtttaattaatctaaactctgctctgtcattcaatgctcccaccatttggctttagctcatgctgctagttcatgttatactgtatttccttactctatgctatagccaccccagacatgctcttcatatcttatcactgtgcccctgttccagataaatccttatcctggcatttctctgcttcccactttgcctgtaaaaatcaagccaggtttggtggttcatgcctataatctcagctacttggttgagacaggaggatcgcttgaggccaggagttttagaccaggctgggcaacataacaagaccccatctctttaaaaaaaaaaaaaaaaacccacacatttcagtgcaatgcctggaacaaaacaacaacaacaacaacaacaacaacaaacaaatagaaacaaaaaaaaaaaaaa

SEQ ID NO: 234498 - DNA, 386 bp, Homo Sapiens
ttataaatgaaatttgcaaaatcacttggcagcaactgaagacaattatcacccacgtggagaaaatcaaaccgagcagggctgtgtgaaacatggttgtaatatgcgactgcgaacactgaactctacgccactccacaaatgatgttttcaggtgtcatggactgttgccaccatgtattcatccagagttcttaaagtttaaagttgcacatgattgtataagcatgctttctttgagttttaaattatgtataaacataagttgcatttagaaatcaagcataaatcacttcaactgctcttctgtagttcttggatttcttttcccttttgactttgaataaatgtaaaatcctttcagccggaaaaaaaaaaaaaaaaaa

SEQ ID NO: 234499 - DNA, 495 bp, Homo Sapiens
caggtgtgtgtagctcagagttccttttacagtgaggtgtctctcactgggggagcttccaggatcttgagcagactggacacaatcatctctcccttcctctatgtcaagcactgttacaaaagactgtgagcaaatttccatctaaatattaataattctgaagaagaggcaaaactgttgaatgcaagcgatacctattgttgaagaaacccacaaattatttctgattctaagatcaggggatacaacaaaatctacaagtcatttcaaatagcacacaggaatcaaactttggtaaatcatttctgaggcacaattaaatatattgtagcactatgttaattaattatattaaatgtcgattcatcttgaatgtattctcaattgcctaccaaaaattggtatgattatcatttctgggtctactgatttttcatcatggcaacagaaattgtcattaaatagaattaagatacaaaaaaaaaaaaaaaa

SEQ ID NO: 234500 - DNA, 602 bp, Homo Sapiens
gtgtggattctttagtggattactatgtgaaaagtatgtggacgtgtgtgtgcagtgtttatttggcagcaattttatcaggaacataatctaaactcagctttttaaccagaaaaatcagtaattcaaatagtatattttaaactagtaaccatcccctcctcatttccaataatgtgtttattacctagactcagaaatactttgatttatttcacatgtggtttatgggaatcagtatcttcgatgtaggattgttcaaggtttgcatcttttgcctgctttaccgttcctgaggatcctctttcacttctggaaatcagtagatacagttttccaatctctcttctgaatgataaagcaagaatataaattatagcttttatatttttaccttttttatgtgaaggtagatgattgctagtgcttatgtagtttgatggaatgctaataaaaataaagagtgtcttcgataagttttcatctatattgttaaaattaaaacaagccctttagttatttggtttctggtttaagagttgtggatgtaacaatatagaatcattaacattaggggagacaagagaaaaaaaaaaaaaaaa

SEQ ID NO: 234501 - DNA, 561 bp, Homo Sapiens
ttctctgtcttgtgaggctcacccttggaacccagccatcatgctgtgacaaagccatgtaccacatgcaggtgtttcggggaacagacctgtcagaggtccttgccaacagccaacatcagtcagcatcaaccactagacatgtaagtgaggaagcctccagatgattccagttcccaccttcagctgatgttaggtggagcagagacatgctgtccccacctgcctaaactgcagattcatgagtaatgtaatttctgtcattgttttaagccattaagttttggggcagtttgtcacacagcaatagacaactggaacacagctcatatgccccttctcagaactgccctccctgatcatcctaagtgcccattggcattatccataacctgaaaattattatgattgatcctaaagtccagcctggtgcctggcacgtaggagatgctcagtgaatatttgtggaatgattgaataaggaaatgaatcctcttgtcacatttgaagttatcagtcatcaataaaatggggatttgtttcaaaaaaaaaaaaaaaaaa

SEQ ID NO: 234502 - DNA, 614 bp, Homo Sapiens
ctttcatttttatagttattatggaaatgttgtcttttatacttagttatataagaaaaaagggagttatgcaattaatatctatcagcttgggaaacgctttggtgcttttctccagttttctggtaccagttacttgtttataaactgaaccttttctgtatatagccatggtttcattcttatcagtccaaccctttgcctgaaacattgaatcttgttaaaccacagcttttagctaaaatgaggtatacctagatgtcaagtaagacagatccaaggtaactgggtaggaaatcttttgacatcttaactcatgttgagtttgtgctgtggtgtcaccagaattccagataaacacacagcctttcccatacctttttttttcttactataaaatattataagatccattgatgtccaaataataccaccgagcatctcttcacctctcctcctcttggtccacttgctaatgcccagttttcttctccatttccactttttcttaggctccctatttactattcattttgacttccttctgttttatttttttccctttagcattgcatgtgaataagaaaataatgtttaaaaaaaaaaaaaaaaaa

SEQ ID NO: 234503 - DNA, 330 bp, Homo Sapiens
cttcttaaaatatatatatatatatatatggtctgggcatggtggctcacacctataatcccagcactttgggaggccatggcaggtgaatcacctgaggtcaagagtttgagaccagcctggccaacatggtgaaaccccacctctactaaaaatacaaaaattagcagggcatggtggtgcacgcctgtaatcccagctactcaggaggctgaggtaggagaattgcttgaagccgagaggtggaggttgcagtaagccgagagggagccaccacactccagcctgggccacagagcgagactccgtctcaaaaaaaaaaaaaaaaaa

SEQ ID NO: 234504 - DNA, 478 bp, Homo Sapiens
  misc_feature (456)..(456): n is a, c, g, or t
ataggcaggaacgtttccctatcatactcctgtcccgggtctcatgtgtctcagttcaaacagacactgccgtctatcttcaagctgcaatgaagctgagagccacagaaaacacctgtaccatggtttcagggaggagtctcttccctcagccgaaaacagacagctttgctggtcatctgttctccactgcgaggacgctgccactcagtgtggagagaggaaggggttctgcctatggtgcaagaaggtcggactcggcagttaatactcttggataatgtatttaaggatgcttaagaaattgcaacagccagttcaaccttcagcaaccaccatactgatcagtagtcatcaacattgagacgagactgtacaccagcaaaaagatcccaactcaatgaaggctcagatgattttagcatttttttagcaataaagcatttttaaattaanctttaaaaaaaaaaaaaaaaaa

SEQ ID NO: 234505 - DNA, 583 bp, Homo Sapiens
ctttttctctatctgaagtgttcacacttacacatgtaggacaataagcaggaccgtctgggccggtctgcataaatgctgtatacataccagatttgatgctgcatatagggtatggaattgcacatccatctcataggaattgtaaatggtttgaataagaggaaagtaatttttgttgcattataaaatgtctagtagcatcataagtttttttgagagaagcatctttttatttcccatattcctggttattttcatcattgctttgaattgaatttttatatctatttttatatgtaactctttttttacctcatgtttttgtttgttttgcacatttctcataccacaggtattgaagcccctgggtgataatttgatggaggaaaacataaggcagtctgtaacaaactctatcaaagcaggcctgactgaccaggtgtctcatcatgccagattaaagacagactgacagttcatctcctcacggactccactctcttttttttcatgcttgctgtacaatgagaactcaaataaaaataaaccaaagtttacaatcaaaaaaaaaaaaaaaaaa

SEQ ID NO: 234506 - DNA, 505 bp, Homo Sapiens
tcgtcccccagcccgacacccataaagggtctgtgctgaggaggattagtgaaagagggaggcctctttgcagttgagataagaggaaggcttctgtctccgacatgcccctgggaacggaatgtctccgtgtaaaacccgatcgtacattagttctattctgagacaggagaaaaccgccctgtggctggaggcgagatatgctggcggcaatgctgctctgttactctgctacactgagatgtttgggtggagagaagcatgaatctggcctacgtgcacatccgggcacagcaccttcccttcaagctatttgtgacacagatgcctttgctcacattttcttgctgacctctgctctgctgccgcattcctcatgcaaagatagtgaaaatggtaatgaataaatactgagggaactcagagaccggggccggtgcgggtcctccgtatgctgagcgccgtctcctgggcccactgccttctcaaaaaaaaaaaaaaaaaa

SEQ ID NO: 234507 - DNA, 397 bp, Homo Sapiens
aggcatgagcttccacgtccggccctagacccattcttaacagggtttgtctccctggaaacttcccgaagcctcaccctcccaggaattccctgctaagtgccacagtcatctcttcaccactcggtttccactctcccatccttgcaccgagatcccactgttaggcctttttcaagcacggaccttctcatgctcagtctctctgtggtgtggaagtgtctactgggtgggcctcacagaaggttccaggccctggtacaagcccaagggaaatgatgatccaaaatggactccgataaagtttctgccactctgcattgggggcttttggtaggagtccagttcaattttataaaaataaaaatacatgtctcgcaaaaaaaaaaaaaaaaaa

SEQ ID NO: 234508 - DNA, 674 bp, Homo Sapiens
tcccatatttttcttgtaaagaaaataatattttaacttacacatcctgtagaaaataccaccttttccccttgtattacagtacaatgtttacattactatactgtcaagctgaaagtataaaaaatgtacatatacattttgagttatgtatcctttttttaaaaaaaagttcgagtctgttgcactaggctgtacatgactaaagttgacagatgctatgctagatttataatcactagttctggtacttgtgtctttgtatgatcaaagcatgcaataagcaatacaaaataccaagccttatacttaaaagaagtttaacatattggttaatatactggttaatatactggttaaacatattgaatgtatataagtggcaaaactagatttttaaggaagtgtacattataatattggagctcagtactgcatgaagagacttcattaaaactaagaaaacatttattttgggagaaattttaggcatttaagaacttgtatttttctattttaaaaagttaaattattccgtaatttggaagaagtttcgttgaatgtaggacataaccgtttgaagggttttcatttgaaaaattgatgtattttgtgccttaatattttgttcttttaataaaaatgctctgaatttgaaaaaaaaaaaaaaaaaa

SEQ ID NO: 234509 - DNA, 695 bp, Homo Sapiens
ataaacaacagacattcattgctgacagcctctataggaggctagaagtccaagatcaaggtgccagcaggttcagtggtgagggcccacttcctggttcatagacctctgtcttctcatcgagctgtcacatggtgaaaggggcaaatgaactcccttaggcctgttttataaggccactactcatattcacgagggatctgcccttatgacctaatcgtctcccaaaggccccacctccaaataacattactttggaggttaggtctttaacatgaattttggagggacacaaacattccttctatagcactcacacacctatcatgacatctgtggctcttgatgtccctcgggtgggctgtcaggagaatagaaaggtgcctgtgcttcaggcctgagacttctttccgtgtgtaggctcacactgcctgagaaatttgggttccttgtttcgtctttaaacagcttcttcctttactagtcgaggctttttcaggtgcccattgcaggagacccctttgtagagtcacgggggcttaatcagaatccccttctctccatatacccaaccccgtagactgtggtgaggattgaatgagacctacttagcatgattcctgacagagtgtgcactcaagtagatactagctattatcgttactattatttctcttaaaaaaaaaaaaaaaaaa

SEQ ID NO: 234510 - DNA, 575 bp, Homo Sapiens
tatgtaaatagccaaaaatgaacattgaatttcacattgtaaaagttttattttatcccttgtatgatattactcaaaaaatccctgtgtatatgaaagtgcataataaatatatttgctttacagagaagatcttgttttaattttgtccttgaaccagtagaacatgcatgatatgcatatagcataaacaactgttagttgttttaagttattatcttaaataaatcctgagcaaatgaatttggaaacattttgcaaagaagaaagtgaaatataacactgtccaaaggaaggtagaaaaacaaagatttactgtttatgtcttcctaagcctttttaaagacttaatgttcttttcccccccccgtgactgattatatactatatcacaccatgtcaggttttgtgcctctgagaattgcagtaatccaataacttttgtatatgtgtgctccttgatcatcagaatattatggccatcttatggcggatattttgggagtttattgcaaacatggtcattcattttctaaataaaatttgtgtgtttcttcaaaaaaaaaaaaaaaaaa

SEQ ID NO: 234511 - DNA, 611 bp, Homo Sapiens
acatattttggctgtacatttagtgcacaaaatatcccttttttgaatgccaaatgcccaagtgtgaaaaccaatatttgttaaagctggagcagaagtcggtatcatcatcatagagtaaacttctggcatatgtgaagatatgaaatgttatccctgaagttattataatttattctcagaaatattagtaatcttattttaagagtaggacattatagtgcagtaatgataattttctcagtgctgcctgttgctagattgttcctatgattgctgtcatgcacatacagacactaaattgagggtcactttccactgaagttagtggaatacaaaataggtggaggaactttcttcctctaacgtctttatatgtgtctgtgtttatatgtgtgtgtatacaaatatgtatacacatacataatatctggagcaaaaatgattatgttgtacagaacttttggaggttttcctccttataaaattctgaagtggtagagttaacattctgcttttaatttatctccaaaaaaatgtgaagaattcccaaataagattttctcatagaagattcatggattttgagtctgagaaaaaaaaaaaaaaaa

SEQ ID NO: 234512 - DNA, 721 bp, Homo Sapiens
  misc_feature (84)..(84): n is a, c, g, or t
gagtagcatcatggtggcaccctgtgtgtctaggatggaatgcattgactcattcattccttaataccttattgagcttttttntattatgtgctcagtgagggaggaccatatataaaccctgccctcaggatgctcacagcctagtggggaaggtagccagctgaacctccagttataactgagggtgccaagagtgagctgttgagagcagcgaggacagaggttttcccagccaggattgcggtactgagacatgcacacacgtgcatacacatgcacagacatgtacactcacaccctaaattgcttgtgctatgtgggaaattttgacccacatattcctatgtttaattgaaggcactgttaacttcttaacaatgctacatctctgatgattttaggaggaattagactgcgtaaacatctcaaaacagggaggtgaagctaggaagcataaatgccccagtgatggctgcaactaggtctcttaacttattgtaatctaaaccttgggtgagggagaaagaaaaaaagagcagctttttaaagtccactgaagacttcagatgtggcaaaaataatcattttttttctggccatgagaaattgtctgagtagagggtggaaaatttcatccttatcaggaagttaatcatagtaatttatgtggaacttcgcaggtggttacttagtcaatcttaaaaaaaaaaaaaaaaaa

SEQ ID NO: 234513 - DNA, 680 bp, Homo Sapiens
ctcttaggaaatcctaaaatatggaagataaaatatgaaatttttctcagtattaaatgtttataacacccactttctaaccctcagagagcaacacagcaaatacttattaacagtgccataaagaaataaaagctagtcaaccaaaacttcccattaaataggaactgtaaactttatatacagataaaacaaccacattttcacaaactgaaacttgaaaaattaagtaaattggtcattcactaaattggctgcttggcaaactaattttcaaagaattagcatgttcttggttggaaaagaaaaagaataagcaaagtcagaaagtaacaaaaaagatctctaaagctgggtgttgcccaaaagcagccgatggagccaaccagaggctggaacattacagacccgctttccccaccacccaagctggtgtatgccatgctcccacagcagaagctaaaaaagtacacttactatttctattaacgaatagactatctccttctaaactgtataacattatatgaaattggaagctaaaatgtttgtagtaattgtttctactatgttcttcttctgccttcattgttaagttttatgtttcattaatacctttttagagtcaaaaaattttcaaaatttcaattaaaaaaatttctaaataaaaaaaaaaaaaa

SEQ ID NO: 234514 - DNA, 650 bp, Homo Sapiens
attcggcacgaggtgtatcttaaaccccctttttttggacaggctgcacttggataaaataggcaccactgtgttgatatgtaattaaattcataactatttatgaatgtgaccattgttaaatttaattatagtgtatttctttcttgaatttcagtctgctgctttgtaaaaaataactgtaattgatatttcatttttaaaatttataaattccaatcattgtcattcaagttattagaaatgagtcacggcactaactcatggttctatactcattttaagaaattgtaaaggttgaggtgtatttggtgactttctctgagacacagatgaacgttggaaatagatgagaaatggatgcagaataatgcagatagtgatcccatgtttgttaattgccatcatggaagtcagagaattaaccaattaagtgacggtaactattttttgtataccttgttctttgtgatctataaaattaaactggataaaatgttaattgggggtagggaaaaagctttgttttaagatttctaagctaattattttaccgttttgttgaccttgtacacaagaatgagattaatctgtattatataagaaaagaactgataaatatttataaaatgacaaaaaaaaaaaaaaaa

SEQ ID NO: 234515 - DNA, 630 bp, Homo Sapiens
gtgcttcgccctcactggcttgcctttcttttccttaaatacatcatgttctctcctattttagatccttttccccgaaggtatggaaacattatttctgtaagcttattcttctatatagatgggaagtttttaaatcagataaggttctaagggcatgtggacaatttacgttatcatagtattgttcataacgtccatcattattctgtagactgtaagggcttactttgctcgtgtaagaattatccttcaaaaagcatttttaaggtattagtattgctaatctataaactttgtgcaagaagtcctaaagtcaatagcaacatttaaagtacagtttgtcatacttaataaacctctggtatattttcctttattatgcttgttaaaaacacagtataaatgggagaaatcattaaagatcattaactccaaggctgctggatgttaggacccttaagcatacttaaaagattgattgtaatcaagaataacttgtatcagattgccttccagtgattcacatttattagttcaaccagttacatacctgtagcaagagaccagtttatttggcaataaaattggggaaggaatcaagacttaaatgaaaaaaaaaaaaaaaaa

SEQ ID NO: 234516 - DNA, 656 bp, Homo Sapiens
tcttggagaactatcaaaattcttagcatctcaacagaacgccaccgtgctgaagttcggagagcagtaaacgatgaacggttaacaacaattgcacataagtaagccattagtcgtaccatccctgattttttatgacatagtataacacagttttgaaacagtcttcctattgtgtagcagattcctgagtcttttaagtaacaatatctctatactcagggatcctgatcatagcagtaaaagtgatattaactgtttattcagttgggtttttttttgcatttggttaggcaagctttaagtactcaggtcaaatcctgttacaatgtaatctctgtctaactaaaaatcaccacaatttagcagatgattcacttacttgaggccaagttcagtaacaaagtattgtgacccctaaaattgaaagccctttagaggttctttgtaatggtatttgatatgttattaccttataaataggcgttgtaacttttttgatatctgactcattatttcatgtattttgagattcagaaaaaaatgtaaaatttgtgttctgtctttaagaaatatgaatataacatctcttaatttatttttaaaaagccaaaaaaataaaacgattaaagattcttaaaaaaaaaaaaaaaaaa

SEQ ID NO: 234517 - DNA, 673 bp, Homo Sapiens
gatatcaaagaatgccaacaataatgctgaagaaagaagttattctacagcaatgagacacaaagaaacgaattttgtaaacattagcatcttggttactggagaactataacttttatgtagtcgtgcttggaaaacactaaaagggaaatcgagtctgtttgacaatattctgtcttcactgttgatcacttcataatgtgttggaatataaagttctatacagttaatatgaagctctctttagcatttaaaacatgatttgcattttcatgaggcattttggctaattttattgatttccttatatttcatagtccttagccttatgagaatcttatgtttctgtgtgttttctatcatgtagcacaatttctgacacacaaaacatacaataaacttgtgttaatttttctatcaaagtcagaatttattcataaggaatctgaagtaaggtgtactaagcttgtttatgggttaagtgatatagccaaattcaaaactttactttttatgtcagtctagaaatatctcagattaaaacatatcacttcttagttccaattagataagggaaatcttttataataatgccaggattgctataatctgataggagacaacaatttcattttgctacaggaaaatttggaggacaaaaaaaaaaaaaaaa

SEQ ID NO: 234518 - DNA, 706 bp, Homo Sapiens
  misc_feature (55)..(55): n is a, c, g, or t
  misc_feature (58)..(58): n is a, c, g, or t
tgcctagggtgctcaatatttattttctttttcttttcttttctttttttttttnttntgagatggagtctcggtctgttgcccaggcgggtgtgcagtggtgcgatctcggctcactgcaacctccacctcccaggagaacattcccagtctgcctttcactgagtttttacctgttcactagaacaacaaaagggaacccgatcgggaaactctgctgtcaactaagcaaactctaaatttaacatttgggggacccccttggagagtagttgagagctatgtgctccccttttcagaaaaatgctctcaaatactcagtgcataagcccacagccttagcaggttcccagaccttaggtcagcaatcctgttctaaggcatacatcacgagcagcattttgattttcatctggggaacttatagttcataaagacctactgatccattaaaatttccacttgattttgccattagtaatctcttaaacaagtccaaggaagccagaggaagttatttcttgaatgcttttatactagtgctttcaagagttcgtgttgctgactccagtttttaaaattattattctcatcttctgcaatgcctcgaggcatgtttttagctgaatagcaataattatgggattgtgcaatactggaagaagcagtaaaaataaaatgtaatactaaaaaaaaaaaaaaaaaa

SEQ ID NO: 234519 - DNA, 604 bp, Homo Sapiens
tcagtttcttgttatttttataaatgcaaacatcttattaaagtagatgctaaggcattagaatttcctgctttatttttctaaatgaccatgaggaaacctggaatgtcaaaggtaaagtgcaacacattctgcatttaaaaattaaaatgatcctttttaaaagtagcaaccagatgtgaaaaattggactggagtccaggttatagttgatagctttaactttctccccaacagcaacagcacaattttccctaaaatgtgttatgaataagtaaaatgactacttcacatcctttaactcttcctacagaaatctaagagagaaatgaaacaaaagtttgcacacttctagacacgataaatacatgtgaaatcacacaactcagaaaatgtcccttaaattaattgagccattggtacttgtgaattagaagagacatctatgttctgatccactgttgaaagctgtacaatgttacctatttatttgcagacatcctttggaaacaaataggtagatttgcaacgaataaagagtggagtacagctgctgacattaccttgtatattcatgcctttatgtaaaaaaaaaaaaaaaaaa

SEQ ID NO: 234520 - DNA, 750 bp, Homo Sapiens
  misc_feature (93)..(93): n is a, c, g, or t
cccccccattgtcttaattctgtaaatggggggaagtgagtaccaactgggtttggcaggaagcacttttgactccttagttttagttgtaanatgatgtggaactttaaacagttcaggaggtggagttagtgtggttggaaaggcaggcagtgaggtgtggaataaagaacaagggctttgataacttcattcctcatgttgttcctggataagtcatttcatctttcttagccttaaatttcccaactgtaaatgtggaaataatgtccatctcctagggttgatatgaagggttaataagatattttaaaagcctaatacttagaaagtgctctgtaaatgttagtataaatgttagcttgatccttggacagttaaatctggaggtgagattggagtagatgatttctagaagttccatgtttgctttagaagccttagtttagaccaggtgcagtggcttatgcctgtagtcccagcactttgcgaggccaaggcaggagctcaagaccattctgggtggcatagtgagaccccccatctctacagaaaatacgtttaaaaaaaattaggcagatgcgatggtacatgcctgtggtcccaactacttgggagactgaggtgggaggatcacttgagccagggaggttgaggctgcagtgagttgtgatcgcaccactgcactccaggatgcactccaacctggtgacagcaagatactgtctctttaaaaaaaaaaaaaaaaaa

SEQ ID NO: 234521 - DNA, 479 bp, Homo Sapiens
taatcatcttttataaaaattgaaatgtccttgggaatgttaaaggaatgagattgaatatttataccttcaactgaattacctgaaacagattgcagcccccattataccaggctgaaatcagcacacaaggggatgatactgacacaaagggaaccatgccaaaaagtgctttgaaggttttatggttgttttgaagggaatggggtgaggaaagtagggggaagggagtcctgagaagaatatagatgaaagagggctctctttgattagccagagggcaacataagatttggagaccatgggaaaggagctctggggtgccttcctgcttctcctgtgagttaagctttgacttcttataaatgttgtttcacacctcttctggacaggctcctaattaatgggagacaagagagcaaggtagttgtgtcattgatgctcacaagtagtgagaagttaaaaaaaaaaaaaaaaaa

SEQ ID NO: 234522 - DNA, 497 bp, Homo Sapiens
acttcagattcctggattgatgtcttatctacaggcttctttttaaaaatcaagaatgattggctgtgagtttaccaggattatagttgaggctaaaggacagctcctcaggaaagcccctgttctacatctacggtcacatgctggaccttgagttgtcactcagagaaaagagtgccatctaccgaaactccacagtttccattgtgaatggcttctttggtgcagagttccaaaaattatgtagcccagctctttaattttgtaacatctaatgatatcaccgccttgaagtgattaaagtagattgcttaaagaattaaagctttaaagatgaaagatgttattgcttttgctggacatgaggaacagttgtaaagtttccaggtctacaataactttctggaaccctctcagtgaactgtttcttgtaaaagttttccctaagataaaagctcaatcccattgtttccacactcaaaaaaaaaaaaaaaaaa

SEQ ID NO: 234523 - DNA, 546 bp, Homo Sapiens
  misc_feature (17)..(17): n is a, c, g, or t
tgttatgatagtacctntacaggttctgatggaagcatcaatgatggatttggcttttccatttgggagaggaggctataaaaaaccttcctggaggacgtgggctcattctgattcacagacaggtccagccccttcacttcttactttgaactactccatctggaatcatagaaactcattagcagctaagtgagtcgtagaccctgttcctacagtttcaacaaaccctgatggtggcatttcagtttatcgtagaggtttcttttcccctacaagggtcattctctcttgcccaattttggctgagaagggaggaatatcatggccgttttggctgtatggtgttactgtataatgatatggggattggtgagtgaaaaataaaatgaaccctcacttgcttaggtaccagttttatgtaagaagaaactcacagcttttgcacattatttgagatttgcttcttctgtttaacatatttgtggtactttcctaaaaagttttgttatagacagctgtagagattaaaaaaaaaaaaaaaaa

SEQ ID NO: 234524 - DNA, 545 bp, Homo Sapiens
  misc_feature (15)..(15): n is a, c, g, or t
tctgtattttttttnttaactcttaagttcaaaggtatacgtgcacattggttacacagataaacttgtgtcatgggagttcgttgtacagattatttcatcatccaggtattaagcctgctacccatttgtttttttcctgatcctctccgtcctcccattctccactctgtgataggccccagtgtgtgttgttcctctctatgtgtccatgtgttctcatcatttagctaccacttataagtgagagcatgtggtatttggttttccattcctgtgttagtttactgaggataatggcctccagctccaaccatgtccctgcaaaggacatgatcttgttcttttttacgtctgcaaggttctctgcttataaggacaaaggggagaatagggattggtgggcaactagtcatctactagttagcttagtaagctaagcattaaatctaagaaatagcaaaataagcctatggaaattaggaagaaggaaagaatcaaggtaaaagaaaaaataaattaatttggaaaaaaaaaaaaaaaaa

SEQ ID NO: 234525 - DNA, 566 bp, Homo Sapiens
aaaatccagttgaagataaataatttttttatactttatcactgaacccaagtgtttatttaaatgtcaacagtacttctaagaacgttgcctgtcatcgtggtctttggtcttggataactaaactgcctttccagagaaccaaatgtcagagttactagaccaaatagtggttaaaacctccaaaggaagtaatgtaatcttattcataatgggattaacatattttagacattcattttaaacactacctcagttaatatagagtataaaaatctgtggtttaatccctcaaaagttaacagtaattttttttttgtcttacacacacacacaccccctcccccaccatcactatccctgtaccctcaccttggtcatctatcctgaaataaggcttagttagtattggcctgaatgttttgtgttttttttttgtttttttttttttactgttactttgaaaaatatgtatgtataccttatcatatctgcctatatcacttactttggggagatactcagagctttgtggttatcagtatactaaaaaaaaaaaaaaaaaa

SEQ ID NO: 234526 - DNA, 663 bp, Homo Sapiens
  misc_feature (53)..(53): n is a, c, g, or t
actaaaatgcaaaagcaagagtgcaatttttaaaatctagaagttaggggttntgttggagaaaaatggactgatctttaaactattcagtcttactgggatttttatgcatagaaactcacatataaacatgaaataaacagtgccagtattcataggaaagtgagaaactgtaatatttggccattattctattcaacaggttttagaggcatgccaccattttttccttatatttttgcttaatttttttaaattgtcatttaattcttaaactgtcatttatttgagatggaaataagatctaaagttagttgcctttgcctgtaaaacatgtgatttgcaaattattatttttctttttttttaacaaatggaagtaaatttgtttcacgtaaatcttaattttcaacctttctggataccttaattgtaactgtcagtttgcactggtcggtatatggaaacacattgctctaccctgctacttagttgattttaaagtgaatttacagtgatgagaaatttgtgaaaaatatattgtatttcttttgatgtttcaaaaggttgcctatgaaaaactgatttgttaaaacatgctacatgtccaaaaataaagaccagaatgacattttgataattttcaaaaaaaaaaaaaaaaaa

SEQ ID NO: 234527 - DNA, 654 bp, Homo Sapiens
gatgacagagtggactccatctctttacatatgtatatcttactctcttgatgggacaagttggtagaaataaagattttttttttctgttgtgatttcggtgtctgaccaattttctgactcattgtgaaggtgaccagatatgaaggcatatatatgactactcctctgtcccttaggtgtataagacttagctggaatccaactaaagatttgggctggtctctccatcttaacgttgatgggattcaggacacataaccccaaaatattgcaccctgttatttgagaaaactgcagaagcaaggtttctcataccttccccttaccccttctcccctgaagcaggccataaaccctaagtgactgttccctgaagtagatcataaaaccttcattccataggtaccctttatcctcacagatacagagacaccaagaagaatctggacaaataggacttgctaagttctccacagtttattaccattagattatgtccttttgtcctctgattatacttctgcataagactgtacataaaaatacacaagttttcctatttcttttttgtcttcatttctgaagattcctgtcatgtaaaacttacagtaaataaatgtgtgtgcttttctcaataaaaaaaaaaaaaaa

SEQ ID NO: 234528 - DNA, 774 bp, Homo Sapiens
  misc_feature (51)..(51): n is a, c, g, or t
  misc_feature (66)..(66): n is a, c, g, or t
  misc_feature (111)..(111): n is a, c, g, or t
  misc_feature (122)..(122): n is a, c, g, or t
tatacccaaagcatagcaacaaaagagatacacaaactgacttcatcaaanctaaaaactgttgtntgaaatgacaccatcaagaaagtgaaaagacagcttacagaatgngagaaaatatntgcaaatcataaatgtgataagggacttgtatcttggtggtatataaagaactcgtaactcaattataaaaagacaactttgaaatgggcaaaatagctcaacaggcttttctgcaaagaagaaatacaaatgaccaagaagcacatttaaaaattttcagtactattactcatcaggaaaatgcaaatcaaaaccacaagacacccaatgtctacaatcaaaaagataataactagtattgatgaggatgtggagaaattgaaattctcataacatgctggtaggaatgtaaaatggggcagccactttggaaaaagtctggtagttcttcaaatggttaaatgtagagttacgatatgatccagcaattcctctcccaggtatatacccaagataaatgaaaacttatatccacataaaaacctgtgcacaaatgtccatagcagcgttattcataatagcctaaaagtggaaacaatcccagttccagaatgaggaaggggagaaactaatgtgtattagctattgtgtgctaagcattcaactagattatttacaaaccttgtatcatctcaactctttaaagactgtattgcaatgttttgaatattcagagagaaaaaagtcgttgctaaaacaaaaaaaaaaaaa

SEQ ID NO: 234529 - DNA, 702 bp, Homo Sapiens
  misc_feature (53)..(54): n is a, c, g, or t
  misc_feature (125)..(125): n is a, c, g, or t
atagaggagtaatcatgtctgaaaagtcaggaaagtcttcctagaggtaattnntaagctgattgttttagaattagtagaagcttgccagatggaaaagtccaggcaaagtgtaacatgaatgngaaaggccacagtctagaaatggcagagtgtgttcctagtttgtttgtttgtttgtttgtacctgccttgttccaggaaggatttaatgtggtttatattccagtcctttaatgctggaagggctgagatgagactgaaagatgggcaggaagtatatcatcacaagctttgtgtttgatgttaatgtgtatgatttttatattatgggaaataagctcttagaggagtgatataatcaggtttgtgttttagaaatctgtgtaatgaatgaatgaagaaagaaattgaagaatcatgtaacatatgtgatcgcatttttgtaaaagaaccatgtgtgtttatatgtgtttatatatatacttgtgtatgcaaaggtaaaagtctgaaaggatatatgctaactgttcacaatgataaccccccaggaatgggattggaggggagggggcttctgtgtttgttatgtatgctgggtgggatattgtgcttttatttctatattgtttgaatttttttacagtatgtattatttttgtaataaaaattttaaaaaattccaaaaaaaaaaaaaaaaaa

SEQ ID NO: 234530 - DNA, 699 bp, Homo Sapiens
  misc_feature (103)..(103): n is a, c, g, or t
aggtagataaaccataaactgaccatccttctcctatgacacatttaacaccctaagttcttgggataattattctttggagggcattattatactttgcttntgaaatagccagctatgtagataaggacagtgggaaggctgcagagttagcccccatgttttaacacgttctgctggcctgctgttgcctccacaaagctcctccagaatgtttgcagtcacccgttcacttcatgataactggatacagacagaacatgggtcagcttctaaggccttttgacctggacccagagcttagcagactgccccagctgtttgcactttcaatagactggtgggctgggacccagacaccttttgatggcaccagaacatacagctgggagccagacaccctgatggggcaccagaacatacagctaagagtaaaatggctgtgcattgctggtgaatttttaaaagaacccaccagcatccacacagtgggacaagagtagtgggaataaagaatggactgtggctcacacagaatgccctctcaaaggtcccattgaaagaggtcctttaggaagcacccatagaagtagaaacattgtaaggaatagatattgaatattcttcatgtatttcgttacttacagaatggcacacctaaaaatgaaaagctctgaatttaaaaaaaaaaaaaaaaaa

SEQ ID NO: 234531 - DNA, 674 bp, Homo Sapiens
atttaaagaacacactgagagcatcctctttctcgttagaagagccataaaggacattgtgacctccgtttttcaggcttctttgaaattgttgaaaatgatcattacacaatatattcctaaacataaactgagtaaacttgaaacagctcactgtgtggagaggaccattcccgttttgctcaccagaactggagattcttctgcccgcctccgcgtcacagctgcaaattttattcaggaaatggccttgtttaaagaagttaagtctctccaaattattccatcctacctggtgcagccattgaaagcaaactcttcagttcacctggcaatgagtcagatgggcctcctggcccggctgctgaaagacctgggcactggcagctcgggcttcaccattgacaacgtgatgaagttttcagtgagtgccctggagcatagagtgtatgaggtccgcgagacggcggttcgaattattttggacatgtacagacagcaccaggcttccatcctggagtaccttcctccagacgacagcaacacacgcaggaacattctctacaaaacaatttttgagggatttgctaaaatagatggcagagctacagatgctgagatgagggcacggagaaaagcggctacagaagaagcagaaaaacaaaaaaaaaaaa

SEQ ID NO: 234532 - DNA, 673 bp, Homo Sapiens
  misc_feature (44)..(44): n is a, c, g, or t
attgaatcctgtggccatcccatagaagtccagcagacaggatntgttaagtgccagactttgtcaggaagtcaaggagcttctgctttgtccgcctctgggtctgtccagccagctgtttccatccctgaccctctgcagcatggtaactatttagtaacggagacttactcggcttctggttccctcgtgcaaccttccactgcaggctttgatccacttctcacacaaaatgtgatagtgacagaaagggtgatctgtcccatttccagtgttcctggcaacctagctggcccaacgcagctacgagggtcacatactatgctctgtacagaggatccttgctcccgtctaatatgaccagaatgagctggaataccacactgaccaaatctggatctttggactaaagtattcaaaatagcatagcaaagctcactgtattgggctaataatttggcacttattagcttctctcataaactgatcacgattataaattaaatgtttgggttcataccccaaaagcaatatgttgtcactcctaattctcaagtactattcaaattgtagtaaatcttaaagtttttcaaaaccctaaaatcatattcgccaggaaatttcctaaacattcttaagcttctattttcctttggcaggggaaaaaaaaaaa

SEQ ID NO: 234533 - DNA, 642 bp, Homo Sapiens
  misc_feature (110)..(110): n is a, c, g, or t
gcatgttcacccggcgcagcagtgtgggtgtggcggtcctggagctgctcaatttcccgccgccatcctccccgacgctgtccgtgtcctccaccagcctctgacccacntaccaccagaggcctgcagcctcccacatgccttaaggggaccgtggcccccaccagggacgtcctgcgccatccgttcacgtctctgcatccattccttcatgtctttatttagttgtttatttatttagttatttatcttatttattgagaggtgaggagtgccacggctgcccgtttacacctttagcgtctggtcctcctgcgtgtcctcccctccactgcctgcatggggggcgcggggagtgaccaggcgggggcctcaccgccccagggccgttgcctgctcagaccttgcaggctgtggagcaagaggccctgggtctctccaagcagctgcagaccccagctcgaattttgcacatggcggggtcccgggaagggtggggagcaggtgtccttcctgtcgtcgtctgccgtgtgccatctttcctggatcttgtagcgggtgcacacgcgtgcactgggaccacacagcaatacgagtccaacttaataaacacatttctggggtaaaaaaaaaaaaaaaaaa

SEQ ID NO: 234534 - DNA, 621 bp, Homo Sapiens
  misc_feature (78)..(78): n is a, c, g, or t
gtttctcaacagataaatccaaggaataccattgatactaaggttattctactcataggctttaccaagttttggagngagagaataagaaaaaagaattgtttctaactcatggaaaccttgaggaagtggctgagaaattgaaacagaatatttctttagtacaagatcagttggcagtatctgctcaagaacattctttctttctgtccaaacggaataaggatgtggacatgctttgtgatactttgtatcaaggaggaaatcagcttttgcttagtgatcaggagttaacagagcagtttcataaagttgaatctcaactgaataagctaaatcatctcctcactgatattcttgctgatgtgaagacaaaaagaaaaactttggcaaataataaattacatcaaatggaaagagaattctatgtatattttttaaaagatgaagattatctgaaagatattgtggagaatttagaaactcaatcaaagattaaggctgttagtcttgaagattgaaaattactgaaaactgaatctttattacgtgtcctcttttatttattagaagactgtgtataataaacactactaaatttttaaaaaaaaaaaaaaaaaa

SEQ ID NO: 234535 - DNA, 514 bp, Homo Sapiens
gcacgaggaacaacctctcgatgggtcccacgaagatgtttccagacccttggaatgccaagttcaagtttagctatgtctcgcggagaggccggtggaagaagcaacgagaatgaagcaccccagttctctgctgagcacatgggcatctgcaataaagatttaatttcccagcttctcctgaagctcggtatggccacaacactaaattctgcccgaggagattaagcaaaatagtatgggacttccaagaaatgtttttaaagtcagaggcaggcctttcttcatgccttcttcctctttgctggctggaatgcaaagaccatggcaggaggccaagcagccatcctggaaggtgaaagcctcatactaaggacgtcagacagcgaaataagagcctgggtccttgaccctgtagacatctccctccccatcctggtctgtctgccttgactcctttcatatgagagaaataaacttttaacttgcgtaaaccaaaaaaaaaaaaaaaaaa

SEQ ID NO: 234536 - DNA, 624 bp, Homo Sapiens
agtagcagggattacaggcatgcacccacatgccaatttttattgcttaaaatggcgagttctatggatattatctagccccaagcccatatctgtacacttttgttcattttataataccagaaagaatgttctatcagtaaaagaaggttttaagtatgaatctccatttttgtggagtttttctaccctgtaaaaattaactttgtggttcccagtaattacagtaaggagtttttctatattttcacagttggatttatctaaggatatttctcagcatattaaggaatccttttctacatttgagcaaatactgaggttcatgttgtaccaaataataataaattgcttttgtgtttaatatgtaacacgtaagaacaattgaaattttcttctaagatttaatactagtcttttagtataaaggaatgtaactggagaaaaaaattaatgctacagccatttatcctgtgttatgtgttatataatctgaaatttgtcacaatgttacaatcaggaagttttttttctggtttcttcttccaaaggaaaataatagcctacttgtattttgaagtaactgaaataaactctctccaagccaaaaaaaaaaaaaaaaaa

SEQ ID NO: 234537 - DNA, 632 bp, Homo Sapiens
  misc_feature (594)..(594): n is a, c, g, or t
accttcaataccagcaagatcactgggttcctgaagccaggaaaggtaaaagtggaactgaaagaatccaaagttggactattcaatgcagagctgttggaagcgctcctcaactattacatccttaacaccttctaccccaagttcaatgataagttggccgaaggcttcccccttcctctgctgaagcgtgttcagctctacgaccttgggctgcagatccataaggacttcctgttcttgggtgccaatgtccaatacatgagagtttgaggacaagaaagatgaagcttggaggtcacagctggatctgcttgttgcatttccagctgtgcagcacgtctcagagattcttgaagaatgaagacatttctgctctcagctccgggggtgaggtgtgcctggcctctgcctccaccctcctcctcttcaccaggtgcatgcatgccctctctgagtctggactttgcttcccctccaggagggaccaccctccctgactggcctgggatatctttacaagcaggcactgtatttttttattcgccatctgatccccatgcctagcagagtgctggcacttagtaggtcctncaataaatatttattaaatgataaaaaaaaaaaaaaaa

SEQ ID NO: 234538 - DNA, 634 bp, Homo Sapiens
  misc_feature (47)..(47): n is a, c, g, or t
tcgtcaaatggcagagtttgattgtttaacctagactaatcagtctntggagggcctgccacatgtcttccagacggctagaatgctcaggagataagagtggggcctatcgctctgtgctttctccccctgcattagccgcagagctgagtgagtctatgaaaacccattggtcgggctgccctagcaacacagaatgctgtgctgacacatactccatcacatgtttgcgatgaaaatgctgtatttttagaacacttcaaagtcaggaaaccgttaaaccacactgcatcctctcttgccctctggccacttcctccacacccccaggaacattgcccccatttcacagaaaaggagcctgagacaaagattaagtgatattttaagcaaagctgataatcccagggaaaattgctgatcaagtcttgaaatccaacacatccttcggagtaatttttaatgctttcgcttcttttacctaagccatgtgtgttccatatgaccttaaatctaagccctaatattgtaaatggagttcagaagacaacttagtctcccattttctttcctggcattcattcaaataaaaataggcacgtaatactgtactgttaaaaaaaaaaaaaaaaaa

SEQ ID NO: 234539 - DNA, 656 bp, Homo Sapiens
aggtaatgaatacatacatttttctgtgataaaactcttaaaagttaattttaatgtattaatagtattcctaatgtgtgctgcagaaatggctatgagcctcttaaatttacatttgcaacttaaaggtagttttagaaggaagtacaaattggctttcatcttgcaaacaatcgttttttacttcattatcttaatttgctttgtcactcataaaaaggaaaccatacctgagttgtagacaatgaggaaacacttgaggcttctgctgtgtgttcttttgttattgttgttattgttgttactcagtaacttgaatattgtttaatgtgttgtaagacgtagagtttatctcaagctgttaaaaatggtaatgtacaaatgtgaatagacacttatctatataatatgggtaagttttgtttcgcctataatagatgtttataaaaacaagtgaggggacagttggtctttttatcttttctttctttttctttcttttctttttttcttttttttttttttttttttttttgcttccacaggttgcactattgaaaaatcgagattgtataaacctggtaaaaagctgcaagatgccaaaatcttgtagatgtcaaataaaaagttattatactaaaaaaaaaaaaaaaaaa

SEQ ID NO: 234540 - DNA, 592 bp, Homo Sapiens
  misc_feature (573)..(573): n is a, c, g, or t
gggttcagggagtcctcctgcttcagcctcccaagtggctgggaccacaggcgtgcaacaccacacccagctacccactcattttttggttgaatgaacagcttaaattcttgttctgacccaagagcctttgcactgcctcttcctcctgcctgcttatccccagttatccacctgttccctccctcatttccttcaattttatttttttctgcaatggggcctttcctgactaccacttaaaattgcttgcttgggtacaatggctcacgcctgtgatcccagcactttgggaggttgaggtgggtggatcacctgaggtcaggagttcgagaccagcctgaccaacatggggaagccccgtctccactaggaatgcaaaattggcagggcgtggtgcacatgcctgtggtcccagctactcgggaggctgaggcgggagaatcacttgaacccgggaggtggaggttgcagtgagccggtatcgcgccattgcactccatcctgggcaacaagagcaaaactctatctcaaaaataaataaataaatagaaataaaataaaattgcaatntaaaaaaaaaaaaaaaaaa

SEQ ID NO: 234541 - DNA, 613 bp, Homo Sapiens
gaaaagcaaggcaaggacccactgcacagcaagttcccccttggaagcccacgggcgcagctgcccacaaatgcacataatctctgcagaaatacaaaagccctaatgctggctgcactggggacacaggtaggaggaaattttcccctgtaagcagttttgaattctgaactatgtggacagaacaccaaattttaaaacaaatgaaagtgaagctggctgggcacagtggctctcgcctgtaatcccaccactttgggaggccaaggctgcagtgagctctgatggcgccactggtacactccagcctaggtgacagagcaagaccctgtctccaaaagtgaagtggcaacagacagaaacgagcacttctgcagctatctcacaaaactagtttggcaccaaaactagttaaagtgacctggtgtccgcctcactgagctgctccagcagaggcacaggcattctgcatactggcgctgctgtgcactgacagccataagccaagtcagcctttccccaggagtgccatggctaggaagatgcatctccctcgcctccagtataattttaaaagttatggttgtaaaatgacaaaaaaaaaaaaaaaaaa

SEQ ID NO: 234542 - DNA, 370 bp, Homo Sapiens
  misc_feature (292)..(292): n is a, c, g, or t
ttggaatggactagaaaacattgtggagtgtgggagctatgcttgcattatttgcttaaatccatgtgcttggatgttgtgctttcagtctattcaacaatatttaatcaattattaaattttcttagagacatacacttaaatgaagcattttaattgagtattttttaaaaactccgggctgtgtgtagtggctcaggcctataatcccggcactttaggaggccgaggcagaaggattacttgaggagtttgacaccagcctgggcaaatggcaagaccccacctatanaaaattaaaaattagccaagcatggtgatgcatgcctgtagtcccacccagctactcaggggcctaaggtatgaaaag

SEQ ID NO: 234543 - DNA, 730 bp, Homo Sapiens
  misc_feature (42)..(42): n is a, c, g, or t
tggaccaagtctgcctcacagtgtatgaagtacctaggctcntggagctctgcggtgctagggccctgacctgggtgtcatgaccgctgacaccactcagagctggaaccaagatctagatagtccgtagatagcacttaggacaagaatgtgcattgatggggtggtgatgaggtgccaggcactgggtagagcacctggtccacgtggattgtctcagggaagccttgaaaaccacggaggtggatgccaggaaagggcccatgtggcagaaggcaaagtacaggccaagaattgggggtgggggagatggcttccccactatgggatgacgaggcgagagggaagcccttgctgcctgccattcccagaccccagccctttgtgctcaccctggttccactggtctcaaaagtcacctgcctacaaatgtacaaaaggcgaaggttctgatggctgccttgctccttgctcccccaccccctgtgaggacttctctaggaagtccttcctgactacctgtgcccagagtgcccctacatgagactgtatgccctgctatcagatgccagatctatgtgtctgtctgtgtgtccatcccgccgaccccccagactaacctccaggcatggactgaatctggttctcctcttgtacacccctcaaccctatgcagcctggagtgggcatcaataaaatgaactgtcgactgaaaaaaaaaaaaaaaaaa

SEQ ID NO: 234544 - DNA, 358 bp, Homo Sapiens
  misc_feature (31)..(31): n is a, c, g, or t
  misc_feature (95)..(95): n is a, c, g, or t
  misc_feature (290)..(290): n is a, c, g, or t
attgattgaattaataatttgtttaataggnttatttataaaacactttaagcctcttttaatcatggctcccactccagcacaacttgtggacnagaaagggaaaaatgactgaggtttactctcttaccactctgtatgtgtgtgagagaataagagtccacagaaattgctcttttgtactccacgaatatgaggaagtatgagtagaggggaactggtacagaacagaagttattttgggtaagatcaagggcaggatgtaagaaaactagttttcagttacaagngaataaccattgggaatagagctgtgcttcagtgaagtactcaaatggtttaatccagggtaaacctc

SEQ ID NO: 234545 - DNA, 624 bp, Homo Sapiens
ggggccacgacttgcccacatatgtggtcacagagcacagaatacctgggcgggtgtgttggggggtggaaggagtgcctggccctggggaggaccctcttggtggaggggagtgggggactgggaccagccagggaggcagcagaggctggaacccagtttaggcccccaactgggtttggcctggggagggagggtccggctccccagcccttccttagggccaggctttcccgcgggcacgggggtggggggtggtcacccgagcaggcctgtgagaggcctctcctgctagaattgggcatggccgaggggcaggggctggagctgcgagtccaccactcccttgccggccccagggtaagagccacctcctaggccgcagtggcccaaggtcccagctgctcgcctgaggccgccgggggtgcggtccaggcctcccgtctccgggggatctgtagggttcccgcactgcgatagggcggcccgtcccctcctcttggcgcaggacgccccggaacccaaaccaacatttccagctctcaggtgtacagaaatgcggtttactttgtaggccacgttggttcaataaatgatgcagcggacacaaaaaaaaaaaaaaaa

SEQ ID NO: 234546 - DNA, 667 bp, Homo Sapiens
atcctcgaagagaaggtggtgatcaaagggtaagtcagtgataaatcttttgtttgctgcatatactggagatgtgtctgcacttcgaagatttgctttgtcagctatggacatggaacagcgggactatgattctagaacagcactccatgtagctgctgcagagggtcatgttgaagttgttaaatttttgctggaagcctgcaaagtaaaccctttccccaaggacaggtggaataacactcccatggatgaagcactgcactttggacaccatgatgtatttaaaattctccaagaataccaagtccagtacacacctcaaggagattctgacaacgggaaggaaaatcaaaccgtccataagaatcttgatggattgttgtaatggtctcaaatcccaagatttaaatcacttacctatttaattgtggaaaatgattatgaagaacatgtgtatttctatctggtagtgatgtatattttacatttgtcatttcagtgttactggagttttcttcattgtgcacacaggacaaatctgatctctttgggaaaaaatagaaataaaacaatctccctccataatgtgagcaatattacctcgtgcattgtataatttgatgtaaaagaaatagttaccaatgctaaaaaaaaaaaaaaaaaa

SEQ ID NO: 234547 - DNA, 670 bp, Homo Sapiens
  misc_feature (52)..(52): n is a, c, g, or t
actgtgcgctggacttggagccccttggagtatggcttttcacacgggcttnttaccgcttcgactggaagatccacctccccactgccttttctcactcagatggggacaccgaggtccagaggaaaagacacctgtcaaatgtcacagatctgggaggggacttaagacttatcatgccaagaggacacctgtctactcagtttttttttggtggggcggggggcggtgatagggtctcgctctgtcaccaggctggagtacagtgatgactgctcactgcagcctccacctcctgggctcaaagtgatcctccaacgtcagcctctcgagtagctaggactacaggcacatgccaccaccaagcccagctatttttaaaatttttgtgtggagacaaggtctcactatgtggcccaggctggtctcgaactcctgggctcaagtgatcctcctgcctcggcctccaggagtgggagttggagttgatgcctggatacaggagctctgtgggtgggagtgagacaaaacacagggtcctgagctctggggaccaagcaatgtcctctggtgaaaaaaatcctggacttgctggcagaagatttgcctcttactcgccatgtgctctgaatacatttacctgccctctgggaaaaaaaaaaaaaaaaaa

SEQ ID NO: 234548 - DNA, 1000 bp, Homo Sapiens
  misc_feature (104)..(104): n is a, c, g, or t
  misc_feature (109)..(109): n is a, c, g, or t
  misc_feature (280)..(280): n is a, c, g, or t
ctatataacgtggatgagggggttgtggggaggggcataatatgggggaaggagggcagcgtgaggagggtcttaaacaattgtcgtgggagagcgcggcagtnatttngtattggaggtggtggtgggtagagaataaagattacggggggcgcagtctctttttctcggatgctcttttatatttttgacatgcgatgaagcgtgtgtgcgcttatgagaagactagaagggtatttgtcgcgggttcggcgtaagatcgtcgcgggcggtgagaaanccgcgcgcgaggtgggtgatgaaaaaatattctgactttgtggtgggggggagctccgcccgcgcacgccacgaagaatgggagaggaaatatcagtctgttggggaacacgcgacacagtgtgagggagaggtgccacctagggggtagtgtgagggcgatagtatcggggaggcgaggttattattttggagggcgggaacagtgttggttttttaacgcgccccataacagggtgtggttagaaaggataaaagggtgagataagagggtttagtgtggcgcgattcggagttgacccctgaggcaagacaaatggtggggaaggaaaatcttttgcattcaaaggggaggaaccttcaaacgggtgaaaagttctaatttctgtcgtggtggctaaaatggttgtacagggagttatccattaggaaggggattagaaatttgggggaggagaattttgcattgagaaaattattggtaaagtttctatgtgctttttaggcatcgtaaatgatgtgtgcatcaaaacaaacaaaacccttaaattttatttatttatttgagacagagtctcactctgttgtctaggttggagtgcagtggtgcgatctgggctcactgcaacctccacctccctggttgaagcaattctcctgcctcagcctcctgagtggctgggattacaggcacgcaccaccacacccagctaatttttgt

SEQ ID NO: 234549 - DNA, 753 bp, Homo Sapiens
  misc_feature (3)..(18): n is a, c, g, or t
  misc_feature (21)..(23): n is a, c, g, or t
ttnnnnnnnnnnnnnnnnttnnntttcacaagacttaggaacaggtttatttagctctgttctaaagcaggaggaagtagctgtggccttatcccttggacccttgttcagcttgcttgatataagaaagattggccctatgactattcccattaattctagatatgatgcaggtattcatgctagcaggtatatatgtatgatatatgcatggtggggggcaatgattgtaaagctggaagttggatcaaggtagtttaagtacaacttctcctcctcaggaatgtagataatctccttctccttctccttcttctttttgaggtggagtcttgctctgtttcccactctggagtgcagtggcgtgatcttggctcactgcaacctccacctcccagttaaagcgattctcctgacccagcctcccaagtagctgggattacagtcatgcaccaccatgctcagctaattttttgtatttttagtagaggcagggtttcaccatgttggccaggctggtctcgaactcctgactcaagtgactcgcccacctcggcctcccaaagtgctggattacaggcatgagccaccatgcccaggcaggaatgtagacaattttaggtttgtggattggctgcagtgattctgttcaggttgtgaatcttgttcaggtctgctccatgtaacttctcattctgggactcaggccgaagtgacaagggcatgtctcctcgtccgaattcgccacccagg

SEQ ID NO: 234550 - DNA, 1000 bp, Homo Sapiens
  misc_feature (59)..(59): n is a, c, g, or t
  misc_feature (143)..(143): n is a, c, g, or t
  misc_feature (236)..(236): n is a, c, g, or t
  misc_feature (988)..(988): n is a, c, g, or t
ggttttggaggaaaacccttattgcctgggggaatgtaatttacccccttccacatttnttacaaatggttgtaggagatttttttttccccaagaaaatttcattttgaaaacatatttacaaactgaactcaaacagaganctgtgaaattgaaacaggcactgctcatttgtttgagtttttgggtaaacattttgctggtttttttttttttgtttgtttctttcttgtttngcatcaacttttatcagtccatgcaacttcaatgccctcgatgaaggatgcataaaaagccatacttcttaaaaaaaaaaaaaagaaaaaaaaagacttccttctgcataaagagatatatttgccacatcagtccctgtagcacagttttcaaaaccattctgtcaaaaatacagtaatacaagactggctttagtgtcactagcttacactgcttttcatgtatttaggccacctgttgttcctggtactgtatcatgcaataagtcatcaagggcttagtctagtgtaccggtaagctagtggcactgaagcgcttttcacaatctcaacatacatttgaattgcaacacacagatatttctagagtattaactagtgaacccttttattattaaaaaaaaaaaaaaaactacttacaaccattgaagaaaaaattgcaacaaaaaatgtaaaaattgaccgtctccaacttgtcccctttactattaacaatgtgaccaacagatctgtggcacggacacagtacaaagagttgtcatggcaatgagtttggctgatgcaaaggtcattgtgcagggtcaaagggcaaaatcagtggtccatgttaccccccaactgcagggctccactccacccacacaattttagggaattagaaaaaacaggggaactaccagaaagtgcaaaatatgaagaaggcagctttcagctccttcagcatggagtagaacattcatttttgatcccgnggaattccggac

SEQ ID NO: 234551 - DNA, 1000 bp, Homo Sapiens
tggggtgtgatagaggcgttttaatttgtagggggggggggttgatacataggtaatgggcgagtggggtgcaacaggtgccctcaaagtgaaggggagggggctctgtgaatgtcccttataaagtgccctcgaatgtagtcagagggcgcgcgctgtggggtggccacatgggtacccaggggccttaggttttgtgggagaaacgggatgggattttccaagggttggggggggcttgcacagttttaaaacccccagaggcaggtcccccaaagccaagatggggaagaaagtttggttaccccttcagggcaaaaaggccccagaaaaagggggaccctggaggagagggcctgggttctgggacactggggccacaagatgggccggaggggggaccccctggctggtttttgcagcggggttgggacgcccagccccaagggaggaggcagcttagggggggcctggggaggggctttgtttagggtagccctgggggcccccagttgttgggcagagtcactggggaggggtcagacccaccttggtgaggtcccttcccccaagcccagttcagtccctttcctgaggggagaggatgcggcagggaagccccaaggtgccttcatcagggaacgcccacgcatcactttccacatgacaaaaccaagagaacccccaacatcaaaaaaacaaaagaccccgccgcctgtccccgttctgtctgtgtgcagtggcttccggggggggggggggacgggggggctcaggtttacacggggtctttttaatacaacgtttaatcatctggttgatcaagaaatgcaatgctcagtctaggaacagcagcagaaatagcgagagacacgggacttttatacaaaaaaatttgttgcttacaaaacatatgcaaaaaaagcttaaaaaaaccagagaccaaaggcagcatccttgctaattttcatctacattaagaaaaaaaaaatcttgtaac

SEQ ID NO: 234552 - DNA, 872 bp, Homo Sapiens
  misc_feature (21)..(22): n is a, c, g, or t
  misc_feature (25)..(31): n is a, c, g, or t
cgccctttttttttttttttnnttnnnnnnnaacttttatttgcttttttgtttttggctttttgagacagggtcttgctctgttgccccagctagagtgcaatgacacaatcatagttcactgcagcctcaaactcttgggctcaagggattctcccatctcagcctcccaggtagctgggactacaggcacaagccaccacacccagcttgcagttatttttaaatgctgagatttatgatgcgggaggaggggagggctgccctggaaagccagaagaccatcaattcacacctggatttccagctttcccttcctcgtcgtctcctctcaaaacacttgcgcgcgctctctggtgtcaagggctgagggcatcaggacacccattcctgcccaggcctcaccccccctcgccaggctagccccttccgagacacagggctgagagcaaggccaaggcctcgggtttcgaccagatggcggcttcctaccttactcctgaagaggggcttggctccaggcccacagtactcgttgtagatgagcttgaagaggaagaggtggaagagggtgattagggaggccacgctgaaccagaagaggaagggcagcccggggtcctgctgggccatgtgctcatcatgggccaggatggccttgaggtgcagcgtgtgccgcaggtcctgcaggtgtgtgaggtcggtggagatgtagagcagtggcgtgatgggctgtgtcaccatgaccgagaaggtgtggcccgtgggcgccgaggtcagctccactggctcgtccaggcagcctgccttgcaggcatagatcttgacaggctggccacgggactccacggacatcccaggaattccggacc

SEQ ID NO: 234553 - DNA, 524 bp, Homo Sapiens
  misc_feature (511)..(511): n is a, c, g, or t
aatagtaggctatttactagtaggtaggttttggggagtcaaaagttacacgtggatttttgactgcgcaggggatcagcacacctaacccctgcattgttcgagtcaactgtattataaaagtagccttaataactttatcgtttatgcggcatacatgtttccacttgtcattactatatagtatgaaacgctgttgagtctattttgaatcctaaatatgtctataatactcagtaagatacggaagtcagattacatatacactgaacaaaaatcaccatgtagaatactgtacatgtaagtctgtagcttgaagtatagaaccagagccattaatgtgcagggtttattgttctttcagtgcaaggcagttcttattttaattctttaagtccgtgcataaattgtaagtgatttcccttcataaatattgggagacccatttttaatgttgctttccagataagacttgaaccctgatctgtccacaatttattatttcttccanaaaaatctcgtgc

SEQ ID NO: 234554 - DNA, 556 bp, Homo Sapiens
atttaatactatgggtcatgttttgggaaaatcagcataggatatattattaagaattcagatttaatcattacgtgtgaaaggcacaaattcaatttgaaataacttttattcaatggaagaagcattttctattggcaaaactagaggtttctccctaattttctgtctgtatttttataaataaaatgcattatttggctgaaattttaaaaatatttttttcactagacgttagagcaatcttagattttaaataaattgttaagtatcttgaacatgttatttatgatttaaaatatagctaagatttgctttacattgtggcaaatatttacattttagaaaacaaactttgtatttagtcaacataatttttaaaataactaggttgtggatacacataattttctgcagtaattgacgacagatgaaactacatttataggttcccttttatagttacggtaaaattcattttaaaaactttatgtgtagaaataaattgtgccaagtaatatacatgtaacatttacatttttaagagctctcgtgc

SEQ ID NO: 234555 - DNA, 242 bp, Homo Sapiens
  misc_feature (122)..(122): n is a, c, g, or t
aatgtagagatgagctctcaccatgttgctcagactggtcttgaactcctagctcaagtgatctgcccacctcagtctcccaaagtgctgggattagagacatgagccattgcacctggccnaaaaaggaataaatatttaaaagatgtttttaaatgtcagccagctgagtgagagtatagaaaagtaacgcactcgccacacactgctggaagctgtagatatggcacacttttgaaaaa

SEQ ID NO: 234556 - DNA, 708 bp, Homo Sapiens
  misc_feature (65)..(65): n is a, c, g, or t
ttagttgtctttggatgtgctccctagaggctgcgcctgacacagggagctgtgtatacatgatntattaaaaggaaatcctcttaggagaaacatattagcaggataaacacaagaaagaatgcagttacaagtggagtctcaatcaatcccagaggaaattctgggacttcagcctcagcttgacctatggggggctctggaatgtcagatttctcctgatcccaactgtgctctggggcttccattgcagccaagagagagcattccctagaaaactccaggtgaggagtctccagtggcccaagggtgatcctccagaggaggttacactgccgaactgggacattggcaccctggatttgaatatctagagagggcacccaatggtcatactaatgtttgccataacagtctcttctaggtctagacttgaagcatatggaagggtccttgggctagagccaacccaagcccaggctgactcccttttaatacttctaattttccctgaagatctggtcttctccctaccaccactaccctattacataagaggaaaggattggagaatgttcttgaaaagaatgtgatgctttcccatacaaggaatatactcaaggaaaaatttcatggcacaaaatgctgattctgtccaatttatcccatgaataaattgtgtacacatataaaaaaaaaaaaaaaaaa

SEQ ID NO: 234557 - DNA, 682 bp, Homo Sapiens
gctaagtctatgtgagcaaacccacttcatcctttgtacctggagacctggttacactaacctgatactgacctgttcatgtagctggaatggtgtgtttcatgcagtgtggaccaagcaatggcatggggtgtgtgtgtgtgtgtgtgtgtgtgtctgtgtgtgtgtgtttgtgtatgcgttcacacttgtgtgtgtatatgtgcatgtagatgctgcataaatgatttttgatgtcaaagacaaacacattccattgttttaaatattctattatgtaaacaatacgcagagggaccatatctactcttgtcatattatttgtgatggtaaaacatgcatttgcaataaattaagctttctgggaaggcaagcagtattggagccaaacgactgtctcggaacatgtgtgtgttatctcggttcatatcaagtccaaagctaatggagccttccccgccatccagggaggaacaccaggaccccggagtttcttcttagtgctatattttaaagttgcattgacgttttcctccccttccttttgtgcaagttggaagtagcagtgttctaaaagatggtttgacgtttttgctgttgtttcatgtttttaaaaatgtatctgctttgtgtttggaaataaaaatctctattttggtctatgaaaaaaaaaaaaaaaaaa

SEQ ID NO: 234558 - DNA, 674 bp, Homo Sapiens
aactcctcgcagaagtgggagaggccgccagcctgcaccgagaggggctttcctctctcttgctccccgcttcgttctgttttggctgcagagagtggttcatccatactctcattccctcgcctccccttgtggacgggggtcttgccttttcaattcctgtgttttggtgtcttcccttatctgctaccctgaatcacctgtcctggtcttgctgtgtgatgggaacatgcttgtaaactgcgtaacaaatctactttgtgtatgtgtctgtttatgggggtggtttattatttttgctggtccctagaccactttgtatgaccgtttgcagtctgagcaggccaggggctgacagctaatgtcaggaccctcagcggtggagcctgctggggggacccagctgctcttggacaagtggctgagctcctatctggcctcctcttttttttttttttcaagtaatttgtgtgtatttctaactgattgtattgaaaaaattcctagtatttcagtaaaaatgcctgttgtgagatgaacctcctgtaacttctatctgttcttttttgaggctcagggagaaactagcatttttttttttccaaactactttttgtcactgtgacagttgtaaataaagtttgaaaatgctttccaaaaaaaaaaaaaaaaaa

SEQ ID NO: 234559 - DNA, 633 bp, Homo Sapiens
cggtatgctgacatctgccctgaaccttcaccctacagcattacaggctttaatcagattctgctggaaagacacaggctgatccacgtgacctcttctgccttcactgggctggggtgatccttggtgcctttgtttccacaaggccttttcctgccccctgccttgccaaagacatttaatcagcacacagctgccagactattcccacagtgctccaaatgcacatgaacaacagtgacggctccagccttcgacccagagccccgtgcccagtgcgtcagtgggcctggggttccaggctacatcaagcactgatggtgtcagggctggtagttaccaaatcagggttaagaaacatcagggccacatttcactaccttcacagatcaaactcagcagcagtcatgactgtctgtcactacactggggatcccaattccacataagcacttttggaagaaaacagccaaagttggcctaaaattggcgctggaatttgggctgggaaaaatcttgtggttatttcctttaaaaaggaacaaaactttagtatttaattagttgatttatttaatgtaatttcaaacaattaaattatgaataatgcaatgtaaaaaaaaaaaaaaaaaa

SEQ ID NO: 234560 - DNA, 657 bp, Homo Sapiens
  misc_feature (31)..(31): n is a, c, g, or t
  misc_feature (50)..(50): n is a, c, g, or t
aggagagctcccttatagtcctttgtcaggngacagaatacctggtcacnactgggcttcagattgagagttgattcatgttctgagtccatatgatgagacacattacgatggaattgtcacttttgttgcctctggaactttaaaatacccgtttagtgacgtggaattaatctttattttttccgtcaccctcagccctcatttaagctatcagttggtaaccacttgggtaatctaaacctaagttgcatttatttggtcacattggtaaccaacattgcttcttaaaagttccttgcaacagaatgactataattgagataaaacattaattttgaggctttaattttgtaatatggattagtggccgggcgcagtggctcatgcctgtaatcccagcactttgggaggccgaggcgggtggatcacgaggtcaggagttcgagaccagccatggtgaaaccccgtctctactaaaaatacaaaaattagtcgggcatggtggcgggcccctgtaatcccagctacttgggaggctgaggcaggagaattgcttgaacctgggaggcagaggttgcagtgagccgagatcgcgccattgcactccagcctgggcaacgagcaaaactccatctcaaaaaaaaaaaaaaaaaa

SEQ ID NO: 234561 - DNA, 710 bp, Homo Sapiens
  misc_feature (23)..(23): n is a, c, g, or t
ccccagagaaaaccatgtactantggagtgggtacccccattcacagtgtcccaggtcccctggctttggctgatttcaaaatatagagccctttcttgccagtacatccaagtttaaaattatcagcgaaatggtccatgtttttccaattacctgctgacacggttctaagctaagtgaaggggaagatctgagagcgtgctgtttgtggctgttgatgcatattcgtgatgtaacaggtcctggggcctcactttaccccatttgtaaaatggggctaatgtcacctgcctcttacctacctcagagggatttggtgaagcaaactgttaatcttcgaaaacgaccatttcacttcttggatatcaagtgctaacccagtatgttcttcttttttatgtaagggacagctttctccacagagtcctttctgctggtgaggacagcatttctgagcagggctttgttctctatgtgcattaggacttttatcatgcccttgttctgtgtgtagttacttgacagcatcaaatgccgcctcttcctaatgtccttcaagttttcatgaactagcaaccccaccttccaccatggttctgggcgcctgattttgctgtgactcccagacccagccactgtttctgccaccctgtaacaggccattaaagctccccagtgttcagcctccttcaaaaaaaaaaaaaaaaaa

SEQ ID NO: 234562 - DNA, 726 bp, Homo Sapiens
  misc_feature (22)..(22): n is a, c, g, or t
gaaaatcgcctgaactccttanttcaggtggatgcccctgaccaaaaaggaactgagataaaaccaggacaaaataatcctgtccctgtatcagagactaatgaaagttctatagtggaacgtaccccattcagttctagcagctcaagcaaacacagttcacctagtgggactgttgctgccagagtgactccttttaattacaacccaagccctaggaaaagcagcgcagatagcacttcagctcggccatctcagatcccaactccagtgaataacaacacaaagaagcgagattccaaaactgacagcacagaatccagtggaacccaaagtcctaagcgccattctgggtcttaccttgtgacatctgtttaaaagagaggaagaatgaaactaagaaaattctatgttaattacaactgctatatagacattttgtttcaaatgaaactttaaaagactgaaaaattttgtaaataggtttgattcttgttagagggtttttgttctggaagccatatttgatagtatactttgtcttcactggtcttattttgggaggcactcttgatggttaggaaaaaaatagtaaagccaagtatgtttgtacagtatgttttacatgtatttaaagtagcatcccatcccaacttcctttaattattgcttgtcttaaaataatgaacactacagatagaaaatatgaaaaaaaaaaaaaaaaaa

SEQ ID NO: 234563 - DNA, 635 bp, Homo Sapiens
  misc_feature (75)..(75): n is a, c, g, or t
ggtgggccagacctctggcctgttcctcagccctactcatggggacattcagggacctccaggaagtgggcgggngagcatccacccctgctagccggcagctgtggccctgatcaaatcaggggctggggagggaaagtgggtccattgaggtggccctgctccatcagccccctacgggacttgtgttcattacagtgagggggtgctcccactgtctcccggcctccctaatgctccctctgctgcagggagaagggttccaagatcacaaaatgtcaacaatgctggcctcctggaccagaccccgaggctctaacaatgcactctgagatccctacccttgccgttggtctctgtcgctgactcgaggcacctaacatccattcacacccaacacaggccagcgacttttggggctcagccacagacatggtttgtcactgttgagcttctgttcctagagaatcctagaggcttgattggcccaggctgctgtgtgtgctggaggcaaagaatccctacctcctaggggtgaaaggaaatgaaaatggaaagttcttgtagcgcaaggcctgacatgggtagctgctcaataaatgctagtgtgttatttcaaaaaaaaaaaaaaaaaa

SEQ ID NO: 234564 - DNA, 698 bp, Homo Sapiens
taattccagcgggaagatacatgtttttatgaatgaaaaaagctgctgagtttttggtttaggaacatcaatttgttcaaattgaccactgtctaaggagcctagtaatcggcgtgccttagtgtgtttatgtggtaatgtgttacatttagcaattataacattgttttattaataagactataagaagagtgtacttttagtaagggagaagtcttggagggttgcttctgcaggacggggagggaatttgaggggaggctgaggtgccgtcaggactttttttttttttttttgagatggagttttgctcttgttgcccaggctggagtgcaatagcgcgatcttggctcaccgcaacctccgcctcccaggttcaagcgattctcctgcctcagactcctaagtagctgggattacaggcacctgccaccacgcctggctatttttttgtatttttagtagagatggggtttcatcatgttggccaggctggtctcgagctcctgacctcaggtgatctgcccgcctcggcctccaaaagtgctggaattacaggcgtgagccaccatgcctggccatcagaacttgtaatcaagacagtatgttgagaaattctaacattataaattacaaagctttgactattaaagtttttgtgatctaatgatacagttttgaaaaaaaaaaaaaaaaaa

SEQ ID NO: 234565 - DNA, 734 bp, Homo Sapiens
cgcaagcctcctgcagcgcccgcctgccaatgtgaggatggcaccagctgcagccctccccaatcccagcccactgtgctgtgtctctggcgggctgtcctccttggtgggagctgtcctgcacactgtaggatgcttaaaggtatccctggcctccacccatccctagccagcagctcccagtcagacaacagccagaaatgtctccagactctgcccagcctccccaggtagccaccctcgagacatgacctcagagtctctgtgtctcctagaagcctgacagagacccccagggcagtgggtgggtggcgggctagagacccttgcctgtgtccgggaccctggcgccgctctcccctcctgtggatccctccgcactaacagtgttctcagtgggcagacgcctgggcaccccttgggccctgcccagcatggccatggcgcaggctctcgaacccgcatggctttcccaggcctggtgattctgctctccagggacggttggcaccttcctcgggggcgggccccacgcaccccagaacacacagacccacctttctggcgttctttctacctcccttttcgttgcctgaggagctggtggtttcatgagttaatgatacatcttgcaaggtgtacacatagagaaaaaaacctaaaaatgtggaaaagcacgccaaagccttatttaaataataactattaaactattcaaaaaaaaaaaaaaaaaa

SEQ ID NO: 234566 - DNA, 552 bp, Homo Sapiens
ctaatttttgtattttttgtagagacggggtctcactgcattgcccaggctggtcttgaactcctgggctcaagtgatctacccgccttggcctctcaaagcactgggattataggcgtgagccactgtgtccggtccctgtaggtttttttttttttttttggacggagtcttgttcttttgcccactgcattccaggttgggcaacagagcaagactctgtctcaaaaaaaaaagaagaaagaaagaaattgatccctcataataggctgtatagcagattctactgcaaaggctatggttgcacaacagacttctttgaatttgcttgctaaacttttactggataatactgggattacaggtgtgagccactgtgcccagcctctcctgtttaactgtattcattctaatgtttacttacttctttaatttgtaaaattgggtcacttagagttttttagcctatcttgccatttagccactgttactgataatttggatggaaaagaaaaataaattatatcacctctcaaaaaaaaaaaaaaaaaa

SEQ ID NO: 234567 - DNA, 634 bp, Homo Sapiens
ggaaataagctgccttgagccttaaaacccacaaaagtacaatttaccagcctccgtatttcagactgaatgggggtggggggggcgccttgggtacttattccagatgccttctccagacaaaccagaagcaacagaagggatcgtctctccctccctttgaaatgaatataccccttagtgtttgggtatgttcatttcaaggggagagagagaggtttttttctgttctgtctcatatgattgtgcacatacttgagactgttttgaatttgggggatggctaaaaccatcatagtacaggtaaggtgagggaatagtaagtggtgagaactactcagggaatgaaggtgtcagaataataagaggtgctactgactttctcagcctctgaatatgaacggtgagcattgtggctgtcagcaggaagcaacgaagggaaatgtctttccttttgctcttaagttgtggagagtgcaacagtagcataggaccctaccctctgggccaagtcaaagacattctgacatcttagtatttgcatattcttatgtatgtgaaagttacaaattgcttgaaagaaaatatgcatctaataaaaaacaccttctaaaataaaaaaaaaaaaaaaaaa

SEQ ID NO: 234568 - DNA, 624 bp, Homo Sapiens
ggcacgaggcgattcataattatgtatgatccaaagtgtgcataatttcatttaacgttaaagaaatagatccaattcctttcttgcaaccaaaaataaataaaatacgttgcctcaatataaggtttgggctattctgtgtttctatagaagcaatctgtttttggtaaaatgtacttttaaggatccagtcatctgaagtattttatgtagagttagagatttcacaatattgactatacatatatttaaaatataaattatccagctgatgtttgaatttgtcttactttcctggccacctcgttgtcctattttataagctggggagttaactagcttaacaaaagatgcttagcttttgtaaaagaacaagtgtttcattttacaaagacactccaaatgatagttacttgattttctcgagacctttaactatggtgatgaataacaggacttgctttcaagccttaataaatgtaaaatgccttttaatgaagatacagctgagtgttttcctcatgaatctgaaccaattaccaatttgtgttccagtcttgattggtattgactgattcaaataaagttggtttattttcaaatattacaaaaaaaaaaaaaaaa

SEQ ID NO: 234569 - DNA, 505 bp, Homo Sapiens
ggcacgagggggatggggttcaggatgaaagggaggtgggattctaattcatgtgccagtgacaatcctgcatgcatatagaaatttttatttattgaatgtacacaagtaatgatggagtttgattatatggttcattttcatttatcctatgcagatcacaaagagtaaactgaaaggaacaaacgctaagtaaaataagggccagaaatctgtaaatttggtattagattaagaaaaaaagaattgccagttttttcctggactctttccttgcagaagcgattttcaggacaactcaagccaattaaaaaaaagaaaatcactttccctatctgtttggatgaagttaactagctagtcactaagtgaattttgaaacctcttacctaaatgatagctgctcttggtgtttctttatgctctacgtttggtcatgtaacatgcataatctctgttctctgaagttgattaaagttctaaacttaaaaaaaaaaaaaaaaaa

SEQ ID NO: 234570 - DNA, 702 bp, Homo Sapiens
cgaggagcccaccagcctgcctggctgatggacagcaggctctgccttctggaggcggcttatatcccaacagcctgaggcagggctctgtggcccaggccagcagtggctgcctcttttggttctgcatggtacattttgccaaccctgaggaccagttcttggggttccaggcctcggccttcctgctccacgtgctcaagcccccacatggggctgcgacaccatctggctcctcacagggaggtccagccatgttctctgggctcccagtgagccccctgccctccagctacccccagaatccatccttcattcctccaccaagctcctgtgtgagctgcagcacccacacgggggaagccctgcactccagcagcatcttccagccttggcacagaactgatggcaaaggaagggctgggttttcagcttctgggacccgaggaagaccccacctcactcctccttccccagtacatcagactggttaggaggcatcccagaaggggcagcctcatgcccaggtttcagccctaaaggtaatgattgtcttgactctgccttggcatttcgctcggaatcacggcagacttggagtgtttcttcaaggcaggcatctgcttatgagcaaggtcaaagatttttcaaaatattgtgcattaattcattaaagctactgttaaataaaaaaaaaaaaaa

SEQ ID NO: 234571 - DNA, 542 bp, Homo Sapiens
ggcacgagggggagggggaggggtgggcggccgaaagccaactgtttgtactgaatggcaagaatgttctagtaaatgtgtaccaaaatgtgaattactttgtacgattacagtctccacgtcgacctaacccaatattattggtattaatgtgctttttttgtataaagtgcaaacatttcgtcccaaagtctaagtactttagtgcagtaaaatgttgtttcatgtcctgtcaagaattcgtatagtacgagcctggatctgcgtgtcaaactgttccatttgtttatgtaaagtgatattaaaaaagatataaactataactgtccgttacttttggcaaaagatacaaccacataatgtatataattcctagtttccatatttatccgcatgtaaagggccggtttatccatgttacagctcttcaatatttatggctagaagaactcgtatgtacactttagtttccagaactgtttggtaacctttcgtaccttattaaagattcttaaatctccgtgaaaaaaaaaaaaaaaaaa

SEQ ID NO: 234572 - DNA, 686 bp, Homo Sapiens
aggaatctatagaagtccaaattataggttgtattcttccatcttcattgtcttacctctgaaggaatagaacctgaccacattattatgaaacattatggctgtttatgtaatttagggaggactggtctgtaatttctgaatgtatatagaataatatttatgtttacaatgtaacttttcaaaatttacaaatcaggattatatacataagaattccactaagaaatgccaagattcttaaatttgccagcgttaaagtagaaaataacatttcagaagagcacaatatgcataaaacatttttcaaaattgaaatattttcctgggcattaaaaacctttactattggctacaaatttattgtacctgatgaaaacatattttctggacttaaatgttattacaaatatcttaattttcagtaattgttttgcactttcaaagattgtaaatagttcattcaatcaatggtatagagttatttatttgctacataatagatactgtgccaaataattactttttatttattttatttagtacgtaattttgaagtacattttttcctgttttcacaattagactacatttaatgtgtaggaattgtatgtatgtatatcttctgtaaataacatctagtatcttcactaaatataattgtcgacaagaaaaaaaaaaaaaaa

SEQ ID NO: 234573 - DNA, 690 bp, Homo Sapiens
  misc_feature (113)..(113): n is a, c, g, or t
ggcactcactggggccccgcagtccacgcagattgaattccccttggcgttccggatcgcctggatggccacggcctcgctttggctgtctgtgcgcagctgcagagagggtntgggttggcactgactctgcctccaagccccacctccttctcagacacctctgctctcctctcacacgacttcggccgtgtcgttgccaatggccgtcagcaccagggtcagttcctgcggccagtcctccactccacctcaaactcttaccttgaccttgctgctctcacagcattgcagactggctaggatctgactctcgatggcctggacccaggcatcccgctcctcaaaactggctgcctcaaagtgccacgtctgacccgtgctggacacgatcaggaactcaaagttttcctctgagtgggggatgggatggggtcattaagggacagagttcaagcaggggctgcctttcccaagaccgtcctccctgatgtccatcccgagcccctgggagtggggcagtgggggtagggaaagcagagggtggggggcagcaggaagcccgagcacatgcaggggaaggcgggggcacccccacccttctgcaccccagctgagcgcccctcccggctccccacttgttacctgctttataaatatttcttaaactacaaaaaaaaaaaaaaaaaa

SEQ ID NO: 234574 - DNA, 590 bp, Homo Sapiens
agaccccctggcgcaggagcacacagactcggaggaggggccggaggaagagccatcgacgaccctggtcgactgggatccccaaactggcaggctgtgtattccttcgctgtccagcttcgaccaggattcagagggctgcgagccttctgagggggatgggctcggagaggagggtcttctatctagactctatgaggagccggctccagacaggccaccaggagaaaatgaaacctatctcatgcaattcatggaggaatgggggttatatgtgcagatggaaaactgatgccaacacttccttttgccttttgtttcctgtgcaaacaagtgagtcacccctttgatcccagccataaagtacctgggatgaaagaagttttttccagtttgtcagtgtctgtgagaattacttatttcttttctctattctcatagcacgtgtgtgattggttcatgcatgtaggtctcttaacaatgatggtgggcctctggagtccaggggctggccggttgttctatgcagagaaagcagtcaataaatgtttgccagactgggtgcagaatttaaaaaaaaaaaaaaaaaa

SEQ ID NO: 234575 - DNA, 698 bp, Homo Sapiens
  misc_feature (21)..(21): n is a, c, g, or t
gtccttttttttttttttttntgcaaaataaaagcaagtgtattaagaaagtaaagtggtgaaagaacagctactccacagacagagaagggcgttcctgaaactaagagaaggaacgtatccaccctaggtacaatgcttgtacacatggggagaggtgttctgttacaagggtttgtgataattcactttaattattacattttgcaagaatccctattactacctttaaagcaaaattaggaacgcctttgttctccagatatccagctatctggacactcgggtctcttcagtaaacattaatttgttcccttaaccgtaagtatctgaaagctaggaatatccttatgagaatgcaggcccgtaagtcccggcctcatttttctagccctcactcaaaatggggtcgcttcaggttccaacgtctctgacagtcatactacatatgactcagccacgtcaatggaaaaagtagactggatagtgacgtacccgcagaaaacgaatgcaacaatctgtcatacagatctgacggcagtcagattctgcagtgaagtagaggcggtaaacttgaatgcaacgatcttcataccgcatcccacaaagccacgtaaatccaaaagcagtccgactctcgatagtgaaacacatgcggtaaacttgaatggaaagatgtttatactgcctcggataga

SEQ ID NO: 234576 - DNA, 658 bp, Homo Sapiens
ccgcgtttttttttttttttttagtaataaaaagtaaggatggcaaagtgaagctgaaaaaatgacaatttcacatccttccctcctttccagctagttaggaaggagacagaatttcccaagttgattccaagatcacacagtgagtcaacaacataggctgaagaaattgtaggagcaatggacagagacaggacccagcaggaggtaaagaggagacatattttccaagcactgggacaaatggaaataattacttggccacttgctgccccatcattgtatcaccttccttcaatcttttggctgccactctcatgtagggatccacggtgaggaacaaagcttcaagcaggacctctccattttttaagggtgggagctcagatgtcttcaactcaaagtcactattagtaggatagccaacaaagtgcttcttcagggtccatgtcttagtacgaaccatcctgaagctcaggagcccgaaggttccactgcctggggaaggcggctgggactgcgcagccgggcgcccggggtccgacttatgacaggtcccaagagagggtggggccacccccagggcggggctgcttctttagggtgagagcccggccccgaaagggtcacaggaggaaaaccagggtccgggaaatct

SEQ ID NO: 234577 - DNA, 548 bp, Homo Sapiens
  misc_feature (25)..(25): n is a, c, g, or t
  misc_feature (79)..(79): n is a, c, g, or t
  misc_feature (91)..(91): n is a, c, g, or t
  misc_feature (150)..(150): n is a, c, g, or t
aagtgaaagtacaagaaaatgcttntagttcaggcggcaggtctccagtagttcagtcagtaggtagagaaagacagtnttctcatagtancagagtagaaaaactattgatgctatcaagtgcgtcaggtaccatgttctgaattcctntggccacagataaattaataaaggcttaggattctgggaaaccattatataagacccaagtaaagtaacctccctccattctttagaatttgaagccttctggaaaaagccaaagtgtagaacaaactccccagccacctacagaaatctcactaacatcttcaaactggaaatttacctagaccatttctaaggtgtaatgcatttaaggtttcccaaaaataaaatacagagcagggtaggcgtatcactgtcataagttatgtttggaaagtgtaaatgaggatgctgtaacagccttatttggagggttggaaagttgtgtgtggctggcattttggaaattggagagaaactcttctaatttttctaggctatgtaagcccccctacgatagc

SEQ ID NO: 234578 - DNA, 582 bp, Homo Sapiens
  misc_feature (55)..(55): n is a, c, g, or t
catcccccaaagcccccagtgacctctatgctgcagaggtgcactgggtgggccntagagctggcctgcagagcaagcaactggctgcatgcctgggcctccctgcgcagttcctcacatgcatgctgtggtcccagcctgacctctccatctggagggggccgcctcgctgggctgttccaaagctggagtcctggtggcagctgctttgccaagtcgcgcagtagccagggcttgcctgcagcccagaacactcagacagggtcaggccttccagggttcacagcacgtcccatgcccctatgtcctggcatctggggaaaagctgtcactggccagacgtggagtggcttcctgccctaagctggcaggctgtcctgcctcacatgccagagccaagaccggcaaaccccagctgtcagggcagggaagtgggcaagggggcagcaagctgctggtgtctatgccttgactccgagataaatagatgacctaacagtggccaacttttgcctctcacctttctgacggtgaaatggaatcgagccccagacctgaccagggtacagtaaaaggtcttcc

SEQ ID NO: 234579 - DNA, 837 bp, Homo Sapiens
  misc_feature (67)..(67): n is a, c, g, or t
ttctcctaatacccaataaaatacgaaaggggctgtggaagatcagagccccttgttcacgagaagncaagaagcccccctgaccccttgttccaaatatactcttttgtctttctctttattcccacgttcgccctttgttcagtccaatacagggttgtggggcccttaacagtgccatattaattggtatcattatttctgttgtttttgtttttgtttttgtttttgtttttgagacagagtctcactctgtcacccaggctgcagttcactggtgtgatctcagctcactgcaacctctgcctcccaggttcaagcacttctcgtacctcagactcccgaatagctgggattacagacaggcaccaccacacccagctaatttttgtattttttgtagagacggggtttcgccaagttgaccagcccagtttcaaactcctgacctcaggtgatctgcctgccttggcatcccaaagtgctgggattacaagaatgagccaccgtgcctggcctattttattatattgtaatatattttattatattagccaccatgcctgtcctattttcttatgttttaatatattttaatatattacatgtgcagtaattagattatcatgggtgaactttatgagtgagtatcttggtgatgactcctcctgaccagcccaggaccagctttcttgtcaccttgaggtcccctcgccccgtcacaccgttatgcattactctgtgtctactattatgtgtgcataatttataccgtaaatgtttactctttaaatagaaaaaaaaaaaaaaagggcgccgctcgcgacccacgcgtcc

SEQ ID NO: 234580 - DNA, 865 bp, Homo Sapiens
aagccttggcccgggcctccaatttaccttttattattgaccaaagagaagaatgtttgcaatgtccttcaaaactaaaaccacccccttacagttccaattttgggcctgtcttctatctatctttgcccttctggtccgttccctgttctgagccccagggaacttagggctgaaagtcacccccgaagcctcagaccagatcgggaggccacacgcagctcatggggacagagggcccagggtgacggtccactcatgagaggtgctatgtgactccagggagtctgtccctctccgggctccaatccccagcccaagctcagatgacccagcctgtgtccctttagcggccgaggagccaccacctgttcgggggctggaggatggcttcccagaggacctgggacactcacctagctcgttcatggcacggcggtactcctcatcaaaggacagcttcataacagcacaggtggcctggcagatctgcggctcgatggggatcggggctgtgggcacagggaccagatcagagcccccattcccaggaaatgtcccaggtgactcccgaaggtcccccccccccccgcaacccgcccgccccaggtttgaaggatcccgggagctttgcaaatggctgcaaagttgggacttcctttcccagcctctctaagatgggatgatggggtggcctctctcactcagccttgggaagggaggcgaggtagttcctggagcaccacacctttcagctgtgcttctgccctttttaaaaataaaactgacgagacagggtctcgctctgttgtccagaaaaaaaaaaaaaaagggcggccgtcgcgatctaaaaccggacgcgtgg

SEQ ID NO: 234581 - DNA, 855 bp, Homo Sapiens
caaactctggatgaacaataatgaaatggaaatagtgggtccagtgccaataaaatgtgatcataaagtctgaccagttcacaatgtttctttttctaagagtcgaagagaaggaaagtatcatataggaatattctggaaaagaaagtggggtgaatgaaaagaagcagtttaaaagctattcttcttaccatcatactttatttttaatacaaatgccataaaataaaaggtacccaggcatcttttaagcaaaaatacattttctgtacatcaagccatcatttacagattaacactgcaaaaaatttgaatgaataactcttaatttgtttacataaaattatctgaaataaacaaaattatatgtagaatgagaacaaacaagaaccaattcaaactcctaaaatcttgcctctgtattaatttcttcagtttcaaaatcatactcatctacaaaaggaatataggtattcttaacgttgaacattatttacaaaatgaattcgtttctctcagttactgttgattttgtggtcacccaacacataagttgtggtgactccttaagcgaccctgaactgctattctgctccagctgggagtgcctgctctctgccccggaaggaggcattataccaactcatagtatttccctgtttgggggtcaaagtaacagttcagacaagggtcatacaacaaagtcagtacttcctcctttgcattctcagtggcctgtttgttgtggtgcatgatgcccaaggtggggaacacccaggtactggctgggggcactatatcggaatcagcaaagctcacccactgcaccacctgggctgctgcctctggagtctt

SEQ ID NO: 234582 - DNA, 885 bp, Homo Sapiens
  misc_feature (79)..(84): n is a, c, g, or t
  misc_feature (86)..(104): n is a, c, g, or t
  misc_feature (106)..(126): n is a, c, g, or t
  misc_feature (148)..(148): n is a, c, g, or t
ccccaaagaaaagcctggggtacggcgtaaagctttgggccccctccgagggaatactcttagagcggcccgccccttnnnnnnannnnnnnnnnnnnnnnnnngnnnnnnnnnnnnnnnnnnnnntacccccctgaagctgattacntctcattcagaactgctttcatgaaatacaaatagaacaatgtgggctggatgcggtggctcacacctataatcccagcactttgggaggccaaggtgggtagatcgcttgagctcaggagtttgagaccagcctgggcaacacggtgaaaccccatctctccttaaaattttaaaacagaaaaatcaaaaacaaacaaaagcaaatagaacaaggtggacaaaaatctaccattagagtcaccaaggataaaacctcccaggatgccgtggacactttagacgctggctctcaactcttgcagtgatgtcactctcagcccaaggctgtcttcctggcatccatcagatccgcagccctggtttggaagtgtgtggagggctaggaaggatacctaattttcctcagcaaatccctctgccaaggggtacccaggactgaagagaaaccccagctctggtgtggagctgtgctgtcatggcagtgccaaggcagccagtggaagttggctgacaaggcaaactgaggcaatccacgcagaattcaatggccacccaggctggagtgcagtggcatgatcatggctcactgagcctccaactctcaggcttaagcaattctcccacctcagcctcccaagcagtggggaccacaggcaagtggcaccacgactaattttttttattttttgtagagacgggatcttgctgaattgcccaggctggtcggacgcgtgg

SEQ ID NO: 234583 - DNA, 958 bp, Homo Sapiens
  misc_feature (252)..(253): n is a, c, g, or t
  misc_feature (259)..(259): n is a, c, g, or t
  misc_feature (280)..(280): n is a, c, g, or t
  misc_feature (304)..(308): n is a, c, g, or t
  misc_feature (310)..(310): n is a, c, g, or t
  misc_feature (329)..(329): n is a, c, g, or t
  misc_feature (348)..(352): n is a, c, g, or t
  misc_feature (359)..(363): n is a, c, g, or t
atttttccccccccccacgagaagaagagggtgctcttcttcccacaagaaatccccccaagggagggggggttttttccccccacccccggcgggtgttaaaaaaaaggggggcccagagggcccaaggtttataaaaaaggccctcccatattggggccccccttttttcaaaaaaaaaggtggggttcggcttatatttgggggccccccggggggggtttttttgggggggggccccccccctttttnntttttnggggggtgtgggtggtgtttntggttgttgttgtttttttttttnnnnntntttgtttttgttttttttnttttttttttttttttttnnnnnttttttnnnnnattttcacaatcatctttattacagtaggatgatggtcctgggccaccagcctaaaccttgcagccttaggaaagacctgtgtcaacagggcttgcctccctctctagacaggggctcagccacctccagggcatccctgctgcattttccctgctggaggatggggcagagggacaatgggagaggagggcatgaccccaccccaggctatagcagctccttggccacaaagatccttttgccagtagcagaagggaggaaaacagcaaccaccagggttaccaccacttgtgggatggccaggaccccattatgtcctcttaaagttgtgctcaaagcaattaataaattaaaatgagccttcagcagcaaagctgtcaatcacacaggagaagctgagcagaaagcaaagcaaagaggaatttatagcttctctggctgaggcctaggcccctccctctaggagcagctgtcagcacggactacataggggcctccaaagtactgagaggagccatctagactattccccctcatatgtgtctatcatgcattaaattttagagggaccccaatccaaatgcaataacccta

SEQ ID NO: 234584 - DNA, 965 bp, Homo Sapiens
ccccccgttgattgttttccccaagggggggaaataggtttacttcaggggttgcgcatctatgttctgctaattttttttggaagccctctcccccatttggggaagccaccccactggcacagctttctgggcccccagggcggtccccagttctcttggggtaaagctttttgttcaggaaacagcgtttgggggggaaggcccaaacccccaggtaggtttggggaatgccactcattccccagggggcgtgggaacccgttggtggaccttgcacagtccaatggccttggccaggcgcgggcagttcccggattcacttcgtgggttcacagggttcccagtgggcggcccaccctccaaaccggggggggcgcgggcgtgtccgggccggaggcagggtctcccaggcgcgcggacacggtcgactacactagttttagatcgcgagcggcgccctttttttgttttcctttttttgagatggagtctcactctgtccccccaggctggagtgcagtggggcgatctcggctcactgcaagctccgcctcctgggttcacgccattctcctgcctcagcctcccgagtagctgggactacaggcgcccgccactacgcccggctgattttttgtatttttagtagacagggggtttcaccgtgttagccaggatggtgttgatctcctgacctcgtgatccgcccgcctcagcctcccaaagtgctgggattacaggcatgagccactgcgcccggcctgcttcctgccaagttaaacggcatgctagctctcagctccccatgcccaagtggacttgaaaggtctaccccagccctccttccacagcccatcctgagcaggctgcctactccaggcaggccccaggctgggctggaccatttaatcctcacagccctggtaaggctgagatcacggatcccacttcatagtggagaa

SEQ ID NO: 234585 - DNA, 925 bp, Homo Sapiens
  misc_feature (68)..(68): n is a, c, g, or t
aaagagcccgggaggccagggttagttaggaaggcagggggttggaacttccgctggggggtttatcngggagggagccccaaaaagggttggcgaaccagggcccattgggggacagaggccctggaatgcccaactccaggaatgtgggcctctggccactaagcagctgctgcaggaagtgcagagacttggcatcgggcaggacttcccatgtaggacactggctcgccaccctatgaccaccctaaccctagaaaaaaggatgcagtactaaagtgtcattcattcaaagccactcctcttttggtattccacccattttccagacggtgacactgaggctcaggaagcagtagggacttgcacaaagccctttgggaagcaggctgggaaacagtggagggagggtgtccattagccccaaggagacacaggatctgggctctgtctttcgccttcctcccagaatacgctgccatcaactccatgctggaccagatcaactcctgtctggaccacctggaggagaagaatgaccacctccacgcccgcctccaggagctgctggagtccaaccggcagacacgcctggagttccagcagcagctcggggaggcccccagtgatgccagcccctaggctccaagagcccccaaccgggacccaaccctgcctccctgggctaggctctggcctgggcactcaccccctggcttagacaccttctcaagggctggccttcagggacccctggtgggtctgcctgcctgggccacccttcctgcctgggcctccccttggcctacctgggccagcccccaccacctggcatgccctcctggggccaagagtgggcctgcaacccacccacttgcctgcccacccaactcctgggcgccggacgcggggtcgacgatatccg

SEQ ID NO: 234586 - DNA, 883 bp, Homo Sapiens
  misc_feature (856)..(856): n is a, c, g, or t
  misc_feature (865)..(865): n is a, c, g, or t
ctttcttatccggttattcatgccacttctggtctcgtcgggggactagggagttccctagcagtacgaagtcccacgacactggcccggaggctatatctatttggttttgctttttggtggggggtggtgatctggttcttacacatcttggaagcaagaacaatcaggaccaaagtcactttgatcccacttttccaggagaaaaaccacctgtttggccagtgagaactacttgtatgaaataatttggccaaaccttcagtgtgaccaaatgtgagactgggagtttgtgtttttcacaggaaccctaagtatagacctctgctgctcatcaggaaacttactggagatgaaggccccagctgttgtcaccgggtttggaaagcaccttaactgaatcatgtaagcatcaggacataagcagcactttgtggtcaaatgtggaagccggagacttcaaagcacctctgggacccactggttgaagtttgcaatagaaacttaagttttcccaaatccataaagccttagccctggttctcaatagaatcagggacctagcaggaaatgattttactcaacctaaaatgctggatcccaggcccgtgtagctataagaattctggcctggatcccaggtgtacaactatggacaagatatgggcctctactttctcctctataaaatgaggctggatgaaatgtcagctagggccattttggctgctgaggctctgggatttggtttagttactgaatgttagattttctgcctagaaagataactatctagatacaagtggttggatcctgtttttgtttgtggtacatgtgtctttcccaagagagatgntgtcaccanattagccctgccttaaaa

SEQ ID NO: 234587 - DNA, 867 bp, Homo Sapiens
  misc_feature (22)..(22): n is a, c, g, or t
  misc_feature (25)..(28): n is a, c, g, or t
  misc_feature (51)..(51): n is a, c, g, or t
  misc_feature (55)..(56): n is a, c, g, or t
  misc_feature (61)..(61): n is a, c, g, or t
  misc_feature (69)..(69): n is a, c, g, or t
  misc_feature (74)..(75): n is a, c, g, or t
  misc_feature (78)..(79): n is a, c, g, or t
  misc_feature (88)..(88): n is a, c, g, or t
  misc_feature (96)..(97): n is a, c, g, or t
  misc_feature (102)..(103): n is a, c, g, or t
  misc_feature (113)..(116): n is a, c, g, or t
  misc_feature (123)..(123): n is a, c, g, or t
  misc_feature (127)..(128): n is a, c, g, or t
  misc_feature (132)..(132): n is a, c, g, or t
  misc_feature (134)..(134): n is a, c, g, or t
  misc_feature (140)..(151): n is a, c, g, or t
  misc_feature (293)..(293): n is a, c, g, or t
gcgggggcccccggggggggtnccnnnncggcggggccccccgcgggttcngggnncccgncccccccnccggnnccnnggtttcccnccttcccnnggccnncccccccccnnnnccccccngggnnggangncccccnnnnnnnnnnnnccccccaaccccccatttcacccctccccagcttcccaaacttctgtctgcccaaatgggctctgaccgtgctctgtcggcccgagacatttggaagtcctgggggatgctggcaaatctcagctgttgctgaggagggggntgggacccctttcccaatcccaaccttgagccccaggagataccgcgcccacacccaatcttgggacactccctatctggttggaagagagtaaccagtttccagagagccagagagtgagagagagaaagagagtgagagagagagagaaagagagagagagatgctgttgaatcagaaacagatcaacagcccaaagattttcctgtccctggagtgccagccccaggaagctccagggctgagtggtcaggagccagtttctccagcccctcctccccacaacccttagtggggaggggcagctgtccatttgcccaaagtattaatgcaactgaagctgtgatatttccaacgactgtaggaggaaaaattaaggggagagaggaaaacaaaaccaaccaacccctaaaatcattttcttattgtacataacgacctcattctcctgtatatgcggaagatataaccttatatttggtaagtgtttcttgtgctattttatcacgtgacctgtttataaaaatatatattaaaaaagttgtaaaaccaaaaaaaaaaaaaaaaaaagggc

SEQ ID NO: 234588 - DNA, 904 bp, Homo Sapiens
tggggacccccaaggaaaaaaggggggaaatggttggggaacctaattactggattgagccgccctatctgtgtctgggcaacaggagaggccgctggtacccttccattattttcatttggtgggtctggttttcttttttcctttccccccacatattttgcccacctctgtcttctttagggcaatgagtgtaattttttcccctttctgactttttttttttgtttccccaggatcaaagacagggcaaatatatatatatatatatatatatatatatatatatatatatatatggcaaatatatgatatatatatgtggatatatatatatcaatttccagatacttttggtattgtttttcatagtgaagatgaaaatggagtgagtgcatgggagataagggggtgggaggagacacaccatcaatggaatacaagtaacatgcaaaccggaatttactgtcagcagtccagacagttttgccataataatttctcagagaaatcattgtctgtggcatttttttgtgttaatattatttttctctctcctcgttttaatattttctcttttcttgctcttccatacatggtgggtttaaactcaaagcatctgattcaacgtaaaaggaggcccgcctctctcatcaaatttctcgtattaacgtgaacttcgcagaaaaaggtcagtttcaaaacctgtgaacttcccagctgcgcacttttttcatcttagttttttaaataagtatacctcttctttctgctttgccttcttagcgcatttttaaaaacacacatttaagttggtaactccccccagtctctcgagaatcgtctgggttgtttttccatatttttaaatgtataaaatactttaattttaaaatttgttttt

SEQ ID NO: 234589 - DNA, 856 bp, Homo Sapiens
  misc_feature (2)..(2): n is a, c, g, or t
  misc_feature (5)..(5): n is a, c, g, or t
  misc_feature (12)..(12): n is a, c, g, or t
  misc_feature (15)..(16): n is a, c, g, or t
  misc_feature (18)..(39): n is a, c, g, or t
  misc_feature (41)..(51): n is a, c, g, or t
  misc_feature (53)..(57): n is a, c, g, or t
tngtnttgtgtngtnntnnnnnnnnnnnnnnnnnnnnnntnnnnnnnnnnntnnnnnggcttccaatccaaactgggctaaatggtatgtttattttaaacaaggaatttgccatggacaagatctatctggcttactgtgagttagaagtacgccctgccgtaacactggtatttccacatagtatggaagaggaagagaggaaaacttaattaagtgttgcaaaattgtttgaggacctattttggtccattccttatcaactccatgtgtgatttcaagttatctaaagggcatgtgactttatttctgactaacatcaagttcctctcctcatcataacaaggcgattcaaacctaaactgtgattcttaggagatgcttccaaggggaagctccctcgttggacatccagaagattgcattttctcttcagagtacaattttccatctgtcagagcatgtctgaataaaaatttgaacctactacaaactacattagaataattttcaagtatttttctgtcacaaaaatggtgtgacagaatgtgttgaaaaacacaaagttcacagctgagattaatttagataacctagtggttaatatgctcatgaacatcagcaacaaccgtgcattccttggcagatgggatgcgatggaaaccaaaggtttccttaaggcaagcacttcacaactagttttctgtcaattcttgcgtaaatcacattctgtattcatacaaaaactttgtttttctctgacaaactgtacacatagaaacaaatttccaaatggacaggaacttaaatttgtggagatgccccatgtcttgtgagacttaaaaaaaagaaaaag

SEQ ID NO: 234590 - DNA, 973 bp, Homo Sapiens
cccccctctcctgcgggggggggggggtgtttcccggggggggcggggggggatgtgagggtgcgggcgctggggccccccttacccgctctgtgtacaatatgtggtgggaccccggaactccctcctggggccacaccctggggcgtgttggccaaaaaccctgggtttgttttccctttcgctccaacctcccaatgtgtgttggggggaattttggggccactggcttgtgttttattggcaggattccctgccaatgttaggtggaggattgagaccggccgtggtcactttctggctatttggtcggtttgcttctctgcggggtatttcatccacgatacgggtggacatcgtggctagcggacagacacgagcctcttgggaataccttgtccatcacgtcatggccatgggtgccttcttctccggcatcttttggagcagctttgtcggtgggggtgtcttaacactactggtggaagtcagcaacatcttcctcaccattcgcatgatgatgaaaatcagtaatgcccaggatcatctcctctaccgggttaacaagtatgtgaacctggtcatgtactttttcttccgcctggcccctcaggcctacctcacccatttcttcttgcgttatgtgaaccagaggaccctgggcaccttcctgctgggtatcctgctcatgctggacgtgatgatcataatctacttttcccgcctcctccgctctgacttctgccctgagcatgtccccaagaagcaacacaaagacaagttcttgactgagtgaggggcacagagcctgggacaacaaaaacggacaaggccagaaacagcttcatatggacactgggacttagccccaagcctgggtgtcctctgaggccagcctctccaccttttgagcctgcgcccacactattgaaaacactaatgaaagtaaaaaaaaaaaaaaaaaaaaaaaaaa

SEQ ID NO: 234591 - DNA, 580 bp, Homo Sapiens
tgcagatagcacattcagtagccttattttgttgatggaatactgtatcatatgctcaactctgaaaaccttgaacacggccaaaatccataaagattataaaagcaaactaagttgtgaagctatagtacatgtaggcatttagttaagtatagcaattcaaactgacctgcatccatccaaaacaaattcctccttcaaccttatttttacttgaaatttgctagaagaaatagcaaaccgaaatttgttttatgcatgagttaataccactggctcagcaaatacaagttagtttgctttaagcaggtaactttttttgtaatggaagaaatgcactacaaagttaagacagatttttgctaagtgcaggaggccctttattattgctgcagaaaacaaaagcctggctgagttgatgttttacattctcccttactgaaatctacatgacatgatgcttcttgctgggtttttgtacatgtaaacattgtcaagctgtgaaagaaaatggctggaggtgtgctttgtgtgaaaggtgagcaataaagtatctgttaagttcaaaaaaaaaaaaaaa

SEQ ID NO: 234592 - DNA, 562 bp, Homo Sapiens
cgaagaaatgctaacggaaggatttgttatgtttaggatcttcccttggaaactaaaaatagaatattaatgacattactgtttgtagaatgacatatgcagattttctcataagcagtcattgtgtttgccagtaatgtttgagagacatgtaagttgaaagttttgctaaattataaagctcctttaattcgttggttttgattctcttattctcttgtcttttctaaatgttaacaaaatatatcttaacagattacatgaaatttaggaattatttaaaagttaccattagctctaaaattaagattcggatgctttatttatagtaactgaagctaataatgttttatgttttgattttttgaaatttaattgtagaagtcactgccttctgagttttcaaatagataaccacctttaatattacactgcttataatactaatgtttacagatatgtttctgtttataaccatataatacattggctttgtcatattagttttttttgcaagtagttatgtaaaagagatagataataaaatattaaataactgaaa

SEQ ID NO: 234593 - DNA, 608 bp, Homo Sapiens
gtttgcaattatttcgaaggggagaaatcatctggatcagaattaagatgctctggtttcaaggaaatagcatgcaacttgccagatcctcctttggactcttcttgagaaattgctctgcctctaagacaactctgcctgtgttgaccttattcacaaaggacccatgccccctttgtgatgaagccaaggaagtactcaagccttatgaaaacaggcaaccctacaaggatcagaagctgccaggaacaaggagaagacgctccccttcctcaccttcccacccccacatggcttctcagtcggggaaaagatacaacttaactttaaaccaagtcttaagttttgattatgacatgggattagatgcaccaaaaacaatttcaagtgactgtggggcattctattgcctgagaatgttcaagagtcctgatatgacctgttgtttttatcctaaacagtgaaaaattcatccaccaaatatataggaatagagggagacagaaagatgctttctgaaggtatcccatatttagagtattggttacatatacctaatgttggttttaacctatagctcttcaataaacttactcatcaattcttaa

SEQ ID NO: 234594 - DNA, 571 bp, Homo Sapiens
ttttagatttgataaatatttttattactaaagaatctccccagacattttcttttttttttcacacatagatttaagtatcttgattgttagtagtctaaaaatgggaagaatgaaaaagcataactagatttttctatcttctgtggtcgcccgcccccccccaaaaaaataccatttatggttctctccgcaagtataaaagcattacatgcaaaaaaaagatctcagagaaaacaaaagtaaaagaaaagcagaaaatcacctgttatctactcccagaaataatcaatttcaacattttggtatatgtttttccaggcttctttgggttgatcccacctatgagatcagaatatgtatgcagttctttctttaacccttttttctcctatgtactgtgaacatttaaaaagtacttttaaatattctttggaaacttagcttttagtaactacttggttgtatcataatttattaactaatgttttattggtaaacattggcttgcctcccatgacttgccattataattaaaactgtgactactatctgtctccattacatacat

SEQ ID NO: 234595 - DNA, 450 bp, Homo Sapiens
gtaacacagagggcagatttgggctccagcttcctgctgtaaacaattctcacgccagaaaagacctttgtcactcagctgttctgaagaacttagcagaattggccagggtggggctggtcagtgagtggagtctgtgcattgtgagtttctcagtcaaataatgtgtatccatatcaaatgtaagttatcaatggcccaatgcccatctacccgctagaggccatgactgaatatgcttgggttctttctacatggaaaatctacagtcacctggcttatgtaaacttgggaatacttacactaggatcctattaaccaaaccagagtaaaagcatacattggccatttctaacttagcttaccctgctgtgaaaaagatttcagcccaaatcttatttttccaaattacttcatgcagcaagtagtgtataccctgctgagtaaagg

SEQ ID NO: 234596 - DNA, 438 bp, Homo Sapiens
gatttgtttatttattttgagagagatgtcggctgtgagcgttggactaaggtcgacctgatggacctcacctctcgccttgccatgtctaaggtcgaccagatctctctcgccagcagcagtacaattcaggttgagcagagggatgggatcgtgattcactgtggccttgatcttcctggtctcgcccgggcggtcttcccaactggcctcccgtgtcccttggactactcagaccttcttcctctcttttttcctaattccactttctgtttgtttccatagtacttggagagacttgctattcttttttttctttgttcttttctctctctcttttcctatgcttcttcctgcacagtgaagtttaccttttaatttttttttttttaatcacactcaagccttggaaatcaattaaatttgtttctttaaaac

SEQ ID NO: 234597 - DNA, 416 bp, Homo Sapiens
gtacagataatttcctcacccaggtactaagcctagtacccaatagttgctttttctcctcctctctctcctcccaccctccaccctcaaataggccccagtgtatgttgttctcttcattatgttcatgaagttgagagagtgttttgaaaaagaatgttggaaagcatttccactgttagatgattttaagtcaaaaagttatacaacagtgtgacctatttgcacacaagcatggacacagaattgtgtcatatgtttaaaacttttctagatccttttgtggttcataagcttgatgattgagttttcgcgtccacatgtgagatgtgcctcccttgagccttgtcattggcacattacctgcctgatgtgaacaataaaaataaaaaataaaaatttgctaagcagaaaaa

SEQ ID NO: 234598 - DNA, 570 bp, Homo Sapiens
tatcaccctggctggaaagcagtggtacaatcatagctcactccacctcaaactcctggactccagtgattgtcctgtctcagcctcctaagcagttgggattatatgtatgagtcactcatcaacaaggatcaacaatttttagatggtattgtaagtaaagttcactgccctagaacatttgtggagggagctaagggaatcaatattatctgtattcaggatcgtgtctgtataaccagaagcagggtagttctcactgtggtaactgagataaaatcatgttcttgatatgcatgactcaggggtaaccaacaccaaatttagttaccaaagacttttataaagtgaggactgcctgcatgcatgtttcttctcttctaggaaatgggaagattgcaatatcactgaatgttaagcaaacagcatacattcactccacttgttccatgtgttcttgtaccgggatctgctgctttctaattttaacttttagattcagggaatacatgtgcaggtttgttagatgggtatgttgttttttgtttttttttttttctttcttttttt

SEQ ID NO: 234599 - DNA, 515 bp, Homo Sapiens
  misc_feature (169)..(169): n is a, c, g, or t
gaacagtgaaggctgtgttcaaggactctgtggttggcagagacatcctcacaccaccagatttggagagaatcttcgggcttcctggagggaacatattccactgcgccatgtccctggaccagctctacttcgcccgccccgtgcccctgcattcgtgctaccgctnccctctccagggcctgtatctctgtggaagtggggctcatcctggaggaggtgtgatgggagctgctgggcgaaatgcagcacatgtggcctttagggacctcaagagcatgtgaccctgaaccagctctgacccaggaagaagactccacccctgaattccaagtgctccattggatcagcttcccaggaagttcagcttcgggttagtacataaggccaccacaatgctcaagaaattattttagaaaaaacgtacgagttacatttagtgcaagttgaccttatgcccatgcctccatacatggactggttctgttttattaaaactaatatttcatacaaaa

SEQ ID NO: 234600 - DNA, 533 bp, Homo Sapiens
gctgaacttgtaaaaatacaatcttagccacatacctatgaaatgtatatgtgtgtatatatatatacatgaatttgcttctgagattatggaggctgaaattcccaagatggaaggaaagctggatacccaggaaagcatttgtttcccattaggcctcttaattctctcctggcccttgattgattgcatgaggcccacccctattaaggagggcaatctgcttcacttagtctgcccatcccaatgttaatcgtatctgaaagactctctggaacacaaccagaatcatgtttggccaaatgtccgtggaccctggtgctcggtcacagtgacaagtacaagtaactatcacacatgccctttgtcatattggtgatttccactgtttttctcccaaactgcagcttatatttgttctcttaatactgttgagcaaaaacttttaatttttataaagtcgaatttatcaatgttttctttaatggtttgtgtttattgataataaagaacactttgcctaaaaaaaaaaa

SEQ ID NO: 234601 - DNA, 495 bp, Homo Sapiens
cagttggagaaagcagaatggagtccagccagctaacaatggaaataacatgggatctggtgcagtaatgggaaacggagaaggaaaaaaataaatcccaggcacttaaataagaagtgaaccctgggttatttggcaaaaacaagagaaaatgatagtgtagggtgatagaataaatgtttattacatttcacagtattttcgtaaagtgatttgcagtggacgtgagtctgaaaagtgggagcaaattctaaaacctctgtccttgggactaaaggaaggtaatgtcacagtagttactgaagaggatctaattgagtgtgcataattatatttctgaacaccatatctgaattttacataggagtttcactttggtgatttcagctagtgattttcagtctgtcctgcagaggtggactgggtagctgggggagagaaaaagaaagaaagaaagctaggtttgattttatctcttgagattctagtatgttt

SEQ ID NO: 234602 - DNA, 580 bp, Homo Sapiens
tgccccatgtcatcctcctctgtcttaatagttgagaatcttggaggtggggaacttgcagttactcatctgttcttcagttaaaatctctgtgatctatcttgtgatattcctttctagtcactaagggagaaaccagggtctttgattttacatagctttgagaggagctacagctttaaattggaatgcttttccaaaatttaatagctgcctgccctaaggggcagaacttcatgaaggaatgatttctagattctcattgaagacaactgaaaatggatgcaccctggattcagagcaagcactggaagtggcccccagcctcagttcttctcggatctgatgtttaatggggaagagaaagggtgagatggaagctttccctcgccactgaaaggcccatctcatccagggcctgcaaggatgctgattaatcatgatgagtgagtggggtggaaatgcatggcccatgggccaaggcgagaagcaaaggtggaaccagtcctgccagtggattcattggcagagcttggccgggagggcactcttctggagaaaagagaagagggaatgacag

SEQ ID NO: 234603 - DNA, 446 bp, Homo Sapiens
attccccgccccaacacacacagaaatacaggaggattgagaaatgaattttgaggagtcatgtaaagaaagatagaaggttaaatctaagttgcttgtagctaagcaggattttatattttgggtgcaagaatttaagaagaaagtaatgtgtttaaatgcttagaaaggaaggatcagaatgtaggaagtgggaccagcagtagtgaaactagtgaggaaaagtttccctcagcccatatgggcaatttcccttggttcctgtggagcatttggctacagacacagaagcaaaagcatttaatcaaagtgtttaagaactgggtttttggctgggtgtggtggctcacacctgtaatgtcagcacttttgggaggtcaaggtggggggatcacttgagcccaggagtttgagaccagcctggacaacatagaccctttctctac

SEQ ID NO: 234604 - DNA, 605 bp, Homo Sapiens
tggatgtttgatctgtgttgtccatgaagtggtttttttttttttaaaaagaaaaccatgatcaacaagctttgccacgaatttaagagttttatcaagatatatcgaatacttctacccatctgttcatagtttatggactgatgttccaagtttgtatcattcctttgcatataattaaacctggaacaacatgcactagatttatgtcagaaatatctgttggttttccaaaggttgttaacagatgaagtttatgtgcaaaaaagggtaagatataaattcaaggaagaaaaaaagttgatagctaaaaggtagagtgtgtcttcgatataatccaatttgttttatgtcaaaatgtaagtatttgtcttccctagaaatcctcagaatgatttctataataaagttaatttcatttatatttgacaagaatatagatgttttatacacattttcatgcaatcatacgtttcttttttggccagcaaaagttaattgttcttagatatagttgtattactgttcacggtccaatcattttgtgcatctagagttcattcctaatcaattaaaagtgcttgcaagagttttaaaaaaaaaaa

SEQ ID NO: 234605 - DNA, 414 bp, Homo Sapiens
ccccagagtttttttattttttaagccgacctataaacaagcagtttgtccctgcttgctcgcctggcactaaggacccacagagatgtcactcggtttaatgctgtctcattttgatgcctggcccgtttggggttgccgcccctttactacgccgggaccctcctcggcctcaggctcccaggcactgcaggatgctggctgggcactcagcagtcgaggcgctgggcatgctcagtggctgggacccggcgggccgcgggggagcgcgcctcggcccaatgcggctgaggggcggagcgagtttcccggggaggcctgctgattggtgggatggcctgtttttcaagccttgcactgcagaggtttgtgtacctaattagaacccaagttaaaaaaaaaaatccgaaaaaa

SEQ ID NO: 234606 - DNA, 507 bp, Homo Sapiens
ggccactgtgcccagcctccaacctaatttgagtttcatttgtatttttttcatcaccttacatgtgttaacagctgtttcaacataaactccattataatctatatacatttaaagaccgtgtttacataatctcttctgggtagaaaatggaaatacttaacctttgcattggtccctttcaggcttgaacaacagtggctgtatctgcatcgtggggttgctggtggtagaacactttggtgttaggaaagtttggaaaagaggatatccctgtattaggccattatgattagagataagcagcctgggagaaacatacaagacctgtggctactggtagagaattggaataagcttccaacaatggactgtagagattaatggagattgtttagtgggcccatggctaggtggggtattaatacagttgaagttatgttcccttggcacagatctttgagaatctcatacatctgtgaaaaagataatgtgaaataaacagta

SEQ ID NO: 234607 - DNA, 455 bp, Homo Sapiens
cgctcttgctcccatcagtgccaccacctctgtatgctgtatacacatccacttaacctcacatccatttaacaaacatttaccaagaatctactatgagtgagacaccatgctaggtgccgtgaatacagatacaaaagatcattcctccccacaagtagttcacagtctttgagggaagacaaacatgcaaacattttaaccataatctgctcaataatataatggaggtaagcattggttggaagtatgaaatcataagtgtctgactcctggccgggtgcagtagctcatgcctttaaccccagcactttaggcggccaaggtgggcgaattacttgaggtcaggagatcgagaccagcctggccaacatggcgaaaccccgtctccactaaaagcacaaaaactagccaggcgtgatgtctggcacctgtaatcccagccactcaggagg

SEQ ID NO: 234608 - DNA, 556 bp, Homo Sapiens
aatgactaatattttctccccaaatacagaataattcagatgggcaaccaagttttcaagagactgctgtaggtgaagtctgtctagccaaggcagaacacttacaggagtccctaactgtgccacccttggaatgggttagtgtacaggctcagaatattgtggattacagtttttcagagaaaactaccacagatgtagacaaaaatgatctctgaaagcattgccagcagccaggtatgttccttagatttccacttaggtttggcattttggcagataagctaatcttgtataaagcatcacattttactatgcttagtgttcctgggttgtatttatctacattattagagggaatttttattttaaaaaaattgtcattcatgagaagaatgggagttcatgccacatagtattttaccaatttatataaagtgggaaaagtctttaatacttcatgatcacttgaattaaagttttagtatctctggaaaaaaaaaaaaaaaaaagtcgagcggccgcgaatttagtagtagtagtagtagtagtaggc

SEQ ID NO: 234609 - DNA, 410 bp, Homo Sapiens
gtcattaaaaaataaaataaccaaatacaatgtatgaaccttcacacactagattaaattagatactgaatcaaaaagcaaaagttatgaaagacattttaagaacaattagggaagttgaaatacagactgtatattaaataatattattgaattagtgttaattttcctagatatgataatggtattgtgattataaagaagaacattcttattcttaagaaatgcttgctaaagtgtcatgatgtctgcaacttaccttcaaatggttctaaaaaaaaaagagggtgagagaaagaaggtacagtcaatgtggcaaacattaacagccggaaaatctacatgaaggggataaggatacttcctgtactgctcttttaactcttctctaggtttgaactttaaaaaaa

SEQ ID NO: 234610 - DNA, 674 bp, Homo Sapiens
  misc_feature (37)..(37): n is a, c, g, or t
ggaagttccctgctgatgacagacttcaggaggccantttgttccaggacccacatctgctttcttcatatttcttgatcctgccctggatctacagttacacttttctggaaacttctctgggatcaaagactaggggtttgctctaggaccttatggccctgcctcctttctggcctctcacaggacattttcttcccatagatagaaacagagggagctactctcaggctgcaggtaagatgaaggaggctgatccctgagattgttgggatattgtggtcaggagcctatgagggagctcacccaccccacagttcctctagccacatctgtgggctctgaccaggtcctatttttgttctaccccaatcactgacagtgcccagggctctggggtgtctctcacagctaataaaggtgacactccagggcaggggccctgatgtgagtggggtgttgggggggaacagaggggactcagctgtgctattgggtttctttgacttggatgtcttgagcatgaaatgggctatttagagtgttacctctcactgtgactgatacgaatttgttcatgcatattttctctatagtgtgagccagctctccgtcgtgtcgggactgacaagcagatcatcaatgtacccattccactcgtgcctgccgaatcc

SEQ ID NO: 234611 - DNA, 421 bp, Homo Sapiens
atacacatattcttcaggtctctaagcccctggaagcagcattgtgtgatattctcagaggcaggggaaaatagagggaaaaatagagactattggtatgttctccccatcagcgagttattgtaactggtcaccactggacgggaaggagaacagaggagagggaaagagaagcccaacctctgtgatcatatgagggccaaggctgagcagtgtagacagagaccctttgaaatgcatttgtctctcaaatagactagtaaacaccgacttctcctttgggttacaaacaccatttcaacctttcgggagagtcagagctaggatgtacaagaactgattctaaccagaagtccgcaagtactgtggacaagaatgcttaaccacgctgcttcagtccttgagaaaccgtgataccgag

SEQ ID NO: 234612 - DNA, 233 bp, Homo Sapiens
gccccgatttcgcaatttgaggctccgtatcccctctttccacactggctttttcccacccgggtacagagtgggaattcctttccaaaaaaaaaaaaaaaaagaatgagtctggcccctttttgtctttctctcatcctctttgcctttcaccatgttatgatgcagcaagaagcccctcatcagatactagtgccatgaccttggacttcccagcctccagtgtgtagaga

SEQ ID NO: 234613 - DNA, 431 bp, Homo Sapiens
aagaaggcaaatgatgacttagtattattatgaaactattctgatctcacagactccatgaaaggagtctattctctaggattccacagactacactttgaaaactgctaggctactctaacacacttgtttaataggtaacctaccaattcatatttatttccaagtttaatgcaaactacctgacagcaaatctctcttctttgtacttcgctttaataccccgcaacgatttgaatgtgtcccccagaagttcatctgttggatacttggtgcccaatgcaggcgtgttaagaggcgagacctttaggaagtgcttgagccattctcagattaatgggttattcagagaaggggctagttagcacaagagtgggtctgtaataaaagccaatgtggctgtctctcgttagtcccctcaccatgtgatg

SEQ ID NO: 234614 - DNA, 391 bp, Homo Sapiens
tcaggagggggaagtgaaagaaacattcggtaaagaggggaagatgtaagggagcttgttaacaaggaacttccacaaggcccactggaaaaatgagagaagtgggaaagaagcaatggaaagctgggtcaggaaagagaaagcaggaagaaaatcaggatccccatttgacaagtaaggacatgaagaagctaagtgtcctgcccaaccagtaagtcaaagactggaatttgaacccccagatagttctctaagggtgggaaatccatctcagtaggaacttgagggaagcttgagggaactttagggaaggtttccagttcaacaaaaagaaagaggctgggcatggtggttcatgcctgtaatcccagcactttggaagccaaggtgg

SEQ ID NO: 234615 - DNA, 447 bp, Homo Sapiens
ataattcctggagggttggctgaaagacacggaggcctcaaaagaggagaccagctgctatcagtgaacggagtgagtgtggaaggagaacaccatgagaaagctgtggaactactcaaggctgctaaagacagcgtcaagctggtggtgcgatacaccccaaaagttctggaagaaatggaggctcgctttgaaaagctacgaacagccaggcgtcggcagcagcagcaattgctaattcagcagcagcaacagcagcagcagcaacaaacacaacaaaaccacatgtcataggcccttgagggaaagctacttgatcaaacatccgatagtcacaaatttgaaaccgtgcttcagaatcccagcacatagtaaaagacaacactgataattatacctgtcaagaagctgtgaacacatggtgtataaattctttaccaaggcaaa

SEQ ID NO: 234616 - DNA, 662 bp, Homo Sapiens
ttaaggactaccttgggaatttggaatctcgtttcatttccgaatggccccatgtcccgcagagattgatccccaggtgaagaatgcagtaagcttttagaagacatagatgagaagataagcaatgaagtcttaaaaagctcaccatcatatgcaatgaggagaaaaatagaagaaattaactatgggcttcataatgttgaaaagatgttgcagcagaaaagcgaaaatattgagaaagctcaagaaattctaaagaaaatgtgggacgagttagatctatggcattcctaactaaatgagctggattctgaagttcaggacattgttgaacaggacccaggacaggctcaagaatggatggataacttgatgattcctttccagcagtatcagcaagtatcacagagagcagagtgtagaacctcacagttgaataaggccacagttaagatggaggaatatagtgacctttctgaagagcactgaggcttggatagaaaataccagtcatttgctggccaatcctgctgactatgactctttgaggacactgagtcaccatgctagctctgtgcagatggctttggaggattcagaacagaagcactatcttttacatgcatctgtatggatctagtagacctgtctctcatttatga

SEQ ID NO: 234617 - DNA, 445 bp, Homo Sapiens
actttaggcaaaccaaagtggaaggtaaacgttacccttattttatagcttccctgtctaattctcaaagtttttatgtatataaagttgcctactatgcaaataatttgaatatgttaatgttgcctaagtgatacatctcttcatctgtatgcatgtgattaatataacctgaccaccttacgcagggggctgaaaccattgcaacaatgattaatcatttctgaataatatatgccccactagaaatcgtttcttcccacgattaatcatttcagatatgaagttttcaggtggggcaacacattttgccccagtttccattcatattctgcattatagatcaagcaaatagaaaatcagcataaaagtttacattgatccagcagccttagtttaaattgtttaatatctagaactaactgtaaaactcttaatgcagtca

SEQ ID NO: 234618 - DNA, 543 bp, Homo Sapiens
tgtgcgaacaaattggacaagaaggacttctttggaaaatcagatcctttccttgtattttatcgaagtaatgaagatggcagttttacaatttgtcacaagacagaagttgtcaaaaacactctaaatccagtatggcaagcattcaagatctcagtcagagcattatgtaatggagactatgacagaacaatcaaagtagaggtgtatgactgggaccgagatggaagtcatgatttcattggagaatttacaacaagctatagggaactttctagagggcagtcacaattcaacgtatatgagagtgcttgttcctcaaattatctggaagaattgcggaattcttcaaatctcaagatcaaacattacctttctcctccaaacaacctgctccatatttaatagaataaccattgaaccatctgaaaaatttgtgatcttgccagtgacgcccaacatccttactggtgcatgttttcctgtagaatttgttcaattagggctttctgaaatacacaataaataatacgtggaatgaaa

SEQ ID NO: 234619 - DNA, 652 bp, Homo Sapiens
  misc_feature (34)..(34): n is a, c, g, or t
  misc_feature (39)..(40): n is a, c, g, or t
cgccctttttattattatctctttcttatctgtngtttnnttctttttaatacaacgtttaatcatctggttgatcaagaaatgcaatgctcagtctaggaacagcagcagaaatagcgagagacacgggacttttatacaaaaaaatttgttgcttacaaaacatatgcaaaaaaagcttaaaaaaaccagagaccaaaggcagcatccttgctaattttcatctacattaagaaaaaaaaaatcttgtaactaatgtttttattttccttaaaaaaaatatttcgcttaggcacaatttgctggtggctttagaagaataagccaggtttccacagcatcccccttgagtgatatgtttccatttctccgctttttatagttaaggcatttttttcttctctgacaaagtgtatgttttgttgcttgctttcaggttttgtttactggaaaaaaaaaaaatgctcctgtcagcccaggcaacagggccaagatgcagtttcaggatccatgggacaggtcacagagtgacacggtggctgagattcggggacagggggagcgaggccagtgagtggtaggccagggccccagggagctcctggacccagtgtcaccttggccgcccccatcactccgaaccttgtcaggt

SEQ ID NO: 234620 - DNA, 710 bp, Homo Sapiens
  misc_feature (128)..(128): n is a, c, g, or t
ctttttttttttttttcctttctccccttttccctcccttctttacccttgtttctgctatgaggaaggttttttttttttttactttttaaattttttctaacatttttctgtttttaccaaaactnttctcaaaatcttgtattactcttaggatgacaatgataaaatgtaatttccatttccaaaagaaaaattgaatgcacctacattgattcattctgctgctttacaattaaggcaatgtattacactgatagaagattaaaaacataattaatttatctttcattctttgtatcttagaatcacccatttggttccttaactccatatagatcatatgctaggccatccaatttctttataaaataatagtgaatgtatgtattttagagttgtattgaccaaatattttgtgtctagacatttttggtttttagttgtaaattatgttttgtacagatttaatgactcacaaatacaagaatatagaaagaattactagtactaccagggagtgttcatagagagtagtgtattttaagttcttagcattaaagaatgaattccaaaatatatgtagccttggacacaaagggaaatctttagaaatttttatttaaccataaactgtaagctgagtatcattctccccattttatagtttatggttaaatggggagagtgatactgtaagctgagtatca

SEQ ID NO: 234621 - DNA, 983 bp, Homo Sapiens
  misc_feature (967)..(967): n is a, c, g, or t
cccgcacacagcctgaaaaaacttgggcctcccaccgcggcgggtataagccgtataaatcggcacccctcttccctcttacccccctacccagagcttcgcagaccgtcgggttcccatgccacccgttgtggcgcctcctttaggcagaacgaaatttcgagctccccgcgaagatccaagtcaccccggggggcttataacccccagcacgttgttatttgaaattcctttagattgtggcacttgttgccactttcatcggtgttggactattggaatggcgccatattgtcactctttctccttgcttaaaaaagcagagttagattcttgcacattaaaaaattcagtattaattaaacattacttattctaccctcttttttggcaaggaggacaaatacgcaatgttggaaaaccttggatggatatcttctctttaaaaaaatgtaaagataatttggtcttgagggtttaaacggttgataatgcctctacaacaacaagaaaaaagataaaatactaggatagaatcatggtgggcacagtggcttctcaggaggctgaggagggaggtttgcttgagtccaggagttggagaccagcccaggcaacatagcgtaaaccctatctctaaaacaatttttagccaggtgcggtggctcacgcctgtaatcccagcactctgggaggccgaggcgggtggatcatgaggtcaggagatcgagaccatcctgcctaacaaggtgaaaccccgtctctactaaaaatacaaaaaattagccgggcgcggtggcgggcgcctgtagtcccagctactcgggaggctgaggcaggagaatggcgtgaacccgggaagtggagcttgcagtgagccgagattgcgccactgcagtcggcagtccggcttgggcgacagagcgagactccgtctccgatcgcgtgctcgacgatacctaggatnccgaccggtacagcct

SEQ ID NO: 234622 - DNA, 487 bp, Homo Sapiens
  misc_feature (18)..(20): n is a, c, g, or t
  misc_feature (24)..(25): n is a, c, g, or t
  misc_feature (27)..(28): n is a, c, g, or t
  misc_feature (30)..(32): n is a, c, g, or t
acatgttttttttttttnnntttnntnntnnnttgttacagaggcagaagcagctttattgaaaaacagagcatgagtagaacgacttcaaatcccatatggcaccacagtgagaagtaacttcctctgagcttcttagagaatccaacaatgtcctgcttccttggggagctgcagccatgggcacatgggaatagggcttccaccaagagtcccgtcagtcacagcaacaggaggtcttcctcagacaactttgatgatagtggttgttagccagagcaagcttctgccatgagtggaagcagcctgagcctctcaccaggagcagatgctggtgccatgcttcttgtacagcccacagagcagtgagccaaataaacctcttttccttagagattgcgcagcctcagatgttcctctcctggtatccgcgccatgatgcaatctgcttacagcctaaatcaggatgaaccatatgactcatccc

SEQ ID NO: 234623 - DNA, 842 bp, Homo Sapiens
  misc_feature (34)..(34): n is a, c, g, or t
  misc_feature (37)..(37): n is a, c, g, or t
  misc_feature (47)..(47): n is a, c, g, or t
  misc_feature (53)..(54): n is a, c, g, or t
  misc_feature (57)..(57): n is a, c, g, or t
  misc_feature (62)..(62): n is a, c, g, or t
  misc_feature (73)..(74): n is a, c, g, or t
  misc_feature (85)..(85): n is a, c, g, or t
  misc_feature (92)..(93): n is a, c, g, or t
  misc_feature (96)..(96): n is a, c, g, or t
  misc_feature (104)..(104): n is a, c, g, or t
  misc_feature (109)..(109): n is a, c, g, or t
  misc_feature (125)..(125): n is a, c, g, or t
  misc_feature (127)..(127): n is a, c, g, or t
  misc_feature (129)..(134): n is a, c, g, or t
  misc_feature (139)..(145): n is a, c, g, or t
gccaagtgccctagctttaattaatacggacttncanttataaaggnagcacnnttngtacnaaagaaagctnngggtacgcgtntagcttnnggnccctcgangggantactctagagcagccngncnnnnnnttttnnnnnnnacaggtgcaaccacacattttattttttctatatgttttcgatccacaattggttgaacccacagatgcagaacccacagacatagagggccgatttgtatagagaggaaggcaaccagacctaagtggttaagacaccaacttaatttaaagcaaagatcaaatggtataattcagatgtttctgtagatagtaaacatccagtcagataatactacaggcatacactgttttattgtacttcattgtactatacttcatatatattgcattttttacaaatcgaaggtttgtagcaatcccacacctagcaagtgtatcaactccattttcccaacagcatatgctcacttcatgtattctgtcgcattctggtaattctcccaatattctgaactttttcttaactgttatttgtgttatagcgatctcaatcagtgatctttgatgttactattgttttggaggcaccatgaactatgcccatataatatagtgaacttaatggatacatgtgtatgttctgactgctccacacatctgctgtttccttttctctctcctcaggccttcctatttcgtgaaacagcaacactgaaattaaaccaatcactagccgtataatgacctctaagtattcaagtgaaaggaagagttgtacatctctcactttacatcaaaagttagaaatgattaa

SEQ ID NO: 234624 - DNA, 413 bp, Homo Sapiens
  misc_feature (20)..(20): n is a, c, g, or t
  misc_feature (22)..(24): n is a, c, g, or t
  misc_feature (29)..(29): n is a, c, g, or t
acaaggtttttttttttttntnnnggggntttttcgaatatttattaatttattttaacctaaattacatgttaacataaatatttttatgaactatatttccccaaacaaaaacagttagcaaagtggtattgttttacattttgcattttaacaggagacaggtgggttcttatatttgcttccgttgtgatactgcatgtcatgtagcctctggaaaactctactgtacacctctattttttcagggctttacgtgctaggtgtggtttcttcctctgcatcgaaccagcgacctgggtgcctccccacccaagacggacctccacatcgggaaccgccgccggcgcagcggccccagcagccgcagccaccttctccccggagcgccacttccggatctcgagtgtccc

SEQ ID NO: 234625 - DNA, 905 bp, Homo Sapiens
agaactttgggtgggtttggccattccaaagtttcttttttgtggagaaggtaatttttggtttttaaaaaatttattggccaaggttattggcaaaccccagctaaaccggagggattttgttaataaattccggtaggaaaaaggaaaaattttataaaggatattaaaatcttataataaaattaatatcccatggccccatacatgggtgcaaatttttcatatgaacttacatcaaacatttaggccatactctcttttctactatatataggtctataattacacacacatttaataatttaccccaatgtttaattgagtaatgaattcatttaatataacctttagtatagcagaatactacaggttacccacatttaaccctaaaaacaaacaaatgacaggcacttcagtgaaataacaagcccatgttcaaatataaaatgctaaaagtgagaaagaaattatgaaaatatatacctttaatttgcagacatataaacacttttggtacagtacagatgcatgatgccaaaaagtaaaatgatccagtttaagctaacacattccttgtttatacagattattttgctatagctctcatataaaataatatttccagctcacacaatgaattgaaagtgataaatcactgatgaaatagctttcttcattgcaagagattcagtaaaagctaaattatcaaagaaatctgctgcagggcttacaaataaactgttggatttaatccaaaaccaaagaaaggaagccagaaatggtagtcaacaaacctaaacaacaacaaaaagataagtacagtataactttcatataaaaggcccaactaaaacaaccagtagtgtacacaagcctctagaagaattcacttttaatatgat

SEQ ID NO: 234626 - DNA, 869 bp, Homo Sapiens
aagaaaactttacttctgccatggcctgtgtgtttgaagtttcaaaatagtgaacacgggagcacaaccatcatatttacaggctgtaaaaggactgaacatggttatttatatatatagatatctgtatatacacacacacatatgtgcacacacacactctctctccattatcgaacgactgactgtaaacctcaccacacagggtggtgccctggccccgaggtcaccccgacttttctaaatcttgtttgagtgaagtcattttttcatgtgttcatactatcattgtagctgtgaagttctggtacagttgtaaaaagagaaattgagttgtttctctatgttcttcagatgtgcagcccacaattcctcgggaaaggtgaacctgaacaacccaagtctctctctgcagagccctgtttctaattgtggtagaaaatattgagacagagcatttgccatgggacatttacagcctttatacaaatgtatttagttctcttttttccaacataaaattcttgttttaagatacaagtaaaattaatctttaaatataaatgtaaattagtacacaaaactaagaatctttagacttatctttgtaactaattagggtggaagttatgaaagaatgtaattcactaaattattttttaaatgaaacctttttttttctttttgaaaccaaatgttaaactatagccttaagaaatgcttggtagaagtgtcctaatgagacaaatttgtacttttatcctcaaggttaacactaatctcctaatccattaaactcttgaacaggtattacaaaggaagaaaacttcaccccttatccttaacatatatagtatatttaaaaaata

SEQ ID NO: 234627 - DNA, 653 bp, Homo Sapiens
agcacatccgtgacacggacgccttccgcagctgcaagttccccaccaagaggtccaagaaagctggccgccattaaacaggttctgacccagccagtcctggtgactggcctctgccttccaccggagagactactgaccttctcacctccacccataccttctccccacagcctctgctgatgcacagagctgcctacacctagacacgtcctggcagggggcctcgggcactccactaccaacccagctccacccagcagtgtcctggggagaaggaaggctgagcctctccccagccttcatgccttccccaccctccagctcctcttggagaagctgttgctgagacccccccccccccaagtcaatcagaaccacaacaggttggtcatcaggatggccaccctcccaggatcatccttcctctgttcctctttccctgccacgtggaaacaatcatcagatccttgccccaccccttgcttccagaaagggttttaaagcccatgccccaactctgccagcccccacctgccaggacgttctagcaggacatcggtgctttgctgtccatcttcccatgctgcaatttcttcctgagatttctataaatataaatgtatgtatgtattaaaaaaaaaaaaaaaaaa

SEQ ID NO: 234628 - DNA, 703 bp, Homo Sapiens
gcacgaggtggacgccgaactcatcgacgaggaggcgctgacgtcgctggagctggagctcgggctgcaccgcgtgcgcgagctgcccgagctcttcctgggccagagcgagttcgactgcttctcggacttggggtccgcgccgcccgccggctccgtgagctgctgagggcggccggcgcccgcccggcgtgccggagaggagaaagggcccgactgcccgccggaccctgcacccagcgactgggccccgcgcgcgccctccgcgagggtggaggcggcggctgtgtgcgcagggcccggcaccggactgggaccctggcgtccctccaggccttgcctcctgcgggaggacagtttggcttcacttctctgaccccagcctcggccgtaaagtgaaagagaccggaccagcttcagctttcggactctggttcttggatcgtgtcctctccccctcgccgccctcttcccccaatctgagccattgcaggcctctgcctgctgccccctctctcctcgggatcgggtccccagagccaccatctcctgagcctcccaccccgctgcctgggccctgtggttgctgggcctcccacctcaaggaggggaaggttgtacagcccgaacccgtggagcaatgccctgtctggcctccaaaaccaaaataaaactgggtcactttaaaaaaaaaaaaaaaaaa

SEQ ID NO: 234629 - DNA, 723 bp, Homo Sapiens
  misc_feature (23)..(23): n is a, c, g, or t
  misc_feature (120)..(120): n is a, c, g, or t
cttcccccacttcccctcaaatnttctcagctctgccgctggtctccatgaacggcaagggaaccaccactcattcactgtcagtgtaggtaagacagaggatgcccttgcaaaaattgngactgaggacagtagcacacggaatggtggatcatacatttgcacccagagctactaaacgctcagtgaccccagagaccattaatttcccggagtgaaggggatgggggtagagctaattggaatttttattatccaggactcatcctaagaagaatgttggcctctcttcatccctggcttagccgtcaggtagaacgcttactcacctgacaccgacttcttagagaagcgagtcttttttgaatggaggagcgatggtaaccccactagggggcgcccatgatcggctcccagtgcacccccttaagggtaagcaggccacatatctagagtctgatagtctgtgtgttcataaggtctagaagtctgtggaaacgccctgaaacctgtagtattatcttaactaccctcttatgttaaggtttacataataggatttttaaacaaatgtgtttaattttttaagatctcttgtattaaaattttcttttggaataagctgtggaaattttgttacaacctggttgagatcaacctctttacaatgacacaaattgtgacattttataaattagatacttcaaaaaaaaaaaaaaaaaa

SEQ ID NO: 234630 - DNA, 676 bp, Homo Sapiens
  misc_feature (66)..(66): n is a, c, g, or t
  misc_feature (91)..(91): n is a, c, g, or t
acagctccccctgcagccagacctccagcgcgggcagctcgggcggcggcggcggcggcgcggggnccgcggggggcgcgggcggcgccgngacctaccactgcaacctgcaagccatgagcctgtacgcggccggcgagcgcgggggccacttgcagggcgcgcccgggggcgcgggcggctcggccgtggacgaccccctgcccgactactctctgcctccggtcaccagcagcagctcgtcgtccctgagtcacggcggcggcggcggcggcggcgggggaggccaggaggccggccaccaccctgcggcccaccaaggccgcctcacctcgtggtacctgaaccaggcgggcggagacctgggccacttggcgagcgcggcggcggcggcggcggccgcaggctacccgggccagcagcagaacttccactcggtgcgggagatgttcgagtcacagaggatcggcttgaacaactctccagtgaacgggaatagtagctgtcaaatggccttcccttccagccagtctctgtaccgcacgtccggagctttcgtctacgactgtagcaagttttgacacaccctcaaagccgaactaaatcgaaccccaaagcaggaaaagctaaaggaacccatcaaggcaaaatcgaaactaaaaaaaaaaaaaaaaaa

SEQ ID NO: 234631 - DNA, 707 bp, Homo Sapiens
agttagacaggaactggcttccctttctcctgttactatgaggacaacccacacctgctcagtggcctaaaatattttaaatatgttcatgacaattatgctgagaatgccaggataacactgatggaacccatgacttcaccaggattgtggtctacatttacaggcctagtactagaactagaccggcttagagagtgggagatatccctctgttgtccatcgaaagataaaaatacaggctttcagccgggtgcagtggtgcatgcctttggtcccagctactcagggggctgagatggggaatcctttgagcccagaagtttgaaaccagcctgggcaacatagtgagagacctccatcttaagggaataaaaaaaaaatcagactttcaatatgagtaacaagttatttttaggccttttatgactttataaataggcaataatgaacaccaagggaagcaaaacactgaaaagaattttaaaatttgttgtagaacattaatacgaaatttgaaactgcaaaacaatgtaaaatttaatgtcatgttgtcatttacttttgtgtatattgtgccatgtttattttcaaagtcctatctagaaattctaaaatgtctaattttcttaattaaaaatccagaattctgtagtttctgaaattcaaaataaatactttaacataccaaaaaaaaaaaaaaaaaa

SEQ ID NO: 234632 - DNA, 646 bp, Homo Sapiens
ctcattttagatgggcacaatattttagatggactgaggacccagagactcaccttgaaggggactcagaagaagatccttgacattgccaacatgctgggcttgtccaacacagtgatgcggctcatcgagaagcgggctttccaggacaagtactttatgatagagacaaggtctcaccatgttgcccagaatggacccgaactcctgagctcaagagatcctcctgcatcagcctcccgaagtgctgggattataggtatgagccaccaccctgacctccaaataccttttgaactcaggcttggatttgaactctggttctatcaactattagctgtgatttcagatcagtgacttgagcaatttgtgccttgtttcattaagtggagatgacaatagcacctgccttgcaagaattatttgatgtggccgatgagaaaaatcagaattatgaaaagtgcttcacaccattcctggcatgtgaagagccctctctaaatggccattatgctaattagcaccttaaagggaaatcattttcatgaaattttatttgaatctggctagagaaaatgctcaccttcttccttgtgttttgcttatttgattaaatgtctttgatttcaaaaaaaaaaaaaaaaaa

SEQ ID NO: 234633 - DNA, 619 bp, Homo Sapiens
ctttccctgcactaacgccaacctgactgcttttcctgtcagtgcttttctcttctttgagaagccagactgatctctgagctccctagcactgtcctcaaagaccatctgtatgccctgctccctttgctgggtccctaccccagctccgtgtgatgcccagtaaagcctgaaccatgcctgccatgtcttgtcttattccctgaggctcccttgactcaggactgtgctcgaattgtgggtggttttttgtcttctgttgtccacagccagagcttagtggatgggtgtgtgtgtgtgtgtgttgggggtggtgatcaggcaggttcataaatttccttggtcatttctgccctctagccacatccctctgttcctcactgtggggattactacagaaaggtgctctgtgccaagttcctcactcattcgcgctcctgtaggccgtttagaactggcatggttcaaagaggggctaggctgatggggaagggggttgagcagctcccaggcagactgcctctttcaccctgtcctgatagacttccctgatttagatatccttcgtcatgacacttctcaataaaacgtatccccccgtaaaaaaaaaaaaaaaaaa

SEQ ID NO: 234634 - DNA, 714 bp, Homo Sapiens
  misc_feature (325)..(325): n is a, c, g, or t
ccctgtgcctcactttcctcatctgtaaagtgcgaataattgctacctctgggtcaatgtgagaatcaaatgagttagaatagtggcatataccattttaatgtttttatttattttttaaaatttattatttttattttttttttaccattttaatgtttttattaaccactcagcatccccagtgcctgacctatagtaggtgctacgtatctgcttttggaatacatgcatgaatgaatgaatgggtatgttgggtgggggagggaccaggggaagggtctgggactgaggggatgcctgggtcactgctgcccactgcctntacagaccaacaaggcttgggccaagggggacatccagggggcaggggccgcctcccgccgtgccttcctgctgggggtcctcgccgtcgggctgggcgtgtgcacgtatgcggctgccctggtgaccctggccgcctaccttgcctcccgagacccgccctagttgcccctacagccctcactgtgaaccctgaggccggcagcccagcaaatctgtgggcagagagtggagaatcttggtggatgaggctgcggcggcggcaggagcatctagaaacgggagcgagctggactggaacccttccccttcctggccaccgctcttcgggcggcagcaacctgagattaaacaccagacacccttgcagccaaaaaaaaaaaaaaaaaa

SEQ ID NO: 234635 - DNA, 714 bp, Homo Sapiens
tgggctgtgggagagttgaccgtattctgggcaagactccatgacccctctgattctgcagtgtacagctgtttgagagcctcatcattttacttttgaaacaggaatgatttctccttaattgcttaaggccggggagcaaagtgtcttaacttctgtctttgactttcccagcgttgagtcatcaacactttgccaattagctcatggtcctggcaacctcagaaacccctgaagttttaaaaactttctcgctccccacgaccccagaatgaaacagctttaaaaatagccttaagcaaaaggatgttatttcattaaatttggtttaatggaaagaataaaagtaaatgaaaaacacaccctacacactagactccgaacactggtaatcagtactgcatagcaaactctttgggaaagaaaacgaaaatgttattgcacatgtaaaatatgaaaacttaactctgctgtgtgttaggcaatcctgtaatcttttttgactcttaaaagaaattcatttctgaaatgcttggttggaagactgtgacaatagctcatgaaattgagtgttatttttttctttcttttttaaaaaaatatgtaaagtgcagtcttctgtattcctgcatattgtatatacctgtatatgttttcctgagcagttaaataacaataaatatgacgttaatggtgaaaaaaaaaaaaaaaaaa

SEQ ID NO: 234636 - DNA, 754 bp, Homo Sapiens
  misc_feature (78)..(78): n is a, c, g, or t
agaccattggaatgaccggtgtccagccgtgacatcttcctgcatagcctgggcaagagccgctccttccgttttccntactctcgggggcccctccctgctgttaggaccggactccttattggttactgatgttctgcggtatcatccacaactttcataaacatcgctccaaacctaggtctggcaggttagagaaagaatgaaaccacccaacaggaataaccatcattgtttggtatctctgagttcaagataattatggcctagtagtggaaagggagtagcatctaattagtatttcttagtccaacttgttgaacaaaaaacaaatgatttagtcagcagaattctgggagttagagttccttgtctaaaattaaaaatccaaatcagtaactgggatagtgcttaacatatagcaggcactaagcaaatgtataaataggtgaaaaatatgaaattatcttttaaaagattagataattttaaggttggcatttgctttttcaagatttacatggctgacttaagatttgagatgttttaaaacaatggtatttaaatacatttatgtgaaaatgggtaacaaattgtgttgtataatttccaagatatatatgtgattaacatccgcatgtatgtatttaagccagttctttacatattgaatcataagcttttccctttttcacattttccttctgatcctcatacagataaagacattgtttttaaaaaaaaaaaaaaaaaa

SEQ ID NO: 234637 - DNA, 664 bp, Homo Sapiens
acccacaacgcttgacctcccattgatccgtctgcgacaccggcagtggctaccatttattgagtgctgatggtgtcacctgggattgacttagtggtctctggcgctagttccgaagttgattctgtctggagagcttaatgcagtgttcagacctcagggtccgaacctgagggtcacccaaagatgagtgggacatagctgtgtgacctcagctgagtgctttcacctctccaacctcagtttcctcttctgcaaaatggggtggcttcatggcaccttcacgtggtgtgattgcgaggaatgaagggatcgatgccttgcaagtagaggagaaggggccggatacatcttagttgttatgttatttaatcatcttggcaaccccgggagggaggaaccactatcattttattttccattttgcagttgaggacaatgatgattccagcacagacagggcccctgacggggcagtaggaaaggagaattgctttggaaggagcataggctggactgccagcactcataggaggcttcgtgtgtgcccaggactgcgagaattaaatacaggacacccagttcagtttgaatttcagataaactatgaataatgattagtgtaagtatatctcaatttaactggaaaaaaaaaaaaaaaaaa

SEQ ID NO: 234638 - DNA, 689 bp, Homo Sapiens
caggcggcccccgggccagtgtgttcgacctgaaggccatcgcctccctgctgcggctgccagacgtcccgaggatcttcctggtgaaggtggcctccaactgccccacagggctcttcatggtcatgttctccatcatctccatggacttcttccagctggaggccgcccaagctggctacctcatgtccttcttcgggctcctccagatggtgacccagggcctggtcatcgggcagctgagcagccacttctcggaggaggtgctgctccgggccagcgtgctggtcttcatcgtggtgggcctggccatggcctggatgtccagcgtcttccacttctgcctcctggtgcccggcctggtgttcagcctctgcaccctcaacgtggtcaccgacagcatgctgatcaaggctgtctccacctcggacacagggaccatgctgggcctctgcgcctctgtacaaccactgctccgaactctgggacccacggtcggcggcctcctgtaccgcagctttggcgtccccgtcttcggccacgtgcaggttgctatcaatacccttgtcctcctggtcctctggaggaaacctatgccccagaggaaggacaaagtccggtgaccgctgcccagacacagactggcaataaactcctactaaatccctccgaaaaaaaaaaaaaaaaaa

SEQ ID NO: 234639 - DNA, 690 bp, Homo Sapiens
cagcacgtaggggagtgaggtggggtgctgctgttggtagggtaggaagtgacctcgcagggtggggccagggcttcgtggccagtgggcggccatttctgtgacattgcaatgttctgcgtggatcgttttctggattcctgccaaggtgtttacttggcctggggaaagagaggaacgcatgaggggcccagaccttgccccctgacccatgatagggtctttgagggcatacataacacatctggagcttaaaaagaattaaactgtagaaataagacttcagtgaaggataatatattagtggaggaaagaccaaatggaagatggtgttaaccatcccacaaatagaaatgagtgttatattaggagcctaaggtgggacaaccacacttccccagagctctttaaaaatagcgcagacactcatgcctctagtatgattcagttcagctcctcattgaaccagggaagagaccgacagacttcacaccacttcttctgttcctgtaattctccactgtgcagcttgggatttcctggagatgtttccataaaaatagagagatgccatcatcactgtcgtcactgtcactgctgtacaataataaaagaaggtgctaggatgccttcctgtaagttttagactagatgtattaaaaagtatccggtaaaaaaaaaaaaaaaaaa

SEQ ID NO: 234640 - DNA, 662 bp, Homo Sapiens
  misc_feature (27)..(27): n is a, c, g, or t
  misc_feature (81)..(81): n is a, c, g, or t
cctaggaaggaatggtggggtggcgtntgggaacttgtgccccctaaacacatttactggcctcctctaatgactttgggnaaaagatgattctgggtctttcccttgacttcttgtttcaattacaaactcctgggctttctggggaggggttcagaaaacatcaaaacactgcagcagttcctaaatgattctcacaagcaaccctgagagagacagtcttgtgagggagatctgggggaggcaggaagctcctcagattttctcacagacccttcccaattccatcaccactgccaacaactcctcccccagagatctggctggagcccagaaaaagaagcatgtggtttaaaaaatgtttaaatcaatctgtaaaaggtaaaaatgaaaaacaaaaacaagcaaacaaacaaaaaacaatggaaaagatgaagctggagagagaggaaccagttgccaaggtagagagctgcccgctcctgccctctggatgacataggggacatcaacaagacggctgccaacctgagaagtcaccaaaccacaaaaataaccttacagccttcagggaaagactaccagctctgtctttctaccctctaatttaacaatgcataagagtcaataaaccctacttttttaaaaaaaaaaaaaaaaaa

SEQ ID NO: 234641 - DNA, 615 bp, Homo Sapiens
gcgctgttgagttgaagttggtaccaaatacacatttaccacttttatatctgggaagtcaacttgccatcgtttcatgataacaaccatttataagagaaaaagacaggacacgctttccatcgttcagtatttgatgacacaaaattccagttctaacgttgggcatcaacttctagcactacgagtgtggctcccacttggacaagataccgagcttcgttatgcagtttttaatattatttattattttaaaaagtaataagcacaaaactacatacattgtatgtcatttaaagtatttatgtcaaacagggtgcaagtgtgaacccaaggactggagcacaaattcctaactgcctggggcagggctaatgttagcattggtgtgcgtctgcctccaaaggaggttctagttgtcagcgagactcaacacagatgacattgaaattcgtttctctcctcatctatcacactggagcaaaactggctatttctgtgaatgatataaaacagggttctctgtaatggtattgtacatagtatatgtttactgttaagttcttgttatattataataaatatatttatagatctagaaaaaaaaaaaaaaaa

SEQ ID NO: 234642 - DNA, 628 bp, Homo Sapiens
  misc_feature (27)..(27): n is a, c, g, or t
  misc_feature (112)..(112): n is a, c, g, or t
caagctaagaggctgtctggaggcttnatatgtgtctggagttaaggggagaggaggagggtagacagggtctctccccaggtgggatctgaatatctgtcctcccctcttnttcatgccacctgactccttcggccccctggctgcctttagctgtggtactgctgacaaccctgcttgctactgccttatccagcacagtgaaaaacttctccagcctggcaaggccacgttggttaatagtccctttcccatgtccagctcctacaaatatgtcccttaatgcatttggtgacatttacacctcactcatgtgctctttccctattcactccttcactcattcaaagcattaaaatcctatgtatatataggatagacaaatatatagatatatagatatatatatatatagcaagagattgatataaaatagtaaatatcattgctgctttgggctgctttggaggaggaggccatgaatatggggaaggcagatctggggtgcaggggtaggtagggaggctgggggacccagtgattcagtacaatccaagggatgcaacgcgggcttgtttaatctttgtgcctgaacagtttttccatgtagagaaaaaaaaaaaaaaaa

SEQ ID NO: 234643 - DNA, 623 bp, Homo Sapiens
aagcaatgtgtgttcttgctggctcagaccactcagcttcattaacagatgcaggagaggtgtatgtttgggaagcaacaagcatgggcaactggctaatgaggctgctttccttcctgtgccccagaaaatagaagcacattgtttccagaatgaaaaggtcactgccatctggagtggatggacacacctggttgctcagacaggtctcttgtggctcagagcataatttggcaataattggtggagtgtgttactcttggggctggaatgagcatggcatgtgcggagatggcactgaagccaacgtctgggccccaaagccggtgcaggctctgctgtcatcgtcaggactccttgtgggctgtggggctggccactccttggccctctgccagctgccagctcaccctgcattggtccaggaccccaaggtcacctacctttccccagatgccatcgaggacactgaatctcagaaagccatggacaaagagagaaactggaaggaaagacaatcagaaacttcaacccaaagccaatctgactggtccagaaatgggggactgtgatagagaatctttaataaagtggcttttccccccaaaaaaaaaaaaaaaaaa

SEQ ID NO: 234644 - DNA, 708 bp, Homo Sapiens
gcacaccagagtatcctctggcacatgcaggcctgatgtttcagaatctcctgaattacgtcagaagtcaccattgtttcagtttgccgagatatcttcaagtacgtcccactctgatgcttctacaaagcagtgtcaaacatctgccttgtttcagtttgcagagatttcttcaaacacttcgcagttgggtggtgctgagcctgtaaaacgctgtggaaagtctgcactctttcaactggcagagatgtgcctggcatcagaagggatgaaaatggaagaatcaaagctaataaaagcaaaagaatccgatggtggaagaattaaagaattagagaagggaaaggaagaaaaagaaattaaaatggagaaaacagatgaaactaggttacagaaggaagcagaatttgaaaaatcggctaaggaaaatttaagagattctaaggaattgagaaattttgaggcattgcaaatagatgacataatggctataaaaatggaagatcccaaagaaattagaaaggaagagttagaagaagatcacaaatgtagtcattttcctgatttttcttattctgccagtagcaagataataattagtgatgttcccagtagaaaggatcatatgtgccatcctcatggaattatgatcattgaggatcccgcagcattaaacaagccagaaaagctaaaaaaaaaaaaaaaaaa

SEQ ID NO: 234645 - DNA, 761 bp, Homo Sapiens
  misc_feature (20)..(20): n is a, c, g, or t
gtcctgtgtagaccatcttntgtaaactgcgagctcctcttccctgtaccctctgccccagtcgtgaccccctaaaagttaaggggtagttggcacctccttattaatatgccagcctagatcccccccggtggaggggcaaatggctgaatccttgtgtgatatttttttcttcgcttgtttatttattcatttatttaattgtatttattcatttactaactttatgtgttaccaattaattttgtttacccattcctttatccatccctcccctccttttcaggtaaggagacaggaggagtaggaggaggcagggcctctccatgccagcctctgtggtccttgcccaaacccatcagcgcaatacttgaaccttctcccaggtaggggcaggaggagccacatgagagagggagaaggaccgtgtttacctttagagttttgttttgttttttccttctgagtttgctgttggtgcaggaataagggaaaggcccaaggtatccaagcctggggaagggcaggccagccagcacctctgccttctcagggacaagagtagtcctttaccaccctcactctgcctgtcccctctcctactctacagcattaaagactgtgggaccaggaccctaagtctcctttccttctgggtggggagttctggggttcttggtgtgtgggagaagttttataattgcttccaaacagctgggtttaaatataaaatagacacactcaaaaaaaaaaaaaaaaaa

SEQ ID NO: 234646 - DNA, 604 bp, Homo Sapiens
  misc_feature (34)..(34): n is a, c, g, or t
  misc_feature (58)..(58): n is a, c, g, or t
catcacatcaaaatgttttgctaatggacatgtnaacagtgtggatggagaaactatnatcatcagtgatagtgatgattcagaaacacaaagctgttcttttcaaaatgggaagaaaaaagatgcaattgatcccttactattcaagtataaagtgcaacccactaaaaaagaattacatgagtctgctattgttaaagcaacacaaatcagccggagaaaacacctattttctcgtgataaactaaagctttttctgaagcaacactgtgaaccacaagatggagtcattaaaataaaggcatcatctctttcaacgtataaaatagcagaacaagatttttcttatttcttccctgatgatccacccacatttatcttcagtcctgctaacagacgaagagggagacctcccaaacgaatacatattagtcaagaggacaatgttgctaataaacagactcttgcaagttataggagcaaagctactaaagaaagagataaacttttgaaacaagaagaaatgaagtcactggcttttgaaaaggctaaattaaaaagagaaaaagcagatgccctagaagcgaagaaaaaaaaaaaaaaa

SEQ ID NO: 234647 - DNA, 690 bp, Homo Sapiens
gtggggagagtcccaatagcagaggaactggtgagcccgggccaaaatttcatctggcatccggaatgcattaaaaacaacccacaaatctgaagctcctcgcaggagagagagagagagagaggagagagaggagagaggagagagggagggaagagagtgacggagaaggagagaaagagacgggagagaggagagagaaagagagagagaggagagagagaaagaacgaacgaacagggaacttgtaaaactaaggggaaaagggcagaagagaggcagcagcgtggtccctgcaagcgtccgctttcctggccaagcagcccccagcacgcctgctttgtggggcagggccatgcggccccgaggaaggatgcggtgagccagagggttccagacaaaggaggggatccccaaggctctgggccagccagtccctgttttactggcaccacggtccctcctaggcgaggacgaagagggaaggggtggagacctccaccttctctgcgtgtggctgcgtccctttacagaatgacaggcccttacttccgagggcggggactaatgtgtaaggcttaacagatccaattccagaaattatctgtgtttttttcaatcaccctcttgtgctccccccacccccccattaaatttcatcttttatcttttaaaaaaaaaaaaaaaaaa

SEQ ID NO: 234648 - DNA, 585 bp, Homo Sapiens
agactcacatgactttctggtttggggtctggtcatttccctttcaatttttgaatctccttctctgttcagttggcttggcaaagtaccctctgttctcatgtcactaattcctgctctaggtcatctttcctttgtgcagcccacattcccaccatcctgtgaactttgttgtacttggtgttgggcaactggtgagtgttgtgacaggctcagacctgatccttcctcaggagcaattggagaccacaaatttaaagcagaaatacctgttaaaagcttggctttccttatatgagtgaggctcccagcttgggtgtggcctcctgggctcacggatcagcttgctgggccagagggggtcttagtaatgtgctagagagacacatgctcccttctcatcgtagagagcctgcatgctgagaggctccctttagacacctgcctctcgctggcttttcctttagacctagccaccagtgttttgaatcatggttttgttttgtttttgcatgcaaaaaccagaacatgacttagaaattaaaaaaaaaaaaaatcctactagccaaaaaaaaaaaaaaaaaa

SEQ ID NO: 234649 - DNA, 696 bp, Homo Sapiens
gaaagcattagaagacaatgagtctgtcagaactgcaaaatatgctgagtgtggatgctctgaaatctgaaaacattacttgtgaatgcttctattcaaaatgcagacacaatgccagaagtctcaggggatccagaactgcagccagtccttgctgggctgttcctgtccatgtgcctggtcacggtgctggggaacctgctcatcatcctggccatcagccctgactcccacctccacacccccatgtacttcttcctctccaacctgtccttgcctgacatcggtttcacctccaccacggtccccaagatgattgtggacatccagtctcacagcagagtcatctcctatgcaggctgcctgactcagatgtctctctttgccatttttggaggcatggaagagagacatgctcctgagtgtgatggcctatgactggtttgtagccatctgtcacccgctatatcattcaccatcatgaacccgtgtttctgtgcctttctagttttgttgtctttttttttctcagtcttttagactcccagctgcacaacttgattgccttacaagtgacctgcttcaaggatgtggaaattcctaatttcttctgtgacccttctcaactctcccatcttgcatgttgtgacaccttcaccattaacataatcatgtattaaaaaaaaaaaaaaaaaa

SEQ ID NO: 234650 - DNA, 650 bp, Homo Sapiens
acaaactgcgtatccctggggatggccttggccataaaagcatttcatattgtgagcagcatgtggactacaaaagaccgtcttggaccaaggaagaaatatcctcaatgaaaccaaaagaattcaccatctctcctgactgtggcaccattcgcccccagggatttgctgctatcagggtgacattatgctccaacactgtacagaaatacgagctggcactcgtggtggacgtggagggcatcggagaagaggtgctggcgctcttaattgcagcaagtgctccggagttatgcaataggaaggtgatgctgtcagtcctgcagtggaagatccatagagccaagaggtccctgccccgggacactgttgctgtgacttgaatttcaggctaggagtgggcccccaagatgaggctcatctttaacaaggtatactcctcagaaccatctccaactcctctctctttttgagagaggcagctgggttaaaatcctggctcagccatttgttgactgtgtctttttgaccaagctacagtcattgcagtactgctgatgagggtggtggtgtcatcgactaatgatgatgtgatcccaaataaaatcctggggccacactcgtcccaaagcaaaaaaaaaaaaaaaaaa

SEQ ID NO: 234651 - DNA, 691 bp, Homo Sapiens
agaaagtctagggatgagaactaacaccactgtgcatcacagtgtgtcagtctgtgccaggcagcttataaatattttttgcctctaatttttatacatttatgaggtaagtatcattttctaggtaaggatgctaatctgtctccaagccaaataacacacagtaaatcatggcaccaggatttgaatctgggtctttatacatcatagcccatgctgttctcactgtattttgctttttccaagtataaccccgttttcacacgaatggccccttcacatatttgaagactaccgtcgtgtccgtgctgaccctttctccctgccacacatggctggagtgcaatggcgcgatctcggctcactgcaacctctgtctcccaggttcaggaaaatggctttgtaaagaagcttgagcctaaatctggctggatgacttttctagaagttacaggaaagatctgtgaaatgctcttctgtcctgaagcaatactgttgaccagaaaggacactccatattgtgaaaccggcctaatttttctgactcttacgaaaacgattgccaacacatacttctacttttaaataaacaactttgatgatgtaacttgaccttccagagttacagaaattttgtccctatttaatgaataaattgtatgtatttttctctaaaaaaaaaaaaaaaaaa

SEQ ID NO: 234652 - DNA, 671 bp, Homo Sapiens
aagagttagaatgaaaactcattacttttccattcccaatctagtgctagatgtataaatctttcttttgattcttcctaacaaaatattttctgggttaaaaccccagccaactcattgggttgtagccaaaggttcactctcaagaagctttaatatttaaataaaatcatattgaatgtttccaacctggagtataatattcagatataaaacagttttgtcagtctttcttagtgcctgtgtggatttttgtgaaaatgtcaaagagaaaacttatatactatttcccttgaaattttaaactatattttctttacaggtatttataatataccaatgcttttatcaaacagaattttaaagagcataataaattatattaaagaaccaaaagttttcctgagaataagaaagtttcacccaataaaatatttttgaaaggcatgttcctctgtcaatgaaaaaaagtacatgtatgtgttgtgatattaaaagtgacatttgtctaatagcctaatacaacatgtagctgagtttaacatgtgtggtcttggtattcttaagggaacttccacattatacatttgatgtattgaccagaatatgtaaaatatgcttataaatcagaaaaataaattgtttctcactaaaaaaaaaaaaaaaaaaaa

SEQ ID NO: 234653 - DNA, 492 bp, Homo Sapiens
attcggcacgaggaatgggaatgttcagatagatacgactttgtcatctattgtctctgcatttgttaaaatagtaatgctatcactttctttagcctctaagttagttgatatttatttacccttgttaccaatgttcttatgttaaaacattcattcattcaatattaacaccttattgtagctaggtattttaataagtaaattaacttcctgatgcaaggagttggtagcatagtacagtgtagtgtttcacaaatataacctgttgatcctataaggtcaaaactattttcatcatagtaagatgtggttttctgttatcattgttttagtgtttgtactgataatgtggaagcaaacaccaaaacaatgaaaacagaaaaccacatgatgggtaaaactgctgatgcctcagcatgaatcagtgctgtgacaccagtctgtactagtagtcattgtattcttcaccatcacaaacttagttgaaaa

SEQ ID NO: 234654 - DNA, 560 bp, Homo Sapiens
tcgggcaccatcttaccctgagtggacctgtttcctttcttgtggcatactgttagctttgatttctctggaagcttttgctttttctgaacctccacgtcccttgctctggtggctgattggactcttcccccacacagggtcatcctcatccttgaacaccacgctgccttcaactagtgcctggtcatccattcgtgcctccaactacaacgttcccctcagcagtacagcacaaagcacttcaggtgggcctcgccttcgctcaggaagggagggttggtcacagccagagccgcggctgttgttttaatgccctcttctttcgtccagtcttctcagggaattaggagattctgtttgtgagcctgggaaattatttttaacatcccttactcctttttaaacttactgtacccagcagtcatctactaaaatcagttttcactgaacagctctcatctcatctcagagccacagcagctctgtaattaaatgtaatttaatccaaactagttctcagactatctgcagcggaggatctttaaaaaaaaaaaaaa

SEQ ID NO: 234655 - DNA, 622 bp, Homo Sapiens
gagcctatactgcagttccagtccaaaagctgtctgctgcacagttccctcttactcagggaagctcagtctttgattccattccagccttcagttgatcagatgaggcccacccacattacagagggccatccgtttactcaaagcccactgatttcaatataaacctcatcccaaaaacaccctcccagaaacatccagaataatgtttgaccaactatctgggtactaaagcccagccaagttggcacatcaaattaatcattgcagggtgtgagcaggagaaaaaagaagagatgagattgccctgagcccaaatccagaaagcagggcacaaccaagagagctaaagacccctgggtaaagccacctcctgcccccaagtccttccctgacgcagacttgctggacaaccaggtgcgtcaacatgcaggtacaggggcagacccttctcccttccctcctcctccatgcctttcacaactatttgctgagtgtcactgtgccaagccctggggctaaaactaatcaagatttggttcttctgtacacttaaaagtggttaaaatggtcaattttatgttacgtatattttaccacaatttaaaataaatttgaaaaa

SEQ ID NO: 234656 - DNA, 716 bp, Homo Sapiens
atattgcttcattgatgacccatgcccttttacccacccaggctcacccaatacacctctccaagttcatgtcctgtgtctcaccttgggctacttcatcttcgacttgggctggtgcgtctactttcagtctgagggtgccttgatgctggctcatcacacattgagtatcttgggcattatcatggcccttgtgcttggggagtctggcacagaggtcaatgcagtcctctttggaagtgagcttaccaaccccttgctacagatgcgctggtttctccgggaaacagggcactatcacagtttcactggagatgtagtggacttcctctttgtggctctgttcacaggagtgaggattggtgtgggagcttgcctccttttctgtgaaatggtctcccccacgcctaagtggtttgtgaaggctgggggagtagcgatgtatgctgtgtcttggtgtttcatgtttagcatctggcgctttgcatggaggaagagcatcaagaagtaccatgcttggagaagcaggcggagtgaggaacggcagctgaaacacaacggacatctcaaaatacactagccaaggcttgctccagattatggattgggttaagtcagccatgggaaccaggttggaaatatgactgttacataattacacttataacaaacttaggtttcaataaagggctaaatgtaaaaaaaaaaaaaaaaaa

SEQ ID NO: 234657 - DNA, 638 bp, Homo Sapiens
  misc_feature (19)..(19): n is a, c, g, or t
gaaaaacggggagatgccnccggagcacagtcccagctccagcgacccaatggcgtgtaactcgccgcagtctccagcggtgtgggagccccagggctcgtcccgctcgctcagccaccaccctcatgcccaccctccgacctccaaccagtccccagcgtccagctacctggagaactctgcatcctggtacacaagtgcagccagctcaatcaattcccacctgccgccgccgggctccttacagcacccgctggcgctggcctccgggacactctattagatgggctgctctctcttactctcttttttgggactactgtgttttgctgttctagaaaatcataaagaaaggaattcatatggggaagttcggaaaactgaaaaagattcatgtgtaaagcttttttttgcatgtaagttattgcatttcaaaagacccccccctttttttacagaggactttttttgcgcaactgtggacactttcaatggtgccttgaaatctatgacctcaacttttcaaaagacttttttcaatgttattttagccatgtaaataagtgtagatagaggaattaaactgtatattctggataaataaaattatttcggccatgaaaaaaaaaaaaaaaaaa

SEQ ID NO: 234658 - DNA, 687 bp, Homo Sapiens
  misc_feature (83)..(83): n is a, c, g, or t
  misc_feature (301)..(301): n is a, c, g, or t
  misc_feature (667)..(667): n is a, c, g, or t
ggagcagctgttgaactgggaagagactctaaactgccagtcatctgtaatataaaccatttgctgtatagacctcctttgtntgcacaccatctcccaccagcctcccctcccccagggccccacccagtgtgggcctgggctctcttgggctttatccatgtctttagatttgtgtttgccttttgtttttttaaccgcgcagttcattggccactctgcacgcattcagtattaccatggagctgggaatcttgctggagcccctggggcaatagcagcagcaccaggcggtctcctntacagactgccttggcccacccattgaacattcggcacgtgaccttgtggggggagcggggattgggcacctgcgatcctctttcctctcttcatctttctcttctgcccttctttttggaagaaggggtttcaaaaccagtttagtttccaaaaagtgtacatttgtggggggggggggtctaatttgagagcgagagtgtgtatgtgtgtgtgtgtaagtgtgtggatttttttatcatttttttaaaatgcagtactctttgtatcagtctgtcatgggtctatagctgtttcagatttttttcagctgtacttgagcatctgaaactgcaagaaagaaactcattaaatgtgattcttcttnctaaaaaaaaaaaaaaaaaa

SEQ ID NO: 234659 - DNA, 650 bp, Homo Sapiens
  misc_feature (72)..(72): n is a, c, g, or t
gacaaggtagacagagagagagagcgagacagggaacgggatcgggaccgcgggtatgacaaggcagaccgngaagagggcaaagaacggcgccaccatcgccgggaggagctggctccctatcccaagagcaagaagggtaagctgggcagaatggggctcggtgagaccaacaaggtgcagggtgcactgcgtgaggaagccttccctcaaaaagatgcctggacctggggctagaggagggtgctgtggtacatggcagccaggggcttcatttcttcttgtggggtggggctcagtgatcaggggctcctggtgcctctattgaagactttgccctgccacttccacagcagtaagccgaaaggatgaagagttagaccccatggaccctagctcatactcagacgccccccggggcacgtggtcaacaggactccccaagcggaatgaggccaagactggcgctgacaccacagcagctgggcccctcttccagcagcggccgtatccatccccaggggctgtgctccgggccaatgcagaggcctcccgaaccaagcagcaggattgaagcttcggcctccctggccctgggttaaaataaaagctttctggtgatcctgccccccaaaaaaaaaaaaaaaaaa

SEQ ID NO: 234660 - DNA, 714 bp, Homo Sapiens
aagagtttttttttaaggaaaatcattctactttgagaactgtaataaagccctaaataacagacactactttgttgagctattgtgaaaaaaaaacaacacattcgccaaggttatatggagcccctgatttccatcaaaaaggtttctataagtatattatttacatttttatacatgataactcttgcctttgtgttgaaaaaaaaaaaagtctcttttttttcccccactcagcagttattggaaatagactgttcccatctgaaaccgtatcgtaatttgcatcaggaaacccaactgctgacattgaggacctgggtgtgttcaattatgattttgctggaggctgtccctcattttaatgctgcagctattgaaccaccttcctgaaacctagctgatacggaatagcagagacatgcctctcaacaccattagctttgcaaatggcttcatttcagtcaacgtcgacttctgctttggccaattgaaaaatgaaaattaaaggagagaagaaaaaaaacacagatgcacttaaaacatgaaaagaattatttatatgataaaaatatatttagcttttcaaagcacaagactgaatagaagtgctctttttatgctttctggagatgttactgttaaatgtctttctacatcaggcttaataaatctgtaatgacatttgatggattgaaaaaaaaaaaaaaaaaa

SEQ ID NO: 234661 - DNA, 680 bp, Homo Sapiens
tggaaatttagaatccaaattttcttaaactttaataacttgtctaacaactctctaatagggactaaaaatcaactcaatatatcatacatttacacttacaaagagtctttatctagacaacataatttttggaaaaataaagcaaattcaactttattggagttattggacagatcagcaaattgttattttaaaaagttttcttgtttaggcaatttggtaagtggtttctagttataaactagccactgttgattaacttgagaaggtgaagcaggggagttctgaagagattacctagagctacataaccctaagttaagtaaaattttcactttcattcttttcattctctcataaactggttgaaaaaacactgtactaccaacaaaggtgtcagttgcttgtgctgccctgtctatgttatgctctgaataggtctcggtaaagattatatggaaatactataaagaatacataaggtaaaatactagtcagaaagggttcagaagaagttagcatcaactgtatgaaaattctaggtaaagctaagtactattgagttggaaaaaagtaattctatcatgtttgcttgttttcctctactgtttttaatgtgatgttgtaatatattttaaaaataaaacttgaaaacgttgaaaaaaaaaaaaaaaaaa

SEQ ID NO: 234662 - DNA, 737 bp, Homo Sapiens
acgaggacaccaccagcttggatcgccctcgccgtgtggaatactttgtagataagcaactccaagtaaaggctgtcacctgtgggccgtggaacacctacgtgtatgctgtggagaaagggaagagctgacatgtgtacgtatatgtatatgcaacacctgtgagacccccattcaggtcaaggaaaaccattgcctgcaccccaagggccccatatttgcccctccccatcacagtcctgcccttcaccctcaagcacggtcctaaacttgtctgcactttagaaacacctggagagcattgaaaactctgctgcctaaggtcagcatcaatcaaaacaatgaaatcaatgaaacaatgaaaccagagcttctaggtgtgtggcctggatagtggtagattcaaagctccacccacctcatcccaggtacatttgatgtgcagctgagattggggcacattccaggtcatcgtcttctgtcagtcatttccctgctttcgtttgaattttaccattcttgtatgcagccttatacgacatagttgtgtttgcttttgagtgttagataaatggaatcctgtgtatgtgcttttgtgtcgtttttgtcactcagcattgtataatccatccttgttgggtcctggagttcatttttaatgctatatggtgttctgttgtatgaataatacctcaagtgatacagccttgttgatggtcaaaaaaaaaaaaaaaaaa

SEQ ID NO: 234663 - DNA, 749 bp, Homo Sapiens
  misc_feature (117)..(117): n is a, c, g, or t
  misc_feature (294)..(294): n is a, c, g, or t
ggggtccacttgagcctgatcgagtgcggcccagtgcacaccgccttcatggagaaggtgttgggcagcccagaggaggtgctggaccgcacggacatccacaccttccaccgcttntaccaatacctcgcccacagcaagcaagtctttcgcgaggcggcgcagaaccctgaggaggtggcggaggtcttcctcaccgctttgcgcgccccgaagccgaccctgcgctacttcaccaccgagcgcttcctgcccctgctgcggatgcgcctggacgaccccagcggctccaantacgtcaccgccatgcaccgggaagtgttcggcgacgttccggcaaaggccgaggctggggccgaggctgggggcggggccgggcctggggcagaggacgaggccgggcgcggtgcggtgggggaccctgagctcggcgatcctccggccgccccgcagtaaaggcttcctcagccgctgtctcccgcgcccttctttgtcccctgggtctgtgtggtccctggggatggggcggcggtagcagctgtgggtggctaattaagatagatcgcgttagccagttttaccagcgcagctaggcgcgatggctgtcgcctgtaatgccagcgctttgggaggcggaggcaggaggatcgctcaagccccggagttggagaccagccagagcaacacagtgagacccccatctctacaaaaataaagaaaatttaaaaatcaaaaaaaaaaaaaaaaaa

SEQ ID NO: 234664 - DNA, 693 bp, Homo Sapiens
tgcaaagacccaagtgcaattggaaagaagcaggttccctgttttgcctcaatgctaactaaaaagctgcatttctttccaaaatctaattaattaatagaggctatctaatttgacactctgtattgaaaatggctttctcagccaggcgtggttactcacacctgtaatcccagcactttgggagtccaaggtgggcggatcacctgaggtcgggagttcgagaccagcctgaccaacatggagaagccccgtctctactaagaatgcaaaaaaaaatttagctaggcatggcggcgcatgcctgcaatcccagctacttggaaggctgaggcaggagaatcacttgaacccaggaggtggaggctgcggtgagccgagattgcgccattgcactccagcctgggcaacgagtgaaactccgtctcaaaaaaaaaagaaaatgtctttctcttccttttatataaatatcgttagggtgaagcattatggtctaatgattcaaatgttttaaagtttaatgcctagcagagaactgccttaaaaaaaaaaaaaaaaagttcatgttggccatggtgaaagggtttgatatggagaaacaaaatcctcaggaaattagataaataaaaatttataagcatttgtattattttttaataaactgcagggttacacaaaaaaaaaaaaaaaaaa

SEQ ID NO: 234665 - DNA, 708 bp, Homo Sapiens
  misc_feature (70)..(70): n is a, c, g, or t
cagagagaaacaccgtagtgagaagggaagtggagcgctgactgctgtgtgccaggagagtagaaaggcncaggtctgtgccaccacccctccccaaagctcagtgcacccagagtctcacagggaccaacacggtgcctcggtcctgcttccatccatgcaagtgtcctccgctcaccagggtgttctgaggcagctcaagtgctctcccccaagcagcacgcagtcaccgctgccagtgatgaacacacgcacgggctaggcacatggagcccaagcacactgccacctcggacacgggccccggcccagcgactgccttgtggtgtggccgtcctcatctgccacaggaagacagacttcgagggacctcttgcctaaggcctcgctgactcaagggtagattgagatttggacctaataggctccagaactgtgctttgagctacagggtggctgcaggatgagacggatgcagttcaaagtgcaggatgtgctgcctttattacctgctttcccgctgagcaaatccctgtcttgagtgggaagtggcatctattcccccagccatctgaaaatgctgtgttcataaccaaataggtgctgtagcttcctagccatcccgctcttacccgcccctctgcaatgtaaaaggcgtccactgttgtgtaaatacacagtgctttccagaaaaaaaaaaaaaaaaaa

SEQ ID NO: 234666 - DNA, 692 bp, Homo Sapiens
ggggcctgtcaagcgcccctggcccgaagcagcccccgacggcaagcacaggcccggagctgctgctgctgcctctttcctccttcatgccctgcaaggcggctgcaccagccagggtgtcagcacagcgggctactcctagggataagcccccggtcccctcatccctggccagtgtccctgacccccatctactccttcctggggacttctcagccaccagggctgggcctggactttcaactgcaggcagcctggaccttgaggctgaacttgaggagatccagcagcaactactgcactaccagaccaccaagcagaacctctggtcctgtcggcggcaagcgagcagcctgcgcaggtggctggagctgaacagagaggagccggggcctgaggaccaggaagtagagcagcaggtgcagaaagagctggaacaggtggaaatgcagatccagctgctggcagaggagctccaggctcagcgccagcccattggcgcctgcgttgcccgcatccaggccctgcggcaggccctgtgctagcgtgttcgcaccaggaacgcaggtgctgggctgtcggggaggcctcaggccacctccaggaacagaacacagttttaagtttgattttttttatttcaaaatgctttgcaattaaatgaattactgttcaaaaaaaaaaaaaaaaaa

SEQ ID NO: 234667 - DNA, 623 bp, Homo Sapiens
  misc_feature (27)..(27): n is a, c, g, or t
gaccagtagcctgagaggggctttttntaggcttcagagcaggggagagctggaaggggctagaaagctcccgcttgtctgtttctcaggctcctgtgagcctcagtcctgagaccagagtcaagaggaagtacacatcccaatcacccgtgtcaggattcactctcaggagctgggtggcaggagaggcaatagcccctgtggcaattgcaggaccagctggagcagggttgcggtgtctccgcggtgctctcgccctgcccatggccaccccagactctgatctccaggaaccccatagcccctctccacctcaccccatgttgatgcccagggtcactcttgctacccgctgggcccccaaacccccgctgcctctcttccttccccccatcccccacctggttttgactaatcctgcttccctctctgggcctggctgccgggatctggggtccctaagtccctctctttaaagaacttctgcgggtcagactctgaagccgagttgctgtgggcgtgcccggaagcagagcgccacactcgctgcttaagctccaccagctctttccagaaaacattaaactcagaattgtgttttcagcaaaaaaaaaaaaaaaaaa

SEQ ID NO: 234668 - DNA, 726 bp, Homo Sapiens
cagaggctccggagccatgcaggccgaaggccgggcacaggggttcgacgggcgatgctgatggcccaggaggccctggcattcctgatggcccagggggcaatgctggcggcccaggagaggcgggtgccacgggcggcagaggtccccggggcgcaggggcagcaagggcctcggggccgggaggaggcgccccgcggggtccgcatggcggcgcggcttcagggctgaatggatgctgcagatgcggggccagggggccggagagccgcctgcttgagttctacctcgccatgcctttcgcgacacccatggaagcagagctggcccgcaggagcctggcccaggatgccccaccgcttcccgtgccaggggtgcttctgaaggagttcactgtgtccggcaacatactgactatccgactgactgctgcagaccaccgccaactgcagctctccatcagctcctgtctccagcagctttccctgttgatgtggatcacgcagtgctttctgcccgtgtttttggctcagcctccctcagggcagaggcgctaagcccagcctggcgccccttcctaggtcatgcctcctcccctagggaatggtcccagcacgagtggccagttcattgtgggggcctgattgtttgtcgctggaggaggacggcttacatgtttgtttctgtagaaaataaaactgagctacgaaaaaaaaaaaaaaaaaa

SEQ ID NO: 234669 - DNA, 753 bp, Homo Sapiens
  misc_feature (43)..(43): n is a, c, g, or t
  misc_feature (57)..(57): n is a, c, g, or t
tccgctccatgtctccagtcatcagagcactctacctgtatantcatccccatttancagataatgacactgaggctcagaaaggttgaggataagcccactttcctgtcattagtggcagccccagatccagacctaggcctcctggcacccagtccactggcagtggaattgctttcctgagaatcattctgaggctgggctattgcttctcccttgcttcaaagaatctagcagcgggggataggattttgcaacaaaaagctgacccagaggccatacagagcaggaatatcccattgccccctcctccactgggttcagagggtaagaaagcaccctccaataaacccaggctccaggccgtgggggctgctgaaggctctttccccgcaagggccaggtgttgacaccttaaagctggctgcgcccccagccccactcttggctgtgctggccaggtgactcctagttcttggccacatcatcagaaagtcaaaggtctcactccaggtttggggctccttccttccactcccctccctgccagagtctgtcttggccagtgccagcctcgatgctttggttttgaccccacctgatcctcctttcctcatgcagcacaagtgctcaccggggccagagccagggcatggatatgacaagcagggcagcctggacactgccctcacaggacagcgccaataacaatacagtgtctgagtatctccagggaaaaaaaaaaaaaaaaaa

SEQ ID NO: 234670 - DNA, 736 bp, Homo Sapiens
  misc_feature (74)..(74): n is a, c, g, or t
  misc_feature (95)..(95): n is a, c, g, or t
atcggcatgcagtttttgacccgaggactcaaaattcttattcagcacagactatgaaactcatgagtttcatntgccaagtggagtgaaaagtntgaatgttcaaaaggcatctactgaaaggattaccagcaatgctaccagtgatttaaatataaaagttgatgggcgtgctattgtgcgtggaaatgaaggtgtattcattatgggcaaaaccattgaatttcacatgggtggtaatatggagttaaaggcggaaaacagtatcatcctaaatggatctgtgatggtcagcaccacccgcctacccagttcctccagtggagaccagttgggtagtggtgactgggtacgctacaagctctgcatgtgtgctgatgggacgctcttcaaggtgcaagtaaccagccagaacatgggctgccaaatctcagacaacccctgtggaaacactcattaaaagaaccccagaggtcaccaacatgtttatatcttgacttgacttttttatgcatgcaaatcattgtttttacagagtttgtgataactcataattattttaatggcagagcactgctgtatctgttttatggtctacatagttaaaatcttctcagagagcctaaattctaatacattttattaatttatactaatcttcatatttactgttctctaaaataattatgagaagcaaataaaatcaaaagtcatgtttaaaaaaaaaaaaaaaaaa

SEQ ID NO: 234671 - DNA, 688 bp, Homo Sapiens
aggagtccccgaggatgccgtatgcaagcctgggggacagccagggactcagaggcacctcagaagaagagcttggcattctgacgcataaaaatacagaaagtgaggtgggaagtctgaggtaattatggcctcagaaatgtatggatgtgtgttattttggattcatgcacaggtttccttttgttagactcttagaaatctctttctcccttgagattagtatatttacaaatgagacattgcatgaacggtcttaggaagaaagtgcctgctaaatcttaggtgttctttgttcaaactaagaccagggttgaaaactatggcccagggaccacttccagcctgactgttgttttgtttaatttaaaacaactttatagatagagaattcacatatcataatgtttgcccatttgaactttatgactcagtggtcacaaggtgtacgacgaccatcaccatggtctaatcccagaacgttaccacccagaaaggaaaccctgctcctatgaactcacgttgccttctcccgccagcccttggcaaccatggatccgctttctgtctctatggatttgtctgttctgggcatttcctataaatgggatcatacaatttgtgttcttttccacataatatttttgtaaataaagttttactggcacacaaaaaaaaaaaaaaaaaa

SEQ ID NO: 234672 - DNA, 745 bp, Homo Sapiens
aactgtgataaattaggtttattagaaatatctgtacacattgcctccatggtggcgtaagttctgaaaaatatatgaccgtgacaatagtttatcatcatcattattgttattcaaaataagggtaaataaatctctgtattgccaaagtgacttaaactgttctgatgaccacacagtgtgatttctttagcagagaaagttggttttaaaaataaatagtaccacttttctaagactgtacagtttacaaataaggtttttttctttgttgttttcctcttctattaagttttagtgaaaagcctaattacagaaaattgtgcagatactagtgaagatactagtataagtttaaaggaacatgtgactgtaaaatctcacatttacaaagtgcttgatctcttcatatttcacacgcatgttttagaatagattttagggagtgtttaattcattatccttttgacttaaaatttttgttaccaacttcctaggacttagataatatataaataagtacaaatcccaggggaagtgttgtgatgctagactaaaaggtgggaatgtgctgctgttccgtgagccttgttccattgttgaaaatttgatgcctcagtgtttattcagtaccacctcatggagcttcaatgtaaatggattatatgtataattggtaatttgtatagttttgtagattgtagattaaatgcactcatcatgtcacaaaaaaaaaaaaaaaaaa

SEQ ID NO: 234673 - DNA, 647 bp, Homo Sapiens
  misc_feature (34)..(34): n is a, c, g, or t
  misc_feature (523)..(523): n is a, c, g, or t
tgggcctttccctgaggactggatggctggagtntgggagcctgagttgacagaggaggctaagcccgggcagctactttgttccagaaatctaaggtccctggagggaggctctgctttgggagggggaagggagctaacattgcagagcaccaactgtgaaccaggtacaatggcagagcctttccatacctgtactcacaactagcgggtgaggagtcaaggcaaataggtgtctcatagctccccatatctcggcagtcgaccacctcctcctttgattctctgatgtcactgccagttctcctcctattgctctgacctgtctttctctgtgtcctttgcaaactcattctcaactccttagactcagtcaagtcccccagttacacacttccatggtactatatatcattccttcagagcacttaacacagttatttcctatgtatttgtccagtcatttgaataatgatcctagtttcattggatggaaagttccacaaggtcagtgaccatttcnatctgtgttcaccaatgtgttcccagtgcccagaaacaatgcctagcataaagcagctgttttgtaaatacttgttcaatgaatgaataaatgacaaaagaacatcaaaaaaaaaaaaaaaaaa

SEQ ID NO: 234674 - DNA, 735 bp, Homo Sapiens
  misc_feature (66)..(66): n is a, c, g, or t
aacactagcataagatgtcaatatgtctatccatatgtcaggtccatactcaactcaagcttctgnttaactgctgatctattggcaactccagttcccaataagttcctcatctccttctgagaccacctcagtgtggacttaatcgtccacatcactgtcagcattttggttaaaaccattcaacaagtctccaggaagctccaaactttccttcatcttcctgtcttcttctgagccctccaaactcttccaacctctacccgttacccagttccaaaggtgcttccacactttcaagtatctttatagcaatgccccactcctggtaccaaattcctgtattagtctgttttcacactgctatgaagacatacttgagactcggtaatttatatagaaaagaggtttaattgacaaaaaagctaacaaagtgagccctgattcaaaaatgactgtctacacttggcacatgagggactttatgatattaagagattaattaaacaacagtggatggggaggaagaacagacttttgagctcttcccaatataggaatgtgttagttctaaaaattttcttaagttgtttgcttggaactcagagtatatttttccatacgaaaaattcagaactattttatttatgatatgggctaaaaagacttctgtaatctagcttggaaacttaataatcattaaacttattttcaatgaaaaaaaaaaaaaaaaaa

SEQ ID NO: 234675 - DNA, 613 bp, Homo Sapiens
gcccccgggtgctaccagctcctgctgtaccaagcaggccggtgccaacccagcaactgccgccggtgcccgggggcctatcgggcactgagggggcttcgaagctttatgagtgccaacaccttcggcaatgccggcttttccgttctcctgcctggggcccggctcgagggccgctgtgggcccaccaatgcccgggtcagatgccatctgggcctaaagatccctcctggctgtgagctggtggtcggcggtgagccccagtgctgggctgaggggcactgtctactggtggacgactcttttctacacacagtggctcacaatggctcccccgaagatgggcctcgagtggtcttcatcgtggacctctggcaccccaacgtggcaggggctgagcgccaggccctcgactttgtcttcgccccagacccttgaaggaaggtgctcccttcacacacccaggctggagagacactgcgctcagggacggcttgatggtagccaggacctcctctctactgcgggggtgggcgggggcggaggatgggaactggctagtgagcactgaaatataaattctgaatcctctcctaaaaaaaaaaaaaaaaaa

SEQ ID NO: 234676 - DNA, 587 bp, Homo Sapiens
catccccagcgcgggaagcatccgtgagacccgggcggcccctctccctggtcttcactgaaggctgccccggggaatccctgtggatgtcccggattctattaggacagaaccagagacgcgggaccttagccccagctcaggcgccggtgccgagcggacttggagagatgatctctggagaccccggaatgttctttttaaaactttcctcggcttcgtggtgaccagtaggtgaacgtgaaattgacttaacatgcgacagaccagtttggtttgttgcccccaaaataccctccttccccccaccttttactgagaagacttttttggggggggggcccaaacaacttgggaaattgcatcaagcgtccgaacatgctgcttacaactttagaaacgcaaaatgcgttgttgtgggagttgtgtaatttttagtaggtgctcaaatacttgctgaacttggtgtctatttttaagtcttgcccattgatgtaaactgtccctaggtcacgtgtatcttgaggtctaaaagattatttatgcaataaattgaaattcccatagccaaaaaaaaaaaaaaaaaa

SEQ ID NO: 234677 - DNA, 699 bp, Homo Sapiens
agtagaagtttaaaactgttcaaagaccaaagcacaacatttatctagtgtttgatcctagtataaaagaatggcaataattatgtgaacaggaattacatgcccttagaatgtgcattttttaacctattaaatttgccaatcttgcaaactattgtttacttgtattgcataattagatactcatattaacatattgaattcagaaaaagttagcaagccaagatgacattctctgtagcactattttaaattataatgaatgatcacataaaactctttagtatttatctaaagtaattattactctacttcatttgtttatctaaatcagtgatcattgatgtttgaactttttggcttaaatgtttattttgtttatactacttgctagagtaaaataaatttaatacatgaaaaactctacacaatttaaaataggttataatttgtcaatacttatgttttaaaatatttttagaaggaggagtgctgtatattattaaaacaattttctgaaattgtttaatattatctttgattttaaaatgacatatatgtggatttacaatgaatcaaattgtcctaaaagatgtcagataagaaatgcaagtgctttgcaagtctaatacttaatgttcttttatgtacaacaaaaatttaataaattaactttaaagcaaaaaaaaaaaaaaaaaa

SEQ ID NO: 234678 - DNA, 773 bp, Homo Sapiens
  misc_feature (91)..(91): n is a, c, g, or t
aattcattagtgtgaaagacgtgcgagtgagttttctggccctgaagcagtctgcactgaaaggtacccaagtgccctgaaacagtgtagngaaagacctgggaaacactggaccaaaaaagcctgatctcatggagacctgcatggccctgttagagatggcgtagaagtgaaagtcttaaagggagcattagagatccttttaatacacgactgagtgccagcttatttgtgatgccccttcccagaccaggttaggattcctgggaaggccgcggattccggccctggaagaggcaggatcctggagcagttttgtgaggcttttgtgctcccatacgccccctggtggtgagtgtaaagaagactttgcctctcacaactacatgtatgtgtggcatttttgttagagatgagaaaaggattgagaaggataaactggaatcctggtaagaagcctttatgccagcccgacacctgctgtaattggggtgcatgagctatggagtcagatagttgttgggagggggaggacaagaagtctattgtttggactgtgtttgtctcacaatcaccacaaaataaaagtgtagaaaatgcttgtggtgtactaactcttttctgtacttaagttactcagattaacatgcacttctaattctaaacattttttttggagtcatcactgtcgctgtttaagtagaacaatgccaacgatgtatgagaaacagggaataaatcaggatttgtgtgtgaaaaaaaaaaaaaaaaaa

SEQ ID NO: 234679 - DNA, 744 bp, Homo Sapiens
tcagaggcgtcccctgcaggagagcttcatgcgcctgtggaggcctgtgggactcggagcaaagcatggacaactggctgagtcggctggacggctgccgctgactgtaacatgtaaagcaggcactgagcaccacctgcctggcagtccagggcatggagaggcacagacagcaccctgcttgtgacttcactggcccaactcatcctggaccccttgagcaagaccatggctggattccaggaactggtggagtggaagtggatccaggaaaatgccgtgtgaagggaggactcagatgcactccctgtggtctgggctcaaccagccaaaagagcaacaaagactccagaacccactctacctcctcaatcccttggccatctgtggagccccagagcctgcggctgtggcaaggcctgtttctgcgctggacctgctcacctgagcctgcagaagctgcatgggggaagagtgtggcaaatagtgacaggaagggagaagacagaagcctctcagccaactgcttcagccgagcccctattctaagcactggctccttggatagcagctgagatgttcctgaaacctctgcaggccccttaggacctttacaccttggatgagggtgcctgcaacccaggttagccaaaagtactgagggtcttaagtttgaagtgtccaaagtatagggaggtctcaataataaaagtctccatgatcagcaaaaaaaaaaaaaaaaaa

SEQ ID NO: 234680 - DNA, 755 bp, Homo Sapiens
cggcacgaggtgatttatagacttgatagtatataagaggcctgtgcaataactctagtaatatgtaactaaaagcactgaactattgtaacaactagattgattattacaatttatatacattttacagagattaaaattttcaggatctgtctattctaaagttttcaaataaaaagataaatttcctaagagattatatttagaagcaatgataatatatgaaaaaagcccaggcttatttcatattgtttagatgattttctgtctaattgttttgtgttttttgtcttccttattatagtaattcagactaatgacccacatttaaaatatgcaatagtggctgacgaagtagctattgtgtattataactaagaaaaatactgatcagtagtttcctgttcagcaaaatcggaagaataaggaggtctttaaagatgtactttttcgtttgtttgtccttgcttgcatcttcctttgcatgtgcaatatacaaataagcctttaggtgaaatgtatttatccctgccttttgcaacggacttaccctaaaagtcatcatcaaaacactatgtcttttttttttctctttttctattgtagtgaattagatatatgtgcacattctatgtttatgtttaaatgatttatgttttctgtatcacaagttttcaaattaaagtatggagaattattgttagttgcctatgttgatttgaaaacttgtgatacagaaaaaaaaaaaaaaaaaa

SEQ ID NO: 234681 - DNA, 637 bp, Homo Sapiens
tgtagaggcaagcaagtttttattttttaaaaagttttgagagaataatttataagtttctgtgcagcaaagtggctaattactcattaaatacaggaaaagaatgtagtatctaaatccagctttttcttacctctggtacacttcagattacttacctaatacatattgagggcttttaacccttagttttatcaatttttctagttttattttatttttataaaataattgaaaaagaaccaaaaatgaattcagaagttccatagatggatttttgccccttcttaattttctcccacaatgaaaacattttagaagacattttgaatcaaaatgtattatgaccattgaaagttctctattttctaagaagctgagcagctccaagggcctcgtttcaggtggtactctatgtattgtctgtgggcttgtttctacctgtacagtggaaccatgtgaccatgtcttgtgcttgcaatatagaaaccatgcagtgctgttttgtgaattggcagtttctgtataaactcttatttatatacattggcctctctgtatgattttccatttgctacatgaattgtaaaattaattataaaattatagtacctgctaaatacaaaaaaaaaaaaaa

SEQ ID NO: 234682 - DNA, 444 bp, Homo Sapiens
cctggggtgtttctttacatatacttgaaccagaatagcatatcacagcaagttgaacacagaagcatgtcggcagatccgcctgtcttctgttgagtattgaagatacatgcaaaaatgtacaacatggccattttctcgctggtttctttttgaaaataaggttattttcataaaatattacttaacatgaagtgaacctattgctaatttaatgaataagtaaatatttttaaaattttcaagtatggtcagtatcaatggatataacccccataatcaaagctctttagggttctccatactttctaagaatgtaaataggtcttgacaccaaaaaaatggaaaacacgtggacttggaagtttttctcgaatgggctggatgtgaccctgaccctgtttttaccaagcctccttggttttttccctcttttctctaaaa

SEQ ID NO: 234683 - DNA, 402 bp, Homo Sapiens
tgcctgtggtcccggctactcaggaggctgaggcaggagaatagcttgaacctgggaggtggagcttgcagtgagccaccgagattgtgtcattgcactccagcctgggcaacaagagcaaatctccatctcaaagaaaagacaagacaagacacctttgaggtcctcttctggtcctctgcaccagaaagcttgggagagtggggacatatttttcccccattgctgcattcctagtaactagatgtgtgctgcaaaaaaaaaaaaatatagtttaaggaatgaattggtagctattgttatatgtaaatgtgaaattaatatctacaaatacatatctgtatttataaattgtacttacgtagagaaacaaaaaaataaaaataattgtaattacaaaaa

SEQ ID NO: 234684 - DNA, 385 bp, Homo Sapiens
tgggtttcttcagctcaaggcaggagctttcctgcacctggtttaattctaagaagtcggggaaatgaagccaaacaaggagtcacataaacaagccatttttgcaggaagtaatatgtgtctatctctatagcagttggggaggagatgactgcattgtgaaaaacctccagactgcctgtctgcattggctgttgagaagtaaaatgctaaactgtctcttaggtaaatctctgaatcacgaaaaagttgtcagtccagaactggaggcactctggccttctgcataaacctcctacaaatatcaggttctggacaaccagcacttcttcagagatgaataatcaaaaggaattcattaagcttgactgccacaaatgtttgg

SEQ ID NO: 234685 - DNA, 592 bp, Homo Sapiens
tagccaaattaaatagtacatgagaaattcagagtattagacagttttaaggcattcaactgagaaaactttatttgtcaaagtcagaaaacattttcatcttattgagagatatgtttttaaacttttatcatcatttgtaaatgtggaagttggtggattgctgtgtttttgcatgattagcatgggagtctgttggagcaagaggaacatgcttgttttgaaaactcgagatgatgagggtggtacatgcagtgtgttctctctttattggcttctaaaccagttttgtcctttaatgcatgtcaaatatttctcccatgcttctcttagcagaaaagtttttacctataagacagggcaccttttaactctaaaactagtgatactctgtgacatagactttgtcttataaacattttttcattttttattttgaaaaattgcaaatctacagcaaaagtaaaacagtagtagagtgaacaccatgtaaccctcacctggtgttaacattgtaccctatttgctttaagttgtatgtatttctgaacttggcaaaattggaaattaaaatttttaaaaattaaaaaaa

SEQ ID NO: 234686 - DNA, 649 bp, Homo Sapiens
tcagcagattaaaatggaaggggtgtgtaactaaaaacataaatgttaagcattagtataaagtaacttctgtaataaattatatcgcatattttttcagataggacagctcaaccttacgatgcctacctgatgccaggtgatgcttattttcttcctaaagtaggttactggtcatatcttttttccaaatattaaatgcaccttgccagatattctcctgcagctctaaggaaaggaaatcaatttaaaaataatttgtagaatctactattgagccaccaaagtataattccctaaaagtttaagaaaccctggcaattaattcagcataaacatatcctataaacagcaggagaggttcagctttctgattttactgtggaccttttcctaagggcattcatgaatgcagcaacagttttaactatggcttacatttattttaaatttcactaaatacaaatcttgattgtcatgccagttttagatcttattaattttcagaatggataaattcaaataatcataaattacggtaactttttattataccaaggtgttctaatgccatcatatgaagacagatgcttcaaacaacctgcattaaattatatttttaataaaattaaaatctatttttaaccta

SEQ ID NO: 234687 - DNA, 648 bp, Homo Sapiens
atcagctggaattagtcaatcgagaaactaacttcaacaaagtgtttaactcaagtcctactgttggtgttattaatccattggctaagcaaaagaagaagaatgataaatcaccaacaaacaggtttgtgagtgttcccaatctaagtgctctggaatctggtggagtgggcaatggacatcctaaccgcctggatcccattcctaattctccagtccacgatattgagttcaacagcagcaaaccacttccacagccagtgccacctaaagggcccaagacatttttgagtcctgctcagagtgaagcttctccagtggcttctccagatccccagcgccaggagtggtttgcccggtacttcacattctgaaagaattgtgttggcacagctctgtatagactgttactaagagcatgactttatacagattgttatgtaaataggctttcctatgtcaaacactgtgaatgagaaagtatttgtctctccaacttgaaaatgcactgtatttcctgtgatatttattggaatcattctataaggtactatattatgtgtgtaattataactgttatttttatttgagatggaagagtctttaacctttgtaattactgcataataaattttgttagaatcaaaa

SEQ ID NO: 234688 - DNA, 582 bp, Homo Sapiens
ctcaaggctggagatagaagcttctaaaacgattagagggaacggttcctggtgctcacacagggccaggaacagtgccagttcctatcagccacaccagaaaactcgtagttcacgggcactgagtagcgtactcaggaaaatcttgcctcattagcagaaaatatttagcccttgactgggtgctgctccacacccaccttacaaatcatgaaagcaagacccaaaggggtcaaactctttccaactaacttaactgcatcccaggataaagccctagaaaattggtagaaataaacaaaaaaagagcacctaacaatataaattcacaatgtctggcatccagtcaaatatgcatgcaaaaagataggaaagcagtgacccataatggaggaaaataatcaactgaaactgacctagaattgacacagatgttagaataagcatggaaggactttaaaacatttattatgagtgtattctgtaaagaggtacatagagaccagatcaaagttttaaagatgaaaaatgtgattaaggcgaagaatgcactggatgggattaatagttgattaaatatta

SEQ ID NO: 234689 - DNA, 952 bp, Homo Sapiens
  misc_feature (152)..(152): n is a, c, g, or t
  misc_feature (944)..(944): n is a, c, g, or t
ccggccccggggttccttgcaccaaaaggtggcggtccccccacaggggggccctgcccagggaggttggtccctgcggaccattggggttccactcaggccgggagaaagggtcccttcccggttggtccgtggggttaccttccgcccgnccgttgggaacgccgggatcatcgtggagccccatccagtccggagggtggagacaacccacgcctttcgatgattctttcggaagctgagagacatcgccaggaaagcatggctgcgccttcttggtggacgaggtccagaccggaggaggctgcacgggcaagttctgggcccatgagcactggggcctggatgacccagcagacgtgatgaccttcagcaagaagatgatgactgggggcttcttccacaaggaggagttcaggcctaatgctccctaccggatcttcaacacctggctgggggacccgtccaagaacctgttgctggctgaggtcatcaacatcatcaagcgggaggacctgctaaataatgcagcccatgccgggaaggccctgctcacaggactgctggacctccaggcccggtacccccagttcatcagcagggtgagaggacgaggcaccttttgctccttcgatactcccgatgattccatacggaataagctcattttaattgccagaaacaaaggtgtggtgttgggtggctgtggtgacaaatccattcgtttccgtcccacgctggtcttcagggatcaccacgctcacctgttcctcaatattttcagtgacatcttagcagacttcaagtaaagaagccatttccactacagtgagaaagcccggatcccaacagttgtcaaattgattagtttgcctaattcatgttttcacttaaaagtatcagaggtgaaaaaaaaaaaaaaaaaaaaaaactcggactagttnttctctct

SEQ ID NO: 234690 - DNA, 711 bp, Homo Sapiens
tttttttttttttttttatatcatgaaaaaagatttagagaattacaagagtttaggttaataggaaacacaaatggaggtggaaatttaaaaacaaaggaatggaactcaactctccacagattgaacccacacaggtgtcactgtttactgaattagcaccacttttgtgcagtgaagacacccgtggctgagatttcttaaatctcactttttccatgcttttcttctgacaaactgaccacggagggagagctctcctcccccctccctatcccagactgctgctgctttcctgcaattctggtggtctttttgttgcctcatctgattgagactttggggaaacaacacagcagcaaaccaggacatatattccctctaaaaacagcttgaaaattacaacacaaagatctcaataattatgagatgcagtgattttttcttttttttctcttcccccggccgcgcttggaggtatctctaggttagactcctctggggctggaatgacgtgaagggtaaggtcgcccagcttggccagggcagtcgggggcaggacagcgggagagccggtccgaccccagcccagcctgctgggtcagcattcatcagagaggtcgtcgctgcccgggagctccgcggcttcgagctccacgctggacagaaacctcctcagcgtcttgcggccgccacccaggcctcgctact

SEQ ID NO: 234691 - DNA, 545 bp, Homo Sapiens
ttttttttttttttttttttttgagatggagtctgtgttgctcaggttagagtgcagtggtgcaatcgtggctcactgcagccttggcctcctgggttcaagcgattctcgtgcctcagcctactgattggctgggactacaggcgtgcaccaccacgcctggctaatttttgtatttttagtagaaatggggtttcaccatgttggccaggctggtctcgaactcctgacctcaagtgatccgcccaatttggcctcccaaagtgctgagatcacagggatgagccaccgcgcccagcctcaagttctaggataaggtgagaaaagaaaaacattcaaaatacccaatgttttttacatacatgaaattaaaaagcacagcacagaaaacccactacaaagctactgtaatcatacccgttagaatgactattatcaagaagacaaaagggaagtgttggagaggatgcagagaaaaggaaagaaaagctttgtacactgttggtggcaatgtaaattattatagccattatggaaaaccagta

SEQ ID NO: 234692 - DNA, 656 bp, Homo Sapiens
ttttttttttttttttttgagagattaagattcttttaatggtgaaaaggatatacatatatttggaattagccagcttgactcagtttaggtgatcccaattttggtggcaacaaccaaagcatcgtagtcaggagccagtcgaacatatgccttcctctctccatcagactgaatcagagtgttgactttggccacatcaatgtcacaaacttcttcacagcctgtttgatctggtgcttgttggctttaacatccacagtgaacacaagtaggctgttgttttctatcttcttcacagcctactcagtggtcagcggaaacttgatgataacatggtggtcaagcttatttctcctgggggtgctcttccaaggatatttgggctgcctccggagtcacagtgtcttgggccgccggaaggtgggtgacatgtggatcttgttttttttgtggctgtggacatctttcaacactgccttcttggccttgcaaagccttcgctttggcttcggctttaggaggggcaggagcttccttcttcgttcttggcaccatcagcagcagctccctggggtgcaaaaagggcagtgcggatcaggaacagcaggactaggctcatctccatggcccagactttctttcccctcgtccga

SEQ ID NO: 234693 - DNA, 921 bp, Homo Sapiens
  misc_feature (72)..(73): n is a, c, g, or t
tgttgttttttggggacagggttttcacgggttttgcccaggggtggagggcaggggcaatttcaggtggannggaaccctccccccttcccggggcccaagaaattctcatgcctcagcctcccaaggcgctgggaaccacagggcatgtgccaccatgtccggggtaatttctgtattttttggtagagacggggtttcactgtgttgatcaggctggtttcgaactcctgacctcaagcgatccgcccacctcggcctcccaaagtgctaagatcacaggcgtgagcgactgcacccagccctggggccctgttcttatcctcagcccacttggttttcccatccctagggagctagtttcagttctctatacttcttagccacaggctgggctcctgctaaacagcaggtcacccggaaacataacatcactacttgtgcaccacagcactgccactcacccagaatctgggcatcattcttgatcccttcgtctccccccaggtcctgttgattttgccccccgaatgcccctcaaatcattctcttctttccatctcccctgccactgctatagaccagacccctctagcctctcacccaggcaactgcagcagtctcctaaaggagcaactcgcctccagctgctcggcagtcaagtgacctttgaaacacagatcagatcttctcactctccatgggatcactggcttccaggatgttaaggataaagtccccaattcctcaacatgcgtgaggatgccatgcccaatctccagcctcatctcaaacaccagcccccattctctgagctccagacacaatggtctttcccttcctgaagcccatccaagacaccccgccctttttgttgctttaggacctctcctattgacacactgggcctcctgtttggaa

SEQ ID NO: 234694 - DNA, 494 bp, Homo Sapiens
tattgcctgtttggaaataatgtcacactggcaagcaaattcgagtcgggaagtcaccctcggcgcatcaatgtcagcccaaccacttaccaattattaaaacgagaagaaagtttcacattcattccgcggtctcgtgaagagcttccagacaactttccaaaggaaattcctgggatctgctatttcctggaggtaaggactggtccaaagccaccaaagccttctctttcttcgtcgagaataaaaaaggtttcctacaacatcggcaccatgttcctccgggagacaagcctctgagacctgctacagatcaaagactcctccaaaaagcacaagcccagaacatgggtcaccaatggggggtggaaagagattgtgtctctttcattgctttgttgagaacaagcagcaaaatttctgtattatgtcaggcaataatcctactaaaaggtggaggtgaccgctgtcaataaaaagccggaggatgaggg

SEQ ID NO: 234695 - DNA, 626 bp, Homo Sapiens
ttttttttttttttttttaatgctatattggttttattgtgctgccataacaaattaccaaaaatttagtatcttaaaacaacacaaagttattgtcttatggttctataattctatataattctataatgtcttatggttctataatataaggtcagaaattcaaatatgagtctcactgcactaaagttaagatgtcagtaggaagccagatgtggtggcacatgcctataatcccagcactttgggaagccaaggcgggaggagtgcttgagctcaagagttcaagaccagcctgtgcaacacagtgagacctcaatgctactaaaaataaaaaataaaaacaaagatgtcaacagggctgagctcctttctggaggctctggagagaatgttcccttgctttttccaccttccaaaagccacccaccttccttggctcctggcccttccctccatcttcaaagtcaaaaacaactggtcaagcccttcttacagtgcatctccctgagcctgttttcatcatcacatctctctctgacccagctaaaaaaggttcttctcctttaaggactcatgtgattagcttggacccaaccagataatccaaggtaatctcctcattc

SEQ ID NO: 234696 - DNA, 1000 bp, Homo Sapiens
acagtttgctcatgggtccagccccacgaggtcgcgcctcggagttcttctgtattaaaacgttgggtcgccggctggttcctggaaccgctcgggggatttccttgccgtttgcgcctgccacgccatcggctcatccaaagaatggtcttccggggcaccggtccctcattgtggccccgcaaggtgcttcggggtgggggcccgtccccgaagggtaatagggtcagaggggagtgttggggcgccaaaagagggggtccctcaaaggggggatcctggtagcctgcgaaggtggcactgggccccggggtgcgcgtgacggtgcagccccgggtcatggacgggcaccacggcacgcccatgctgctggatggtgtcaagtgtgtgggcgccgagctggaatacgactcagagcacagcgactggcacggctttgactgaggcccgaggccccgcctgccccgggcccctcagccttaaaccccgccttgtccccccgacatgctgcgtgatggtgtggcttcctcgcccctctctggggtgggtgtgggggtggagtggccttgcccacgcctctcacctctgccttcatttgtgctgccaccctgcccctccctcgtcctcctctcccacttcctcctctctgtgtgcctcagtctcctgccggaagaaatgggttgagcccgaaaggaggctgtctgaggaagggagagggagggcctggggtgggtcccccactccccaccccaagccacagggactcccaccagggtctgggagaggacggagctggctctgtggcgtcgtggccccattactgctgccttgcttcagccacctctcctgcccctccctagtccccactgctgtccaccatgagtaggagggaggtgcagtccccagcccccacccctcaggtctgtgttacttggtttttaagcgactggttgggatagaaccctaaagaaataaacttccagtggataccggaaaaaaa

SEQ ID NO: 234697 - DNA, 339 bp, Homo Sapiens
gaaaatccaaactctgaaatgctccattgagcacttcctttgagcatcatgtcagcactcaaaacagactttggaacatttctcattttctgattagggatattcaacctgtatttcccaaaaacttaccagaccacggaactcttttctcatacaatactaacagtccacatattgttccatagaacacatgcaggatacactttaacgcaaagtacatactgcttaacctaaaaatgcaattagttatcaatctcccacccacactgataaactggtatttactaaatgctgtaggactataaaagcatcccccaatgaatttcttgttgaaattca

SEQ ID NO: 234698 - DNA, 626 bp, Homo Sapiens
  misc_feature (167)..(167): n is a, c, g, or t
tttttttttttttttttttttgagacggagtctcgctctgtcgcccaggctggagtccagtggcgcgatctcagctcactgcaagctctgcctcctgggttcaggccattctcctgcctcagcctcccgagtagctgggactacaggcgccagccaccacgcccggntaattttttaaagacagggtttcactgtattagccaggataggatggtctggatctcctgacctcgtgatccacccgcctcggcctcagtctccactttcaaccccattctcttcatggacaaaggcgtggctcagctctgactgtaccttaggtcttctggagctctgacaagtccctacctgaggggtcagggcactcccagtaatactgggactccaagtctcaaaagcaaagtggcccccactgcctcctcattatgacaggaagctttagtgctcacttggcctgggtaaagaaacactttgtttcttgttttctacttttctttttttttttttaaagatatggctatggataatggtcgtagatatcttacaatctaggattattttgaaaacttttttctgagttattcattgtaagactctcccccaatccaaggggtgcctcgtgccga

SEQ ID NO: 234699 - DNA, 986 bp, Homo Sapiens
ccgcgggggggagttataatataacatacccttggaataaagagggcccctaaagagattccttggggtttacccaaaagttgtcttctccagggagagcttttctgggtgggggcacttttatggagaagggggcccaaaaaaaccggcccttttcccttttctttccaggtaaggaaggaaacctttggcttccttgggccccatccattcctgtttattcccacggggctgcccatctgaaagctgtaaagatataagaagtctcgcacagcccgggttcaggttacaatccttcgcacctaattgtacgcctttgtgtgaggtttggaggagtctccaggaacacctgggtttcctttctcacaggtattttccagtcctcacgggcaagtcagagagtccccagaggcaattgaacaagccctcagagatcacgtagtccgttcactctccatgggaacccgcacttccctagagacctgtagccaaatcatttggagagcttctgaagcttctctgccttcctctgtctcaaagaatcccatgtgcctctagttgagaaacattcctctggagattctaggttattctcatgagaatgttacgatactcaggtgggctggggcagaaaatggatgagaactagtgtagtccaatggctttgctttggtaactgaacccccagaggaggaaaataacaacagctcagcttttctcagtgttatacaccaaccattacgctagttacatgatatacatactatttaattctcatcctttgaggtctggtatcactattgccactttacagataagaaaacaagggttggccgggtatggtggctcactcctgtaatcccaacactttgagaggccaacgcaggtagatcacctgagctgaggagttcaagaccagcctaggcatcatagtaagacctcctctcttaaaaaaaaaaaaaaaaaactcgagactagttctctct

SEQ ID NO: 234700 - DNA, 929 bp, Homo Sapiens
  misc_feature (1)..(1): n is a, c, g, or t
ntccgcccccgggccattagatgccctggaagttttttttttttttttttttggagcccagggtatcccttctgtcatcccgggctggagaagctcaattccgggcttggctgcagcctttgactttccctggctccagtgatcctcccactccagacttcctgagtagctggaacccccaggcacatgggcaccatgcccaggctaatgttggtattttttgtagagacaaggtttggccatgttgcccagactggtcttgaactcctgagctcaaaatgatctgcccacctcagtctcccaaagtgctgggactacaggcatgggccgccgtgcctggcctcttttggctttttaaatgtggctctaactgtgtttccatcggacagacctgctctaggtcagccttgtccaacagaactttctgtgatgctggaagttttctatatctgtgctgtcccacacaattgctactagttacatgtggccgctgagcatttgaaatgtggctaatgcaactgaggaagtgaattcttcattttatttaacttaaatgaattttcatttaaacagccccctgtggctagtggttagtggaaagcacagtctagaccaggtgtttataaactatggcctatttttgtaaataaagttttactggaacacagtcatgctcatttgtgtatgtacaatctacgactgctttcaagatgcaatggcagagtggttgtgacagaggctgtatggcccatagagttgaaatatttatccggctctttccagaaaatttggccaacccatgctctagcccatcattttccaaataggttttccatggaaaatgatttcatgggatatcaacggcatccaaaaaacaaggcaggggtattccatgctcagatacgtttggcctcgtccgaattgccacc

SEQ ID NO: 234701 - DNA, 786 bp, Homo Sapiens
  misc_feature (1)..(11): n is a, c, g, or t
  misc_feature (13)..(13): n is a, c, g, or t
  misc_feature (15)..(19): n is a, c, g, or t
nnnnnnnnnnntntnnnnntactgttctctggacctgattttgcacttgaaaatttccaagctctcagagtacttcagtgttaatagaaaacagctaaaatgttgccacatttgcagatgtggcagatgtgagcagaagaacaaggtcagcacacataggaccaggtcttggtacagcaggagcatgtggagtttccagaactgctttcaggtgtttctactctgtacggttttcattccctatttccaatacatcatcccctgtgtttcacctcatttcctcccagtttccgtttctactttgtcatatattaatttggacctttgtaatctttggtttccttctagtggaatctggtgattttattaaaaccagaccaacgagaaaatgtttccaggtaagtcttcaggctggcagcctctcttccaatatcatcccggtccatcagctgagcctggtaggtaatcccactgttgcagactggaggcttacaaatgctgctcagggatagcactatgcttgaaacatacgccttgtgctttagaagccatgagttccataagcgcacgctgaatatgtttattaaaggacacgtggtcccatggaatgtggcgctcagcactgcacagcactagcagtcaccctgaacactcactgttgtcagtagcaccatccagactctagtgcagacacctctccatatcccctgctttgtgtcttggaagcccaaggtggcttcttttgaggctggattgtgatgctgcccatatcagagaaggacactt

SEQ ID NO: 234702 - DNA, 839 bp, Homo Sapiens
agtaaggtgcaatgggccatgatcttcagcttcactggctaccttttgccttctggggttcaagcaaattcttcctgcctcagcctccgagttagctgaattacaggccacctgccaccatgcccaggtaatttttgtgtttttagtagggacggggtttcaccatgttggccagtttggtctcgaactcctgacctcaggtgatctgcccacctcagcctcccaaagtgctgggattacaggcgatctgcccacctcagcctcccaaagtgctgggattacaggcgtgagccacagcatgtagcctacccagctaatttttatatttttagtagaggcggggtttcaccatgttggccaggatggtctcgatctcctgacctcttgatctgcctgcctcggccacccaaagtgctgggattataggtgtgaaccaccgcaccaggccaaaaaagtttcattttcaatagagctttctgactctgcttttgccttcaacactttcacaatgattttctgctcctcaataaggaaagcacacttgattctgtcatgaacacactgagcacacatggaaccagggaagcactgcgggccctatagacatgccttttgttttggactatcaaataacaactttagatctcacagcacgagctcctgaatgtctgcctggacacacaccacgtgaagattttggtgctttcccaacttctggcataaagtaaatgatctataccagggttcaggacagcctagtttagttagagtttctcactagaggcctacgacggtatgtcacatgctggcccattctgcatgcctctagacaatgttca

SEQ ID NO: 234703 - DNA, 958 bp, Homo Sapiens
  misc_feature (1)..(1): n is a, c, g, or t
  misc_feature (187)..(187): n is a, c, g, or t
  misc_feature (195)..(195): n is a, c, g, or t
naggaggtggggtttcacccatgttggccaaggctggtctcaaacttcctgccctcaaaaggatccattcccctccagcttccccaagtggtgggattacaggcatgaaccactgcgcccaggccaagttttaaattttttctggagatggggtgctcgctatgttgcccaggctggtctcaaactntaggctcnaagtcttcttgccccgaccttccaaaagtgctgagattacaggcatgagccactgtgctcagcccccaacaattatttttgacagataatagggatgtctccttgctctctgtgtctggccaagtagccccagggtgacactcttttttttttgtttgtttttgagatggagtcgtgctctgttgcccagcctggagtccaatgccgtggtctcggctcactgcaatctccgcctcccgggttcaagtgattctcctgcctcagcctccagaggagctgggaccacaggtatgtgccaccacacctggctaatgttctcatttccagtagagacgggatttcgccatgttggccaggctggtctcgaactccagacctcatgatccacccgccttggcctcccaaagtgctgggattacaggcgtgaaccaccatgcccggccgtgacactcgttttatagcatcaggctggtgaccagaatgtcatggcttctgggcagaggccagcttccatgccgtgtcctgtcttcctagtgcagatgtccccagctgcagtgagtaccagtgtgagggaatgggctccagactcccagaggggccacagggatggccacgccaagctctggggagtagccgattccccagcacctgcctgcccatgcacctttggggtgactcatgagacagggtggggctcccacctcccctctcccaaaaggcaatcagctataaaggctctcagaggccctcgtgccgaattcgc

SEQ ID NO: 234704 - DNA, 910 bp, Homo Sapiens
  misc_feature (203)..(203): n is a, c, g, or t
aaccagcttcaaaaagttcttccaaaaaaaaatctttaaaaatgttgcccactgctttcaaaatatttcatcatagtccgggctgtctttgattctctaagtttctcaatgttctagtacaggttttgctttttcttgaagtagagggactagtgtttattctcaagctttcatgtttgctttaaaattctgcagtaatgtgnagtcatattaagtgtcatacccatgaacttttttcagtcttaaagactcccctgtatttatgccagctcacggagtgtccttagttctatgcctctattacagtatcagtcggccattttctgttcatcatcactgcctgagtttaccaagagactgctcctctctaagcatagccagcactaattgtggtcttttcatgctttgttctgttttttttttttttttaacctcattattgggatacttaaataacagatttatgctgttgttgtttctactggtcggtgctcgctcactaatatccaatcctagtatgattttcttttacttgtgtctattaacagggttatgtcacaccctgtcaacctcaaaacagatgatactcatcacttgtcttccatcttgctgttctattatcttcctacaaaaatagctaatttgtcagatttcaaagccttgttatttactgatgagcttaccaactggaccttttgtatcttcagtgtgtaattctgaagatgcattctgatacactagtgaactgggggtgacggtgaaggggtggtggaactaagggggtggggcggcgaacataggcaatatgccatttcctcaccatcccatgcttgtcatgtgagacaacagaaaggataaagaatactctattttttattctgaaaagataattatagcaatgatccttcca

SEQ ID NO: 234705 - DNA, 912 bp, Homo Sapiens
ggggcaggcgggaggccacagtgtgtggggagctgccaagggtgcctcgccctgccagtaaaatgccaatagccccttggggccataaccccccagggtccatttttttagggggtggcattttggggccccccagtaaatttattaatgaaagccaaacccattacacttagtgataaacaggtatttcataaatagcagggaaaggaagtaatcccaaatagtggaaaacaaggaagcaaataaaggatctaccccttaagttaaaaacaaaaacatttaaaagaaatactgcaactattaactaaaagataagatttaataacacagtaagacactcagttggggagggattaattgcaaaatatatcattatttcacagtgaggtttaagtactcataacaatcttctggttttagtagaacagatacccactggtgtatttttttcacatttgttttctataatttcttcccctctactatttcatataaagacactaatgtggtcaaacattaaactatcaattgacaatcaccttttgcttccctattaggaaataaccttcattgcttaactgcaactcaagagaattagggcacagtcaaccatgtcactgataaaaacataagaagtaatgcatcacatttattccaatctaaacacactgtcacagatgtggtaagtgaactggaacactggtgttccccagtgggtcatcagctacatatacatcacattcttttatcaaatctggcattgaaatttccttttccatatataggtttaaaaaaataaaattaaaaaagccacaggagcaaccctgacagagaagtcttgcatgcagccttctcctgagaaagtatgtaatcttagttatcctcgaagtcagcaagcgctcttgtactgtt

SEQ ID NO: 234706 - DNA, 960 bp, Homo Sapiens
  misc_feature (13)..(13): n is a, c, g, or t
  misc_feature (161)..(161): n is a, c, g, or t
ttttatgttctantagggatcttcttgcacttttttcctgagcatcaaatatgtaaggtgctaactacataatatctttcccttctacccaccaggcatcccagagccaaaagtgaggtagcaggctgcacactgagcaatcttctggtgtacctcctccnaaatagtcgttcttccttctcttgcttggaatgttaaaaatgtttccccttatttgctttcttgccagcccgctgatgaggagtgggaacaggtatcacgaaccctcaggttttccagaaacttgagggaagaagagatcttggcaagcattcatttattcacgtaacataagccagacactatgccaggggctggcgatacagaaatgagtaagacatgatccctggcccctcccatccctggaatgtctactaggaagaagctgctagaaaaagacaacatgctactttaaagccaagaggggccagtctcccattccagcttggtacacactgaacacatttgaggcttatgactggttcttttacttacaaatattgtttagacacattttcaaatgtcacaccaatcaataataataaggaatggattttatctatattgacagttctttcaaccttaagagtgaactgctacaggtaagattcaatcacatttttcaggagaaagctattgagaccaatatgctttggttatctaataagggtggaatgacttataatgctatttactccaggcaaagagaaaatacaacagacataggatcttgatttcaacgtagttctcctccatgtgcatttctctgtccgtttaggtcaatgccaactggtccaccagtgaacatgtccaccggccctgagctaactcattggtttattattcctgacctaaggtgttttaccccacgcgtccgcggacgcgtggtcgacgatacccgggaatccggaccggtccagc

SEQ ID NO: 234707 - DNA, 958 bp, Homo Sapiens
gtttgtttgtgggagtgccaccaggtccccaattatatggggaaacccctgtaagccagttctgttttacttaattctcccccttaaatgggtaaaaatcaggaggtgaatgttatggctcattttcctaatggttataataactccaggaatgtcaaatttcttacattttccttttaaatagtgtggaaagcctcaaataaaattgaaagtgtgcgttctttattctcatattgatacatgcattttctgggggtggaggataagcagcactttccagctgcagttggcttgagaggatgaagcacatgcactttttccagttggtttattgcatttcatgtacagtcatgcagttctccgttcacatgtgacctgtgaacacctatttcgactatatatatatatatacacaatttccacagtaaaattttaaatgtttcatacataccactacaatataaaccataaaagatatatttggtaataaaaacttaatagcacttttaagttataaattaacttttaccctggaagctgagatcttcccaccatgtggtgtcttttgccaagaagaggcaacaacattataatgtggaatcaacactgtggctgccctttgctgcacctatcgccgcctcctactatgaattaattcattcgccttctcccccaccccctggcaattagtgcagcagaaacacagaaacgagaggactgtgctgaggttaaccagtttgattccacattgaaggcacgagtgcatataatgttggtaaatctcttcatatcaaaggcatctcaatttagatcacttaaactacagataaaattagatgtgtagcacatatttctaaaatattgtccatattttttccattttaaataaaggtattaaggaattcgtgacaatgtaaaaaactactctatgcacttagaaaaattgtgaattcgaaaa

SEQ ID NO: 234708 - DNA, 918 bp, Homo Sapiens
  misc_feature (250)..(250): n is a, c, g, or t
aaagatttgcttatttataaattggtttgacctgctagctaaaattatagttcctggaatttccctccataaataaatatgatcaatatatttgaaacttttttagattggtaagacaagccagaagtcatatttcgaaattcagttctagtggtaactgctgcttctggaaaatgaggagagaaacccaacggtattaaatattattttttttttacacaattcaaaaaagaaatatatccactgcttntagaagtaggtgtaaatgtgtagataaaacatgagattatcaggactaacagaaccataattattataaagcaaatacttacatgtgccatgcactgtcctggtactttacatgtaatcctctcaacaatcctatgaagtaggaactattattatcacctctgtttcatatacgaggaacttaggtataaagtgagtaaatatcttgcccaagatcacatagttaagtggcagagccaggatttaaattcaggaagtatttgctcttaaccactaaactatgctgcatataggatgctccaaggaaaaatgtaatctatggaactgtggaactactacaggagattgactgtagtatcttttatcaagggatgtaagattacaaagccctctgttgcttatgcactttctatactggaactatcaatggacttagctccacccttcccttctcagaatttagactactttcccagataggagcttattaattttcaaaatattcctggacagttaggaaggttatgtggtattatcctgtttgagaactgaggacagaagggaggcacttacccaagattctgtaatcagggaaggttctgcaatcaggatcagatctcctgatcctcactatacagcaaacttagcttttctgatggtgacctagaa

SEQ ID NO: 234709 - DNA, 934 bp, Homo Sapiens
agtaccctttattcaggtagaggtactccttttttcccctttctttattaataaattttatttttaccccaatcttttccccaaaaagagagttgaggaatgtcggagaatctctaccactcggtaaccatggcgggctgttatatcagaaaaatccataaacatacacagcagcgagctgttttcacaagacttccctgctaataaacacaacactttctcctccactcagatgggagcctcagatgccaaaacgcagatgtgccaactaactataggctcgttgctaagcagagaaacctatcaagtttgtccagcaaattcgattgtacagtgggatggcgtctgctctgcggccttggacagggagccactggtctgtgctgctgtcccctgaggcaggtcgaagctggtggcccttagagggcaggtaaaatggttctcatgggttagaacataagggctttgagaaaaaatgcaaaaggtctcattgaaattggaggcctatgtgaatctgtttacatggaggcatactgagatctcgttctgtgcttaggtgaactgcaggtctcacgctggctgcatgacttggtgccccctggctggctgagccactgcctgccaccttctcataccattacgtgggggtctaaagaggacatcatccccaaccaaagaatagtgagagagaaaatcccaaacatttgagacagggttcaaaagcacccagacgccttctgtctctttcccagttcccatctggctagggactgtgaatcagaattcagaatctgtgctgccctgaggggacaggcacccaaatgcaataaataacaccaagctcaggacccagccacagaccttcctccaccactgctgcgggttattcctcgatgggaactgaaggatcgagaggaggaatccgttccgcccc

SEQ ID NO: 234710 - DNA, 644 bp, Homo Sapiens
acaagtgtgaagaggctgtgtggcgagattgtggaactgaagcagcacctggagcactacgacaagatccaggagctcacgcagatgctgcaggagagccacagctccctggtcagcaccaatgaacacctgctgcaggagctgagccaggtgcgggcgcagcacagagccgaggtggagcagatgcactggagctaccaggagctcaagaagaccatggccctgtttccacacagcagcgccagccatggaggctgccaggcctgctgactcctgccgagaagctgggccaccccttaagcttcctggtaaagttacattgtctgcacctttgtacttctttactgagtgtactggctggcaagagttctctcttctgttggtaattatttaggatttttggaatgtattcaggacctgtagcttggttttctaaagcacctcgtaaaatgatatgattactccaagcccctctgcatgttttcagacagaacacattgacatattttgagacaaactgactattaatcttgtatccagtatcctgagatgaagtaaatgcagtgttctactgcctgatgtgaaagagagctatgtatgataattaaagaaaataattttctgtgaaaaaaaaaaaaaaaaaa

SEQ ID NO: 234711 - DNA, 715 bp, Homo Sapiens
tgttcgttcatcttaccaacgtcgccatccagaaacacggggaagactacaaccacatccatgggggcaagtggacagtgagtaacctgcggctctacctggagagcacccgcggcaaggaggtgaccagcaagctgttcgacgagatccactggatcatcgtgcagtccctgaaggctgtggcgccggtgatgaacaatgacaagcactgctttgaatgctatggctacgacatcatcatcgacgacaagctgaagccctggctgatcgaggtgaatgcgtccccgtctctcacgtccagcactgccaatgaccgaatcctcaagtacaacctgattaatgacaccctcaacatcgccgtcccgaatggtgaaatcccagactgcaaatggaacaagtcgccacctaaggaagtcctcggcaattacgagattctgtatgatgaagaattggcccagggtgacggggctgaccgggagctgagaagccgtcagggtcagtctctggggcccagagcaggccgatcgagagactcggggagagcggtcctcaccacctggaagtgagtcccacctggaccttatcaaaactactcactccacctgggcccctgctgaagcccgtattttgaaatttcccttttgtagagcttttttcctttcctaagccctgtaaataaatgaaggcacttctttggaaaaaaaaaaaaaaaaaa

SEQ ID NO: 234712 - DNA, 684 bp, Homo Sapiens
  misc_feature (39)..(39): n is a, c, g, or t
gagaggctccaggggctagactccctcaggaggctgaantgaaaaagggcagggggcacttgagctgggctggggctcaggggtcctaaccctttaggcagtgacatggcctctgggtggggtctggccgttggccctggctaatgtctctcagtcattcccctggggctcaagcgctgggccgcccactcctgcctccctcatctgtgtcccgagttcctgaagggacatgggtggaatgatggcagaatccagggtctgcagcacctgctgttgttgccaaccagtctcccaaagctccttgctccccaccccttgcgaacaggaccagattttgtttggagcctcagcatgccggggcccagatgatggagcataacgggtcccagccaattgtgatgatcctttttgctcatttcccagcctttcttgctgttaggggctaccatgggaccagctctggccagagggaactaagcaaatccaatagagatgtttctggggaaggttttgcagcccactccccatcttcctgctataaatgtgggtgtgatggctggatctggggcagccaccttgctaccatgaaggaaaggccaagacaatcatccacagctattccctccagcatctggttctgtacaaaaattaaatgcttatttgtttaaaaaaaaaaaaaaaaaa

SEQ ID NO: 234713 - DNA, 750 bp, Homo Sapiens
  misc_feature (92)..(92): n is a, c, g, or t
cacccaccagcctctgtaaccaccattctgctctctgcttctgtgagttccattgttttagattctatatgaatatgaagtatttgtctttntgtgcctggcttatttcactgagcacaatattctccacttcattcatgttgcaaatgacagaatttccatcatttttaaagactgggtaataatccattatgtatatgtataccacatttcctttatccatttatctgttgctattaatatatagtgctgcaatgaacatgggagtgccactctcttggacaaactgatttcaaaacatttgggcaaatacctagaagtggtattactgaatctaacatgtcttctatttgacttttggccctatggtagtaggacatcacagaagttggggtttgggaaagttagcttaagatcatacataagtaaatgtatttgaacttggattatttaaccttctgattgcaaagtcttaaatattctctatcaaaattaaattttattaaaattttaaattaaatattctattctcttcagttatagtttaaaaaatatatattcctatcttttgtaggtggaaccgtcccaaaatgtcccttgctcagaagaaggatcgggtagctcaaaagaaggcaagcttcctcagagctcaggagcgggctgctgagagctaaacccagcaattttctatgattttttcagatatagataataaacttatgaacagcaactaaaaaaaaaaaaaaaaaa

SEQ ID NO: 234714 - DNA, 717 bp, Homo Sapiens
ggggaatattactctataaatgataggtcaaatcggttgacagtttttttcaagtcttctgtatacttgctgattttttttttttttggtctttgtcctatcaacaagtgagagatgattgttgaaatctccaaatataattatagttttttgtttctctttttagttctgtcaggtttgcttcatgtattttgaagctgtataattatatgcaaatatgctaaggattattatgtatttttaatgacataattctttcatcattatgaaatctccatctttatcgctgataatattccttgtcctaaagttcaaagagcattgaggtgtgttttggcaggcagttgagttactattgggtcgacttgatcctttggaatcttgtttgtttttaatgtttgttagggtgggtgtaaagttgtctttatttaaggacggtggttgtcaactttcagtctcatgaccccctgaaactctaaaaacttattgaggactccgaagaattcttgcttatgtggattgtattaatgcttaccatatcagaaattaaaactgagaaataagtaaaacaatatttacttattagttccttttcaaatgacaataataaacccatttcatgttcagctctctcttaactatgttctttcttattagttttcgtttccttctaaccacaaataaacatataaaatcttgaaaaaaaaaaaaaaaaaa

SEQ ID NO: 234715 - DNA, 723 bp, Homo Sapiens
  misc_feature (42)..(42): n is a, c, g, or t
gagcaaggggtggcaggacagagggccaagctcctactacanatgtggaatatgctgtggggtactggatacataagggatgccatcagagaaggtggtcatgggcatccccacatatgggcactccttcacactggcctctgcagaaaccaccgtgggggcccctgcctctggccctggagctgctggacccatcacagagtcttcaggcttcctggcctattatgagatctgccagttcctgaaaggagccaagatcacgcggctccaggatcagcaggttccctacgcagtcaaggggaaccagtgggtgggctatgatgatgtgaagagtatggagaccaaggttcagttcttaaagaatttaaacctgggaggagccatgatctggtctattgacatggatgacttcactggcaaatcctgcaaccagggcccttaccctcttgtccaagcagtcaagagaagccttggctccctgtgaaggattaacttacagagaagcaggcaagatgaccttgctgcctggggcctgctctctcccaggaattctcatgtgggattccccttgccaggatggcctttggatctctcttccaagcctttcctgacttcctcttagatcatagattggacctggttttgttttcctgcagctgttgacttgttgccctgaagtacaataaaaaaaattcattttgctccaaaaaaaaaaaaaaaaaa

SEQ ID NO: 234716 - DNA, 680 bp, Homo Sapiens
  misc_feature (614)..(614): n is a, c, g, or t
aagcgagccatcgagccattggcagaaatcctgctgaatgtcattcagaaacctcagcccatggtcgccctcctgtgcccctctcctgccggaaagccctgcaacattctagggttgggggcagggccatccacggtttctgggcagagccatggtggcaggagagagatggctgaagcctgagcagcccagagtcccgctggtctaggctggtggtcggggcccctgggagaggagacagggcattcctccccactctgtctccaggctgcctctgggtagcctctagtctgctgttcttcaggaggcctgccataaactcttcggagtttacgtgttgcaccttttcacagacggttccccacagcatcctcagacagctctgtgatgtagcttttaggaggcactcaggtgtcacggctagactgcagctatgagacagatctggcttcaaatccaagagttgccatgcacttgctgtgtgaccttgggcaagtcacttcacttctctgagccccgtgttcctcatctgtacaatggggcttacgatactactacctcatagggttgtcctggggatcccagtatgatgaagtgcgcccaggggcttggcnatggtgcccggcacgcagaaaaagtgctcaagtaaatgtttttgtcataaaaaaaaaaaaaaaaaa

SEQ ID NO: 234717 - DNA, 639 bp, Homo Sapiens
  misc_feature (407)..(407): n is a, c, g, or t
  misc_feature (570)..(570): n is a, c, g, or t
gctctggacttatcaccccaggagaactgaacccggacctgctcactgcctggcatggagaggagcacaacagatgccacgtcgtcgtgcattcgccaacacgtgccctcacagggccagcgtcctccttccctgcgcaagacttgcgtcccccatgcctgctgggtggctgggtcctgtggaggccagcagcggtgtggcccccgcccccaggctgcctgtgtcttcacctgtcctgtccaccagcgccaacagccgtggggaagccaaggagacccaaggggtccaggaggtgggcgccctccatccttcgagaagcttcccaggctcctctgcttctctgtctcatgctcccaggctgcacagcaggcagggagggaggcaaggcaggggagtggggcctgagntgagcactgccccctcacccccccaccaccccttcccatttcatcggtggggacgtggagagggtggggcgggctggggttggagggtcccacccaccaccctgctgtgcttgggaacccccactccccactccccacatcccaacatcctggtgtctgtccnccagtggggttggcgtgcatgtgtacatatgtatttgtgacttttctttggaaaaaaaaaaaaaaaaaa

SEQ ID NO: 234718 - DNA, 595 bp, Homo Sapiens
aggcccctcaggacggccaccacatcccgcagcccccaccgccaccgtacggccacaagcggtaccgccaaaagggcagggagggccactcgccactcaaggccccacacgctcagcctgccacagtggagcacgaggtggtgcgggacctgccgcccacgccagcaggagagggctacgcggtgccagtgatccagcggcacgagcaccaccaccaccacgagcaccaccaccaccaccaccaccaccacttccacccgtcctagcgccactgccaagcacacctcgctcccagcacaccacggcccgcgacctcagggcagggagcagagcagctgccggctgtgtgcccatggggagcccagcccccaccccccacctccgacagcaaacagcaactgactgcaggtgctggcatgatggaggtggtgcaccttggacacgtggacaaggcccaggcgccctctgctcttctgccctcgatgccacatggcggtgaacacatctgaagccactatgtttcctggctctaaggctcgtctgtgtaacccataaaacctgctttgattccaaaatgagaaaaaaaaaaaaaaaa

SEQ ID NO: 234719 - DNA, 662 bp, Homo Sapiens
  misc_feature (63)..(63): n is a, c, g, or t
cgttttcattttctcgtgttctttatgataatgatctttgtagattggttatttctgtacttnatctgtaataaactttgtagatcctgtgaaccattactttgcctaaatcacttgagacttgagtctttaataacaaagcatcaatattcactaaagtcaatctcttttgagtttctgtgacttggctagaagctcttgacactaagggattagtgttaattttccctgggggtgttccactagggcattactgtataatgacttgatgttgccacatagacttcaagatatataatattttgaggattttgttgattggcctatgttttattgcatagtgtgaaacgtgtaaagcttggttaacctgtatatagatagcttattgttgactagttatagtgtatttagggttgcctgtaatatttaagcttctttactgatgtgtgtgctggtaggaacatataatttttgtacattatatttactgagatgttgccttttttattttacaaatactttggaattccaatgtgttttttgcttccgtgaggattaatttggaaaggtttttaatgacattccactgatttcagattttgcttgagattgacttcaataaattgtcctgtatgttccaaattaaaaaaaaaaaaaaaaaa

SEQ ID NO: 234720 - DNA, 747 bp, Homo Sapiens
ggctgctgatttccactgaagagctaatttcctgtgagacattaacagtgatttaagaaaaagattcctgtaactgtaatgtcttacaataacagaatgcaggagagcacatatcaatgaagaaaagacaaaatgtacttatccatgaagctgaggttaagaaaccagtgtcttcaagagccagggacagcactgggtctgtgcagagttgagagatggtgatgacatgtgacagagctccttgctgctcaaattttatgccagataaaatattcaccttctcggactccctggcaccaggcatggccatgtaatcctacagcacagctgatgaaagagaagacatcttgctgctatttgacaagcaagaagataaaagctttcctataaagatgatggagcaaaaaaatagaaggggcctagactccctaccttcacacttcctgctataaaagcattgctattataaggttaatctgcagaaacagacttctatgtcatatgcttaaatgcatcaaaattcatacaatatccattaaattggtaaaagtatccattttaaaggattaatctgagggacccacagacacttaacacaatcaaatctcagaaaaaaaatcagttatttcattgtgattttgaggctgatcttttatgatcttttagttatcaaactgttaaatacattttaactttcaaattttatgaataaaggagatgaatcctgttaaaaaaaaaaaaaaaaaa

SEQ ID NO: 234721 - DNA, 739 bp, Homo Sapiens
agggaagattaagactctttggacagaccatgaatgaattgctgccagtgctgccagactgaattggctgacagaactcccagcccaggaaagttccatgacaatgactgtcgcagaaggaaatttcccactaaagtcagtccattttcaagttttggtcttcagagacaaaagaacgtcccagccacctgattttgatggtgaggtaactctaagttgaattcaggctagtgttgcagtatagctttggcatgttcatgagtgagcacccagaatgtgttgaaccaacccccacccctaactactgactatgactgcagtgggtttttatggggaaaaaaagtgtgaaaagcaaaaagaaaggaacagagattttttatcacctttattgtaagacagtccatttatgaattgagtataaacacatacaaagtaacaagagattcctaagaaacgcaaatccttgagtttcacgcacttcatgttcaaccatttgctgtaatccagaggcagcctgtgaatcattctcatgccctgtttttttttttttttttcctataatgttctgggtttaaaagccatcttttccacattttctgtaaataatggataatcattttaaaaaattttatttttagtgctgttttaacaatgtagatagatcataaatgtacttgctgaattcaatcatttttaacaagccaataaagtttgataattcaaaaaaaaaaaaaaaaaa

SEQ ID NO: 234722 - DNA, 734 bp, Homo Sapiens
  misc_feature (15)..(15): n is a, c, g, or t
  misc_feature (25)..(25): n is a, c, g, or t
  misc_feature (44)..(44): n is a, c, g, or t
  misc_feature (74)..(74): n is a, c, g, or t
aaggcttcgtaattntgattctccnaaaagaatatccaaaattntgtggaacatttgctatattgcatgtacgngacattaccactggatatgacagtagccagcctaataagaaatcagtgctgcctgtgagtaaaaacagccaaatgattacatttacttttcaaaatggctgtgttgctacccttcggacaagcggaacagaaccaaagataaagtattatgcagagatgtgtgcgtcacctgaccagagtgacactgctttactggaggaagaactgaagaaactcattgatgctctgatagagaattttcttcagcctagtaagaatggactgatctggcgttctgtttaggggtacaccaatacgtcatgacactgtgtgggcatatggaacagagcaaccgagaactgcatacattgaaccttgtgttagcattctctctctatctcatctggccgagtatctttttccttttattttctttctttttggtcaactggctagactaaacaaagtataagtttgaaatgaaatggtctagagggaaatgattcaaattttttcataattcaaacaaaagttattacactaaaagtattatagtaacgtattgtccttccgttaacagaaacatcacaattcaaaagtgagttttcttattatagtgtgattaagcctagttctgtatctcgtaattgtgtatagcatggtaaaaaaaaaaaaaaaaaa

SEQ ID NO: 234723 - DNA, 699 bp, Homo Sapiens
  misc_feature (20)..(20): n is a, c, g, or t
  misc_feature (66)..(66): n is a, c, g, or t
  misc_feature (89)..(89): n is a, c, g, or t
gcttcagaacctgcagcatntgcatatcactgggaacaaagtggacattctgccaaaacaattgtntaaatgcataaagttgaggactntgaatctgggacagaactgcatcacctcactcccagagaaagttggtcagctctcccagctcactcagctggagctgaaggggaactgcttggaccgcctgccagcccagctgggccagtgtcggatgctcaagaaaagcgggcttgttgtggaagatcacctttttgataccctgccactcgaagtcaaagaggcattgaatcaagacataaatattccctttgcaaatgggatttaaactaagataatatatgcacagtgatgtgcaggaacaacttcctagattgcaagtgctcacgtacaagttattacaagataatgcattttaggagtagatacatcttttaaaataaaacagagaggatgcatagaaggctgatagaagacataactgaatgttcaatgtttgtagggttttaagtcattcatttccaaatcatttttttttttcttttggggaaagggaaggaaaaattataatcactaatcttggttctttttaaattgtttgtaacttggatgctgccgctactgaatgtttacaaattgcttgcctgctaaagtaaatgattaaattgacattttcttactataaaaaaaaaaaaaaaa

SEQ ID NO: 234724 - DNA, 642 bp, Homo Sapiens
tgacagcatgcattcagatattttcccagctcgtcactatagtaattgggagacagtcctcatcctggaagaactcagaggggatgaaggcacgaggagtcagaggcctgaggagtcagagcctctagagaagaaaggaaaatatgagggaccaaaagcaaaacctttaaatacttcatctaaaaaatggggctctttttttattgattcagttttgggactggaaaatacagaagactccttggtttatacatggtcttgtaagagaatcagtacttacagcactattgcaattccaagtattgaagcaatcgcagaattacctctggactacaaatttacaagattctcttcaagcaattcaaaaacagctggctactatccaaatcctccactggtcttatcaagtgatgagacactgatatccaaataagttgtctttactgaaaaatgaagtgaagacccatatatgcagttaaaaaaaagttaattttcaaaaaatactgtaaaagactttaaggaacaagttttattgaccaataagttgatatttgtccataggtctcctttctataaatcatcttgatgtttaacaactcttattatattaaaatctcagtatcctaaaaaaaaaaaaaaaaa

SEQ ID NO: 234725 - DNA, 756 bp, Homo Sapiens
  misc_feature (41)..(41): n is a, c, g, or t
  misc_feature (62)..(62): n is a, c, g, or t
  misc_feature (125)..(125): n is a, c, g, or t
gagagtgcacaggaactttctgcatattctttcaagagatntcgaggtcactgactcttttntcaagacttaaacacaaaatccacatccatcattcttgcgtaaagagaccattcttttttttntgagatggagtctcgctctgttgcccaagctggagtgcagtggcatgatctcggctcactgcaagctctgtcttctgggttcatgcccttctcctgcctcagcctcccaagtagctgggactacaggcacccgccgccatgcccggctaattttttgtattttttagtggagatggggtttcaacatgttggccagaatggtcttgatctcttgacctcgtgatcctcctgccttggcctcccaaagtgctgggattacaggtgtgagccactgcacccggcccaagatggggtttcatcatgttgacctggctggtctcaaactcccaacctcaagtgatccactcacctcagcctcccaaagtgctgggatgacaggcgtgagccacagtgcccggcctagtacattgtttaaatggtgcatgtaaaacctcatggtactacaactgcctggtgacagactcaccagagtaaataactatcctgctgttctccaaccacatgggattccccaaacaaagatttgttgagtccaagatgcatcatgccagaactcttgcagtcatacacataatttgtttcattttaataaatacggttatcttttttcttcaaaaaaaaaaaaaaaaaa

SEQ ID NO: 234726 - DNA, 672 bp, Homo Sapiens
tgtaccaagtgtgaactggggtcattcggtctgtgatctcgttgcactgctccaagtctggctgtgtccaggcggtccatgttgaaaatggaggatggctgctgacttctgactggctgagcagtgggttccttcaggttccttgccaaccctcctcccctgcccacaacttctccaaacaaagcaggctgtttgctcacttcttcaaaaggaggaatgataacccaaatctgcccaagtgacacttgagaaggttttggctggggttcctggtggatttcttactacctaacgcccaagaaaaccaactaaggactctcaaaccatacctggtgggggttcttcgctcaacctcttcttccctaggtcaaagccactatcatctgatgtgttagggatgggttctgattggcagaaattaatcagctcccaatgggagcccacggaactaagtagggtcccaagaaaaaaaacgggagctatttcacagagctgagcttctgccaaatttcattcctcaaacctttcaggaggggtggttggcgtttctaaaatgtttatgggatttgagttgcaggtgtccacttaactgactagctttgataaacaatgtcagattttaactatgaaaacgacattaccttgtgcatttttaaaaaaaaaaaaaaaaaa

SEQ ID NO: 234727 - DNA, 657 bp, Homo Sapiens
atcgtcactctttcttcctcgcggacgtcctgcccatcgctctgagccggcgccccaagtagagccagagtagttcgtacccagccttttcacgtaactcggccgaggtgttcttctccgaattttttccgtcaggcccagattagcagattttggggtcagctgggagaggcgttaacttttcttcgcacactcttgctttgtgcgctcaaccacagtctgaattctcgcagaggcgttccttgagtagcccttggccacactgctcacctccctgcagaagtcaaagccccagccctcctctgcgaatcccgaggccagcctggttggttaccttctccccttcgccctttactccaggccgtccagcatcaaacactagcctccacacgtggaaaagaccctgactcccacagtagactagtcttatgggagtcctggctcttgggccaggctgcattaggaaaatggaaaccagactgtcttcaaattcttctgcctagccttagccattagagagaggtcctgctaaagatggactgcaaatgcgcttgatggaaggagatgtcaattccactgaagtcctcatttctgctgtaggtgatattatgtcgtgactttaggagaagtaatggtgataccaaaaaaaaaaaaaaa

SEQ ID NO: 234728 - DNA, 715 bp, Homo Sapiens
  misc_feature (120)..(120): n is a, c, g, or t
gtaagagacagaagaaatatatctatacattaccttgtagcagcagtacctggaagccccagcccgtcacagaagttggagggggctcctgactagacaatttccctagcccttgtgatntgaagcatgaaagttctggcaggttatgagcagcactagggataaagtatggttttattttggtgtaatttaggtttttcaacaaagcccttgtctaaaataaaaggcattattggaaatatttgaaaactagaaaatgatggataaaagggctgataagaaaatttctgactgtcagtagaagtgagataagatcctcagaggaaacagtaagaagggataatcattaagatagtaaaacaggcaaagcagaatcacatgtgcacacacacatacacatgtaaacattggaatgcataagttttaatattttagcgctatcagtttctaaatgcattaattactaactgccctctcccaagattcatttagttcaaacagtatccgtaaactaggaataatgccacatgcattcaatgggatcttttaagtactcttcagtttgttccaagaaatgtgcctactgaaatcaaattaatttgtattcaatgtgtacttcaagactgctaattgtttcatctgaaagcctacaatgaatcattgttcaaccttgaaaaataaaattttgtaaaacatcaaaaaaaaaaaaaaaaaa

SEQ ID NO: 234729 - DNA, 584 bp, Homo Sapiens
accagggcccccaaggaccccaaggcgtgcccggcaccagcaaggacggccaggacggtgctcccggcgagcctgggcctcccggagatcctgggcttccaggtgccattggggcccaggggacaccggggatctgcgacacctcagcctgccaaggagccgtgttaggaggggtcggggagaaatcaggctctcgaagctcataaaattcaacgtgaggaagcaagtgacaaggacgcccgaagcacagtggacggtcatgaaggagcgggggtgtggcaggcgggtgacgtccaggagagggagcgcccctggctgcccctcggccgccgactggacgcgcgggccttgccagcgagcaccctcatcgggctgtcgcctgacagcatacctcaaaaggccctagctaataaacctgtaagcccagcatttgagagaaggtagggtgtgtatatataaaaggttgtgtacaactccacgaggtgaaaaatattcagtaacttgtttgcatagcatttgtgtaaagactatgatctcatcccaataaaatgatatattaaatcttcaaaaaaaaaaaaaaaaaa

SEQ ID NO: 234730 - DNA, 673 bp, Homo Sapiens
  misc_feature (17)..(17): n is a, c, g, or t
cgagcgcactgggtgtncaaggaggggaccagatgtgggtgccaccatctactttgacaacctgcagtcgggtgaggtgacccagctgctgaacaccatggggcaccacacggtgggcctgaagctgcaccgcaaggggaccgctctcccgagcctggccagacctggacccgtgaagtcttcagctcctgcagctctgaagtggttctgaacacaccacagccatcagcactggaatgcaaagaccagaacaaacagaaggaagccagcagccaagccggggcagtttcagtctccaccccaaatgcaggactgtagaagcggccaggaagaaaaccaccccctcttaaggttgtttttgtgaccgttctttggagcattgttctaaaaatgggaaattacatattgctgtgccaagggcaacaaacacctgcagttaaaggaataccttccgcgaggcggcttttcggagcatgcatgtttatagctccagccaggccagaccgagggctgctgcataagccctgcttggtgcatttctttacttgcaaggggacagagtgtgggcttaggtttgggactagagggggctttggcaactatggtgctcaggtgattatccttcgctcgtttatccaataaacatttatcaagcaaaaaaaaaaaaaaaaaa

SEQ ID NO: 234731 - DNA, 720 bp, Homo Sapiens
accagcaagaaattaatggacaaaacgaaaaggggagtctttttagttaagctggcaattaccagaacaattatgtttcttgctgtattataagaggatagctatattttatttctgaagagtaaggagtagtattttggcttaaaaatcattctaattacaaagttcactgtttattgaagaactggcatcttaaatcagccttccgcaattcatgtagtttctgggtcttctgggagcctacgtgagtacatcacctaacagaatattaaattagacttcctgtaagattgctttaagaaactgttactgtcctgttttctaatctctttattaaaacagtgtatttggaaaatgttatgtgctctgatttgatatagataacagattagtagttacatggtaattatgtgatataaaatattcatatattatcaaaattctgttttgtaaatgtaagaaagcatagttattttacaaattgtttttactgtcttttgaagaagttcttaaatacgttgttaaatggtattagttgaccagggcagtgaaaatgaaaccgcattttgggtgccattaaatagggaaaaaacatgtaaaaaatgtaaaatggagaccaattgcactaggcaagtgtatattttgtattttatatacaatttctattatttttcaagtaataaaaccatgtttttcatactgaaaaaaaaaaaaaaaaaa

SEQ ID NO: 234732 - DNA, 680 bp, Homo Sapiens
cggcacgagggcagctggtgatttatgaagagatcagcgaccctgaggaagatgacgagtaactcccgtggggatacgacacatgcccttgatgagaagcagaacgtgtgacctttcacgaacatgggcatggctgcggctccctcgtcatcaggtgcatagcaagtgaaagcaagtgttcacaacggtgaaaagttgagcgtcatttttcttagtgtgccaagagttcgatgttagtgtttccattgtattttcttacagtgtgccattctgttagatactatccttataattgatgagcaagacatactgaatgcatatttcggtttgtgtatccatgcacctacgtcagaaaacaagtattgtcaggtattctctgcatagaacagcactatcctcatctctccccagatgtgactactgagggcagttctgagtgtttaatttcagactttttcctctgcatttacacacacacacacacacacacacacacagagagagacacacacacacaccaagtaccagtataagcatctcccatctgcttttcccattgccatgcgtcctggtcaagcccccctcactctgtttcctgttcagcatgtactcccctcatccgattcccctgtatcagtcactgacagttaataaacctttgcaaacgttaaaaaaaaaaa

SEQ ID NO: 234733 - DNA, 673 bp, Homo Sapiens
tcagatgagtgttgggtgaatctgtcatctggtaccctccttggttgataactgtcttgatacttttcattctttgtaagaggccaaatcgtctaaggacgttgctgaacaagcgtgtgaaatcatttcagatcaaggataagccagtgtgtacatatgttcattttaatctctgggagattattttccatccagggtgccatcagtaatcatgccactactcaccagtgttgttcgccaacacccacccccacacacaccaacattttgctgcctaccttgttatccttctcaagaagctgaagtgtacgccctctccccttttgtgcttatttatttaataggctgcagtgtcgcttatgaaagtacgatgtacagtaacttaatggaagtgctgactctagcatcagcctctaccgattgattttcctcccttctctagccctggatgtccacttagggataaaaagaatatggttttggttcccatttctagttcacgttgaatgacaggcctggagctgtagaatcaggaaacccggatgcctaacagctcaaagatgttttgttaatagaaggattttaatacgttttgcaaatgcatcatgcaatgaattttgcatgtttataataaaccttaataacaagtgaatctaaaaaaaaaaaaaaaaaa

SEQ ID NO: 234734 - DNA, 670 bp, Homo Sapiens
gtttagcttaagacccaagaaatgctgtttgctcatggtaaacagaaacagcatcttcgctacaaccactgacaccagctggcgtcataggtagctagatcattgcatttgttttgaaatgttaatatgttaaatactaaactaatatttcaaaaatgtgtatatatgatttctatatccttgtttttcagatagcctgcttataatttaatataaattaactgatgcattcataagatttcaataatgaaatggttcccttttaaaaaataaaaatactttgtagattaaaaataaatcagaatttcaaatttaaaattgtccacacactaggaaatagaactgtgttaatatataagaaatctggggataattaagaatgaaggacttttctatcatttccattttataaattgccacctgtgaaaatggtttttgcacattatttgtatttttctttgtatatgaaataattttttgtactttgtaaaatatggagcccattgtaccttcagctatttgagactatacacagtgcttcttttgtaactggattactttaactttcgtgaaggcattacattgcctcacattcactaaccaccttgaattaaatttatttcttaagaaaaagcatccctcatttactgtgaaaaaaaaaaaaaaaaaa

SEQ ID NO: 234735 - DNA, 705 bp, Homo Sapiens
gccgtgttttgaggcccagcagagtaagcccttggccgtgatgtgtctgaaacacctgttaggggtccctccatatgtcagagcctctctgggatgaattcaagccagaaaacccagtcgaggctcaagtttgaatttcagcttcactgtgtggctctgggaaaatggctttcccactctgtgcctcagtttccttgtgtttacaagactaatcccattgactgtttattaagcacctactgtgtgccaagcgcttttacgtggcttctccctcagccagccttgagaaggctggaggtggtgtcatcacctccattttacagacaaagcagctgagaccccagcgaggggcggagacctgtcccacgatcacccagcaggagtcgtggcagaacggagcatcagccagaccctgttgtgggcgttgtcatcaagggagcttgaatggagggtctggtgtcagatacagccgactccagccccagctcatcccccatgatgctgtgtgacccactgggcactctggtgagggagctttccagacatcaacagcccactctgcttccctttctgagtcccctgtccagcactgcctagtgttggagggtagaccaaggctgtgcatgattcaccccctccttccatcctggagctggcagtgaataaaagcccgtatttacaaagatgaaaaaaaaaaaaaaaaaa

SEQ ID NO: 234736 - DNA, 741 bp, Homo Sapiens
  misc_feature (53)..(53): n is a, c, g, or t
  misc_feature (78)..(78): n is a, c, g, or t
cacagaagtcacagctcatcaatcatcagagaactcatacagtaaaaaaatcntaggaatacagttaatagtagtctntgacagatcatcttggacttcaggaaatgcaattatgataacgtttgtagacagtcacgtcatgttaggtgtctgtactccatgaggatgagaactctaaatgaggtggtgtatggaaagccgatcataattcatagagtagagtgaacctatgactgcagtggatctcaaaaacttttaaaaccatagacaagccttatagagtagaacattcacagcaaagaagaatcctgtgaatgtccaaaagccttccagaagtcaagtctcttaagctattagaaatattcccactggggatgagggaaaaccccatgaatgcgggaaatgaggcaatatttttaagaaatgacagttcattgtacataagaaaatgctcttaggaatgaagttctatgaaagtactaaatatgggacagtgcaacaagtaaccagactattttgtattttggagaattcatattatggagaacctaacaatttaaagacactgggaacacttgcccctcagtatagtactgtcaagggaagccatacactttttgtagacatgggtaccaaaaatacccaattctaagtggttgacagatgttcactttgaagtgtgaagttttaaaaatacgtgaataaattggttattgaaacatcaaaaaaaaaaaaaaaaaa

SEQ ID NO: 234737 - DNA, 708 bp, Homo Sapiens
  misc_feature (15)..(15): n is a, c, g, or t
  misc_feature (18)..(18): n is a, c, g, or t
tctgtgcaaaaagtntcncaggtggttgagagcaccaggcctggcaagaaggtctggttaggagaaacaagctctgcatatggaggcggagcgcccttgctatccgacacctttgcagctggctttatgtggctggataaattgggcctgtcagcccgaatgggaatagaagtggtgatgaggcaagtattctttggagcaggaaactaccatttagtggatgaaaacttcgatcctttacctgattattggctatctcttctgttcaagaaattggtgggcaccaaggtgttaatggcaagcgtgcaaggttcaaagagaaggaagcttcgagtataccttcattgcacaaacactgacaatccaaggtataaagaaggagatttaactctgtatgccataaacctccataatgtcaccaagtacttgcggttaccctatcctttttctaacaagcaagtggataaataccttctaagacctttgggacctcatggattactttccaaatctgtccaactcaatggtctaactctaaagatggtggatgatcaaaccttgccacctttaatggaaaaacctctccggccaggaagttcactgggcttgccagctttctcatatagtttttttgtgataagaaatgccaaagttgctgcttgcatctgaaaataaaatatactagtcctgacaaaaaaaaaaaaaaaa

SEQ ID NO: 234738 - DNA, 581 bp, Homo Sapiens
caaaccctggggacagagtgactgtggacacaaggaagatgctggcgtgaggtgctctggacagtcgctgaaatcactgaatgcctcctcaggtcatttagcacttattttatccagtatctttgggctccttctcctggttctgtttattctatttctcacgtggtgccgagttcagaaacaaaaacatctgcccctcagagtttcaaccagaaggaggggttctctcgaggagaatttattccatgagatggagacctgcctcaagagagaggacccacatgggacaagaacctcagatgacacccccaaccatggttgtgaagatgctagcgacacatcgctgttgggagttcttcctgcctctgaagccacaaaatgactttagacttccagggctcaccagatcaacctctaaatatctttgaaggagacaacaacttttaaatgaataaagaggaagtcaagttgccctatggaaaacttgtccaaataacatttcttgaacaataggagaacagctaaattgataaagactggtgataataaaaattgaattatgtaaaaaaaaaaaaaaaaaa

SEQ ID NO: 234739 - DNA, 754 bp, Homo Sapiens
ctggagtgcagtgcgcgattttgctcactgtaacctccatctcctggttcaagcaaattctcctgtctcagcctccctagtagctgggactgcaggtatgtgctaccacacctggctaatttttgtatttttagtagagatggagtttcaccatattggtcaggctggtcttgaactcctgacctcaggtgatccacccacctcggcctcccaaagtgctgggattgcaggcgtgataaacaaatattcttaatagggctactttgaattaatctgcctttatgtttgggagaagaaagctgagacattgcatgaaagatgatgagagataaatgttgatcttttggccccatttgttaattgtattcagtatttgaacgtcgtcctgtttattgttagttttcttcatcatttattgtatagacaatttttaaatctctgtaatatgatacattttcctatcttttaagttattgttacctaaagttaatccagattatatggtccttatatgtgtacaacattaaaatgaaaggctttgtcttgcattgtgaggtacaggcggaagttggaatcaggttttaggattctgtctctcattagctgaataatgtgaggattaacttctgccagctcagaccatttcctaatcagttgaaagggaaacaagtatttcagtctcaaaattgaataatgcacaagtcttaagtgattaaaataaaactgttcttatgtcaaaaaaaaaaaaaaaaaa

SEQ ID NO: 234740 - DNA, 569 bp, Homo Sapiens
acagtaaggaccagccaagcttcagctgtcccattcctccccatacaacacacacacctttcaggcagggaggagatgagcttccagccccaagagtggaggctgccacatcctaacatagtatctattgaaaaggaagcagtgtgtatctatgattatatctctgttcatctatatatttttgacatgtagcaacacctctccatcttatcaaggaactcaactcggtctgggtctccccagtgcccagtggtggcctttgacaggtaggaggatgcagtgctgcaggctattttgttttttgttacaaaactgtcttttcccttttcccctccacctgattcagcatgatccctgtgagctggttctcacaatctcctgggactgggctgaggcaggggcttcgctctattctccctaaccatactgtcttcctttcccccttgccacttagcagttatccccccagatatgccttctccctccctcccttgccctggcatatattgtgccttatttatgctgcaaatataacattaaactatcaagtgaaaaaaaaaaaaaaaaaa

SEQ ID NO: 234741 - DNA, 587 bp, Homo Sapiens
tacagaaacgatctgaacaactgggtggcagaagaaattctagcaattaagtatgtggaacaccctcagatagacagcctggacctgcgcggagaagtgcattaccccaacctcagctttgagacaaaggagctggattttggctgcatcctgaacgatactgagctcattcgctacgttaccatcaccaactgcagtccgttggttgtgaagtttcgctggttcttcttggtgaatgatgaggaaaatcagataaggtacccccagcacagaactctcacagaactctgcttttcatttgttttctctttcaggcttttcatggggttttctgtattccatgtactggccattcatgaatattttccattttgaccactaattattgacagaattaacaaggagcttaaaatcacgatccatcctcgatttcctaacaggaaacatagataaaacatctttgaaagtcccaatcaccaccgaattaacaaagcaatatccataagcccactttaattttgagtctagtgataagaccattagaaattcatcactaaaaaataaagtctttgtagaattgtttaaaa

SEQ ID NO: 234742 - DNA, 593 bp, Homo Sapiens
tacggccgggaggacaacaccctcatcatgaccactcgaggtggtggcctgatcatcaagatcctgaagcgtacagcagtgtttgtagagggaggaagtgaggtgggtcccccaccagcccaggccatgaaactcaatgtgccccgaaagacccggctttacgtggatcagacactgcgagagcgggaggctggcaccgccatgcaccgggccttccagacagacctatacctgctgcgcctacgtgctgcccgcgcctacctgcaggccctcgagtccagcctgagccccctgtccacgacagcccgagagccactcaagctgcacgccgtggttcagggccttggccccacctttaagctcacacttcacctgcagaacacctcaacaacccgtcctgtcctggggctgctggtctgcttcctgtacaacgaggcgctctattccctgccccgggccttcttcaaggtacccttgctggtgccagggctcaactaccccctggagacctttgtggagagtctcagtaacaagggcatctcagacatcatcaaggtgctggtgcttcgagaaggccaaagtgcacccctggt

SEQ ID NO: 234743 - DNA, 558 bp, Homo Sapiens
ccaaataagagcagagtgcataacaaaattagatattcaaacggagtcctcccattccaagaaactggaaacccctagtttatgttaaaaggccagtctaaattctttcacttacatctttacagaaaactatattttctctcttccatacccagaaatctaatcagaaaactgacttttctcatgttcaactggacctaggggaatatgacagaaaagcatcccataggctttaatatactttttaaaatatataaaactgaaaattaatagccatttaccctgaaagagttctgcgtggactttgtcacttgcatagtaatagcatgtgcctcattgttcagaagattagctttaggtcctattttcaaatacgaaatggtagcataagctgtaaaactgtagtcttctctgcagaaaataaaggccaacaataagaaagcttttgaaggaatcacggaaaacaaatttataaaagaaataactatatgcgcagtaattcttaacacattgacttgaaataataaaatttacaagaatgcaaataaagcctttaaa

SEQ ID NO: 234744 - DNA, 476 bp, Homo Sapiens
tagaaacaggctgggaaccaggagtgcagcttctcggagtacgtggctgccccacggggtgggatgtgcattttcagtcacatttggggagagcacgcgtgttcttaagtttttagtgggttctagtaagaatggatgttgatttttagaattctctcctgtttattttttaacattttgtggtgggaatttgtgaaagaatacgaagtcaagagcatggtacggtgaggacccagcaccatctccaacctccccggggtccacgtggggtctgcgtgtggccgcctgtccctcagcacgatgtctgggtgtaaatctgagacatcacagcatgcaggctgcagacgtaggcatctctacaaaagaaggatgcgtttacaggagaatcgcttgaacctgggaggcagaggttgcagtgaatcgagatcatggcactgccctccagcctgggcgacaaagccagactccgtctcaaa

SEQ ID NO: 234745 - DNA, 532 bp, Homo Sapiens
tgctccttataaatatgttgatatctcagaagacagcatcccggttttcattttataaagtgccatacttaagaatgctgtaatacttatcttttataacatgtttccttcgctttgcttgtcttttatgtcatcagttttaactgtttacttcatttaacagtttacatcattcaacagtttacttcattaaacagtaggtggaaaaatagatgccagtctatgaaaatcttcccatctatatcaaaatacttttcaaggatatacttttcaaaacaaacgatttaaattttatgtttaaaatataaactttagatttaaactttatttaaatatctggttcctatgattttgacttcagtaagttcaaataaaatatattttgcaattcatttttacattataatttaaaaagaagaagcgataagtggagtcagtttcaatgctaggtggggtggttaatgatttttctggtgttgctgctaatgtggattaacaaataaaaacattcattgccttttgcctcataaaa

SEQ ID NO: 234746 - DNA, 492 bp, Homo Sapiens
tgcctcagcctccggagtagctgggaatacaggtgcaggctgccacgcccggctcatttttgtgttttagtagagatagggtttcaccatgttgcccaggctggtctcaactcctgagctcaggcaatcctcccgccttagcctcccaaagtggtaggattacaggcgtgagccactgcacctggccctcgactcacagattttcaaaatacttttgaacagtaagctgaggacagtgtttattatgactatactggtctcctttcactagctcacaaaatttaactacatcacttgtcagtctcctaaaaatgcagtgtatgtgctttgaaacttgtgaatgatctgctgatttgtgctattttatattcaatgttgttgaaagaatagtttttaaaccaagtaatgcaaaaatttagtgtaacatgaatgcttgtgctgtaaaacatactggaaaatcaatagctctggaataaactttggatttttaat

SEQ ID NO: 234747 - DNA, 532 bp, Homo Sapiens
  misc_feature (366)..(366): n is a, c, g, or t
ctaagcagtctgggtcagagcctgatttgatcttctcttgggatacgttgtcattgaggcagaggaactagttggacttaggtggggaaagcaagacttaggggcttgaaattttctgagtttctaaaaatgttgtcaactattttgtttcaatcattacaaatattttgtattcttatagaaccatgtcattgtacagcattctatttttctttattaagaacaaaatgggcctggcgcggtggcttacgcctgtaatcccagcactttgggaggtccaggcgggcggatcacgaggtcaggagttcgagaccagcctggccaacatggtgaaaccgcatctctactaaaaaataattacaaaanattagctgggcgtggtggtgggcgcctgtaatcccatctactcgggagggtgaggcaggagaatcgtttgaatctgggaggcggaggttgcagtgagcggagatctgccattgcactccagtctgggcgacagtgcgagactccgtctcaaaaaaaaaaaaaaaaa

SEQ ID NO: 234748 - DNA, 492 bp, Homo Sapiens
tacctagttagaaagaatatatcaaggaatactttccccacaaattatccatcagaaagttgctcaagagtcttctactcttttatcccaagcaggaatccttagtccctggtatggagccacctctgctaaagtactcacagcgtttgggaactcacttctttcacggcaacttacaccatgcttggtgtaagaggcttcaattctaggagctgtctttgtctttgcctctcatctttttccacttctaattcatcacccaagtagaacaaatgttctacttctgccttctcatagccccccagtaagccttctcttttccacagtaattacagcagcctatcctcaatagaaatggttaaagacttcttatcctccgatttaccctcttagaaagtggctccaagtttcaatactccagatgcagtcttaacctgaaaatgggatttatcattacagtaccatgagtgaaatacatcctttactaggaaa

SEQ ID NO: 234749 - DNA, 330 bp, Homo Sapiens
  misc_feature (72)..(72): n is a, c, g, or t
tggtttctagtttcagttgacgtacgagcctgctgccagctggcctcacatctttcatgtgactctcacaanccggagacccggacattggagaaaccctcagtaagagagatccaactgggttcagaccccgaggctgtgttgacgggacatgaggcaggatatagaccaggagccacctcctgaaatttagagcaaaactacaaaacaaggcctttgggagaccagggtgggagcatcacttgagcccaggaatttgaggcaacagtgagccatgatctcaccactgtattccatccagtctggacaagagagcgagaccctgtctca

SEQ ID NO: 234750 - DNA, 454 bp, Homo Sapiens
aaaaggaaaaataccaagatattattggattctatcttttaatttgggaaagatgcctgtggattttatttctccaaacaattcctttccatagatgtgatttctggtggtaagaagcctatcagtcttctacctcagtgatttaaaaaaacaaaaaaacaaaaatgaaaaacaattctgccagacataaatgtcctctgtttgtatttatgcggtttgctgtgcccaatcgacctttctgcccaggtttaatgatgccacttaaaaagccattcacacgtcccctctcctttcagagctttcaagctgaaattgatttccttattcaaccccccctcccacttcccactggctgccaacccatgctccttcccccaacctgattatatggaagtgctgtcactgggcagagggttttttttttttttttttttttgccacgtctattaagaag

SEQ ID NO: 234751 - DNA, 501 bp, Homo Sapiens
gtttatcagaatttgattctcttcagaatgcttttggccaggtgtagggggcacgccagtaatcccagcactttgggaggccgaggcgggcagatcacctgaggtcaggagtttgagaccagcctggccaacgtggtgaaaccctatctctactaaaaatacaaaaagattagccaggcatggtggcatacacctgtagtcccagctactcgggaggctgaggcacaagaattgtttgaacccgggtggcagaggttgcagtgagctgagatcatgccactgcgctcctagcctgggtgacagagcaagactccatctcaatttaaaacaaaaaaagaatgtgtttttaattttgttaatgtttgtctgttatacatagcactggtaccgcaaacattttacttaaactcttaatagcatttctttcgccagatactttaatatttcaccttacattaatcctggattcacatttctttaattgaaataaatgttaatgac

SEQ ID NO: 234752 - DNA, 430 bp, Homo Sapiens
tattgaacacttactcactagaagtgagttctttagaaaaatacagtgaaggactcagttcagtcttgtttttatcagagtgataatcatcctgtttcacatcccaatactattttgaaattctaaacaattaaaccaaaattccaataaatataaggttatgccttcaatatattcctatacaattctgtaaccatggtttaaaatacacaagcttaaaataacatgcttagaaatacacaataatatgaacagtatttcagccttaattgtgaatttccttgttattcaagtattaaatgaaatcttttgagtttttagccaaaaattggcatttttaaaatacgaaaatttccttggaattataatgtactgtacctcttcttttttaaataaaggcattttactatatggaaaataaaaaaaaaaa

SEQ ID NO: 234753 - DNA, 282 bp, Homo Sapiens
taatcatttctgtcatttcctgggtgtctctggtagcatccttaaactagggtggtgaagtatggcttatggcttatgcctgggctctcagaggaattgtgtgcttggcttccctagggcctgtgagcctggggcaggacgtgggtggtatgagagtttggacttaggccggcagctggtagggaacatctatccttgcactcctgagatcattcccctgccagagaagacacagctcctgttttggtctgatgaattaagctaattgtggtgcttaaactt

SEQ ID NO: 234754 - DNA, 437 bp, Homo Sapiens
tggtctggaactcctgggctcaagtgatccacctgcctcaaccccccaaagtgctgtgattccaggttgagccaccatgcccagccaacccaattaatttcgatgtaagagtacttttaagttttacagtagtatcaaaaaaatccacaattatctttaaaggttattaacatactcctcccttatcacttctccgtataaagtcaggtcttctttgatgcgttttaattaaaaagctttctgcaatagatggactgcaaaagcaaacgtgggaagccaaccattttttatagagcaaaacaaatttacaaaacataaaacaacaccattcttcccactacactaaagggaacattaaaagacatttgcaaaaatgtacaagaaagcgactcttaactctgcaacgttttctttaaaacctcgctttggcgtcgacc

SEQ ID NO: 234755 - DNA, 459 bp, Homo Sapiens
gtatacttaaatagctactttaaagttctattattaatttctattaagaaatgctgggtctttttttttttttcccttgattatgggtcagattttcctgcctctttgtatggctagtaattttttaattgaatggtaggcattgtgaataataccttgtaaggcatctggcttatgttatcttcctttaaatggtattgttttatttcttgttaaagaggattatttctgtttgaacttagtcaaatgtggtccataggctggctatttttgtaaatgaagctttattggatatagccatgcccatttgtttaatattaatatattatctggcttcttttgtgctataatagcagagctgagtagttgtaacatagaccctatgtgtcttagtccattcaggatggtataacaaaataccagagactagtatggagtatttagaagactgggtcgagc

SEQ ID NO: 234756 - DNA, 872 bp, Homo Sapiens
attattcttagcccggccaaaaaagtaaaggagtcttttttggagctccctagatttctttacatactttaaagaattatcatgcaatgtccaaatatgcaaaaacctcggtatcaccccccaacaaaaagaagtatcccatttaaatacaaatgctattttttttttaatggagactcactctgtcacccaggcaggagggcagtggtgtgatctcagctcactgtaacctctgcctcctgggttcaagcaattcttctgcctcagcctccggggtagctgagattacaggcgtgcgccaccacgccctgctgatttttgtatttttggtagagacggaatttcaccatgttggccagtctggtcttgaacttctgacctcaggtgatctgcccaccttggcctcccaaagtgctggaattacaggtgtgaggcacaacgcctggcctaaaaatgctaaaataatttaagccaactttgaggaataactaccttcaaatgatgcattattaagtatatggttatataagttttgacaaatgcatatacctatggaagcatcactaccatcaagataaaagaacattccatgacccctaaacactcccttgagcccttttgcagtcaatcacccttttcttaccaccctaggcaaccactgttctttctataactaaattctatctagaatttcatgtctacaggatcatacagtaggtactcgcgtctatcttcttttactcaccaagtttttgacactaatccatgttgttgcatgtgtcagtttgttcctttatactgcagagcagtatagtccattatatggatataccacaatttgtttagatcccaagaattccggaccggtccag

SEQ ID NO: 234757 - DNA, 907 bp, Homo Sapiens
  misc_feature (6)..(6): n is a, c, g, or t
  misc_feature (246)..(246): n is a, c, g, or t
aaaggncctgagggaaagtagaagagcgacctatggggggtttatagggcgagaactttctaggccggagggatccgctgtagccccagccccagagtgcagatgagcgtggtgtgtttgcaagggctgtgagggggccagtgtggttgcagcagagtggactggaaaggagaggggaggtgtgttctgagaggttcagggaggccagagctgtcattgtaagggcttgggcttttattctgagcntagtaggtgtctttggagggcttgggcagagcagggccaggctctagttcacatatgagcaggatcaggctggctcctgcaacaattctaggttaaagaggggtgaggacagaatcagggacaccagcaaggaggcaactgcaatactccaggcaagagaaaacggtggtcgggaccaaggtggtagcagcagaggtggtgagaagtggtcagattctggatccatttttaaggtagagacagcagaattcgctaatggattgaagggaggcatgagagaatgagaggaggcaaggatgcctccaacgtttttaacctaaacaactggaaggatagagctgtcattcccaagatggagataacggcaggcaaactggtgggttttttttttcttttgatggagagaccaggaacccagttctgaacttaagtttgaggtgtctagcggaacaccaagggagatgatgagagggaagggggtgcagggagaagactgggggagtcctgggcacagggatggcccagtcgagagatcagggagccagtgtggctgcagccagcagcgcggagaccccgccagtgcagtgcccgcctctgtgtctgtccctcctggttctctcccttattggcctggctcgcctgcctgtctcattgactgttc

SEQ ID NO: 234758 - DNA, 669 bp, Homo Sapiens
ttttttttttttttttttgagacccagtcttgctctgtcacccaggctggagtacagtggcgcgatctcggcccactgcaagctccgcctcccgggttcacaccattctcccgcctcagcctccccagcagctgagaccacaggcgcacaccgccacggccggctactttttttttttgtatttttagtagagatagggtttcaccatgttagccaggatggtctcgatctcctaacctcgtgatccgcccacctgggcctcccaaagtgctgggattacaggcgtgagccaccgcgcctggccatgattgcaatttcacctaaccaatgacccagataagaatctgtgctcatccactcaagattttaactaccatttacacaaattttcatctccagctcctgctcccctcttacaaattttaagatggtttctggatatagcctgaatggcctacaggcattacaaacttaagttcaaaccagaactatttccccctgacaaatctgctctaacagtattcctttacttggataatggcaccaccatctcccaggctcccaacctagaggcctcagaatgaacaaccgcccatagccaatcaaccagcaagccttgttctatctcagaaatccctccaaatccaaatcccacctctcttgtctctc

SEQ ID NO: 234759 - DNA, 580 bp, Homo Sapiens
tttttaaatagcattttggcgctcgaagttgatctccccagcgagggccccagcgtgaagccagggcccgggaagcaaatgcgagcctgtaagatagctaacagtgcacttaaaggaaaggggcgtcttgttcttgttctcttctttatcatacaccaaccaaggtttttatatcaaaccaaagggaaataatactctgctagaatatggactgttgaagtcaccaaactgtgattattgattctgtacataccattgttattaaaaaaaaaaagaaaagaacagagctttgtatatttgaaatgttataacgcaattgcactcagcgtggtatggtaaaagtttgtcctcccgtagattcttactgtgttgtagatacggtagggttcctagacaaatatttatgtactcaagccctttatttaacttattaactgtagaggcttccgaaaccttcaagataaaggcaatggtacagtacttttgtgtaatgtgtaattgttaccacttttccttgctatctagtggagaagtgtcacgctcaaaataaaaaaattatatgtttaaaaaaaaaaaaaaa

SEQ ID NO: 234760 - DNA, 566 bp, Homo Sapiens
gaattttcccaacgaattttctgccatgggcacccccttttgttgtcttaaatatgcaacattggaaatctgaagatctggcgtatgtaccctattacttggatttgtctgatcacaagtatttgttggaaggtgccacattatttaacaaagaggaacatcattattctgcagctttccagattggtggacattggatgcactatgatgggctcagaaatgtgaatttaattttgttaaataaacccccagagtttctcctcttgtcatcattggtttatattcgagcaacagagaaataaatatagattgatgctaaaagttgttttccctcctgcccatgctctcccagatgaagggcttttattttgtgtatacttggtatccaagaaaatagttcaactatactagtttcagaagtgtattttcagtgtttaaccccaggtaaatgttttatatagaggatctgtgcaaaaatgtttgtaatttttttatatttcctgagttatttttatatgagcatattttatgttggaataaaatatatcttgtggcaaaaaaaaaaa

SEQ ID NO: 234761 - DNA, 404 bp, Homo Sapiens
cctaaagcccctgtcaaacaggacagaatgtggtaacagaacagaggacaatgagcacacagatgagttccagcgactttagcacgctaaacacatggccaagtcggcctgagaaggtggggaaagtgggtgaagctaatgcttaaatacaaaactgcctcccatttgctaagcactaactaagtgctttacttatagtatcttacttaatcctcacaatgattaaatgaggtaggcaccactctctgcctttctttgacagctaaggaaacagtttagggaggggaagtaacctgtctgaggtcatccaatttggagtcacggagccagaccctagtctgtctgatttccaagcataacttattgcatccattctgccaggtttgccagtcctctgggacggc

SEQ ID NO: 234762 - DNA, 929 bp, Homo Sapiens
  misc_feature (6)..(6): n is a, c, g, or t
  misc_feature (30)..(30): n is a, c, g, or t
  misc_feature (51)..(51): n is a, c, g, or t
  misc_feature (69)..(69): n is a, c, g, or t
aagaanactggaattctcccagtgcttaanttcataatggagtcacaaagnctggaaattatcagactnaatgggagacccaggagggaagatgtggtcctactaactgctggagagcacaataaagcatgctcttgttaggaaaattacgactggaatgtgctgaccttctagaaacaagaggagtggtgctccgtgacccccactctgttctctttcctttgggtggtagatttcccactcttcctgcccaaggaggaaaatcccagagagctggaatcggcccaccacccatttactgctccccaccccagtgacatacatctcctgtacactgagcccaaaaaggcccgtagccaacactatgacttggttttaaatggcaatgaaataggaggtggttcaattcgaattcacaatgcagagctgcagcgttatatcctggcaaccttactaaaggaggatgtgaaaatgctctcccatctgctccaggctttagattatggggcaccccctcatggaggaattgccttagggttagacagactgatatgccttgtcactggatctccaagcatcagagatgtcatagccttcccaaagtccttccggggacatgacctcatgagcaataccccagattctgtccctcctgaggaactgaagccctatcatatccgagtctccaagccaacagactccaaagcagaaagagctcattgaatcatgcataccatgcagaaagttgagcttttaggttttgtcctctttgcttccccaaggctaaagtcagatctagagttctgccacaggtctaacaatcaagtctttagatggaaggaatccaggcaacattcttcaccacaacgaagaaacagataaaagatacccaattttgacttgaaaaaaaaaaaaaaaaggcgccgctc

SEQ ID NO: 234763 - DNA, 990 bp, Homo Sapiens
agctcggggggcgcccaaggtagtataaaaaaattctccagagcagagagaggagaacccccccccgcttgttactcttcgcttgcgccgctcggtgtctcgccgggaaggaagaagattttttttgtgccccggcaccaagcccttatgcccccgtgagggccccccggatttaggagatgtgcggggtgcttaagtgcggcttcccccccagcgcgttgaagaaccaaggggcccagcgagattttcttcccccaaccgggccagggcaccacctgggagtgggcacagctcccaccagcattgccacagcatggaggagttcagcccattacgacctactggatgcagcccacaagccaagaaggtggccgagggccacaaggccagtttctgcctggaggacagcacctgtgacttcggcaacctcaagcgctatgcatgcacctctcatacccagggcctgagcccaggctgctatgacacctacaatgcggacatcgactgccagtggatcgacataaccgacgtgcagcctgggaactacatcctcaaggtgcacgtgaacccaaagtatattgttttggagtctgacttcaccaacaacgtggtgagatgcaacattcactacacaggtcgctacgtttctgcaacaaactgcaaaattgtccaatcctgatctccgggagggacagatggccaatctctccccttccaaagcaggccctgctccccgggcagcctcccgccgaggggcccagcccccaacccacaggcacggaggggcatccctccctgccggcctcagggagcgaacgtggatgaaaaccacagggattccggatgccagaccccattttatacttcacttttctctacagtgttgttttgttgttgttggtttttattttttatactttggccataccacagagctagattgcccaggtctgggctgaataaaacaaggttttctaaaaaaaaaaaaaa

SEQ ID NO: 234764 - DNA, 944 bp, Homo Sapiens
tccatatggttcgttaagggggccaggggcccagggacttgccccaattttagaaaatcccctaatgtgcagttgttcccttttgtctgtatgaagggccccttgaatgactaatcccgggctggaagcatttcccctggggggtgtcggagtccatgagccaagcctgagggggacagtgagtctcccaggtctgccacactggtgcaccttgctggcacggtgcctcaggaaggtggcgactcaggtgggccttgagttatattttaactcagctgctcagttcccaggggcacatttctggatcagaacccatgggaaacaggaggtactaagtgcaatgtcttagcattctgcaaaatggagatctgttgtccagcggcttatctcctttttagtaacccttctttctgaacccagggcccttttcagccttccctcatattttcttgagatcaaactttacttctttcttatttactaagaatttgcctgtttgaataagaacaaaacgctaaggtgggtagcctaagctgattttctgctggttacacgtgtctctcacaccacatttcctcaaagctaatctgaattctgtaggctaaaaatattcatgtagcaaatctgagaattgaaaactgcagataaccggccgggtatggtgactcatgcctgtaatcctagcactttgggaggccgaggtgggtggaccacctgaggttaggacttcaagaccagcctggccaacatggtgaaaccccatctgtactaaaaatacaaaaatttgcctggtgtggtggtgcatgcctctagtcctagctactcgggaggctgaggcacgagaatcacttgaacctgggaggcggaggttgcagtgagtcgagataacactactgcattccagcctgggtgacagagtgagactccacctcaaaaaaaaaaaa

SEQ ID NO: 234765 - DNA, 732 bp, Homo Sapiens
  misc_feature (5)..(44): n is a, c, g, or t
ctttnnnnnnnnnnnnnnnnnnnnnnnnnnnnnnnnnnnnnnnntttttagacagagtattgctctgtcgcccaggctggagtgcagtggcgcgatctcggctcactgcaagctccgcctcccgggttcatgccatcctcctgcctcagcctcccgagtagctgggactacaggcgcacgccgccacacccagctatttttttgtatttttagtagagacagggtttcaccatgctagccaggatggtcttgatctcttgaccttgtgatccgcccgcctaggcctcccaaagtgctgggattacaggcgtgagccaccgcgcccggccctgttagatacttttttaaaaacaacagtttgctttaaactataaacattaaaccctcccaaaagaataaaaatgcatagtcagtagtttaaatgtctttattaatagctataattaaatcttttttcaaaatatcagtccaacataactccaatcatatctatcacactgatgggaggaaaaatgacaactacacaaagttttcccattactgataatttttgtcaaaagattccaattgtgagaaagtcagaagttccaggaagagaatttataattaccagctcagtttttaaaaatcactaaattagctgggcatgcagctcatgcctataatccgagcactttgggaggttagctaaggtgggaggattgcttgagcccaggaatttgagaccagcct

SEQ ID NO: 234766 - DNA, 686 bp, Homo Sapiens
cttttttttttttttttttttttttaaatcccagttaccaaaagaaacagtgaataatttattacatacgctataataccattactctaaacactattgtctatgaggtatatctgagaaaattcggtaaggaattgcgcggtctgcattgccaacatgcccaggttcatagtaaagctttggaaccgtgaagaactagaaaaaagggaagaacgagggaggcagaggaggagacatagagaaagaacctttggtattagtacaaatcttgttctttgcagggttgcattgcaaagcaccacagtacaataagcccaccaactgactgtatggaggcccagttgaagctgaggtattcacaggaagaattaaaaaaagcacagagaggtccagactggctaaatcgttgctttggttcaagcaaggcactcgtcccgtggttatgtcacactttgcaagtgaagcatgaggctggggggattgctgaggagaggtctgccaagtggggatgttttctgtgttcaggctgccatcgctctttctagatcctctctcgtatgggtgtggcagtaggaaagatgcggaaggtgatgttcgcttatagggagctctgctgctcaatgaattaagtcatctttgctctgtctcccagggattctgagagttctaattccaataggaattta

SEQ ID NO: 234767 - DNA, 856 bp, Homo Sapiens
ttcttccccccgagggacaccgctttcactggaccggacattctttttcatggcagtgatgtgtctctctcccagattttaaagccaaacaggtcaagagatcggcaaagccttgatggattctacagccatggatgggagctgagggtcgagaaagtgagagtgagcctgctgacccaggggacgtgagggaggaggagatggacagtatcactgaagtgcctgcaaactgctctgtcctaaggagctccatgcgctctctttctcccttccggaggcacagctgggggcctgggaaaaatgcagccagcgatgcagaaatgaaccaccggagttcaatgcgagttcttggggatgttgtcaggagacctcccattcataggagaagtttcagtctagaaggcttgacaggaggagctggtgtcggaaacaagccatcctcatctctagaagtaagctctgcaaatgccgaagagctcagacacccattcagtggtgaggaacgggttgactctttggtgtcactttcagaagaggatctggagtcagaccagagagaacataggatgtttgatcagcagatatgtcacagatctaagcagcagggatttaattactgtacatcagccatttcctctccattgacaaaatccatctcattaatgacaatcagccatcctggattggacaattcacggcccttccacagtaccttccacaataccagtgctaatctgactgagagtataacagaagagaactataatttcctgccacatagcccctccaagaaagattctgaatggaagagtggaacaaaagtcagtcgtacattcagctacatcaagaataaaat

SEQ ID NO: 234768 - DNA, 860 bp, Homo Sapiens
  misc_feature (25)..(25): n is a, c, g, or t
  misc_feature (215)..(215): n is a, c, g, or t
aacgtgacgggccaatcgggcatangggggaacaagttccccacggaggaggccacggagaggtgaaaacccttttaattcccatcgccttgcgacaagcccacaggcaggtgcgcaaacatgacgctgttcttccgaactggtcgctgagaagttcatcgatgacatggaggacgtcctctgcccggaccctcagatcgtgtgcccagaccttncctgccaaacagatgcaccgtggcctggcggcgagcccccggtcaccttcctccgcacggaagaggggccggacgccaccttccccaggaccattcccctgatccaacagttgctaaacgccacggagctcacgcaggacccggccgcctactcccagctggtggccgtgctggtctacaccgccgagcgggccaagttcgccaccggggtagagcggcaggactggatggagctgttcattgacacctttaagctggtgcacagggacatcgtgggggaccccgagaccgcgctggccctctgctaaagcccgggcacccgcccagccgggctgggccctccctgccacactagcttcccagggctgcccccgacaggctggctctcagtggaggccagagatctggaatcggggtcagcggggctacagtccttccaggggctctggggcagctcccagcctcttcccatgctggtggccaccgtgtcccttgctgcggctgcatcttccagtctctcctccgtcttccagtggccgctctctttataagaaccctggtcattgaatttaaggcccaccccaagtccagaatgacctcgcaagacccttaactcacaaaaaaaaaaaaaaaaaactcgagact

SEQ ID NO: 234769 - DNA, 702 bp, Homo Sapiens
  misc_feature (28)..(28): n is a, c, g, or t
ctttttttttttttttatctttggtgtnttatttcctccagtattttctgagtgcctgctgtgcatcaagcactgtactgaatagtgctgaggacccacaggaaccaaatcggcatcttctcatgaaattcagactagtggcagaaaactggacttgtgatgaaggagcagatgaagtgctctggaaattcaggggtgaaggaggaggatgagctgtctttagagatgaagcagtagtatacagaggaaccagagggggcaattccaaatgaaatgaacacagggcagcttgacagctcattgggcccatacaaagaacgtggttcattttgtgtgtgtggggaagggtgcaggaggtgggtggagttaatggagtagtggttgtatggtaccattgttaaaagcaggtgttttagcttattcactgtgcgacttcaggcacataacctctttgagcctgtccaataaaggtacagtatttacttcacattcaaaataatgcatttcaagcctgagcatcacggctggcacaaaactagtgtttttttgaacaccaactatcaaatatgtgatagaaatgccttgaatgtcaagataaagaatgtatatattctctgggtaacagggatcaaacagatttttgagcaagaggacactgatgagaggtacgtgtaagggactggatcctgagtcgaagtctaa

SEQ ID NO: 234770 - DNA, 732 bp, Homo Sapiens
  misc_feature (98)..(98): n is a, c, g, or t
cttttttttttttttttacactttagaagggtgagagctttatggtattgacttgtatctcaataaaaactttttaaaaattaaacacacacacaccnacacacacacacacacacaccaatttctttgcagtcctgcatttcttaggattcagttctggacttggtcttcactttctctgccttctggctgcaagaaatgcaaccctcttttaccaccaaggaggccctctggctctctcacttagctttcaattgctgattgattgcatttagctttttactacttttttccccagagtcttggaaagagccacctaactgcattggtctatttacgtaccagcgccatgctgtttaagtatcagaggcttcatagtatgttttaatattggctaagactaggccctgctcagaactcttctttccctgtgttttcctagctattgcgtgtgtatttttccataagaactttagcgtcaacttatctggttccatcgaaaagcatatgtgggtgtttttagggtgaccattaagcctatcaatcaactcagggagaactgacatctttatgcagtcaagtctttccatccgagggtgtggctagaccgggaagcccccaaaagttacagtggggccaatatgccaacaccagggtggccattgccaaagactgagggcctggaatgaaatacacccctgttcagatgagcaagccctcctctctgcccta

SEQ ID NO: 234771 - DNA, 495 bp, Homo Sapiens
gtacagacgggatctcattatgttgcccaggctggtcttcaactcctgagctcaagcgatctgggaagcctgcgcttctcagattcactactgggattacaggcatgagtcactgtgcttggcatgttatctaaaatccttaaaaagttttttcattttttcacctgaaacttggtttaaagagcctttccctaaactatataaaaaccaaacaccaatatagaagtttttgttttcaatgacttagtgctgctatccaatgccctatttgcttacaacattaaaagctatttatcatactatggcaaaatgaatttataagcagcaaaataacttctgactcatgagctgggtaaacataaacgttttagcatactaaaaacatcccaaccaaactggcgtgttttttttttttttaaacgcatttgcctaatagggagggaaattctgatccctggtcgagcggccgcgaatttagtagtagtaggcggcagc

SEQ ID NO: 234772 - DNA, 397 bp, Homo Sapiens
gtcgacccttttgccagatggcgcatttaactttgtggcatatcatcgactttcaaggaaagatttacttttcatcagattaaagttgaggaaggattttctttctaaatactgaggctctgaatttcccaagttggataccccagacagctagagtgatcttaaaagtgactctgagagttgacttaggaagtgtagacatttatccaaaatctgtatttactcctgacttacattacaaatacagagttttatttttaaagaaaatttcaataaaaagcaccatttaattaaaatctactcaccatcaaactttttaaaaagaacataagccaatgtcaggagttggagaccagcctggccaacatagtgaaaggcagtctctactagaaaaaaa

SEQ ID NO: 234773 - DNA, 527 bp, Homo Sapiens
gacttacagcttaggaaatgcaaagtcaagtttttcttttcaccctgaggcactcagtgcataaaggttcaagttttaaaactaagaatgtttccaaaagaccagcaatgttaaaagagtatttcgtgtatactagacgtgcctttaagcaataaaaattccaagagctgatcattattgtgcttccattttagaaaagtttatttagtaacaaacttcccagtgtagggaggtttttccttgcccttttgaacatgttaggttattttcttcctatcctggggccttaccaatgtgtaatgctttcaaagtttctatgaagcctgtgtggattctattttagcttatttatatattctcatttattttgaaggatattatacttaatttggttcagagtagtcgccaggttttgcacctgacaatggcacatattttttgtataactttttctaggtccttacccttttccacactttacatttgtacagtgaaagcaactgccagtggaggcctgaaatgtccaa

SEQ ID NO: 234774 - DNA, 532 bp, Homo Sapiens
tcccagacagcagctgtctggcccttgctgggtgagggcacaccactgccaggggtcagcctcgcacccaggccaggcagaagctgtgctctgaagctaggacagctggctgagaagtgggttcaggcgaagggtgaagccatgtgtagcagttcctgccagtgcagatctggagaggagctggcccggaaggcgtggttgtgaaagcgcccttcttatgttaggaggccttggcaaaattggatttcttcaaaaatacatgtaaaggtctgttgttgaattgtactctgcccctggaagcagatacagatggctgcctgctgctcggctttgcttttgcttttcccaccgtgttttcatctttgttcacttgaggctttccccagctggtgtgtgcaggacagttcatggtaatgttgccctctgaggccccgtacaccagaagggaggccctggaaaattttgtgcttccaacgtggccttcaattcttgcttttttgcccctcagaagcatggggcttttgagcacact

SEQ ID NO: 234775 - DNA, 627 bp, Homo Sapiens
tgctctgttaccttgttggttaaaggaccaaataagcatactctcacacaagtcaaggatgccataagagatggacttcgtgctatcaaaaatgccattgaagatggttgtatggttcctggagctggtgcaattgaagtggcaatggctgaagctcttgttacatataagaacagtataaaaggaagagctcgtcttggagtccaagcttttgctgatgccttactcattattcccaaggttcttgctcagaatgctggttatgacccacaggaaacattagtaaaagttcaggctgagcatgtcgagtcaaaacaacttgtgggcgtagatttgaatacaggtgagccaatggtagcagcagatgcaggagtttgggataattattgtgtaaaaaaacaacttcttcactcttgcacagtgattgccaccaacattctcctggttgatgaaattatgcgagctgggatgtcttctctcaaatgatgattgaattcaaaatcaacccttctagaagatgaaatttagtacactttacatctgactactattgtgtagcctgagccattctgaatttctacacaataaatgcagtttatgtcttttgggtaaaaaaaaaactcgtgc

SEQ ID NO: 234776 - DNA, 679 bp, Homo Sapiens
cagctcttcttggagagagaagggcccccttctttgatgcagttatgccgccttagaattcggaagtgttttggaatccagcagcatcataagataaccaaactcgtcctcccagaggatctgaaacagtttctcctacatctttaaatgcatctagggaatggattcacaaacgatgtgaaaacattattgagtgttgtagccactagaattttaaaatcaagttggatttatagagtttgactagttttttcgattagatttgtatttgttataaacttgtttatggagtttgactaattttttctattcaatttgtatttgttaaactcaagccagggtggaaagacactgcatacgtttgtattattagttagaaggcatgaagacttttttccctgcttggagagtgtcataagttattgttttgcatatctactgcatgccaagcactttctgcatcatctaatttagccctcacagccactgggtcaagatgtccaattttccagagtaaggatagaggagtcaaattcaaatacaggttttctgacattaacttatgtgatgacttgatcgaggcaggcttttccagcatcactgtcctggttccatctctgctatatgggaatgaaaataaagaaacatatttcttggcttgtctaaaaaaaaaaaaaaa

SEQ ID NO: 234777 - DNA, 592 bp, Homo Sapiens
tgcatggatcacatctactaatagagatttctaaataagggaggacgctgacatcaagcacatttcaagtagacacacagaactgaagaatttccacggggagaagcactcatggtcctcagaacattggcaatggccttggagaaagccccagaatccatggccacgggctatttccatagcgagacttctcagaagcatccttaggaggacacaacggcttctctgctttcaggggctgggagggaggggcgccgagcaccatctttcctctctgggagctgcagccttacggacaagcttcaaacctgagctacttccaacttccgcggggaggggcagcaggggagcgtggttccaccgctttctctcgcaccaaacgcggcagctgggcggccgtggcggtgaggggagaggcggccggcgctgcatgcgtgtttacgtatctcggatgggtgtgggaagaggagatagaaagattctaatgaaaagatggaggggagagagagagggggttgagaagaaggggaggcaccacctttcttttctctgctcttcctggggatctgaaaactcctcctaacaggccttt

SEQ ID NO: 234778 - DNA, 688 bp, Homo Sapiens
ttggtccatggaatgcctctacagccaagaaatctccccttaatggacaagctcttagatcttgatgacaagctacttatgaggcctgggtccagtaccatcctttcaactcgaaattggccaaatcgagctgtggagtttagtacatcatctctgtcatacacagtgcagtccaccaggagacgcaatccaccaccacgaactcttcatccgatcagcacgagccattcatgtgctgaaacaccaagatctgtggaagaaatcctcagaggagcccgagtcccagtggcacccgactcgctctcctctccctcaccgacgcccctgagtcgaaataatctgctaccacctattggcacagctgaagtggaacatgtgagcactgtggggccacaaagacagatgaaaccccatggcgactctagtcgagctcaaagtgcggtggtggatgaacctaactatcagcagccacaagaaaggctccttttgcccgactttttccccaggcccaacacaactcaatcatttttggtagagtgacgtacttcctagaatggtcttgatagttggggaaagaaaaggtggggggaataatagtttggcagacttaagattttatctagaggcttaacccagaataaaagttgagtttccaacaataaaaagtgttataaatacattttgttca

SEQ ID NO: 234779 - DNA, 537 bp, Homo Sapiens
cctgacgctgggcacagtgactcacacctgtaatcccaacacttctggaggccaaggcaagaggatcacttgagcccaggagttcgagaccagcctgggcaaaatagaccccatctctggaaaaacaacaacaaaactttccgcgtggtggctcatgcctataatcaataggactttgggaggccgaggtgggaggattgcttgagtccagaagttcaagaccagcctgggcaacatggcaaaaccctatctttacttaaaaaacaaaataaaacacacacacacacacacacaaaaacctagctgggcagagcagcacatgcctgtagtgctcgggtggctgagatgggagaatcacctgagctcagaagatggcagctgcaataagctgagatcccgccactgtacgcaagcctaaacaacctgagtgagaccctgtctcaaaaaaacaaaacaaaacaaataccctccctgagcttcagttcccctaatggtaaaatagagaaaataatacctataaaaaaaaaaaaaaaaaaa

SEQ ID NO: 234780 - DNA, 643 bp, Homo Sapiens
aatttttaccactttgtaaacttgctaccctttttgattagaagtaaaaatacaaatttccaacacaatgaatataatttggtttatttctctttgactctctataaaaaaagaactggaaaaactattgtattaactgatttcaagtatagaagccatcttgaagaaaagacagttacttgagctcttgtatttatcagatgatgaaaagtgcagagaagaaacaataaatacaaatgttcctagtcactgtgtaaatcacatttaaatttgatggggttttctaagaataacactaagtttataagtattaacaatcttttaaatctgaaaaatgttttataaatatgggtattagttaatatttgttatataaagtgttgaattattaactatttctttaaaacaggacagatggcctaattaaatgacaaaagaaaacaacatctttttacattttccctactgatactgtacatatgtaatataaagtacacattctggaagaaaaaaaggagtgacagtcagagcaagtgaggggtgggaagaggaggaagggagggaggaaatgaacatttttttccagaagcaacaaagcaaatatgacttggaaatgtcttcttggtaagagcggacgcgtggg

SEQ ID NO: 234781 - DNA, 537 bp, Homo Sapiens
tttctcatacctacaccccagtaggcatttggcaatgtccagagtcatttttggttttcagtatgaagggtgggtgctgctggcgtctggtgagcagaggccagggatcctgctaagcgtcctacaatgcatagtacaactgcccccaccccccaaaaaaagtctcatccagaatgtcagtagttctgaggttgagaaattctacctataagcaaatggacattgttgtgttccaataaaactttatttacaaaaaataatcagaaggccacatttggcctgtgagctatagtttgcttatctctattttaaatagctttttgctatatgataatatagttttctgtatttgttcctgaattgtctcattcaccccaaatatttttccaaattttcttctattttatgcctttaaacctttactaaatacaaataatacacagaaacaatagcccctgtgtaactaccacctaataattaagcatgttgttttattgttttgattaaaaatttataaaagaaataaatcatttcaga

SEQ ID NO: 234782 - DNA, 629 bp, Homo Sapiens
ggtatggatatagaagaagtggaaaaactaattactgctcaacaaatcctaaaatggctctctgagatgcaagaagaggaagtagaaataagcctccctagatttaaagtagaacaaaaagtagacttcaaagacgttttgtattctttgaacataaccgagatatttagtggtggctgcgacctttctggaataacagattcatctgaagtgtatgtttcccaagtgacgcaaaaagttttctttgagataaatgaagatggtagtgaagctgcaacatcaactggcatacacatccctgtgatcatgagtctggctcaaagccaatttatagcaaatcatccatttctgtttattatgaagcataatccaacagaatcaattctgtttatgggaagagtgacaaatcctgacacccaggagataaaaggaagagatttagattcactgtgaatgaaaagcacagcctcagaataaaagatgatttctcaaaaatagctgattggcaaaatatcgtcatcttgacaatatttgctctatatcttatgtcttttctgttttaaactgtgcctgtagtaatagatatctgtcttgatgaataagtaaaattaggtatgcatttgtttcca

SEQ ID NO: 234783 - DNA, 553 bp, Homo Sapiens
tgaaaagacattccacttggtgggaagagagcagcagtttttctttcaagatgcagtcggaggccctgactggtggggattcaggaagtgtgtgttagttggtcatcttgtcagtcatggtgacaaagtggctgtggtggggctactggagaccgggcagcaggggcatctgaagacaccactttgcagtgatgcagactgctccttacttgctgtgtcctatcaggcaagttactttgcctctctgagcctcagtttctttattcattaaattcaaatatgagccaggtatggtggcccacgcctgtaatcccaccgctttgggagggtgaggcagtaggatcgcttgagcttgggagtttgagaccagcaacataggaagaccccatctctacaaaaaataaaaaaattagctgggcatggtggtgcatgcctgtggtcccaggtactcaggaggccgaggtgggagatttgcttgagcccagaaggttgagactacggtgtgctgtgatcgtgcactccatcctgggggacagagtcaggccctgtctca

SEQ ID NO: 234784 - DNA, 461 bp, Homo Sapiens
ttcaaaagaacttgtgaacattttggtgagaattttcacaagtgaagtacgtccatatcaccaacatggccccaacactccagatgcccctcggggttctctcccaggtaccacgctctgacttctgactgagatggttttgattgtgcctgtttaagtcctatgaatagaatcacagagtatatacccttgagtctggcttcttttgctcaatattatgtttgtgagattcatttatgccattgtcccagctttatttatttattttttctcaaaaaacagtctggctctgttgcccagggtagagtgcagtggtgtgatctcagctcactgcactccagcctgggcgacagagcaagactctgtctcaaaaaaaaaaaaaaaaacccaaaacgtttgagatacaaagcctacaatcaaactcataaacgggaacaggccattacaaagagaataggaaa

SEQ ID NO: 234785 - DNA, 510 bp, Homo Sapiens
ctgcattttataagactttttaaagctttaattattcaactaagaaccaataatggcttcttcaaggctaatatcaatagtttataagcagtatatttcacctacactaaatatgggcattttaaaagaagattccccccttcccccccagaaatctgcatttactaaatttgtcttaagtccaattgtgtttaaaggtcatgctggtcgggtgtggtggctcacgcctataatcccagcactttgggaggccaaggtgggcagtcacctgaggtcaggagtttgagaccagcctgaccaacatggtgaaaccccgtctctactaaaaatacaaaaattagcttggcatggtggcgggtacctgtaatcccagctgcttgggagtgtgaggcaggagaatcgcttgaacctgggagaccgaggttgcagtgagctgaaaccgtgccattgcactccagcttaggcaacaagagtgaaactctgtctcaatcaatccatcaatcaatcaat

SEQ ID NO: 234786 - DNA, 595 bp, Homo Sapiens
ttgtaaggatgccgcaggagaaatcatgggcaggggaggagacaacgttcaagttgccgttgtccctaaagataagaaagacagcccagtcagaacaatggtccaggataacaaggatgggacatactacatttcctacacccccaaggaacctggcgtctatactgtgtgggtctgcatcaaagaacagcatgtgcagggctcgccattcactgtgatggtgaggagaaagcaccgcccacactcaggcgtgtttcactgctgcaccttctgctccagcgggggccagaaaaccgctcgctgcgcctgtggaggcaccatgccaggtgggtacctaggctgtggccatggacacaaaggccacccaggtcatccccactggtcatgctgtggaaaatttaatgagaaatctgaatgcacatggacaggtgggcagagcgcaccgaggagtctacttaggactgtggctctctgatgggtttgtgctcagccttttaaagctgcaggcagcaccacttgagatttccagaggacccagaccttcgttcattctaaagagactgatagaattaaaaacaaagtgccttatcttgca

SEQ ID NO: 234787 - DNA, 611 bp, Homo Sapiens
gctaggattataggcgagagctgctgtgtgcttcttaagtgaggtaagtaacttccatagaaaatttccatcagttcattcatgaaagaacaaagaacctggcaaaacttaaaaaaacgtttccaagaatcagataaaagaggacaaaccttagggagaagaaggcagctgctcatttccagcaggggaagtagctgcatagagtacaaggactggtaggcctgttggctgttcctgtttaaggagacaagatgggcatggaacagggaccaccccctcctctgggagaagctgttacccccttcacttttcctcctctgtcattacccacaatcactctccttctttgcgctatggtaggtgtttacccatcataggaatgggcatttgaactttgaaactgaatgtggtgattacacttcatgctgaagcttttcacatgagtgctttcataagcattaagtaaaattttataatgactgcagtccaaggacattttccctggtttttggccagtctaaatattgtaagagagagagaagaaaagtgtacggaatataattgtctctaagctaagaaatgtggatgttcaaataaaacatacgtacaga

SEQ ID NO: 234788 - DNA, 418 bp, Homo Sapiens
taatctaaaacatccagtactcctggaggatttgaacttgtgcccaatggctggtcagactctcttggattgagaatgttggattgccattcctcagactgaatgtgggccaagcaattgtgctttagaaatttatcttagagtgcggtggctcatacctgtaatcccagcactttgggaggttgaggcgggtggatcacctgaggttgggagttcgagaccaagtctggccaacgtggtgaaaccctgtctctactaaaaatacaaaaaaaaaaaaattagctgggcatggtggtgggcacctgtaactccagctgcttgggaggctgaggcaggagaaactgggaggtggaggttgcagtgagccgagatcgcgccactgcacgccagcctgggcaacaagtgcagtgggtcgcac

SEQ ID NO: 234789 - DNA, 393 bp, Homo Sapiens
tggaagcctgccagcttacctaaccagtaagaccctcagcccatggagtcctgtgtgatgttgtgagcgtgggaggacagactgaactgctcggcccgtggagtcctgtgtgatgttgtgagcggggaggacagactgaactgcgtgtgttcgcacatagacctcaacagggattggcattttgaagctgttggcgggggctgtggactgcttttcttcctttctagctcaacggcagctaaagccactgcatacaatgcaaggactggctcctgtttggccgcgactgattgcagcccctggtgaaatgagaaccctgtgggtcggaacaaagtttggattatttatgttgcaagtaactaaaatctcaagtgaaactggtttaaacattaa

SEQ ID NO: 234790 - DNA, 605 bp, Homo Sapiens
agatgaaagtcttgtatccaaagcaatggagtacatgtttggctggtagtagaacaccaagaaggaggttgctacactaaaacagagttagcagagtgctgctggttccttcggttagttatataactgttcctgcagtattggatagctatctcatacttcttttagaaagaagcctttttcattaaggatacaacctatttgtagctcgcactttaaaagatgcttgagatacattttaaagaaaactaaaaatccctgtaaataggattttgtgctttctgtaacagtgcatgcttcagcacagaaaactcagcattgattattgtaaattaaataactgaaattgtggtgagacgtcatagtcttcatgagaacgtgggggtgaatttcatgaaggggaactatagttatttctaccgacacaaatattataattagcaatttgaattatggtcttttaatttagatagtatttaatattttaattatccttgtttgtatatgtcctgtcacagagtgtcctcttggtgtattctaaaacgagcattcttttaaaaaacctaaagtttcttgataataaacattgtcaatgataaaaaaaa

SEQ ID NO: 234791 - DNA, 611 bp, Homo Sapiens
  misc_feature (167)..(167): n is a, c, g, or t
tcccggcccgtcccgcttagttttcggtttgacaatgccatgaagcagatgagcgggacctgaaagacctgacccacagccgacttccgatccaagaagaagaagagaaagcagggcggcagtcctgatgagccagatagcaaagccactcgcacggactgctcgancaacagcgactcagacaatgatgagggcaccgagggggaagccacagagggccttgaaggcaccgaggctgtggagaagggctccagagtggtaagtggctctggctgggcattttctgtctgcaggcagggcgagctggcctaaagagtggtgctctccctggggccagaggcaatgctgtgtcagctctgcgtgcatggtgaccagcatggggaggcagtgtggtctggcagaaagcacaggctgcctagctggaggcacagtttccttgttggaaaatgggatgagcccctgtgcaccaggtagtgggaggatgtgaggtttctggcacatagccgggccttgtcatttaaagccattgtaaataactgggctactctgggccaccctgcctataggatagccctgctctgtctatggagcaagcagctgttttactatat

SEQ ID NO: 234792 - DNA, 568 bp, Homo Sapiens
ctgctaaatcaagtcacaacatggtgagcgtgacttttccgaaaatgatgccagagatcatctctgtgcaagtgccccaagatcctttctgggaaagtcaagcccatctatttccacacccagtgaagcatggaaaccctatttccccaccccagctcatgccccctttcagatgtcttctgcctgttataactctgcactactcctctgcagtgccttggggaatttcctctattgatgtacagtctgtcatgaacatgttcctgaattctatttgctgggctttttttttctctttctctcctttctttttcttcttccctccctatctaaccctcccatggcaccttcagactttgcttcccattgtggctcctatctgtgttttgaatggtgttgtatgcctttaaatctgtgatgatcctcatatggcccagtgtcaagttgtgcttgtttacagcactactctgtgccagccacacaaacgtttacttatcttatgccacgggaagtttagagagctaagattatctgaggaaatcaaaacaaaaacaagcaaacgtcgatc

SEQ ID NO: 234793 - DNA, 908 bp, Homo Sapiens
attctcctggcttcagcttccccaagtaactgggattacgggcgcatgctaccatgcccgggctaattttggtatttttagtagagacggagtttcaccatgttggccaggctggtctcgaactcctgacttcaggtgatccgcccaccttagcctcccaaagtgctaggattacagaagtgctcggcctcaaaaattttgaaaagaaacttagttgtcaacatgatttcataatagactgcatacttagtgttacgctttcccattcaattaaaagtaataatagtctgaaaaaaaataattgtataaaggaaagtctactttcagatatggttagctttcaacctattaagttctggattttggtaagctgaagtaccctttcatgtgtccgcagaggccatctcattttagaggtgactatgctcaaactcaactcgccctagagattcacttctttgctaccaaagtctttcatattctgaaaagagtctccaaggactctggtaatctgatctgcatatatgggaataaacagcagagtaaaatccaagatgactgagaatgctaagaaacacaggaagaactacatgaagaatcagaaaggaagacaagcagccttctgactctaagctgcttggagattctgcatcctcgctacatccactgggcacacagcaaaatgatactcaacacgtgcaaaaagtgaggagagaaagatgcttctgtcctgcacacagcttttagtggatggtaaagcccttgcagacaaatctctagcctcctccaccctatcccacacccttcttgtttgtgcctgaaaggttatatgtaacgcagaacttcagggtggggaggtggcccaccactgggctgtgctttggatgggtttaaaacacagaattctt

SEQ ID NO: 234794 - DNA, 972 bp, Homo Sapiens
ccgggccagatccaaattcctttgggaaagttacaggctagaaagaattatttaggttccacattgttcctaaatccgggtggtaccctgaccccacccccgttttttcctcttttgcgcggaagagacacccctcatttattctgggaggggagaaaaacaatttcccccaacaaggcttatttaggaaggccagcgttacatgtgcatacatatgttttgaaacctggctttccaacaagactctcatcaacaagactctcattatcctaaatccagataaaatccccaaggatattctttatccatttcttttcttagccttcaaaatgatcacatgtaatcagccatcattctatcgttcacctctgataaaactggtggtgttggctgcctgattcttcctctttgctttgtgttgtattgttttgttttgcttttctcattataaaaataattcatgcttattgttgaacatttgataaataaagaaatatataaagggggaaaatctattaccccatcatccagaggcaactgctattaactttttggtattttccttccagtcttttttctatacatactttaaaaaatatatagttgagattgtactgtacatccataaatcatccttttcacttttcattaacaaagtaattttcccatgttatttaaaaattcttcagaaatatttttaatgacagcataatattctactctaaaaatatatcgtaatttgcttaacccttctcccaccaatgaacgtttaagattcctccaacttatttctgttattaagaggaattctgcaaggtagtcatctttacacagcatgtccataaagtctggaaacagatggtaatattttcttttaaagattgtcagtcttttgataacaacatgtatattcacctgtgtttccagactttacaacctgtgatagcatttcagatttattccatccgaaaa

SEQ ID NO: 234795 - DNA, 896 bp, Homo Sapiens
  misc_feature (52)..(52): n is a, c, g, or t
taaagcttggggtacggcgttaaagcttgggcccccccggaggggattcttntagagcgggcccgcccttttttttttttttttaacacttactatgtattattctggagactggggcaaatggacatgaggactcaaagcgggaacccaaagagatcacagctctggctgaagatgcaaagaaatgatttggtgattacacttttctttgttatctctagctacccttcattagcatgaatgattgagagattacgatacttaaaatgctggcatacaatatacagtcagctctcaatttccagtgtgcaacgaaataactgaggctctctaaggcttaccctaagtcccagggatctgctaggcagctcagcacatccccagctcacaccccttcactgctcagcctgtgtgtctgcacagactgcagcccatcttgagattatcctaagtaaaaaggaactgattgggtaaaacagctataaagagccacagaaagcttttcaaagcaaatgtaaagaaacctaaaatagctgatgagccagaagccctcccttgaatgaataagtgagtgttagctatgtttttaaaagttactgacatgttattctagtttacatatgacatcgattttcactcctctgctcttttatggtgcaggccgttttactagtcccacaaaagtgtttccactctccatgttcttggttttatgaccgaaataacctccacgtcaagcaactttaagggatcgaaatgtctggaagagagaggtgacactgcccaatttagatccagctcaggttctgcagcaacagggtctgggtgacgacatgtttctatggaaggttgcgaaccgggcatctgcagtatttcccagatcagtttacatgtgc

SEQ ID NO: 234796 - DNA, 879 bp, Homo Sapiens
ataaaaaaataggttttttgccaggaacaaggttaataaaaccagggaataggcaaaactcaaaattccctgccaccccaggccaggagccgagtggagccaggtggagggggggctaacggagagcccagagcagcaaccaacacagagggacctggtcattgacttgtgggttgcgtgcatctttttttttttttttttgggacagagtctcactctgtcgccaggctggagtgcaatggcacgatcttggctcacttcaacctccacctctcgggttcaagtgattctcctgcctcagcctcccaagcagctgggactacaggtgcatgccagtacgcccagctaatttttttgtatttttagtagacatggggtttcaccatgttggccaggatggtctccatctcttgacctcgtgacccgcccgcctcggcctcccaaagtgctggggttacaggcgtgagccactgcgcctggccacatcatctcatttttcaagagatgtgtcttttagaaaatttgcattttttaaaattatactttggtctgcaaaaaattgcatttttaaatgtttgccactaattgattcttctcccctcaaaatggcagtgcaagtcaaaataagacacaggcagccagttcgcaacctgttgtatacactccacaataaaaataaatggatccacacagtagcaaaatatgtgtacaaaacctaccaggaagaccagggacagacccctaccctccggtcaacatgagacaaggagagggaaggaaggctgagaatggggcaggagcccttgcagcaccagcctgtgtctgcagccctgggtcctgaggtaccactgggggatggaagaactccaaggagagccc

SEQ ID NO: 234797 - DNA, 735 bp, Homo Sapiens
  misc_feature (5)..(70): n is a, c, g, or t
ctttnnnnnnnnnnnnnnnnnnnnnnnnnnnnnnnnnnnnnnnnnnnnnnnnnnnnnnnnnnnnnnnnnnttatagatccattgacttttattacaaatgtacttgatcacttggcttcaaaaagtttaaaatcaataccctattttctgtatgccagtacaaagcaaactgttttacaaattaaatacctaaaaatttgacaaaaatattaaaatttgatgaaaaacaattataaaaatccttaatctctctcttcaaaaaaaggaggcagtcttcccactcctattatacaatattaataatattcaccatttttagaataggtagctaaattatatctttctgttagcatacaaaacttagactaatatatttgtatatgctccagttaagtttgtgaatgccatctgattgcaatataatcaactatctttaattgaatcctaatttacacttatttaataatttgcatagtttgaaagggataaaggttattctacaactaattatcataggctattacagtgctacttttcaaggcaataagtatttgctcccaaatgaagtatatgtcttctttaggcaggggttaaaattactagcagctttctctattacctgaaaaatcaaattggaagttatccatctctctagatgtgaaggcctgaaaaaacataatatactttccgcttggaatcaaatttcaacccctgcatgggacaactagaaagtga

SEQ ID NO: 234798 - DNA, 882 bp, Homo Sapiens
  misc_feature (10)..(10): n is a, c, g, or t
  misc_feature (189)..(189): n is a, c, g, or t
  misc_feature (264)..(264): n is a, c, g, or t
tatttccatnccaccaattagcccataataaacggaaaatggaaaaatattttttgtatataaattcccatttctttattaaagtaaaattaaagtttcattaagagtccagttaaaaaaaataggggcatatactgtctgtatatggctacctgtcttttagtaacatgaattttgtttttttgtttntgagatggcgtcttgctctgtcgcccaggctggagtgcaatagcacgatctcagctcactgcaacctccacctcncaggttcaagcgattctcctgcctcagcctcccaagtagctgggattataggtacccaccaccacacccggctaatttttgtatttttagtagaggccaggtttcaccatgttggccaggctggtctcaaacttctaacctcaggtgatccgcccacctgggcctcccaaagtgctgggattacaggcgtgagccaccatgcccggcctaattttgttaatcttgccagtttcaagccattgacacaaaaacatcagcaccatattaagaagtcacactctgacctataaaatgtgacagccccaggagaaccattacaccattattcattttcagtaaaaagtctaatagaacagtgacaaatattgtgccttagatccttaatcatacgatacaaatcatttacaatataaattgtaaagatgaacatgtgctggcacagctagggtttacatactctttggaagctcaaaaagttcaagaatgtcttatcagtcttcatttcagatctagtagcataaaagctgggttttctaaataggatttccacaaattggagaagcgtgacattgtagcaccatcaataactctgtgatcagctgaccagctcacattcat

SEQ ID NO: 234799 - DNA, 892 bp, Homo Sapiens
  misc_feature (61)..(61): n is a, c, g, or t
  misc_feature (67)..(67): n is a, c, g, or t
  misc_feature (101)..(101): n is a, c, g, or t
  misc_feature (153)..(153): n is a, c, g, or t
  misc_feature (219)..(219): n is a, c, g, or t
  misc_feature (228)..(228): n is a, c, g, or t
  misc_feature (280)..(280): n is a, c, g, or t
ttttttggacacaggattctcccttctgttggccacattcatagcttcattgcagcctcanccttcntgggctcaggcgatcctcttgcctctcaagtacntgggagtaccgggcatggaccacaacacctggctaatttttacattttgtanaagggcaaggtcccactatgttgcccaggctggtctcaaactcctggcctcactgaccctctcacntcagcctcncaaagtgttgggattacaggcatgagccaccatgcccacccaccacatcgcntaatctttaaagacaaataccatggtagaaagaaggaagaccatcatctttgagcgattcttctcctaggagaaaaaaaatgtcactttctgatacagtattttagaaaggagaagggaagagatgaaggtaagtgtggctgatggaaaacatgaaagctggctacagctccactaaattagcctcactgggatttatactgacagagtggcatccggcttccccaacaccttaatgagccttaaatccacgtgaaatttcaatgaaccatctctatcctgaaaagctcctgcgaaacatctaaatcatgaatcagggtctacagcacgaatccatttatatactcaaagtgcttctgaaccaaaagaaacttggcttccaccaccttcttaaggccacagattttgaacttatcatattttggaaaccccaaaggtgagtcaggaggctggatatccaggctgaagctttgagaagaattccatggagattcaagacatcttcagtggaagttcacaaaagtgagtggaaagaatacaacaaaatgaagcaagtgcttaacctacatttcaagatagctagacttttttcttccttccgtcaccttttcct

SEQ ID NO: 234800 - DNA, 958 bp, Homo Sapiens
  misc_feature (576)..(576): n is a, c, g, or t
ggtgtttgtgaaaaaccctccccggttttaaagagagagtgtttccccccccccccttttgggggctttcaaaaaaaagggtggggggggtttcacaggggggtgagaaccccccttttgccccccgcccctatattttttcccccttttttaaatttttaaaaaaaatcggccgcggaaaaataaattttgaggggggggggtttttttttttaccaccccaataaaaacctttaaaaggggttatttcttttccatttttttctttccccgggattaaaaaccggcccaaaaattttaactcccttttttaccatggaatcaaggttttaaatatttttccatttttttttaatttcaacttttctacggttaacttgggcggttcccttttttttttttttttttttttggacagactcttgcttctgttacccaggctgggagtgcagtggcgcgatctcaactcacccacaaactccgccttcctggatttcaagtgattctcctgccttagcctccaaagtagctgggattacaggcatgcaccaccatgcctggctaattttgtatctntaatagagatggggtttctcagtgttggtcaggctggtctcaaaatcccgacctcaggtgatccacctgccatggcctcccaaagtgctgggattacaggcatgagccaccgcacctggccacttggctgttctttacttgggttggttttattttgttgtttcctttttcttgacggaaatacttattcattccctcaacacattcatctgtgtgacaggcctggtgttgctgctgtgggtaagtgaagaagatgaagactgtatccacaaataagatttccttaccacattacagggcattaatttgtcactgaacagaactttgattatatctgacaaggttagatgtgcaggcatctcactgtcattcatttctacat

SEQ ID NO: 234801 - DNA, 490 bp, Homo Sapiens
  misc_feature (229)..(229): n is a, c, g, or t
tccctacccactccaagccatgagtctggcttggattttacaggtttgaggtgttcatgagttgacaagtggaaaaaccaggaaagaagttgagtgtttaagactgctgtttgaaggagaagtctaacttcaagacaaaagttcaggactcatcagctgagaaatggcactgaaaattatgcaaatggatgagttcagctagcaaacaagtccagagagagcagcactngggtacgcacctggcctaatgccaccccactcctcccaatccgtgtgttatgctggagagggttcagcctctggtgagtttcaccaaaccgccacatctctttcttctgagaccttctctaaaatcccctcttttatacttagtgaaatgggattctctttttcccatccagcttaggcaaatacttttgactatgagaagaatgaggatgcatttaatatctgtactgcatggctaattccatcaaagatttcgtcgacc

SEQ ID NO: 234802 - DNA, 830 bp, Homo Sapiens
  misc_feature (67)..(67): n is a, c, g, or t
  misc_feature (189)..(189): n is a, c, g, or t
ttatccttaagggattggagtttttaaatatccagagtccccgagggaccatgtcattcaagcaacnagaggtttagcataaagccctttccggagcagctttcacaatcactcttgtactgacatgccagttagtaagggaaaacagcagagatcatggcctgagggaaggggaaaatacagcacagnatgtattttcttgaaagatggagaccaagaaacaattttttttttttttgagacggaatcttgctctgttgcccagtctggagtgcagtggcatgatctcggctcgctgcaacctctgcctcctgggctcaagaaattctccctgcttctgcctccagagtagctgggattacagatgcccgccaccacgcccagctaattttttgtatttttagtagcgacggagtttcactatgttggccaggctggtctcgaactcctggcctaaggtggtctgcccaccttggcctcccaaagtgctgggattacaggcgtgggccacggcgcctggcctccaagaaacatttttatgaagaccacctcctgggtaacccatgttgaatgaaacaggtctgctaaaaatcaggggctctccaacagagccgatatgcaggggacattctcagcattctctaattggacacttgtcaaaaggaacagaatgttagaatcatctttgcctaggaattggtagtttaaaatttttacatttatgcggggagtgtgtgtatacatatatatacagcaaaccaaaaataaattctaaatcccccaaccggctgaatggacccctgtcttggcccaggggatcggacgcgtgg

SEQ ID NO: 234803 - DNA, 498 bp, Homo Sapiens
aatcccccaccttagcctctggagtagcggggacaaaggtttgtcccaccacaccccgcaaatttttgcattctctgtagcgatgaggtttcaccatgttgccttggctggtctcgaactcctggtttcaagcaatccacctacctcagccactcaaagtgctaggactataggcacgagccaccgtgcccagccttaggttacctttctatattcagtcagtcacaggaattaacatctgattttgtattctaaaaacaagcccgttttatatttccagaattcaatttattcaaaatttgcttttcttgtcggtaatttctagcaatttttatgtctgtatgtttaaaaaaattaacatatccacatacaatgtgatacagtttggccgtgtctccacccaaatctcatcttgaattatattgcctataattcccattgttgtgggagggacctggtgggagatgactgaatcatggcggcggtttcccgtcgacc

SEQ ID NO: 234804 - DNA, 876 bp, Homo Sapiens
ccatctttaattccttccttgtcatttctcataaatcattagtgttgaataatgttttcatagtcaaattttctgatgcctcaaccacatttactttttaggtgcttctgtacagtttttataacaatttctgaggactctattgcacaaaatacaggtctttttctaatatgcttacttttaaataaatttgtttccttaatggtggctgaagagatacaatagatttgggttcaaaaccttaatgtcaatgataaaaatggtttagttctacaagaaactcaaaaaacaatttcaagattaaaaattctggaaatcaggttttcaagccttttttttattagaaagcttaaattattagctttttttttaaaagggagtagccaatatccatttttgagttttctcaaacaaataataaggatagcaaactaggataagaaaacacattagaagacagccttctacttcgtacaacttctagttaccttttcctatccattcacctacttctgttcagcagcaagaaaaaaaatccatttatttttgcctttttggatttttccaagataaacttcatttacctgaatacaaacaaaagctagggagatggcttttatattggcatagaccaaggacatgtctcacaaaccaggaaaccctgcctcgtatggcttattttgcagtttggagtccaatggttataaaaccaagtgaaagtcgaacaatattcaaaatgacacagattgacaacaaataatggaaacacatgaaatcctcttagctgttaatcttcccaatagacaaatccctagcattctgtaaataaaattataaatactaaagaaatgaagagaatttcacaatggggaaagg

SEQ ID NO: 234805 - DNA, 600 bp, Homo Sapiens
ttttttttttttttttttccatccttcagtcgctttgtgtttattgagcacctcctgctgcaggacctccatgtctgctatatacacaatgctcacaggcttgctggtgtcgctttgctttacagataaggaaaccgaggctcggaaaaggtgaacacctttgcccaggacagtccgtgcgtgaagtgggacagagtttggttggagctccggcagcctgagccctgtctcctgtgagccctgcatgtccctgggtcgaggctggggatgcaggggtacgtggggaggacagggcctggccaggagttgttcttgcttcatgcaggtttgggggacaagcacccactcctctcagacccctcacgtacccttaccctgctcacacacactcacagctgtcagagactcagccacacacgcacatatgcgcccataagacaaggctgccatggtcacaggcttcctgtgttcgggcctttgtgcctggagacacccctcacagccccgtccatctggggcaggtgctgcctcatggggcacagagcaagcaagtgaccctcagccagcatttctctgtgtggtggcctatgggatgacaga

SEQ ID NO: 234806 - DNA, 977 bp, Homo Sapiens
  misc_feature (872)..(872): n is a, c, g, or t
agtggctcccgcagatttcctggagaaggggaagggagacgtttgcagccgcgcggaacacccaaaagacaacacgtgaccccaccatttggtttctgacccagaggcccaccctgaggtgctgggccctgggctttctaccctggggagatcacactgacctgccagggggatggggaggaccaaactcaggacaccgagctggtggagaccaggccagcaggagatggacccttccagaagtgggcagctgtggtggtgccttcgggagaagagcagagatacacgtgccatgtgcagcacgaggggctgccggagcccctcaccctgagatgggagccatcttcccagcccaccatccccatcgtgggcatcgttgctggcctggctgtcctggctgtcctagctgtcctaggagctgtggtggctgttgttatgtgtaggaggaagagctcaggtggaaaaggagggagctgctctcaggctgcgtccagcaacagtgcccagggctctgatgagtctctcatcgcttgtaaagcctgagacagctgcctgtgtgggactgagatgcaggatttcttcacacctctcctttgtgacttcaagagcctctggcatctctttctgcaaaggcatctgaatgcgtctgcgttcctgttagcataatgtgaggaggtggagagacagcccacccccgtgtccaccgtgacccctgtccccacactgacctgtgttccctccccgatcatctttcctgttccagagaagtgggctggatgtctccatctctgtctcaactttacgtgtactgagctgcaacttcttacttccctactgaaaataagaatctgaatataaatttgttttctcanaatatttgctatgagaggttgatggattaattaaataagtcaatccctggaagttgagagagcaaataaagacctgagaaccttcaaaaaaaaaaaaaaaaaact

SEQ ID NO: 234807 - DNA, 885 bp, Homo Sapiens
taggtttaaaacccccttaagggtgattgggcacctgcctgcttaataaaattccatctttttggttggaatccctcacttatggctattgggtaccctaaaaaatattctccaaaacccttgctcccagtccctctttgataaatatatagttaatcggaaataaaatccattgcaattcatttatgagttatcttacatatcacaaagcccaattagaattagtcattattcttgatgaagagtctgtttttaatcataaaaatcatgacagttactcagacccaggcatttcaacagagctaacaccaccttcagataggcacaccatgcataactcttgggaagttgagctttgctaaataaaagatatttctgctgatcaaagatgatcaagctttctgtgtattggaacagaaagtaacaaagaggaatgagccaggagaacaaactaattcctttaaataaataaaaaaaaaaaatgcaaatgtccttcaccagtaaagcaagcaaatttttaaaatctctgtttttgaaatctactcgtcaaagagttttcagaggcaatgaaaggggaacagatttttcattgtaatagtggaagttgtgtgatagttaggagatatcaacatgcatttttaatcttttccttagatgaaagagatggcttttggcagtgtgttctaaccagaaagaaaggatttgtattactctccaaatctactgtactgtcagcttcactccacctgagaaaaaagaaaaaaaaattgatagctcaaatgcatgtaattcataaacactgcaaaggagagccacttggtgtctgcagtcctcatattaacagtctgtcacagaatgcagttaaagtattgatcggacgcgtgg

SEQ ID NO: 234808 - DNA, 900 bp, Homo Sapiens
  misc_feature (23)..(23): n is a, c, g, or t
  misc_feature (79)..(79): n is a, c, g, or t
  misc_feature (86)..(86): n is a, c, g, or t
  misc_feature (93)..(93): n is a, c, g, or t
  misc_feature (108)..(109): n is a, c, g, or t
  misc_feature (131)..(131): n is a, c, g, or t
  misc_feature (182)..(184): n is a, c, g, or t
ccccccacttttgttttcgtganctttgaggtaggaatttaaaaccttttcaccaggaacccccagaaaccatttaagnattactnactgaanggaattttttgagtnnattttggcaatttttgctttcngataaaaaattcccataaatatttcgacagggaaggggagcaaaacaaacnnntgaatttttctcctctgtacattcagaatccatttgaaacttctctcaacataagcaaaaatgtaagtcaaagccagctgcaaaaatttgtagatttggcccgagaaagtgcctggattttacaacaggaagatacagatcgaccttccatatcaagtaatcggccctgggggctggtatccctattgctaccatctgctccaaacagaaagtcctttaccaagaagaaaagcaataagtttgcaattgaaacagtcaaaaacttgctagaatctttaaaaggtaacagaacagaaaatttcacaaaaaccagtgggaagagaacaattagtactcagacatgatggctgctacattgtgtaaagaactgggcttagcctatcaaatggtctgtggacttacttggaaaaactgatttgaaactttcacagatctcagctttcatctgatgtcacttttcatgatcttctcattggcccccttaacctggtctgaagttctgggatgttttcagtttgatcagtctgatactcagtggcactttattaaaacatcagctgtggagtgtggcggtgcacacctgtagtcccagctgctcaggaggctgaggcaggaggatctcttgagcccaggattttgaatccatcgtggacaacatagcaagattccatctctaaaaaaaaaaaaaaagggggcgctcgcgatcccacgcgtcc

SEQ ID NO: 234809 - DNA, 873 bp, Homo Sapiens
gtgactgccaagcaaagttaccttctcccatgtccccagtgacaaaagttcaggacagaaaacagatgccttaacagtcacctggtcttgatctccagacctcaagtgatttgcctgcctcagcttcccaaagtgctgggattacaagtgtgagccactgcactcagccaatctgggagtatttctaaagaaaaaaattactttgatttgtggaggactaaatcataatacatttctatgcaacaatagcttctgagaggaaattcaggaatgtttgtgtttaccacagacaaaaacatttgatctgttaatcatcagtagctgtggtcatctctctttcttaaactcttgggcaatgggtggaaatcagagaccaacttcaaatttaatgtgtaaaaaacaaatagttcagctgcttctattggtaagaaaattcaacttcctaccagccttagaaaggtctctttaaacaatttctttccccctagggttacctagctggtccatacaggttttatcacctcactgcaaggaggaagttgaatattctgttccccacggggatctggcttaatccctagttgctcatatagttggtatcagcatagcaatattttgcataatgctttatttttctcaaatgactattgcatagatgatcttgatatttgcaacagcctagtggatttggtagggtcctgaatcatctctataaggcaaacaaggaaattgtaacacaaagaaataaacatattgaatataattgctattctgtaagacatacagtctgtgtaagatgtatcttatttacagagacatttttgaaaattaaaatattaaatactttttgttataaaaaaaaaaaaaaaaaaa

SEQ ID NO: 234810 - DNA, 742 bp, Homo Sapiens
  misc_feature (2)..(9): n is a, c, g, or t
  misc_feature (11)..(11): n is a, c, g, or t
  misc_feature (15)..(15): n is a, c, g, or t
  misc_feature (17)..(35): n is a, c, g, or t
cnnnnnnnntntttntnnnnnnnnnnnnnnnnnnnggtcagcctttaaccaagcaagacaataaactccttttgtcagaatcgatttgattaaaaaaaaaaaaaaagaatgtgctccttatttctcattgctgtagaatacttaggaatacacatctactaatcacaattaaaaaataagagaatctttagaaacatcattgctttctggaggtagaaattttgaacttgaaggttgtagttccaggcaattttgtgcccttgaggtgtccaattgatagtatagcttgcctctgctaataaatacacaaaagttttctttcctgtgattttcagaaattatttttggaatacaaagattaataaggaatatgtgatgtttatctcctgcatttcaaaatcttctggattttttttgaggcatgaggagcaggtaatgagattttttttctgaatatcttgattctctcccttaacccagattttgcatattatgcattgctcatttgtcacctacaaaaataaaggttaatgattatttgtttgcttttgtctatataagctccctaaggcacagaccatgttcgtttttcttatgttcctcttagcactgtgcctggtgccttgccatataaaaggtaccctataaatatttgttggctgagtaatcagagagcccatttcaaaatctaaattatacaaatcatcaaagaccaaaaacccacgcgtccgcccacgcgtcc

SEQ ID NO: 234811 - DNA, 614 bp, Homo Sapiens
cttttttttttttttggtcttttttttttcttttccatttcgttgaaatatttacagcaatggggaaggaggaggagagaggaaggagtaagagggccccctagggaaagatccaagcccaggacccactccccagggagatccagacccaaaatctgctccccagatagccgagcccacaggactgggaactgcccaaatatggccacccctgtgggctgggggccctgcggggagttgtgcttcatcaggagtcgccccaagggagggggtcattgggtgcactgggaggcagagggggcaggtttgcttgcggggcagggaccaagagcaaggggaaaggagcttcagagaaagttcaacctttaaaccaccagccaccaccgcccagtccccctgccctgcggccttttcccagtctccagggagcagggaattacagcgcaggaggaacctgtccatctgtcctgcctcactgctccctctgggtgcagccggcagcatttctggctgcggagaggagcagctaacaggttccatccagtgggggcctttggcaacctcagaagctgcccctccctgcccaggaaactaaagccctcatttcccttcac

SEQ ID NO: 234812 - DNA, 878 bp, Homo Sapiens
ccagccccttttgggaaggccagaagccgggcggaatccccttgaggtcggggagtttgagacccaggcctggccaaacatagtgaaaaccctgtctcttttaaaaattcaaaaatttagctgggcatgtgggcatgcgcctgtagtttcagctacttgggaggctgaggcaggagaatcacttgaacccctgggagggcagagattgcagtgagctgagaccaaacccactggactccagcctgagtgacagagcaagactctgtctcaaaaaaaaaaaaaacagcaagcatgctggcacacacctgtagtcccaactgcttaagaggctgaggcaggaggaccacttgagcccaggaggtggaggctgcactgagctatgatcgtgccactgcactccagcctgggtgacagagcaagaccctgtctctagaaaacaagtatcttttgtgtgttttgggctgtttaaaaaaattatttaaaatggtctcttctgttccataatactgctgtaaaacaaacttttctaagttctaatataaaaacaaaaaacaaaacccatgtggttaggtcaagaacctaggacacataaacaaacagaaaacagatgaaaactcacaaaaattaaatatgaaagaaagatgtcagctagaaccttagttgtcattaagctttgtcttccttatcccagatattgaaggcagtttacaaggggatgataacaaagtaactaactaactgtagcaaaagacaagtatgggacagactgggacctggagtaacactggatcacagactgcaaaggcccacgcttggaacaagttgccaacttgtttcactctgcttgcttcagactgtgcacagctgggatgggatct

SEQ ID NO: 234813 - DNA, 937 bp, Homo Sapiens
atctcccacccggtgggtttcccacccgtgaaccctggttttggaaccaggcattcacccccccccttccttttaaccccccaggtgaacattggtatgccctcccggtaatcctccctggggagtggttcttgaatagccagcgggcctaatattttttgagcttttttgttggaaactgtctacccagttcccagaagggaattacttgtggagttgtcacttttttaagtaatatgtttatgggagtacttttattttttctcacattttatcatacagagttgtcttggttcaactggtgcctccccgggtcgtgtttgctcagtctcctcctcattctgtgcttcagggaatcctatgacagactctatcttgatgtggttgtctccgtttaatagcacagacttgaaggagtttaaaaggaggctggaaatcaatactgcacactgcacatttgctcggaattgcacatctaacaggaaaagagggagaagaaagaaacttcattcagaggttttgttaggttacagattatcacattaatttaattactactaggtaataataatgggagacttgagtgataataggggattttaaaactctacagatggcatacctgtgcctgcttctggggttggaagtgtgacttcttacacataaagcactacctaagtaattctctctctgttttgtgccagtgctaaactactgattacttgtaattatgaaaagaaataaagggtgtctatcatatgaagataacgccttccctaagtcacatatcagaataggaagatatgccactaacttctaaagaagttcaaaccctgtatccaattttaatgataaaatagccaagaggtatatcgatgatggaaattagccacatgtacactacattttttctaataaagccatttcttaaaaaaaa

SEQ ID NO: 234814 - DNA, 631 bp, Homo Sapiens
  misc_feature (25)..(25): n is a, c, g, or t
cgccctttttttttttttttgtttngacaaacaggtgtatgcatttattcctttttaggaacaatatctaaaaaaagaaccgccctctgccctcccccaaaaaagacaaagattcacacagacacatcgggatatatgtacaacgtaataaaccccatcctaaagaagcaactgggataacccccaggggatacagaatcagaattgtaaaaatcatagtgaagtttgcttgctgtaaagcctgagaatttttttttcagttggttcttctgcaaggctgtgatacctgcaaagatatgtaaaatctaatttttcttttttttttttttttgctacagtctttagactaagcatgcaagacatacgactaagtgcaactgagtgaaatgttttttttttaaattttaatcattccctaaaggtttgaactgaggtatgcgtactaacagtttctcatgctgttatctttactcatgtctagctacacatgctgagaatgaactaatctaccagatttttatcctcttttgaataccaaactaaccagcaaccactcagtttagaagcacagggcccccttcccatgaccctgtctggctactgcctgcacatcatgaagctgcctggaaaa

SEQ ID NO: 234815 - DNA, 903 bp, Homo Sapiens
  misc_feature (378)..(378): n is a, c, g, or t
ctttgaatagtaggtgagaaaaggactgttccatatcccttttttcccaccaacttgatgtttgtttggaaggtatagttaccttattggtattgatcggtaaaagccaggatgaaccaattccagaaaaagttggagtaagcccagacacttttggaaggggcagtgtactagaaatgggaaaaatgtatccatattaacggctactcgtaactcctatgaatcaggtaaaaggagggccaaataaaaatcagtgctagggagtgaaggtcagactcacaaaccaaataaatgaaatattcaatacatttcacaataagaaaataccccaatgtcctaatgaaaaagaataaaaacacatactcgatcctcttctcntaggagatgaaatatattgttttaaaaatgagttactccaataagatatgaataagcaatatataaatatataataaacataacagaccagttagatatataatagacaacagattaaatactgctgactaagcacaacttaaggggattatataattaaatgtatccaaaaaaaccattattgaattgacctgtcactttctaatacatctttgttactaaaaatttaggcaacttagtaaccatgactctgggtcatctgatatcataatgtggttcaaggtccaccaatcttctgtttctttgattgtatttccttgtttcaggacaggtaaaaatgttaatatcataataaagaccaaactgtccaattaccaaaactgtgaagcagcaacaatgtcaaagaattacaaataaaaggaataagaattttttgaaaagcaactaaaattgagaaaattctttttataagtgaattcagtatgttcactgagcttgtaagcaaggaaatagtctatggatgcc

SEQ ID NO: 234816 - DNA, 814 bp, Homo Sapiens
  misc_feature (25)..(25): n is a, c, g, or t
  misc_feature (42)..(42): n is a, c, g, or t
  misc_feature (123)..(123): n is a, c, g, or t
  misc_feature (155)..(155): n is a, c, g, or t
aaaacctggttttgaatggttttancccttcccctcaaaatncagaggaaccccatttaggaaattttcagactaaccatgaaaatgcctagcttctaaattgttaaaatagggttaaatttncctgccaaaaatgggaaagtagtttttcccanacagtaaaaaggaaaaaccaaaaaacttcttctaaaccctgtaattttttttaagtatagctcaataagttaggaatttgggagttttgtttaaaagtcagaaataacttgatatttatatcactaatagaggtccaaaaggcattgcaaattccattagttctatcacttctaaatggttctctaaatgttaactatggcttatccggccattaaagggtgtctggccctaaaatataataggcatgtttcaaaaaaatgaaagaggaataataaatttatataaatgttcaatctcattccaaaaatgtcttacaaaaatgtttcagtaagtacttcctaaaaacatttagcaggttttaggacctgaaaaataattttcagttggaaaaacactttttctgagaagagaatatgttctagttttcaagacagtttatatagtaacagggaaaattaaatcattcaaaaattaaaatttgggtccaagattaagttttagaaacagagcatttcatttaatccctagcaacaagtctggaaaggataaatgtattcctaacatgcagactattaacagctcttccaaggccagaacagaagctccacttaggagctaggatcaccaccacaaaatattacctcgtggggctcccccc

SEQ ID NO: 234817 - DNA, 553 bp, Homo Sapiens
aagtagctaccccaggagtctaaaatccaggtctttcatctccgaagtcaatgctcttcccaccatgctgcctatctcagagcaggaaaaacaaacaaaaaacaacaacaaaacctggctcgtgctgggcgtggcggctcacgcctgtaatcccagccctatgggaggctgaggcgggcggatgacctgaggtcaggagttcaagaccagcctggccaacatggtgagaccgccccgtctctactaaaaatacaaaaattagccgcgtgcagtggcaggcgcctgtaattccagctactcaggaggctgaggcaggaggatcacttgaacttgggaggtggaggttgcagtgaaccgagatcgccacactgcactgcagcctgggaaacaaaagtgaagctctgtcttcaaaacaaaaacaaaaacaaaaacaaaaacaaaaacaaaaacaaagaaacctggctcatttcttgtttcggcaagtctgctaaaagattcactcagcacagcagggaaataaaggtgtttcctgctttcaaaaaaaaacctcgtg

SEQ ID NO: 234818 - DNA, 431 bp, Homo Sapiens
gcttctgttcagacccagctgggtttcaggcttaattcattgctctatggtgggatcaccacagctgctgtggggcctttacaaatgcaaaaaagctgtcagtgtttgtttcatcagctgcataagtgatgaggccaagttgaggaatccattccagtgcgcagtgtgcaggctgtagctattattgtttacagaattagtgtgttggagctttaaaatagttggcacatcgtctgccctttaaaagcacaagactaaggaatgagaccagttggttgtccttgtaatgttggccggatccagcccagcccttgtcttttaacagctactgctccgggctgtgctgtgggacttgactactctttggaggaagtgggggtgcttgctgagttcttgtctctgtagttctgcatcccaaacttaggtttgca

SEQ ID NO: 234819 - DNA, 507 bp, Homo Sapiens
gccgtgttcactgtcatacgactcctcagagggcaaaacctttcttttttttttcgcaggggggctctcactcggtcgctcaggctggagtccagtggcacgatctgggctcactgcaagctccacctccgcggtcacgccattctcctgcctcagcctcccgagtagctgggactacagggcccgccaccatgcctggctaatttcttgtatttttagtagagacggagtttcaccgtgttagccaggatggtctcaatctcctgacctcgtgatccgcctgcctcggcctcccaaagtgctgggattacaggcatgagccatgacacccggccatgtgaatttttttatccaaaaagaaccccgttttcctgcctacctacctcatccttaaaaaatttttaaatctatttccaaaggaaattatgtaaatttgtaaatagagcatttctgtagaatttttttggaaacgatgtctcactctgtcaccaaggatggaggtcgacc

SEQ ID NO: 234820 - DNA, 881 bp, Homo Sapiens
actccctgccctttaagttttaaagtaatcccgcccgccctggccctcccaaagttgctgggaggacaaggtgtgaggcccccgtacttggcgggattcatgatttaaagcaaaggaaaaaaaaagaaataaattattctgctcaatactgtttggcataattgcattgcttttcatcaacactcaaaacagcctcttcaggaagcactgagatgggagtggcaagactggctgaggcctagctctctaaaacggtgggggaggggggagcgccctgagagaggcattctactaaccccaccccaatcacccctatttttactctttctactttcggaattggaaagaacgacactcgagctaggttccaatatattaactttcaggggcccactgcccatcccaaccctcccctaacaaagtcccctgccggtccctgttccctcagccagctgcaggaacctaccaacggccaggaagctgcctggtggtgtcaactaagaaaagggggagcatctgcgccgtcactgttggggagggggctctattagtggtttgagagcttcacagaagccttccccctcctaaacctccccagcttcgaagggggagaattccaccagcagccccgtcagggacctaagctgggttcagccatgcaagcagcttccaggtggaaccccggccgcgagcttcccagcccttctagagcgggagatggagagcagggtggaggcaggcggcttgcggcgcgcaagtctcctcttccccggccggctcccggctgcgagctctgccagctcagaatttgcaaagaatctgcggtttggccacccacggcagcttcagcttaaccaaagaatgagccccaggcaaagttc

SEQ ID NO: 234821 - DNA, 462 bp, Homo Sapiens
  misc_feature (27)..(28): n is a, c, g, or t
  misc_feature (30)..(31): n is a, c, g, or t
acatgtttttttttttttttttttttnntnnttttaacttttattaatctttattttaaaacataaccagatgcaccttggttgtttacattctctggttgccattcagtctcaaagtaaacaccgggagcatatgataaatcgtagtttaaggaagccatagcacttacagagttctcgaatggttacaatataaaatctgtcataaaaatcagtaaaagatgcaaggtagaacacagtttaacactggtacaatggcagtagcagctttgcaaatgtttgtctatatgatttccacaggacttttttttttttgcctggcctcattatgtagcaaagcattttttcttttctttttgagatggagtcttgctctgttacccagcaggctggagtgcagtggtataaacacagctcactgcagcctcaacctcccaggctcaagtgattctcccacctccc

SEQ ID NO: 234822 - DNA, 937 bp, Homo Sapiens
  misc_feature (785)..(785): n is a, c, g, or t
  misc_feature (787)..(787): n is a, c, g, or t
  misc_feature (790)..(790): n is a, c, g, or t
tttcctcccgcctgggggggggtgtacctacgcgtttcccctccctcttatctcagggtccatgccctaaccccgctctctatgtttttctcttcccgcttccctctgcgcgttcccctcctgaccgattcaccctctccgccgcctttgtcggcgttccgctgagccgagcgcgcgcttccctctctaatgaggctacccgccatccttctcccgctcttgtacttcccggtttatcccgttccccccgctttttttcccctgcccacccagatttcctccccgtccttctccctcccacttttttttcgcctgatccccgtcgctcatcttctctctgagacctagagcctcatctttcctgggtaccaagtgccagcacccaggacagtggctgccctacaggagcacgcgattaacacacgtgggtgggatgaaagacaatgagcaagtgagtgtcgttttaatccccattttatagataggtgacagcttcagaggccacattacccagtcagtaaacacagtaagctgaggttccacccaggccctttggctgtgaaagccaagatgagtagcctgggggccacgcccctcccccaggtgcccagttcatacaggcaggcaattggcagacgtgggggcctgtggatttgtcagcaaggttgctggtggggtttttgtttgtttgttttgagacagggtctcaccctgtcacccaggctagagtacagtcgcgcgatttcagctcactgcaacctccacctcccgggctcaaatgattntnccncctcagcccagatctggagtagctgtagctggactacagacaagcgccaccatgcccggccaatttctgcacctttggcagagacagggtttcaccatattggccaggctggtctcgaactcctgacctcaagtgattcacccgctc

SEQ ID NO: 234823 - DNA, 869 bp, Homo Sapiens
acacgacgtggctttcagtgccaaaaaacatagtatattcacagtttacaattactgaagatttactctaagctagttgctgttctaagatgttctgcatatatcaactcattgaattgtcatatcaagccaaaggaggtactattaatatcccacttttactggggaggaatctgagacagaaataggttttgcgacttctccagtgtcatttgaaaatggcagggaagttggggttcaaagccagaagtctgactccagagcccaccctctaacaagctagacatattgcctctttacagtgtatgataagtgcttgccaaatgcatgtaagaactgactatccagctaagtttctccaaactagataactgtctttaagcagggaccttgctgcctgtgcccctcccagctctctctccagtcaccactacagagcacaatgcatggtgccttcttcacaagcaaataccttctcccttcttcaaatcctgactacagatccagggtagcaccatataccacacctccctaaaaaaagaatggttataggcagggcgtggcggcttacacctgtaatcccagcactttgggaggccgagatgggcggatcacctgaggtcaggtgtttgagaccagcctgggcaacatggcgaaaccccgtctctactaaaaatacaaaaaattatacgggcatggtggcatgtgcctgtaatcctagctactcaggagcctgaggcaggagaatcccttgaatctgggaggcgaaggttgcagtgtgccgagatcgcgccactgcaccccagcttggatgtcagagtgagaccccatctcaaaaaaaaaaaaaaaaaactcgagactagttctct

SEQ ID NO: 234824 - DNA, 909 bp, Homo Sapiens
ttgtgcttgaaaataccgttcccgggaagattctttttccaagctaggggcaataaaacctgtgccctgaaacttgtcttcccgaagaggcagcctggaggaacagctgaagcttcccactggttgctgctgggccgccccgccctgtgggaatgggggctctctggtgcttcctacctttgtgccttcttggggctgggcagattcacctcaggccagaagccccctggacactccggggccttggggctgccgttctgagtgtgcggaaggcaggactcaaaatgagatcccatttgactccctctgtatgtactgtgccctctcctggctcttgaggctctggagtcccaattgtctgtgttagtcagtgaccaggttccagggaaaatgatgtcatgtggtggtccaacttactggaaccaaagagacagtactttgcaaagaaaaggatcactgccaggtgcactggaattgctacagtttagtccgcatgatctctcctgaaggaggaagcctgtttcaaaaatagtttccatcatgagtctatcaatgagctcccacctctccagccagcctagaaagcaaacgagctgcccacagttctctgccctgtctgggaggttgaggccacagtgtatagactggtaagccagacaggcctcctcccgcaagctgctaccttgctttcacctgtaccttggtccccgggcagctagctataaagcaagagggacaggagcccagaagagacactgaggacaagagatcacaccagagtacatgtctctgcctctgttttcagtgtggctttggacaggaatatatgaataaatcactgccatacaggttttccaatacacaagtgctagaaaatacacacaattccccaatgaaaaaaaaaaaaaa

SEQ ID NO: 234825 - DNA, 917 bp, Homo Sapiens
tattgagaatagggggggggaccccttttgtgggaagggaaagccttggttgttccccccttcccagttgtttggggcttttccccccggggggggcccaaagccccactgggagttgccggtttttttctcccagttcccggtgggcccccccgagtattctggagggcttggcagggagttcggggggttctggcacctgttcagcccctgggtcgggttcctggtgtgctcccctaaaagctgtggttttgctgtgttcacttcggatttttctggtctggggagaagctgtgaattggagaaatggagctctgtggcttcccacccaaaccttttcagtccagctggaggctggagggagacacaggccccacccagcagactgaggggcagaggcacaggtgggagggcagcggagatcagcgtggacaggagcgatgcactttgtagatgctgtggctttgtgttgcgttttgtgtctctgttgcacagatctgttttttcacactgatccgtattcccctgggtgtgcacacagggcgggtgtggggcatttaggccatgctgtgctctacttcattgagtaaaatcgagtgagaggttccgggcagcaggatcgacgcccagtccagccggcagagggaacacacgggtccttcattgtcctgtaagggtgttgaagatgctccctggcggcccccaagcagactagatgggaggaggcgccgctcagcccctcaccctgcatcactgaagagcggcgcctctgcagcaagcagggcttcaggaggtgcccgctggccacagccaggttttccctaagaagatgttattttgttgggttttgttccccctccatctcgattctcgtacccaactaaaaaaaaaaaaaaaaaactcgagactagttctct

SEQ ID NO: 234826 - DNA, 479 bp, Homo Sapiens
ccttcctcattcccacactctttcctagaggtaatattaagcttccaattaattttagatggtagtttcaataatttcttttcactgggtattacaagtcttcatttcaaccctctgagtttggtttacttgtccatttaatactaatttagtggatacgttttaggtgctgttatggcagacccaactcaagctggtgatttctatattacttggaatcgtgctagttgctttgacaactacactcaacaacatataatatcttaaacagaacagaagtttcattcatataaactgtttttttaagataggaaaagcattgctcctttatgtccgcattcaagaacataggctactaaggtatttaatctgcagtatgttgcttccaagactactgtagaattggccgttccagtcaagcatactgaaaaacgtatacagaagagtgcatgttgggattttggagactaaattggata

SEQ ID NO: 234827 - DNA, 807 bp, Homo Sapiens
  misc_feature (17)..(18): n is a, c, g, or t
aatattttgtggattanncaattgagaatactaccttgcaaaaaagtaaacttcaaaaaaagaaaatagaaagctatcagaattcctgtagagtttgtgtttcccttctccctccaacatagttttattctaatgttttctttattcattttctttggtattagtgtgctgtaaactcacccaaaatgaaaaacaatcaaaataaaataaaacaaaatgaaagcacatcagttaaagataaaacaaaacaaaaaacaggctgccaggttttagtggacagaagggtaggccccctggagatcagccaaattgagtggatggaagtaatcaacaacaagaggacaacaacattagccactgctgagcagaaaattagaaagattcttcaatttatttttttttcttttctggttgtcaggttttgtctctcctgtcttccactggtacaccataaatcagcagtgtgggcctgctgtaagtcagacacaccacttagggtcttcacaccaaattttctggtttctcataaaaactcaaaatgtcagcttggcattctaaaatcagttctgcagactatgcaggattctgcttctggggaggcctcaggaaacttacaaaggtggaaggctgaagggaaagcaatcatggtcttcacatggctgatcaggggcggcaccgactatgtgcccgataactggctccccgcgcagcagctctttgccagcgccgactgcctcacctacgacgacttcctgattctcccaggattcacagacttcatagctgatgaggcggacctgacctccc

SEQ ID NO: 234828 - DNA, 521 bp, Homo Sapiens
gtagtcatcagggagggagctccttttatcttgttacgtactcccctcttgtgcccctttcttcccttgatctaagaaggttgctccggatctcgccatctggcctgcgttcaatcagcagaagcttcctggaggagcaggaggaggcactgtgctcgcatcacataccagtggccagaagttggcttcagggaagctcaggaaataggatgcgagaagccatgagacctccccaaactctgcagtaacagagtcaacaagacaatggcttaaagatggagagaccagttgatcggtcacacaagctgttccacgataattcttgtgtcagaaggggaggctgactaccaggaccactggccccacttccagcccctccattctgagtacacttcagagggctctggcagggtgagggggtcttggtggtgccacagagagtaaaggtctagcacacccattgtggagatatttcatggggacaacccagtgacttcacttgaagtaaagtgggattttcc

SEQ ID NO: 234829 - DNA, 589 bp, Homo Sapiens
agcccatgataaagttccttaagctggtgattcctaatcaaggacaagccaccctagtgtctcatgtttgtatttggtcccagttgggtacattttaaaatcctgattttggagacttaaaaccaggttaatggctaagaatgggtaacatgactcttgttggattgttattttttgtttgcaatggggaatttataagaagcatcaagtctctttcttaccaaagtcttgttaggtggtttatagttcttttggctaacaaatcattttggaaataaagattttttactacaaaaatgaaatttgtttggacttccacttgagacagtaaagagagtattagacacccagtaaaaactgccatataaagaagttgtaattgtttgttgtgtatgtatttttttcaatgccaaaccagctgtgatccaatttacatccacattttaggtccaacagcaagaagttcagagagagatttcccaaccagacattgggtcactcactggtcaccttgccagtgcattttattagaagggaatctgttgtagcaaatgggaataaacctgggtttaaatagacccagaactga

SEQ ID NO: 234830 - DNA, 608 bp, Homo Sapiens
acttttattctcctattggagggtctaatttgtcccaaaataggggcaagtggggttgagggtggggtttgggtggggggaggagatcttatccaacctgtaggtggagaactggcccagagggtaacaagtacttgcagtttctctgaaaagttcagtccctcctcctcttccttttctctttttctcccttccctgatagcgaaggagtgtttttctttaccccttgacagaagtggtcctctgccaccttatatttccctgtagtcctcctcttctgtggattcatatgggagcgatatgtcatttaagtaaagttactgttcaacttagttacaatgagttttaatagcgtcccagtgctacattttatttttcaagcttgtactcacggtttagttttttctagttgttagtgattgcaattatcaggatgagcctccttttagcagagtgaacccctttttaaaggccactttaacaacaaccaccaatatattgtttagagacggtttctgtctagtgtaaaacttgagtggtctgactctaataaatggttttgaaatgtgtgactggtattataaaatttgtgaataaaacatataaaa

SEQ ID NO: 234831 - DNA, 460 bp, Homo Sapiens
attatgcagtttaatgtgcagtgcaagtgttttctgccctggggtctgcgcaggccactccagtcctcagggggatccctcagtgcagctgggtcactttcttctcagctctgcttacttttgaaattaagattgttccttgacacttttatggctgttgcgtaggcagagttgagtggctgtgacagagactgggtgaccctcaagcctgaatcatttgcagggtcccccctgagaagtgtgcggccctggcgtccctctctccagccctgccctgggcctggcttgtgaacctgtgatgtcgggactgcaggccctgctgggccgttttcttaccaggcaaaattcctgcttcacagagttgatgccaggggtgtcaaatcttttgttttccctgggccacattggaagaagaattgtcttgggccacataaaatagaataacactaacaatagttga

SEQ ID NO: 234832 - DNA, 682 bp, Homo Sapiens
  misc_feature (6)..(6): n is a, c, g, or t
  misc_feature (8)..(35): n is a, c, g, or t
cgacangnnnnnnnnnnnnnnnnnnnnnnnnnnnngaacagaactgcagttattttactgttccccaactggacagctgcttcatttgcgcttgtttcacgcaaaatttcagaaacttgaaacaggcgggattgccatccactactaaatagcaacactgtaaattcaaagtcgtaaaagtggggaggaaaaatagcgaaaaggtacactctcaaagctttcttctttcgggtccgtaggaagacgcacaggaccctggggtcgggctgatggtaggtctcaaggctgggagttcaggaacccccaaggcgggctttcgcctagggagcagccgggagcatgaggaccgagggtggcccgcgtctcggcttccaagaagaacgcgagactgacagggcctgcccacttcacgcacctcatagcgggtcccgcgcttgtccttcagggtggagatgagcaggaaggctcggaccggcggctgactcctggaagtctgctgacagaggctcaacacggctcggacgcccttgccccggttcctaagccccaaggcgggcaagtgccggctgatcacctccacctcacagtgtagcttcatctcgcccaacggccacaaccacgtcaagctggctttgaaacttcctccttcccgccacccggcgccgccatcggggtcctcccc

SEQ ID NO: 234833 - DNA, 818 bp, Homo Sapiens
  misc_feature (281)..(281): n is a, c, g, or t
gggggaggaaaaaggagaaaacccggggataaggcattgcggggactaaaatcatattttagggaccaaatgattccatataggaaatgttgcacatttatttataagcaaagaattactcctgttcttttatgtagtagtataaaagaatcacagatatatttgttgattcagaaactgtgcatatctaataaacaagagacagagctgcagaatacctggtttcatacaacttgtgcaactgatttttgacctgttttgtttttgttttttttgagacnggtgtctcactctgttgcccaggctggagtgcagtggcacaatctcggctcactggaacctctacctcctgggttcaagcgattcttgtgcctcagctgacatgctttgaaaaatctttcctcatgtgatactcctccccagtactaagataccaattatagaaaatcaactggttaggattacattttgcatttgataaaataggaattgagatgaagaaaatagttcatacgtctctcctcagtatttccttcaattcttcactcttgtatataaatcaaaattataagtgacataattttagcaaaccaaaataaccagtaaaccaaagaataattttacttaaagtacagacaacctcctaacaaagagttgaccaagttaacacctgaaatttaaaaacctttcatcagactgctttcagcatatttaggatacatacatttcttcttttgaaatctctaccatgagagactaaacacagtacgatacttgcagagatttccattaacaacttcttttcaaatagtgacacc

SEQ ID NO: 234834 - DNA, 597 bp, Homo Sapiens
  misc_feature (353)..(353): n is a, c, g, or t
gctttgagagaggagtgtgtgtgcacgtattcatctgtgtgtacatgtctgcatgtgtatatgttcgtgtgtgaaatgtaggctttaaaatgtaaatgtctggattttaatcccaggcatccctcctaacttttctttgtgcagcggtctggttatcgtctatccccaggggaatccacacagcccgctcccaggagctaatggtagagcgtccttgaggctccattattcgttcattcagcatttattgtgcacctactatgtggcgggcatttgggataccaagataaattgcatgcggcatggccccagccatgaaggaacttaaccgctagtgccgaggacacgttaancgaacaggatgggccgggcacggtggtcacgcctgtaatcccagcacactgggaggccgaggcaggtggatcactctgaggtcaggagtttgagccagcctggccaacatggtgaaaccccatctccactaaaaatagaaaaattagccgggcatggtgacacatgcctgtggtcctagctacttgggaggctgaggcaggagaattgcttgaatctgggaggcagaggttgcagtgagccgag

SEQ ID NO: 234835 - DNA, 780 bp, Homo Sapiens
atcacttctcaggaagttgtgagggtgaggagaatagccgggcccactctgcagagggagggaacaggcacaggctagaggcatgggctgatagagtgagtcctctccctcattcattcattcattcattcattcatccatcagacacctgctgggcatctgctgtgtgcgagacactgtgctgggtgccccagacacaagacagaaactcgggtcgctctgtgtgcctccacactggccttccctgctgcgtggacgcaggctctgtctcctaggctttaagccccatgcatcaggtggaagacaatttccagcggcctctgcccgcttgtttttcctcctctccttttcctgccgccttggtcttttttgtcttttgtgcagggccgtctctcgcagcgcccgtctgtgctccgcagcgtctaggaaaggattagtgtgagcagagcatgcaggctttggtgaacagagccgagcttggtttcaacatctaattcaatttgttctgccgagattgaaatatgaaatggttgccagtcaaacgttcaaaggacggggaagggagagtgagcgcatgctgaaatttaaattttaatgaaaatgactttaaccctttggtacaccttgcaaaatgtaacccatcctcccatcttgtgaaagcggcctctcgggttagagcttttccacccacttctcttccactgagcttcactaataatatgtaatcatttttttcagccgtcttaataataaaagattaatagaaaaaaaaaaaaaaaa

SEQ ID NO: 234836 - DNA, 796 bp, Homo Sapiens
  misc_feature (56)..(56): n is a, c, g, or t
aatctctcagaaatccatgttctttccatctctgtgtgatgaccatgtgaaatcgngaaacatcactgctcgtgatcctgccattatgggactccgaaatatactcaaagtttgctgtacccatgacatcacaacaataagcattcctctcttgctggtacatgatatgtcagaggaaatgactataccctggtgcttaaggagagcggaacttgtgttcaagtgtgtcaaaggtttcatgatggaaatggcttcatgggatggaggaatttctaggacagtgcaatttctagtaccacagagtatttctgaagaaatgttttatcaacttagtaacatgcttccccagatcttccgagtatcatcaacactcactctgacatccaagcactaaacccttatagattgacatgctggcagaagatgattgttaaactctccaggaacttgtgctatgctgggaatctgtcaagcaaaagatgcccagaaagagaacttgcagctcaatccacaaatcaagatacatgtgtgtgaaaccattccaaaaatttatatactgcacaaactggtgatcaacccctaacttaaacacttaaagtctctttatgaatttctctttttttcttctctgtgttacctgtgaatattagtaatctaaaactttttatttatcacacatggacacttgggaaaggaaacttgattatatttacatggaggcatttgactttttcaagaggcttgactcgtctcaggtgcaatccttaattaaacatacaaacaaaaaaaaaaaaaa

SEQ ID NO: 234837 - DNA, 559 bp, Homo Sapiens
ggcacgaggcgagttgctaaaattttaacagttatttcctgctttttatcacagttgatttctgaagactacattgccaagcagaatgatgaaatgactttttcgttgtcaggcaattttggttaagtcaaatcttaatgccctcttcgctatcagatgttgcctgtgtttccataaagcaaaatgctgattttggtaaaaaacatgactgcttctagagctgggaggatctgcagactttcacggattcatggaacaagaaaagaagcataggtacttttaggtgccattaggtattgatcagtgaaatcctagggtgctctatgagattgtactaggcctatgaagagtggtaagccaaataggtctccatgggagatacattatgtaaataaataaacaatggtttgctggttcctgttggtgtctccacaagtaggtaaacatgtttaaaggaacccgggttcttagattttgttagactttttaaactcaaggatgagcataagtgcttgaaataaaatgctaatacttaagtgtcaaaaaaaaaaaaaaaaaa

SEQ ID NO: 234838 - DNA, 735 bp, Homo Sapiens
  misc_feature (45)..(45): n is a, c, g, or t
caccatactttactgtatccttcaggtgtctgtcctagctagttntgtggtctgcctccttcagtccctgcaacaagcctgtttattttcattatattgatgaggttatagagcttggacaagttacatgacttttcgaagatcacatagctaataagtgtcaagagtcttattctcaaaaccctggtctgtccaactacaagcctgtgctcctgactccactattctgcttaccctaagcctaaagctgcccacttcaagctcaaatcctcttggaggcttcatgctttaaaaaaaaaaaatccatgcaattttttgcatcctaattaataatatatctgtgtgttttagtgtaaatttttttttttaaattaccaattcagttatttagctttttattccccaaatctttggtaccctaggcagatgtgtcatatttatcctgggctttatgtacctctggtttgagggactcttgaacttcattttaagaaacatggcccaatgagtacacagtcaagtcttcatgtccctgaacactgcattataaaatcagcactccttgttctttgtatatttgtgttatcaaataactatgtgattataatctggcttctcatataccataagtgcagaagagaatcaaaagattgagtacctgattccctaaactgtcaaatttcccgttgtatattaataaaatttgtatcgtttcacaaataaaaaaaaaaaaaa

SEQ ID NO: 234839 - DNA, 751 bp, Homo Sapiens
  misc_feature (284)..(284): n is a, c, g, or t
catggtgtggtcgcagatcgagcggcgcaagatcatggagcagtcgcccgacatgcacaacgccgagatctccaagcggctgggcaaacgctggaagctgctcaaagacagcgacaagatccctttcattcgagaggcggagcggctgcgcctcaagcacatggctgactaccctgtacgaggaggagggcgcgggctgctcgcccgacgcgcccagcctgagcggccgcagcagcgccgcctcgtcccccgccgccggccgctcgcccgccgaccaccgcggntacgccagcctgcgcgccgcctcgcccgccccgtccagcgcgccctcgcacgcgtcctcctcggcctcgtcccactcctcctcttcctcctcctcgggctcctcgtcctccgacgacgagttcgaagacgacctgctcgacctgaaccccagctcaaactttgagagcatgtccctgggcagcttcagttcgtcgtcggcgctcgaccgggacctggattttaacttcgagcccggctccggctcgcacttcgagttcccggactactgcacgcccgaggtgagcgagatgatctcgggagactggctcgagtccagcatctccaacctggttttcacctactgaagggcgcgcaggcagggagaagggccggggggggtaggagaggagaaaaaaaaagtgaaaaaaagaaacgaaaaggacagacgaagagtttaaagagaaaagggaaaaaaaaaaaaaaaaaa

SEQ ID NO: 234840 - DNA, 766 bp, Homo Sapiens
  misc_feature (60)..(60): n is a, c, g, or t
gacatgtgatatatcatcataacttttataatatatattagtacaatattgattgcttgntaaaaatcaccagaggtgccccggcagaactcctccagcagtgctccaccaccggccccagaaataaagccagaagcagcagaagtggccacagaagaaaaagaagagaaggaggaagaaaaagaagaggaggaggaggaagaagaggaggaagaatcagattcctaaggttagaaatagggagatgaagccaagtatatcaaactcctcaagtactgagtgggaatgagatgtttggtgaagtagaaatagatagctttagtggctctgactcagatatactgatgtagaaggaaggattctttcacttttattatttattttggtaattaaatttacattaatttaatatgttaaatattttagtaccttttgctttttcacatttcatttgaaccattaacatgcatctttggacatcaatgtccttgtctttttggcccaattgttttagtcaccagaaactttttcaggacatgctatcttctatttgtttgacatacagaatcatatgtacctgaatttattactaactctgggattttcattttaagtaacaactacctattatgtgaggacagttgtttatgtgattggttgttctaacttgccctataaatgtgcattcatcaaaggagaagtttttaaatccaaaaacaaataaaacccgattcatattagacaactcaaaaaaaaaaaaaaaaaa

SEQ ID NO: 234841 - DNA, 816 bp, Homo Sapiens
  misc_feature (13)..(13): n is a, c, g, or t
  misc_feature (108)..(108): n is a, c, g, or t
  misc_feature (157)..(157): n is a, c, g, or t
ttttttttttttntttaaaaaaaagagagatgtgtttattccatgatcagtacagaccaaatgcatattcaccgtatgaaagtcaaaccagtcagtgactccagagtntggccaacactgaggcaccagcgtcgtggtgtagagtggttctcatgcnacgcgtaacctcaccaggggctccaattataaaaatgtaaaaaaaaaaaaaaaaaagcatgggcaggagcggccagctggttggggctgggcgccaggtaggagagtctctgccttagtctgtggcgcccccagggcccggttcccacctcatcccttggcccttcctttctcagtaaaaaacaaaaacaaaaacaaaaaccaaaaccaaaaaaaaccaactcaacagatctgacattaaaaaacaaaaaagccaacaaatgggtgggggggggggggtggaggggaaagaaaagaaattgtagctttctggttttataattaaaaatagactaataaagtttgaaactgagtaaaatataggcaggattttttttgtgtgttttgtctttttgtggatttttttgagcttttttcttttttcacaccagtttggtggagtcaccaacaaacttcaaacaaagatatgccaactatgttcactatacagtacagccacggtcacacactacccacagcgcggtggcagccgctgctcaatgaggagacgatcacaccatttcggagataagcagtgccattgtgtctggaggagaagagagaattaaaaataaaatagaattcaacaaaaaatatatatagaaaaaaaagaaaaaaaaa

SEQ ID NO: 234842 - DNA, 714 bp, Homo Sapiens
cagatgcagccacagatcaggacctgcagaaagcccacccacttccccttcatcagcctctcggaggtatgctgtctgccatcaccaagtgtggttcaaaacacaggtaaaagtgtcttaactggaggccttgatgcgttggaattcatcggcaagaaaaccatgaatgtccttgcagaaagtgacccgggctttaagcggaccaagacgctcatggagagaactgtttccttgtctcagatgttaagggaagctaaggagaaggagaagcagagactggcacagcagctcacgatggagagaaccgcgcactacgggatgctgtttgatgaatatcaaggcttgtcacacctggaagccctggaaattctgtccaatgaaagcgaaagcaaggttcagtcatttttagcatcacttgatggagagaagctggaactcttaaaaaatgacctaatttccattaaagacatctttgcagccaaagaattagagaatgaagaaaatcaagaagaacaaggcttagaagaaaagggagaagaatttgctcgcatgcttacagagcttctctttgaattgcatgtggcggccacacctgacaaactcaataaggccatgaagagggctcatgactgggtggaagaggatcaaaccgtggtgtcagtagatgtggcaaaagtgtccgaagaagaaacattcaaagaaaaaaaaaaaaaa

SEQ ID NO: 234843 - DNA, 677 bp, Homo Sapiens
ctacatatgtagtaaaattagagacttttgtcactttaatttttagattatctcaagttttcactagatttcaatgtgccacttgtgctatgagtctttaagaagctttaaaaaataaatgcacacctgtagccttttaccattcagacaggtagattatatttacctgtcatgagggaccatgtatggttgacagttgcaggtttgattaaatccactatattgcacaaattttgctggaaataatttcctgccctgccaagagctctatggtagtttgataataaactactaccccagtattcttaggaactgtgttactaagtcttttctgcctgatttgtactttatttccatagacccctcagatatgtgaggaatcaagccataaatgtgcatttgctggacattatgtaccatgtcatctctatgactacagatttcaaggataatttttacatctaacaatttcactgtaacagtgaccgataatgtgagaaatgtgctttttacagtgctgctggtgggtagacaagtgcttgctgcagttgtttctgaatctagccagatgctggagtcgtgaagctgtaagctccgcgggagcagggaccatctctctttcttgcactacaggcactcaataaatacttgtggctgtgaaaaaaaaaaaaaaaaaa

SEQ ID NO: 234844 - DNA, 823 bp, Homo Sapiens
agtagcatttccagcattcacacttgatactgcacatcaggagttggtcacctttcctgggtgatttggttttctccattcaaggagcttgtagctctgagctatgatgcttttattgggaggaaaggaggcagctgcagaattgatgtgagctatgtggggccgaagtctcagcccgcagctaagtctctacctaagaaaatgcctctgggcattcttttgaagtatagtgtctgagctcatgctagaaagaatcaaaaagccagtgtggatttttagactgtaataaatgaggcaaaggatttctattccagtgggaaggaaacctctctactgagttgtgggggatatgttgtatgttagagagaaccttaaggagtccttgtatgggccatggagacagtatgtgataacataccgtgattttcatgaagaaattcttctgtcttagagttctcccctgctgcttgagatgccagagctgtgttgttgcacacctgcaaaacaaggcacatttccccctttctctttaaagccaaagagagatcactgccaaagtgggagcactaaggggtgggtggggaagtgaaatgttaggcgatgaattcctgagcaccttgtttttcttccaaggttcgtagctcctctctgcccttccaagcctgtaacctcggaggactatcttttgttctttatcctttgtcttgtttgagtgggtcagccccagaggaactgataagcaaatggcaagtttttaaaggaagagtggaaagtactgcaaataaaaatccttatttgtttttgtaaaaaaaaaaaaaaaaaa

SEQ ID NO: 234845 - DNA, 778 bp, Homo Sapiens
  misc_feature (22)..(22): n is a, c, g, or t
  misc_feature (36)..(36): n is a, c, g, or t
aaacaacaaagcaaatgatatntatgtcatccaggnacagataggagagtacagtcattcttcatagcagtttcattgccaaactccaaatgagagatgtaatctaggtaaaagacacttattattccagattacatttacctcacaatctgagatcatgaaaattagtcaaatatattagaaacagatgtacacgaagtcacctcagataaactgagaaagtgatgtctaatgctttggaaaattctgtttctacttaatactcagattaatgagttttaaagatcaggaacatctttatgggggttcataaatgttaggaacaatgatatgcactttcatcagtttaattattaggattcaagatggtatttaaaatctagatgtaggctcagttagtcagtgccaaaaatggaaatcttacatttttttagaggaaacacaaaaatatgactatttggatcttgtcttaatttacaactggtaagttcctttttaatgcttaaaaaaatggacatggtagaattgctacacacctgaaaaaggtctcaaatagaatgttccattaacaacaacaactcagaaatctaattcactctacagattttatttctgatcaactaatcaacttttattttcttgagcctggctgctgctgattatgtataacttgccaaataactacacatcactgaatgttacacatgagtttaaatgggtaatatacaggttttgttataataaagttactgattaaattaaaaaaaaaaaaaaaaaa

SEQ ID NO: 234846 - DNA, 700 bp, Homo Sapiens
gcaccggtgcccgtgacgtacgagctgcccacactgtataggacggaggactattttcctgtggacgccggggaagcacagcaccacccccgcacttgccctcggcctttgtgagctttgtggtcttcccatcaggaacgctggaaagtgacattgtgtacacactgcagcttgggggttttttctttgtattgctgtttattttatattttaaaaatatttaaaaaaatgtcgagatggggtctcactatgttgtccagactgatctcaaactcctgggctcaagtgatccacccaccttggccttccaaagtggtgggattatgggcaggagcctccgtgcccaggctgctgccattttcaaatttcctccctgcctcatgtgagaccacagggtttggagaagcagttggaacccacgtgtggtgatgcctcccacatcggcctgcttggggttctacaggggttgagggaccaggcctggccggggctgatggacagtggggactttccttctctccatgatggctttgcaggggctccatggtccttctctctgtgatgggtttttgcacggggtgtgctctgccactgtggtgggtgggtggatgctgcttctgttgcctccagacctcggtgcccacagccttgaggatccttccaataaaggtgtcaagagctcaaaaaaaaaaaaaaaaaa

SEQ ID NO: 234847 - DNA, 725 bp, Homo Sapiens
agaggaatattctttatgtcctggccaggaacattctaactccccactggcaggacttaagttatgtctttatattttcgcctgtcttttgtaaattgtaaacctgtcccctcataaatagggcatcttcttgtacctgccacatgtcgggccggtcagcacaggttttctgcagggcttctggctgggctggcaaaaagcagcagggagcagggcaaagctttttttctggcctgactcccccttggtgcagcccagcgctgccacctgggtggatggtccccggggccctattcccagttgctccagagccactatttaggatccaggttgtgccaccaagttcaaggctggttgtgatggtgagaacagctgctttcatagaaaaatcatcatgtcctagcacagatggccccaagcaggggaagtacaatactgcaggctgcaaatccatgtcacaggtggcaaccttggtcacagagatcgggggaagggtaatgtttacaaaggaaccttttaaaaaagattttgactggagcacattggagttctcgggagttcccaaagctaatttgtgtctcctctctgactactcacgtagttttgagcaagtgcctaccttgatttttctgtcttttaatagaattgaatcatacttgctacactttccctcatcatttagcattttgagaccttgaccttttaccaaaaaaaaaaaaaaaaaa

SEQ ID NO: 234848 - DNA, 733 bp, Homo Sapiens
gaaatttaacacttatttatgtaaaacattttatttaagatattttctaatgattttaattttagagagtaccttttcattctgtgtgttacagagaagtactgaaaagttaaggacacttgggggctacttttttccctctaaactaaaaaagacattggctgaattataactagttagttatcacctcgtcccttaaagtcagtgacctcctgtgtttgatgtatattacatagagtcttaagtcagtgtacagttccactggaatttgacagttgtctctacagtcatgcaactcgaagtagaaaagagtgctggacataggaagggggtgcttggtttgaggggttaatgtgaggcctttttgaaaaatgaatattttgataaaaagaattcttgttttagcacagttgatgcacataagtgattctcatatttgttgtataaactggtttaatacatttggaacatagttggattacattcatttcctgggaaagctagcttaccatacattcaagtttataaaacaatttgccataggcaaagccatttaaaaagttcattctgaaattatttcatttacctacagtgaaataattgtgaactaagtagtctttctgaaaactgttgggttctaggcattcctgagaaattgaaagtggctacctttcatgtcaaaaatgttgatctattataaataaaatgtttttgcataaaaaaaaaaaaaaaa

SEQ ID NO: 234849 - DNA, 731 bp, Homo Sapiens
actcagtacatgttccaggtccccatgctatgaccatccaagagttggtggactatgttaatgccaggcaaaagcaaggaatctatgaggaatatgaagacattcgtcgtgagaaccctgttggcactttccactgttccatgtctccaggaaacctagagaaaaaccgttatggggatgtaccctgcctggaccaaactagagtgaagctaacaaagcgaagtggccatactcagcacataaactgaattcacagtcctatccaggacccttggagaagattttcctgcaggagcatttgagctaagagactggctggctggagggtaaattcatcagtactgctgagatcatcatcgtatatgccctgaaggagtggagtacagtggttgagttggggctctggagtcagagatacctgtatttatccattttgttgacttccctgtctccagtacctagaacagtgcctgccacatatcagacactcaggacatatttgtgaatgagtgaatcttagtgtactgggagattcttctaatcatcctgtggttaatatgaagatcattgtctgatttgtagtccctctccttactgaaacattagcggaggctttatttttatagtaaatggagtatttaggctttttttttattttattttgattttagtttttagtttttttgacattatttactttgcgggccgaaagcaaaaaaaaaaaaaaaaaa

SEQ ID NO: 234850 - DNA, 768 bp, Homo Sapiens
  misc_feature (247)..(247): n is a, c, g, or t
ccattatataccaaagacaatatctcaagttatctcattgtagcagtgtctgtgagtcaaaacttcaattttagtagagtcacactttctttatatagaaaaattcatgtactcactactcatgtagttactgtatctttaccttcagtttgtaaaaatgactaaaagtagggaaaacaagtgttaaaacataatggataagaaaaggttggaaatcatatggcaaatcacatgttcctcagcctcnaaggtgtgtttagttgtgaaagaaagaataaaattgtttaaatgtttcactttttgggaatgacttctcccctactcccccagaaaatgcgatgtatacctttgcccattcaactttagtccatatttttaggaacacacaaatttactttaaggaattacctttaaagttgactatataatagcaaaagagaaagtattgagactgtcagtgttgataaagcttctagcaagattaggttgactagaagtgcatcacagttctttatacttttagaactaaaagccttataattttgaaaaatatccagttacagaaattgtaccttatcagttatactttttttctgagtaagaaaacaagctatagctttctggttaatttcttatttttcgttgtttggtttttgtctttttgagtggaacgttaaagtttattaccttcatgttaaggaatatccagcttcacagacaattaacttgcaataaatctctgaaataatcaaaaaaaaaaaaaaaaaa

SEQ ID NO: 234851 - DNA, 741 bp, Homo Sapiens
  misc_feature (67)..(67): n is a, c, g, or t
caaggagaacaagccgccccctgtactcatcacgctgcctgcagagcccacactgcccccagacgcntacagccacctccagggtcacctcggccacttccctgggcccgaacccctggccttccccgtcaaggagctgcagggcagtggggcccgacctggggtgcccctgtacccaccgggcctcagcgagctcaaggtggccgaggtcaaggagggggccctgctgggagcaggcaaggccaaggcccccaagacggccagagctttggcactgcctgacaaggttctgctggaggacgccatgaagctcttcgactgcctgccaggcgcctctgagcctgagggtaccctgtgcgaggtccctgggccggccctgcctgacagcagtggtgggaactcagccgatgacatccgctcgctgtgcctgcccgaggagctgctgtcctttgactacagcgtgcctgagatcctggacaccgtgtccaacgttgactacttcttcaacttcaaggcgctcgacgaggagcagccgccccacccggggccccctgccaccaacaccccggcccccattctgtctggcaagagaaaggcctcgacggccaagaagggaaagccgggaaggaaggccaggcagccggcaggcccagccagcgccactcccccggggcccagggaggacctgggagccaccccgcattaaagcacatttgacctttcaaaaaaaaaaaaaaaaaa

SEQ ID NO: 234852 - DNA, 470 bp, Homo Sapiens
ggcacgaggcttcaaaatagaagataaaatgctgctttaagaagtaacagttatttttctattttgaagactatttattgtaataattagaaaacatgaaatagggaactccagactgacacagcagttgtttttgaaaaggaaataaactttgatgaattagataatccagatacatcattgtaaactcttactctaggtgctctttggtgagagacaggctttgttctcttgttcataacatttctctgcaaagaattctctatggagtgaagcgaatgaagtgaataatttcttaccaaataaatttatcaatttacaaatctgctctacatctcacttttgagttcagttgtagtcatgagtgatccttcatattttattaaaagtgttcattcaggtaaggtgtatgttgaaattttgccaattatcttaataaaacctggcaattttaaaaaaaaaaaaaaaaa

SEQ ID NO: 234853 - DNA, 695 bp, Homo Sapiens
gaggtcaggagtttgagaccagcctggccaacatggcgaaaccccgtctccactaaaaatacaaaaattagccaggtgcagtggcacacacctgtaatcccagctactccgaaggctgaggcaggaggatcacctgagcccaggaagttgagactgcagtgagctgagattgcaccactgcactccagcctcagtgacagcgagactgtctcaaaaaaagaaaaaagtgactgaggaggaagaggccaggtggcaaatggaacagaatcaccaaagggtgaacaggactaaggcaatgtagtgtatggctcagctacgtcagagtggaaaaggtgttattagagcagaaactatggtccctgcgtcacagggaagcaacctacagagaagcagcagctccccaagagaggagagataagaagccagaagcctcagagtgaacaattgtcctattagggattgctctagagagagaaacctctgggaacgtacccctgtgaggcagcacagcacaatgcttttagaattgtatgagagttgatatatctccatttgttttgcaaaggcaaaaactaagatacagagagattatctgttaaagttatgtatttctttggtaataaagatgctgacagtgttgctggaatgcatttctttaataaagatattgtacaatgaaaaaaaaaaaaaaaaaa

SEQ ID NO: 234854 - DNA, 678 bp, Homo Sapiens
  misc_feature (54)..(54): n is a, c, g, or t
tttattttttgatgtagccttgtaaaaaaaggagtcttaaaaatgatttttttntaaaggcaagagaaatcttgtagtgctaactgccttgagatgccaattacctatttctgagaatttggtgactcttattggtaatgatggcatttacaacatttggcatttcccctttttcagctcagttaccatagaatacttccaagctttactacttcctctgtaagtcatttcagttatgccaggatatttgatgattttgtttatgtagaattaggtaacaaagccaattatgctatccttattattgaaggattaatcttatgacttaacataagctttggttatatttggtgtagtctttggctaagtacccattaaggctagtagcaaacacttggaaggtggctaactgggactgggaatacgtgtctcaacttgagaaaccaaatagtgcgaagggactcagggtggccagacctgtgaccttggcctcatttgtatcttgttttcactgaggtgatcagacacttagtaccctagaaatggactggaattattgaatcttcttctgtaacatcacaatcttcctggttttcagaataaacgtttttgtgcttttgatataaatatatactctataataaaatgtttgactaatttaaaaaaaaaaaaaaaaaa

SEQ ID NO: 234855 - DNA, 652 bp, Homo Sapiens
tgcagtagaggaaggtttgggtcttgacggtgctatttgccacggaaagatccttcctgctcccagggcaggagagccgaggtaagacttactgtaggctgtcgttttttttgtttgttttttgtctttgcgatggagtctcactctgtcgccaggctggagtgcagtggcatgatcttggctcactgcagaacctccacctcccaggttcaagcgattctcctgcctcagcctcccaagtaactgggattacaggcacatgcccccacaaccagctaattttttatttttagtagagacagggtttcacatgttggccaggctggtcttgaactcctgacctcaggtgatccgcccgcctcggcctcccaaagtgctgggattacaggcatgagccactgcgcccagccaggctgttgtttttttacctccttgtttgcacaatttgggccactcacaagagtgtataccctgtgataaacagttacctacattctcctctgcatgcttgtctttagaggaaggaaatgtattaattgcccaaagtaatatattgtgttaagatgtgatatatactggggaaaaaaaaagtgtatattgacatttctggaataaaccactttgattcccagttaaaaaaaaaaaaaaaaaa

SEQ ID NO: 234856 - DNA, 602 bp, Homo Sapiens
agggcaagccagacactgagtgacaccaaaggctttgtaactatgtcttgagggtctgctgccccagcctggcagcaggaaccgccctccccaaacacccacagccactgacccatccaggactccagagagtcaggtcaaccccgaggaccccttgggcccttctggggtactcctttcggcccccctggtagagtctcgggagttcacacagggtggcaaacaccccctagagctcctctgcctgaatcctgccccctagcctttgaccactgtcagccacctgtgtcccttgagccttcgggtcttcacttcccacttggacatcactgctggacattcccatcgagatgacacctgggttccaatcccagctctgcctttgaagcacttgcggccaccgtcaagtccctttgctctcggaccctgggtttctcatcctttaatgaggtgggttcagaagctctcccatcttcacagcaaccctggcactggcttctcaatgggagggaagcagcagagaaactgaagtgttagacactatgtgtcccaccaccccattacagagacatatgacaatgttcaaaaaaaaaaaaaaaaaa

SEQ ID NO: 234857 - DNA, 710 bp, Homo Sapiens
atcccagatgcaataagatgaaggtgaatgcctcacacaggatgtggcacatgacagtgcctgaaggctcccttcaaggaagccgtcctgccccgccccctcctctgctcctgcagcgccctgcacagctctgctccccgcatgcaccgcatcgggtctcagttttttgtttgcgagcttgccctgtccctgcttgtagcccctgagccctcacagttgtcacacacccagcagtctgccaaggagctgcttttcctgactactgtctctccatgcctagggaagtcaaagccctgggccttgccttcagggagttgacagtgtccttgaagtggtgaagtgcccaccacatgaaccaaggagagacgccaaagcagctgccatggactctggcctgtccaagcctctgtgcacctgcagtctctttccactggcacttccctgctttgctaccatcgtggaagaatggaagggagggggagaaggtgggtgggctcagggagaacggccagagtggccagaagatgcagagagaagccccactgggatctgagtattccccaagggcactcagccacagggatgaactagtgtttgtttgtatccttgcagttatgtgacttaaagtgactcagagatatctatgtatgcgagtgtactccgctggcaatgaagtaaatatatcaattttgaaaaaaaaaaaaaaaaaa

SEQ ID NO: 234858 - DNA, 689 bp, Homo Sapiens
aggaggatagttgaaccagggttcaagagcagcctggacaacaaagcgagaccctgtctctacaaaaataccaaaaaaattagctgggtgtgatagtgtatacctgtggtcccagctattcgagaggctgaggtgggaggatcacttgagcctgggcggttgaggctgcagtgagccaggttcctgcgatccagcctgagttactgagtgagaccctgtccacatccccacaagaggtaaacttatgttcatcaaaagacatgtacaaggatgttcatagctgctttatctacaataaccattcactgcaaacaactcaaatatctatcagcagtaagataaatacattgtgatacatctccacaatggattattatacaaccaagaaaaagaacaggaaagcagacatgacaatagattctcacagatacaatgttgcgtaaaagcaagacgacaaaccatgtatttccacttacacaaagttcaggggtaggcaaaactaatctatgatgaaaatgtcaaattggaggatactgactgagaaagagcatttgggaatttcctggagggacaattatgttcttctggtctgcatggtggatacacaggtatacacgtgtagaaattcaccacgctgaaatttatgatttgtgcactttaccatattcattaaaaaaaaaaaaaaaaaa

SEQ ID NO: 234859 - DNA, 676 bp, Homo Sapiens
  misc_feature (581)..(581): n is a, c, g, or t
caaattggctggcaccttgatcttggacttcccatgctccagaactgtgagaaataaatttctattatttaagcccatggtagttttatggcatcctaagctaagacagcgcgtctctagtttcccacggattcataaaggtccataccaaaaatgttataactgttaatagtgtcctgtccttgaatttaacagcaaccaacatattgtttgcatagttcttgcaccatttggaaacagtgacctttaggtgttgcaggtaactattgggaaatccttcaatttgtttaacatttccatattttgatttgcatcttgggagttgcttggaatttgggatcctcttctgtctcttgagttgaaatcagaggctgcttgccgggcaaggtggctcacgcctgtgatcccagcactttgggaggcccaggcagacagatcaccagatgtcgggagttagaaaccagcctggccaacatggcgaaaccccgtctctgctagaggtacaaaaattagtcgggcgtgctggtgcatgcctgtagtcctagctgcttgggtgctgagtcaggagaattgcttgaacnccgggaggtggaggttgcagtgagccaggatcgtgtcactgcactccagccggggcaacagagcgagactctgcctcaaaaaaaaaaaaaaaaaa

SEQ ID NO: 234860 - DNA, 683 bp, Homo Sapiens
gacctcagcctcagcctcagcctcagcctcagccccgatgtcagcactgaggcctcaccccccagagcttcccaggacattccttgcttggacagcagtgcccctgagagtggcacacctatgggtgccctgggcgactggcctgcccctattgaggagcgtgagagcccggcagcccagcccctgctggaacaccagtactgagctacctggcgcccactggaccacctcctaggattcagtaacggacctgctctgctgcctctctgctggaccacagaactgagtggctttggcctacatgtctgaaccctgacctttggctgccttggccagagtaccaaaactgagtgacccagacctctgaccttgacccctgatctctctcatccccagtccagggcctgggctccccagatggaggcagtcagcctcccagccaggccctaagagccaaaccatgggctggtcccacttggagcctgtggccaggaccacctcagcccctgggcctgcactgcctgcaggtgtggcccccttggcctggacctggggcctgaattgtgggaagggtggtttctttctttccttttttttcttttcttttttttttttttttttgtgcttcggagacatcagaattaataacactatttttgattttgaaaaaaaaaaaaaaaaaa

SEQ ID NO: 234861 - DNA, 601 bp, Homo Sapiens
caacccccagtgcttgacatgaatgcatgtgtgcttcctaggactagaggccggtgctgtctctaccattgccctcactttaaggggcacacgagcagatggtagcaagccctggagagcagcactcgggcaagtgaggtggctctggcactgcccctggactttcatgtttgtagcttgagctggttttaattggaagctctgtgatttacataatcacttacaatctctgtaaataaggaactatttatgaggaattgtaaatttcctctctcccccttcttaccctgtctgtgatcttgtctgtgatgcagtaatgatattccactctaggttcccatgatcagtggtgaaatatagtgattttcacctgtgcttccattctgaagttctggaaagaagtactggatggactgaagtccaggacaacgtcccaaagaaaggcagagtccaggtaggcttggaggaccaagccctggatgagcactggagggcagaggcctcagtgtccagcactgtgccctgcacatggaaagcccctacgtttgtggaatgaatgaataataaaaatgttttcataagtaaaaaaaaaaaaaaaaaa

SEQ ID NO: 234862 - DNA, 792 bp, Homo Sapiens
  misc_feature (30)..(30): n is a, c, g, or t
  misc_feature (37)..(37): n is a, c, g, or t
ggatgtgctctgagcaggagcacatggctntgcagcncacgaaacagcaagagtaaggacaaggtgaacacgataggttgatggagtgcattaatgctcatgagcggtttagagaagcagtcagagatgagaggatggcagctagctgaaagataaggacagacaatggaagaccttgagtggctggatgtagatcgagtgacattgcataggttgaacaggtgttttatacagttaatgaaatccatttttgttttgttaacttttagcattttttaaaagtatatattgtatataacattcttggtagaaaagttacaaaatgctcattagtaaatagaaaagatgtcaattactcatactaccaccatccagaaatatcactctgaacatgttggcacacatccttcctaacatttttctctacacataacacgtgtgtaagacttttttttgaacaaaaaatagaatcacaaacatgctgatttattttttcccctttattggtctttagctcccaaatgcctcctcacagatacccactgtgatgtgtttgatgtgtgtcctgaacacgcatgcttccttataaaaggtgtgtgtgtgtgtgtatgtgtgtctgtgtgtgtgttttaaagtttacataactcagccgggcacggtggctcacgcctgtaatgccagctgttgggaggccaaggcaggtggatcacttgaggtcaagagtttgagaccagcctggtcaacatggcgaaaccctgtctctactaacaatacaaaaaaaaaaaaaaaaaa

SEQ ID NO: 234863 - DNA, 669 bp, Homo Sapiens
ggcacgagggatgaaaggaatctggcctagggagccccggactcggtttacctaccccgtactcatcccactcatctgtctaccctagtgtccatcatgccctgaatgacagcttaacctgattaacccactggggcttgctattttatgagcatttttaaacagaaaggaaagatgatatcccagtgcaggtagactttatttttgaaagcatcgtggcccctcacctctccctctcccccagaaccttggccagaattgagtcttcgcgttggggaggccacgctggaaccattgctctagggctgaaggtggaagtagggccactgccgcagcttcagccagagccctcgctgcttcgcagaatttaacaagcacacgactgggattcctttggatatgagaaaggaaggcaagtgcgggcaaagggaagctcctcccgtttttcataaacagaagtaagatgtcctctttcccaggtttgcacaatcacttctggcaaattaattgaaggtccttgaattcagccagtgcacgaaacctttgcatgttcttctgaaactgtacttcttccctattctgtctacccacactctgcgaactttgccttttccttaaacacattccagaccaaacactgttcagtttgttaaaaaaaaaaaaaaaaaa

SEQ ID NO: 234864 - DNA, 758 bp, Homo Sapiens
  misc_feature (16)..(16): n is a, c, g, or t
  misc_feature (27)..(27): n is a, c, g, or t
cagtgtatgtccatcnaaggagtatanaatgaggaattccctgcgaggacatttactgtattgctacttaaattatggaagacaatatatcttcaactttaataaaacctattcagaaaattaccaattcagaattcggagttcttatccaggtgctctaactaacttcagggaaattggaacaataagttatgttacatgcacactcaaattctttattttctccactttaagcaggaaagggtaaaaactgttttggtactcaagcccagccttacatactgtgtttctctctctgtctgcatgcatattaaagtggaaaaattgtatttatatcttagttattaccatagtacctatgaaccttatcagaattgcttgactggtgttacagctgctattaatctaagtctattgtttttctattttagtagataatttagttttaaaatacgtagggtttgagagcagatatatttatttaatctgttttctctagtaactattgctgaagggttaggcattcagtattcctatttgtcctaattttgaagttaaaaattttggttacagatagatagagggagaaaagttcaaaatgagtgagagagaactttatgcaggttgagataatgcctaaaataatgagctggccagactgtggaggtactctttgtattttgtaacattgactttgggtaaatgctttttcactgttaataaatatatatcctgtatacaaaaaaaaaaaaaaaaaa

SEQ ID NO: 234865 - DNA, 655 bp, Homo Sapiens
  misc_feature (13)..(13): n is a, c, g, or t
attcggaacgagngacaaataccaaatgcatgcacggcttaaaacctagatgacaggttgatgggtgcagcaaaccaccatggcacatgtatacctgtgtaacaaacctgcacgttctgcacatgtatcccagaacttataataaaaaagaaaccagtaagtgctcaataaatgttactaacatctatttcttcattcattcttcaaccattacccactgagtgcctatttggatacttggcttagtacctgggtgatgaaataatctacagcaaacccccatggcatgagtttataacaaacctgcacatgtatccccgaacttaaaagttaaaaaaacagaatctgcacaagtctaagctacttccttgaggaaaagactcgagctgagatctcaaagaagagtagaagttgcaggggtaaagaggccaaagaagagtgtctcagatgagagcggcacgtgcaaaggccctgtggtgggaggagcctggtagctctgagaaactccacaaaggcacggtggtggctggaatgcagagatgtgggggcacattgaaaaccttgttaaagtgcttaaaatgattatcataaaggtagaaactaataagtgctaaataaatgttattctcgtccgtttaaaaaaaaaaaaaaaaaa

SEQ ID NO: 234866 - DNA, 607 bp, Homo Sapiens
  misc_feature (226)..(226): n is a, c, g, or t
  misc_feature (349)..(350): n is a, c, g, or t
caggctctgagtctcttctctttgggagtatccatcaaaatgactttttgtaaaaacagattttcccccaaccagaagaatctgcacaaacttggcagcgtttttacttgtttaatgagtttaagacattacatggtgaaagagaagcattttggactcctgcatttttatttaccattcccagactgacgagaaaaagaaaattcctcacataacagcccttctntaaagaaaaaggaaaaagtggctgtaagattagaacattgctacaaagggaatgctgcatgttttatcaaaatgcaatgaccaggaatgatggttgattaaaaaaaaacaaaacaaaaaccanntttttccccaccccacccccccaaaccctgaactggaatcaggaaagacggaggaaacaatcaaaatcaccattctattgctttgacacctttactaggtgaattggtggcattcacaaagctaatagggacgtttatatcaagaaacatttctgtatatattgttgaattttagttgtacatatactttgtatgtttttgtcttctttcatatatggagtaaaagccacaaaacgctgaaaaaaaaaaaaaaaaaa

SEQ ID NO: 234867 - DNA, 712 bp, Homo Sapiens
  misc_feature (58)..(58): n is a, c, g, or t
atgatgcatccaatagggccactggcatcccagccaggttcagtggcagcgggtctgngacagacttcactctcaccatcagtggcctagagcctgaagattttgcagtttattactgtcagcaccgaagcgacaggtggcccactttcggcggagggaccaaggtggagatcaaacgaactgtggctgcaccatctgtcttcatcttcccgccatctgatgagcagttgaaatctggaactgcctctgttgtgtgcctgctgaataacttctatcccagagaggccaaagtacagtggaaggtggataacgccctccaatcgggtaactcccaggagagtgtcacagagcaggacagcaaggacagcacctacagcctcagcagcaccctgacgctgagcaaagcagactacgagaaacacaaagtctacgcctgcgaagtcacccatcagggcctgagctcgcccgtcacaaagagcttcaacaggggagagtgttagagggagaagtgcccccacctgctcctcagttccagcctgaccccctcccatcctttggcctctgaccctttttccacaggggacctacccctattgcggtcctccagctcatctttcacctcacccccctcctcctccttggctttaattatgctaatgttggaggagaatgaataaataaagtgaatctttgcaaaaaaaaaaaaaaaaaa

SEQ ID NO: 234868 - DNA, 715 bp, Homo Sapiens
gtgtgaggcactgcacccacccagccttatagctaaatatctcttaggctggtctaaccatagagaaatgtaatcaatggcttttggggtttacctgctagtccactcttcttgcatccaaattggttaccagaacacagggtgattaataagacattagacctggcccttacatttcctgggagaagggcatgtcccttttaacaaaaacacaactttcatctttggattcccaggtgatccctatttgcatttactggcgtttgtctttcgtaaggaagcaagaatgcaaagctttgtaactcagcacagcgatactcaagagtttctggatgctgggaggacattagataggtgatgagttctaattattcaatttttaaaaaagactcattttctttgctcttttgaactccactgagacacttgaacagaaagacagggagcccttatgctacctgaagagttatatgaaaagaagtttccagtgccaatacctctgcatttccatttaccatgtgacctgaaaagcaatataaagtaactatacagagaaaaaagatcaaaatgcaacacgccaaagtggttgtctttctaagtgggaaaatgataggcaacttaagtttttgtcttatttttttcctagattatttacagtgaatatgtaccacatttagaataataaaaaatcataaagataaaaaaaaaaaaaaaa

SEQ ID NO: 234869 - DNA, 682 bp, Homo Sapiens
ggcacaggggctcactgcagcctccacctcccaggctcaagcgatcctcccacctcggctccctgagaagctgggaccacaggcctggctaaattttgactttttgtagagacaaggttttgccatgttgcccagtcagatctcgaactcctgggctcaagcgaggggctgttacatctgatcagggcaaaaggggctgtgctccttggacactttgcacagccccagtgggcttctttctcctctgttagtgtggttaatgttcatctgcctgcatccctgagtcacccaagtgtaacctcagccataacacgtactgcagccggaacggtgtccgcagctcagcgtccctctcccatgcactttctgaactttggtcttttaaccaggtttaccagccgctttctgcctctttgtgcttttgagggttttttggtttgtttgttctgttttgtttttaaataaagatgattatttggcccaggctgagggtgcaaacagaactcttcacgtgtccacgacaagaaaaatagtttttacaaacttctagttgtggcatcaaaagtgtgagtttttgcacctgcaaaattgtaatgcaagccctgactgggtggaagctgaagtcttgctgttttaaattaaataaataaattatttttctcctaaaaaaaaaaaaaaaaaa

SEQ ID NO: 234870 - DNA, 827 bp, Homo Sapiens
  misc_feature (67)..(67): n is a, c, g, or t
taaactcaacaacatagatagcagaatcccgagcaagagtcatactccatgagttaaaatttttttntaataaattgaaactgatctacggtggttggattcagattgctggctgccaggaagtcagagactgcctgcaaggggctctagggaacattttgtggtgatgttttctttcttgatcgtggtgatacatgtcacggttgcatacattgtcaaaactcatcgaacagtagaggtgaaagggattttgctgcatggaacttattccttaataaggttgatttcaaaaattaactggtatttatactttatttttcaaatcttgtagaaaataatgacataaaatgctcacaacgtattcaacaaaaagactgtaaaataacctatagtatgatctaatgattatatatacatgaatatatgtatgcatttataacttacgatatggtccattcatatagatatgtgtacacacacacaaacacatatatgcatgcgcacatatatacacatacagtttggaaaatatagcagaaggactttcaaccaaatgcattcagtaattacctcatgggtaattgttttctttttattttttaattctaaataccctcttagttttttcttaattctaaatatcctcttagttttttttttttttttgtacttttctgtaatgaacactatttttgtggaagagagtcttttttgcttgctgtatttttctttattgttaattgacaaataattgtatgtattcatgaggtataatatgttatatatataacacttttctttttataaacaaataaaaacaaaaaaaa

SEQ ID NO: 234871 - DNA, 620 bp, Homo Sapiens
  misc_feature (48)..(48): n is a, c, g, or t
ggaaatctacttggggttttgagtttgtgcctgtggtatctctctccnaaaaatggaaaatatgtggctgatttcagtcagtttgaacagattcggaaaagcccagattgcacattttactgtgcagattctgagaaacagcaactcgaggagaagtacaggcaggaggatcagagggaaagagaactgaggacacttttattacaacagagcaatgtctgatcacaggggcgccatccaggtttaaccctgcaagctgtttccacatcagaactcccttcaaacacaaagattgctgtgaaaacgaaaatgtgtagacgcactctcaaaaactgcacggacatacaaaatcaatcttttcctttgatcttgtggctaaaccagcatttctgtgtttgagagatttcctgttaggtgcttcgtctgaaagtgaactctcataattcaaattgtataaaataaagctacatttctaagagcttggtgtagggcaattggaataatgtcctgttagataaacagacatttagcaatgctgacattaaaaggaaatgtatttctatacaagattattagctgtaatacaagatatttatttaaccaaaaaaaaaaaaaaaaaa

SEQ ID NO: 234872 - DNA, 723 bp, Homo Sapiens
cattgatgatacctcaaacttcgatgagtttccagaatctgatattttaagccaacaggtaacaccaccagcattgtctcctgctgccttataagcacattatttacccccaattttgggatgatgtttacaaatcagggtagtgaacatggagaggaatttcatttcttcaggttctttgtaagtacttttctaattctaatgctgggtagtggtgaaaccttggtgaatggaaaatgagtatcagctcccatgtttagactgctcaactgggtgagtaagtcacaaaaatctgttcttttgttatttactaagtgttaggtaatctgaaatgacaggaatgggaaaataaaacattaaaaaatttgtgaagaaatatgagatttaaagaacatgagcaagaaaatgtggaaaattcatagagtgaggccaggcgcggtggctcatgcctgaaaccccagcactttgggaggccgaggtgggcagatcacaaggtcaagagatcgagaccatcctggccaacatggtgaaactccatctctactaaaaatacaaaaatcagctgggtatggtggcacacgcctgtagtcccagctactggggaggctgaggcagaaggattgtttgaacccgggaggcaaggttgcagtgagctgagatgacgccactgcactccagcctggcgacagagcaagactctgtctcaaaaaaaaaaaaaaaaaa

SEQ ID NO: 234873 - DNA, 701 bp, Homo Sapiens
  misc_feature (76)..(76): n is a, c, g, or t
agccccctcccatgtgaaccaaggaaaggaggcacagcccagagaacccctgtgggatactaaagacagaagaggngaaggtggcccttagagacagagcttggacagatgccagaggctctgttccagagtgcaggaagaaggggctagggcaggggagattctcataggggaaataaaactactaaaatatgcacagggctcaatgtttaatctgtccagcttcgtataccttataatcatcacagaagaaaggaggtatataaacattacttatctcacctctcatcatttccaaacaggagactgaggcagatttccattattactgaggttcccttacctacttctgtttaagaaacaaaacaactgtaccatagatcagtgctacaaatcgcaaataaatatgcagtgaggaggaaggcatagagagagagggtctggaggggagggggtgtaacaaagagactcccacaactggcttcctcttcaaaccccaaggaaagccttcttccatctgttcccctcaccacaggctgagcagaacaggtcagaagggtgaactggtagaatggagagttcaggtccctacagtgctgctttttctcagagtcaagaattgtgaaaaagttacagggaattggtttgtcaagactgagcccattcaacaggaatggggtaccaaaaaaaaaaaaaaaaaa

SEQ ID NO: 234874 - DNA, 688 bp, Homo Sapiens
tgctgcgtttcagagctgactgttcagatgtgtcatgcttttttcattggtccgtgctgggtaatggtgttgcttttcttgcagacccttcctaggaccagagagtcagctgggtaagtgacagcttctcaggtttggtggctcttctgagctgctgaaccacttcttcttcattaaaacttgaattgggggccgggcgtgatggctcacacctgtaatcccagcactttgggaggctgaggcaggtggatcacaaggtcaggagatcgcgaccatcctggctaacacggtgaagcccagtctgtactaaaaatacaaaaaaaaattagccgggcgtggtggcgggcgcctgtagtcccagctactcgggagtctgaggcaggagaatggcgtgaacccgggaggtggagcttgcagtgagcggagatcgcgccactgcactccagcctgggcgactgagcaagactccgtctcaaaaaaaaaaacaaaacttgaatttgggtgaggggagggaacttagaggacgggccaataggtgcagcaagccatcgtggcacacatgtgcctaggaaacaaacctgcacattctgcagatgtatcccccccccttttttttttagaagaaataaagaatattttttaaaaaaagaaaaatacatttgtagctattaaaaaaaaaaaaaaaaaa

SEQ ID NO: 234875 - DNA, 565 bp, Homo Sapiens
ggcacgaggagagtacgtatacaagtgtaaaccaggccaccaagtggtcgggagctctggcttgcacccagaataaatgtattatactcaagtttaaacattatgagaaagttgtgagagtcatttctcacttatggcactgaaaaaaaaaaaagcacatcatggtatgaatgactcatatgcaaaagatgaaaaacttctcactaatttgcatgtcttaggctcctctttattagaaacctaaatgtaaataaagaatattttaggccaggtacggtggctcatgcctgtaatcccagcacttagggaggccgaggtgtgcagatcacatgaggttaggagttcgagaccagcctggccaacatggtgaaactccatctctactcaaaatacaaaaattagctgggtgtggaggcacacgcctgtaatcccagctactcagtaggctgagccgggaggatctcttgaacctgggaggcagaggttgcagtgagcttagatggtgccactgtactccagtctgggcgacagaacgagactccatctcaaaaaaaaaaaaaaaaaa

SEQ ID NO: 234876 - DNA, 596 bp, Homo Sapiens
ccccctccccaaaataccatcagccaagaaccccagtgcagggcagagacctaggaatttggataatgggcaactctgagatgtcaggcaatggggaaaggagagctcaggtgggactaggaggggtaggaagcccgagggctgcagtcaccatcttcagaccactccagagcttcctggggagcaggaacagaggacaggccatgaagcccagaaaggcagatggcagcagaatactaggaagacacctccaatagtctgtccaaagagggtgaggggattaggaagtacagacatatcctgagttacaattttctattttaaaatgctatgaaagctatatgcatttggtaccctcctcaacttatgacgcagttgtgatggggttataaggttacttcggataaaccaactctatattgaaaatatcgcaagtcaaaaatacacgttcgggccaggcgcggtggctcacacctgtcatcccagcagtttgggaggccgaggcgagcagatcaggagttgaggagttcaggagttcaagaccagcctggccaacgtggcaaatacccatctctactaaaaaaaaaaaaaaaaaa

SEQ ID NO: 234877 - DNA, 733 bp, Homo Sapiens
  misc_feature (95)..(95): n is a, c, g, or t
catggagtacctggagagcaagaagctgtgcaccgcgacctggccgcccgcaacatcctggtctcagaggacctggtggccaaggtcagcgactntggcctggccaaagccgagcggaaggggctagactcaagccggctgcccgtcaagtggacggcgcccgaggctctcaaacacgggaagttcaccagcaagtcggatgtctggagttttggggtgctgctctgggaggtcttctcatatggacgggctccgtaccctaaaatgtcactgaaagaggtgtcggaggccgtggagaaggggtaccgcatggaaccccccgagggctgtccaggccccgtgcacgtcctcatgagcagctgctgggaggcagagcccgcccgccggccacccttccgcaaactggccgagaagctggcccgggagctacgcagtgcaggtgccccagcctccgtctcagggcaggacgccgacggctccacctcgccccgaagccaggagccctgaccccacccggtggggcccttggccccagaggaccgagagagtggagagtgcggcgtgggggcactgaccaggcccaaggagggtccaggcgggcaagtcatcctcctggtgcccacagcaggggctggcccacgtagggggctctgggcggcccgtggacaccccagacctgcgaaggatgatcgcccgataaagacggattctaaggaaaaaaaaaaaaaaaaaa

SEQ ID NO: 234878 - DNA, 724 bp, Homo Sapiens
tactggagaaaatggactctatgtaagtatgttttcagatagaattctttccttttttaatgaggaaaaaaaatccacattaatattgaaactgcacctgtaatcccagcactttgggaggctgaggacagaggattgcttgagcccaggagttcgagagcagcctgggcagcaaagtgagaccccatctctactaaaaatttaaatgtatttattaaaactgttctctagaagctttggactgaatcccaaaagtgtttataagttcaaaagcaaaagtatttgtaatttcaacaacaaaaaatgtatttctttatgtaatcttgaaattattaaaagtccttttagcttctagcacatatttgtacaaagagtttaaggaatggtggctggtttggtttgttttttaaaaatgtttactgacgaggccgggcgtggtggctcacccctgcaatcccagcactttgggaggccgaggcaggcagatcacaaggtcaggagttcaagatcagcctggccagtatggtgaaaccctgtctctactaaaaatagaaaaattagccatgcgaagtagcaggtgcctgtagttccagctactcgggaggctgaggcaagagaattgcttgaatccaggaggcagaggttgcagtgagccaagatagcgcctctgtactccagcctgggtgacagagcgagactctgtatcaaaaaaaaaaaaaaaaaa

SEQ ID NO: 234879 - DNA, 740 bp, Homo Sapiens
tcggcacgaggatacttgcagcaagtgataaaggattagtatccaggatatataaagactgttattgagtcaatgtgaaagagaaaaacacctgaagcaaagaatggatgccggcattaaataggcacttcaaagaggaaccatgaacgaccaaaatcaagtgagtaggtgaccagttcccattagtaattaggaaatagcaaattaagaccacaaagagggcagtgagggtggctcacacacctctaatctcagcgcttgggagtccagggccagaggatcccttgaggccaggaggtggagtctagcctgggaaacatagcaagaccctgtctctacaaaaaaataaataaataaaataagaaaaaagtaaaccacaaggagatgacttaccaccaggcaaaaatattaaagtatgctaataccaagtatcaagaagaatgaagcaagatagctcaaatatgcttttgaaggaaatatactgggcttcattcattctgaaataccccttatttaagatactctattatattaaatacagttccaaaacaaaagaaatcaaagaacaaaaaactaacccaatacttttatcacttgtaatttgtatattacacatattgaaagatatattttagacttattagagaacgatttttaattggatatcactcttgtgcatacaaaataaaataaaattgattaaggtgtttctaaccagttacaaaaaaaaaaaaaaaaaa

SEQ ID NO: 234880 - DNA, 727 bp, Homo Sapiens
taaaactcacatcaaaatatgctgtgaagaaaagtgataagttttcttaaaaatcattaaatgctacctcataaaataaatatatatatgaaacttgaagcatttatagatttctgttgttttcttgtagtgttaacctggatacaggtggttttgatacatcttttctgtttgaagtagcaggcttcccctgcagtgtaggtgatggccacctggtggcacatcacactaatgcatggagcttctcatttgtcttcaggattctgaaagtaaagccaatgtttggatgttatgggagctatgcatttcattgtattgtttcttgttaatagttttagaaaatactcttcacattatagttcagccatcaaaaaaaattcacccagaaatgaaggtactagtattctccatattgcagaaatcgtatttagaatttgctttaataagcagtgagttatagagaacaggattatgtagttagaaaagctaagaaaaatgggaaacgaaaagagttaaggttggacttaatggacatatggtatgggcatatatatgtatttttaaatagtattgctgctgttttaactattttaataaatatattacaaaatttatggcaatttttaaatctttagaattattacctgcgaatatctcttaatgaatttcgttagcttctctttgaaaatggctttttgtggtttttcttaaaaaaaaaaaaaaaaaa

SEQ ID NO: 234881 - DNA, 685 bp, Homo Sapiens
  misc_feature (36)..(36): n is a, c, g, or t
gactggtccaaagataggaggagaaactctgtaccnaagaggagaagaacatgctaaatttctgaacagccttaaataacccgaacttcagacattttcccacagacttcctggcctcctgtgactctggaaagcaaaggattggctgtgtattgtccattgattcctgattgacgccgtcaaaaacaaatgcttgttaagcccataagctttgcctgcttactttctgccattgggttggtttgataccacatttaacattgacatttaagtggaaaaccaagttatcattgtcttttctaagctcagtgtggatgattgcattacttcattcactgaagtttttgcccaaaaattggaaggtaaacagagagctatgtttctgtatcttttggttatagagtgttcacttctttatcataacaaaattctagtgtttatacgaacacccagaggcaaaagaatttggcttaattctcactccaggtaagtagcttaacttctgggcttcagttttctcatctgtaaaatcaggaagattggactaagtgatcctgaaatgtattttttagcactggatttctacaaataataaaactttcccatctagataatgatgatcacatagtcttgatgtacggacattaaaagccagatttcttcattcaaaaaaaaaaaaaaaaaa

SEQ ID NO: 234882 - DNA, 786 bp, Homo Sapiens
  misc_feature (62)..(62): n is a, c, g, or t
aatactaacacagtggcagtgttagatgaagatgctgtctacaaggtagataatatactgtntgatactcaaaacatttttcattttgtttaaagtagaagttacataattctatattttaagtcttgggtaaaaaagtagttttacattttataaagtaaagatgtaaatgattcaggtttaaagctctatttgacttcctttttttgtttgagatagcgtcttgctgtgttgcccaggctggagtgcagtggtgtgatctcagctcagtgcaacctccgccccctgggatcaagcgattctcctacctcagcctcccaaatagctgggactacaaggtgccctccagcatgcctggctgatttttgtatttttagttgaggtgaggtttcaccatgttggccaggcgggtttcgaaatcctgacctcaaatgatccacccacctcagcctcccaaagtgctgggattacaggcatgagccaccacaaccgtcccactattttactttttaaaatgacattcctactgattgatttttatcttgctataagttcgatgacaccgtgaatctaataaggttcactgttgacacagtacaagttacatagctaaaatacatagcattgaagactaattttaaggattgacaagagtttattttctattgtgcaatatcttaaaggaagcacccacctttgggaaagtgtatctgctgctcctagggccatgcttgtatacatatttaaataaacatattcatttacccgaaaaaaaaaaaaaaaaaa

SEQ ID NO: 234883 - DNA, 738 bp, Homo Sapiens
catagctgctggagttttatgcccattggttggtttgcagccctggatgggatctgcagcaatggctgcttcatctgtttctgtagtacttcttctctcttccttaaactttacaggaaaccaacttacgagagttatgaactgcctgcccggagccagataggacagaagagtccttcagaaatcagcgttcatgttggaatagatgatacctcaaggaattctcctaaactgggtttgctggaccggattgttaattatagcagagcctctataaactcactactgtctgataaacgctccctaaacagtgttgttaccagtgaacctgacaagcactcactcctggtgggagacttcagggaagatgatgacactgcattataaaaggccatggagagtgctgccagtttaacttgtcatgcactgacacagcattcatgatgttaccttcacttttcaaaatattgtagaaggatttttctcatgctcttatattagggattctatttgagttgcgtttatctgttggcaaaaatatctttttcaaggcatcagctctgaacctagctttatttaaactgaatttccagtatatttttgttttcactaacaacagataaggtagagcagtgaggtttacaacaagccctacaattagagattgctgaactgctgctaaagtgatttttttttatttgaccaaaaaaaaaaaggcccaaaaaaaaaaaaaaaaaa

SEQ ID NO: 234884 - DNA, 592 bp, Homo Sapiens
tcagccagtcccaaggctgccctgacaatcaggcaggctccccacccgtgaggccaagcctcctctgccactgccagcatggcccaaagggagccttggccttgggcttgccagcctcagctctgccctgacaaggtcttgtatccagggcagaggcctgaggtgacccaggcttgctttgtggctgatgccagcaggcttggttctagtgggcaccactggtgggcaacctccataactggcccttaggccctaccttcctacacagctaggctataatgggcctgagtgagagggtagcttccccagccccaagcacaggcagaggggtggagagcaatttttggttttatttttgtttctgaagtggtgcctgtacctccagcccccagggggccttccctggccacacttctctgccccacccaggcatcgccatcccagcactttgctccatgtcacccgtaagatgccctttgctgaatgtacctgagtgtatgtatttaaaaggactcacatgggcatcagagaatttatggctctgtatccaataaaaaagatggtgaaactggtcaaaaaaaaaaaaaaaaaa

SEQ ID NO: 234885 - DNA, 735 bp, Homo Sapiens
aataggaacaaaattgctatcctttagattaggagctgaagatcatttccctgggaatgtttcccatttagcttcaagtttcagctcaaacatcaccttctttctgactcctttcattcattcctccaggcagtaaggggctaccatagtactttgtttatgcctgtattatatgacatcactgtagttgcttgactgtttctcctactgttctgtaaacttattaatgggtgagaatctaattttactcatcttgatggcttcatgatccagcacagtgcctcacacaaagaactattgggtgggtggatggatggatggaggaatggagacagttggcttaaccagatcctatatacagattattactggctccaaaggatgagtagataagaccataagaattggatcaatgtaaatcctcacctgccctttgaagagccaataagggcatctttgtctttaaatacagcaaatgttattcagattttgtacttgtctatctgtttacctcagtgtagatgatatgaggatggtataactatgtaaattgtttttgaaaataatttgtttccccacaacttttgaaggttttatttgttgttgttattactagttcagtcccaaacttaccctttccttttcagagagctaatggccatgcttttcttcaaggaaagaataatttatttgaatgaagtgggatacttgcataacacaaaaaaaaaaaaaaaa

SEQ ID NO: 234886 - DNA, 720 bp, Homo Sapiens
cagccctcaccccagcagccttttccggtcattgtagctgacatggagcagtgacagtattcatttgagaacagggatgcaagtcacagacatcataaaatcagggtctccctgctgaagcattcactagttggcaactatgaatttattccatgtcattctgtttacttagcacttgcactacccttgttggttgagtgtatgctttatttgtttctagtttgaaatcccacatctgatagctgagagtaggcaaatacaacatttacctaatgtcattcactaacatggaagagttgtgaaaattctagagtgctgtaaatccttggcatacactatgacaaacaacttcattactctcccaccaggagctgctctcctgcacttagaaataatgtcacaagtagttttctaatgtacaatgcagacaaatgtactgctctctgaatacttgaagaaatggtattatacatacatagaaacttattagttataccttttcacaatcttattacgatgttgccgttaaaagggaaaaaagacacaggcaatgaatggtgggatagtaagaggacttagagtgtatgaatgagttgattttacttttttggaatttgattaagttgacagtaggcactgattggatgattaaacataagttaatctccactgtgataaaaacttaaataataaacatgatttaaaatagaaaaaaaaaaa

SEQ ID NO: 234887 - DNA, 590 bp, Homo Sapiens
tctttagcagtaccttagtttgatctgatagtgacaaggatccctcttcctcaaagagattaggaccttaccccaactccagaggttgcaccttcattgatctgaaacagaagtggtagtttaattctgtatagtctgattagtacgaggcagaactttttgcagtgaaggaaatcaaccatccgttctgtctctctattgtggtagctactaaccatatgtgatattgagtacttgatatgtgactactgcaattgagaaattgaatgaaatgaacagaaccctactgagaagggctttcctttcaaattaaaaaatcagagctttgtgtggtaacagtcattgcctctttctcctctttctggccaacagcatgcctaaaggtgcagctgccatcaaacaaccatgaaacagcaaatgtgagaatgaaagttacatttcagagatagaactgaaggaggattaaggggatcctgggtccctgatatggcattgttgaacacccaaatcaagatgagcaattgccaaactccccaattattaaatgagaaaaaataaactccagattgtttaaaaaaaaaaaaaaaaaa

SEQ ID NO: 234888 - DNA, 671 bp, Homo Sapiens
atgatttcactgcataaaaactaataccacatcaaatgccagaaataaaatgaaaagtcatataacctgagatggatggcagaaaaatgggttaacatccttagtatacaggaacctcttgcatatgagttaatcagaagcagccacagattccaatagaaaaatgggctaacaatgaaaaattcaccccccaaaatgcagattgccattgaagataggaaatatgttcaaacttattagtagtcaaatgtaagctcaatttgcacctatagaattggcaaaaaatgagaaattaattataatacccgtgtagtaaaatggacactctgttgtactattggtcattgaatcaaagcagtcttgacagtatgcaaaatccttaaattcatggacacttttgatcaagcaattccatatgtaagagtttatcctaagcaaatcattaggatgttggtcaaagtgtacagtgttaggaggaatacattttttgagataacactgcacaacatggtaactacagttaataatggtggtgctgggcacggtggctcacacctgtaatccccgcaccttggaaggctgaggtgggtggatcgtttgagcccaggaattcgagaccagcctgggcaacatggtgaaaccccatctctaccaaaaaaaaaaaaaaaaaa

SEQ ID NO: 234889 - DNA, 643 bp, Homo Sapiens
caaggagagaaaattaagtacttttatataattcatcacttttctggctaccgcaggacagaatatgaccatcttcgtttgaaggcaccaaatcgtcgcagtgtctttgccataagttgcagggttaaatgcgggaatctctcctcgcgttcctgtctggcgtattctgaagaaaagaacagaattcttgtgcctacctaagaatttgagtagtgtctaaacaaacaaagcagttaggtcattttaactgacttgattatccaactggtctttgacagatttgactgttcatatttagtttatgtttgtctgatcatccagtttgctttattttgctgtgttttattttgttgtttgttttgttttgtaccagtgtactaaaactagtcaaaatacttgaattagtttgtttgtgcaaagtgtacaagcttagtaaagtgtccatgaagcaatagccatgaatgctaattatttctaaatagggccacatggttttaaactaatgatggtgaaagaaatacgatgactgagaaagtcatttcgcatgtttactattgttatattcgtgctttacttcaagagtgcagaaatcataataaataacaaactatttttgtgttttctcaaaaaaaaaaaaaaaaaa

SEQ ID NO: 234890 - DNA, 661 bp, Homo Sapiens
  misc_feature (80)..(80): n is a, c, g, or t
atagagaaactcagcaggaagttgatatggaaactcagcaggtgcctttctcaccagcaccgtatgaagggtggcctttntgaagatgtaactattagagctgggcattctcctcccccggcagacagctctcaagcaggagcacaccgaggccagcagtcagctcaggaggcatcaattacaaagacaagaaccagagctatgggataagagcattgcattgaagttttaagtttacttgtttgcatgtattctctaagagaagagttaactttagatctttgaaaacccaggactgtgaagaaagtcatagtagcaggttgaggcaagtgtagaagttacatctctatttcccacagagaggaatattcacatatgtgcagtgtcagcaccacctggaaggttattacctaatggagatccatctgtcctgtgtggaatccagtgaggaattttattggtggaactgaatgttaactgctgtaaatcctaggaaataaacttttaaagagtttctcaggatgatttaaaacaaattttaaaaaagaaaagtagaaaacattttatactttattcagaggagatgctcaatagatgtttgttgaatgaatgattatcaaattaaaggatttcctatttatgcaaaaaaaaaaaaaaaaaa

SEQ ID NO: 234891 - DNA, 618 bp, Homo Sapiens
ccgtagaactgatgattcaagaggctcttatgatcacagctggtgattccctgtgttgaattagtgaaaacaggccaggcacagtaatcccagcactttgagaggactgcttaatgtcaggagctcaagcccagcttgggcaacacagatgcctgtctctacataaaacaataaaaattttttaaaaaaatttttttttaatgcccagaacaatagggcatgattcaaaattatcctccgagctgcctctctggttctttctgggaaaaacacttaggcaagttgagaaaggaaggaaagttggaataatggcaaaactgttagaagcattcttctttcctccattgcctgtcctcccaacattatacccaaactagttacaaagccattctgtaaagagatcgggtacctacaatttcttcagatttacacaatatccactagaatttaatttctacaagggcagggatctttgttgagtggcacatggtagacactcaataaatacttattgaatagatgggttaagtgaaagtggcagggatcaactagagtgtcctgtgcttagggtcttttaataaagatggaaagaatgatgttaaaaaaaaaaaaaaaaaa

SEQ ID NO: 234892 - DNA, 750 bp, Homo Sapiens
taacacgggaggacaaagctagctcttgcaaggacagagcacacatggatcatgctgtatgagctcactttgtgtccctggaattagtgtttttttgtgtgtgatctaactggcaagtttaatgaatagccaaaatctatgttattcttgaggctcctaaaattatgtgtgaaccccaagttctgtctagtattatatccctaaaatgcttttaatagtggtatgttacaagtggcataagaagatcctgtttttaaatttgtcaggcattttattattcagtacataatatgtatagatctgagtgctgttttccttgcattgtctattatttttaccttgtctttcccctaagagaatttgaagaaaatcttcaccaatatttctagtgttgatggtaattaggaaaatagtagttgagagatgtaagaatagattgagaagagtgagtaaaatgggtgaaatgacaagtgggaaccatgtagctgagatgtatttgtttagatgaaaagtctacactggttcttaatgtgaaaatcaaaccatgtatctaccttaagaacaatgttgttgtttttaatttattgtagcgatttagtttttttcacgtaatatttctattttctttgcagattgtttttaatttaaattgtggaatttttacttctcaaaatgtattaagtactgtattttttgaaatcttatttttaaataaatattttttaaaaccgtaaaaaaaaaaaaaaaaaa

SEQ ID NO: 234893 - DNA, 745 bp, Homo Sapiens
gcactgggaagaaataggatccatccttagctgaggcttgaggactgatccagcctctcatggcttccctccaaagtaacttagggttgagggatctatatgtgatgtcaaaacttactttaaacctctagtttcgtgctgtcatttattaggctgggccaccaaatctttgtttcaatttatcagaagccaagtgcatactagcgtcttgtttgttgcccattgcctatacttttcacctgagatgtgtgagttggggccttttaaaaactactgaattgtctgagccttgaagacatttccagggagaagagataatctctcatttcacccacaggctggtctaatcataacctagttaaagatgtccttgtttaagaaccccattatttatttttagtttttaatataaattaacatgtgggtcattatatttctccttaaatgaggaaattttaaattttattgatctaacctttgaagctttaaaaaaggagaaagagggtaggggtgggaaactggcatactgtgtgtatagcactgccgattggctaggccactgtgtctctgctacaaattaaagaaatcctaaaagttttccttggtcatagagttggggaatgacagaatttttctttgttgtgaaatgtatgtacagagtagaccatctctagccctgtggtgaaagaggtacactcgaatgtttgcataaagcaagtgacaaatgaaaaaaaaaaaaaaaaaa

SEQ ID NO: 234894 - DNA, 765 bp, Homo Sapiens
  misc_feature (65)..(65): n is a, c, g, or t
aaggaggagtcaccagctcgaggcgtgtggattgtttccacccgggaacaggctctgtgatgctngaatggaaagaaacgtaaaaagctgtgctaaaaaaaaagcaaaatgctgtgataaaccaaacagggaagggggaaaaaccctcctccttgggattttttttttgttttccctaacaatttggacactacgattgctctcacaaaggaggttcaaagaccagtttgtaccgatgaaacgcgcaactttgtaatcccaacactttctattttctagaatcttctttgttcattgggtggtttttcagtcggctggaattctatcttctgggggccttccgtctgagatggaagctgtcttgggcttgttgtctcttccttctgttgctccctgcccctccccctgtctttccactctgtctggtgagctctgctttttcagtgcaccatcaagagatgcagccccgtggacatgaagacacaatctcccacggacagctttcccccttccgccctctcccaccctctcctccccttgcgctcgcgctcgcgctcgctttctcactggcgtgctctctttctctctctctctccctctgtacctttctcatagttgcttcagatcttaggtctcaagggcactttggcgcgtagtaagtgctttatgtaagaaggcagggcaggggggctttttacaggagaaaaaaaaatgacttataagagaaagagcctggagtatttttggaaaaaaaaaaaaaaaaaa

SEQ ID NO: 234895 - DNA, 681 bp, Homo Sapiens
  misc_feature (23)..(23): n is a, c, g, or t
tggacagccccactctagactancatggtgtggggtaggcagtgaaatccgtaaataggaaacgcaattctgcaaagtatctaaatagacagaaacaacacaaatatttttgctggagtcaggagcactgtgaggcacagaacatctcccagaaagcagattttttttttctgccgaaaaaccaatatatatatgtatgatcccaattaaaagacaaaagcaaatgagccccaaactgcctgtcttcagctttgcctgggagctgctacctttgctcttctagcatcttctaggtaccaaggatattagccacttgagggtgttgggcatatttgtttcattgtaggcaaaatcctcttgtggtttcccctccccaggtattgttgagtctgttcaaagctgggtgtgttgaaacactgcacaaatcctgccactcttgatgtgccgcttgtctcagccttggcagaggctgagtctgttcctgtgcccacctgtccagcaggttttgatgttggctcctgaaagagtttgtatttattttattttgcactagtcacagttgttgttaaactgtatcaaatgttttgggagattatttgcctgagatggaaagagagatggatgatttattgcttcaattgttttaaattaaaagctattctcacaaaaaaaaaaaaaaaa

SEQ ID NO: 234896 - DNA, 702 bp, Homo Sapiens
  misc_feature (14)..(14): n is a, c, g, or t
agaggtggtgttantcagaatgtgccgtgcctttgactctcagaacaacaccgtgtactttgatgggaagtatgccagccccgacgtcttcaaatccttaggttgtgaagactttattagctttgtgtttgaatttggaaagagtttatgttctatgcacctgactgaagatgaaattgcattattttctgcatttgtactgatgtcagcagatcgctcatggctgcaagaaaaggtaaaaattgaaaaactgcaacagaaaattcagctagctcttcaacacgtcctacagaagaatcaccgagaagatggaatactaacaaagttaatatgcaaggtgtctacattaagagccttatgtggacgacatacagaaaagctaatggcatttaaagcaatatacccagacattgtgcgacttcattttcctccattatacaaggggttgttcacttcagaatttgagccagcaatgcaaattgatgggtaaatgttatcacctaagcacttctagaatgtctgaagtacaaacatgaaaaacaaacaaaaaaattaaccgagacactttatatggccctgcacagacctggagcgccacacactgcacatcttttggtgatcggggtcaggcaaaggaggggaaacaatgaaaacaaataaaagttgaacttgtttttctcatgcaaaaaaaaaaaaaaaaaa

SEQ ID NO: 234897 - DNA, 705 bp, Homo Sapiens
  misc_feature (66)..(66): n is a, c, g, or t
  misc_feature (128)..(128): n is a, c, g, or t
  misc_feature (154)..(154): n is a, c, g, or t
tttttttttgagacagagtcttgccctgtcgcctggctggagtggagtggcacaatcttggctcantgcaacctccacctcccaggtccaagcgattctcttgcctcagcctcccaagtagctgggantacaggcacacaccaccacgcccagntaatttttgtatttcttttttttttttgtagagatggagtttcaccatgttggccaggatggtctcgatctcttaaccttgtgagccaccgtgcccaaccctaacaattatttttaaaaggaggaatttaaatgagctgtggattattcattttgtcccataagaagataattaaaaaatgacaaaaatgaactgaacaaaaaagttctaacaaaataataaggctgaatttttaaagtctcttccgcatcttctgttccctgggatgccttagacggggtgtgcagtattttaggtacatcgtgagcaaggagcctgcattcccagggggcggcagggacagcatgtaaggtcttagtccagctctgtgatctgaaggcaaagcctctatgtgtgaaacacaggggtacctcaaaaatagaacaagagcactccatccatgtgcggatgactgtcaaggtcactgagacctacagtgatctggaaaattaaagctctctggccgcctttcctctcaggacatacttctggagatcaaaaaaaaaaaaaaa

SEQ ID NO: 234898 - DNA, 721 bp, Homo Sapiens
tctgacgtagaagagcttacccctccagagcatctttctgatcttccaccattttcaaggtgtttaataggaataataataaagtcttcgaatgtggtcaggtcatttttggatgaattaaaggcatgtgtggcttctaatgatattgaaggcattgtgtgcctcacggctgctgtgcatattatcctggttattaatgcaggtaaacataaaagctcaaaagtgagggaggttgcagccactgttcacagaaaactaaagacattcatggaaattactttggaagaggatagcattgaaagatttctctatgaatcatcatcaagaactctgggagaacttttgaattcataaccaagccaacatctccagacatgtaaaaatagggaaaagtgattcaaattgaaatgcctgtgtattttcctattgtttttaatgttaataacccatataatagggaaagggtgggatttttttgtgggaatgtgggaaggtgggggttatggaggagataactcaaaacttcttcaattttgcctagtgcctgcgtaaataatatatttaatataaaggactccaggtataaatggtgtagaaatccatgattccaagaaaaaacacttttctagcaaacctggttgtttttaaaatgacttttatatatgtaatattgcttggaaactatgagtaataaagcaatgacaacaaaaaaaaaaaaaaa

SEQ ID NO: 234899 - DNA, 805 bp, Homo Sapiens
  misc_feature (237)..(237): n is a, c, g, or t
ggctccgcttcaccacgcagatcggatcatcaacgtgactctgtgctgagagaaggcccagcagattaccaggatatgcttcacatcaagtaggagttgcaggagctgtatttgatgaaagtactagaaaaatactggtgtacaagatcgaaataaattgaaaaatatgtggaagtttccaggaggcctgtcagagcctgaagaagatattggagacacagcggttcgagaagtttntgaagagactggtataaaatcagaattcaggtccgtcctgagtattcggcaacagcacacaaatcctggagcttttgggaagtcagatatgtatatcatctgccgcctaaagccatattcattcaccataaatttttgccaggaagaatgcttaagatgtgagtggatggatctcaatgacctggcgaagactgaaaatacaactcccatcaccagcagagttgctaggctgctgctgtatgggtacagagaagggtttgacaaaattgacctgactgtggaagaacttccagcagtttacacaggactgttttataaactctatcataaggaactgccagagaattataaaactatgaaaggaattgattaaattcacatttatatgtttagaaacatgtagactaacgaatgacataagaaatagtggacattttggattgattaaacatctgactgtgattttctaatgtatatgatttccatgaagaaattttgtttctaaacatgcacattttaaaagcctcttttcgaataaagcaaatgcgtgaaaaagaaaaaaaaaaaa

SEQ ID NO: 234900 - DNA, 711 bp, Homo Sapiens
  misc_feature (689)..(689): n is a, c, g, or t
gaaagaccaaagaaacagaaagaggaggaaactgttgccgagaaaaagaaagataatttaactgctgctgagaaatggaatgaaaaaaaggagcttttttcaagcaaaaggaaaaagaaaaaaataaatgagaaaagaaaggaagaactgaaaagagctgagaaaaaagataaagataaacaagctattaatgaatatgaaaaatggctggaaaataaggaaaaacaagaaagaattgaacgaaaacagaagaaacgtcattcctttcttgaaagtgaggcacttcctccgtggagccctccaagcagaactgtgttcgcaaaagtgttttgataattctagttcttacattatttggttatttatcggtttgccaatattagccatagatttaaaaccattcaattatttatagttagaggaatatattttaattaaatgccagacactcctgctgacaatgaaagaaatactttggaatgtaatcagtgaaagcatttttttgaactgtagataaactgcctcaaacaaagacctaataatcagattgtttttaccattaagatacataagattttatcatgtcctgataattcttatggtggagtgattcatgatctttttcattaagctctgtatgttatttaagtatatttaattccagtaataaaaaggaaatcatctaggtnccataaaaaaaaaaaaaaaaaa

SEQ ID NO: 234901 - DNA, 726 bp, Homo Sapiens
  misc_feature (125)..(125): n is a, c, g, or t
gaggacttgaaagtcttgttgctagaccgaaaggaagaaaaaggggttctgccaggaaatgggaatggcttcatgagtctaagaagaactatcagagtatggagaaacacaccaaactacctggngacaaatgctgtcagcccttaggcaagactaaattggaaagaaaggtgtctgccaaagaaaacaggcaggcccctgtcctccttcaaacatacagggaatcctggaatggagaaaacatagaatcagtgaaacaaagccgtagtccagtttctgtgttttcctgggacaatgaaaagaatgacaaggactcctggagtcaacttttcactgaagattctcaaggccagcgggtcattgcccacaacactagagctccttttcaagatgtaaccaataactggaattgggacttagggccgtttcctaacagtccttgggctcagtgccaggaggatgggccaactcaaaatctgaagcctgatttgctctttacccaggactctgaaggtaatcaagttatcagacaccaattctaaatgtttgaagctttgtttctaaaagtaccttgaaatgatagagatgtaggaaaatatagttgtgggtggagagaggagtgagtttgtttaggtgggaaggtggcatgggatgaagttgtcattactgagcatcttctctgtgtaaataaagggcagtaccattgttaaaaaaaaaaaaaaaaaa

SEQ ID NO: 234902 - DNA, 699 bp, Homo Sapiens
tgcagttactcaagtccatggtgctccctttatctttatcaagaactggaaggaactccctgctgttttagaaaaagagaaaactataattttccaagaaaaaattgaaagaagaaaaatgttacttcagtggtatcagcacttcaagacagagcttaaaatgaaatttactaatattttagaaagctcatttttaatgaataataaaagttaattatctttttgagctaacatgtgatttttaaaatcattttgactactgggtgtataaatgtgtttgtgtgtgtatgtatttatagatgttctttaaggtacccttgaaaactctacattatgtatgccacataatgacatttcagtcagtggtagactacatatatgatagtggtcccataagattataatggagctgaaaaatttctatcgcctagtgatgtcatagcctagtgatgacatatgtattgcaatacatcactcacgtgtttgtggtgatactggtgtaaacaaatctattgcactgccagtcaagtaaaagtacagcaattatgtcctgtacataatatttaataatgacaataaatgactatgttactggtttatgtatttactatactatactttttacaatttgtattagttcttgcattgctatgaataaatgcctgagattgagtaatttttaaaaaaaaaaaaaaaaaa

SEQ ID NO: 234903 - DNA, 667 bp, Homo Sapiens
ggccctggctcctggtccctgttactgagctgggcagtcgaaccgaagggcagatgagctcaagatcatgccttgggaagcatggtgctctaggggtgcctttttattcctttcattgtattatagactgtttccaagtttatggttagaaatggtaaagtgggtctggtgttttgaggtagaacccagcctagggcaagatatgaactgttcttgaggtagaaatgtctacagtcagttgtttcatctagcttgcatcttaaaacacaaacccttcagttgctttcacttaatgcacacatttgccaatgacagagggttatacaggatccttcttttacatttctattgtctgctacgctcatcagagtatattttggggtacaaggttttgggggttttttttcccattttgtaactgccttattgaaaagtaagtgcccttccattccaggcctcctcatattgtacttgtttcctgccaaatctgggggatcatttgtattttaactttgtaatctatggctctgtactgttgaaaggctctcaattctgtggggtctccttagtatgtatgtgacttttcatgttgcaatatcacacgatgggatggcccgacttttgctcttaataaataatctgaatgagtaaaaaaaaaaaaaaaaaa

SEQ ID NO: 234904 - DNA, 682 bp, Homo Sapiens
ggagggcggcggggctcctggcgccggtagcgcacctgggcaggtgtgccagccaggtccccggttctgggatccgaggccatggcttggagtggcccagacccgaacttcgctcctgtgcccaaacttggaactctggaaatgtggcttcgctcactggcgccttgagcttgggcgactgccgggtccgcgaaacccgacccctgcagagctgactccgggactattttagtttctaacgtcaacttgcccgattcaagagggtttgcgcaaaaaacgtagcccgttgtcctcctgctgcagctgttgttgcagctgtgtggctgcgtttagtaggaataaccaactcaaattgggaagttcttcagctcagtatccgctcctgtaattagaactttttttctttaagcgatgaaattttggacagagagatctggagtttagtttgtgactcgaagaaaaactccaaaatgtaataccttgtcccatttggggggaaagtttgggctaattcaattcgccatggaagtgtcttctttttaaagtagtttagtaggtatatgaatgtatctgtcagttcttgagagacctatggatttagcagagattttaacttaagtgcaaaaagtttcatatttaaaggcgaataaagcgaatatttcttaaaaaaaaaaaaaaaaaa

SEQ ID NO: 234905 - DNA, 701 bp, Homo Sapiens
  misc_feature (138)..(138): n is a, c, g, or t
ggccatatcctttattcctgctgagcttcctggctgaatagatgaaatggggtcaagcccaggcagctcattcactacctgtgatccacctcagggcacgggcaaacacataggcttgcgtcttaaagccagctcctntgccagacccccttgtaatgtgccacaacaccctcaatagtcagggcaactggtggagcatggaagtcgaatttccttttctgttaggagctactcctgggaacccctctcagggctgcagcttacaggtgggcagctgtgattgcacaacttgaagggccatcattcacatctattcagtgggagtggggtccctgggattgggcagtgtggtggccctgtgtctcctcacctctgctcctgtcttcatcaccttctctctggaagggaagaggagttggaaggtctctggttttcttttctttttttttttttgccaaaggtttacttccagcatctgagctctggctctcacccctgaagctcagttatagtgcactgatgaactgagaggatgcgtgtggatgtgtgtgcatgcctgagtgcgttttttggggaggggtgtttatttttagtaccccattctggggttctctgatgcagtgtggatgtgaagatatggtaccttctcaagtgtagctctttcaaatatagtcaatgctgggaaaaaaaaaaaaaaaaaa

SEQ ID NO: 234906 - DNA, 751 bp, Homo Sapiens
  misc_feature (125)..(125): n is a, c, g, or t
gttggcgcaggtgaggactcagacgacgtccaccgtcccaaggctgtcactagtatttctctgaagtgcctgaaggtaggaatgggccggcgattgggaccagttgggccccaccacggccacgncaggcaaagcgccagcagccctgcactccacgttggccaagaaggccttccacgcagaatgacaagactgcaaaaatccgatgtgcttccttccctggcgcagtcgctcctcgagccgctgccccccacccaccctgcacccctcgccctccccccaccacagaatctaagacctttcagcttcgagccagggggcgggggatcccgagcaaaagccttccgtggacatcaggccccgtggcctcaagggctcccagggcaaacctaattccccccaaaacgtgaagtcggggaagctgcggctacacattccacaaagtgctggcacttacacccacaacccggaaggctgtggaccgattcctctagggtggtgacctcccattagcaaacggtgtcatggtttggaatgttcattatcgccaagaacctggttagaggcataaagaccttttttcaccgttacctaattttttcccctttcaagaattttttttttttttggtgtgttgtacagcagtataatttttcacttatttattccatcagtagatatggtttgtacaatacaattgtttcatttcagaaaataaaaatttcaaatcatgaaaaaaaaaaaaaaaaaa

SEQ ID NO: 234907 - DNA, 661 bp, Homo Sapiens
gctcaggaccagaagttgtttcagatttcagatttttgaattagggatcctcaaactatactaatgtgagaaagagctctaagatagttaagtagataaaagcaaggtgtcaaactgtagagtatgtttccatttatgtaaagaagaaacaggctaggcaaggtgactcacgcctgtaatcccagcactttgggaggccgaggcgggtggatcacctgaggtccggagttcaagaccagcctgaccaacacggtgaaaccccatctctactaaaaatacaaaagctgggtgtggtggtgcacacttctaatcccagctactccgtaggctaaggcaggagaatcgcttgaacccaggaagtggaggttgcagtgagccaatattgtgccattgcactccagcttgggcaacaagagcgaaactccatctcaaaaataaataaataaataagaaacatttgtttatatgtacacacataatctctgaaagggtaaaagtggcatactggttggccagaagaattgggaggacagtgatgaggaataattttcactctttatcattttatatttttggaattttgaaacatgtaaaattattaccagttcaaaaaataaatttaaacaaaaatcttaactgtttcaaaaaaaaaaaaaaaaaa

SEQ ID NO: 234908 - DNA, 696 bp, Homo Sapiens
ggatttatggatttgaatctaatggaagctaatgatcgagaaggagatccttgtgacctttgggtaactctacactctatgggctacaataaagctctggagttgacagaggcatgtccatttgtcattgatatctatgcagaaaaatgcaagccaaaaattaaagctgtccatatggaggcatgtagtggacaacttgagaaggccatttgtaaatctgttcttagcaacggtgatgccaaagtaatggatggctatgaaaatataatcgtgcatacttacagttgtgacacctggataacgtcagttattgaaaacaagtcagatgagaaagtgattattcacatcagcaatgagctaagtaaaaactgcataaacaacagaggactcaacatatttgcagtagaagtgggacccaaatctacaatggtttgtcaacatgtaatgcctttgaatgaacgacaagaatggatatattattgtatatattctcttatttcttaaataattatacttagaacttaccaaactaagaattatttcagatttagtctgttatttattaaacaactaaatgctacttaactgatgtacctaaataataatctattcaatttatatgcattttcattttatgtccatggtatgtactttattattaaaatataaataatgcttaaaaaaaaaaaaaaaaaa

SEQ ID NO: 234909 - DNA, 637 bp, Homo Sapiens
gccagtacctgtccaaagtgggcggggtagcccaacatgtggacgtagagcagtttggccagctgccggtgcctgtgcactgggtccccgtcgcggaaggaggcccggatgtgggcacactccttttggatcaccctcccgctcctgggcctgagtcttggccccgcgaatctcttcgatgaggtcctgaagcttcagcgaaggcaccaccatcctgactggcagagtccgggagtggagaaacactctctggtcgggcgtgcctgggctttcggcccaggcccgtcctgtgtcaagaccctaagagcccgggtcccacagcgcttcctggtacggggccgagcaggggttggtgctccgtgcggtccttccctctccccgcctccaccacgggaccccgccctcctgggccgactgcagagccttcctgaatcctctgacctcgggcctcaggctttagcggagagacagcatgataggcctggagttcttcaagaggcctcctcgcacatccttaccacccggagagcctcagtttggatttgaagccatcgcaccccaaaggagatgacaatccccccccttttttgaacttttttattaatatattttttttgttaaaaaaaaaaaaaaaaaa

SEQ ID NO: 234910 - DNA, 735 bp, Homo Sapiens
ataaatttcaaaaaagctgaaggcaaaaatccttcatcaggatgcactgagaactatatagttacgtcctgctttttgtataaactgagatgctcacatgcttccccttagaacaggcaatgtgctatgcataacatagttgtacattatctttgcggttgctttgagttttattttttattatttaaaattgtagttataaaatttttccgtatagtaccgtacatttactgtgaggcgcgtgctaaagtgaataagcgagttttcatgctgacccactcaatgctattcagaaatcaattggcttagcactttttcatatccttaggtgcatttagattgccagagttaaccttttgcgtttaaaaaaagaaaaaccctaaaaaataaaatacatgtatttacttaaaaaaaaataataaggtttccctcaagggaaaacagcagctacatgcttctttcctatactactgtagcaaaccaaggcattgatgagagggcatgcaaattgtgcttcactttacagtgttttatcagagcacttaataaaatgtaaggctggtatttatttgaagttgtaccgtatgacttaattcacatctgttggaatagaaaatatattctgttgagtatttaagaggctgtacatgttttcttttgtgtttggattctttgtactttttcatgttccgtacatcaataaacaaagttgaagggaaaaaaaaaaaaaaaaaa

SEQ ID NO: 234911 - DNA, 732 bp, Homo Sapiens
  misc_feature (59)..(59): n is a, c, g, or t
acacagtataaagcatcccagacttgagctaaatcagaggctcagtctattgagtgatntggcaatctgacccagtgtaagtttggatcagcctggtagaaaaagcagatacctttccatgcttgcatagccacatctaacatcgtttcaagcaaaaaaaaatctacatactaaagactaagtttcagaatagtttctaactattgcatgagaataaagctgatgcttaaggccatagggtatcctcaagttaatgatctctgccacaaacatgtctcctaattttttctagatttttcttctaattttagtccacttatcttagaaccaattcagtaaagaaccattaactaactactcccatctccttaaagcactacctacactacagtgcagcaagcccagagtcacagctgggagatggcttgaatgtgaaaggccagtaatgacctctgccatcagggagaggacggtggttcatcgtattctcatgcccagttgtgtcatctaggattcctggtaaacctaacctgataaaccatttttagtgacttgactgctgtataaaaactatagtatgattctcaattatatggccatactccatgtttgccctaacccaccttgttttaggagtttaatatttgatacatatagaaaatacgtcataccttttacaaagaataatagtaaacactaataaaaccattggctaaaaaaaaaaaaaaaaaa

SEQ ID NO: 234912 - DNA, 756 bp, Homo Sapiens
gaccaggaggctcaggagttcaatattacccacctacaacaactgtgggctaatcatgctgtcaaaactcacatgttgtatagtatgctacaaggactggacactgttccagtaccctgtggaataggaccaaagatggatggaatgacagaatggggaaatgttaagccctctgtcataaagcagaccagtgcctttgtagaaggagtgaagatgcgcacatataagcccctcatggaccgtcctaaatgccaaggactggaatcccggatccagcattttgtacgtaggggacgaattgagcacccacatttattccatgaggaagaaacaaaagccaaaagggactgtaatgacacactagaggaagacaatactaatttggagacaccaacgaagagggtctgtgttgacacagaaattaaaagcatcatttaaccatagacaatttgccaggatctaggaaccacctaatggtaggtggacagaaaaggaaaaaaaaaaaaaatttacttgcaagtactaggaattcagatgatcagctcttaaaaaaaaaaaaaaagcaaaaagactaaagccctattaaggaagttattgctttaataagaaatttcaaatattctcttatcccggtccaaaaggattaagcgattaaagaacgtaaaatggagatgtatttacatacacctggaaacctgtgccttgtattcaaattcattaaagcctaatcctgcaagtaaaaaaaaaaaaaaaaaa

SEQ ID NO: 234913 - DNA, 668 bp, Homo Sapiens
aagaacaacctctagcaccacagtgcataataaatgtcattattattagcaaagccaggacctgggtcttccagcttctagctcagtggcatttctgctgccccacaccaggactatccttcgtatacaggtatgaacctaaagccttcagtgtttcaatgaaaagttcacccaaggtctttctgttcagtaagtctagagctaagggctcctggcactctgttcagtcctttcgctggtaaaccacgctgccctccgttgctctgggcagaatgtcaaaccttcttatgtttttaaaatttataaatcaagcactcttatttaatattactgacagcccgaaggcagacgctcccactctcctggggaagagggtcttctaatctgccatcttaaggaggtaaaagggcttgattgggtaactcattgcaatgggcacgtatttattactgtctcccggccttttctcatgctgtttgtctgctggaattaccactagtgccaggccatttgaatatttgaccatttgtcttagaattctctgaatacaaatgtttttcatacctttactatgtactttttaagaatgaagactatgttgcatgttggtttgtactctctcctgcacataaaaaatgcttagtaaatagaaaaaaaaaaaaaaaaaa

SEQ ID NO: 234914 - DNA, 767 bp, Homo Sapiens
aaggaaatgaaaatgctgccatcgatcttgaagacaaatgcatcaaagagcacaacagctaaagaacaccaagctgaaaggttatcagaaaagagacgtgaagcttggaggcctcggacctgactttgagtccatcagagacaaaacgcaaaaattaatacagcaaaaggaatatgcaaaacaagtcaaggagtacaacatgaagacactatccattctatcaaaaccacaaacagaaaaaactcaaaagaaatctgctatccctcggcagaaggctttggaatacgctaagaccatccccaaacccaaaccatcaaatctgactcatcaagcatcaaaggaacaaaaaaatccaacctatgctgggaaagaagaaagtttacctgaaatctcactgctggaaatactgcagaacagacacgaaagggaaaaacaggctgtggctgctttcaaagtccttcacatcgtatagacaacatttgataggaaggagaccaaaaatggtccaggaatgaacgtggagaaaagaaacaccaaccaccttctctgcgttgagagtaatggcctattattatcatctatctgccgtccacgtttgctttctgcaggatttaaaatatgaggcccaattggattatggtgccatattttactttctaggaagaaaattttttaaattatttattttcaaatcagttagaattggagctgaataataactagagaataaagcttttggttttatattgaaaaaaaaaaaaaaaaaa

SEQ ID NO: 234915 - DNA, 752 bp, Homo Sapiens
atacagctactcgactagcctatgactgactggtggtggtaattaaactttgtacagattactgtgtgcagatagttactgtcttaatattaagtttcccagagattttacttttgagatagctgagaattaacgactcttggaatttataaaaatttagttgataccatttagttgctgccagctgcctgtgttcttatacataggagacatcggagtgagtgctttttaaaaaattaatggcgtatgtcaggtatatgtaaaaggacaattgcataatgaactcatgttaacatgatcaatccatggccaatcttgatttatctaaatgccattcatctttgaacccctatttattttgaagcaaatcccagatagcaaatcatttcatttgtaaatatttcaatatgtatgtctaaaagataaggactgttaaataaaaccacaattctgttgttagacttaactgttaacagtttgttagtgttaataactacccagcagtgttcaagttgtgcctttttttttttttttccaattcaagtcaggattcaaataagattcctacattgcatacatctcaaatgtcctacccagtggatccccacactctccactctttggcttcaaattcatttttttgaaaaaacaatgattgctttagcactttaaatttctatgcaatttcaaatgtaaggtgaaattttgatgtacttaataaaaaaattctaacgaaaaaaaaaaaaaaaaaa

SEQ ID NO: 234916 - DNA, 599 bp, Homo Sapiens
  misc_feature (52)..(52): n is a, c, g, or t
  misc_feature (80)..(80): n is a, c, g, or t
gactcggcagtgtgcagtggtgcatgcactgtttcagccaaacccgctccantacccggcagggtacacattcgcacccntacttcacagaggaagaaacctggaaccagagggggcgtgcctgccaagctcacacagcaggaagtgagccagaaacgcagattgggctggctctgaagccaagcctcttcttacttcacccggctgggctcctcatttttacgggtaacagtgaggctgggaaggggaacacagaccaggaagctcggtgagtgatggcagaacgatgcctgcaggcatggaactttttccgttatcacccaggcctgattcactggcctggcggagatgcttctaaggcatggtcgggggagagggccaacaactgtccctccttgagcaccagccccacccaagcaagcagacatttatcttttgggtctgtcctctctgttgcctttttacagccaacttttctagacctgttttgcttttgtaacttgaagatatttattctgggttttgtagcatttttattaatatggtgactttttaaaataaaaacaaacaaacgttgtcctaaaaaaaaaaaaaaaaaa

SEQ ID NO: 234917 - DNA, 621 bp, Homo Sapiens
tagtaataataaggggatgggtgtggctgcaggtgggacatgtcggttctctgtcctgtcacagctaagaactaagaactttagagtctttcagccatagagggtcctgtcatccattgaagggatcagtccattgggattttgccagttttagcattgatgctgtgtcctgggaaacccctgaatacttatcatagcagaagttcagccactgtagccctacctcaggaccgcttttatgggaaagaataattcctttaactgcttgagccatttgagttgtggctgcttttggtacttgtaataaattgaaagcatcttgaatgttctgggacagtaaaagaatgtgcctttgtttctgacagcaattataaaatcaattatatgtttatattctaaaaaatgttttgagtaatgctgacatcattggaaaagtgcatcacttagaaaatgtatctgtgtgtcaattttgtttgttcaaaatcagtttcattaatttgtgggaagatacaccttgtacattttacctaattaaaaaaaatattgccagttgagtatacttgtgatatattcaaagataaataaactttttcaattttagataaaaaaaaaaaaaaaaaa

SEQ ID NO: 234918 - DNA, 659 bp, Homo Sapiens
catgaacaactacggggtgctgctgcacgagctcgggctggacgagccgctgatgacaccactgcgggagcgcttcctgcagccgctgatggccctgctgtaccctgactgtggcgggggccggctcgacagccaccgggcctttgtggtcaaatacgcaccgggccaggacctggagctgggctgccactatgataatgccgagctcaccctcaatgtggccttgggcaaggtcttcacagggggcgccctgtattttgggggcctcttccaggcacccacagccctgacggagcccctggaggtggagcacgtggtgggccagggtgtcctccaccgtggcggccagctgcatggagcccggcccttgggcactggtgagcgttggaaccttgtcgtctggctccgagcctctgctgtgcgcaacagcctctgtcccatgtgctgccgtgagcccgacctggtggacgatgagggcttcggtgatggcttcacccgagaggagcccgccacggtggatgtatgtgcgctcacctgagcttgcttgggcccagtgtgggggtggcaggcaggtgagggctccgttgccttggtctgggggcagaaataaaatccccgcagcctactgcacttcttggctcaaaaaaaaaaaaaaaaaa

SEQ ID NO: 234919 - DNA, 695 bp, Homo Sapiens
caggtgcgggccagtgctagtgcccaggacgcggaccagacctacgactacgccagcaacagcgtgatcctgcacctggacgccggcgacgaggtcttcatcaagctggatggaggcaaagcacacggcggcaacagcaacaaatacagcacgttctctggcttcatcatctactccgactgagctccccacgtctccctccacccacgtccctcacccgccggggtcccctccgggcggggcagacgatgactcgcccctcgcccacccgctcgctgcccggccctccccggctatgacgcccccggcccgtgctcaacaccgcctgggccacagctaggccctcccaccggctcgctgcagagccgggcccagcgcgccctgtccccgtgccagggaaccggggttgaccgcccccgcccagcccgcgctatatatttgtacaataggactgtttactgcccacctccgcctgccagcccaccccagcctggggagaggtcgcggcggcgggtttgcttcctgcgctctgagatgagctgccctcggctccctccggggtggcgcgcccgggggaggggggagttgggggctggatagcttcccagcaccctcagagcccccgcccggctgtgccccgtctgaccaaagttataataaaaacattttcaccccgcaaaaaaaaaaaaaaaaaa

SEQ ID NO: 234920 - DNA, 648 bp, Homo Sapiens
tcctgtcactttaactaaaaaccaaagatttgttttctattgataagcagactagagaaaaactgccttattttcagaagcatgtcttcattcaaagcttaggcttcaatagaaattcagactaatcactgaaatgactatttcaaactagtgaaatatctgggaaataaactgcttcaaaaatattttactgacatgaattttgctagtgaatacaaatacactgcctcaaataaggccatgtatgaatgaacttacaagatatttgagttaatcagtgtttgcatatagagaattagttctaaagttcttaaaaataaatttaggggctccctgaaattttatttaatactttgctaacttacactcttgttttatctccacaggtacattttaggttagctcatggtgaattctatttacaataagtggagcttggattaatgggttttgttatgaattatcttagtgactttagacactgtttccatttgatttttaactatttaaaataccaaattaaataccagtttgttggttgttacttttaaatgattgttactttaacagtgtcccttcttaacacatggggttacaaataaaatactatgcatagtttactatctacgtaaaaaaaaaaaaaaaaaa

SEQ ID NO: 234921 - DNA, 658 bp, Homo Sapiens
gcggcactatctgctgagccaaggctggtgggatgaggagcaggagaaggcctggaggaagcagtcccgcaggaaggtgatggaggcctttgagcaggccgagcggaagcccaaacccaaccccaacctgctcttctcagacgtgtatcaggagatgcccgcccagctccgcaagcagcaggagtctctggcccgccacctgcagacctacggggagcactacccactggatcacttcgataagtgagacctgctcagcccacccccacccatcctcagctaccccgagaggtagccccactctaaggggagcagggggacctgacagcacaccactgtcttccccagtcagctccctctaaaatactcagcggccagggcggctgccactcttcacccctgctcctcccggctgttacattgtcaggggacagcatctgcagcagttgctgaggctccgtcagccccctcttcacctgttgttacagtgccttctcccaggggctgggtgagggcacattcaggactagaagcccctctgggcatggggtggacatggcaggtcagcctgtggaacttgcgcaggtgcgagtggccagcagaggtcacgaataaactgcatctctgcgcctggctctctaaaaaaaaaaaaaaaaaa

SEQ ID NO: 234922 - DNA, 756 bp, Homo Sapiens
gaaaaccaagtggggtctgatgaactggatagctacatgtatcagacagtggggcaccatgccattgacttgtatgcagaagcaatgctcttcccctctatcgccgaaccataagaggaaggagcttggatacaagacaagtgtacaccaaatgtgaaggtgatgaggttgaagatctctatgagcttttgaaacttgttaaggaaaaagaagaagtagaggggatatcagtaggtgctatactttctgactatcagcgtattcgagtggaaaatgtgtgtaaaaggcttaatctccagcctttagcttatctttggcagagaaaccaggaagatttgctcagagagatgatatcatctaacattcaagcaatgatcatcaaagtagcagctttgggtttagatcctgataagcatcttgggaaaaccctggatcaaatggagccttatctcatagagctttctaagaagtatggagtacatgtttgtggagaaggtggagagtatgaaactttcactttggattgccctctatttaagaagaaaataattgtggattcatcagaagtagtcatacattcagctgatgcatttgcacctgtggcttatctacgctttttagaattgcacttggaggacaaggtgtcctcagtgcctgacaactacagaacatctaattatatatataatttttgaaaagtgttttggaacattgttcattaaaccaccatttctatacaaaaaaaaaaaaaaaaaa

SEQ ID NO: 234923 - DNA, 693 bp, Homo Sapiens
gagagcatacactgtccaaggccattagtgtaaggaccgctacccagcctagaggacatcactatactacctcatctgatgattattctttattatgcctctaggtaattaagtaaaggtgaaattgcatacacagatatgtactacatattttaaaagttttatcttaaattgattaaaactttttaaaaagctttggtattaaaagaggtaaacatcagtttcctcaaacattttattcatgttgaatgcctttttgcaatgatgactgagttgttatcatagtattttaaaacctgtatagtgttttagacttgttaaaacattgctgtctagtgtacatctagctaaaagtgtggtttatctaaaccgttttaataagcaagatgactgggaaatctctgccccttttctgagcagtatgcctcttcttttagaattaaatgaatgctgcacaggtccagatgtgtgttgatgtagacttgaaatgtctccacattttggaggacttcctcagcccttttcattgagggaaaatatatttgaatttctgttttagattgtatcgggtcccagttgattcatgtgtacaaagttatgctacctaattacagaccattacccaaatatcctaccaggctttccatctgaatagtaaattaaacagttgttatcaaaaaaaaaaaaaaaaaa

SEQ ID NO: 234924 - DNA, 711 bp, Homo Sapiens
caaggtcaaactgccttaatatttggtgcaagaatattagactatgtcatcaatttgtgcaaaggtaaatttgacttccttgaacggctctcagacgattgctcctgactatcatttcttatctggatcttgaagatattgccaggctttgtcaaacatcacacagatttgcaaagctgtgcatgtctgataaactgtgggaacagatagtccagtcgacctgcgacaccatcactcctgacgtgagggccctggcggaggacacaggctggagacagctgttcttcaccaacaagctccagctccagcggcagctccgcaagaggaaacaaaaatatggaaacctgagagaaaagcaaccttaggcacacattttcctaccagcagggagctcaggcatggctgtgtttctcttcagtgtccaaatctcttctgtctccttttcttaagaactaagaggttttgttgatgcgtggagccatttgaaactcgtaggggatttgcacacaaatgcagcagagtctggctccccagtgccttgctagagtcaccgtcattctgaggtcaaatcatggcccgaggacaagggctgtaagacagggagccccataggccatcatcatccttatcccacacccattataaaagaggtttctattgtatataaacaaacaataaatgattattagcaggaaaaaaaaaaaaaaaaaa

SEQ ID NO: 234925 - DNA, 752 bp, Homo Sapiens
  misc_feature (17)..(17): n is a, c, g, or t
aaagaaagaggcacatntgattatcgaattgatggcaaaggcaatatgtctgcagatggaatgataacagtgttgtcactgttgcctcatctggtgctggtatccatcccctgtgtcttgtcagtcgttactcccagaaactgaaaaagaagatacaagttcagcagccaaacatgatcaaagtgtataaccagttcatgggaggcgtagacagagctgatgaaaacattgataagtatcgggcatcaatccgtggaaagaaatggtattcaagccctcttttgttctgtttcgaattggtcttacaaaatgcttggcaattgcataaaacatatgatgagaaaccagtggattttctggagtttcgtcgacgtgtggtatgccattatctggagacccatggtcatcctccagaacctggccaaaaaggaagacctcagaagcgtaacattgactcacgttatgatggcataaatcatgtgatagtcaaacagggaaagcaaacgcgatgcgctgaatgtcataagaacacaacttttcgatgtgaaaaatgtgatgttgccttacatgtgaagtgttccgttgaatatcacactgaatagcaggtgtcaccacctcctgagataagaaacatagttttatacattatgtacagtgtagcagtggttttgcctagtgttccaattttggaacgtcacataacaatggaacataataaatttttttttctcttcaaaaaaaaaaaaaaaaaa

SEQ ID NO: 234926 - DNA, 623 bp, Homo Sapiens
gggagggcaggagtggcgtctctggtaacggggtcgggcaaagggcagaggtcaccgtccaggttggacagcagcacctttgagcgatggcggcgtctggggaaccccagaggcagtggcaagaggaggtggcggcggtggtagtggtgggctcctgcatgaccgacctggtcaggttagtccggggccagttactcagtctgcggctcgggggaggaggcgtgccgtgcgctatgcgcccagtggagcttttgggcgctgggtctccagggatagacagtgctagctttgggtatgagctgcaggttttcgaagccttcagcctaccttcctggcatgaaagaacttgagtatataaaggtaaatctcaggggaggggacgtaataggccagggtttagtgaaagctctaatattactcaaagcgctccccaaagacctgccctccaaagacttgcgcccccaaagacctttcttggcccggctgctgagcctttccccaaacgagccagggaactttgcccacgtcattttacctccgagaatgtgcctacctcaccagggttgttgtgaggactaaatgaagtaaagtgttttgtcaagcgtaaaaaaaaaaaaaaaaaa

SEQ ID NO: 234927 - DNA, 749 bp, Homo Sapiens
  misc_feature (139)..(139): n is a, c, g, or t
ctcctgtctgcctcagccttccgagtagctgggataccaggcacccaccaccatgcccagctaatttttgtatttttagtagagacggggttttaccatgttggccaggctggttttgaactcctgacctcaggtgatntacctgcctcagcctcccaaactgataggattaccagcgtgagccactgggctggatgcttgtcttttatctttataaagtttttaaaattcatggcttaatttgcacagttaaaaaaaataggaccaattcttttgctttatagccaaagaagaaggaataaatctaagaggaggaactggtcaaaaccatactcccacttgtcttcttgtatgacatcacagcctttcttacattgcatgtaatcacctgtccacttgtcaggctcctggactatgagcgctttgagggcagagaccacattttttttttttcctgagatggagtctcactctgtcgcccgggctggagtgcagtggcgcaatcttggctcactgcaatctccgcctcccgggttcaagcaattctcctgccttagcctcccgagtagctgggattacaggtgcccgccaccatgccctgtcatccccgtgcctggcatgatgtctgaaatgtattaggcatttaacaaatgtttattgaataaacaaatgacattttgtttatatgtcaataaaatgaataaattgattttgatgcaaatttttattccaaaaaaaaaaaaaaaaaa

SEQ ID NO: 234928 - DNA, 701 bp, Homo Sapiens
  misc_feature (65)..(65): n is a, c, g, or t
gagcaagagcagtcagaccccggctgtgatggcgcccagtagttctgcgagatgttaccattggngaaactgagtgaaggcgggtacctgggatccctctgttttcttttttgttgttgttgttattttgagatgaagtttccctcttgttgcccaggctgggtgatccacctgcctcggcctcccaaagtgctgggattacacgcgtgagccactgtgcccagcctctctgttttatttcttcttttttttttttttttttggagacgctctgtcgcccaggctggagtgcggtggcacgatattggctcactgcaagctccgcctcctgggttcacaccattctcctgcctcagcctcccgagtagctgggactgcaggcgcccgccacctcgcccgtctaattttttgtatttttagtagaggcggggcttcaccgtgttagccaggatggtctcaatctcctgacctcgtcatccgcccgtctcggcctcccatagtgctgggattacaggcatgagccaccacgcccggctgttttatttcttataactgtacaggaatctacaatgattgtaacaaaaatttcaattaaggccactctaggcacatggcctgtggggtagccctgctcaacaagaagccgtcaaaaaaatgttttttaattaaaaaattcttcaattaaaaaaaaaaaaaaaaaa

SEQ ID NO: 234929 - DNA, 726 bp, Homo Sapiens
tcaaggttgaagtggacacatcattatcttgggatggtacttctttatttaaatagtcctttaaagttctttgagtggcagagaacgtttttggtttcagtctgagaaggctaccaaatggtttaagttcatttcatagttaggagaaaaagattttgagtagtctaatgtcgtcagaaaggattaaaacgttgtatgtaccaagaaggcagaatgaagaaggatcacgttcacaaatgctgtatgtttaacaaaatacgtttagatggtaatatccaatagtcttatcaagtgctacaatctttttaaacagggaatggccaaatccagtgctattgaaacagcctgaagaatgcaatcttaatttgcctgtatgggacccaagggttagtgtattattttttcccctaccaattcacactgtgcaataacaagtaaaaatcatctgcataaactccagggagacttccagccttttacttatgaatggtcatgtccgtattacactttcttttagataacctcaactataattgtcctcaactataattgatgtgagaagcataattatgtaccctgtaaaccacatttaattgtacatagtttttaatacagattttactaacattttaatttattctatatagaactaccttgtaagtcaaagttgtgtgggcatttgtgctttaaaaaaaataaaaggatactaaaaatcaaaaaaaaaaa

SEQ ID NO: 234930 - DNA, 758 bp, Homo Sapiens
  misc_feature (87)..(87): n is a, c, g, or t
  misc_feature (100)..(100): n is a, c, g, or t
tcctccactcgctccacagcaaatagtgcctcacgcagccagcggacactgtcaactgacgcagcaccccagccagggctggccacncaggcatacagcntagtggggccagaggtgagaggttctgaaccaaagaaagtccaccatgctaatctgaccaaagcagaaaccacacccagcatgatccccagccagagcagagccttccaaacggtctgaattacaatggacttgactcccacgctttcctaggagtcagggtctttggactcttctcgtcattggagctcaagtcaccagccacacaaccagatgagaggtcatctaagtagcagtgagcattgcacggaacagattcagatgagcattttccttatacaataccaaacaagcaaaaggatgtaagctgattcatctgtaaaaaggcatcttattgtgcctttagaccagagtaagggaaagcaggagtccaaatctatttgttgaccaggacctgtggtgagaaggttggggaaaggtgaggtgaatatacctaaaacttttaatgtgggatattttgtatcagtgctttgattcacaattttcaagaggaaatgggatgctgtttgtaaattttctatgcatttctgcaaacttattggattattagttattcagacagtcaagcagaacccacagccttattacacctgtctacaccatgtactgagctaaccacttctaagaaactccaaaaaaggaaaaaaaaaaaaaaaaaa

SEQ ID NO: 234931 - DNA, 706 bp, Homo Sapiens
gcatcaaggcggcagcaagccaaggagcagaaaagacagttagtgaagtctctgagcagccgaaggaaaccagcatgaccgagccctcagaaccaggaagcaaagctgaggcaaagaaggccttaggaggggatgtaagtgatcagagtttagaaagtcatagtcagaaggtttcagagacccaaatgtgtgagtccaactcttctaaagaaacctctctggccaccccagcagggaaagaaagccaagaaggacccaaacatcctactggtcccttcttcccagttttgagcaaagatgaaagcactgccctccagtggccatcagaactattaattttcaccaaggcagaaccctccatttcatacagttgtaaccctttatattttgactttaaactttcaaggaacaaagatgccagaactaaaggaacagaaaaaccaaaggatataggaagctcctcaaaggaccatctccaaggcctagatcctggtgagccaaataaaagcaaggaagtgggcggagagaaaatagtacgttcctcaggaggcagaatggacgcacctgcttcagggtctgcctgtagcggcctgaacaagcaggagcctgggggtagccatgggtctgagacagaagacacagggagaagccttcccagcaagaaagaacgatctgggaagtcccaccgacacaaaaaaaaaaaaaa

SEQ ID NO: 234932 - DNA, 751 bp, Homo Sapiens
gaccatttcagaaattccatttaccacagtaggacactcacattcccccatctgcaaagtgcatttaccctctcccctgaggtttccagatttcatgtcattaaagcattagttcaacatgaaaaatgtcatgtagaccacatcagatcaaaagtttaaaatcccatctaaaacatccacaccaggtgtgaatgaggcttccgagagtgtccattaagtgcagatccttgacataattcccttacctctgtcgacctgtgaaactgaacaaacagcttatctgcccctaatgtgaaatgatgggacagacatagaataaccactacagtgattctagttcaaaatgagggaacatggaggggataaagaagtcaataacccaaaatagtttggaaatggagctgggcaaaatccagcaggagtttcttagttaggatccacagcctgggactgaccctctgtcctgtgggtctttgcctctgggctctctgctctgcatttcttgaaaccattattatttatcatttttctcacactgttttgcgtatggctcctattgcactcaaaatgtttttgagattcatccatgttgttttgtgtgtcaaaagtttgttcctttagccattccatggaatgaatgtatcacagtttattgatccattcttgtattgatagatatttgaatgtttccagtttttcctattatgaataaaactgctatgaacattcttgtataaaaaaaaaaaaaaaa

SEQ ID NO: 234933 - DNA, 786 bp, Homo Sapiens
  misc_feature (26)..(26): n is a, c, g, or t
  misc_feature (56)..(56): n is a, c, g, or t
caacatgtggatcaatactgtttatntgttcataaattattcattcagcaaacatntgttgaacatttaatgtgtaccagatattgccaggatcaggaaataaagaactaaaaatggacattcagactgcaattgctagtacaggggtcaaacaaaatcagtgattagaatttagtgcgttaagttccctgatgccttcacagccagaagaggctgtgaagggataaacacttctgagagtgggtggtagtagaactgagtattcaagactgaatgttaggcaggtagacagtgactggttaagctgagaaacttacaagtattttcgttgagttctgcttccactattatttactttacaatggatatgaagttcagatttcatcttatttactgaaggtggagaaaggatgtggaagtaggggttatgggctctcaaaagtagatttagagagatttttttatcactgttttatgatatagttcactgagcacttacatagattaacagttacaagtttccataaatcagttagaatatgactagcttcagggaaggaattttcaacaactgcaatctttgattgttttactgtgggaacttgcagtgatataattgacaacattatttaacaataataggtaaagtaggccgggtgtggtggctcacgcctgtaatcctagcactttgggaggccgaggtgggtggatcacaaggtcaggagttcgagaccagcctggccaatatggtgaaaccccgtctcttctaaaaaaaaaaaaaaaaaa

SEQ ID NO: 234934 - DNA, 725 bp, Homo Sapiens
cacagctttgttcaaaggattctttttgtctctgacctactattaatgtctgcattttttttggaaattcagagtcatagaactcttctctgtgtgtaaaagcattcagacagagctgctgcccatccttgcaacagctaggggctgaactcctgctctgctgagttttgggtttattctctaacctgtggcaatgtgctgtagtcagcccgacttatgctactgtcatggacagtgctaataataatactgccttttgctggagatgttagttctcacttatgcattttaagaccttttgctggaagtgttagttcttgcttatctaattttaaacgaatatgaaagacaatttaagtgattttgtacattttaatttactcatctacattttcttgtattttttggattaaagtgtacctgtatgctctttctttctgtggaacacttcatttgtagtgtccaatttttaaaaagaaaacattttgataacagtttcagagtaatgacaaaccaaacacacattctaattgtctacttgtacaatttgttgggtaggtactatagggggaagaattaaatatacatgaggaagagaaaaaatctttgccaagaatttcagttattatcacttatggtttacccatattgtcataaaagtaagaaaatgggaattctaattttctgtcacaaaataaagattatataaaaataaaaaaaaaaaa

SEQ ID NO: 234935 - DNA, 710 bp, Homo Sapiens
  misc_feature (15)..(15): n is a, c, g, or t
gaacaatgagactgngaataagaagaactgttttcaaaactgaaaattcaatattaaggaaactttatggtgatgttccttttatagaagaaagacacagacatcggttcgaggtaaaccctaacctgatcaaacaatttgagcagaatgacttaagttttgtaggtcaggatgttgatggagacaggatggaaatcattgaactggcaaatcatccttattttgttggtgtccagttccatcctgagttttcttctaggccgatgaagccttcccctccgtatctggggctgttacttgcagcaactgggaacctgaatgcctacttgcaacagggttgcaaactgtcttccagtgatagatacagtgatgccagtgatgacagcttttcagagccaaggatagctgagttggaaataagctgaaatgaatacatgactgggaataatggggactgcctgtgaggcctctgaaataattgaaggcaagatgaaggaactatctgaagaaatcactacactcttagagaatccctctgttctccagcaaacatgggatgtaaagcctcacagggaatctgataatacatacttctgtcaaccagaaccagaggggtagttttcttttccctccagaggcagcctttggtacttaaaatatctgtagctgattaaatttttcccaacaacctcaaaaaaaaaaaaaaaaaa

SEQ ID NO: 234936 - DNA, 847 bp, Homo Sapiens
  misc_feature (155)..(155): n is a, c, g, or t
  misc_feature (185)..(185): n is a, c, g, or t
agtcagaacatcagcagacttcaggatgagctgacaactaccaagaggagtacgagggatcagttaagtatgatgagtgaccacctgtgcagcatgaatgagacattatctaaacagagagaagagattgacacactaaagatgtccagtaaggngaatctaaaaagaacaagagtcgatagttntgaaatagctggttggcgactgttctttccagacctgctcctgctgcacagagccgcagggctgagaccacgtccatgctggctgccttcaggaagctaaagtattgttggacctagtaaactagtcagtgttggaaacggccttgaaatatttaaaacatatttgtaaccagtgaggcaaatacagaagttgatgtcggcagtaaatggaaaacaatacgtatgtcatggatattgtaggtttccttatgctgtttttactgtgcactttttaaaattaggttttaatttcagtatgtaagaacaaatattttgtatactttcaaactcaattatatggtaatcgatttggtatctatggaatagatatatgtttctggaaaaaaatgcttaaattgtcaaactgtcattacttcttattatagttgaaggcattctccagattctttttaaaagatttgttcatatttctctctctctctctctctctctctctctctctctctcttctttctctctgagggagagggagccctccaaacttcagatcctgtgggtttagtatcattatcttcagctctttgataccctgtgttagagtaatagctaaaggaagttcatgtcaataaattcatacttatatcacaaaaaaaaaaaaaaaa

SEQ ID NO: 234937 - DNA, 695 bp, Homo Sapiens
gcacataccaaaataccactacttttctttgtatgtgaacggtcctggaaggattctgttgctccttggcaggtgtgtggttgcgctatagactggctccggtgatctggccattatactctgctgtctccatcttgaggatgtaggggattatgctgtctatcgaaacattgccaatgagaccagtaaaaaaaagttcttctgttatgttggagctcatcagcctgagtgccggcaggcgaacgaggatccgggccaatctataaaagggagtgtcattagaaaaggagactgtttgatgcccttcaaccacagctcagcaaaggctcctggggtcccgtctgtattgcacagaatcaaaccaaacggatccaccatccacccacctctcttttctgatttcaacagttcctcttatagaaatttatcatgagaaaaaaccaaatgagtacaaaatgtatgtacagatgtgttcccttcactcttgtttattccaactctcctcacccccaccaccaagagaaaacctggaaattcatcaacagaggacagactaaagtaggagtcttcatatgatgaactgctagagactcatttaaaaaacgataatacaaacctgtatttactgaccaggaaagacatccatgacatattgctcaataaaagtttaaaaggagaaaaaaaaaaaaaaaaaa

SEQ ID NO: 234938 - DNA, 688 bp, Homo Sapiens
aagtcctgaagtttaaaacacttttgaccagctttggctcgggagagtggggctgcttgtagaactggaagtgaataactttttcaagcaatatcagtgagtgggtcccatcgacagggttccaggacctggaacactttaacagaaggaaatgccgaagcagcttgcacagttgctttacagacttccaagaggctgattctggcttcaagatggagccttggagttggttttttttttttttttttcttccctcaaagaacctgcggttgcgctttgtgtgttttgtttttgttttccatttgggggccccatgggaaagagcttctgaactctttcctttatgaactcccactgtgttcctataaaggcccttttctttcttagtgttgtaagttacattttcattatgccccatcacatcttctttactgtaaaaatattaaaaagctgtttccaagtgggacagctaatgaagctctaattattgcagacatatttttgagatgtaaaaaaaaaaaatttaaagttaaatgataagtcttagaggcgagtgaggaataaaatggatgtaaacatttacatgggatgcattagaattctgctgtgtgtactgtcttttggttgaaacaaattatgaacagtgactaataataaaaagtcaatacccaaaaaaaaaaaaaaaaaa

SEQ ID NO: 234939 - DNA, 691 bp, Homo Sapiens
ttaaataatatacgtagataccagaggccaagccacagagaggataatagttcttcccaataaaggtgatattaatcagactaatttcgaactaaagaagttactgcttaaagacggaatttcaggggaagcaagactcatttagaacaaatgaaatttctccagtcctacatttctgaattgacttctagcacatcaaaaatatttcagtcattatcagtctcattaactgaaatgccaaatgctaaatgcagtgttctttcacactgttttaattttcttgggaaattgagtccagtggatgttaatggagtgggttgcccatccctgaaatgtcttattttcaagtgcctggcctgggaaagaaggggaagaaacaattgcattatatccaaagatacactataaaaatagagtttttaccaaaaaaagatgtttgttctcatctcagtaggcctcatttgggcaagtgacccacaggtcttttggcgagtttgctatttgcctgttgaaatacttgtttcaacttagagaacagttatgatgtgaccatagcatggcacaactaaaaatctaagcctgaaacctgaaaaaagagatatgacaagggaaattaatcaggctatacataagtattgtatttatttgaataaaaataaaaagagcaacccataaacaaaaaaaaaaaaaa

SEQ ID NO: 234940 - DNA, 601 bp, Homo Sapiens
gaggaggaggcgtcttcccccgccggtcctgtctctcagccacttctgcaggtctcctttcctttgcttcggggacgttctcctgggagcctcacggacgctgtctctggccctagacaaccctaacgaggaggtggcagaagtgaagatctcccacttcccggccgcggacctgggcttcagtgtgtcgcagcgctgtttcgtgttgcagcctaaagagaaaattgttatttctgttaactggacaccactcaaagaaggccgagtaagagagattatgacatttcttgtaaatgatgttctgaaacaccaagctatattactaggaaatgcagaagagcagaaaaagaaaaagaggagtctttgggataccattaaaaagaagaaaatttcagcctctacaagtcacaacagaagggtttcaaatattcagaatgttaataaaacatttagtgtttcccaaaaagttgacagagttaggagcccactacaagcttgtgaaaacttggctatgaatgaaggcggtcccccaacagaaaacaattctttaatacttgaagaaaataaaatacccatatcacctaaaaaaaaaaaaaaaaaa

SEQ ID NO: 234941 - DNA, 706 bp, Homo Sapiens
  misc_feature (8)..(8): n is a, c, g, or t
  misc_feature (93)..(94): n is a, c, g, or t
  misc_feature (153)..(153): n is a, c, g, or t
agcacgtntagggcccagcccctcccccaccccgcaattcagcgtcaagtgcacttagcggggtacccggctcccccagcccccacacccgtnntgggtctcagggtggttccagcttctccttgggcagccagaagttggagtcccatcccnccaaggcacatttttttttttttttttttgtgatcagggagtgtgtccaacgtagccccctggcctgtgcaagccctgactccctcatggtgcctcggagagtggggagcatattgggctggggtaagcactagacccaagtagactggacacaaagggctcgcccagggccctggcgccacccccaccccttcccaccagctgctgctagcctctgtggttgtacatcccacttgcccccacacggagactgactctaaaacccttcatccaatggtgctaacccccggctctcccctgccccacctcacccacccagagaagcacagaccccgccaggggcaggggcccaccgcacacccttgtcccgggcctgtctgggactggccttcccggctcagccagtgaggctcagaagggacacaaagagggatggaagaaaagaacaaagagaaactgttcctcccacccccttccctgatgccaggggcaccagactgattctgaggcacaaataaaagaggcttcataccggaaaaaaaaaaaaaaaaaa

SEQ ID NO: 234942 - DNA, 625 bp, Homo Sapiens
  misc_feature (605)..(605): n is a, c, g, or t
atggacctgagtagctgaaggaaggcccctccctacccaaagactggaggcttctcagcctcaatttccctgtatgtacagctgagggctctgcctgtcccccactgctatcagtatggaaccccagctggggtcccctattgagtgccgactccccccaccgccagcagctgctcctccagccacacccctcctgctccccccacccctagcccttgaccctggctggcctgccccgctccacaggccaccagatgggctcctgagaccctccccaggctgcttacagctcattctgctgggggtagagatgaggggagggagtaagttaaaccttggactagcaagtagaagcctggggggatgcgtgtgcctcagtttcctcctccacaactgaatatttatagtggctgaaaactggggagatacttgatggcgcgaatgtccgttttctctcccttcccacctcctgcaggaagcaggacggggcaggcagcacctggtaggcacagtgctttgcccctcctccccttcccttctggaagtcttggggcctcagtgcttgcaacagccggccttgggcaaataaaagactaggttgtttnctaaaaaaaaaaaaaaaaaa

SEQ ID NO: 234943 - DNA, 776 bp, Homo Sapiens
  misc_feature (108)..(108): n is a, c, g, or t
gatgtacagaatgtgggaagacctttagttgtagctcaaacattgttcaacatgttaaaattcatactggtgagaaacgctataatgtaaggaatatgggaaagcatntgctgtggatgatcagctgtctcaacatcagaaaattcagaatagttagaaattttgtgacaataaggagtgtggacaagccttcactgtgtacgaaaaatttactcaacaccagagagctcatattgatgagaaatcttgtgaacataaaagaatgtgtgaagaactttcatcatggcctgggatttgctcaacttctgagtattcatacttctgagaaatctttgagtgtaaggaatgtggggcgttttatagccacactaaataccttagagttcggagaagataattcttgtgagaaagtctttgaatgaggaatatagggtagttgtcatgttcacaatgtactccctatgaaataatttaccagatacaggcatacctcgctgaattgtgcattgcagttattgtgttttatacaaactgaaggtttgtggcaaccctgtggtgagcaagacgatcaggtccattttcccaacgtcaggtgtgcatttcatgtctttatgtcacattttggtaattctcagaatatttcaaactatttcattgttatatatctatcatggtgatcaatgaccagtgatttttgatgttgctattgtaattgctttgggataccacaaattctgcccataaaagatggtaaacctaaaaaaaaaaaaaaaaaa

SEQ ID NO: 234944 - DNA, 706 bp, Homo Sapiens
  misc_feature (24)..(24): n is a, c, g, or t
  misc_feature (116)..(116): n is a, c, g, or t
ctgcggcaagaggatgcttgagcncaggagttcgagtccaacctgggcaaaagagtgagaccccatctctaaaaccaaaaaggtaccttagaaggtcacctggttggctaaccttntaaaggcaggggcgtgacacgtaggacacattgggaatgtcttggctactacatgtagccttctgggatatatgtgcccagagggagaagcactgagcctgaagaaactagatgagtctcagaaccacagaccggccagaaatctctcccaccattatatcagcgtgatacaggtctacattcatttctacaaacaggaacaagttccttgcagcaataatattattttatgacttgtatttttactatacccttcctctgaggtttagttttcatcacattatgttcaagattccatatctccgtaaattacagctaattacagggcattgttccatggttattaaaaatcagagtttattaaaaatcctgagtcttaagggctgtcttacctttcacttccactgtcctgtagaaacagatcaagctgcaaaccacgtccttcatctgttgttcattttcttgcaactctttgactctgatcccctgagcagcacgttcatcacgcatgctctctgttgcgttccccatttcagatgtccagtaatggtgaaataaaatcctgcttcgacaaaaaaaaaaaaaaaaaa

SEQ ID NO: 234945 - DNA, 654 bp, Homo Sapiens
ggaggcccatgttccttgatgcaacctcgtggcccaggccgggagcagcttgcctcctcagaggtgttgactatctgggtgttcttggtaaccgttaactctgtctttctcagctgcaagccctgagtctccagtagctgaattcacctgacttttcaacaggccaaatctctgaaccttgagtacagggacagctcctcctccctcctcccagctctccccatgtgtgtgatggtgtatttaatgtgtttttttaatgcgacattaaaagattctccacgtcttgctcaacctttgagagaagtttcagattcttgtatttgcttgttttatataaaactatctaatgttctttatatgttcttttctgtacgtaatggggggaggggagggaaatttacatataaatagtcctagttctacaatttgttatttttttaattattattttttatcgtcattgtgaagttgtccagggactttaaagtccatgttcctttgtggtgaaataacctccaaatagtttgagaagttgccaagacgaagaaaaaagcaaaaccccagtagcagagcatggattctgtgttgtttcccattctgtctttgactgcctcattcaataaatagttaaaaatgaaaaaaaaaaaaaaaaaa

SEQ ID NO: 234946 - DNA, 757 bp, Homo Sapiens
tgaaagtgtccaggcgtgtgcacagccagtgcgcccacttccgggctccttgctccctgctgtactgaagttttggattttgcatccaatcctgtgtgcctgcccttctgccgaaggcttgtgaggggcctgagtcctctgcccatcaggatgacaggctccttcctgcagggccataggagggaagttttggaaacacagaatgattccaaggtgctctcgttcctgagggggactggtttgtaacccatgacatctgtgggcgagagaggcagctgggagcaggacacttggagggtcaccccacgggggtggcacctgcactctgagtgccccccactgtcatcagctgcctcttaccgtggacacagttttggttttggggactagggggccccactcctggtggtaccgtttggacttactagggcagtgggacatataggccggggctagtgggataacggggagttacgcctgatgacttttttgatggaatcctgcattagatagctggtgggacccccccctcagaaattggggaactgaggagactccagggagggtgtccttccagggagagcagctatgaggggccccctagcttcctgtgcctggaagtaagagaaccagtaaagggccatacacacctgtacccaagagaccgctctccatttgctttctttttttactaaataattgtaaaatattattatgacataaagaaccatttaaggccaaaaaaaaaaaaaaaaaa

SEQ ID NO: 234947 - DNA, 758 bp, Homo Sapiens
  misc_feature (17)..(17): n is a, c, g, or t
  misc_feature (59)..(59): n is a, c, g, or t
catgagaggaagaaatnccaagaggaacaaaacagagaatgtctttgcagcagcaaagngaatggaagaacgcccgtgctgaacaaaaatgcgcagaggccctctacacagagacaaggctgcagtttgacgagacagccaagcacctccagaagctggaaagcaccaccagaaaggcagtttgtgcatctgtgaaagacttcaacaagagccaggccatcgagtcagtggaaaggaaaaagcaagagaaaaagcaagaacaagaggacaacttggccgagatcaccaacctcctgcgtggggacctgctctccgagaacccgcagcaggcagccagctccttcgggccccaccgcgtggtccctgaccgctggaagggcatgacccaggagcagctggagcagatccgcctagtccagaagcagcaaatccaggagaagctgaggctccaggaagaaaagcgccagcgagacctggactgggaccggcggaggattcagggggctcgcgccaccctgctgtttgagcggcagcagtggcggcggcagcgcgacctgcgcagagctctggacagcagcaacctcagcctggccaaggagcagcatttgcagaaaaaatatatgaatgaagtctatacaaatcaacccacgggagactatttcacacaatttaatacaggaagtcgataatgaggaacacacccttgttcccgtcattcacgtataaagagtggctaccttaaaaaaaaaaaaaaaaaa

SEQ ID NO: 234948 - DNA, 652 bp, Homo Sapiens
agaaacaaaaggactaacaatcaggaaggggaggtgatcggggcaggagtaaagtggacacctcagcaaagccattcgctgtgatctctgattgtgcagtgtcatgtcctgtcaccagagccccctcgtgtttgatgttggccaatgccgccagcatgatctagcaggccaaatcctaatctaccattctctgacaccagctggtcccctgggtcgtccacccgatgtcccccattttccccacttggcctcccccacaggctttcggcaaaggaccgtgggaggcacctgtgacactgcccttttcctgtgcagctgtttttcttcttcattcttttcactcctcgttactctttttttttttcactctcagcccacacaaaactaggaactttgttattctacttatttttctgtactctgtctgtttgcacacagatggatatttgagagccagcgaactttctttacctcctagtatcatttcatgaaaattagtagcacctgcacaatggggccttggagacaggaataaaaggaaaaatctggaatggaatcacatgacgcaacaggctatgaagactccctgcccggctgctatatgtttggtaaacagaataaatagtacttgagcaaaaaaaaaaaaaaaaaa

SEQ ID NO: 234949 - DNA, 729 bp, Homo Sapiens
gtccatcaccagcaaccaatccaccaacagaatgtgtttctgccatcctgggcagaagctgaaggccagcttcacatttctgctgagagaaggtgacttaacgccttttccggccctagctccaggcgttttgaggcgtctggtgcctgatggtaggtatggtgtgtttgttctgtcccccaggggctggagtcacctggtgcccctgaaggacagatttttggctgttaaaggatggcattttcctgctgtcttctgtgcgtttagttttcttgctgagcgggagctcagtatgacttgccacccacctgatacctcagggcaaggccctttttccctccagccaggtgagtgttttcttcaggcagctgagggtcctgggggagctgaggctctgtgctgcacccccagcccacagctggggcatctcactggagctgttccaggccccactggagagcagaggacctgatcccccactagagaggtccggtgtgcacagccggcctcccagtgtgccaaaatgaactgctctcagctgatggctgtattctgactttgaagcctgttaagaggtagcaagggggctagaggagggagattccacctcccctcccaagtgaccctcctcctgcctctggtatccttccttttgaaacgaagctcagcttcgaagatgtgaacaagaataaaaggaaaaaattctaatgtaaaaaaaaaaaaaaaaaa

SEQ ID NO: 234950 - DNA, 732 bp, Homo Sapiens
gtcccaaaagaccatcctgctctcaactacaacatcgttcaggccctccaagccacaaaactgtggtgaatggaaaagaatgtataaacttcgcctcatttaattttcttggattgttggataaccctagggttaaggcagcagctttagcatctctaaagaagtatggcgtggggacttgtggacccagaggattttatggcacatttgaatgaagatgaaggatcattgatttccttgtgtatggataatccgggaacaggccaactaaatatttgatgaatgtatgatttcaaatacagtgaattccctgggagtcatcaaagaagaccggcattttatggttgtttttattaagtgtatattctttgctcctgaaaatgttattaaataattgtttaggccgggcgtggtggctcatgcctgtaatcccagcactttcaagggctgaggcaggcagatcacctgaggtcaggagttcaaaaccagcctggccaacatgctgaagcctcgtctctactaaaaatacaaaaattagctgggcgtggtggtggatgcctgtggtcccggctacgtgggaggctgaggtgggagagttgcttcaacctgggaggcggaggttgcagtgagccgagatcatgccactgcactccagcctgggcaacagagcaagactgtctcaaaaataaataaataaataaaattgtttaaatgaaaaaaaaaaaaaaaaaa

SEQ ID NO: 234951 - DNA, 767 bp, Homo Sapiens
  misc_feature (87)..(87): n is a, c, g, or t
ctaacccgagcatccagcttccacaatgcctgtgcaggcagctcaatggacagaatttctgtcctgtccaatctgctataatgaatntgatgagaatgtgcacaaacccatcagtttaggttgttcacacactgtttgcaagacctgcttgaataaacttcatcgaaaagcttgtccttttgaccagactgccatcaacacagatattgatgtacttcctgtcaacttcgcacttctccagttagttggagcccaggtaccagatcatcagtcaattaagttaagtaatctaggtgagaataaacactatgaggttgcaaagaaatgcgttgaggatttggcactctacttaaaaccactaagtggaggtaaaggtgtagctagcttgaaccagagtgcactgagccgtccaatgcaaaggaaactggtgacacttgtaaactgtcaactggtggaggaagaaggtcgtgtaagagccatgcgagcagctcgttcccttggagaaagaactgtaacagaactgatattacagcaccagaaccctcagcagttgtctgccaatctatgggccgctgtcagggctcgaggatgccagtttttagggccaggtaagataggttactatcttaccttttttattagctattggggcttgaggatgccaatttctggagctcggtgaatcctgagactcaacccgtctttatatgtacaaatcttgatataattaaagataaatttgtttttgtaaaaaaaaaaaaaaaaaa

SEQ ID NO: 234952 - DNA, 747 bp, Homo Sapiens
  misc_feature (83)..(83): n is a, c, g, or t
aaacagacaggatgcaccacatctagtaaagggtgccatggcagctacatattctgctttgaaccgtaatcagtcaccagttntggaaccagtaggccgctctactcttgctcagcggagaggtattaaaaaaatcacctcaacagccctgtgaagtgacctcagtgagatatttggtaccatggtgtaagctgatagcacaagttctggcgacaggtagcacgtatctgagagacacctgcaagcacacactgtcccagctggtacccataatgctgctgttcctgctgctgctcctgctttcctctcttctcgctttaaatgattgttagcaagttagattttcctggagcttcggaagaaatgaaaatggaaacatgatgaagatatagtcactgaatcaatgagaaaaataatgaacatatgaataccacctaaaaatacactgaataaagtacaccatatagcattatttttataggaaatatttcatgtcccttaaatattctttgttagttatagggatggacagtttatgttaagcacttagcttaaacaatccgtttatattagcactgtatcccttgtgccatccaacattttgtatgtttttgtaaacagttcatatacagtacatttctgtactgctttctttaatgtatacatgccttgtttaacttggaatctattattattaatcaattgactattaaatctggttaaatagttaaaaaaaaaaaaaaaaaa

SEQ ID NO: 234953 - DNA, 628 bp, Homo Sapiens
ggcacgagggattagatgaaattggaaataaaccaacattgtttacattccaggagacttgtagctcagccacacacgcagtaatgacctgtgcccgttcgcctctggcactgcccacccctctttttttttttcttctaattctgtactcacaaaagagaatctcattttcttctttcttccattcccttaaattctgagtactgtacatatatttctgggttcccacgatgatgtgaaaaactaccagactgttttttgtcttctcacaaagacaagaaaaatcagggcattttgtgagtgccttaagatcaaactaacaagatctgaccctctcccctcacagtgagccactgccccacttcagagggtaagagccaaaagcctcattgtgaaaggcactggacttggaccagggacaccatcagggccttggttttctcacgcataaaatggagagtggattaatcgccaaagattcttctgatctgacattttgaaattgtgagagaaactagatgactgtaaacttggtcacaggcctggttctggcagttctttgcggacttttttctagcattatgccaaataaacatgcagtctcagtgtgaaaaaaaaaaaaaaaaaa

SEQ ID NO: 234954 - DNA, 704 bp, Homo Sapiens
  misc_feature (72)..(72): n is a, c, g, or t
caaaaaagagagaagtggagcacagtaaataaacgccagcgttttctccagttcccagcacctctccggctntaggttctgtattgctagttgctttctgacattttttctcattgtttgtgctaccttggccaagaacctctttgccttctccctcgtttgtaacattgagatcctagtagcagttacttcttagggttgttaggatgacatgagatgggcgagttggccatctgccacacaagagttcccttctcactgccatcctctgcccagggtgttccccagaatctgcagggccccattggtcatcttgctgtctgcacaccttcctctctcacctcttggcacttccctcaaaaaagagagaagtggagcacagtaaataaacgccagcgttttctccagttcccagcacctctccggaactggatcccccaaactcctctgtcactttctgtgtccagcgggcccctggggtccttcactgtcttcactctgctcagcctgtgcgcttggccttggtgctgtagggactgttataagagctgctgtccgatccccatattcaatctcacagccccactttgtgtacacacaccagagccatcttcttaaaatcagatcctgtcactcctctccctaaaatctaccagtggtctaataaaatcttgaatttttagcataaaaaaaaaaaaaaaaaa

SEQ ID NO: 234955 - DNA, 712 bp, Homo Sapiens
atgtcatttttcatcggttatatgatgaagatattgtacgagacagtggacatattgttaaatgtttagattctttttgtaatccatttctcatttctgatgagttacgaagattttgctagtggaagactcagaaaatatgaaatattcagccaaccagatagagaagagttcctgttttgtcttttcaaacatctttgccttggtggagccctttgtcaatatgaggatgtgattagcccatatctggaaacaacaaagcttatctataaggatctggtgagtgttcgaaagaatcctcaaaccaagaaaatacagattacctcttctgtctttaaagtttcagcttatgattctgctggtatgtgctatccttcagcaaagaatcatgaacagacattttcttactttattgtggatcctatcaggcgtcaccttcatgttttataccactgttatggtgtgggagacatgtcttaatgttctttcagattatgtacctctactattttgtatttatcatttttctatcttaatactaacttatagataaacatatactttgcaaattaattcaagaaaaatgtaaggagcctacttagagcagaagaaagcaaacaccaagatgcctttttaaaaatttgtgtggaatactaaccggggatcaaatttcatccataataaaatctataccaaaaaaaaaaaaaaaaaa

SEQ ID NO: 234956 - DNA, 741 bp, Homo Sapiens
gaagaataagagctattattattcttagtgtcgtatcctttttttttttgtaaaaaaaaccaagtttccttctaagggaaataaacaccaaaggtaggattccaaggaaatgactcacagcggctggcagggctctggcggggctggcccgggcccccgcgctccagcccgcagcagatgtcggcccggccttccctccctcccttgccggccaaacccgctggaagcccgcggttgcgggagcgccctgcgcccgtgggacctggcggcgaggacgcctattccctgcttctgcgaccacagctgggcactcggaaagttgctagggccgaagaggcgggaggggaggaagggaagagagaggcggaggcgtggaccaggcgggcagcagcctcagcccgccgaggagtgatcctccgactgtgaaaaaccagacctctggctgcctggctccctaggaatcaagaagacgcacagactgaaaatcaagggaggaaggaacaagatcaaggatgaggattagcatctgcaaattgaactctatctaatttgcatgtttatttcttagaattgtaattaaatttgtgtaataaatgttttccatttcatttgtacacttaaaacttgggtgactgacatgcagttaagtgaatttcctttttttaaaagcaaatgtagattattcaataaagcagcaaaccaatattaaacataattagaactaaaaaaaaaaaaaaaaaa

SEQ ID NO: 234957 - DNA, 695 bp, Homo Sapiens
  misc_feature (19)..(19): n is a, c, g, or t
  misc_feature (24)..(24): n is a, c, g, or t
  misc_feature (109)..(109): n is a, c, g, or t
cgaggccgagctgggcacnttccncagggcgttcaagaagctcctgcacacgatgaacgtgccctcgctctttagcaagtctgctccctcgaggccacagcaagccggntacgaagcccccgtcctgtttcggaccgaagactacttcccttgttgcagtgaaaggcctcagctctgacggcctgaccactgcggcaagaggaccccagctggggtgcttacctccagtatgaagtgaattgcaaatcctgcttatggacatatatgatgttggagtgtgggattttaaagtttactttctacaaactctccgtagtatattcatgattcagtgtagaatgtatagactttatgtcttccaattttaaaaaaagagacagggtcttggtatgttgcccagactgttcggaaactcctgggctcaagtgatccttccacctcagcctccccagtagctgggactacggggtcgccactgcacccagcctgtgtcttccagctctaatcagaaagctgcttgtcgagggcatggggaatcaaactgaatgaacttttctctgcactgtggcaaaactgttatttttatggattttactaaatggcgttaccttttcaagatttatatgtttgtataatcataagaaaattgagccattaaagccttgttattcaatcctaaaaaaaaaaaaaaaaaa

SEQ ID NO: 234958 - DNA, 752 bp, Homo Sapiens
  misc_feature (32)..(32): n is a, c, g, or t
gaaaagcagtatggtgtgtcatgtctagcgcngaacacttccctccctctgtccttgaggttgtaatataaaaactgtgttctgtacgtgtgggtgcgattctctgacggtgctcgttcatagcacaagcttacgctgagttctgaactgtcgttcacagctgcgtgtctgcatggtgtcgcatctgttgtacctttggggaaaatttgtatgtaaatgtacagaaataaaaacgttgccccattaacagatttcctctggaatgtcttccctacctcacctgatggtatccaccgaagggcatttcactaccattaatggtgagtaataaaatcctccgtgttcattcagacctcactgcgtcactactttgaacgcctctgtaagctgtgtcttcactcgccccgaggtgggtggagggaggcctctcactctgcttcgagtcctggtcttaaaggtagtcagaggcagaggctggattaaacacacactgtttaccaagtgccactctcagaccacctgagagacggggggccatcagtaaaattaagaggaatttttttcccttgttcgtgtatgttctgctgatccgtggcctgaaggttcctagagacgtcaagaaatgaatatcttacactgtgattctgtgaggaaagactggtaacccaaaactctcttctctaatgtattttttaacgaaaatgacaatatttctttaataaagtatttataccaaaaaaaaaaaaaaaaaa

SEQ ID NO: 234959 - DNA, 759 bp, Homo Sapiens
  misc_feature (130)..(130): n is a, c, g, or t
atacagcaccaaacaggagcgccaaaggcccaaactgcactgcacatgtgtgtgttgggaaacactaccatccttgctgagttgccactgatgatgaagtcagccgctttttggcacaagctcagccccntacacctgcagcaaccccaagtgcgccagctgcggggtggcagtcgctggagaccggccagaaccagtcagatcccgtgggacctgctctgaatctttttggtgggtccactgggctcgggcagtggagcagcagcgctggtggcagcagcggggccgatcttgctggcgcttcattgtgggggcccccaaactattcttctagcttatggggagtcccaacggtggaagatccccataggatgggcagccctgctcctttactacctggtgaccttctgggaggagggtcggattcaatctgaacttagaactttcaactctgacctcgtgaccttttttggaacagcagcagcactaacttgaccttttcgttttttttttcaacttgcaataaatacatttttaaaaggaaaaaagaaaacggagagaaaaaaaggtgggtcattgacagactgtctgagcacatagttgcctcccttataacttcagttttttcgtttggaatatgaatccaaaaagagaacatatcactcttgaaatacttgaatcatgaacgccaacctagaaagacaatgtgaagcaagtacacataccatttaaatttaaacacaaaaaaaaaaaaaaaaa

SEQ ID NO: 234960 - DNA, 745 bp, Homo Sapiens
  misc_feature (18)..(18): n is a, c, g, or t
  misc_feature (50)..(50): n is a, c, g, or t
  misc_feature (110)..(110): n is a, c, g, or t
tacaggacaacaaatgtntgacagggaataaagtcgtgtctggtgtcatntgcgctagcgtgcccctcccctttcggtgttggctccaaaccttcctttccttttatgtntgtggggagtggggaaccacatcagcagcaatcatcaaccaaccaaccaatgggatctacttagtggtgaatagattggctatttaattggtaaaagttgctggtctgaccacaccacagcatgaccactgggttcatttagagatggcctccgtttccaacgttccccacaaatgtttgcttctttcccagtcaagaggggatctcgagactcccgagtggaggtcgtgagcttgcaccccgcctggctgtgtagatcgactgtatagatacatgaagtgggggtgagggccaaggggctattactgctgttgggaaatacttgcctctcgtagatccagccttaatgtttttctgacatcctagtaatagcagaccctgcacaaagtggatatcagacttaatactgtgaggagacaaaataatgagaatagttttaccaaagataatgaaatctcgcatcatgtctgcattttaccatagattggagtgcatccttaggaaactgaatgtaacaaaaacccaggacatttttggaaattgtatgctctctagcaactttgtgtgaatttttatacaaacactgttttatgagttatataaaatgttataaaaataaaaaaaaaaaaaaaaaa

SEQ ID NO: 234961 - DNA, 664 bp, Homo Sapiens
gatcagaggtctgacaccttttttgcttagacagctctctatctcatccatttattttcttctctagacttactccatctctcctcatccttttgcctttgttatttctgctcggactcacatactttcaccatatacatattttcaattgtttctttccttttctcctttgtgagcaaagcaaacaagtactgtccaaggacagccttgtgcatatttcatttgttgcatttgcttggtcatcagaggacagcagtccattaagcacactttgctgcttctactgtaaaggcagcctttaaaacatagcaatatgcacctttcaactttacatcatgtcctgaacaacatcactgtggttactcatccatcagactatctgtatatataagtactgaatcagtatttattaagtaaatgatgtagcactgtagtgattaggaatcattagcaaatgtgttgcttcatgccttggtgatggatgccagcatgttaaactgctgaagtttgattttctgatgcaaaatatatcttgtaaaatttagaccactcctttaatgcagaccaaaataaggcacagctttaattcattattgaatgccttaaatgtcccaggtattgagaataaatgaatatgatacaaatgaaaaaaaaaaaaaaaaaa

SEQ ID NO: 234962 - DNA, 633 bp, Homo Sapiens
ggcacgagggagatctgcaagaggttggccccagactcccggctgaaccctcatcgcagcctcctgggcaccggcaactatgatgtcaatgtgatcatggccgctctgcaggggctgggcctggccgccgtgtggtgggacaggaggaggcccctgtcccagctggccctgccccaggtactggggctgatcctgaacctgccctcgcccgtgtcgctggggctgctgtcactgccgctgcgccggcggcactgggtggccctgcgccaggtggacggtgtctactacaacctggactccaagctgcgggcgcccgaggccctgggggatgaggacggagtcagggccttcctggcggctgcgctggcccagggcctgtgcgaggtgctgctggtagtgaccaaggaggtggaggagaagggcagctggctgcggacagactgaccatggctgaccatcggcgcccacagcgcagtccctgcgcatccccctccggctgcgcacactgcatgcctgggaaaggccagcacttcatggaccctggggaggccccgccccctccccacacccctgctccccactgccgctgctgcctcaataaatctgctgatttgcaaaaaaaaaaaaaaaaaa

SEQ ID NO: 234963 - DNA, 700 bp, Homo Sapiens
  misc_feature (238)..(238): n is a, c, g, or t
tcagcagggccggagacctagatgtcattgtttccagagaaggagaaaatggacagtctagagactctggagctggataactaaaaataaaaatatatgccaaagattttcttggaaattagaagagcaaaatccaaattcaaagaaacagggcgtggggcgcacttttaaaagagaaagcgagacaggcccgtggacagtgattcccagacgggcagcggcaccatcctcacacctntgcattctgatagaagtctgaacagttgtttgtgtttttttttttttttttttgacgaagaatgtttttatttttatttttttcatgcatgcattctcaagaggtcgtgccaatcagccactgaaaggaaaggcatcactatggactttctctattttaaaatggtaacaatcagaggaactataagaacacctttagaaataaaaatactgggatcaaactggcctgcaaaaccatagtcagttaattctttttttcatccttcctctgaggggaaaaacaaaaaaaaacttaaaatacaaaaaacaacattctatttatttattgaggacccatggtaaaatgcaaatagatccggtgtctaaatgcattcatatttttatgattgttttgtaaatatctttgtatatttttctgcaataaataaatataaaaaatttagagaaaaaaaaaaaaaaaaaa

SEQ ID NO: 234964 - DNA, 706 bp, Homo Sapiens
  misc_feature (82)..(82): n is a, c, g, or t
atcagcagcatggaaacgaactaatacaatcatagtttttaaaaaccaatctaaatgtaactattgaacatgattagctgtntcatccctagtagagtgacagaaggaaacatccatagacaggagtaataagaaaccagctaaacttctaaaccatttttaaaggatgcgtgtgagctggcataacctacctactctttcctatgggcctctactgagagcatggaggtaatacatctaatacactgaagaccagggcaagagagctggaagaaatccctcttaagcactccaggccttcactgagtatgaggtgctggtctccaaaggcagagggcaaggcaaggcagagagggatctcctggggcacagacaactgacaaaagaaacacttggattgttgtataagaggagtgagctttgtaaataccacgttagctggcctgctgtggaacagaatgcctatgaatgacagtagtcaggtagtggatgaacactgatctgagagcctgtaaaagaaactctttggaatgataatgtcatctagacctttgatacgcaaagtgtgattcctggacagatgtattggctttacctggcagcttgttggaaatgtaaaacctcaggcctcaccccagacctactgaattatttatattaattaaaattaaataattgttatttcaacaaaaaaaaaaaaaaaaaa

SEQ ID NO: 234965 - DNA, 779 bp, Homo Sapiens
  misc_feature (120)..(120): n is a, c, g, or t
cagttgcaggtgaagacgtggtaccagaatcggaggatgaagtggaagaaaatagtgctgcagggcggcggcctggagtctcccaccaagcccaaggggcggcccaagaagaactcaatnccaacgagcgagcagcttactgagcaggagcgcgccaaggatgcagagaaaccggcggaggtgccgggcgagcccagcgacaggagccgcgaggactgagggcggtatacggtgcggggcctgggatgcccgcgccacccgcagccccctcactcggcggaaacccgcgagccggcccttccgcgtccaagaagtttacttcctaagcctttttattatgatcttgaatgcggacaattggggccaaacgaggaaggacacagacccaaaagccagacccaggtcccagcgcgcttctgggctctaacctgggagactcgcatccagcccggcggaagctacagtctctaccctgagctccgtggcgcagagcgctccacgcgtattcacgccccgctcctcgcctgcacccccaccccgtctggggcctgccctcccggccggggagcctccaggcacacacccgcttttggacgtcggggacccagcggttgggctcaggccacaacggcctgagattgccccggggcaacccgtcggctcggcctggaggccgggtccccgatgtcgctggggcccctaccccctcttgcgaagacggtgactttttttccaataaaatattttatgacacaatcgggaaaaaaaaaaaaaaaaaa

SEQ ID NO: 234966 - DNA, 729 bp, Homo Sapiens
  misc_feature (80)..(80): n is a, c, g, or t
  misc_feature (99)..(99): n is a, c, g, or t
cggcccgcggcgcggtcgtcttggacgctggggcaggtgtgccctctgctgcctcccgtacccggcctgcggagggaggngacagctggacccgcaggngaggtccctttcttcctgaccaccgattgagacgtctccaggaccttaggggcagatccgttttctcactgttggactctacctcactggtctggaagtcctccgaagacattatttttccaaaggaatttggtttcgtgcttgtgtaataaagccagaatttacttgttctttatctccccctttttctatttcactgtcacccctctttgtggacagaagttcgaacatgtggtgttgcactagtttgtgctcagggtattctgaagcccactcgtttcctaatttttactggattccaaagctttgatcgaggatattttttaagaggttcaagcttgtgactgttagtagtgcaaggatttgtatgggctcagtgattacaaacaaagacatgcaaaatacaactgtttaaacattttcaaggtatttttaaaggttttgtattgaaacaatgtttatatttactgagctcctaaaaatggtagaatacacatgaaaacttttgtttaggaaaagttaacttgttaaattcttttgaattgaataaaaaaatgcattgaaaccatatggtgtgtgattaaaaaaaatgaataaattgtgaagaactggaaaaaaaaaaaaaaaaaa

SEQ ID NO: 234967 - DNA, 657 bp, Homo Sapiens
gcacttgcaggctgagtcagtcagccctcaccttccccctccttcctgggctgcagagtgtaacagaatgggaaggcactgtgggaaggaagtcaggaatcttgctgctagccacgccttgcagtgacttctcgtctgggagtgggcactgagtcctctcagtaaactaataagacttgcacctgacaaaggtcaagatatgtagggaacacagtgtatgctaggctgagacctatggtggtggcaggggtggctgttgagcctgaacttccagtactcctgcccttccttctgtttacctggcttggcctacagggggcacccctggtcttgatgcctcaagcccagcatttctgggtcccctctgcaagctcagagagcagggaggcttctggtagtgctcttgatgctcctgtgtctggttggcacaaagatcctgtgtaacatgaaatgaaaggtgcatcagcttgggggctgggaaacctgcagtatgggtttactccgtccctatcactggtgtggctgtgggcaaaccacttattgcctgacctacctcacagggatgttgtgagggtttgatgagagaatgaatgttaataggaattggaaaattcaaagcattaaacacatgtaaacaggaaaaaaaaaaaaaaaaaa

SEQ ID NO: 234968 - DNA, 600 bp, Homo Sapiens
tagtcggtagtcgattgatgggaagtgttcaaaatcattcgatgtggtgacaaggtttcaccaggtactgccttctaacttgagctggccatttccacatgtcagataggaccaacttgccttttaactacccgtgtgatacttaaacactgttgccggtatcacagcttttcttcaaaacaggaagcaacgagaatgagggcattccagtagcaggagacagcatgcatagagatgctgatgaagaaagagcctagcgcacgtgggaaactgcaaaagttcagactggttggaatgctggaaatgttgtgaatgacaggagatgaggctggcgagaaaacagaggtcagattgtggaaggctgtcaagccaaagactttgattttattcttgagattgatgagatgtgtgtaatccaggagtgtgcaaaacaatctgtaagggttcagaaaacatactgcttctatatatagttacctttgtcttaacttgaaaatttcaaattgtgtaggagttacaatgtgtgtaattgttattatagtactggatccaaataatttataaataaataaatatagacataaaaaaaaaaaaaaaaaa

SEQ ID NO: 234969 - DNA, 727 bp, Homo Sapiens
caggcttagtaattctgacttttgaaatctcctgtcgtgaacaaatctacactgcactttattcttgccccgtcctggaattcagccactcctgcactacatttcttaaggtgaagaagtgaaagacgaagacaccaatccaagtgaacgtgtgttattctcttctataatgctattgtattatattccctcttttttttaaattctcttgatttctctgcacaaaagagggaattcttccaaagcaacggaaagtttccttgaaatacttttatctagtcacacttacatagtgtaatgtctctctcttacagcattgtacagtttgggatttgtttttaatcctgtggaaaatgtcctaacagggctttggtgtatctttgttccaatttctacattgcttggggagggggagaagctttctttgtattaaatgaaatacacctctacttcattaaataaatagacacctcaaccattagttgctaatgaaacaaaaatctaagtaaaacatctaactatccaaatactacattttctctacctttgccccaaaatgtgcctcatctccctgcacctccaaataatatttctagtgttttcattttattagttttgcaatgtcactgtccagatagaattattcgatgacttaaaacaactttcgtaagattttcaagccctaaattaaaaaatcatatttcaatacaaaaaaaaaaaaaaaaaa

SEQ ID NO: 234970 - DNA, 771 bp, Homo Sapiens
  misc_feature (88)..(88): n is a, c, g, or t
acatgatgaatgatattaatgagaaaatggagaaaaagcgcaaatggtttggcaaaagcgagaccatacagacagattacattgttantatggatgaactctcctccttcattggggcaaagcccaacatcccatggctgtttctcacagatcccaaattggccatggaagtttattttggcccttgtagtccctaccagtttaggctggtgggcccagggcagtggccaggagccagaaatgccatactgacccagtgggaccggtcgttgaaacccatgcagacacgagtggtcgggagacttcagaagccttgcttctttttccattggctgaagctctttgcaattcctattctgttaatcgctgttttccttgtgttgacctaatcatcattttctctaggatttctgaaagttactgacaatacccagacaggggctttgctatttaaaaattaaaattttcacaccacctgcttttctattcagcatcttttgcagtactctgtagacattagtcagtaatacagtgttatttctaggctctgaaatagccactttaagaatcatgtcatgatcttaagagagcactaatcatttctgtttgagttccactaacacttcaaaatcagaactatgttctttatatctaacttaaatcatttcctgaaacattttgacatgattcctttttccttttaaacaatgtatgaaagatgtattttaaatctaaataaagagcaaattaagcaaaaaaaaaaaaaaaaaa

SEQ ID NO: 234971 - DNA, 742 bp, Homo Sapiens
tgtgttgccagatccagtcctttctaataccctgagtcaacacattactcctgcaggtcttaggctacaatgcaggtcccttgagggccaccaacatggaggtaggcagtttctaggactgtccccagtacatctcaccacccacagccctttttttgccttgattcgagcctcaccctggccttttggcttcccctgcctgagagagacctgaggaggggacagagcccagcccctctcctgtggctgagcaggcctctgtgtccatgacacctgtcttccgggcctgggggctgtgggtgtatgtcctccctactggcttccccggcccctgctgcatgatgctcttggaactcttccccaaggagtcagtcccccaggcctatcaggggatccttttgtatctgcactttgggttttagtttcaaagctccatcaggtacagcttgcatttcaggatgtgtggaaagctcgggtgagggctgccctggttcatcatagctccaccttcctcggaaggagtgggctgttggagaccccccatccatggcacactagctcagcactgcatttcccgagatgattcccaagacagctggtgcctcctggctttcctgtgccaggccaaggggcaccacagaggaccctggatcctttgcctcttcttggttgaaggatctctatgtatgtgtgtatataaatatagttttttatctatatatataaaaaaaaaaaaaaaaaa

SEQ ID NO: 234972 - DNA, 686 bp, Homo Sapiens
aggggcagggctgggctgatggcagcatgtcctggcctctcctagctccctgtggaagctggacctgtgcaccaccgtcctgccacagattgagaagcttctgcagagcaagtatgagagctacgtccagacgggctgcacctccctgaagctgatcctgcagcggtttctgcccctcatcacagacatgctggcggccccaccctctgtgggtgtggatatcagcagggaggagaggctgcataagtgccggctctgctacaagcagcttaagagcatcagcggcctggtcaagagcaagtcaggcctgagcggccgccatggcagtaccttccgcgagctgcacctgctcatggccagtctggactgaggaaagcagtgggcaggggcgctcggcagcccacagggcctggcctcagcccccactcctgttccttgtgcacccactggcccatgagcctctgcctggcccctgctgctgtcctgtggccgtcctggaggaggtgatgctggtccctggccacctctacagccctgaactcttgagacaactctctccagcaatagctgcccagctttgcccaactgttgcttcttggggcagcgaactgagccctggggctgctgctgtaatttataaggcaaattttattaaatttgtaactattaaaaaaaaaaaaaaaaaa

SEQ ID NO: 234973 - DNA, 501 bp, Homo Sapiens
ggcacgagggttgtctctgaaccaggagagaaggtactatacctttcaaatccccagggcagacacacccccacccagcccctatttggacctaaactgtgccatttgaacagtcacttccaagctcagtctaaatgaaaccgaaacgtgaccacgcacaaaggcagtcactgcctcgaggggtgcagaccgcagaattttcacagcaggggctcttggaactctggaaacccccttcttaaatttgggaggaggagtatgcctttggtgtccccctcccaaggggcaattctgaaccccatctttggcaggcatacatatttcactgtttccaaagctatctactctgccaaacaacacccagtcctattccaaactctcaacgattctatcttgttcctgtttttctatgtatttatggttgccgtttgtgtctgatttgattttactgttttttccctgattttatggagtagcattgtgaaaaaaaaaaaaaaaaaa

SEQ ID NO: 234974 - DNA, 727 bp, Homo Sapiens
  misc_feature (23)..(23): n is a, c, g, or t
tgcaacagccaactcgaaattcnccgtgaccagtcttgtggacaccaggttggtgaatcagaatgcaagcaggtgggaaagttttgatgtcacccccgctgtgatgcggtggactgcacagggacacgccaaccatggattcgtggtggaagtggcccacttggaggagaaacaaggtgtctccaagagacatgttaggataagcaggtctttgcaccaagatgaacacagctggtcacagataaggccattgctagtaacttttggccatgatggaaaagggcatcctctccacaaaagagaaaaacgtcaagccaaacacaaacagcggaaacgccttaagtccagctgtaagagacaccctttgtacgtggacttcagtgacgtggggtggaatgactggattgtggctcccccggggtatcacgccttttactgccacggagaatgcccttttcctctggctgatcatctgaactccactaatcatgccattgttcagacgttggtcaactctgttaactctaagattcctaaggcatgctgtgtcccgacagaactcagtgctatctcgatgctgtaccttgacgagaatgaaaaggttgtattaaagaactatcaggacatggttgtggagggttgtgggtgtcgctagtacagcaaaattaaatacataaatatatatatatatatatattttagaaaaaagaaaaaaaaaaaaaaaaaa

SEQ ID NO: 234975 - DNA, 791 bp, Homo Sapiens
gaatgagtcagcgaaggaaagcagagtggagagaaaaagagagactgagtcctgatgacatcatttatttacctagacctagctgcttgtgaatagagccctactgtgctgaatagcttctgtctgctcttttctattctgctccctgctctgtgaggtaggttcctttgctctcttgcttttggttgggttcaacaaatgggaagcaccagtgggagattagaagttgagaggaaaatgaaatgatgttatttatttccctggctcctttcctgccatgtcatcatcagttggctgtgttcctctactaaatagtaccttatcaggaatcctatctcttctgttcccaagcagttaccccagttacctcactaggtttagttcctgctccctccctttaccccttttcacttagggttggtaatagcttacagttattactagccccagtatagttcactacaacttgttgctttacctaaaccctgctcatacatttgtaaatactgtagttgttttattacactcttctcaaatgtccccacttgaaatagccttctatttcttttggggactctgataaattcacctgtttgggtgaaataatagcacatttcctgaagtatatacagtgggacacatgatgttttatgggggaaagagttcttggtgaaattagtttgctgtacattacgttgtttccctcccagggattcagaaggcaaaacatattaaaggttctgaaaagtcctgaaataaacattttgaactttaaaaaaaaaaaaaaaaaa

SEQ ID NO: 234976 - DNA, 557 bp, Homo Sapiens
ccgcggtctgcgggcgccccctctgcggggtcctggccacgtgcttctgcgctacgacagcgccgtggactgcatctgccagcccagcatcttcgtcatcttccacgacacccaggcgctgcccacccacctcatcacctgcgagcacgtgccccgcgcttcccccgacgacccctctgggctcccgggccgctccccagacacttaaccgaaggggccaccctctggcctcctgcttcccaggctcccagctccgcacaggctgatgctccccgcccccaactgtggccgcctgagctgtccccggggacgcccctgcctccctctgcgggctccagaaggcggtgtgggggatggcggtcagcagcggccgaggggggccgggctaggtcccagcctgggccgaccccaccaccaggggtcagcagagcccaggaggcgacaccgcccgcccgccgctcccagacctcgcccgagtcggctctgttgtttgaataaacgtgaacgtgaacccaggcggaagggacccgggaactctgaaaaaaaaaaaaaaaaaa

SEQ ID NO: 234977 - DNA, 729 bp, Homo Sapiens
aaatcatgttactaaaaaatcagtgtaaagtctgtttaaaataaaaaagaatttttctatgtctgtatatcttttgtgaatatttattaggatttcttattaaaaaagtgcaatattaataattgtacattgtcatccagaaacaaaactattggggggactttattaactaacttcctgcagttgtgttcctgtaaactcagtagtgattattatatttttcctatttttaatagaacctggtgtttaactctggatccattcactgtacaggatgtgttgtaaaaactaacatgggatgctgaggcagtaagagggaattcatttgtggcataatagttatgcatggaatgataaagacagacaaattccatactactactaatgtggttaattatttctagttcgatagtgattgaaaatcagtggtcactatttacatttcctaaagagcaagcatcctccagctccatgttgggttggagcagttggcagtgggtctcagtgagctggcagaacctaggtttgggtgggaagcagaatgctcgttgcatgaaatgaatgtacatttaatgtttgttctgtgaattgcaactcagcagcaccacaagacaatgaaggctgctggctaatgtggaaggaggcactttctcctctaaaacacaaaactgtatttgtattttttgtacagataatacagcttatttatttaaaaaaaaaaaaaaaaaa

SEQ ID NO: 234978 - DNA, 699 bp, Homo Sapiens
atgaccgaaaacacaaaggacagtaagtcttcattccatggagtgactagtcagtcaacaaaagtaaaaatgcctcatttcatcaaatcaacttttccagtaaaggccagagttcaaatactgtaagcatgagaatagaatggagctgtcactaaagagagtacaaggtcaagaaccagaaatgtctccaagctttctgcagtgtgagcaaagatagcctcgactggacaaataacacttctgaccccgtggtacccccacatgactggtatgctgcccctggactttgtgtctctctaaaatcactaccattcactgagatctgaccaggtgaggcactcaccaacgctacagaagcaacacacaggtttccaatcctctcaaacacagatacaacccccatcctccaatgtgcatggaagaactttaaatctcagagagagtaagcaaaatcacacaatttagtggtttagacctattccaaagtcttcttttcactgtaacacaaaacccaacagtatcccacccaatttatgaagtcaaatttgtttgcttaaaaaaaaaatcagctgggcatgggctcacacctgtaatcccagcactttgggcctaaacaggcagatcgcttggtctcaggagctcgagaccagcctgggtaacatgacaaaaccctgtctctacaaaaaaaaaaaaaaaaaa

SEQ ID NO: 234979 - DNA, 632 bp, Homo Sapiens
  misc_feature (111)..(111): n is a, c, g, or t
gaggagtggccagaagaaggaggtagtgtaatacgcagagccttttcttcccggtatactatagcatttgccttccgttctgaagctatgtggcttgccaagtccttcacngaaatgagccacgctgatgggtaatttgtggagaaatatcttaattttgatttccttaaggaaaagcgaaaagcagagttacagtcacaaatcccctgaacgtactgctgtcaccagtgtcattgtggctgcgggaaggagatctgaacctaacttttcttactccctgaggagtttcttgttggacccaatggggtccatgaagacactgatggggatggaagcagacccatggcatcaactgcagtgtttctgctgtgttcatcttctcagaaaactctgtgacccagttctttgggagcttttgtcagtctctttcgtgccatctaccttcgaaggaaggaacacttttagagttacaatgatgaggagaggagcgggacaatactcaatcctataccaagtcgattgagattagtttcctactgggagtaagtgcctggccctgctactcctatttgaatgctattaatattacctagccttttacaaaggatactttgaaaaaaaaaaaaaaaaaa

SEQ ID NO: 234980 - DNA, 591 bp, Homo Sapiens
ccatcagctccgaagccatcctcagctccatgtgcatgaatggaggggaagagaagccttttgcctgcccagttcctggatgtaaaaagagatacaagaatgtgaatggcataaagtatcacgctaagaatggtcacagaacacagattcgtgtccgcaaaccattcaagtgtcgctgtgggaagagttacaagacagctcagggcctgcggcaccacacaatcaatttccatcccccggtgtcggctgagattatcaggaagatgcagcaataacatgctggtcataactgtgccaagaaatcctcaccagcagttgctgattttgaaaacagccaccttttttcaggggaagcattcagcaaccctttaaagaaaaagaattaaatgcatgctttaaattttttctgtaattttggaatgatgtatctttgtagagttaatgattttgtacatttgcacatgtaatcatcatacccattttcattactttgatataaggtgctaaacaaaaaaagctttaggtttttcagcacatttcccccaaaacaaaataaaattgggggcatgttgcaaaaaaaaaaaaaaaaaa

SEQ ID NO: 234981 - DNA, 761 bp, Homo Sapiens
gagagccaggacactctccgcagatcatctccttctttcttgcgctgacgtcgactgcgttgctcttcctgctgttcttcctcacgctccgtttctctgttgttaaacggggcagaaagaaactcctgtatatattcaaacaaccatttatgagaccagtacaaactactcaagaggaagatggctgtagctgccgatttccagaagaagaagaaggaggatgtgaactgtgaaatggaagtcaatagggctgttgggactttcttgaaaagaagcaaggaaatatgagtcatccgctatcacagctttcaaaagcaagaacaccatcctacataatacccaggattcccccaacacacgttcttttctaaatgccaatgagttggcctttaaaaatgcaccactttttttttttttttgacagggtctcactctgtcacccaggctggagtgcagtggcaccaccatggctctctgcagccttgacctctgggagctcaagtgatcctcctgcctcagtctcctgagtagctggaactacaaggaagggccaccacacctgactaacttttttgttttttgtttggtaaagatggcatttcgccatgttgtacaggctggtctcaaactcctaggttcactttggcctcccaaagtgctgggattacagacatgaactgccaggcccggccaaaataatgcaccacttttaacagaacagacagatgaggacagagctggtgataaaaaaaaaaaaaaaa

SEQ ID NO: 234982 - DNA, 755 bp, Homo Sapiens
  misc_feature (46)..(46): n is a, c, g, or t
ttcctataaattgcttcgtgtaagcaagtacataaggaccctcctntggtgaaatccgggttcgaatgaatatctcaaggcaggagatgcatctattttaagatgctttggagcagacagctttagccgttcccaatccttagcaatgccttagctgggacgcatagctaatactttagagaggatgacagatccataaagagagtaaagataagagaaaatgtctaaagcatctggaaaggtaaaaaaaaaaaatctatttttgtacaaatgtaattttatccctcatgtatacttggatatggcggggggagggctgggactgtttcgtttctgcttctagagattgaggtgaaagcttcgtccgagaaacgccaggacagacgatggcagaggagagggctcctgtgacggcggcgaggcttgggaggaaaccgccgcaatgggggtgtcttccctcggggcaggagggtgggcctgaggctttcaagggttttcttccctttcgagtaatttttaaagccttgctctgttgtgtcctgttgccggctctggccttcctgtgactgactgtgaagtggcttctccgtacgattgtctctgaaacatcgtggcctcaggtgccagggtttgatggacagtagcattagaattgtggaaaaggaacacgcaaagggagaagtgtgagaggagaaacaaaatatgagcgtttaaaatacatcgccattcagttcgttaaaaaaaaaaaaaaaaaa

SEQ ID NO: 234983 - DNA, 626 bp, Homo Sapiens
gctgtgatcttcaagaccaaacggggcaaggaggtctgtgctgaccccaaggagagatggtccagggattccatgaagcatctggaccaaatatttcaaaatctgaagccatgagccttcatacatggactgagagtcagagcttgaagaaaagcttatttattttccccaacctcccccaggtgcagtgtgacattattttattataacatccacaaagagattatttttaaataatttaaagcataatatttcttaaaaagtatttaattatatttaagttgttgatgttttaactctatctgtcatacatcctagtgaatgtaaaatgcaaaatcctggtgatgtgttttttgtttttgttttcctgtgagctcaactaagttcacggcaaaatgtcattgttctccctcctacctgtctgtagtgttgtggggtcctcccatggatcatcaaggtgaaacactttggtattctttggcaatcagtgctcctgtaagtcaaatgtgtgctttgtactgctgttgttgaaattgatgttactgtatataactatggaattttgaaaaaaaatttcaaaaagaaaaaaatatatataatttaaacctaaaaaaaaaaaaaaaaaa

SEQ ID NO: 234984 - DNA, 715 bp, Homo Sapiens
  misc_feature (35)..(35): n is a, c, g, or t
  misc_feature (91)..(91): n is a, c, g, or t
gagctggcccgttttcctcgttcctggacactgcntatctgggcacactgatttgtatgagccaacctgctattcttatattttctatatnccaagacaggttttacttgattgatttacaagtttttacatccacctagagagtcagaatctcctttggaaggtaactgcagtccagaacattagactctaagggcatatacttccaagcagcctggccacttctctctgggtccctccatgtctgctgagagcctgtgcttctcacctgcacttcttcacccggtttcatgagtgtgctttgctgactgtactgggtagggaaggagctggctcttaaacctgctggcaaatgacttcagttttaaattgatcctgagggagatatatttacgtctgagttaaaataatgaatttacatatatgtgaaaatatttcctcctttattgatggtatttaaagtcaagactggagcttattttaattgagccagaatatttgcatttttcatccaatgtggttatagaaggcatttctccttagaaatatgttaccttggtttcttttttctggaattggtaaaatttaggcaaatttattatttcagaaatagaatcagtatatgcagtgttggttatttggtaatttttatggtaattctgtcggaataaatgcttcctatgtacttggcttcaggaaaaaaaaaaaaaaaaaa

SEQ ID NO: 234985 - DNA, 638 bp, Homo Sapiens
cagcaggaaaacagagcagcctgatcttacacggtgctgatttcagcactaaagatgctgataatgacaactgtatgtgcaaatgtgccctcatgttaacaggaggatggtggtttgatgcttgtggcccctccaatctaaatggaatgttctatactgcgggacaaaaccatggaaaactgaatgggataaagtggcactacttcaaagggcccagttactccttacgttccacaactatgatgattcgacctttagatttttgaaagcgcaatgtcagaagcgattatgaaagcaacaaagaaatccggagaagctgccaggtgagaaactgtttgaaaacttcagaagcaaacaatattgtctcccttccagcaataagtggtagttatgtgaagtcaccaaggttcttgaccgtgaatctggagccgtttgagttcacaagagtctctacttggggtgacagtgctcacgtggctcgactatagaaaactccactgactgtcgggctttaaaaagggaagaaactgctgagcttgctgtgcttcaaactactactggaccttattttggaactatggtagccagatgataaatatggttaatttcatgtaaaacagaaaaaaaaaaaaaaaaaa

SEQ ID NO: 234986 - DNA, 625 bp, Homo Sapiens
  misc_feature (26)..(26): n is a, c, g, or t
gagtactgaaagatgttcagtctgtntaaaaacacaaaaatcaagcctggtgaggtggtactcgcctgtaagtcctgaggctgagttgggaggatggcttggacccaggagttcgagactgcaatgagctgtgatcacaccactgtactccagcctgggggacagaacaagaccctgtctttaaaaataaaaacaaaacccataaatagcagtcgtcacatgcactcagatttccacaaatataacaaaaaatctgaacacagccaacatggggacctgggagtaatacagcctgtgacagagaggcctctagcggttatatcacgtaaaatctcgggagttgtgctttaaatgacataaggaataagaaaatgtccaacccagtgggggcttcaccttggcgttctagacttctgtgagcagcatctgcatcttgtttgtttctgaatcagtttctgttgattcatttttctcctgattgtggatcgcattttcttgctttttagcctgtccggaaatttttgcctggatgcgcacattgtaaatagaacactgttaagtgtctgtaatttttaggagggaaagaataaataattggtgggaaaataaaaaaaaaaaaaaaaaa

SEQ ID NO: 234987 - DNA, 672 bp, Homo Sapiens
ccattgtcttaggacttgtgacattacatgaacattcaaagcacttgaaaaaagacaaaggatccctaatgtccctgaagaggaaattaaaatacaaagttgtttttcattagcaaacttcttactttcttacagctaaacttggtagcttagtgaagtacagctgcttgtatggaggagctggggaaatatatttgctttgaaacttttttatttttacatctcagtcttgctagcaagcactacttggcttagaatctgtcatatccataaaggaggagctcatgtctctagtcctggcccttcaactcagaaggttcttctatactttccttctctcaggactcttatagcccagactttaaacatgaagctgcataattttcatcacttcttactctgccgcatcctctttgcccatgttattaaagtattatctaatactttgaagtttacctgaagaacctctttgtgtgtacttagtaatacaactttttttcctgtcccaacaccttttaatacagttgaatggataaaaacatggatacaaacacatggatatagttatcactgaagcagtgtgacataaaataatacctatgtatacaacactcctctgtaaatagcaaatgtaaagtaaaagatacacaacagaaaaaaaaaaaaaaaaaa

SEQ ID NO: 234988 - DNA, 731 bp, Homo Sapiens
  misc_feature (32)..(32): n is a, c, g, or t
  misc_feature (37)..(37): n is a, c, g, or t
  misc_feature (128)..(128): n is a, c, g, or t
tccgcatccgcaccatcatgaagcacgatgcnaccangaccgagaagctggagaagctcatggtgcgcattggcgtcttcagcgtgctgtacactgtgccagccaccatcgtcatcgcctgctacttntacgagcaggccttccgagaccagtgggaacgcagctgggtggcccagagctgcaagagctacgctatcccctgccctcacctccaggcgggcggaggcgccccgccgcacccgcccatgagcccggacttcacggtcttcatgattaagtaccttatgacgctgatcgtgggcatcacgtcgggcttctggatctggtccggcaagaccctcaactcctggaggaagttctacacgaggctcaccaacagcaaacaaggggagactacagtctgagacccggggctcagcccatgcccaggcctcggccggggcgcagcgatcccccaaagccagcgccgtggagttcgtgccaatcctgacatctcgaggtttcctcactagacaactctctttcgcaggctcctttgaacaactcagctcctgcaaaagcttccgtccctgaggcaaaaggacacgagggcccgactgccagagggaggatggacagacctcttgccctcacactctggtaccaggactgttcgcttttatgattgtaaatagcctgtgtaagatttttgtaagtatatttgtatttaaatgaaaaaaaaaaaaaaaaaa

SEQ ID NO: 234989 - DNA, 746 bp, Homo Sapiens
atgcaaggagtaaagtaaaccatccagaatcaaagcagcaaccacatagttcaaatcaaagatcaaggtgaattttttgtatcactgcctgtggaaatctatcctcatcagtcattgcatttttccctgcctatacctgtgctcctttttcttactgtgttttcagtcacttcctttctgtgaaaggttgcttagctttttttttgacatttgttgttctttatataaaaataacagattggatagatgtgtacatttggtgtttgaaattctctgaaaatcccattaggaaaccaggtgtgaaaagggctcagtagcttctctgagtggcgtttttagctgactggaagtgcttaatctggatcgtctttttttttttttttttttttcaatattttaaaaggagaatttaaatactgtgcttactgtgaaatatatcagttggtgagccgggcgtggtgggtcacgcctgtaatcccagcactttgggaggccaaggcgggttgatcacccgaggtcaggagttcaagaccagcctggccaacatggtgaaagcctgtatctattaaaagacaaaaattagctgggcgtggtggtacatgcctgtaatcccagctacactggaggctgagtcaggagaatcacttgaacgtgggaggcagaggttgcagtgagtggagatcgcaccactgccctccagcctaggtgacagaatgagactctatctcaaaaaaaaaaaaaaaaaa

SEQ ID NO: 234990 - DNA, 732 bp, Homo Sapiens
agagatattcaaaactcagaagcatcagcaatgtttctcttttcttagttcattctgcagaatggaaacccatgcctattagaaatgacagtacttattaattgagtccctaaggaatattcagcccactacatagatagctttttttttttttttttttttaataaggacacctctttccaaacagtgccatcaaatatgttcttatctcagacttacgttgttttaaaagtttggaaagatacacatctttcataccccccttaggcaggttggctttcatatcacctcagccaactgtggctcttaatttattgcataatgatattcacatcccctcagttgcagtgaattgtgagcaaaagatcttgaaagcaaaaagcactaattagtttaaaatgtcacttttttggtttttattatacaaaaaccatgaagtactttttttatttgctaaatcagattgttcctttttagtgactcatgtttatgaagagagttgagtttaacaatcctagcttttaaaagaaactatttaatgtaaaatattctacatgtcattcagatattatgtatatcttctagcctttattctgtacttttaatgtacatatttctgtcttgcgtgatttgtatatttcactggtttaaaaaacaaacatcgaaaggcttatgccaaatggaagatagaatataaaataaaacgttacttgtaaaaaaaaaaaaaaaaaa

SEQ ID NO: 234991 - DNA, 713 bp, Homo Sapiens
  misc_feature (31)..(31): n is a, c, g, or t
  misc_feature (212)..(212): n is a, c, g, or t
tgacaagaacgagcggttgggaaaagtggancattccagcaggcacgactgtggacacgaaaatcacccaccccaccgagttcgacttctacctgtgtagtcacgctggcatccaggagacaagcaggccttcgcactatcacgtcctctgagacgacaatcgtttctcctctgatgagctgcagatcctaacctaccagctgtgtcacacntacgtgcgctgcacacgctccgtgtccatcccagcgccagcatactacgctcacctggtggccttccgggccaggtaccacctggtggataaggaacatgacagtgctgaaggaagccatacctctgggcagagtaacgggcgagaccaccaagcactggccaaggcggtccaggttcaccaagacactctgcgcaccatgtactttgcttgacatgttttagtgtttagcgattgtgtaccgagtgggattcacgagaccagctacactcagaccaacagatggccagcccttccgtgacagccagcatcgaacatgagacgtcattgattttattagattctccgttttccagaatgccttccgtcccagatttcaaacttggattttgaactgcagacctgtatgagaacccaatgtcataggaaatatggtttgctaaaatctataagctgcttattaaaacagagtcccgtgtgtcctaaaaaaaaaaaaaaaaaa

SEQ ID NO: 234992 - DNA, 467 bp, Homo Sapiens
cagtgacaccaacatggctcaccacagcctcaacctctgaagctcaggcgatcctcccaccatagccttctgagtagcttgaactataggtgcacatcaccacacccggctaatttttggaatttaatgtaaagacaggattttgccatgttgcccaggctggtctcaaactcctggtcgcaagtgatgcgtccgccttggcctcccaaagtgctagaattacaggcgtgagccatcctctctaaattctagagaaagaatttggaagggctaaatttccttctctcccgtacctcctcggaattttaccctcttcttatcatccccctatattttctatacttcatctactcaattggctatcatgcagaactaaagtcacttttagtattatttacacttattggcaattgtgtatttcccattctcgtcgagcgggggggaatttagtagtagtaggcggctgc

SEQ ID NO: 234993 - DNA, 716 bp, Homo Sapiens
tcaaatcctgacgtcagtgacccacctgccttgcctcctcaaaatgttggattacaggtgttagccactgtgcctggcctgtattgtattttaataggtgattattggttttcatattaagatagtgaaatctagcgcaaggatctcaaaaatttgtttgatgattgaaggaatattctgaaaattacctagtatagatgttaggataaagagcagacccttttcaatataggtgagaggagaagttggagggtgtgatgatactcaaaagtttttcactgaagagaaattggggcgtgcagtaaacatgtaaaaagattcttactaataagcaggtggatgcaaatgaaaatcatcatggaaggttatttttaaaactggttctatcattgcctcactttatatattacagagttatacatactactttgtaagataacttttcttttcaaaactgaagtcaatgtgatagaatggtgagcattattttggaaggccagactaggaggaggtgggaggaagaagtcagactcagcctgtgaacagacgctaaccttggcagaagccaaaacagtcagacagtgttgtctaaaaatgatcattcaagaagagcgaaacagcaaggtgatttgtgaaagagatttattagaaaatgaaacacatttatacctctgttcaataaaaatctgcttttcgtcaaaaaaaaaaaaaaaaaa

SEQ ID NO: 234994 - DNA, 655 bp, Homo Sapiens
  misc_feature (66)..(66): n is a, c, g, or t
attcggcacgaggtttttgatgccatattttcagtgttacacttttatggcttttaattttcgatntgacagatgtaagaagcagcatgaatagtttatactgtgtttttcagagactgaatgccaagagaactcggtaaatgtttattcttctcagctttctctttaaattcccctaaatagcgccccatttgggaacagagcaagagtgttgaactgaagaccaaaatgccctcaaggtgtaaaataatccgagggggaatatttgctgggcgtcaggaaagactcagatgaaatttcaaccctgatggttttcggtgatccaggaagtcagtgagacaatctctctatatgcagagccctttcatgttaattagaatggtatggacaaaccaatgaaaacaagagggaaagtgagaaagatcacccatgattctgtttcactgtttgctttctcctgtcatggttaagagaaatgtgcaattcgatcctcaatcagtgggtggaggataacagggtagattcacttgtgtgcacttgtacagttgtagctgcgagtccagaagtcctctagagcatgtgtactggcactgagttggtgagacagttgtggagtatcccattctgatgagtacagaaaaaaaaaaaaaaaaaa

SEQ ID NO: 234995 - DNA, 573 bp, Homo Sapiens
actattaatgaaatctttcttttccctcctttctctttttcccttccccgccactgattcagtgagctggagattggatcacaggtataattcaagcttttcatgtagtcatgtagatcactagactccttggtgtactgacgtagcaatttaaaagcagatcatgtgtagtacatctagaagtagatttacaaatattctgaagagttgtaaccttttaaaatactaacagtgacatggttttgtttttaaggtttagcaatatttagcccattatttttgttttattcttaacttgaatgtttgtaaattttatttcttgatgctttcattgtgttatgataacatcaaaataacttgatattctaggttactaataattgttgtgcatgagtgttactacttttggaattgaagactttaaagaattttaaaggcagttgttgactaaacttctttctcttgattcacagccgaaggagtaaaggtgctgcaatgatgttagctgtggccactgtggatttttcgcaagaacattaataaactaaaaacttcaaaaaaaaaaaaaaaaaa

SEQ ID NO: 234996 - DNA, 569 bp, Homo Sapiens
  misc_feature (66)..(66): n is a, c, g, or t
  misc_feature (158)..(158): n is a, c, g, or t
  misc_feature (479)..(479): n is a, c, g, or t
agctctgtgggagcctccatcgacctgcagaagacatcccacgattacgcagacaggaacactgcntacttctggaatcgcttcagcttctggaactacgcacggccgcccacggttatcctggagccccacgtgttccctgggaattgctgggcttntgaaggcgaccaaggccaggtggtgatccaactgccgggccgagtgcagctgagcgacatcactctgcagcatccaccgcccagcgtggagcacaccggaggagccaacagcgccccccgcgatttcgcggtctttggcctccaggtttatgatgaaactgaagtttccttggggaaattcaccttcgatgttgagaaatcggagattcagactttccacctgcagaatgaccccccagctgcctttcccaaggtgaagatccagattctaagcaactggggccacccccgtttcacgtgcttgtatcgagtccgtgcccnacggtgtgcgaacctcagagggggcagagggcagtgcacaggggccccattaaacatgctgatttttggagtaaaaaaaaaaaaaaaaaa

SEQ ID NO: 234997 - DNA, 674 bp, Homo Sapiens
ttttcaagcaggtaggatatcctctcttcttctgtacatgtgctatgttgctagtcggaactttccattataaagtttcctgtcagcttttcacctaatggttttggggtagtattgatgattattcctcaaatccgttgtttaagagctgtataatggtgatattattccttctgtacttattttttttgagacagagtctcactctgtcacccaggctggaatgcagtggcatgatctcagctcactgcaacttccatctcctgggctcaagtgatcctcccacctcagcctcctaagtagctgggatcacaggtgcacatcaccacaggtgcacatcaccatgcccagataatttttttgtatttgttgtagagatgaggtttcactatgttgcccatgctagtctcaaactcctgggctcaagtgatccacccaccacagcctctcaaagtgctgggattacaggtgtgagccaccgcacccagcctcccttctgcatttattgctggaattctgaaaaatttgtttttgctcatcagttattttatatgtggaggtacaatttgtataggaaagttagaataaaatactttgtttctttctccttattttcttgttttcagaataaatgagttgcttcactatcaccctccaaaaaaaaaaaaaaaaaa

SEQ ID NO: 234998 - DNA, 710 bp, Homo Sapiens
cgctgtaccgctcctgtaattaggtgatgactggatttgacaacttagtcccctcagacaagtaagataccctccaacagcaaattcaatgacttaattggaaaacacacaagctggcatgatgtccggtgatttctgtaagaaatgcctgtaggagaaggtctgtgaagtgtggagggcagtgtcgacgctgcacagcatctgcagattcgcagcctcttctctgccggtgcctctgttcggttctgttacccaaaaacaaagaccaaagaaggccaatctctcatttgaccctgtctttttaatctgcctgttttaaaagttgcgtctgtagtagccgcttgctgtgaagacacatcttgacagtccaagtgattttgtgaccagtgatttgggtcctgttttccgctcttctaagaaaaaacaaaaagaccgtgagttattgcccagcaataatcatgttgttactgtgagttagcaacatgcctgacttcctgatagcattactgttttctagttttgtttattgtatattatgtgtggttttatttggtatttatttgtgttttgaggtcttgcaatgtttttgtgtttctgatgctaataactaaagtttgtaagactgtagaatgcaaaactcggagatgctaaactgtcttattagaggaaaataaatctgattatggagtctcaaaaaaaaaaaaaaaaaa

SEQ ID NO: 234999 - DNA, 605 bp, Homo Sapiens
atgactaaacaaataaaagatagtctctaactttcatcataatctcaaagagcttcatgatctggaagaagtttagacacaaatgggtaggcaaagtatttcttaattgctggtgcaagaccttacccttgtcttaataattatcctgtctaagtaatacaccttttaagaaacccctgaaaggaagatgatcgtccttggtagatactgaaatctgaggtaaagtggcccataaactgttttgaaatagagaatttctaaaatatgtagggtattttgaatatagctgagaaagctgctatgaactgaaggtttacgtcccctacaacattcacaaatcccaaatgtgatggtatttggagatagggcctttgagaagtgattaggtcatgaggatggaaccctcatgaatgggctgcatggaaaaggacccacagagatgccttgtacttttcccatgtgaggacacagcaagaaagcactgtctttatgaacagaagtgggccctcaccagaccccaagtctgctggcaccttgatcttgaagttcccagctcccagaactgtgagaaataaatttttgttaatacaaaaaaaaaaaaaaaa

SEQ ID NO: 235000 - DNA, 760 bp, Homo Sapiens
  misc_feature (75)..(75): n is a, c, g, or t
  misc_feature (144)..(144): n is a, c, g, or t
tcagcctcccaagtacttggattacagcacctaccaccagggccagctaatttttgtatgtttagtagtaacggngtttcaccatgttggccaggctgttctcgaactcctgacctcaggtgatctgcccgcctcggtctcccnaaagtgctgggattacaggcatgagccactgcacctgacctgctgaattgtttataatggcaagaaataggaaaccccccaatgtctgttgaacagctatcacgttgaaccacgtgaaactgctgttttctaggccaaaaatggtgagcgatcatttatttcatgattcaacctgatacatttacatagtgcaaaactgtgtcacagtttcaggcttttatgaggaaagcgtttctgtgtagaaactggaagctgttcagggcatcggcagctgaaccctgctccgttggtcagcgttactatcatctcggatcatatggagctcatgtcagccgtgtgggtggcgggtgcacagagacggtctggaaggaaacacgcggatctgaacagcagtaatcctgggggatacgggggttgggctagattacagagggctcattttctacgtcatgtattttatgatacttgaattttttgaaatgggcatttattttataacatgttaaaatgtactttttaaattaagtcattttgtaatatttgaatttttacatttgttgtacaatcaggaaaagcaataaagatttttcaaaaatagaaaaaaaaaaaaaaaaaa

SEQ ID NO: 235001 - DNA, 724 bp, Homo Sapiens
gtgaattgttctctgtgctccaaacttcttttatttgtccctgtgtttatgctcataaccattcatttccctcttttcccactgacttagcctctggggttgtaaagaagttactcgtttatttttgtgtatgtgtggggttttgtcttttgttttctgagaataaagtatatgagatcatggaaaaaatcagaaaacgaggaaaatcataaattcattaccaaaataatttctgatttggtattatagctctgcaaattacttcactaattgtgttcataggtactatggtacactgtacactgttttgtaacttgctttttagatggattatatcatatttttctgtatcaataaatatgaattcattacatcagtttaaactgatcaaaaacattttaatcaaagtaatacaattaaattgctaaatatcatagggaatcgaagagtttataatcccaaaccatactctttcttttcctagccagctggggacatttttaattgtttctattttcattctttctgtttcagttcttataaaaatacatatataaaattggctaaatgattaaatgttatagtagttctttaattataaatttgaataatatttgttgacttccaaactgcataccccttgccttgtccaagtaaaactgtaccatcgtttattctctgtgttgtcaataaaacactaagtgataaaaaaaaaaaaaaaaaa

SEQ ID NO: 235002 - DNA, 655 bp, Homo Sapiens
gaacaccctcgctgtcaatacctgactgcctctgttaaatttgcactgttacattttggttcagtttatttccatgttgaattagagtggattaagttaattttattttgtcagtgttactgttttttacgaattttttaatgcttcagactgtctgattcagtgaactttttgtagtgaaaaagccatgaagccagtagacaagacagatattctgtatgctggaggggatacaggatgattttgaaaaggtacaaagtcctcagtgggcttagaaaattcactgtatgatccttatattatcctacttggcttgcacgtcttcgggtgcatgtatataccgctactgtgtcctcgccatcacctaaatgtgactcagtctgttccactgtaatatgttgtgaatttccttgtactgtacttttattgttggtcttcttgcatcgatgatccaacagcaacaccatttttaaattattgtgaaaagattaactggcaatgtacagagtttactcaaagttttcttaagggaaaacactacaaaaagtcacaaggataccaaatggaaacacatgatgatgcctctgggtctgtatgagaccgtgatgaagtagaaataaagcccttctgagatggcaaaaaaaaaaaaaaaaaa

SEQ ID NO: 235003 - DNA, 606 bp, Homo Sapiens
  misc_feature (23)..(23): n is a, c, g, or t
accttagattattagtattattntgagggcctcctgtgtgtaagcactggttgtgcgcagatggctgtgcagagggccatgaggtagaggctggggaaatgagggcttggaggtgcttgaggtatggtctttacctacgtgaaatgttggaggttgagatgaaaactcttgctttgaattcttcatggaggactacatcatttcaatcctgaatctggctcaattctattattcacttattactgtattaaaaacgtttaattggccaggcacagtggttcacgcctgtaatcccagcactttgggaggccaaggcaggcggatcacttgaggtcaggagttcgacaccagcctggccaacatggcaaaaccccgcctctactaaaaatacaaaaattagccaggcgtggtggcacgcacctgtaatcacagctacttaggaggctgaggtggcagaattgtttgaacccaggaggtggaggttgcagtgagccgagatcacaccactgcactcaagccttggcatcagagtgagactctgtctcagtaaaaaaaaaataaataaataaaaatgtttaattaaccatgaaaaaaaaaaaaaaaaaa

SEQ ID NO: 235004 - DNA, 632 bp, Homo Sapiens
aaaaaaatttaactgcaactttagtattagaaaaatgtctacaagaggatgtcaagaaagcagagttgcatctgtctacagaaagggccaaagttgataatcgtcgtcagaacatggactttctaaaagcaaagtcagaggaattcagatttggaatcaaggctgcagaggagcaactttcagccagaggcatggatgcttctctgtctcatcagtccttagtagcactatcagagaaactggcaagattaaagcaacagactatacctttgaagaaaaaattggagtcctatttagacttaatgccgaatccgtctcttgctcaagtgaaaattgaagaagcaaagcgagaactagatagcattgaagctgaacttacaagaagagtagacatgatggaactgtgacaaaagccaaataaacatccttttccctaacaaagtaaattgaataggactttacagagttctttttcctcttggcatttcctaataacaaaactttctgtgttcttagattacagaatatcataattgatagaatatggtttcttactgtgtgttgcatttttgtgcccaaatacatagttttcatattaaaaagccttttctcttaaaaaaaaaaaaaaaaaa

SEQ ID NO: 235005 - DNA, 626 bp, Homo Sapiens
ccataccgacctcagcggttacctcccacagaacgtggtggactccttcttcccccgcagcatgacccggttttatgccaaccttcagaaagcagtgaagcaattccatgagtaatgctatcgttacttcttggcaaagaactcccgtgactcatcgaggagctccagctgttgggacaccaaggagcctgggagcacgcagaggcctgtgttcactctttggaacaagctgatggactgcgcatctctgagaatgccaaccagaggcggcagcccacccttcctgcctcctgccccactcagggttggcgtgtgatgagccattcatgtgttccaaactccatctgcctgttacccaaacacgcctctcctggcagggtagacccaggcctctaaccatctggcagagactcggcctggacaccatgcgatgcactctggcaccaaggctttatgtgcccatcactctcagagaccacgtttccctgactgtcatagagaatcatcatcgccactgaaaaccaggccctgttgccttttaagcatgtaccgctccctcagtcctgtgctgcagcccccccaaatatatttttctgatatagaccttgaaaaaaaaaaaaaaaaaa

SEQ ID NO: 235006 - DNA, 679 bp, Homo Sapiens
  misc_feature (90)..(90): n is a, c, g, or t
tggacacctgtccgtgccaccctggtcactgagcaggacatccgcgtctgtggcccctgagaccctgcccccgacagccaggcctgggtntgtccttttaggtagagtgcctggtccaggtcattggaggagagtccacatggccacctctggcgtgttctagagaggccctcccgcgctgggtcaggaggcagcatcgggacaggagaagggggctgagctcctgttcctctctccctcccccgaggccaagaaacattcccatccgaatgtccactgcgctcacagattcctttcctcctaaaacttcagccttggccaggctcacggccaggattatggtggctcacgcctgtaatcccagtactgtgggaggccgaggcaggaggatcacgaggtcagaagatcgagaccatcctggccaacatggtgaaactctgtctctactaaaaatacaaaaattagctggacatggtggcgggcgcctgtattcccagctactggggaggctgaggcaggagaatggcttggaggcagtagaactgcttgaaccctggaggcggaggttacagttatccgaggttgtgtcattgcactccagcctggggaacagagcgagactccatctcaaaaaaaaataaaaaacttcagcttttgcatgaaaaaaaaaaaaaaaaaa

SEQ ID NO: 235007 - DNA, 726 bp, Homo Sapiens
gggggtatctcatgtctaagtaagtaaaagaaagaagtagctactgtctcttgtaaaaaccacgtacaaaacagaacaagtctcagttttcagtgcaacatttcaaaaaatatatatgctgcaatctaataattaaaaggaattttacctattatgaaacatattacattttttaagttagataatcagtttcaaaaggagtattcaggttatttaactttgtttttaaatggctgcatcagaaaaaaatgtctatttttttttattaaaatatttcatcacttgttaaaacatatttttgatctgagtttggtaaagtattattttacctgctgttgtactaccacagactgttgacttttagtttcttaaagagaaaaattgcctttttactagaaagcctttgtatattgcaatttttctgtttgggaaaatctaaggatttactgtggttagtcttacagaagaaatgtggatttgataaactagtgcctatgattttaacttatgtttgatatatagtagtaagggttttatgaatgttgattattttgtgccaacagcccagaattgtcacttatatgtaagcagaaaacaatgagctctgcttccaaagttatttaattttctcagtgtttgaatgttattttttgtaagtgtgttaataaaagtgtaaagaattggaaaaaatataaatattcttaactcaaaaaaaaaaaaaaaaaa

SEQ ID NO: 235008 - DNA, 667 bp, Homo Sapiens
gaaaatagaaatacaggattagtattcggggccattttaggtgctattctgggtgtctcattgcttactcttgtgggctacttgttgtgtggaaaaaggaaaacggattcattttcccatcggcgactttatgacgacagaaatgaaccagttctgcgattagacaatgcaccggaaccttatgatgtgagttttgggaattctagctactacaatccaactttgaatgattcagccatgccagaaagtgaagaaaatgcacgtgatggcattcctatggatgacatacctccacttcgtacttctgtatagaactaacagcaaaaaggcgttaaacagcaagtgtcatctacatcctagccttttgacaaattcatctttcaaaaggttacacaaaattactgtcacgtggattttgtcaaggagaatcataaaagcaggagaccagtagcagaaatgtagacaggatgtatcatccaaaggttttctttcttacaatttttggccatcctgaggcatttactaagtagccttaatttgtattttagtagtattttcttagtagaaaatatttgtggaatcagataaaactaaaagatttcaccattacagccctgcctcataactaaataataaaaattattccaccaaaaaaaaaaaaaaaaaa

SEQ ID NO: 235009 - DNA, 472 bp, Homo Sapiens
acacctaatcacagggaggctgggagatgtaatcttacctgggcagttgtgtccctggagataagggaacagtgggttttcggggagctgctagcagtcttctcagaagtgcattagctctaacacattagctgcctcagcaagctggagttttgggctttatagtcaaaatatgaaacatagaaggtggccaggcatgatggctctcacctgtaatctcggcattttgggaggccaaggcaggcagatcgtttgagtcctggagaccatcctgggcaacatagcaaaaccttgtgtttacataaaatacaaaaaattagccaggcgtggtggcatgtgcctgtagtctcagctacctaggaggctgaggtgggaggatcacctgagcctggagggccgaggctgcagtgagccatgatcctgtcactgcactccattcagcctgggctacagagtgagactctgtctcaaa

SEQ ID NO: 235010 - DNA, 675 bp, Homo Sapiens
acggactattgttcagctagaaaatgaaatctatcaaattaagcagcaacatggagaggcaaacaaagaaaacatccggcaagacttctgaaaagacaatttagcaggtagaagaaaagttgggctttcacaaaaggcatctgaacttttaatgaactgtgaaggacaacagcatcttcccaaaaccattgatgtttaagtgtttagaaatcatagaaggtgtaggctgctgtggtaattctatttgtatatctcaacagaattaaaatgtctagcttggtggtatttttatagccataaaagaaaatctttaggctttcaaaataaggatgactttagaataatattgtgtcatagaattaattttcagccatgtggaccatattttgtatccaaggatccttatttaaagctttcaacatgtacaggaagttggaaatttttggtttatgactttgtctaataaagagatagttctaaacacattcttgatcaccaaacaacttcagaaagacagtgactgtacagttatcattatcatcatcatcgtcatcatcataggtaacagttatatcaagcttaatatgtgctgaacattgttctgaacactttaggtagatgaactagatgtatgtgaataaaaattatttggtcctcaaaaaaaaaaaaaaaaaa

SEQ ID NO: 235011 - DNA, 688 bp, Homo Sapiens
ggcttaaaaatctgggaatgtacctttgacctcctggcttatttcacaaaggccaaagtgaaatttgctgggaaaaaagtcttggatcttggttgtggatcaggtttactaggtataactgcattcaagggagggtccaaagaaattcactttcaagattataacagtatggtgattgatgaagtaaccttacctaatgtagtagctaactccactttggaagatgaagaaaatgatgtaaatgagccagatgtgaaaagatgcaggaaaccaaaagtaacacaactatataaatgccgatttttttctggtgagtggtctgagttttgtaagcttgtactaagtagtgaaaaactttttgtaaaatatgatctcattctcacctcagaaaccatttacaacccagattattatagtaatttgcaccagactttccttagactgttaagtaaaaatggacgtgtacttttggccagcaaagcacattattttggtgtaggtggaggtgttcatctctttcagaagtttgtagaagaaagagatgtttttaagaccagaatactcaaaataattgatgaaggattgaagaggttcataattgaaataacttttaagtttcctggttaattaacattcactgagtatccaaaatgaaataaacagaaggaccaaaaaaaaaaaaaaaaaa

SEQ ID NO: 235012 - DNA, 695 bp, Homo Sapiens
tgaacagtgggcagtgattcacattgtgaccaacgggtcgcttctacccagtggccttcttgtgctgctggggcccagctgtcattctaatgatcataaagctgactaagccacaggacaccaagcttcacatggccctttatgttctccaggctctaacggcaacatctcagggtctactcaactgtggagtatatggctggacgcagcacaaattccaccaactaaagcaggaggctcggcgtgatgcagatacccagacaccattattatgctcacagaagagattctatagcaggggcttaaattcactggaatccaccctgacttttcctgccagtacttctaccattttttgaaactacaatactggaacatccaggaactggagttattctacgctaatggattggaaagaatgttgggaaaggacatcttaaatcttttctaactatgccctaaactgcagaactcaaaggaaatatagtgccattgttagtagtcattctagatgaattgggagtatctctccagttattcccagattcactagtgatccttaaagtctctattcagggagaggaagacactttccatctcagagatagactcgtgttaccttgatggatattggatttgtctaagtctcttctagaaaaaataaattctagattattaaaaaaaaaaaaaaaaaa

SEQ ID NO: 235013 - DNA, 812 bp, Homo Sapiens
  misc_feature (128)..(128): n is a, c, g, or t
  misc_feature (793)..(793): n is a, c, g, or t
cgaggacgccctccacggcatcgctaacgaggatgccgtccacggcatcgctaacgagaaaatcaaatgttaaccagcagtgccttgcttcaacaccatcatcggaagtcataagttgaactcttttntgatgtttaaagcctgcataatattcgctgtgttattattcagcctattactatttccttcatgatggaaatttggtttatcccaattttctattctatcaaaacaccgctacataaaaaatccccatgcacatatttctcctaattgtggaaatattttacctaaaagactctagacatgggatgaaattcccaggttactggaattttaaaatagataggtacttccaaattgacctcttacaaattatatgaatttgtaagcttccaactgttatggagttaccccttttgagaaatctgtgctaaaaggacccaaacaatgctgatgacaatgatcaggataataagtacgctgggaagagaacaaaatgatttagatcttagacaagtcattctaggtgtctccactgtttcagttctcgcgttcgttcattcttgtgctttttcgttttaccaaataaaatagccccttgatgtcatatgaatccacgctatgcttaatgagtattggttagtaaaatgcctataactagtaatcttcatctatgcaattaaatattaattcataaaacacttcaaatgtaaacaataattagtaaatgaaaagtacataatacctcgattagaaaaaaatcactccattaaaagacattatttgtgtntaaaaaaaaaaaaaaaaaa

SEQ ID NO: 235014 - DNA, 725 bp, Homo Sapiens
  misc_feature (102)..(102): n is a, c, g, or t
catcccccagtacttcaaggagaatggctatgtgaccatgtcggtgggaaaagtctttcaccctggtactgctccatgtccagagtctgggttctcttggtntgtggtgtctgaatccagcattcccatcctggggatggggctgtctttgcagagccctcttctggctgggcgagtccctcgctagtcagtgcttcctttctaaaaaactgacttgtcaacccagccacgttttcacccaaagtgaaaaagggtagaaagagctttgcttcctttcagaaaccactgagggtgtgctgttgggtctttcagctcctcgggtggtagggaggacacaggctggggaggtggcagtgttgggtggagtccagctcagggccccaccctctcccctgcagggtacctgtcagtaaacctaggggtggggtgaggacacctgagggcctcccgtgtggccagcattgctgttgctgacttattgcccaatgagggggctgtgcttaggtaggggctgctatccactctggaaattaagtcagaaagatgagtgtaatctggtacccaggatctatagggtcccagagacggacattccttacctcaaatgctgcctgataaactggctctctttaatgccaatatggggatagtgaaaagcaaacaaactttaaaactttttatttatagaagtaatgcatgagtatttgagaaaaaaaaaaaaaaaa

SEQ ID NO: 235015 - DNA, 734 bp, Homo Sapiens
  misc_feature (15)..(15): n is a, c, g, or t
  misc_feature (93)..(93): n is a, c, g, or t
atgaccagctgcagntacgtggcccacgagcgcctcagctacgccttctccgtgtggcgcatggagggcgcgtggtccatgtccgcctcccantagcgccgcgccacccacctccggaccggcgcgccagggctgtccgtcgcgtcggcggcgcaagtggaattgggatgcattcgagtctgtaacttctgaaacctgaacaacctcaggaggcccccacctctgccctccaccagcgtcgagagaagggacagcagtgacatcggacagaagacccgggctcccgtcctcccccaggacggtccccacataggaagggcactcccagccctcttgctggtgacattgtcatggtcatcttgtttctgtttggatttttcttctgggtcttatgtttggggggaggtttattctttctgaaaatgtctagattcaggaacacatttatgaggatttggattttgaatttgtatttccctctaagtgccttttttaatgtctatttttttaataaaacagaaatgcattcttgtacaattctgttgaaactggaccaaggctctcagaagaggacccccgagttccttcccctcccccgagcctctgcatgattgtttcaagtcagcctggaattcttactttcacgccgctattcttttcctttctccgtgattgcttggctagccattttaaaaaaaatattctctgttcagtgtaaaaaaaaaaaaaaaaaa

SEQ ID NO: 235016 - DNA, 736 bp, Homo Sapiens
  misc_feature (25)..(25): n is a, c, g, or t
gacagaccacccagccctgtacagngacctgctgaggaccagccgcgtgcactggattgcggaggagcctcccgcagcactggtccgggacaagatgatggagtgccacttccgattccgccaccagatggcactagtgccctgtgtgctgaccctcaatcaagatggcaccgtgtgggtgacagctgtgcaggctgtgcgtgcccttgccacaggacagtttgctgtgttctacaagggggacgagtgcctgggcagcgggaagatcctgcggctggggccgtctgcctacacgctccagaagggccagcgcagagctgggatggccactgagagccccagtgacagcccagaagatggtccaggcctgagtcccttgctctgacagagatggatctgctagaaggaacctggagagcaggacccatggctgggcggctggtgagcagtccaggtgcccaagggccagcttgctgctgcccaaagcagaggaagccgggctggctgagggtccgaaaagcctgcaggggcccggcgagccccaggaagagcctcagctccaggctggggctctggctgctggagcatctgctggctggtggggtggcccgagttccccttcaccgcccccagggagggtttcccacctcagagtacaccgaggggacctgcagagggggctgtcgggacagcgtggaataaacattatttcaaggacaaaaaaaaaaaaaaaaaa

SEQ ID NO: 235017 - DNA, 717 bp, Homo Sapiens
  misc_feature (9)..(9): n is a, c, g, or t
  misc_feature (59)..(59): n is a, c, g, or t
  misc_feature (66)..(66): n is a, c, g, or t
attatattntgataatgccccacaagttatgaaggtaacttctactgaatatatatatntaaattntgcatttttctactgagcaccaacgatttattggaattgatttcaattaggaatttagggatatataagaaccaattacagttgtccatacttatctttgatgtgggacaattaagaagttacaaaaaatgggtgttggtgatattttatcatggttatttagcttaaaatacacgtgtaaaggcaggtgtcttccatttttctcctttgccttttagctgctgttttcctgcctctgacatgttggctgctcagaaactgctctctgggcagtgattggggaacagggtattcaagttcactaaaggctcaattttccattgatagaatatcagtgtccacagaattaagactgcaagcacagcaaagacacccatattgaatgttcccttaaattgcttttatttggagacaattctgaacatgaagtgttatagagggcccaggaaactaagttgagcccacctgaccctgtgatgaatcttggaacttccgtctcttgaatacattcttagtagtagcttcttggcattttcaaaaaaggaaaaaaaaaatatggcatagacagcttattactgtgattctttgagttttctccaggtgagttttttgataaaatatttgtgaagtggcaaaaaaaaaaaaaaaaaa

SEQ ID NO: 235018 - DNA, 629 bp, Homo Sapiens
gggctaaggtagggtagagtgggtgtagtgagtgtatataatgtgatttggccctgtgtattatgatattttgttatttttgttgttatattatttacatttcagtagttgttttttgtgtttccattttagtggataaaatttgtattttgaactatgaatggagactaccgccccagcattagtttcacatgatataccctttaaacccgaatcattgttttatttcctgattacacaggtgttgaatggggaaaggggctagtatatcagtaggatatactatgggatgtatatatatcattgctgttagagaaatgaaataaaatggggctgggctcagtggctcacgcctgtggtcccagcactttgggaggctgaggcgggtggatcacgaggtcaggagatcgagaccatcctggctaacacggtgaaaccccgtctctgctaaggaacagaaaattagccgggcgtggtggcgggcgcctgtggtcccagctactcgggaggctgaggcaggagaatggtgtgaacccgggaggcggagcttgcagtgagccgagatctcgccactgcactccggcctgggcgacagagcaggactctgtctcaaaaaaaaaaaaaaaaaa

SEQ ID NO: 235019 - DNA, 623 bp, Homo Sapiens
gatccatggagctagaattgtagaactaggctcatcagaatcgtgactattattgctccatcaaactgtgaaaagaaatgatgtggaccttgctggaaacaaaggcttagcaaacaatttttgttcaatgcccaccgagacatatagaattgggaactgatacatgtgtcccttataggctcaaaaattatatcttacaatttcttatttagggggaaattatttgaatcagattctatttagtcaaaccaccttttatgttttattatttttgaattcatggagccatcataaaaatatttttaaaatcagaattattgataccctgtagtgcaaaatgtcaatttttaatgtataatcagaagtctgaattttcataaaacatatagcataaaaacctccagtactttggttgacccttgtatgtcacagctctgctctatttattattattttgcaaaataaccattttaacatttgataaagcatatttatgaacatatttcttaataagaaaaatatccattttattaccattttctatctttttcaaaatatgcaagtttttacctatatgtcttataataaaagaaataaaatatttgaaaaaaaaaaaaaaaaaa

SEQ ID NO: 235020 - DNA, 685 bp, Homo Sapiens
gaagaaaaagaaattaagcccaacattaggtagctgtaatgtgaaccaacagagctggcatgtctgcaatttacattgacttcctgtatctctctctttctatggtcggagtctagttaacaaatttatcacactgactttaaagaaatgatctgatataacttgcatgctttctgaacaggccattgtatccattctgaactttgttgccctaaaatgtgttgctgcactggaaagaaagaactagcttgagttggcttgatggatgaacaattatcctcttactttcattacaatcctcttactttattccagagatacctttttcttttaatattggaggatctacttagcaaacttttttcaaagaaaatactttaaataaattcaccacaaccaaactttatgtaagacaatttcaaggtgtttcaaaaacacataactaccaatgtttaatttcacagggaaccagttaagagcacatttaaggatctggcaacccaccttactaaacaaattagtctttctattaatttgagatctgaaacaacctgtcattactctgatatcctgaacgtttaaggattatggaagaagactaaagtgtttgaaatcattcatatttgaaatttttatcattagcttaaaaattactctcagtattgttaaaaaaaaaaaaaaaaaa

SEQ ID NO: 235021 - DNA, 608 bp, Homo Sapiens
  misc_feature (208)..(208): n is a, c, g, or t
cgttccgtgtctcttgcaggctgggccggcttcatgccagtgcgagggcgtcccgtgcccacgtacatacgtatgtctccatgagttctgggctccactggttccaattgagctccagccctggttttcctacccatgcagttagggactttaatttaattttttttttgtagggccaccgccttcaaacacaactgctacaacattntaataaaggctcatttaacccccaggctcctgtcgtgtgaatatcctcagtctgtaggaaactttttttgacacagcatagaagacctagttttggaaaacattatctaattttttgttgtgcaaatccccaaatttctcactaatttttgtttttttgtgcataacttggatgggctgaaggaggtgaggacagattggggaagggtggctttcattccaagatccagggatttggggaaaaggaaggaatttgatgttttttggggtgggaggggagggtgtgttttttacaccaaaaaaaaaaaaaaaaatcaagagtatgcaagcatttctattcctcgcatttttctgtgtgcctggcaaataaatacctgtctcctacaaaaaaaaaaaaaaaa

SEQ ID NO: 235022 - DNA, 601 bp, Homo Sapiens
ggaccagagcaggacctgacccaggaagccctgtttgtttacacccaggtgttctgccatgctctgcacatcatggccatgctccacccggaggtctgtgagccactctacgttttagccttggaaaccctcacctgctatgagactttgagcaagaccaacccttctgtcagctccttgctccagagggcacacgagcagcgcttcttaaagtccattgctgagggcattggccctgaagaacggcgccaaaccctgttgcagaagatgagcagcttctgacttggcgtggggagctgggccccaacatggcgggtctgcagaagatcagcagcttcttacctgtgcgggagcgaaaaagctgggcttcaacatggcaggtctgtaggggtcagacccaagcagcctggactttacagttatgtgaaactgtccacaaaaagtcatggcaataatggtgtaaagaaaatagtttcttgggtatttgtaacgtacaaactatcataaaaattctcctctttcgcatctcactttgtctcttctaagtcggcctcagcaatagcccaggattaaatatgctctgaaaaaaaaaaaaaaaaaa

SEQ ID NO: 235023 - DNA, 687 bp, Homo Sapiens
agtcatgaagtgcttcaagacaaggtgcctctaaaagcttgacagggccttgactgcacaattcgagctgaatgtgccccttgtcagctgccagtaaataaatctcaaagggggaaaagctgaagtttcattacctgatccatggggctttgttggttttggcatcacacaggggaagctcttgcccctccattctctggatttgaagatgtccattggagcctgcagtgcctggacagggttcagagcggaaccttttgaagagtgtcaatagttgtaacagttcagctgttaggaagacaaataaatggaggagctcattaatccgcttttggctctcagtgccttttgcccttttatcacagccttattaggctcctactcatcttgaaccagaaaaaaatgaattgaagttgttgagtactaattggcaaagacttttaatcatgggccaagaactttcactgacttgaaagtaacttctccacagggaaggaccaaaaacctggtttaccttaaaacaaaaacctgttggagttcagcgtggtgtaaaaatgtaaggaagcattgataaattgtctaagtttatccatttgaaagaaattgtgtaagattatgatattctcttttctttaaaaaaaaaagtacaataaaattcaaacattccttaaaaaaaaaaaaaaaaaa

SEQ ID NO: 235024 - DNA, 681 bp, Homo Sapiens
atgctaacagagattgagcacaaggttgcctttctgttagagacttgcaaagatcagggcctgggagataatggagccactcaacatgaggctgaagcgctttccctgaaactgaaaacagtgaagtgcaatttagaaaaagtccagatgatgcttcaggagaagcacagtgaagatcagcatcctaccattctaaagaaatcctcagagccagagcatcaagaagctctccaaccagttaacctttctgaattggaatccattgtaactgaaaggccacaattcagcagacaaaaagatttccagcagcaacaggttctggagttaaaaccaatggaacagaaagatttcatcaaattcatagaatttaatgctaagaaaatgtggccccagtattgccaacatgataacgatacaactcaggaatcatctgcaagcaaccaggcatccagccctgaaaatgacgttccagactcgatcttgtcaccccagggccaaaatggagataagtggcaatatctgcatcatgaactctcatcaaaaataaagctcccactccctcagcttgtggagcctcaggtcagtctgtatctacatggtgcaaatagcctgtttatctttgaaaatccaacaagcattcattaaataaacatgttattctccagaaaaaaaaaaaaaaaa

SEQ ID NO: 235025 - DNA, 303 bp, Homo Sapiens
actctacttcctgtgtcagttgcttcacttttctaaatataaattgtgttccttctgttttggcttctaggaaaccccgagccaaacgtatggccacctctgaccactcgaccagcccagcatggtgtacatttctgggtagcttatcacgccttccaagcattgcctttatcttccttctccccatcaagcctgtattgttttccttttgaatcataagcacttttgttaaatacctcaaatctttcgagaacagcaaggagcaaaataaacttaacttctctgaaaaaaaaaaaaaaaaaa

SEQ ID NO: 235026 - DNA, 685 bp, Homo Sapiens
attaaaacaaaaagtaagcacctaaaggcaaggactttgttttaactgtaccttaagcggtcatgttctctgaagtggaatgtggctttcctaggaatgggtcgtacaaagctaagtggtaatgatgctatttggggaaaggtcttttttgcttaattttgttttttaaaactctgatgattgcttgagcaacaggcaggttatctgcctggttgaattctggttgaaccgtgtattctaatatttctggttaagtggtgactgggtaaggaaaccacttggggtagcagttcaacaattcacttacgaatgtttataagctttccatttcctaggtaattttttaaaagccagtcaaaacaaaaactttactgaaaatggacagaaataggaaatggactttttccttactgtctatacctcctgaaccttggtattgtaaagatctggggacctctgggtctgttctgaccattccctagtctccatggccaagcactcaaggattgatggacaccacacaccagctatattcatttgccaagatcaacagctccttctccaaacaactcaagcccccaattcccatcgcattccatttgggtgagatgcaactaacagccccttcctggatgaaggagtcaaagaataaagcttgcctagaggcaaaaaaaaaaaaaaaaaa

SEQ ID NO: 235027 - DNA, 705 bp, Homo Sapiens
  misc_feature (39)..(39): n is a, c, g, or t
  misc_feature (72)..(72): n is a, c, g, or t
  misc_feature (176)..(176): n is a, c, g, or t
ccctgtgagccgtaggcagagccttgtgtgtcagtgctntcgtcggagacgtagcctcgggttgctgtgtanttgtgggcattgctgctgcacgtggtaatacagctcagtgtcaggtgtggggttcacgatatttcagactcggaacttgggggctctcacatggccatctcatntgctttgtggtcttaggtgggatactttcggatttctcctataaaatggggttgagaaagtcatctgaagcatttttggggattaaggtgataccctaaaaccccggagggcgcacgtaggatcaggtgcacccttcctgcagcgccttggtgtctgcagccgtggcggcctcacggggtgggtggagaggaaagagtggtgcggtagctggggttagcgtccgtttctcctccagtccacctcaccttgtcgctgcttccagggtccgcaagcaggtggtgaacatcccgtccttcattgtccgcctggattcccagaagcacatcgacttctctctgcgctctccctacgggggtggccgcccgggccgcgtgaagaggaagaatgccaagaagggccagggtggggctggggctggagacgacgaggaggaggattaagtccacctgtccctcctgggctgctggattgtctcgttttcctgccaaataaacaggatcagcgctttacaaaaaaaaaaaaaaaaaa

SEQ ID NO: 235028 - DNA, 688 bp, Homo Sapiens
  misc_feature (77)..(77): n is a, c, g, or t
ggaccactgaatgtcactgttccttgaatcatgggcctaccagattgcctgccagaggcaggactgaccagcccttntgggccccagggcaagccagacactgagtgacacccaaaggctttgtaactatgtcttgagggtctgctgccccagcctggcagcaggaaccgccctccccaaacacccacagccactgacccatccaggactccagagagtcaggtcaaccccgaggaccccttgggcccttctggggtactcctttcggcccccctggtagagtctcgggagttcacacagggtggcaaacaccccctagagctcctctgcctgaatcctgccccctagcctttgaccactgtcagccacctgtgtcccttgagccttcgggtcttcacttcccacttggacatcactgctggacattcccatcgagatgacacctgggttccaatcccagctctgcctttgaagcacttgcggccaccgtcaagtccctttgctctcggaccctgggtttctcatcctttaatgaggtgggttcagaagctctcccatcttcacagcaaccctggcactggcttctcaatgggagggaagcagcagagaaactgaagtgttagacactatgtgtcccaccaccccattacagagacatatgacaatgttcaaaaaaaaaaaaaaaaaa

SEQ ID NO: 235029 - DNA, 667 bp, Homo Sapiens
  misc_feature (60)..(60): n is a, c, g, or t
tacaacaactctcgatctcacggatggcaccatcaccttcaacaacaacctcggaactgngactgaggccaaccaagcctatagtgtccccacaaaaatgggatccaaactggaagacatcctgatggacgacaccctttctcccgtcggtgtcactgatccactcctttcctcagtgtcccccggagcttccaaaacaagcagccggaggagcagtatgagcatggaagagacggagcacacttgttagcgaatcctccctgcactgcattcgcacaaactgcttcctttcttgattcgtagatttaataacttacctgaaggggttttcttgataattttcctttaatatgaaattttttttcatgctttatcaatagcccaggatatattttatttttagaattttgtgaaacagacttgtatattctattttacaactacaaatgcctccaaagtattgtacaaataagtgtgcagtatctgtgaactgaattcaccacagactttagctttctgagcaagaggattttgcgtcagagaaatgtctgtccatttttattcaggggaaacttgatttgagatttttatgcctgtgacttccttggaaatcaaatgtaaagtttaattgaaagaatgtaaagcaaccaaaaaaaaaaaaaaaaaa

SEQ ID NO: 235030 - DNA, 649 bp, Homo Sapiens
cacctgtagtgccaggacaggtgtgtcctcggccaggactaagagccagctcatctttgtaacattcataatacgggaaactgaggaccaggtggctcggaaaagagatgagttccagcttttacctaacacagggttctctcgtcgtcccccaacccctccagctcggcttctttgtgtccagggttgtagatttttggatagaggtgtttctgattctagtgagtctgagaactggaaaagaccaaggaggggttgatgatttacaaggtccatagaaaaactttttgtgtggtcggaagttggccaagcagaggcccacagcctgatgctactgccccccacccccccaaagatctgaattccctaaagatcaagagggttcagctggccttgggagatgtttgctggagaatgacttcagttttctcctaaggcaatcagattgcaaccattagcattgtatcttatctgcaaatcagtttactccgaggttccccaaggatagttttattaggaccacaggactttactaaccactgaggtaacacgctgcttgtgcagcaattattttgaggtggaggtatttatgggacaagtttataattccatttattaaagggactaacctaaaaaaaaaaaaaaaaaa

SEQ ID NO: 235031 - DNA, 698 bp, Homo Sapiens
agagatatgcaatccaaagaagagagaagaatgaataaaaaggaagagagcttcagagaaacgtggaacaccattaactgctccaacatacacttagtatcggaaggagaggagagagagagaagggagaaaaaaattatttgttgaaataatggctgaaacttcttaaatttattgtaaaacattaatccacacatccgggaacttcagtgaactttagaataaatgcaaagagatccgcaggcaaatacatcatagtaaaaatgtggaaatccaaagaccaggagaaaaccttgaaagcaccaagtaaaaactacttgtacattttaaggaaagtcatataaaattctgatttgtcatcagaagcaatggaggccagaagcatggaatgacatattcaaagtgccccctaaagaaaaccccaaaatggaaaggttaaccaaggaccctatatctagcaaagtgatctttcaaaaatgaaagcaaaataaagaaattcccagataaacaaaaacagaatttgttgctaccagacccaccttacaagaaatactagagttcttcaggctgaaagtaagtgaccacagacaataattcaaattcacacacaaaaacaaagagcaccaataaaggtaactgtgtaattataaaaaacaataaaaaggcatatttcttctcttaaaaaaaaaaaaaaaaaa

SEQ ID NO: 235032 - DNA, 646 bp, Homo Sapiens
accagtcctgccagagtttgatatatagaaggtgttgctccatgacagcattgcccggcatccagctccagaagatcccgactggattaagaggttactgcaaagcccctgccctttctgtgattctcctgtcttctaaataatcagtgacgggaagatggaagggcatgatgaactctgccatagaaaacttcctccagcctgaagagaaggatgcactggaggaagccggaccctcacgagtggagagaagtccttggtgattgtaaagagggcccctggagctcatttctgaatcgcactctccatttccagagactaaaggatgtcctttgaaatggctggactcagagagttggagtcgttttgagatgagcattagccccagctttgtaaccaatgaggaacacttacttatttttaagtatcttgacagaagcaatttgaacacagtgtcccgtcatttctagaaacagaatggtctcttctagagagcttggataaggaccttgctgggttgagttaggttttaatccttgctttggtttggaactgccttcgggctccagaacttaaattgcttggtccgtggcatctgatgtaccaacagagattaaaagtgtaaagcaacaaaaaaaaaaaaaaa

SEQ ID NO: 235033 - DNA, 782 bp, Homo Sapiens
  misc_feature (22)..(22): n is a, c, g, or t
acttaaagcaaatattagattntactcatcaagggcaagtaaatgaatggaattatctgagctctatggcactggttgtttagagtgactgatgaagtgcaactttcaaaaacatttttgatgacatcaccagcctactgcagaagtgcagggcaccagtaaacaccatgtattattgaagatgaatctgtttgtatgtatccttgtcaaatatattctataatgaaataaaatctgaaaagtggatttcttattgacctatattcatgaaagcatataaattaaaatatttaaaattagatatgattcacactatattctgtttcatatgcagattttattctcacctgggccatttgcagatgagactgtagtttgcagatgagactgtagtttgcagatggcgtggaagcattcatcaggggagataaccataaaggatttggcctaattaccatactcaattgtcagtttacgtggttttgtgaatactggcaaaagcaattgtttttaaattaacaatggagagaatgataagatgagggaaggaaaaggcattcattattgacttacatgtcagtaaggtctgcttttatttctatgtactcctgtttgccaagctcaataatggacaaaggatacaaacacacacacatctactattttagataaatgtactgttatatatatatgtaaactactattgctctctttataatgattaatcactttattatgaatgaatgaatgaatttgatggatttaaaaaaaaaaaaaaaaaa

SEQ ID NO: 235034 - DNA, 685 bp, Homo Sapiens
ctccccataatgacattatgacaccagttgatcctggggtagcccagcccaacagccgggttttgggccagaacgtcatgatgggccctaattcggtcatgtcaacctatggcagccaggcatctcataacaaaatgatgaatcccagctcccatacccaccctggacatgctcagcagacatctgcagttaacgggcgtcccctgccccacacggtaagcaccatgccccacacctcgggtatgaaccgcctgacccaagtgaagacacctgtacaagtgcctctgccccaccccatgcagatgagtgccctggggggctactcctccgtgagcagctgcaatggctatggcagaatgggccttctccaccaggagaagctcccaagtgacttggatggcatgttcattgagcgcttagactgtgacatggaatccatcattcggaatgacctcatggatggagatacattggattttaactttgacaatgtgttgcccaaccaaagcttcccacacagtgtcaagacaacgacacatagctgggtgtcaggctgagggttagtgagcaggttacacttaaaagtacttcagattgtctgacagcaggaactgagagaagcagtccaaagatgtctttcaccaactcccttttagttttcttggttaaaaaaaaaaaaaaaaaa

SEQ ID NO: 235035 - DNA, 676 bp, Homo Sapiens
gctgtgtgtcccagagacttaatcagaagctggaagaagggctgtgacgtgtgtgacagcaggaagtgctggtcaacccacagccggccagcctgccgagacgccatcttggccccaatcttggcagggagaggggagtgtatcggactctggggagagcagctgcctgcacgggcagggtcctcccgtctcaggattaacgttctcaactgtatttgatttctcctcagccagagggggtaaggtggccttcccagaagcacaggtgggccgcgtgtcagaggccctggacagcctgtgcctctcccaggcctcccagcaggggtggctctcgcccctctggaggggagaccccaggaaccggcccccgccctcagccatagcctcacagggtccttgtttctcggggcctggctctgtgggtgcacaaggcatggtcgggctcccgtccttctggaagtctccagagtggcatgtgggcagctgtgtgaagcggccccccagatcttcatccagcctggcctgcagcagctccctacgccctctgctacctcccctgcctacctttgggtagacgttctcttgacccttccttctgtgataaagcaaaagcgtgtgatctcttttctcaccaaggaataaaacgtctctgaataccaaaaaaaaaaaaaaaaaa

SEQ ID NO: 235036 - DNA, 699 bp, Homo Sapiens
  misc_feature (66)..(66): n is a, c, g, or t
  misc_feature (681)..(681): n is a, c, g, or t
aactcactcggcaagccgtcagattagaagataattctgaaacaaatgcctgccactctttgatancaaaaatgacggatgagctgtatcaccatatgcctgagaatcgttgtgtgttaaaggacttggatcgtcttcctactgagacgtggccccagcttctccgtgagctctgcagcacacctgttcccaccctgttctgccccaggattgtgctggaagtgctggttgtgctccgaagcatcagcgaacagtgccgccgtgtgtccagccaggtcaccgttgcctcagagctgagacacaggcagtgggtggaaaggacgctgcggtctcgccagcggcagaactacctgcgtatgtggagtagtatcagactactgtcccctgtgctcagcctgatactgttactcattgcgctggagttggtcaacattcatgctgtttgtgggaagaatgcgcatgagtatcagcagtacctaaagtttgtaaagtcgatcttgcagtacacggagaacctggtggcttacaccagttacgaaaagaacaagtggaatgaaactatcaatcttacacatacagctttgttgaaaatgtggacttttagtgagaagaaacaaatgttaatacatttagccaagaaatccacaagtaaagtactcttatgaaaacttgtaaaaaaanaaaaaaaaaaaaaaaaaa

SEQ ID NO: 235037 - DNA, 835 bp, Homo Sapiens
  misc_feature (52)..(52): n is a, c, g, or t
cgtataaatgtactgaatgtggaaaagccttcagttggagtacagacctcanaaatcaccagaaaactcatactagtgaaaaatcctataaatgtaatgaatgtagaaaggcctttagttactgctctggtcttattcaatgtcaggtcattcatactatagaaaaaccttatgaatacggtaaatgtggcaaagcctttaggcagaggacagaccttaaaaaacatcagaaaatgcataccgaagagaaaccctatgaatgtaatgaatgtgggaaagcctttagccagagcacatatcttacaaaacaccaaaaaattcatagtgaagagaaatcaaatatacatactgagtgtggggaaaccattagacaaaactcttcttttttacaacaataaaaacctcacactggagagattctctgaatgccttaagaatttggttaatatggagacccttcccagggaaacagaaggaggatcgtgaaaactgttgactacttagaatgatcacatggtttagtggagagagcatgattctgggttttaaaagtcatggatctcaatctcagctcctattactaactagatcttttactttggggtaagtcacttcatatctttaggccttaatttcctcatctgaaaaactggaaggcctgacttgttgagctttaagatcctcaattattatatttactaggaattcaagtttctatagatgtggttcagaattgtgacttatttattgtacatcaggtgtgattcacaagtgagcttgtagtagttattaaggagtcaataaagatatgatatagaaaaaaaaaaaaaaaaaa

SEQ ID NO: 235038 - DNA, 821 bp, Homo Sapiens
agccccgagagaatgatgaattgcactggagaaagccgacgtggtgatggtgactcagcagagcagtgacggctggctggagggcgtgagctctcagacggggagcgaggctggtttcctgtgcagcaggtggagttcatttccaacccagaggtccgtgcacagaacctgaaggaagctcatcgagtcaagactgccaaactacagctggtggaacagcaagcctaagtcttctctgagaggagtttcgtgagctgaagaacaagctgctcatggcaagggctggccccagaaccctgcaagagaggccttctgtggatggagaactaggccttctcaaagctcaaggacaaaatccagctaacccagtccctcggcccaggcctcctttcgtgctttgtgcttggtgggggggatttcgagggactttgcactggactctgggaacctttcatcattaaaaaaagggggaccattggggcctgagccaaggaactttccttctactgccttatagtgcttaaacattctccgcctccagggtgcagattcagagctggccagagtttcagtgatagccgtatgttaaacagaatctcacctcagtctcctggagggagatgtttaagaggggttaacacatcagatgggagggtcagcccggtgacctctaaggtatcttctaacctagaaactcaccataattatggtgcaaggtcagtgtgtctctgagatctatgtctgttggtggcaatgtgagggtgatactctctcactctaataaacttggcacttctccgagtaaaaaaaaaaaaaaaaaa

SEQ ID NO: 235039 - DNA, 756 bp, Homo Sapiens
  misc_feature (15)..(15): n is a, c, g, or t
  misc_feature (27)..(27): n is a, c, g, or t
  misc_feature (50)..(50): n is a, c, g, or t
  misc_feature (122)..(122): n is a, c, g, or t
ccgggcccgagcacntgcaggacaagnccgactccccgcacgtgagcgcnagcgaggcggatgtgccctccctggcccccgtggactcctccttctcgctcctgtctgtctcacacgcgctntacgacagccgcctgccgcccgacttcttcggcgtgctggtgcgcgacatgctgcacttctacgctgagcagggcgacgtgcagatggctgtgtctgtgctcatcgtcctgggtgaacgggtgcgcaaggacatcgacgagcagacccaggagcactggtacacttcctacatcgacctgctgcagcgcttccgcctctggaacgtgtccaacgaggtggtcaagctgagcaccagccgcgccgtcagctgcctcaaccaggcctccaccaccctgcacgtcaactgcagccactgcaagcggcccatgagcagccggggctgggtctgcgacaggtgccaccgctgcgccagcatgtgtgccgtctgccaccacgtagtcaagggtctcttcgtgtggtgccagggctgcagccacggcggccacctgcagcacatcatgaagtggctggaaggcagctcccactgtcccgcaggctgcggccacctctgcgagtactcctgacggggcatctgctgggcttgcccgggcggccgcgtgcagaaccccgcctggtcttgtgcccgagacgggcggaggctggaacttgagacctcaataaaggaagtagagccgcaaaaaaaaaaaaaaaaaa

SEQ ID NO: 235040 - DNA, 636 bp, Homo Sapiens
tgagctcttggaagacattgtcataaaagccagtgattttaagaaaaagagtggttctggaatcagtgttttccagtcccatcccagaacatcagttgtaagataagtacaattggttgtccttgatttcataagtagaacaaacactaaatgtgcctctgagatggccaccccgggcagggacctgtgccttccgccgatgctcagggctccctctggctcccgggtcactcttgtggccccagtgggtggtccctgcagtcatggcctgagtgcgcaggggccaccgcgtggctgctgctgtcctcctccgggacccacggggaccaaggtcacacgttccgtgctgtgaagctgtccagatgtgcctctttggctgggggttctggtggacgtttcaagtggcattttgtacaatgcaggttagaattcaggaatttcaagtatgtgcccgggtctgtcaggtcccagttgcctttctgacggcccccctcagagggacggcgacgagcactaaatgcttttttgactattttcctatagattttttttaaaacttttttttcctcctgttccaattgatagctttcttatttaataaattctgtagttcaccgcaaaaaaaaaaaaaaaaaa

SEQ ID NO: 235041 - DNA, 720 bp, Homo Sapiens
  misc_feature (79)..(79): n is a, c, g, or t
gtgggaatcagctagggctgctgtaactgagttcgcagacccagtggcatagacagcaaagaggtactgccacgtgctntggagaccagaagtctgagaggaaggtgctggcagggctggttccttctgaggctgcaatggaaaacctgtcctggcctctctcctggcatctgctggttatctttggtgttccctgtagacagctgccccctccctgtatcttcatgtcgtcttccttctctgtgtccttctcttcacgtagtctttttaggacgctggtcgtgttgccttagggcccccatgtcagtgccgtcatctagactgatgatgcccgcagtgatcctgtctccagataaggtcatgtcctgaggtgttctgggttaggactttgacgtttgaatggtggggggtggtggacacaattcagcccctgacagcagcttttctctcccctccctgacgctgtcgcagctgcagtgacatgtacgagaaagtgctgtgcaccagctgtgccatgttcgagacctgaggctggctcaagccggctgccttcaccgggagccacgccgtgcatggcagccttccctggacgagcgctcggtgttcacactgaactgtggggtcgacgggaggggtgccttttacatgttctattttgtatcctaatgacagaatgaataaacctgtttatatttgcacaagaaaaaaaaaaaaaaaaaa

SEQ ID NO: 235042 - DNA, 745 bp, Homo Sapiens
  misc_feature (79)..(79): n is a, c, g, or t
gaaaaaggcagctctgtcttgcaggaaacaagccctgtctgaccgccaaggcttcatactcaaggatgtctatgcttcnccgtgagcttcctggaaaaaacccccgagagtcgtcagtacccctgggccactgctaacaagcacctaacaaggggcccagagccccctgctccagccacatctggacccatcagtgactgcctgccatagcctgagagtgtcttggggagaccttgcagagggggagaattgttccttctgctttcctaggggactcttgagcttagaaactcatcgtacacttgaccttgagccttctatttgcctcatctataacatgaagtgctagcatcagatatttgagagctcttagctctgtacccgggtgcctggtttttggggagtcatccgcagagtcactcacccactgtgtttctggtgccaaggctcttgagggccccactctcatccctcctttccctaccagggactcggaggaaggcataggagatatttccaggcttacgaccctgggctcacgggtacctatttatatgctcagtgcagagcactgtggatgtgccaggaggggtagccctgttcaagagcaatttctgccctttgtaaattatttaagaaacctgctttgtcattttattagaaagaaaccagcgtgtgactttcctagataacactgctttctcataataaagactatttgcatttgaaaaaaaaaaaaaaaaaa

SEQ ID NO: 235043 - DNA, 723 bp, Homo Sapiens
gcccgcgccccggcaccccccagccctcccagccctcccggcccgcgacgcacccgggggcgtgttgatcagtacaagccgcagccccgcttctcgcgcggcgcgcgccagcgcctcaggcgtctccgcgtacggccaggccacctcgacggcctcgaagcccgagctgcccgcggcccgcacccgcgcggggaggccggggagctcggggaatagccaggacagattggcggagaagcgcagcggcgccatgcctggggaggccgggccgggcggagtccgcgggatccaaaggcggcgggcggcgggcggcgggcggcgggcgggggcggggctctccttgctggccctgcgaacgaacgagcactgttcgtggttagaaaagcgaagtgctgtaaaaacccgggccttcacgaaaagcgcctacggttagcgagagagggatcacggggagaggcgaaggggcggagcgagggcggccggaaaaggagcaggacccgcgcctggagaaggtagggaggccgagctccagggcctgagagccggacgcgaagcaagagagagctggctgcccgagggcccggttgcaatgatgggacgcgcactttaatactgagtctttcctctgattataaaaatgctatctgttcgttaagcaacatttgaaagctgtatgaccaaataaagaagcacttttataccgccaaaaaaaaaaaaaaaaaa

SEQ ID NO: 235044 - DNA, 739 bp, Homo Sapiens
caaagatcccagaaggggagcgcgttgacttcgatgacatccaccgcaagcgcatggagaaagacctgctggagctgcagacactcatcgatgtacatttcgagcagcggaagaaggaggaagaggagctggttgccttgaaggagcgcattgagcggcgccggtcagagagagccgagcaacagcgcttcagaactgagaaggaacgcgaacgtcaggctaagctggcggaggagaagatgaggaaggaagaggaagaggccaagaagcgggcagaggatgatgccaagaaaaagaaggtgctgtccaacatgggggcccattttggcggctacctggtcaaggcagaacagaagcgtggtaagcggcagacggggcgggagatgaaggtgcgcatcctctccgagcgtaagaagcctctggacattgactacatgggggaggaacagctccgggagaaagcccaggagctgtcggactggatccaccagctggagtctgagaagttcgacctgatggcgaagctgaaacagcagaaatatgagatcaacgtgctgtacaaccgcatcagccacgcccagaagttccggaagggggcagggaagggccgcgttggaggccgctggaagtgaggatgccgccccggacagtggcacctgggaagcctgggagtgtttgtcccatcggtagcttgaaataaacgctcccctcagacacccgcaaaaaaaaaaaaaaaaaa

SEQ ID NO: 235045 - DNA, 754 bp, Homo Sapiens
ggaacactgctacaaggtctgaatgttgtccttcacataccattccagaacactgctgccgtggtctgaatgtatgtccctcacataggattccagaacactgctactaggttctgaatgtttttcccacacctaggattccagaacacttctgctggtgtctgaatggttgtccctcacatatgattccaggacactgctatgagagtcttaatgtttgtccttcacatagaattccagaacactgctcccgtggtctgaatgtttgtccctcacatagcattccagaacactgctacaagggtttgaaagtttgtccctcacataggattccacaacactactgctgtggtctgaatgtttggccctcacataggattctagaacactccagctggcttctgagtgtttgtccctcacataggattcctgaagactgctgctgtcgctatagtcgttgagagtgtctgaatgtttgaccttcaccaaacaccaaatatcctggccctttagtcttgtactttccagcctccagatctgtgaacaataatctctgttgtttatgaattactcagtctgaagtattttgttatagtagcctaaagagactaagagagcatcacctgccctgtcacctcatcaccgcattactgaagctatactaacaacagtcacttttagtgggtacttcatgcatcagaataaagggaaaaaattgcaaggcatactaaaatccaaaaaaaaaaaaaaaaaa

SEQ ID NO: 235046 - DNA, 739 bp, Homo Sapiens
gtgtatattttcctcagtctacccttctgctctagattgtctggactcaggagattgtggcagttactggatagttatttttaagataatgattgcttttctctgtttatataagtcatgtgtacttattgtagaaagtttgtaagatgcaaaaagtataaaaattaaagttatgcactactaacatttcaatatattttctcccagattttcaataaagactttcaggcagtgatttaacgaggattttattttaacttatattttagtttaaggggaacacgtgcaggtttgttctatagatcaattacatgtcacaggggtttggtgtacatattatttcattacccaggtaataagcatagtacccaatagatacttttttgataccccaccctcctccaccctctaccctcaagtagtccctggtgtctgttgttcccttttttgtgtccatgggtactcaatgtttagctctcccttatacgtgagaacatgtgatgtttggttttctgttcatgtgttggtttgcttagggtaatggcctccagctccatccatgttgctgcaaagacatgatctcattctttttttatggctgcatagtattccatggtgtatatgtactatgttttctttatccagtctactgttgatgggcatttaggttgattccatgtctttgctattgtgaatagtgctgcaatgaatatatacatgcaaaaaaaaaaaaaaaaaa

SEQ ID NO: 235047 - DNA, 707 bp, Homo Sapiens
  misc_feature (23)..(23): n is a, c, g, or t
tgactcctggtgccctctccctntgtccccccagagagacatatgcccccagagagagcaaatcgaagcgtgggaggcacccccattgctctcctccaggggcagaacatggggaggggactagatgggcaaggggcagcactgcctgctgcttccttcccctgtttacagcaataagcacgtcctcctcccccactcccacttccaggattgtggtttggattgaaaccaagtttacaagtagacacccctgggggggcgggcagtggacaaggatggcaaggggtgggcattggggtgccaggcaggcatgtacagactctatatctctatatataatgtacagacagacagagtcccttccctctttaaccccctgacctttcttgacttccccttcagcttcagaccccttccccaccaggctaggccccccacacctgggggaccccctggcccctcttttgtcttctgtgaagacaggacctatgcaacgcacagacacttttggagaccgtaaaacaacaacgccccctcccttccagccctgagccgggaaccatctcccaggaccttgccctgctcaccctatgtggtcccacctatcctcctgggcctttttcaagtgctttggctgtgactttcatactctgctcttagtctaaaaaaaataaactggagataaaaataaaaaaaaaaaaaaaaaa

SEQ ID NO: 235048 - DNA, 762 bp, Homo Sapiens
  misc_feature (32)..(32): n is a, c, g, or t
agccagactataacttccagagtgagcacccntacttcggatagcgcccctccccagccagtcttgagcctcccgccaaatcccagcctcactaggtggacccccttcccagtgttctgccgctcctgtggccatgtcgcccactccttccactctgggggcggaggggaatggcttctcgggaccctcagctagcgtgggtgcccttttccttatgcggagtgcccgcaaggctggggtagccccctccagtacaccccaaagtgaaagggataagagtgcagccccagaataggcggggcttggaggcggtcccaatgtcccctgggtccacagtgggtccccttttcacccttggcgctaggctgcgcactccctttccccgcagctttaataactcctggcctggcaccctcaccccaccctgactttcccatcccccagcgcttgtcctgcttcaccctaccccgcctaagactgtaaaggcctaaaaacctcggcctgtcctcccaccattctgcctgccatatgcctgtccccttttcctccaaaccctattagggtaccggaagcagaacccctgggctgaggccctggccctgcccccggcccctgcccctgcccgcccccctccagtccaggcagtcgagctccacctgccctctcctgctgcttcctctcggtgatattttttctacgccaaaacagacgggaaagggaacaaaataaagtgaaatccaatacaaaaaaaaaaaaaaaaaa

SEQ ID NO: 235049 - DNA, 795 bp, Homo Sapiens
  misc_feature (75)..(75): n is a, c, g, or t
cttttcatagggtgaacttgcacagcaaaaacaaacaaacgcaagaagagattggctttaacacactgggtactntgtggtctctctttcgtcggtggcttaaagtaacatctatttccattgatcctaggttcttcctgactgctttctccaactgttcacagcaaatgcttggattttatgcagtaggcattactacagtacatggctaatcttcccaaaaactagctcattaaagatgaaatagaccagctctcttcagtgaagaggacaaatagtttatttaaagcatttgttccaataaaataaatagagggaaacttggatgctaaaattacatgaataggaatcttcctggcacttagtgtttctatgttattgaaaaatgatgttccagaaagattacttttttcctcttatttttactgccattgtcgacctattgtgggacatttttatatattgaatctgggttcttttttgactttttttttttcccaatccaacagcatccttttttttaaaagagagaattagaaaatattaaatcctgcatgtaatatatctgctgtcatcttagttggaccaacttcccatttatttatcttaaaactatacagttacatcttaattccatccaaagaagatacagtttgaagacagaagtgtactctctacaatgcaatttactgtacagttagaaagcaaagtgttaaatggagaagatacttgtttttattaaacattttgagatttagataaactacattttaactgaaaaaaaaaaaaaaaaaa

SEQ ID NO: 235050 - DNA, 721 bp, Homo Sapiens
  misc_feature (24)..(25): n is a, c, g, or t
  misc_feature (172)..(172): n is a, c, g, or t
agctgcccccaccagaccccgctnntgcaggacctatctctgaccctcatagcctctcctccttcctcacccagttcctcaggaaccccggccttacccggccacatgtcatccgaggaaagtggtaccagcatcagccttctgcctgccctgtccttggctgctccagacncagggcagagaagcagctcccagccctcaccagccatctgctcagcccctgccaccctgacccccaggtccccacacgccagccgtacccccagctccccactccagagctgcactcccagtctctcaccccgtagccatgtccccagtccacaccaggctcttgtgaccaggccccagaaacctagcctggagttcaaggagtttgtagggttgccctgcaagaatcggccgccttttcccaggaccggagctaccaggggagcccaggagccctgctctgtctgggaacccccaaagaggcatcgtgatggttctgccttccagtatgagtatgagccaccctgcacgtccctctgtgctcgggtccaagctgtcaggcttcctccccagctcatggcctgggccttgcactttctgatggatgcacagccagggtctgagccaactccgatgtgagacgtcacgcaggacagataccgctccacactctgcttcctttgagttttttaataaaataatctcatgcggcaaaaaaaaaaaaaaaaaa

SEQ ID NO: 235051 - DNA, 747 bp, Homo Sapiens
agatgctgcctgtggacgagttcttgcccgtcatgttcgacaaacacccagtgtccgagtacaaggcccacttctccctccgcaacctgcatgccttctctgtggagccgctgctcatctaccccacacactacacaggagacgatggctatgtgagtgacaccgagacctcagtcgtatggaacaatgagcacgtcaagaccgactgggaccgcgccaagtcccagaagatgcgggagcagcaggcactgagccgtgaggccaagaactcggacgtgctccagtccccactggacagtgctgcccgggatgaactctgaggggtagcagccagaaagccaaagcagccatcggtggcccaggctccacgtgcttactgaggacatcagggccacctctggaccccttggcaggccacagagggctctcgtgtggggtggtgtccagccagctcttgctaagcaatcacgtgcacacaggcagcattaatggagtgcctactgcatgccagcaacagggcttggccctggggaattgggaggaaccaagccctcttcatctgttcatgtgcccagcatttattaagcacctgctgtatgcaaggttcccatgttacggcagtgaatgaggcataattgttccctccatcagcgattgattcagtcatcaagcagttactgatcagattaagaatcaggcactagtgatacacattcatttttaaaattcaaaaaaaaaaaaaaaaaa

SEQ ID NO: 235052 - DNA, 627 bp, Homo Sapiens
tgaagaaataatctgttgccgtggagaccaagtgcgactggcagttcgtgtccgagtatttacttaccctgaatctgcatgtgctgtttggatcatgtttgcttgtaaatatcgctcggtattatagggccaatatttatataagatttatacctgtgtttaattggaattttacacattgtacattacttagctatttagaggtttgttattttaaaatcacaatctggcttgaatggcatacttcaattttgtatatacttgactggtaatgtttaaaaaaaatcatgcattcctttaaaaattaaggctgaaaaacttgtataaatctccctggaatttagtataaattaagtgtatattctattttaataaatgctactttgtttacagttatcagtagtttaaatattaatataaaatgcattcagttttctttacacaaacaggtaatcaaagagatgtttgtctaagggtttgagccctagacaaatcagtatgatcattacttttcacaggttaatggaattattttatacagattaggagaaattaacctcatgacagatttatttattgcattggtgaaaataaatgttaatgaattacaaaaaaaaaaaaaaaaaa

SEQ ID NO: 235053 - DNA, 714 bp, Homo Sapiens
  misc_feature (57)..(57): n is a, c, g, or t
ctccacaaatttttattttctacactggtacagtttaagaaaaactgtaaacatctntgggaaaggtggcataatagaatggttagatcacagactctggcttggcttggtggtgcaggcctattgtcctagctactagtgaagccgaagcaggagaatcacttgagcccaggagttcttggctgtagcacgcaacgagcgttgggtgtcctcagtttggcatcaatatggtgaccccacaagagccagggaccaccatgttacctaaggaggtgtgaagcggctcaggtcagaaatggagcaagtcaaaactcccatgctcaccagtaatgggatcatgcctgtgactaacactgtactccagcttgggcaacacagcaagaccctatctcttgaaaaataaataaagatcacagactctgaagccagactggcaagattcaaatcccgactgccatttttaactgaaagaccttaggtaagttacctaacctctctgtacctgtgtaaaatggagataacagtagtatccacttcacagagttatgaggatgaaatacattcatatttataaaacgtttggaacccagtacttggcacatagtaagaccatgtaagtgtttgtaaaataaaactgaaaataaagccatataccaaataagtggaaatgtatccaaattccattaacatttcctttttaaaaaaaaaaaaaaa

SEQ ID NO: 235054 - DNA, 716 bp, Homo Sapiens
  misc_feature (55)..(55): n is a, c, g, or t
  misc_feature (73)..(73): n is a, c, g, or t
gcttatctatagctttaagattcccagcacttgttttatatattgttttcatttntgctatgaagaaaaaatntcaaggaaaagataccaaggcatcggacaatgaaagaaaagtaatggatgaagcaaacttagaattcttaaataatggtgaacattttgtaccttctgctggaacagatagtaaaacatgtaatttggacatgcaagacaatgctgctgccaactaacattgcattgattcattaagatgttatttttgaggtgttcctggtctttcactgacaattccaacattctttacttacagtggaccaatggataagtctatgcatctataataaactataaaaaatgggagtacccatggttaggatatagctatgcctttatggttaagattagaatatatgatccataaaaatttaaagtgagaggcatggttagtgtgtgatacaataaaaagtaattgtttggtagttgtaactgctaataaaaccagtgactagaatataagggaggtaaaaaggacaagatagattaatagcctaaataaagagaaaagcctgatgcctttaaaaaaaaatgaaacactttggatgtattacttaggccaaaatctggcctggatttatgctataatatatattttcatgttaagttgtatatttttcagaaattataaatattattaatttaaaaaaaaaaaaaaaaaa

SEQ ID NO: 235055 - DNA, 798 bp, Homo Sapiens
  misc_feature (147)..(147): n is a, c, g, or t
caaatgctgtattataaaggttttggagctgcaccgaagcatcttattttatagtatatcaaccttttgtttttaaattgacctgccaaggtagctgaagaccttttagacagttccatctttttttttaaattttttctgcctatntaaagacaaattatgggacgtttgtagaacctgagtatttttctttttaccagttttttagtttgagctcttaggtttattggagctagcaataattggttctggcaagtttggccagactgacttcaaaaaattaatgtgtatccagggacattttaaaaacctgtacacagtgtttattgtggttaggaagcaatttcccaatgtacctataagaaatgtgcatcaagccagcctgaccaacatggtgaaaccccatctgtactaaacataaaaaaattagcctggcatggtggtgtacgcctgtaatcccagtgacttgggaggctgaggcaggagaatcgcttgaacccgggaggcggaggttgcagtgagctaagatcgcgccactgtactccagcctgggcaacagcgagactccatctcaaaaaaaaaggaaatgtgtatcaagaacatgattatccagcggtattttctaattcagatcatcaaactgattatatagaagagttggctttaaaatgtttgcaaatgtctttttttttttaatactggaagaaaaaatattctgttgtgtctcatacagtgcttaggatgtctttcacagagcttattaaaaagatgaaacctgagaaaaaaaaaaaaaaaaaa

SEQ ID NO: 235056 - DNA, 764 bp, Homo Sapiens
  misc_feature (42)..(42): n is a, c, g, or t
gccaagtggaaaaactcaagtctggtataggagatggcaatntgcagtattacctgtacaattggaggtgtccaggtacagattctgaaaaggttggactagtactacaatagatggatatttttatttctagaactctgacatcatcatttgttaatatttaatgatttctggaactgccattccaaagaagaataaaagcacaactcaagtgaaattgaagtagtcgataatcagaaaagatgacaaaagtccacatgtgacatttgtacgtttctagctagaatgttaaacttcatcctttttttactgttgacctatttgtgggagggatgaaaggctacaaagagcacattcttgtaattttcaaatttttgcctgtctcttgaagaggtattttttcacccttagaaaagggactgtttttctatggactaagtagaagttacagagtcatgtaagaaaatctttgctattgtgtggagagaaattgctgcatttctgtttcttaagtgatggtacatttgtccatgtaacagaacaaaagatccatttggaaattttttttactggtatcaccttacatggtatcactgggaacatttatggaatcaacacttctgtagctcagtgacaggtggtggttgtttaagtgcagagcaatattaaaatgtactggtgactagtacatgtatttctccataagcagagttgccgaatcaataaacatgcaagtttgtactttgaaaaaaaaaaaaaaaaaa

SEQ ID NO: 235057 - DNA, 739 bp, Homo Sapiens
cattggatggtgtgcagatcaaagattcagtcattcagcaaacctataccgagtacctactgtacattcatgagtgctaggcagccagccttccaggtgctcaggtacatctgtgaacacaactggctattggaggaagcaaaatcagtaacatgacctgctctctttgatctgtgctacagaaaaaaaggaaagtggagaggcatcaggaagtcaggagtgctggggaggggctggtaacagtcatggtattaaagaggagggcaggcaggccttactgtgaaggtggtatttgagatgaagtagttggtcagagtccctgtttgacacatggagaccaccttgacagcaaaggccctaagggggagcggtgcaaagcaaggtgggctggtgagtgagaggagagggatggcatagagctgggtgggggcacaggagcccgtggggaaggtgttcgcctctgaatgaagtggggttgtatcagataccacgggtgaagcatcgggaagaggatcctgcctgtaaaccctgctcaaggactgcaccatcatcatgcccagtgtgtgcgtgtattaggtttgtatgaatataatgttgccaattgtatctgtttttatgaaatgtttgctatgtgccaatgattattcgatccatgagaccatagaagaatgatccaaggagttgggaggggaatcaaataataaatcagcgattctgcaatataaaaaaaaaaaaaaaa

SEQ ID NO: 235058 - DNA, 716 bp, Homo Sapiens
  misc_feature (34)..(34): n is a, c, g, or t
ggcaacaggacgccgccgagtcccgcttctcctncaggcacaatggctgaggaatgccccagagcgtgcgcggagcctgtggcgcccaaggccacggccccgccggagaggaccagcgactactaccgcgtgagcgcggacctgccgggcaggttcaacaacccggggtggttccggggctacaggacccagaaggctgtctccgtgtacaggaccagtaaccaggcttacgggagcagagcccccaccgtgcacgagatgcctaaagtattttatccaaattcgaataaattttcccaacaacttgcagcgggtggaatgttccggaacaatactctcaatgtttacctggagaaaagcatcgtgactggccccgataactgcatcacctcctgtgaccggctcaacttccaccccagttacaacatcaacaggccatccatctgcgattgaggggctggaaactccctctaggagtcctctgaccccagggcctcctggaaaatcatcatccctcatcacccacagtcgcccgattgtgacggcacagactgcgctgccttccctgaaaatattattcgtctgcggagtaggaaaatatgcaaacggggccgtgaagtcctgccatttcacatctaataagtacatgggaaagatgctaatggttgactttgcattaaaaacgttgtcacatcctgaaaaaaaaaaaaaaaaaa

SEQ ID NO: 235059 - DNA, 736 bp, Homo Sapiens
  misc_feature (141)..(141): n is a, c, g, or t
ctcccgcagcagaatactattaatgtgacatttaaaagcgttgctgcagaagtgtttcttcagtaggaaatggttagacttgcctcagttcttaacaagtgtttaaagacagtaggctgtagaagaacaagtattaggttntaaattttataatgtgccccatttattcacattgattgactatccagctgttacaagagcagtcgatctttattttgtgtaagttagtttcatttcatcagatgatctgcacagaactcagaataaaccatcaattttaggtataggctgttttgttgttggcattatcttttagatataaaatcatagctagggtgaactgtagacaagaaagtcttccttgaaacagggataatattcaggttattataaatatttaggcttgaagcatagagctactgtagggtgaaaaatctctgtaggactttctggggcttcagtaccatttacacccacgatgaagggcttaaatagaaaataatggaaaattaaatattactttaaggaaagcaaagctgcactaaaatttttaagggaaaaaaaacaagtagccatttatatttgtgaccttgcattaatatttaaatgttgattttaatatggagctagcacacatagatgcgcaggcacgcacacacaaaacaagcaaatgtaactccaggcatttgtaatttaatataataaatacaagcatgttaaaaaaaaaaaaaaaaaa

SEQ ID NO: 235060 - DNA, 707 bp, Homo Sapiens
agcaaagaaaatgcaaaagcagttgcatcaagagaagcattgaagtatttctcaagaaaaaggtggtggtaaaaatatgtaaaaggaaatacagaggcagtgaaatagaagatctagtactccttgatgaagaatcgaggcctgtaaacttacctccagcactaaaacatcctcaagaattactataatgtgtccaaaatatcactgcatacaatatctggtatttgaagagaaaaactgacttttgtatagtataaaacacaggctttcacaaattttgtattgctttttttccagttttgcagaaaatttacattctagttctcttcacacagtagcagttgtaaataatttatgaatgacagtacacattaaaaggtatgcattagcagcatattagtatgctgttttatttgctgaagaaaatactgtcttctatttttaatgatacattaggtacgatgtgtagttcggtagagtcctaaaatttttgtactactttcaatttggtgaaaatgtattaagttgtctaccatgttttcttttctagctgaataaaccacatcaaaggaaagggaccacagtatttgaatgtttgaaagtctgtaaagcttaaggttttaaaaatgttgcccgtaatgttgaacgtgtctgttaaaaaataaaagaaaaaatagttgcttcaaactaaaaaaaaaaaaaaaaaa

SEQ ID NO: 235061 - DNA, 762 bp, Homo Sapiens
aaacagaaggactagtgacatgtgagaaataaaatagcagctccaccatggacttcaggctgttagtggcagtactgacataaacatttgcaagggaagtcatcaagaaaagtcaaagaagactttaaaacatttttaatgcatatacaaaaacaatcagacttactggaaataaattacctatcccatgtttcagtgggaaatgaactacatattgagatgctgacagaaaactgcctcttacagtaggaaacaactgaacccatcaataagaaaaaggatcgaaagggaccaagcagctcactacgatatcaagttacactaagacttggaacactaacattctgtaagaggttatatagttttcagtgggaggggttgggatgggtaatctcattgttacatatagcaatttttgatgcattttatatgcataccagcaattattactgtgttcgcacagttctcacttaactggtgctatgtgaagactctgctaatataggtattttagaatgtgaattgaagaatggatcccaaaaacttcagaaagaggatagcaaaaaaagatctagtgcgattttatatatatatatatatatatacatacatatatatatatcatatagcttaagctgatttaaaacaaaggccttagactaattttcgattttctttcttgaaataagctaatggcttgtttgtgtaaagcttttttattaaaagaaaaattttaaaaatcttaaaaaaaaaaaaaaaaaa

SEQ ID NO: 235062 - DNA, 788 bp, Homo Sapiens
  misc_feature (60)..(60): n is a, c, g, or t
  misc_feature (117)..(117): n is a, c, g, or t
  misc_feature (152)..(152): n is a, c, g, or t
ttcccgagcacgagcccctgtggcttaatgccagcctgggctctcagcaggaggaccctntgttattgcatcacacttttggaccagcatgccggtgggtgcaggcgccatttgtcntggaagtcaatttccttcaggagacaaagcaagtntggggtggtagccttaatgcccagcaccttggattgattcccatggtctaagagggtctttttgactaaggccagcctgtggtgatcccagcagctttggagggcctgcagcccacacactgactgatacatggtatgttacagggacttgtcactttggatcaggctgggccactacagggcctgatgggccaacttgggtaatcactgggaggagggaaactgaggcccgaggcagatacctgggtttggggagggctgggtttagcccggttctctgaactacatacccccagctgtgaagccttcctcttgaggggttgaggtgggcagtatacaggagccaagcagcccagggtgggtcgcagcccaggccccttccagggtgccactcctttcccccttgtgttgcaaggagccctcctgcctgggagcttgttctttggaaggtgctgagcctgaatttgccacagtcaagtcaacgttcccaccccactggcttggttacagggctctcacatggggtaggggagccatactcccacccccttgcgtattcccctgggtttgttgatattttgcactcttaacacctgccaataaagacggtctacactgaaaaaaaaaaaaaaaaaa

SEQ ID NO: 235063 - DNA, 815 bp, Homo Sapiens
  misc_feature (43)..(43): n is a, c, g, or t
gtctgctggtataaagtaccatgaagagtccatccacgccgcntacgtccatgtgatagagaacagcaggcactatatctatatcgaaaaccagtttttcataagctgtgctgatgacaaagttgtgtcaaccaagataggcgatgccattgcccagaggatcctgaaagctcacagggaaaaccagaaataccgggtatatgtcgtgataccacttctgccagggttcgaaggagacatttcaaccggcggaggaaatgctctacaggcaatcatgcacttcaactacagaaccatgtgcagaggagaaaattccatccttggacagttaaaagcagagcttggtaatcagtggataaattacatatcattctgtggtcttagaacacatgcagagctcgaaggaaacctagtaactgagcttatctatgtccacagcaagttgttaattgctgatgataacactgttattattggctctgccaacataaatgaccgcagcatgctgggaaagcgtgacagtgaaatggctgtcattgtgcaagatacagagactgttccttcagtaatggatggaaaagagtaccaagctggccggtttgcccgaggacttcggctacagtgctttaggtctaaaatgactccaggtgtcgaagatccctgatctttggcaagaagatgcaaattttaaactaatctgtggtgaagcagagagaatactgggctaggaagctgggctcgtttcagctgtgcgatcctaaataagtccattcaataaagtgttatttagaactttcaaaaaaaaaaaaaaaaaa

SEQ ID NO: 235064 - DNA, 790 bp, Homo Sapiens
  misc_feature (51)..(51): n is a, c, g, or t
  misc_feature (139)..(139): n is a, c, g, or t
tggaaggctcagaaggcagagtgaagaagcatacccttaagagaagccctntgaataatcaagtgctaaaacaaaatcaggtgcttttttaaaacagcttgattgagatataatccacataccttaaaattcacacatntaaagtttttagtgtctccagacacagtggttcatgcctgtgagactggggcaggaggatcacttgaggccaggagttcaagatcagcctgggcaatatagtgaaaccccatctcttaaagaaaaagttagccaggtgtgatgatgtgcacctatagtcccagctacttgggaggctgcagctgtggctgtggctgaagctggcggatcgcttgaggcccagagtctaagactgcagtgagctctcattgggccactgcagtcgagcctgggcgacacaaagagaccaccctgtctgatagataactaacaaaatagttttagttgggcaaaattaaagagttgggcaaccatcactgaaatcagtttcagacattttcaccactccaaaaaagaaaccccacatcgactagcagttactcatttgcttctccctatgtcccctgacaaccactaatctatttgtctctatagatttgccagtttggggcatttcatataaatggaatcatctgtatgtaagtggttaataaggattggttgattgaagattgaaaagggtcagctgggaaaatttttaaaaagactgtttttaaaaaaggtgctacaaaataaagtgctatctttttctgttaaaaaaaaaaaaaaaaaa

SEQ ID NO: 235065 - DNA, 701 bp, Homo Sapiens
ccacaggagcctggtggagctccaggaggtttgatctctcttgtgaactctggaactgtattcccaattgtcaattggacatccctacgtatgggacctcagatatttcaaacatgatgtgtccaagtctgtatcacttctggccatcatattgttcttttatttttccaaatttcacatcaccagtaacaaactagctgtgatcatggcagatagcctggaaataaaactcccctttttaccctttgcacagcaaattgacatcaaatcctgtttctactttttttttttttaactattgcttccctattctgtattctcactgctccatcttctgatgtaggaggtcatctgttttcctcttttcctctcctctgactcttaagccctttcccattctctttctcaggaatggctgttaaaatgccaatatggtcttgtaactttcctgtacttagtgaacctccttatttacaccctgtttgtgaagtggctgtgttcaccctgggtggacacggaatgtttttggcatgtacaaagagaattttatgctgcctgtgtacagttattaatttgtaagtacactcagctttttgtatctgtaggtttaatatctgtgtatgtaagcaaacttggatgcaaaatatttgaaataaaatcagatgcttgcatctgtagtgaacataaaaaaaaaaaaaaaa

SEQ ID NO: 235066 - DNA, 686 bp, Homo Sapiens
ctgcttctgaaaacggctccctgtcttgggctctaatgagaatctggggttgggagaggctgttggtctgagggcagtaatcacaggctgcaggctagagggggcagttatgactgcctgaaagtgggtgagggattgcacttcagaaaaacatctaaaaaacttagtctatgtttgaattccccacctccatcccatctatgggaagagccgttcagtgtttagagagtggggagatgggtccctgcacttggcctctccataagccttggagggtcagggctgataccaggggtcctggcaagccattgggcagagacagaccacaagagcagggcatttttttacgctgggcatacatatgcacacaagcatgcacagaggcatgtcccgtgcccagcctctccaccgtcactgtccgctgctggctggaggggatgcaggggtagtgtatgcagaccttccactgggcaaatgccatgtgtcaggagggaaaggcctaggaagcccccatggggaaggttctggatttattccctcctctaaatgctataaatacgttagcacttgagtcgactggaggctgccaggaattcaggatgcatacagctgtaatttaacccagagcagctccacgtgagagcattaaagatgtaatgaagatgtttaaaaaaaaaaaaaaaaaa

SEQ ID NO: 235067 - DNA, 738 bp, Homo Sapiens
  misc_feature (17)..(17): n is a, c, g, or t
  misc_feature (95)..(95): n is a, c, g, or t
atgtactatcacttgtnacatgccctctgaattggagaaagtggcttgcacactttgaggtaactaactgtaattaacttgtgttctctctttcntgctctccttctcaacatgaacacaaacctctatggaaaagtagcctcttgttaatctgatctagtttgtatggaaaaagcccatggagaaccttatctttaacaagctcccagagggtgcccagatttggaaattctagagagcagtggtgaccttttagcaaagcttctgtaacagttcgaatgagttgcagaacattccactccatcaaatgacactgtaaacaaatcacttcaagagaggcttggttttgtgtggcacagatggacccaagctttcatgctgtgcactgagatagaaactccacccgcagcgcctgcgatggatggagcagtgtgccctgatgctcaaagcgtattaaaggaaaaaaaagtgatcagcatggaaagtttttatggggaaattataactccaagtgggtgcattggtttaaaaatggatcacaatgatagagttcttcatgaatgtttacaagttgtaaggaataccgttagtgaaagaggaaaagaagtgggttctgaaaatgcagtttcccatccaatgattttgataacaaaattccaacttttctcaatgaaactgatgcagtattatttgtgcaaataaaatgtgtcataaatatgcaaaaaaaaaaaaaaaaaa

SEQ ID NO: 235068 - DNA, 788 bp, Homo Sapiens
  misc_feature (180)..(180): n is a, c, g, or t
  misc_feature (185)..(185): n is a, c, g, or t
cagcatcatagccacacttgagcacacagttcaggctccttttcacccagatgtactgatcagaattgttcccacagagtgacactcttccccaggctggatgggggttttgtgaggtaagggcacctcttcatcacctggcccttccatgcacatgtggttgtggtcgttctgtggtgngaatntgctgcagttcagactctctggccaggcaaatccaaattccttcaggacgggttcacagcgtctcttgactgaaagacacatgccgccgcatgggccaatggggatgttgatcttctctgtgcacattggcacataaacagaacaaaggaagaactggaaaagtaacaaaatgaacacacacaaaaaaaacaatgacttggaagtttgaccaaatgctcccacaaagctgagttgaatgcttccaggcaatctaggtatctacttttaaaccaacctatcgggagtctgtctgtttactctgacctcaaacaagggcgcctgataatccatcacttacatacttttcttagtttggctttagtaatcctttccagaagaatgtacataaataaataaataaaataaatagggtctgaagaattgcataagccctctttgcacaacacttgaaataaatcttaaaaaactggctttcaatctccttccattttagaaactatttgaaaaagctaaagaaactaatatgactcatttaggtggtttatttttatccccgtttctttatcattttaaaaataaaagttaaaaaaaaaaaaaaaaaa

SEQ ID NO: 235069 - DNA, 641 bp, Homo Sapiens
ctgtcctgtgttctgggcttgtctcgggtctgaccaggagatggaggatgtgtccttggcagagccaaggggagacagaggtttctggatgccatgacaggctgtcggggtccaggtggcactcatgggccccctgccccatgtgaatgctgctggcacctggtggggggttgcccagggatggaccctgggcatggcttctgggctgcttagtccagggggagcaacttgtggccaaatccatgagttcagaggaaaaggggaaggcactgaaacgtcaccagagagacagctgttgagaccgctcagaaaccctctgtctgtcacactctgccctggctgctgtgtggtcagggcaccatgagggtgtacagatgtgctgtgtcctcagagcctcgcaggtgccctcacttactgcctgggcccctgcccagcagcctcaaggacaggcctttgtccctcacggttgtggacaggaggtcgcaccactggcctgcgagagcctctggtgggcccgtggcttcccccagttatctgctaaggaaaactgtgctcttcgaagggcagagccaagaagtcagccctgacttttgtaaaattttactaaataaaaccacctggataaaaaaaaaaaaaaaaaa

SEQ ID NO: 235070 - DNA, 746 bp, Homo Sapiens
  misc_feature (19)..(19): n is a, c, g, or t
gccgaaaaagcctcacggnacagaacacggccacgaacccccctggcctcactggggtgacttctcctcctcgtcgtcatcgtcctcctccagctcgcccagcaacgagaacgccacaagcaactcgtgagcccacgtcggccgtcgggaaagcacggggcctttcccacccaccctcagccagcgccacacggcacccacagactgggtgccccggcggcgccacgcttggctggtcagcgctgcaggtcccgcctgttccagggcaggacccgggcccggcccaccggccccctggcttgggaaggcgtgggccacatggtcccctctggggcgtccccagcctccccgtcctctgtctaacctcaccctctaaacgttcagcggtggaaagatttttataattttaaattattactgctttgaaataaacggacgtttgagctcacgtggcggccatgcatggtttgtggcggaagacggggcccagcggctcccccagcgctgaagcacggggttcagcggctcccccagtgctgcaggtgccgccaggacgggccacgtgggcccccagcctccccctcggccgcctccacgacccggagtaggggggctcgggaccatgaggatgaccagcaaaattcaagaacaaaactgctccaacagacttttttaaaggaaaaaatatgtgtatcttgaaagctatttaaaatacactacttacaaagaaaaaaaaaaaaaaaaaa

SEQ ID NO: 235071 - DNA, 550 bp, Homo Sapiens
  misc_feature (14)..(14): n is a, c, g, or t
  misc_feature (445)..(445): n is a, c, g, or t
  misc_feature (459)..(459): n is a, c, g, or t
  misc_feature (544)..(544): n is a, c, g, or t
  misc_feature (546)..(546): n is a, c, g, or t
agtggtgcaatcanggctcactgcagccttgaacttgtggactcaagcgattttcctgcctctctcccaaggagctaggaatgcaggagtgtaccaccatgcccagctaaataaaaaaaaatgccaagttgcccaggttggtctagaactcatagcttcaagcaatcctctggcctcagccttccaaagggttaggattacaggcatgagccaccacacccagcctattactttcttatctgtattattgtcaactttacatttattcttcctcttttaaattagctgtggaaaggtgtatgtatttccttttcacaaagtattaaaccatctattcctatgtccttttcttttgatgttgagagagtatttctttttttaaacccacattcacccttactctttttaacttctctaccattccttcacatttcctccattttantagttgcaggatancaatgatagggattcatatttacctcactggatttttatgagacttaaaagaccaaatgctttgaatagtaaaacatgaaattanangggt

SEQ ID NO: 235072 - DNA, 297 bp, Homo Sapiens
tttttttttttgagatggagcctgggcagcaggagcaaaactctatctcaaaaaataaaacaagatttttctgagaaaaaggtgtaaaaccgtatactaaatttgaaatagaaatataagcgtgaactcatttgttgttcttttaccgtagacacattttctacctctgccccagtagcagtagacacatcaagcacctagaaagtggtctctaatacatgaaaaccatgaattcatagtgatggtttcaaagccaaaaccaaccaaacaaaaacatgtaattggtcactcttggag

SEQ ID NO: 235073 - DNA, 503 bp, Homo Sapiens
tggctcacacccctttgaagtcatttaagacatatggccagctgtaccttatatgcagccattcacaggccctcgaggcgctcaaacttgaacatgtgaaaaaaaatcacccaggggcttgttaaaacagtttcctggaccccaggccaagggtctgactcaggttgggaggggcctacatttccatgtttaccggctcacagctgatgccaaggtcatgctatgaccaacagtgcccgggcggcagggggcagaacctgccatcaggaaaacgcaaaaggacatgacctgtttggccaagattaatgtatttacctctgctgatttataatcctttatataaaaacatccttactaagtccccatttattgtactagcagacaggttttctctaatgaaacctcagatcacaacagatggactcacatattttaatagtctctctggatcctgatccccttatctcactgtctccataaacaatatgccaactcccggccat

SEQ ID NO: 235074 - DNA, 470 bp, Homo Sapiens
tatcctcccaccttagcctccaaagtagctgggaccacagggtgtgccaccacatgtgacttttttttcttttttcttttttttgtagaaatggagtctcactgtgtttcccaagctgatctcaaactcctgggctcaagcaatcctcccacctcagcctgccaaagcgctgggattacaggcatgagctaccatgcctggcctgttaatatattttcagtgattaaacaaatgatgacaaaacataggttaccacgttctctcccatggaatacccatttctgtaaacacccaaaatgttccagtggggttttcctgctttataaagcagtacatattttaaaccccttttactcttaatttcaaagacgtttggcgttttgcaaagctagaaaaagtaattttatctctcactgccatacctacagtcaaactatagtcgaccggcggggtatttagtagtagtaggc

SEQ ID NO: 235075 - DNA, 498 bp, Homo Sapiens
tgcctgagcctcccaaagtgttggaattacaggtgtgagccactgcgcccggccaggaaaacatctttaaggagggatgtgaacttggctttgaagaatgggtgggatttggaaaggtaaaaggaaatagggatggctttacgtaagagaatgaatgagagcagaaacataaaaggggagaatttagtatagttattcttgggacagtgagtttaacaggttggccctccttcccatgtgagaggtaagatttgttaggactttctaggaagggtgttaaaattaccagttgctgtagtttgaggtttaaatactgagtaaaagagagtgaaattgaagttttgatttaaaaaaattgtgtcatagaaattaatttgtaatatggagtggagaaagatataaagagtttgggaatccagtaagaaaagtgttgcatgaatacaggttcaagttatataagacctggtgatgtgataccatgaagaccaaaaaaaaaaa

SEQ ID NO: 235076 - DNA, 576 bp, Homo Sapiens
gatctaccatatttaggaaaaagttatttaaaaaagagcatggtggaaaaagaatgtaagacccagaatttatccctttgacaatgaatctggcctttttaatagcaggatggaattgattcactagtttttgctaactttcactttcagtaaaggttgaggtgttgtttttgcaatgactgtgtattcattgaggaaaggtttccaatgaaatttcattactctgacctcttctaatttttggtcttctttatatttacatgtcttacattccacaaaattatttagaaatgctgggcatggtggctcatgcctgtaatcccagcactttgtgaggccgatgtgggtggatcacttgaggtcgggagtttgagaccagcctgaccaatatggagaggtcccgtctctgctgggagtacaaaattagctgggcgtggtggcatgtgcacgcctgtaatccccgctactcgggaggctgtggcgggagaattgcctggacccgggaggcggaggttgcagtgagccgagattggccactgcactccagcctgggcgacagagtgagactctgtctca

SEQ ID NO: 235077 - DNA, 436 bp, Homo Sapiens
accacttgactttctcctgacatttctccttaatgataaattggaaaattcaaattttgactcttcagccatcagagtgtggagtatcaaacattgattattcaaacttatgaactagtgaaccaacccatcatggctcaagaaaataattatccatctctgcatttataactccctgctgctgttcaccctgaagcacactatgtagacttgccatgtgcaaagcagcttcttagccaatcaatatccacaactgctgggaaggatacctgcttatctctttgcggtgctactgccaatcaccagactaaacatcatttctattccatggcaacgttttaagtcagaccatctggaatgtctccagatttggtaaaaatgcaaataaaactttgctttacattcacctagcaatgaataaaaattaacatattca

SEQ ID NO: 235078 - DNA, 403 bp, Homo Sapiens
ctctccagcagtccctgcatttcctcacctataaaatgggaaggggaacactccttatggagctggttcaagtattgagcgagagaccgggactacaagtgttttctaacacaggggcatgaattcagccgtggcggcggcagcttgttaggagagcgatcacctaggggctgatggggtggccaggcgtcgggatggcatccagtcttctctgtctgcatgctggagtcatgtgagagatttataacagaatagggatgctgggttccatctcctgaaattctgtgtcattggtctgaggagtgtcctgggcatctggacacgggaaagctccccagcagggtctcctgtgcagccaaggttgaagctgcttcctagtccatttcttgctcttcagatggat

SEQ ID NO: 235079 - DNA, 568 bp, Homo Sapiens
  misc_feature (33)..(33): n is a, c, g, or t
  misc_feature (520)..(520): n is a, c, g, or t
ttctgacaaggaaaagaagaaaacatacttctntgcagcggacaaatactggagatttgatgaaaatagccagtccatggagcaaggcttccctagactaatagctgatgactttccaggagttgagcctaaggttgatgctgtattacaggcatttggatttttctacttcttcagtggatcatcacagtttgagtttgaccccaatgccaggatggtgacacacatattaaagagtaacagctggttacattgctaggcgagatagggggaagacagatatgggtgtttttaataaatctaataattattcatctaatgtattatgagccaaaatggttaatttttcctgcatgttctgtgactgaagaagatgagccttgcagatatctgcatgtgtcatgaagaatgtttctggaattcttcacttgcttttgaattgcactgaacagaattaagaaatactcatgtgcaataggtgagagaatgtattttcatagatgtgttattacttcctcanataaaaagttttattttgggcctgttccttaaaaaaaaaaaaaaaaaa

SEQ ID NO: 235080 - DNA, 582 bp, Homo Sapiens
agaatttgaccttctaagatcaagtaagggacacttgaaggcttattgtgcttcacagtaaaataacagctctattattattcagcaaggccaaagacttttgagaatgtgtatggaaaattctttttgtgcatttgagggcaaaattcaggccatcttcttatacatatactatcaaattatgttgtgtgcattagaaatcagttgcttgatagtagctattaaacccaatattgctgatagtatgctaatatcctaaaacttaaatattgcatatctatgaatgttaaattcagaatatctctaaaacatggaaaattgatgtttcaataaaaagggagacattttattattttgccttactaatgattttgcagctctgtttttctgcacactcaatagaaaatattgtgggtctgagatgccctttgaaaatgcctgaaagaaaacatgggctactacattatgttaatgttttgtaatgtccttttaatgagtggtgacataaaagggctgctttgttgtcctgatatggcaaaaattaaataaattctttttcactttaaaaaaaaaaaaaaaaaa

SEQ ID NO: 235081 - DNA, 587 bp, Homo Sapiens
  misc_feature (18)..(18): n is a, c, g, or t
  misc_feature (57)..(57): n is a, c, g, or t
aaaacgacaggagcatcncaggaagggttcccagaagtcagaatccaagatggatgngaagcacaaaatgcaagaggaaaatgttaaactaaaaaagcccctggaagaaagccacaggctgcaaccccaccctatggatgaacaggatcagctgctgctctctgaaaagccacagttgtgtcagctatgccaggaagacggcagcctaacaaagaatgtgtgtaagaactgcagcggaaccttctgtgatgcctgttcaacaaatgaactgcctcttccttcaagtatcaagcttgagcgagtttgcaatccctgtcacaagcatctgatgaagcaatattctaccagcccatcataagactggaggccaagacctggaccaaaacgtttatgcaggctcctctgtacctgtgttttagctgtcaggatctcatagagcccagttcttagagtcaactaaagagttgataggaatttactaggtccagggagaaaaggcagtggttggggttactggaaattttgctcattttctctaatgactgtatgaataaaagtgaacttacttgaaaaaaaaaaaaaaaaaa

SEQ ID NO: 235082 - DNA, 548 bp, Homo Sapiens
aaaataactgcatcctttaatggcagtaatacaattactggattaagagaccacaggagaaaggcaggtgacgtttctggaagacagatatggagtataaaaagggtgtgaaatagtcatgcggcgatcattgtaaaaatacagttcattatatacatatttgcaccaccaactctcaactctgaaacagtatttacacttttgttacaatcctggttagagaacaatttttctttaaaagctcggcctgatggcaaatgagaatttcgggtgaattcatagtcctatgaggttcttaggctgaatattccaagaggagggctccagcttctatttcatccacagatttcggtttaaaaaatatttttcttttacaaaagaaaattctcaaaaggagaggaaaaacaacaacaaaaaccacaacactgccacactgtgtattcatacttattttacaaacaccaagggctgtgccctctgcttcaaggccaacactggtggctgaagacaaatctcattaatgattgtgtaaaaaaaaaaaaaaaaaa

SEQ ID NO: 235083 - DNA, 624 bp, Homo Sapiens
  misc_feature (78)..(78): n is a, c, g, or t
aaaaaaggctctgtatgcatggtggggctatgtaagtactctttaaaactatggccctattaatcttacaagtgtacntattgggtcaagcaatgtaaactgtataaatgtaaaaacaacccctccacacacataacccctggaatatatggtaaaaacaagtagaagctgtttcagcgagtgggttttttccccctgcctgcggggggtgcctttctcattttcagcaaggtgatgattatctcatgggaaatgacaaagatctgcttttgtggcagaggactttgtagatttgttattttaagagaggttattcctttttattccttccctcccactaatttgttggcctttaacagcaattttgaaaactgggtcttctggttatgtttttgttttaaaatctttaaattagaggatgctgtgccattgagtactttaagttaatatgaggttctggttcaaggaaaacttacgttggatctgaaccaatgagcagatattttgatatgtgccactcttgcatatacatctcagtcctaactaaagattctagtggcatccaggacctttagggaggcatttaataaacacttaataaataccaaaaaaaaaaaaaaaaaa

SEQ ID NO: 235084 - DNA, 627 bp, Homo Sapiens
  misc_feature (12)..(12): n is a, c, g, or t
caagaagaaagngaccagatagtgttaagatgctgcagttgtgttactgtgaagaaaagattcgcttccactttcagcaggctatataaatatatatacatatatatatatattttcactttggtaaaaaaaagttgaaaaatctgaggagaacataattaccttcacaaattatttatagatacactgggtgagaagcttactgtagggcagtcacccaaaaaaaactaattttagtgctttcaatagtgtaatatttgtatctattaccatggcagcagtgtctgctgcacactgtgtcctattactgtaaatctcctggtttataattcttatggaaactaatttgttttgtaatggaatccagagcagatatgtataatatgatcaggattgtcctacagttgtaaataagaataggtcctgtttattttgacatctttttacaaatgcattgtattagggtgtgaatattctgaaccatcctcttgtttaaagtttggaaatttttattgttaaatgtaacattttaatggttgtaataattatttgtatagatatgaatatagtattttatttaagaaaataaactttgcatttttgcattgtaaaaaaaaaaaaaaaaaa

SEQ ID NO: 235085 - DNA, 560 bp, Homo Sapiens
  misc_feature (22)..(22): n is a, c, g, or t
  misc_feature (36)..(36): n is a, c, g, or t
agaattcggcacgaggccattntgatgttggagcgnccgcggctgtaggctatttttttgtattttcagtagctgggattacaggcacacaccacaatgccaggagttcaagaccaatctgggcaacatagggaggctacgtctctcaaaaaaataaataaatacataaataaataaaaataaagccaccgcgcctggccaaaaggcatttcattctttttattttattttattattatactttaagttctagggtacatgtgcacaacgtgcaggtttgttacatacgtatacatgtgccatgttggtgtgctgcacccattaactcatcatttacattaggtgtatctcctaatgctatcctttccccccccaccctccccaccccacgacaggcccaggtgtgtgatgttccctttcctgtgtccaagtgttctcattgttcaattccgacctatgagtgagaacgaaggcatttcattcttgatgatggtggtggtgatgatgttgatgacaattatattaataaagcaattgctatgaaaaaaaaaaaaaaaaaa

SEQ ID NO: 235086 - DNA, 625 bp, Homo Sapiens
aggagggtgggaaccctaatttccacagaatgaaattttgatgttaaatgacatgtatacaaattcttccttaagtgaaagttatgctgcatcgaattgtaactgaaagtatagatccaacaaatagagactgggttctagagagttctggtctatagaaacccaaaactaaaatctctcataactcaagtatggaatactttttttaaagaaattcttatcatgggtgttgtaataatgaagacgaatttgactttatgcagtgttctgcagcatgcctcccccacatctcatagcaccaggttgtgtctgacctgacataccctgcagctctcagctggctgcagtaacattttgtgggagaaagaggagctggagttacagaaatgattgtctcttggttctcagtttttagcccttgagaggacatacttttccagcctcatgggtatggcactcttaattaaaatttcagtgactgtttactggatgaggcagatttttcacatttttgcaaattaaatatattttatatatattaagtttaattttttcagtttttttaatgtaaaagcaagtgaaattttaataaacttctgtaattaccaaaaaaaaaaaaaaaaaa

SEQ ID NO: 235087 - DNA, 691 bp, Homo Sapiens
  misc_feature (140)..(140): n is a, c, g, or t
cgcccggactactgcctatcaccattgcactttattatgtagtactgatgggacgttcctgtcttctttgctaaagagcccttaccaagggatcaggagcaatgccactgctagcataccttccttagtgaaaaatcttntggaaaaggatcccactctgacctgtgaagtactaatgaatgctgttgctacagagtatgctgcctatcatcaaattgataatcacattcacctaataaacccaacggatgagacactgtttcctggaataaatagcaaagccaaagaactgcaaacttgggagtggatatatggcaaaactccaaagtttagtataaatacttcctttcatgtgttatatgaacagtcacacttggaaattaaagtattcatagacataaagaatggaagaattgaaatttgtaatattgaagcacctgatcattggttgccattggaaatacgtgacaaattaaattcaagtcttattggcagtaagttttgcccaactgaaactaccatgctaacaaatatattacttagaacatgtccacaagaccacaaactaaacagtaaatggaatattctctgtgaaaaaattaagggaataatgtgattccaagtaaatgtcttaatacagtttcaattagaaaataaaatgtctcatacttgcaaaaaaaaaaaaaaaaaa

SEQ ID NO: 235088 - DNA, 675 bp, Homo Sapiens
ctattaggtttcttcaataatgttaaatttctaaattatagcatatgttttagttaattctgaaatcagttacttcatttgttaattatccctcatatcatgaatattgttttttaaatgttctatacaaatttgcatcacttcttttcttacagcttttgcagttaatatattctaaacttgaaaatgtggtatcaatcaataatagaagtatcactggaggatttatttagctttgtatttcttaattttagtcctagctactaaagtatgtaagccttaaagtttaaaatgtttttcttaaattagctttatacacaaacattttcatttactttatgaaatgggaggagatagtccactgtgcttatgtttttttgtttaatttctatattctgaagcagtgcagatatagggtatgctaatcaagtgagcaaggtggaacatgtacaatataaggagaagctgtaaaaatcacagtataaaattatgaagtttggtaactgtaaaatgtactgtatttatatgtaactctcattctaaaagttgccacaaaagctgaattggaagcttcatgtctgcatgaaatttcctatatttttaatgtgtatgatgaaattaatttttcttgaatattaaagtctgccaattgctatgaaaaaaaaaaaaaaaaaa

SEQ ID NO: 235089 - DNA, 654 bp, Homo Sapiens
gaggctgtgctcccatggcggcatacccatccttgcacatatacacatacccgtaggtgagcctgggctgtgccacacaagcacttcatcgggggttttgagattagacacattttataatgggggagatgtatgactgggaactgcatttacttgtggtatactgtgttgtgcactcatgcactgaccttacactttgtacttacactgtgggcatgtggtcaagatgcatacctcatgaattcaactattttttcataaaatgaaattttattatgatgtgtaaaaatgctttatcagaaactgaagtgtgttctcatggcacacttcatggcagcacagatatacctcattttaaccaatagatattctctctaaaattatgtgcaaatcaatttttaaaaatcaaactctatgttaaacacattttggcagtgtgctataataaaaaaaagtgttgtgtcaaagctttctagtgacggtcagtcctactgctgtatgtcaggtttgctcacaatgaggtattcccacatagaaataacaatgcatgtattacccagaatttaatgttgcgtaccttatgttcaatgaggttttgtaatttttttaggctgatgattaaaattctttctctctaaaaaaaaaaaaaaaaaa

SEQ ID NO: 235090 - DNA, 655 bp, Homo Sapiens
  misc_feature (57)..(57): n is a, c, g, or t
tatcatcccaggtggtgcttgaccctgccataccctggctattaagataaaaagatntgtggacattaaaattatgaatatgtcagtaataatccagcacacattgaaatattgacacagattaccataatttgtgcaacatcttataaacaatgtcatttccatagtagtctaaggcttcaccagcctggcccactgtatctagactttaggttcattttaataattatgctttccttctctgtatcatttgggaagttgataaatatcacttccttagataccttcattcagtgatatatctggcttttacaattaaattggaaaaggtaagtttctctttggtgggttgagagttggaccatcaattctaatctacaaaaggaaattcatgatttcactctgacgcctaggatctagccaaggctggtctgcagtatcagatgtccaaactcatctactattagccatattttgtgagtcgtttgtctaaactttgtcaaaaatgcctttgccatgattttgttgctatctggatttcaaacatggacagttaggaagatgtgcattgaagtaggaaaattttgttcagatttgctgttatttattttttaaattaaaaatggaaatgtattttaaaaaaaaaaaaaaaaaa

SEQ ID NO: 235091 - DNA, 736 bp, Homo Sapiens
tgctattagttatgtttgtttctcggtttagaagctattcgaaaagtccagtttctgtccccagtgtagcaaaatgtagttcctcggttgtttttctttaaatgctttataattttacactacctttttaatatacaaacctcattcttcattggataacttgaaggctttgatttctttaaaaatttaaattttagtgtgtatattactttgacagttccctcatctttgagatgcactgatcactgtgcttgaaaaagacaatactgaagattgtactatgaagtttattgaataattttcataaattatttatccaaatgagagatttttagatttttgtattctgcttagttttaaaaaaaaaaaatagtagtttaaaagagaggctagtaagtttgatgctattcttgccaaacaaactcagccaaaatctttaaagtaacaagagggaaaaggatgactaatcgttctgcttctgagtacattttccaaaacgttggaaagaaacttctgaattgaaatcttgaatgtattgaatctgtcaaggtacacagcggtgcctttgtaaatgttcattactttatttaatcaggtgataagtggtgtaatgtagcagagcttaagaatagaactcaattatcactttttgtgaacaagttggaattgtcatgttactgtgtaattgatttgctttacaatgaacaataaatttaataaaataaaaaaaaaaaaa

SEQ ID NO: 235092 - DNA, 587 bp, Homo Sapiens
cagggtgtgaacagcaacaagcatccagcacttgcagaaataaatccaaaccatccatttcaaggccaatactcagtatcagacatgaagttaaggttctcacattctgttcagaatagtgaacgtggcaaaaaaattggaaacgtcatggtcacaactagccggaatgttgtacaaacaggaaaagctgttggccagtcagttggaggagctttttccagtgcaaagacagctatgtcttcatggctttccactttcaccacttccacctcccaaagtctcactgagccaccagatgagaagccttgagcaaggcgtcagaggctgctattgctttctgaggtttaagtgtcccctgtctgtctgctgctcccaggctgttactagccacagatccacagcaggggaccatatgtcgaactgtttacatggatgttgctctaagtgaatgtttcgggatgccgaaatgatgaaatcacagccatagcagggatggctttccaggttggggtttcaattgactacttttatttcagtctgagcctgattaaaacatacagtgaaccttcaaaaaaaaaaaaaaaaaa

SEQ ID NO: 235093 - DNA, 793 bp, Homo Sapiens
gcagctgagtcccttgtcagactgttccaaaaagcaagtaaacccacttcaagcacacaaatcatgttgaagaccaacatgtatcataatgaaaaggtgaactttcatgttgaatgtaaagactatgtaaaaaaggcaaaggtaaagatcaacccagtgcaacagagccggcccttgttgagccagattcacacagatgcagcaaaggagaacacctgctactgtggtgcagtggcaaagagacaagagaaaaaagggatggagcctcttcaaggtcatgccactcccgctttgccttttaaagaaacccaggaactattactaagtcccctgccccaggaaggtcctgggtcacttgcagcaggagagagcagcagtctttctgccagtacatcagtctcagattcatcccagaaaaaagaagagcacaattattctctttttgtctccgacaacttgggtgaacagccaactaaatgcagtcctgaagaagatgaggaggacgaggaggatgttgatgatgaggaccatgatgaaggattcggcagtgagcatgaactgtctgaaaatgaggaggaggaagaagaggaagaggattatgaagatgacaaggatgatgatattagtgatactttctctgaaccaggtattataatgcttgcaagcttaccagactgacctttgtattactattttgaaatagaaaggtttttgtttctgttttgtttggataatttctttattttagtttgggaattaaatgacttaaaccttgaaaaaaaaaaaaaaaaaa

SEQ ID NO: 235094 - DNA, 748 bp, Homo Sapiens
  misc_feature (102)..(102): n is a, c, g, or t
agtacagttttatttcccttatttttaagtatagcaggaaaaaaataacaagtttgtccatgttactactgatactgtaaagaaacttccaaatcactggtntgggagggggtggatacatcctcattttctgtacatgatgcatggggaaaaacagtagttactgcatcatatagttccaagtaaatcatatagttccaagtaaatttgacatggaaataagtgttaactacaaaaatagaatatatacattccaatgtttggaaaagaagtggtaaaaagaaaaatagcaaaaagacactaaaattagcaaaaagtagattgacagtacagatgacctataaactggttaaatagccctattacaattgaaattgggtcaaaaatcaatctctaacctgagatacatttgtataaaacaaatgatcaaagagtttaaagataatggaaactataaatcatagaaatggcaacatttttcttaaaatctaaacataagacattttatgtaaaacatacaatataggatgtaacatttaacaaactatatggtaaataatatgacattaatatataaaatatatgttccagatcttgatgtgggtgatagttttacttatgtacatcgatatacatctatttaaaaacatgtacatttaaattgttgcattttatgtatttaaaatttattgagtaatccttctgtatgtattattaaagagaatatagcaaaaaaaaaaaaaaaaaa

SEQ ID NO: 235095 - DNA, 665 bp, Homo Sapiens
  misc_feature (47)..(47): n is a, c, g, or t
agaggaatacatcagaatggtagctgagtggagttgtctcgaggtgntgaagaacagacacaagctttctttgaaggctttaatgaattcttccccagcaatatttgcaatactttgatgcaaaggaattagaggtccttttatgtggaatgcaagagattgatttgaatgactggcaaagacatgccatctaccgtcattatgcaaggaccagcaaacaaatcatgtggttttggcagtttgttaaagaaattgataatgagaagagaatgagacttctgcagtttgttactggaacctgccgattgtcagtaggaggatttgctgatctcatggggagcaatggaccacagaaattctgcattgaaaaagttgggaaagaaaattggctacccagaagtcatacctgttttaatcgcctggacctgccaccatacaagagctatgagcaactgaaggaaaagctgttgtttgccatagaagaaacagaaggatttggacaagagtaacttctgagaacttgcaccatgaatgggcaagaacttatttgcaatgtttgtccttctctgcctgttgcacatcttgtaaaattggacaatggctctttagagagttatctgagtgtaagtaaattaatgttctcatttaaaaaaaaaaaaaaaaaa

SEQ ID NO: 235096 - DNA, 642 bp, Homo Sapiens
  misc_feature (18)..(18): n is a, c, g, or t
tgactgctacaagatggnccagttttactattctgccaaagcttttgatgtccttgagaggctggatcctaaccctgaatattgggaaggcaaacggggtgcctgtgtgggcattttccagatgatcatagctgggagagaacccaaagagacccttcgagaagtgctccatttactgagaagcacaggtaacacccaagtagaatacatgatccggatcatgaagaaatgggccaaagaaaacagagtgtccatctaaaatagcgccagcgtcctaggaaccagcttctactttgacataaaactggaaatcattttcactccagtttaatctgtgatacagggctctgttttattgacattttccttccttgctctttaagcctcaaggtcagagactgacttgctgagacttagtctcctggctgaacagagtgccatagtctgtgaccctgtatgatcctagtagcaataagattttggacttatctggtgcctttcttccaaaaatgctcagagtacttttatgcaatttactgactttaaggaaaacagtataacttttttttgttagcattttatggcattgtctcctggctgcaataacaaacatctttgatgttcaaaaaaaaaaaaaaaaaa

SEQ ID NO: 235097 - DNA, 729 bp, Homo Sapiens
  misc_feature (145)..(145): n is a, c, g, or t
  misc_feature (167)..(167): n is a, c, g, or t
gtcaccccagccgccagttgcccaagatctgatacaaggtacccatgaagagattatgaactacctgaaggtggagactgtacggtggtgtgttggagctggcttgtaatgtcttatgagtgacaatcgttagtttgaggaattntgtgagacagttgtcaaattgntgctagcttgaaatctgcggcaattggagtatttacaccatagaaatgctataagtgaagacctacctttcccttaagagctagttgttaaacctttaccagcataccactggaccttgtctaaaatttctttgtgttcccagtgtcttgcccagtagatacaagataaatattgccagaatcagatatcaggaagtagtaagaaaaggagttaatatgcaaactaaatcactcgctcaattgaataattgagatcttctgttcatttgttccttggaccttaatcatttgcattttggagaaaattttttctgctttaaaagtctgtaatttcagtttttgtgtcggggagagggaaaaactatttgtctgtagttgctttttgtgacaaagtgaatacccactgggctaagtttcatatctaaagcttgtcactaagaattttcatttttaggggtcaaaaacctattttgaaaatagtgttgtgtgaatgctgtaagtgttgtacatgtctctggtttcagaattaaaagaattcagagttaaaaaaaaaaaaaaaaaa

SEQ ID NO: 235098 - DNA, 749 bp, Homo Sapiens
  misc_feature (75)..(75): n is a, c, g, or t
agtgccacccccaggcctaactttcagagtcctgtgttcccttgggcctttcttggatgtggcaacagaatactntgtgacattgggtgaaaaagcagaactggcatggtgcattgtagagcgattctgttgtgaaaacagaaactttcagacaccttttcttctgtaaatagaatatgtgctttccgaagattgaggtcatctcgagcttgagtgatgacagtgaccctgaactggactacacgtcactccctgtgctggaaaacctgcccacagacactctgtcaaatatatttgcagtctctaaagacacctcaaaggcggctcgggtgcccttcacagacatctttaaaaaagaagctaagagggacttggaaatccgaaaacaagacaccaagtccccaagacccctgatccaggagctcagcgacgaggacccctctggccagctactgatgccccccacctgccaaagagatgctgcaccactcacttccagtggagacagggacagcgacttccttgcagcctcttctccggtgccgactgagagcgccgccacacccccagagacgtgtgtcggagttgcccagcccagccaagctctgcccacgtgggacctcactgcattcccagcaccgaaagcatcatagttttccccagttatatgtagcataaatggtttaattataaatgtctcccttaggcatgataaacattttaacacccagaaaaagaaaaaaaaaaaa

SEQ ID NO: 235099 - DNA, 595 bp, Homo Sapiens
tgattttctacacagaagatcatgtcatctacaaaaaatataattttactttttctgattttgaggcatttcatttcttttgctagttcattgctctggctaggacttccagtatttattgaatagaaaaagtgagaacgttcttgcatcatgtgagatcctacgggaaaaggattctattttccctgcttggttatctccacattggtcatttcatcaatggtctttctattggtgaggtaaatttccttctccatctattttgtttaagatttctatgatgatcagatgctgaattttgtgaaatgatttttctccatctgttgagatgatgtggttttcatctttcattctgttcaagtggtatatcacattgatttgcttgaatatgttgatccatccttgcatgccagaagtaaatggcacttgcatatctacaatccttttatatatcctcttgaatacagttttctagtacaagtggtcttcaagaagctcatggaaaaatacatattatggaaaaattgtgcatgaatttcacagtttttgcaccaaaataaactgatacaaatctgttaaaaaaaaaaaaaaaaaa

SEQ ID NO: 235100 - DNA, 584 bp, Homo Sapiens
  misc_feature (12)..(12): n is a, c, g, or t
  misc_feature (25)..(25): n is a, c, g, or t
atactgtcattntgtagaaggagcncaggtaaggatgcctaatcctgtccagtttggctagaactccatagccaaaaatgcagatttggattgaacattttttgatggacttctatcaatgcttaactagtaaaaacacatcttttctataagactttagaatactgtggtttctaatgggttcttgaataatgattttgcattgttttttctagttaatggtttttggtagtatttaatgatagcacagtttggggttttattgttcttgaagggggaggatattgaattttttttcttagagaaaacatcaggtttgctcaaatagactaacaacctgttgtccttaagcacatactaccatgaataaactcaggaaacaattttcaagaaaattcgaatgcagtgctggtgatggggatttttgtgggaaaaaacaatggtttcaagtcctttcacaaagatcaaacttcagcctattttgttagactcagcaatgtctaaaacattgttttttgtaatttattgtcattggtaattcaatataataaaacaattttgatagcaaaaaaaaaaaaaaaaaa

SEQ ID NO: 235101 - DNA, 681 bp, Homo Sapiens
  misc_feature (25)..(25): n is a, c, g, or t
tggtggaacctggtttcctttaccnatgaaattgtcttacttgaaaatattgatcctgatgagagagaagatggtgccaaggctgtctttgtataatgggctcaaattctctacctcttcagggctaatacttttaactgagctgctgcctatagtgtcttttggaaaactacttaaagggtgattttctgttactttttagcaaatttttttaatcacctcttgctacacccattcttttcatgtgcagccgactcaaaaattaccagttttggtgaaaggctaaattagataatttggaaccaggatactaatgatttctcatctttacttttttttaatcctaatataaagtgaatttgattgaaaaggcaaatagctattagggaagcagtttgccattgttgcagagttatctgtactttgtttaactgaaaaaaatgtagaaatatatgtaaagaatttaagacaagagtactgaatggatgatttgtcataggctttcccctttctttctgttctagcagcaggaaaagtttctctatatcctctccctctacctgtaacaattttgttttctactgttaattacattgtgtatttatagttctatgcttactgttgtgcatatactggcaataaaactgtacataacattacttgaaaaaaaaaaaaaaaaaa

SEQ ID NO: 235102 - DNA, 651 bp, Homo Sapiens
agcaataaaaggcatcatgttctgcaataggatttcttactcatttacctattttaacactaaaatagaccacaactgagcacaaattccttttataaatgttatagaagcagggaagaataataaacacatttgtgaattgtggttcagtttatttatctttagggaaggctgatcatttatcttatagcagataaccccagcctcttattcattatggttaacttttataatttatcttattttataatttaagaatatagtacatatcagttgggtttggttttggtcatcgagactaaaagctccatcaaaacagaactttgtgttttctgctaacttatttaatgacacaagttttaagagaaccacaattcattgattcacttattcttttccctaattgtgaattttagtgataaatacacctgtactactgaagaaaatattctgacacttcacgtgtgcaaagtatagaactgacagtgtcagtttcagattttgtatgtacgatttctggcttatatatccaatggtgcagattttgaaatttgtaagaacaaaatttgttaagaaaaacaacttgctctagttttgtgaccttgtgtacttttgaaataaaatcaagaaagcaaaaaaaaaaaaaaaaaa

SEQ ID NO: 235103 - DNA, 708 bp, Homo Sapiens
attcggcacgagtttttttttaactagtggttgtgtttaatttatgtatacaaatgtgttgggtgcaagtataatttagttacatgcatagattgcatagtggtgaagtcagggcttttatggtatccatcactcgaataatgtacattataactattaagtaatttctcaccatctaccccaccctaccttcttactctttcatgtcaggtgtgctggccctcaatgaccaacacaacaaagataaatttattgttttctgagacttagacttagacttagaattcaaaatcaacctaagagaaaagatgaccccgagacaataaaacatttgttttatatatatatgtatttataaacacacacatacacagacatgtatatatatgtgtgtgtgtatgtgtgtgtgtatatatatatatttgtttatactgaagaaactcatacagagtctttcccactgcacaaacccaaaagtaaagccacatggccctatgcaataaacattatggtaataacttcaaaaaaaaaaaaaaacttcctccaatgaatgtaaattcgaaaataaaatgaaacaactatttctccagatgtgcagaaatcaatataaagacacataaagacacaggaaacacagaaaagcaaggcttatgacactttcaaaggaacacaataattctccagtactctaagaaaaaaaaaaaaaaa

SEQ ID NO: 235104 - DNA, 571 bp, Homo Sapiens
gcacgaggggctgaaagatgactaaattcagtcttgaactgatgttgtaatttggtgtatggaagctggtttctaaacttcaaaaacatcatgctatgtgacagaagccagtgcaaaagactaactattgtgcgattgtatttatataaaatgttcagaaaaggaaaatctagagagacagaaggcagatgagtggttgcctgtggctgggagtgggaatgagaactgtctgcaagcagacacgtgggatctccttggggtgacagaaatgctccataactggattgtagtgatgactgcacaactctgggaatatactgaaaaccacttacagtgagttaattttatggtatgcaaattatatgttaataaagttttttttttttttttaataaacaggtttctttttgcatggaggctgaggcagggactttaataacttcaaggttcactcacctaggtggctctgtgtgaattctagactcgactccattgtagacgtgggagtgcttttagttaagatgttatagaagttcaccccatctgtgttctgaaatataaaaaaaaaaaa

SEQ ID NO: 235105 - DNA, 505 bp, Homo Sapiens
gcaagagggcattgacagctgtacaatactttggtgttaacctgtggtcttccttcacctcagtgaactctgccctgcccatctgtccagaggaagtcttagctcctaccccccaccctccctggcgcttggatgggaggcgacacagtatgggattgtgaaatccctgctgcgatgctgggtatctggaaggggagaagggggtggaagcagcgcagggaatgctgtgagatgagaagagctcacatcgatgggaaatggccctggcccaggctccagaatgtgacagcaacagtggcctggctgttttcccggggggcggggggcgggactggcaaactgggaggagaggcaattaagacgcaacaatcaaaccaacctttaaatagtaacttttaaaaatataaaaacagttcagtacaatgacttttcattctttttttcttcgggaataatttcttctaccccctctaccccctctagagccaaaaaaaaaaaaaaaaaa

SEQ ID NO: 235106 - DNA, 662 bp, Homo Sapiens
gtcatctttactcagaatcctagggataggtagaagaattcatcttttcaagaaagtgttttaaaaatactttgggaaaaaaactgcatcaaaggtaatttatcctcaaattaaatccttgcaggaagagaaattaaccctaagaaaaagtcatcaatatttttcaactttttttttttttttttttttactttggaaaggacaataactataaacctatatccagattttctttctgctgaagctgttgtcagaatcttcctttggacaaaacatcactagctgactataaaaacaaaagtgtcatcattgaagccctgaagaggcagggaattgagcttcagcaaaatacaggaaaagaactatcccgtataaatgtcagaagacagatttcctaaacaagtaaaagggacctcaaaaattttaacataatcccaatgaaatcattttttaccacttttacagcggtgtttcaagcggactgtcactcagatctgcagagatgaatattactcaaaaaatttttttgttctcttgcatttttttcaactaccgcaaagctatacagatttttttgtacttgtggatcttttgtacttctcataacctaatgtcaggctaagaaaaataaaatatttgggggtaaaaaaaaaaaaaaaaaa

SEQ ID NO: 235107 - DNA, 627 bp, Homo Sapiens
  misc_feature (27)..(27): n is a, c, g, or t
  misc_feature (65)..(65): n is a, c, g, or t
gacaccagagcccacttccatcctctntggtgtgaggcacagcgagggcagcatctggaggagtntgcagcctccacacctaccacgacctcccagggtgggctcaggaaaaaccagccactgctttacaggacagggggttgaagctgagccccgcctcacacccacccccatgcactcaaagattggattttacagctacttgcaattcaaaattcagaagaataaaaaatgggaacatacagaactctaaaagatagacatcagaaattgttaagttaagctttttcaaaaaatcagcaattccccagcgtagtcaagggtggacactgcacgctctggcatgatgggatggcgaccgggcaagctttcttcctcgagatgctctgctgcttgagagctattgctttgttaagatataaaaaggggtttctttttgtctttctgtaaggtggacttccagcttttgattgaaagtcctagggtgattctatttctgctgtgatttatctgctgaaagctcagctggggttgtgcaagctagggacccattcctgtgtaatacaatgtctgcaccaatgctaataaagtcctattctcttttttgggaaaaaaaaaaaaaaaaaa

SEQ ID NO: 235108 - DNA, 711 bp, Homo Sapiens
ctcaccctgaagagaagccctacgagtgtaagcaatgtgggaaagccttcagatctgccccacaccttcgaatccatggtagaactcacactggagagaaaccctatgagtgtaaggaatgtgggaaagccttcagatctgccaagaaccttcgaattcatgaaaggacacaaacacacgtaagaatgcactctgtagaaagaccttataaatgtaagatatgtgggaaaggcttttattctgccaagtcatttcaaatacctgaaaaatcttacactggagagaaaccctatgagtgtaagcaatgtgggaaagcctttatttctttcacttcttttcgataacatgaaaggactcacactggagagaaaccctatgagtgtaagcaatgtggaaaaaccttcagatctacctcacaccttcgaaaacatggtaggactcacactggatagaaaccaaagcaggtgaatcacctgaggtcaggagttcaagactggcctgatcaatatgatgaaacccctgtctctactaaaactacaaaaattggccaggcgtggtggcctgcttctgtaatcctagctagttgggaggctggcacaggagaatcgcttgaatctggggggcagaggttgcagtgagccaagattgtgccattgcactctagcctgggcaacaggagcaaaactccgtctcaaaaaaaaaaaaaaaaaa

SEQ ID NO: 235109 - DNA, 695 bp, Homo Sapiens
cttctgagaaggcctttccctttcctctttgcctgctatataaggcaggttcctgtggctctgctggctcagtgtgggctgcaggaggactgcagactcagctgcaattctgaggggggtttgggaggcttgtgcgaggtctcaggcctgtgtggggagctggtgcctcttcctgcccgtatctttctcttccaagggcagtgctccaaggcagggactggagaagccaaggggagagtctaaaagggctagagcatttttaaaaatagacacagggtcttgggactggggtttcggattgagttgcaagcagggagaaaacctgaaggtcggtgcccctatggggctgaccagtagagaatttcctttactgtatttttgtgtctggtcttccctttctggcttctaggacatccatgccaggtgaggtgcctgggtccctgttacaagtcaggagccctgtagggagacccctccttttgtacaagtacctgaatgctgcgacaagcagatttttgtaaaattttatattagtttttaatgtcagtggcgactcggttcctggggctgcagccagcctgggacttttgtaagaatttttgggtgactcacttagatgtcgtttccttcttgccccctcttcctctctgtaatctaagtgcattaaacatctttgcagaaaaaaaaaaaaaaaa

SEQ ID NO: 235110 - DNA, 704 bp, Homo Sapiens
ctggtcatcaagttggacttccctatgtgaaaccataaactaacctgaggaagatactgaggggagaggggctgtgtaacggtgactgcctctaggccagccttctgccaggcagagaacaggaagctggcatgcagggtgtctggcactggtaaaatgacaccatgtttgtaagtgcattgtcctggcttttggtgggccgtgcaggagttcctgcctgaattatagtctttccatctcatatcttcatgtggagccctcaagctttagacaagtcttttatctccgttttcaggtggctcccattatcttgagacctcataatgctgctttccttaaatttgttttacactgacgctagtcagcacagagctactcacatttctggccaccactcggctccattatcttgacttctctcctgccctcttacgttgcatttcttcttttacaccactgttttacatgttgctcctccttagccattggttcctgttggcttttgttcttttacctgagttggaaatctgggaagacaattccaactcagtggtctgggcattctggtggtgctgccaaccccagggcaggaagaacagtgagtgagatactgtgccattacctgcttctccagccttgaagcccaaagcagccaaataactctcaaatgacgatcacttttactcaaaaaaaaaaaaaaaaaa

SEQ ID NO: 235111 - DNA, 643 bp, Homo Sapiens
tccaacccggttgatgtggttcgaactcgcatgatgaaccagagggcaatcgtgggacatgtggatctctataagggcactgttgatggtattttaaagatgtggaaacatgagggcttttttgcactctataaaggattttggccaaactggcttcggcttggaccctggaacatcattttttttattacatacgagcagctaaagaggcttcaaatctaagaactgaattatatgtgagcccagccctgccagcctttctactcctttgcccttttcccgtgttctaatgtattttgacaatgttgtaagtgtttaccaagccgttggtctcctaagggcctcctgatggaagaacagtggggtggttcaaagttatttctatgtttgtgttaccatgttaacttttccccgagagaaagtgttaacattgagactctggccccagattggtatcttctatgaagatggatactgatgggtgacattgaaaacggcctgctttccaaatgtggttaaatgtaattggttagccccagacttgggctagagcagaaggcataggccagggtggttattgctatatgtgttacagacctcggttctcattaaagtatttattggcagaaaaaaaaaaaaaaaa

SEQ ID NO: 235112 - DNA, 638 bp, Homo Sapiens
cgacaaagagtcaccagacagcctgtggaactgacccccactgataactcttcatcatgaacttggaccaaaatgaattgctggcttctcttatactaacccagagtttgtcattaatgtgtaggtgaatgcaaactccatcgttgagcctggggtgtaagacttcaagccaagcgtatgtatcaattctagtcttccaggattcacggtgcacatgctggcattcaacatgtggaaagcttgtcttagagggcttttctttgtatgtgtagcttgctagtttgttttctacatttgaaaatgtttagtttagaataagcgcattatccaattatagaggtacaattttccaaacttccagaaactcatcaaatgaacagacaatgtcaaaactactgtgtctgataccaaaatgcttcagtatttgtaatttttcaagtcagaagctgatgttcctggtaaaagtttttacagttattctataatatcttctttgaatgctaagcatgagcgatatttttaaaaattgtgagtaagctttgcagttactgtgaactattgtctcttggaggaagttttttgtttaagaattgatatgattaaactgaattaatatctgcaaaaaaaaaaaaaaaaaa

SEQ ID NO: 235113 - DNA, 670 bp, Homo Sapiens
  misc_feature (16)..(16): n is a, c, g, or t
  misc_feature (35)..(35): n is a, c, g, or t
  misc_feature (62)..(62): n is a, c, g, or t
  misc_feature (84)..(84): n is a, c, g, or t
agtactttcagttaantattccttaaaaagaaatnacagcagaacctcactgtagcattctntactgcagagcaaaattcaatntaagatgggcttctctgaggtccacatcatggcagttcatttactcttgtgccaaatggcaacaccacgtctaaagcagtttcacagcatggtcccctacaatgttataccaaggctctgatgtatttcttttagtagtttctaagtgtaaaatttattctaaatgtttttatggctattatctatttcatcagttattgaattaagaatgattttcattacttgagtgggatttgtgatttaatgacagttgaataatcaaaaatattttattaggcccccaaaatttaatagatatctatttctgttacattttattactgtatggcacaagaaagaagtgacattgggtatgttagaaatgaaataaggagtaaaaatgcattaccatttgtttaataattatctttacagaatgctagtttaatgacttttttaactgaattttttgaataaatcagaaatgtttgtattggtcacagatctatcataattgcttttctgatgcatttaaaaataaatggaacacttaaatgtatattaccgatgcaaactgtggataaagttgaaagaaaaaaaaaaaaaa

SEQ ID NO: 235114 - DNA, 623 bp, Homo Sapiens
cactttttcatttataatcactttagtagttaaaagtagttttccagaaaaaggacataagagacctggtcaagtataaaaaatataaaagtctgggaagtgaggagcacctctgcccagctgctgccccgtctgggaagtgaggagcgcctctgcctggccgcctgaccatctgggaagtgtgacaagcgcctctgcccggccgctgtgcaaccttccacgtgtgaagtgacagccttgtgtgtgatcttttctgtcttccccaagtttgcattttcgacattaaagtttactttttagttaaaagtttaaaaaatatatataaatacactgtagataacatttgtatgccagctacacctttttctacttctgtttggctttttttccccacaccaatggtaatttatcttcacagattgttcttcatttctagaaattgttacttcatggtaattacttgagcaaaagcttgaaaatccctgacaagtacttttcatctcatagtatattagttttcactcagtcattttatgaataatatagttatccacttaaacatttcaatattttaaccatcttgaaaattaaagattaaaaatcccaaaaaaaaaaaaaaaaaa

SEQ ID NO: 235115 - DNA, 650 bp, Homo Sapiens
caagcctggttatctggcttgacccgcccacacggaggcctccccagcgtttctttttcccgagaagagctccagctcgcaggtccttagaacacggcagagcaggagcatctcaggaaccaacggccagctccttggcgctgtccccagccccacaggcctgctgcggccatccgcaaacgggcatttccttgaacttttgagagtgcctttgaccagctgttcgcagctgggaaactccaacttttgaagtcagagcttggagcggcccccgcaagggcgtggctcaaaccctccccagagctgggagccattgcttatgcaagcccgtttcttttgatgtaaagatggaagtcgttactatattttaataatgcaaatacatcttttaaaataagttaacatttcttaccaccagatggatcaggctttgaatttaatcatgtaaatgtttgtaattttatgtcattttgttaaaatgggacgctttcaattggtttccaagaaagatgatacctctgcattttctggtggaaaaggtgtaatacccttaatgagatcaaagtgttaggggaaaaaaattccaaaagtagttacaagctatatcaatgtcaaagtaaatgcacttcatcaaaaaaaaaaaaaaaaaa

SEQ ID NO: 235116 - DNA, 661 bp, Homo Sapiens
aaaggcaagagccaggaagtgaagggtcctgtgtatactggcttacttgttgagttggagaactattgccgtattcctctgctaagctcagggtgcattcgtggaaaccctactgcaactggcccattgtgcatacaaagctggaactgagatgtgaacagatttgcattgccttgatcaccttccgtgggaaatatagctaggcccacttattggtaggagctactgacatgttaaaactaggttaaactgaattggaagtaatggtgtatttggaatcatggctgactgattccattacatgttctagcatgataccagtctgaggttattccccttgaaccaccgacttagtagagtttaatgcacaatgtgatggtcttagttccttgtactgttcttcagtgtcaaagttgttcaactaccagttaagttttttgggctttgtttctcagtagtgacaataaatttgtgttgatctatttacaccttttggactgaacaccttagcaatcattgatattttaagcctacaggaagtgcccatgggataaaaccaatctgctggctcacactaagttctgatcccatgattttggtctcattaataccgtgctataaataaagttagctaaatcttttgaaaaaaaaaaaaaaaaaa

SEQ ID NO: 235117 - DNA, 685 bp, Homo Sapiens
  misc_feature (43)..(43): n is a, c, g, or t
actatgtgaataactgaagtaacactagactgaatctcctttntggagtatgtatcttctctcacttgttcaagtacaggcacactgttcaaccgcatggtatctttctgttgtgtgacttctacaaatgtaattttaaatgaaattaagttaacatggattcattacgttcctggccctgtagacacgtgtaagattatttaaaattctttcatttttttctgcctcttactatacgactgtagtgcaacaaatattttaaagcccccttttcttctttattttcattagttgtacattgatttcagtgtcaacacatttaaagattcattcatgttgcacagtggcttacatgaacgtgaaactgtgatataaggttttctttcatactcataattagcccaaaacagttgccaaactttgccattgtgctcctgcatttgtgtttgagctgctatatatttgtggaaattacactgaaagttgactaagagactattgaaaaagcatgaataattaaatatacatgtgagagacatctcatctgctgtattttacttagtgaatattgttcactcttccgtgtctgatgtcttgctgaatgctgtgactcatagtttacttttgttcaaaatagtttgcactttttgttaataaaatcaacttgagaaaaaaaaaaaaaaaa

SEQ ID NO: 235118 - DNA, 599 bp, Homo Sapiens
agcgagacccagccagagaacagtaagaggagtgctctcctatctgcactcacccaggccttcacccagactttaccgcggaggcggctgagtgcagctacagctaggtccgcgtccctcactcttttcatcttctgcacgttcttcgtgaaactggaaggatcccgggtctcagctagaacacggtggaagagaactttcctaggaaacggttcatgtgtcacttttcaggatgtggaaacactgagccatacaccctccattgcttggtgctggggttgtgtggcctccactgggcacttgccgacctgagtctggggccaggggagcccaggctgccctgcactcctgcctcccagcccacagccaggtgctttcatcacagctaaacctggttccctccaaacctcccagccactcgggcttgtaactgtctgagccccggatccggtggggtgaaagcagccagctcatcccagtgactcacaggacacagccatccagcggcatctttccttgtcgaatgatactgtaatgaccttccaaagtgaagagtagcacattaaagtgattttattgttaaaaaaaaaaaaaaaaaa

SEQ ID NO: 235119 - DNA, 556 bp, Homo Sapiens
actcttgacctcagatgatccacccgcctcagcctcccaaagtgctgggattacaggcataagccaccgtgcccgaccctgtccttatcttataataaccagttcttctagaaccagacgatgctctagttctcctagattctgaacctcatgacctgtaccactcactagttccagactacacaacttctagaaggtgccacctccagggtcctgattcaagatctggtgatctgctgtttctctggttctagaactgacttacaagtgccttctgattctagacctcattccgtaagttcccttggctctagacttcatcatttccagctcctcctcactcaagatctgactccaaattaccctgggtctagaattcagccttcaaatatcttctgattttagactttgccttatacatttctctggttttagatcttaccaccctcaactccttctgattctagatcttatggttcccaaatctctctggttctagaactcagattttaggcttttgtttttccttttttttgttaaaaaaaaaaaaaaaaaa

SEQ ID NO: 235120 - DNA, 579 bp, Homo Sapiens
  misc_feature (95)..(95): n is a, c, g, or t
cacgagacccatcctctgcgatcccgccaggcatgtgtgtgtgaatgcatgtgcaaagctctccatcagaagggtggtgtgggccctgcaggtcntacccctcggccttgaagctccctcgggctgcggactctgcctcctgggtctgagcattagaaccaggagaggggtgtccctgggcagagccaggggtgcaaacagcctgcagccatctggccttttaagtatagtgtgtcgcatttccgggtaggaaggtagcatttcaagttcaaagagaggtcaagtcatgcaaccatctttcctccagcacttttggggtaaggaggacagtttttgttatggtttaggggaaattttcatgaaattttcaccattaccaatagattactgatgtccatggcaagtgatctgttcttggtattttgttttgttttgttttggtttttaaatgtaatcacccattggtcaggcccaggactggtcaccatgagctctgctagccacggccccaacgatgcttccggctctcatggattccacagcaaataaaactgtgctgacaacaaaaaaaaaaaaaaa

SEQ ID NO: 235121 - DNA, 676 bp, Homo Sapiens
  misc_feature (21)..(21): n is a, c, g, or t
  misc_feature (44)..(44): n is a, c, g, or t
  misc_feature (580)..(580): n is a, c, g, or t
tgaaactcccatgtctataanatgtaatgagtgtgaaagaagtntcactcagaatacaggcctcattgaacatcaaaaaatccacactggtgagaaaccctatcagtgtaatgcgtgtggaaaaggcttcacccgaatttcataccttgttcaacatcagagaagccatgtagggaaaaacatcctatcacagtgacccatgccatacatgccagagttggtgctcatttgtcactgatctgaagccactccccctggagtctcaactatagaaattgtgggctgggctttatttaccactacacattatcaggtgttagaaaatgtagactgggttagacaaattatcttctaagttctagaaggggtttgtaatcaaaacatatttgataggaggctacgggagagttgtctagaagaggtaagacctgaaactgtttgttctctcccactagaattaaatggatgtttagactggctacttgccctaaaccagcacttggtgatgtctactgggtggatggttgtgatttgggggctgcttctctgaccattctttttgactgtaatgaatcctccnacagttggtcagattcataaagtcttatatccccctctgtgccttttctgcaggtgctaataaatgtttattgaatgtaaaaaaaaaaaaaaaaaa

SEQ ID NO: 235122 - DNA, 662 bp, Homo Sapiens
agtttttggggcgctccctgccagaggagaccatggacttcatggttcagcacacgtcgttcaaggagatgaagaagaaccctatgaccaactacaccaccgtcccccaggagctcatggaccacagcatctcccccttcatgaggaaaggcatggctggggactggaagaccaccttcaccgtggcgcagaatgagcgcttcgatgcggactatgcggagaagatggcaggctgcagcctcagcttccgctctgagctgtgagaggggctcctggagtcactgcagagggagtgtgcgaatctaccctgaccaatgggctcaagaataaagtatgatttttgagtcaggcacagtggctcatgtctgcaatcccagcgatttgggaggttgagctggtaggatcacaataggccacgaatttgagaccagcctggtaaaatagtgagacctcatctctacaaagatgtaaaaaaattagccacatgtgctggcacttacctgtagtcccagctacttgggaagcagaggctggaggatcatttcagcccaggaggttgtggatacagtgagttatgacatgcccattcactacagcctggatgacaagcaagaccctccctccaaagaaaataaagctcaattaaaataaaaaaaaaaaaa

SEQ ID NO: 235123 - DNA, 683 bp, Homo Sapiens
aggtaatgtactagttaattgacccttagaaaattatatttttctgcctgcaagtcttcattaaagaaggaaattttaaaatattttatagtataatgctatccaaactcatttttaaaaacattttattatggaagttttcacaaatgcacaaaaagaatagcagaatgaagctctgtgtacccatcctccaacagctgtcctgtggtcagtcttgtttacctgcatccccacctatcccctgccccaacccacagggatcagtttgagtcccattaacaggcatagtattttcatgtttgtgtgatcagagacattcaaatataactccaaagatagggtacttttttgaacataaccacaataccattgtgtaagactgctaaaacattttttgatgccaagtaccagtcaatattcaaacttcctgattgtctcgtaagttttttttaacagttggtttattcgagtcaagatccaggcaagatctagatcttgcattttgttaatataatctatagatttaactttcctgtttttaatttttgaagaaactaagttgtttgtcctatagaattgtccttcagtggattttactgaatgtatcctaatgggatcatgtacaccttttctgtcccctatatgttctataaactgacagatctagaaaaaaaaaaaaaaaa

SEQ ID NO: 235124 - DNA, 586 bp, Homo Sapiens
gcacgaggaggaatattgaggatgcgctcaaccaactcttccgaaacagcagcatcaagagttatttttctgactgtcaagtttcaacattcaggtctgtccccaacaggcaccacaccggggtggactccctgtgtaacttctcgccactggctcggagagtagacagagttgccatctatgaggaatttctgcggatgacccggaatggtacccagctgcagaacttcaccctggacaggagcagtgtccttgtggatgggtattctcccaacagaaatgagcccttaactgggaattctgaccttcccttctgggctgtcatcctcatcggcttggcaggactcctgggagtcatcacatgcctgatctgcggtgtcctggtgaccacccgccggcggaagaaggaaggagaatacaacgtccagcaacagtgcccaggctactaccagtcacacctagacctggaggatctgcaatgactggaacttgccggtgcctggggtcctttcccccagccagggtccaaagaagcttggctggggcagaaataaaccatattggtcggaaaaaaaaaaaaaaaaaa

SEQ ID NO: 235125 - DNA, 665 bp, Homo Sapiens
  misc_feature (14)..(14): n is a, c, g, or t
gatcccaaaatgtntgtgttgtccttactcaaaactaggaaaaacaattatgtggtaagaggctcagagccacttacttaaatctcaactagatttatttgtgagaacatctgttttctgatatttagacacttcctcttccattgctgtttcctatgactcatgcacagttatttgttcaggtttcatggaatttcccaagtgtatttacctttgtttggtttttaaaatgtaaattatattgccccaataaatgagtatgtgtgtcagggggactgtggctgggtcattgcatgtggagggggagtttacagaagagaactcctagaagagctttacttaactatgaaaattttcaaagaataggacatttctaataagtccctaagagtgtcctgaaggacatgttttggttctgaaacatagtttctataatcatccttaaaaaataacttgtttctgcttaataggctttactatgaatatacctccatatattattgagttagaatgtgagaaaaggagattaatttttgaagtacaaatatagtgagttagtgagtgtaggcatcctgactgcctagtcataactttgatgaagtagaaataccaacatcctcaatatgaagatatgcagcagccccaccaaaaaaaaaaaaaaaaaa

SEQ ID NO: 235126 - DNA, 636 bp, Homo Sapiens
tgattgctttgtgttcagtccttttggaacacgtagcttccagcttaagggtagagaaatatatacctaaaatcatcaatacatgaaagaaaaaggatggaaactatgtcctcagttttacttctaccaaaacatccctgtatgtgtgtgcatgtatgttggcgtgtgtgtgtgtgcatgcatattagtaaatgtgtgtttgcatgtgtgtgttggggagtgtatgtgatctgggtgtttgtttatctctgttattattcccctttagctttattttagtcaactctacattatgatgaatttcaaaatgaagctgtattaaaataattgtaatataacaattcaatctcacatgttactgcagatagttaacttttgctgcaatctattgtacatttgcaattttctgtgttagtaaacttagcagaatctggttatttatttttgtgtaggcttaatgttcactgaaagataagtcaattactgttagtaaaaaattaaggtactctcactgcagagatttaaggcctgggcctaatgtgctgtattatgaagccttgtgactgaaaaatatgtttacatatgttgtctatttttttaataaacttttatagctggaaaaaaaaaaaaaaaaaa

SEQ ID NO: 235127 - DNA, 624 bp, Homo Sapiens
  misc_feature (21)..(21): n is a, c, g, or t
tatttattctatactgggctntggaatatgaaaaatggacctgtgtggccgggcgtggtggatcacacctgtaatcccagcactttgggaggtcaaggtgggcggatcacttgaggtcaggagttcgagaccagcctggccaacatggtgaaactccatctctactaaaaatacaaaaattagccaggcatggtggcacacacctgtaatcccagctacatgggaggctgaggcaggagaattgcttgaacccgggaggcagaggttgcagtgagctgagattgcaccactgcactgcagcctgggcaacagagcaagtctctgtcttgcagcagggggaaggacctgtggtactcctacaaacttaacaactttagcttttcggggaacagtggtggtctccacagatagctagaatcttctaagatgaaaataaactgtttcatccagctgctttctgcctgttaacctttgccacttccattccttcaagtgtgtaatccccagggttgtcttgtattacacacatccttgttaagtaaatataccactgttgatttcttcttccagtgcaacatttggattaaataaaaatctttagtttccaaaaaaaaaaaaaaaaaa

SEQ ID NO: 235128 - DNA, 590 bp, Homo Sapiens
aagagtgtacatagtaggtgctcaacaaatttattgaatgaatgagtgaatggaaaaactgggagagtcaaaagtgagcagaagctctccatttctacttctgtcacaaaccacattaaattgtaaataaggcccttctccacttgacttcaggcagcagattgtctagaagcctaaggacagcaatttctctgacaagacaaagtagatattttataccaggggttggcaaactactgcccacgggccgaatttggcccagtctgtttttgtatggtgcaaactaaaaatgatttttacatttttaaagagttataaaagaaaaaaatatgtggtctgtgaaatctaaaatatttactacctggcctgttggaggaaaggtttgccaatctctgttttataccattaactatgagattaacaaaaacttttacctttgtgcagaaggttaaaaaaaaaaaaacatggttaaggaaaaggagacatgttacctcttcatacactcctataactgtggcattgcaaaaaataaaaataaccacctttaaaaaaataaatcttatttaaattgcaaaaaaaaaaaaaaaaaa

SEQ ID NO: 235129 - DNA, 629 bp, Homo Sapiens
ctcgacctctcaatgtgctgggattacaggcatgagccaccatgcctggcctccaaattgttttttttttttaagaacaaattttttcagattatctggggctaacagtactgaccaggggagtaattttctgtatattgaatgacttttttttttttttttaagtgaaatcaaccaattgttttgaagttctatggaaactcagtgccacctctctttagttcaggtatcctgggttagttctttaattgagatctacaacaacactgagtggaaaatgattttggtttctgggaaccaacctgttcaggagatgattaactattatactgctatttggggattaaaatagatttttaaaaaatttgagctcccaaaatattttatgcattgggcaatagctgaaaactttcttcagctgatcgttataatactgtttagtggagagtcaactgactgataatctattacttagggatggattttcatggtatttacaacttataatatgaaaatgttatcatcaggaaattatatttagcactgatatcgcaaaatagtctagttctgcactgagtttccatagaacttcaaaacaattggttgatttcaaaaaaaaaaaaaaaaaa

SEQ ID NO: 235130 - DNA, 696 bp, Homo Sapiens
tcaccccacttgtgtaaactgctctgcatataaaccaagggcagaatgtttcaccctgatcttatgggaggaatcaaactcccaaaatagtgtgtatatatgtaataaacagcgtcacgtaaatacatatatgcagtgcttgttgtccaaatagaaatgaaaataagtggaagagagaggaagaagtcaaaccatatgaaactgaaaaaatatgacgtacgaaatggacaaaaagctttttctgaaaccaactttttacttccatcatccttttttagcctgttgcttcagagagacacaaagtgaacacactggtgtgaatgtcgctctctgtgtgcttgtgtttgtaatgaaagtctacagccaattttacttgtctaccaccgtgttgtgctcaaagagacactacttgagtgaagatttcttctttccctgtaccagctgttacagtgttacgttgtgtttaaaatgtgtatggtttattgcaatctgaacagagctatgggtttctaccataagtcaggttgtttgttccctaacctgtctctcgtagcaaagtcacttttataacagtttaccactatgcttgattataatgtgaaaggcggaattctgagtgtgttaagatggtattaatcatgtcggtgtcatgtcactaagtttaatgctgctgtttttaaaaaaaaaaaaaaaaaa

SEQ ID NO: 235131 - DNA, 552 bp, Homo Sapiens
gcacgaggggaatatttttccaagtagttttggttcactattcacaggacattggcattatctactaaggctgaaaatgtgcatattccatgactcaggattttatctcctagatatatattcaacagaaatgcatgagtatgtgcaccaacaggcatgacaaaatatttatagtagtggtgttcacaatagtcccaaactggaaacccaagtgtccatctccatcggaacagaaaactatactttggtctgcttctacagtggcacatcaacccacctttgagctttagatctaagaagtgtgttcatgcaacagccatagagatggtgctattgaaaggcaatctgcccatcctgtgtattgacaagcatcaggattccaggaggattcttcctgattcaaagactgtcaaataggaaaaaagaaaacagtaaatgaacaaaaacatcaacatggagtccaagtaatgaatttatagaggaaaatgtatgctactctgaaaacaaagcttatgttagagaatatcttactgtaaaaaaaaaaaaaaaaaa

SEQ ID NO: 235132 - DNA, 625 bp, Homo Sapiens
  misc_feature (581)..(581): n is a, c, g, or t
gcacgaggcaggtagagagggagggcgaaaggaatagaaatggcatgtctttgatgctgtggcttgtgtggggacaatgggaagagcacagcaggcacaacatatctgtgttagtgccacgtggtatctgttaagtatggccagagcctcacatataagtgaagagagttaagacaattcttgctctttgaacaataatagtctatagaatttctattggcaaaccatcccagacaacctgacctatcaaacaaaagcaaataatccctgtctcagaactgctggtctaaaagctagaaggggcatgataatggaaattgctagaaaagagagaatgctctactctctttcctgtgcctacctacccccatcctaaaccctgtaaaacagaatttcaaaatagatgtcaaatatgaagtaattcagacttccaaagaaggaaagagttctgcccagggcagtatgagcaaatccacagggatgttaagatttggtccaactcaaaggtttatgggcagtgagcctagagtctcttgagagtaaacccttgcatttgggacaaggagaatatgtgaagttcnaggagtgctcacactagagcaagatccaaaaaaaaaaaaaaaaa

SEQ ID NO: 235133 - DNA, 647 bp, Homo Sapiens
  misc_feature (17)..(17): n is a, c, g, or t
  misc_feature (29)..(29): n is a, c, g, or t
atagcaaaatacaacanccatgtaccacncaggcagaagagtcctcacctatacgcagttctgcatattgatcatcatgacaggaagtatttcgttttttaactgatcccaggtgcacagatgtattcataaaggaagacattagatccagccattgtggccaccaggctctgtggacccatctcagtggagaattcgttttggacccgtggctccgtgcagctgtggactcgagtgccatccactggtgtgagtcttgcggggaggccacaggtacagctgctccccgtgaatcctggtctgtgggttgagaaggggctcgggcctctggaatgctctagcgtgtgacgtgttctcaggaaaacgttctgtgccaagtgccgcctcgctgtgtccggcatgggactgcgctggagggtccggcgtggaaggcagacctcctgtacctctatcgttcccatttgtggcatccaaaggcggaaggctcatggcttccccactagaggcggcgtcttgggctttcccattggattgtgaaaggcattaagactgtttggagatgttggctgtatttcctgtcacatcaggttgtatgatgacgaataaaaggtgctgtgacccgtgttttcaaaaaaaaaaaaaaaaaa

SEQ ID NO: 235134 - DNA, 577 bp, Homo Sapiens
gacaggaaaattcagttctaaccagatgttccagctatgttactcaaccagcagtgttaggagcagagagcacttgcactaagagctgatcaccatttgagatacgcggcttaacgcacatgtgagtgtagcttgctacatgaaaatgctaggctctagggcatgtaaaacatgaatacagaatactagattgttctaagtaatgtcatttcggtttgtgaatttgatttttcccttcatttcatgtcatattgaaaatgcaaacaaactgctctcaagaacacccagaagctatctgtgttaccagatgtgttgtgaacactctactatttttcataggtgcttccttgaaatatatgtccattgtagtggtggagagggactggactctctcaggctctttacttgccagttgtctcccgcagttaatggaaatatatatacatatatatatatattttatttagaatataatttaaacatgaaggtctattctttgcactttttattaatatatatatagataatctttaaaaaaattaaaattcaagtccattttaaaaaaaaaaaaaaaaaa

SEQ ID NO: 235135 - DNA, 612 bp, Homo Sapiens
aggccccggtcactggcgccctcattaccgccagcagtgctgggagtggtgggagcagcggcggcggcggcaatagtttcagcttcagcagcgccagcagtcttagtagcagcagcaccagtgcgggttgcgccagcagccttggcggcggcggcgcctcggagcttctccctgcaacacagcccacagccagcagcgctcccaaaagccccgagccagcccaaggcgcgcttggctgcttatagactgtactagggcggaggggatccgggccttgcgtgcagcctcccaaccatgggctgggttttgtgcttactgtatgttggcgacttggtagggcaggagacgcagcgtggagcctacctcccgacattcacgcttcgccccacgctgctccgactggctgcagcggacactgcccaaagcagaggggagtctcagtgtcctgctagccagccgaacacttctctccggaagcaggctggttcgactgtgaggtgtttgactaaactgtttctctgactcgccccagaggtcgtggctcaaaggcacttaggacgccttaaatttgtaaataaaatgtttactacggttaaaaaaaaaaaaaaaaaa

SEQ ID NO: 235136 - DNA, 633 bp, Homo Sapiens
caatgaactggctgtgcagaaagcaaaggcagaaatcaccaggctcataaaagaagagctgatccggctgcaaaattcataccaaccaacaaataaaggaagatacaaagtcttatagacatccggaaaaaagatttttacctgtgctggtctatgatgtatgtggcagttgctgtctgcagtttacaatgtattgtaaatgaagattttttaaattctatcttgctgattttttttaaatataagaaactggtacttggtaaagaaatctgtccgtaagtacccccacaatcagtcaaactatatttaaagccagcctgttttcagagtatgatgtcctttaatgtaaactcaaatatcaatattttaaatgtccggataatattctagaggtttaaaaaatggaaatatttgaactttctattgaagacaataaagtacacaagtcgttaaggggctattcactttatcctgtactttcaatgaaattgtgatcatttcctaagaaaaggtaaaattcactatcatattttgtgtccccaccttgatgttacatgactctggaacaatatgaactggatttaagaatgttataatagaagtcttacaaaatggaaaaaaaaaaaaaaaaaa

SEQ ID NO: 235137 - DNA, 634 bp, Homo Sapiens
  misc_feature (199)..(199): n is a, c, g, or t
cacgtttgctgccgttgggggctcagggtgcactccccgggtcacctgacctgctgcccaggggcttccagtcctgtctgtgtggactggcacctgggctgctggagaagtctcctcccgttcggaccagcctcagggctgcacgttacctcaggaatgggccccaccatgaaggggcccatctgtcagcagcgtcttntaggtccccagctcagggagccatccccagctccagttttctcatgcgaatatgcacagttttaattcacgttgttacactagcctgccgatgagacccagacacaggcagacctggcgctcttgacccctgattccagtgaggactggccctgaggagtccttgcagacctgctgcctgccccacgacaggcccaaagatggaccccccctggccttgtgacagctccccaagtgttctccggtggagaaactgcagaggactggtgggcggggctccccagccatcaccatcctgtgtacaatggctgtagacttgtatatggctcctttaatattgtaaagatgctgatgtacaattgtcgtgcatttgtgtgaacacattgcgttcccagtccatgccataaatgatgctctcaaaaaaaaaaaaaaaaaa

SEQ ID NO: 235138 - DNA, 667 bp, Homo Sapiens
tggaggtgagcagaaggtgcctgtctttactaaacagccaggatggaggaatcctgacaagagctgctggtgttctgagccggaccctttcttcctctctgaaaattgttgaggaggccttgcgagcaggagtggtaaagaaaatgatgaaattcctgaagacaggaggtgagactgcatcacgttatgctataaagatactagctatctgcacgaatagttatcatgaagctcgggaagaagtaataagactggataaaaagttgagcgttatgatgaagctgctcagctcggaggatgaggttctggtgggcaacgctgccctctgccttggtaactgcatggaggtgcccaacgttgcgtcttccctgctaaagacggaccttttgcaggtcttgttaaagcttgcaggcagtgacacacagaagacggccgtgcaggtgaacgcaggcattgctctggggaagctgtgcacagctgagcccagatttgctgctcaactgagaaagcttcatggcctagaaattctcaactctacgatgaaatacatcagtgattcttgagagagacagggtttgtgtgcatttggggaacacacagatgcacaccgtgtgttgttcctatgctaataaagacctttgatgtatccacaaaaaaaaaaaaaaaa

SEQ ID NO: 235139 - DNA, 734 bp, Homo Sapiens
tgacaccagcatgttgctgtaaatttagcaatagaataggcaatggactgctgtgcatttccttagtttttcattctgaaacagagcaaaacatcttcccaaagagatggagacaatctcttctgggtagattccaagtataacctgtcccagggtccctttgctcagctgtgactaacaaaagtctgttcaatttaactacttagataagaagcgcaatgcttttatttaaaaatttaatattttctatggggctgtattttccaaataatagcaacaaaactgtcctaacgttttcactgttctgtaattttgttttaatatagaggatacccataatttcttaacactggaaacatcattctgaacgatgtaggaagcggtcagtaacgtgaatgatgttattgtaccgtctccagctttttccttcttcccccagatggtcgcacctgtgcatacatccctgtgcatgtgggggcacatgagtgggaaagtgggtgtcactcctattttctgtcctagagtgtcagcgttggaagggatttttttttgttcctccagtccggccctctagttgatagtccagtagtctgttaacaatttgtaaggacctgggttatattttaaaggttgttgctgttgttgtttgggttcacttatgtatatgcagcttgactgttcaacccagatttttaaacaataaaaaaatttaatgtataaaaaaaaaaaaaaaa

SEQ ID NO: 235140 - DNA, 563 bp, Homo Sapiens
gagtaccctgtgggtaaggcacacctcagaagggacaggtccaggccctctcctccctggcctggagcttctggcaaggcttttcttctctgagcctcactttcctcttttgaaggtggcaatagtaactgaacctgcatcacagaatggccttgagggttagatggaacatatatagacataatttgttgaagacagagtagcaaagacacaaagtaaaaaggacagaaaaaagaaatgcaacttgtgcaaaatagaactttcaaagatttacaagaagggtaaatgaagctatcgtagcttcacttgggaaaagggagagaacagatgaccagcaccaaggatagaagagggatttcttactttaaaaaaaatggtccaaagaataaacaaactgaaaacagccaaaagagaaaggaagaatttgttagaatagggcaagactaaaggacagagtaagggtgctggccgccacctgactcaagttcaagtcgagctgccactgttgaaatttcaaggagaaatggtgagaagctaaaagatgcaaaaaaaaaaaaaaaaaa

SEQ ID NO: 235141 - DNA, 702 bp, Homo Sapiens
gtggtgagcaactgactgaagtttccagtggaaaagttcctgacgattgtttccgcagcgaccttgaatttcctggtcaccatggcgacctggaagtcccaccgaatgctctcaacaatggggtaccccgaggacattcgtgcaattggctgcgcagtctgaggcctgaaaagcgtttctgccaatcgttcttgactttctggagcctccttagtgggttcaacggagcagggatttttaaaactgcccccttttttaaacaggggagaaaattgagatttagtaccaggtgggttcaggtcctgagcaaaagccccatctttgaattcagaatgctgaccccagggccgatcgtgtagagcctatggtgtatcttaatcgaaacccgtggcccaaacatctcagccaggaacctgggactttaggtgtcacttaatctcttcacacctgttaactacacctatctgcataggaggctccccacatcagtccaggcaacttttttctttgcctggggccatttcttctaaatggaaggagaaaagtctgagcattagaaattgtggcattaatgtctgcaagggctaatggagtgaaaagaatacattattctccttttcttcttagaaaaaaatttcaattgtggatgtaatagaaataccattaaaatatatttctgattgcaaaaaaaaaaaaaaaaaa

SEQ ID NO: 235142 - DNA, 682 bp, Homo Sapiens
ccccctgtggagatgaaggtgtgtgctgatcccccgtcctcctgtggagatgaaggcgtgtgctgatcccccgtccccctgtggagatgaaggcgtgtgctgatccgccgtccccctgtggagatgaaggcgtgtgctgatcccccatccccctgtggagatgaaggcgtgtgctcatcccccatccccctgtggagatgaaggcgtgtgctgatccgccatcccactgtggagatgaaggtgtgtgctgatcccccatccccctgtggagatgaaggcgtatgctgatccccggtccccctgtggagatgaaggtgtgtgctgatcccccatccccctgtggagatgaaggtgtgtgctgattactaatccacatgggcaagaacaggatgtccgtcattaccctgaatcaatgctaacacagtgccacttgagttcacattaagttagaaattgagaatctaaaggtacctttattttaactaaaaaataatttatatactgtatattgattgtgacacaatttacaaagtctgaggtgtggaacagttatttaagcattagtcaaccctggtccttaagacagttctagtaaaatgggattgtatatatttgttcaactattttgaccaaaaagttcaataaattttaaatgtttaactggaaaaaaaaaaaaaaaaaa

SEQ ID NO: 235143 - DNA, 516 bp, Homo Sapiens
agaaactttcccagaagatggaggagagtatatgtgtaaagcagtcaacaataaaggatctgcagctagtacctgtattcttaccattgaaagtaagaattaatcactctttttatcttttattctattaatttttttttccttaaaatcacttttcttcttctcttttttagctgatgactactagctcccctcccctctccctggaactttctctttcactccaactttcttactacatccatcttttctgtggcggggccaaaaaaggaaaccaggagtgccactatgctgacttcttattccttttcataacagtcttcaaagcacagctcatctaaagaatgcctacttcttttccaaataagcatcagatttatcgcctattatgcagtaacagtcaataaaatgtacttatgggggggaattactcaattattctatcagaacctattataaagactgtatttcccatagacgtttacagcaactatgtttaaaaaaaaaaaaaaaaaa

SEQ ID NO: 235144 - DNA, 724 bp, Homo Sapiens
ctccaaagcagaaagtattggtgcttgctaccgtgtgaattcttccttagacatgcagagaaaatgtatgcaagagaccaaaaagatggctccaagctatgtcatgttacctgtaataaaatcttttcttctagattctttctatgttggcagataatctccccttgtagcttccactcacttattcttgcattcagagtcacaatgatcatcttacccatgtggtttttgagaaagaaagatcaattctttgtttgcagtaggtaatcttagagatggagatgattgtagaattattcctagatgagtgtcaatttatttaattccattgtcatataaggagtcaaattgtttcttatcatttgttcattgaagaacagagacctgtctggaaaatcgatctctacaaattcaattaaataatgatccccaaatgctgaaaaagtgaaatacagcaattcaacagataatagagcaatgtttagtatattcagctgtatctgtagaaactctttgacgaacctcaatttaaccaatttgatgaatacccagttctcttcttttctagagaaagatagttgcaacctcacctccctcactcaacactttgaatacttattgtttggcaggtcatccacacacttctgcccccactgcattgaattttttgcttatgttgtttataataaaacttttcaattatctcaaaaaaaaaaaaaaaaaa

SEQ ID NO: 235145 - DNA, 654 bp, Homo Sapiens
ttttaatgaaactggtaccatctgtgctttcacaaaaaacttccaatgccatttttgagaactaacctaactagtcatgctaaccagaaaatccactggggaggaggttccttgtgaaacaaaatgctgttcagttagtaaccaagttactttgattgcaaaagcagctgtgtttctgataagtactgaacaaatgtgtgtaattttctgtgccagacttatgactttgttttcaagcactgtaatgtgggatggatggttagaaacaataatatattagggtttctgtttaaccctttcaggactgaactgtatctccttttgttaattttcccctgtgttgtgataaatgtttgccagcattcagtactgtgttggtccagatgtaggtttatatgctcatttttagcttatttcttgtaccttgcagcatgctctacgcattcagtccttaaggggtttattttacaaactgtgcgcctgtaaggtttattagcaataagatagaaaattgagcaagtttataccataattttgtagaaaaaaagaatctgctcagttccatatttcatccgtgaaaaacttgcaatacgagcagtttcaaggaataaataaaaaggaaatgtaaaccattgtaaaaaaaaaaaaaaaaaa

SEQ ID NO: 235146 - DNA, 743 bp, Homo Sapiens
  misc_feature (43)..(43): n is a, c, g, or t
gggtccggagggagattcaccgagtccccacgcagcgcagccnttcgcagttcgacaagaaaatcctgctgtggacagggcgtttcaaatcgatggaggagatcccgcctcggatcccgccagaaatgatagacaccgcaagaaacaaagctcgagtgaaagcttgttacataatgattggactcacaattatcgcctgctttgctgtgatagtgtcagccaaaagggctgtagaacgacatgaatccttaacaagttggaacttggcaaagaaagctaagtggcgtgaagaagctgcattggctgcacaggctaaagctaaatgatattctaagtgacaaagtgttcacctgaataccatccctgtcatcagcaacagtagaagatgggaaaaatagaatatttaccaaaatatctgccatggttttattttggtaacaagaagcacaatgtcttttttatttttattttttagtaaacttttactgaagtataccatgcattcaaaaagtggacaaaactgtatacagtctgatagatatttatgtcgtgaacacctgtgtaaccactgccaaagtgaagatgtagaatattggcaacacttcacagcctcattcctgccttttctcagccattacctcccaaacatagcagtttttctgagtttcatcacctttgattcattttgcctgtttttgaactttatataaatggatttatacattaaaaaaaaaaaaaaaaaa

SEQ ID NO: 235147 - DNA, 649 bp, Homo Sapiens
gattctgaatttgagtcagtaatagctggtttattccaggattcaaatgtaagtaacttactctcaccaacagtagtcaaaatgagaagcctgctatgctgtggatttatggctcatggactctggatgagttctgcatttatcttcgtggagtgacgaataattgaattggaaaatcatggcatccagaatggaactgcataaaaatctgctggagtgtttccgaaaaaatgaagacctctgggcccttatcccagactttctatttcagtggtccatggaagagcctgcaagcttggcttttccatctcaggacttagctgcagggtctcagggcacactgcagagactcgtcatcctgttgcctggaggtgtgcactggctatttgcagatgagccgccatcccgatgactgcccaatcctcggctgcctgtgctccgggtctccattcatttgaccagcaagacccacatccagcagcaaggactccaccgggatgggagcctggtgcttattctcgaactcagcaatccagcagtgcacctgggtctgtttccagcctggccaatgatattctaagcatgaattattacatattactaattattaaaaattaaatgtaatatcttgaaaaaaaaaaaaaaaaaa

SEQ ID NO: 235148 - DNA, 699 bp, Homo Sapiens
ctcacaaaatatgcaaaagttgtgagtcccatggagaatatttcccactagtggagaaacaatttaagactgagacgtttcagaacgctagaacattggaatcctctgatacagtttacactttgtataccaagcagcactaatacatatatagttagacctatcatggtggacaccaaaaacaaaagaggagacattaaaaacaaccagtaagaaaagagttcaaattgacaagctaattctgcagttatttggaagagtgaagggtcagaaataacaaaaaccctcctgaggaagaaccaaagtagtagagatgggctgtcttgccttagagacattaaggtctgttataaagctataataacgaagacagcctggtattagggtgccagtgtagttacagacaaagagaccaatggaacaggataaaaagcccataaataatctcatgcatatatgcacacttgacttacaatggaaggagtattgcagatcagtggggagagactgaactaatcaataaatcatgcagttacaagatcatacatgtggagaaacaaaatgaaaccagatcctgaagtacacaaaaaatcggttccaggtatattgaatatttgtatttttaaatcaccaacagaaaggttttaaaggaaaggaaaacagtagaactttcaaagaactaaaaaaaaaaaaaaaaaa

SEQ ID NO: 235149 - DNA, 560 bp, Homo Sapiens
tccgcgcgccagagacgctgagagtccgcactggcatcaccttctgagtttctgatgctgatttgtcgttgcgaagtttctcgtttcttcctctgacctccgaggtccccgctgcaccacggggttgctctgttctcctgtccggcccagactcttctgtgtggcgccgccgaagccaccgttagcgcgagctgctccgttcgccctgcccacggcctgcgtggctggggccgagtcccaggggccgcacggagggcacagtctcctgtcaggctcggagaggtcaggagaccgaccccaccactaactttggagaaaatgtgggtttgctttttaaaggaatcctatatctagtcctatatatcaaacctctaactgacgtttcttttcgaggaagtggcttggtgggtgcagcccccgccggttccgttgacgctggcaccttctgttgattttttaagccacatgctatgatgaataaactgatttattttctaccattactgaacattaggacaaacacaaaataaaaaacaaaacacagaaaaaaaaaaaaaaaa

SEQ ID NO: 235150 - DNA, 694 bp, Homo Sapiens
aagatcagactgtatatattgttctagataaagcagagtatctaagagatatggaagcaaatcttttgcctggatttcttagattacaagaattggctgacagaaatgtgactgttctctttctcagtgaaattgtttgggaaaagtttcgtccaaatactggatgctttgagccgtttgtcttatatttccctgattacagcataggcaaccttcaaaagatcctgtcccatgatcatcctccagagtattcagctgatttctatgctgcctacattaacattcttcttggagttttctacactgtttgtcgagatttgaaagagctcagacatctggcagtacttaattttcctaaatattgtgaacccgtggttaaaggagaagcaagtgaacgtgatactcgcaaactgtggagaaatattgaacctcatttgaagaaagctatgcagactgtttatctcagggaaatatcaagttcccagtgggaaaagctacagaaagatgacacagatccggggcaactgaaaggcctctcagcgcatactcatgtggaacttccatattactctaagttcattctaattgctgcataccttgcttcatacaatccagcaagaactgacaagaggttttttcttaagcatcatggaaaaatcaagaaaaccaactttctaaaaaaaaaaaaaaaaaa

SEQ ID NO: 235151 - DNA, 696 bp, Homo Sapiens
atgatgagacataattaagggtcatctacaatggacaattttcaaggtgctgatgtgatgtcacaacctccgctacatcctgagtaagtcagtgtccccaacagcagatgaggctgggtctttcctcatttctgcttctgggatgacatcagtgggagagttgaagatctgagaattctaaaggaaatgttctctgatgggaggagagagggaacttatttcccttcaaagtagtttgcttcttaagaccactcctccctccagaatgtctttaaccagacatcatttcagaaggtggggcagctgcttccttaggaagagtgggcctgatagctcaaccaactcctttagcatgtaaactcacagaaggcaagaacccctttttttagactttccaaatgcatcctgcaaagagagagatagctgatagggactgacaagcacactgtttagataagaagcaattagccttttatatctgtgctctatacattttctatgtgcagcatctttcctaacttgttgtggttcccgggtggcaggtgcacagctgggagggactgccggctgtttcgtacaacattcttgccaattcccttgaggagaaaattcttcacatggcttctgcatgtacagtatttgggcagcaaaacatgattaaagtcagtttgaaaatggaaaaaaaaaaaaaaaaaa

SEQ ID NO: 235152 - DNA, 641 bp, Homo Sapiens
ggtggtagcaggattgtgcacaaagctcctaattagaggaaagatctgggttttagtcttttctcctctatcgccgccttaccggttgtacaacattggaccagccattctccccaaggcctcggcattttcattgttaaatgggaacactcctaattcacactgttgctgtgaggattacatttggtaatgaatgatagaatgctttgtacatggaaaaggactatacctttcttttttaactacaaaggcgaacatgtaaccctctacctgtgggcgcacatttgctgtggtgttacgttccactggtagcgcccaacctcccttcattcaagcacattttacgggcctacagggaaggttttcttcctgtcctctcctaagacttgtttatgttcatcatctcttctatactagagctgcagtcttacatttgcttacttcctgacatccacccccaccccagtgatttctccccatctccacctctatattatttgaactaaatgaattcatgaatgaacaaatgagtggatgaatgaatggtaatggataatgggctatgaagtcatatttaaaggcactatctcatttaaaaacaatctaaataaataactacaatgataaaaaaaaaaaaaaaa

SEQ ID NO: 235153 - DNA, 599 bp, Homo Sapiens
attagaaaactactcggatgctccaatgacaccaaaacagattctgcaggtcatagaggcagaaggactaaaggaaatgagaagtgggacttcccctctcgcatgcctcaatgctatgctacattccaattcaagaggaggagaggggttgttttataaactgcctggccgaatcagccttttcacgctcaaggtgtgagccactgcaccaggccccttcatcttaattttaatatatctttgaataaacaccattgtatgaacctgctgtaagcttgggagtggtctgttagtctacagcttgtgtctgagatgtgctaattgaatatttgctcagtacctcatcttaactgcctttggctttatgttgcttatccttcatagtatcttgttcattggccttttacatccataggcatcacttctctgatattcgttgtgctcttttaatggattaatggtttgcttggttggttcctctagttagactgtaaactccttgagagcagagtctgtattttattaattacccacagtactaggtacatagttgccttcaataaatatatatttaatgaacgaaaaaaaaaaaaaaaaaa

SEQ ID NO: 235154 - DNA, 657 bp, Homo Sapiens
  misc_feature (38)..(38): n is a, c, g, or t
cagtaatggggaaagaaaagacttacagctctctggtntgaacagcccaggatcctgcttagagaaaaaggagaaagaggaagagttggaaaaggaggaaggagagaaaacagacccaattttgcccattcgtaagcgagtcaaaatacagacccaaaaaaaaccaagccaagaggccctaagaaaaaatttaaagctccccagagcaaggccttggcagccagcttttcagagggaaaagaagttagaacagtgccaaagaacctgggcctatcagcgtgtaagggggcctgcccctcatctgcgaaagaagagcccagacaccgggaacccctgacccaggaggctggaagtgtcccccttgaggacgaagcctccagtgacctggacctggagcaactcatggaagatgttgggagagagctggggcagagcggggagctgcagcacagcaacagtgatggcgaggacttccccgtggcgctgtttgggaagtagctgttgctcctctgctccctctttttctcccttctctggggcgcaggagggagaagttgctaagtgctgggtctgttcattggctatgaggttcaaatgtgtgtggtgcagtttctgtgttaataaagcaggttacagtcgaaaaaaaaaaaaaaaaaa

SEQ ID NO: 235155 - DNA, 667 bp, Homo Sapiens
aaaaagtgtattttaactctgtatatattacccttaagtcattttcctgtcttcactaatttagcaatgcattcatattagctgatgaaaataggcactcacaatgacaaccagagccagtttcttgtcttttttatacattttgtcatcccagagacaatcagtatgtgcttacctgtgttcaagtagagaaaaatacagtagagtctgataggacatattcttgtaccacagacaaaacaaatcttatgttgcatttactatcaactgctgctaatacgttattataaaacttacctagctcctgaattcttcctatcttatagcttaaaaaaattaggatcataggcaaatcagttaccttgcagaaagagctttgtatgacagacattgtcttattttatttctgtaaaatattagctgtatgaatatgatttaattaacaagaaaacatttcttcctgattgacaacagtgttagacaaggtgcaaagcgaaactggttgctcaagttgatagaaaacaaaattctgaatatcttcaaattaaattcggtaaaaacacattattttttcatatgtgatgtattcatgcagaacaactatctttgtattttgtttttaaaatgtgtttaataaatgatcctttgtaaataaaaaaaaaaaaaa

SEQ ID NO: 235156 - DNA, 649 bp, Homo Sapiens
  misc_feature (51)..(51): n is a, c, g, or t
gaaagagcaatataaggagcgagtagaaaatattctaatgtagtattcatntgaagaatcctgaaaactgttcctgccaggcttgtggactgcatcgctactgtaaatattcagtgcatttatcaggagagtttataacaccaggaccatgcaaatagataatttcatgtcacatgataaacaggtgttcactgttggcagaatttgtgccagccgtaccagaatttatcataaactgaaacattttaaattcaaactataccaggaatgttgcaccattgcaatgacagaagaagttgaagatgaacaagttaaagaaacagtggaaagaattttcaggcggtcaaaagaaaatggctggattaaggagaaatatggtcaacttgaagaatatctcaattttgcggattactttcaagaagagaagtttgagttgtaacacatttccatcagagaagattttttaaattcctgtaaatgtgaagatcatgattcttgtttttctgtatcatgtgacatgtttgtacattttatctatatcttcatggcaaaatattttgtttaaaacatgattatcttaattcctgtgaagtggcactctacactctaattaaacttttatctgatgtacataaaaaaaaaaaaaaaa

SEQ ID NO: 235157 - DNA, 644 bp, Homo Sapiens
agtacaggtgcctggtgtgggactagcaggcagctctgcctgtggccctggcataggatccactaggcgaagctggctgggctcctgagtcaggtggggacttggagaacttttatgtctagccagaggattgtatatgcaccaatcagcactctgtgtctagctccgggttcgtgcatgcaccaattagcactctgtatctagctaatctggtggggacttggggaacctttatttctagctaaaagattgtaaatacaccaatcagcactctgtgtctagctcaaggtttgtaaacacaccagtcagcaccctgtgtctaactcaaggtttgtaaacgcaccaatcagtgctctctgtctactctatctagctaatctagtggggactgggacaacctttatgtctagctaagggattgtaaatacaccattcagcactctgtgtctagctcaaggtttgtaaatataccaatcagtactctgtgtctagctcagggattgtaaatgcaccaatcagctctctgtaagtggaccaatccactgtctgtaaaatgggccaatcagcaggatgtgggtgggggtcagataagggaataaaagcaggctgcctgaagtagcagcggcaaaaaaaaaaaaaaaaaa

SEQ ID NO: 235158 - DNA, 464 bp, Homo Sapiens
taaaaaaaaaaaaaacgtatgtgatttatatatgtagttctccgggtaaaaaagaacctttctcctttttgaatttttgagatgttacctaccagtaatgttggtactattataaggcaatcgtcttataaactttttcactaaatagtcattttgttttctttgttttcaacacagtttttacgtaacagaactgttttcctcatcactattagaaatcagttgttaatgtgcatgctagtgttttgaattttaatattgattataaattcacatgtagattagtaatttgtaaaaaaaaaaatgtaaatttatgtaactcatttttcagatactttggtactaatgttattttatcgttaccaattcttacaacaaatataccaaactatggatttaaatgttttggcattaaaaactatttgataataaaatcaggaaattttaaaaaaaaaaaaaaaaaa

SEQ ID NO: 235159 - DNA, 633 bp, Homo Sapiens
ctgaaagggttgtcccacacgaaaagagagaaaaggataatgaggttcttttgatgctgtagtttttcctgggaagactaggaaggactctgaatttcaaaagaggtgatttctcgcatgagcatctcttccatcctccctccctccacaagctacagtgatgcatgtagcagacacggcacctacagagtacgtggtccaagccaataaagctcaacaaaacccaagcaaagatggagcttatggcccttaccctttggaaatatccccagattggtttagattgaacctgaatttgaataaagagaagcaaaatgtagggggaagaaggattataaaatattgggattgatattggtatcagtgatttgaagttgatttccaagctattctgttcagtcagaggctttcttagcctttaacgggagaagagaaatacggtcatgcgctgtataacaaggtttccatcaacaccgctctcacgtacaatcccctgagactacagtggggctgagaaattcctatcacctggtgacatcttcatgatcctgaccctgtgtaggcttaggctaatgtgtgtgtttgtgtcttaggttttaagaaagcttaaaaagtaaaaaaaaaaaaaaaaaa

SEQ ID NO: 235160 - DNA, 788 bp, Homo Sapiens
  misc_feature (104)..(104): n is a, c, g, or t
ttccttagagtgggaggggcataatgttcggtttctgcattcaactaccttgtaaatggtgtccgttgcagtttcaccaaatgtattgatgtgatttacagtgngaatgaaagaacagattaagcattgatagctttcttttttcccccttttttcttttttctcttttcttctttcttttcctctttttccccaagaggaagaattgcttttctcttaccagtatgatttgtaactctggaacactattcttacagaatgcctttctaacctgaaggatacccagatttctttctttatgtacaagatggaaaatcccctacccctcaaaaacaggttgagtttatgggccagaatattttgtataccagacattggtaagctctcatggtttacaggaaggctctggttccccctcacaggatgagcatgctcagttgggcgtgtgtggaggagctgtgaacttcacgctcttcaaccccagactttgactgtatagttttttgtttttttaactgttccatcaggaaaaaaatgtgtcagttgattttggtgtgacttgtgtaaatggttcatggcaatgacgttgggttgcttcctaggcctggctgagttgtgcctaagggtggctgaaatactaaaacacttatcttacagcaagtgaacaggggctacctgccacatcccctccacagatgcactttaaaaagccactcatgctttggcttaaactgtaattaatttattttatgtacaataaatcgcatttgaaaaagaaaaaaaaaaaa

SEQ ID NO: 235161 - DNA, 662 bp, Homo Sapiens
  misc_feature (76)..(76): n is a, c, g, or t
ctagcagggtgttcctgcccagcatgcccagctcctccttgggtgactcggagtctttcccatgtcagagcccccnaaatgggggtagcaaggagcacctttctggaaccccctatagcatccaagtttctttctgggctctcttgccttttcccccctttcacagatggcacccctgggcatctgtccttgcctaggtgattttggaggttggtgccttcctgggaactagccaccagcttatctgcttcccttcccctggcatcacttcccataggcctggggtttctagactggggcctggccacccctttccccactccacgagtgagtcggcctccagagaagactggcacaattccaactagagtcaacccatgctgccctctgcccttcccactcagatctagatcctgctttcatttctggctagtgaagtagacttttgtgtttttgaggtttattagcaggtctgctcaggaaccaaactaatgagtagctttatattgggccaccccaatatatggctttgggggctgaaaaagcagatgtagaccccctccctcggatccttattggtgtgccctttagcactccgcagactctgcggggtgaacaggagtgatgataaaatttttcattctaaaaaaaaaaaaaaaaaa

SEQ ID NO: 235162 - DNA, 706 bp, Homo Sapiens
tcatactcaacacaaggaaaaaacctcattaaaattaatgactaatcaggaggcaacgtaaccaaaagcacagtgaatgaaagttttcatggtaggttcaacatgggtttattgctagaaagatccaggggatagctttaggtttaacttcggctcaccaacgtaactttctaatcatttatttcagtaatagctagaagtgggtctgaatgttttcccagagtctgatacgtgtttttttttgccagaagagaggtcttcaggagacttcatttaaattctgattattaaactgaggctttaattgatgttaatgccttatgtcaaatgtaaagttagaatttgctagggctgggatagggagtgatatttctaggacttagacattgaaaactaattcagcctgtagtaacctggatggttttcaatggcatggttagtcaaattcatggttttaaacttagaagcagctttcgggggagagggtaggttggagcatttattacatattttactgtttaatgtcttaaccgtgggccttttaatttgtaaacactgaaatgattgttgggctgtggaaaacatttacctatttaccttggaagttttaaaagacagtccactttttagcatgtgtgttgtgtccagcctgtggtcgtcttaactaataaatgtgatttttctccccaaaaaaaaaaaaaaaaaa

SEQ ID NO: 235163 - DNA, 664 bp, Homo Sapiens
atcagagtttctgtggaattctgtttgttaaatcaaattagctggtctctgaattaagggggagacgaccttctctaagatgaacagggttcgccccagtcctcctgcctggagacagttgatgtgtcatgcagagctcttacttctccagcaacacttttcagtacataataagcttaactgataaacagaatatttagaaaggtgagacttgggcttaccattgggtttaaatcatagggacctagggcgagggttcagggcttttttggagcagatattgtcaagttcatggccttaggtagcatgtatctggtcttaactctgattgtagcaaaagttttgagaggagctgagccctgttgtggcccattaaagaacagggtcctcaggccctgcccgcttcctgtccactgccccctccccatccccagcccagccgagggaatcccgtgggttgcttacctacctataaggtggtttataagctgctgtcctggccactgcattcaaattccaatgtgtacttcatagtgtaaaaatttatattattgtgaggttttttgtcttttttttttttttttttttttggtatattgctgtatctactttaacttccagaaataaacgttatataggaaccgtcaaaaaaaaaaaaaaaaaa

SEQ ID NO: 235164 - DNA, 662 bp, Homo Sapiens
tcaatcatcagtatgaaggcgtcacagaaacagtgtataatctcataagaagcacttgcccccgatttctcttgggtctcctggatgcagggaagatgtatgtacacaggcaagtgaggccagaagcctggctgtccagtcgccccagccttgggtctggccagctgttgctggtttgtcatgcctccggcttctacccaaagcctgtttgggtgacatggatgcggaatgaacaggagcaactgggcactaaacatggtgatattcttcctaatgctgatgggacatggtatcttcaggtgatcctggaggtggcatctgaggagcctgctggcctgtcttgtcgagtgagacacagcagtctaggaggccaggacatcatcctctactggggacaccacttttccatgaattggattgccttggtagtgatagtgcccttggtgattctaatagtccttgtgttatggtttaagaagcactgctcatatcaggacatcctgtgagactcttccccctgactcccccattgtgttaagaacccagcaacccaggagcctagtacaatatagtgatgccatcccgtcgactctccatttaaattgtttctctttctgcataataaacatttgttaataaaaaccaaaaaaaaaaaaaaaaaa

SEQ ID NO: 235165 - DNA, 759 bp, Homo Sapiens
  misc_feature (38)..(38): n is a, c, g, or t
gagggcgatgaagaggaggatgactatgatgatgactntgaagacgattttattcctcttcctccagctaagcgcttgaggttaatagttggaaaagactctatagatattgacatttcttcaaggagaagagaagatcagtctttaaggcttaatgcctaagctcttggtcttaacttgacctgggataactactttaaagaaataaaaaattccagtcaattattcctcaactgaaagtttagtggcagcacttctattgtcccttcacttatcagcatactattgtagaaagtgtacagcatactgactcaattcttaagtctgatttgtgcaaatttttatcgtactttttaaatagccttcttacgtgcaattctgagttagaggtaaagccctgttgtaaaataaaggctcaagcaaaattgtacagtgatagcaactttccacacaggacgttgaaaacagtaatgtggctacacagtttttttaactgtaagagcatcagctggctctttaatatatgactaaacaataatttaaaacaaatcatagtagcagcatattaagggtttctagtatgctaatatcaccagcaatgatctttggctttttgatttatttgctagatgtttcccccttggagttttgtcagtttcacactgtttgctggcccaggtgtactgtttgtggcctttgttaatatcgcaaaccattggttgggagtcagattggtttcttaaaaaaaaaaaaaaaaaa

SEQ ID NO: 235166 - DNA, 701 bp, Homo Sapiens
gggcagccctcgaatccccctcccggcgcagcagagctcggaggcccgtgtcatccgcgtcagcatcgacaatgaccacgggaacctgtatcgaagcatcttgctgaccagtcaggacaaagcccccagcgtggtccggcgagccttgcagaagcacaatgtgccccagccctgggcctgtgactatcagctctttcaagtccttcctggggaccgggtgctcctgattcctgacaatgccaacgtcttctatgccatgagtccagtcgcccccagagacttcatgctgcggcggaaagaggggacccggaacactctgtctgtctccccaagctgaggcagccctgtcctctccacaagacacaagtcccacaggcaagcttgcgactcttctcctggaaagctgccatcccccagtagaggccactgtgctgtgtatcccaggaccaccacccaactgtagcccattggaccccatctctttttctgactctgttggtactagatccatattccaaagacatcagcccatgggtggctggtggagagctcaatcccataaatgtagaaagaggtggggcatggatacgtcaaatccctccccagagaaatcttataaatgttagagacgcatcagaagtgacagatgcggatgaaaatagtgaccagagttatgaaacaggaaaaaaaaaaaaaaaaaa

SEQ ID NO: 235167 - DNA, 630 bp, Homo Sapiens
  misc_feature (20)..(20): n is a, c, g, or t
tggttatagcaatactcaanattaaatgggaaaaaacttcatgatagcgtaagtttggaaagtttagcaaaatcacagtggtactgatttttatttgttttctattttttttattttatatttttaatttttttaacagggtcttcctctctcgcccaagttctcatgcctcagcctcccaaatagctgggactacaggcacaggccaccacacctggctaatttttttgtattttttgtggagatggggtttcaccatgttgccaaggccagtctgaaatcctgggctcaagtgatcctcctgctttggcctcccaaaatgctgggattataggcatgagccgctgcacttggcctgatactgatttttattccttgcgttatcacatagtgttgtatttgaaacatagttcatggttttatcaaagaactgaagatgagaatactggtcatctaactttgtaatttgatttgattatactgtaaagtttgacagtctcattttatcactgcgtttgtatctattactaaaatgtattttttgacctcttactgattcattgttggtatgtacaaactgttgacttgtaaaatcaataaagtcttagttggaaaaaaaaaaaaaaaaaa

SEQ ID NO: 235168 - DNA, 694 bp, Homo Sapiens
tcaacaaaagcttacctggtaagatattcagctggtctggtcctcaagactccaatagacactcttaaagaaggattgctgatggattgatagtgaaaccattagatcattgaattcctctggaattagaaaaccagagagtcccattttaagaaattagatatttaatatagcattgtgtgttctattttagtaacagcagaatctcttgacattacacaactcagtgaaacaacatcatttaagccaaaatatctcccaactgactgatagactctgagcactaatatcatagtgctgtgatgatggacaattacatagtaccgataacagccatgcactgtgcaaagcatgcccttctgcacaggagagcaaggcacttgcagtagtgatctatgccagcaaaacatcattttgagacaaacatttttgtggcagatgtttttcctaaaaagtactatatcatccaagaaatatttgagtaaaatcccttgttcttttgggtgacattaactgacatttgctttttttcaagacctaatagaaaataagaaagcccataatgtatttagaaacaggaatcctcagagcaattctctgtattctcatataatttcaatgtaaaacagaaaacatattgatgtgttggtgataggcttgaattattaaaaacttcaaaaacaaaaaaaaaaaa

SEQ ID NO: 235169 - DNA, 679 bp, Homo Sapiens
  misc_feature (34)..(34): n is a, c, g, or t
tgccgggaagtgggtcggctgcgggaggcggtgnccgaggagcgccgccggagcggggacctggccgctcaggcagccgaacaagagcgccaggccagcgagatgcgggggcgctccgagcagtttgagaaaacggcagagctgctgaaagagaagatggagcatctcattggggcttgccgagacaaggaagccaagatcaaggagttgttgaagaagctggagcagctttcagaagaggttctagcaattcggggagaaaatgctcgccttgccctgcagctgcaggattcccagaagaaccatgaagagatcatctccacctacaggaatcatctactgaatgctgctcggggttacatggaacatgaagtgtacaatatcctgctgcaaatccttagcatggaagaggagtgaggcagcctcactgtgtgccctcagggatacgagattctctgttggaataagaaaccctggttgacagaggcttcatcaggctgtggtgggcgggggtgttggccactaggcaatggtatgggcagggcttcacctgacattatggacctcagacctgagaacctggaccctggaatcagcatggatgagaccagaggaggtatggatggaaacaagctctatggaaaataaagcatgaggcaggaaaaaaaaaaaaaaaaaa

SEQ ID NO: 235170 - DNA, 705 bp, Homo Sapiens
  misc_feature (27)..(27): n is a, c, g, or t
tattttagacagttaagttcatgtgtntgattttgtcatgtcagcataaatgagaaaaagaagtggatcatgcagctaatgagtaaccaacattttgtaaagttttaaagttttagcaaacaacattattccatctcatttaaaggttaaaaaagaagagacaactctagccaaagtagaaatttatattctacacgtccaaactgtctcctagcagcttttggactatatatcacttgatgttaaagtatcttttatttgtaataaatattcaaatttctatttagaagctctaatgtatacctagattaaatcaaatcacagttttatgcttttaaaatatatgtatttcaaactgtatattttaatttctgagtgcatgttatatagtatttaatacttcagatgtcttggcaaattcaatataagtatttattcccacaagcgatatatgggatatctcttaaaaattatgaatatgtaccatttccttcaaagtcatcctagcctatgctgtatcaaaagtattgtatattttatggagatttagtgatatacatgtaaatgttttttaagttattttattgaagttcaatctttacataaaattaaaatctttttttaaaaaaagtgtcagtgccagaactgtaaatgaaaataatcaaataaaagttaaaataattcattaaaaaaaaaaaaaaaaaa

SEQ ID NO: 235171 - DNA, 642 bp, Homo Sapiens
ctgactggcacacggtccccgggagcatgaatgacttcagctacctacacaccaactgctttgaggtcactgtggagctgtcctgtgacaagttccctcacgagaatgaattgccccaggagtgggagaacaacaaagacgccctcctcacctacctggagcaggtgcgcatgggcattgcaggagtggtgagggacaaggacacggagcttgggattgctgacgctgtcattgccgtggatgggattaaccatgacgtgaccacggcgtggggcggggattattggcgtctgctgaccccaggggactacatggtgactgccagtgccgagggctaccattcagtgacacggaactgtcgggtcacctttgaagagggccccttcccctgcaatttcgtgctcaccaagactcccaaacagaggctgcgcgagctgctggcagctggggccaaggtgcccccggaccttcgcaggcgcctggagcggctaaggggacagaaggattgatacctgcggtttaagagccctagggcaggctggacctgtcaagacgggaaggggaagagtagagagggagggacaaagtgaggaaaaggtgctcattaaagctaccgggcaccttaaaaaaaaaaaaaaaaaa

SEQ ID NO: 235172 - DNA, 710 bp, Homo Sapiens
agaattcggcacgagggttaccattcctcctgcctcagcctcccccatagctgggactaggggtgcatgccagcatacctggctacgttgactcttaaaatctatgttctcttattttaaagatacagtgctccccactgaaaattaaacctaaaatgtcacatattggtatgttgttaacctggtagattaaatcatgagaatgattagaaagacgggcaacacagcgggttacatccacactgctgatcacaccaacgacaggagctgataagcaagaaagcgtcacagccagcgtctgttcacccaaggttgacaagtgaagtttctctaatgttgattgttagccgatttgtaacctggcatttacttagcaactgccttatcaattacaggatttgccggtaaaagcagactcaaatataaaggtttttggcttaacttggtttattatagttgctctatgtttgtaaacagacaatctctaatgtctgattatttgtatcacagatctgcagctgccttggacttgaatccatgcaatgtttagagtgtgaagtcagttacttgttgatgttttcttactgtatcaatgaaatacatattgtcatgtcagttcttgccaggaacttctcaaccaaaatggaattttttttttcagtatttcaataaatattgatatgcccagcctgataaaaaaaaaaaaaaaa

SEQ ID NO: 235173 - DNA, 719 bp, Homo Sapiens
gcctgtcagaggagatagaccagctgcgcggcttcattgcctcgcagggcatgggcaatggctgcgggcgcagcaacgagcggagttcctgcgagctagaggtgctgcttcgcgtaaaagaaaacgaactccagtacctaaagaaggaggtgcagtgcctccgggacgagctccagatgatgcagaaggacaagcgcttcacctcgggaaagtaccaggacgtctatgtggagctgagccacatcaagacacggtctgagcgggagatcgagcagctgaaggagcacctgcgtcttgccatggccgccctccaggagaaggagtcgatgcgcaacagcctggctgagtagaggtcccgcccagctgcagaccctccaggctggaggaccagccgccctccttccctcctggatggaagtaaaaagccaagctttctccccaccctctgtgggccacacgtgcacttgcacccaccacacacacacacacacacacacacacacacacagacacacagacacatacgcacacacgtgcacacatgtacacacggatacacacacacacacacacacacacacactgcatatctgagcacgcccctcgcactgggtctcaccttgcaccttcttcaggattttatatgtgaagagatttttatatagatttttttcctttttttccaaaacactttatactttaaaaaaaaaaaaaaaaaa

SEQ ID NO: 235174 - DNA, 750 bp, Homo Sapiens
  misc_feature (9)..(9): n is a, c, g, or t
  misc_feature (40)..(40): n is a, c, g, or t
agaatcgcnacgaggaaaaaaaaaagacaagccatgaggngacatgagtagtgtggtggggagggcccgctggcctgcctgggtgggggctgaggagcagaggccggatgctgaggaggggcaggagccacattcgaggcctcctgccggctgaggggctgggtgggttccacctgaggaggcgccacgactctgcccaccccggctcccatctcttccaggctcctctggacccttcccgctgcccagcgctggggacgccttcctcaccctgcggactctggcctctctccagcctcctcctgggggaggctgcctgcagtcccaggcccagggtagctggcagggggccaccccccaacctgcaactgcctcacctgctggagaccctggcagcatcaactccagtacatctaattaagtttgggggataagcaggaaagagcgctgcgtgagctgccatgtatcgccagccgttgctttgttactgaacgtgccgccgacgacctcagaaaacccagatgggtggtggtgcccatgagcccctgctcctcagccaggcccgtggcgccggctcatgtgtctgctgcgactcgagatggcctgaaacgccactcattctcccacttcagttcgtttttttgacagtaattttatggtaacgctatgaattgaattgtctgttctaggactgggcacagattttccccattaaaatttttgacttattttaaaaaaaaaaaaaaaaaa

SEQ ID NO: 235175 - DNA, 638 bp, Homo Sapiens
agagatactacgcagacatcgccaagctcccagccatcagtgaccaggacatgaatgcctacctcgccgagcagtcccgcctgcacgccgtggagttcaacatgctgagtgccctcaatgagatctactcctatgtcagcaagtatagtgaggagctcatcggggccctagagcaggatgagcaggcacggcggcagcggctggcttataaggtggagcagctcattaatgccatgtccattgagagctgagaggaggagcctcgcattcctgggaagagggacctgtccaagctgtcacactgggagtctcagatggaaggacaagtgatggggatcaggccccagagcttgctgtcccctgagaccccatcctggggagaggggaggactcctctccctacgccagccaagtttcgtcatagccagttccagctgggagagacagtgggcgtcgtccatcctcagtgagaacaccagagaacccggggccgggagaaggtggttcttcaagccgagaggcacgagctggggacagttctgcctctgtgactgctgctttgcatgaaaactcatttgatgtatattggggaaataatgagaactttatttaatttttttaaaaaaaaaaaaaaaaaa

SEQ ID NO: 235176 - DNA, 688 bp, Homo Sapiens
agaattcggcacgaggcgcggcggtcccccggtcgtggagagcgtgtcctgcggcgcgatggccgtagtgttgccggcggttgtggaggagctcctgagcgagatggcggcggcggtgcaggagagcgcgcgaattcctgatgaatatctgttatcgctgaagtttctctttggctcatcagccacccaggccttggacctagttgatcgacagtccatcaccttaatctcatcacccagtggaaggcgtgtttaccaggtccttggaagttccagtaaaacatacacatgtttggcttcttgtcattactgttcatgtcctgcatttgcattctcagtgctacggaagagtgacagcatcctgtgcaagcatctcttggcagtttacctgagtcaggttatgaggacctgtcagcagctaagtgtctctgacaagcagttgactgacatattattgatggagaagaaacaagaagcataaaaggactgcaggaggtgctgtgggttggagccgtgggctgtggagggtttgtgtatgatgagaagccctgtacagtcttgtcaagaaataccctgagccagtctctgagacgcttcggtaaaaaatgtccctggatggaatcaagattttaaattcaaataaagcctaatatcatgttgtgtccacattaaaaaaaaaaaaaaaaaa

SEQ ID NO: 235177 - DNA, 582 bp, Homo Sapiens
  misc_feature (37)..(38): n is a, c, g, or t
cagagttaatggtcttggtagtctactcatatttaanngtgtggaacacccaaaaagcttactgtaagctgagagtgtggtaaagggctctttgttttactatgacctacctgagctatcttgctggggaacaccctaatgtcagtctctttataaagggcctttcattttggcctggcaagaaatactctttcatcctcctgcatggagggcaaaaaaaaatttaaaaattggctgctagggtctgctcacttccctgttttgcagaccccacactcttctgcaattcatttcatagttgtcaagactatacaaattgtcctttttaatgttctctcttctgctatccctagttggcagtcttcctctttacaacctgctgaaagtggaagacctccagttttcctttaattcctcagcaaaccaccaactattatatgtcttttttccagaacaacttattttttaactataattatatgcatttatgttagattcactgaaaacctcatcttgtatggtgctctgtaccctatgggtgctaaataaaggcttgctactggcaaaaaaaaaaaaaaaaaa

SEQ ID NO: 235178 - DNA, 601 bp, Homo Sapiens
cctcccgggctctgtgtctagccatgtaaggaagtggagacagattcctgtctctaatccagacctgagaatgcttgaattctcaaagtcctcctagctgggaccttgggagtgtcacctgctgtaagacttgagtggcctgactgggtggttgtgaggatgcaaggagaaaaggtgcaccaaggtgcttcctaagtcggggagaccattcctgggagccacgtgactgacccccaccatggctctttccctccaactcgtgctgatagctggccgctgggaggccgtccccagtgagatcctcagaccctgcacagccctgagtggcttcacatctcttggtcagtgtcttcattctccccagtcagggacctgggatgtttgttacttctagaagcccttcctcaccctcataatggaccttagccccttgctggtcccactcacatcccgtctccattgctgtctgagttccaagactgagtttcttcaagcatccacttgtgctaccaggctgagaagttctgaggatgtgaccccatctgggcatcatttaaccaataaaatttctcgaatggaccttaaaaaaaaaaaaaaaaaa

SEQ ID NO: 235179 - DNA, 591 bp, Homo Sapiens
  misc_feature (33)..(33): n is a, c, g, or t
agaaatgctgcaaagaacaagagctgcagccancaggagatgcaggtgactcccatggaccagaaaaaggacagaaacatgacagaaaactggtagaagaaccaaagaggtttggcatttcacagggcacctgactctggagcccacagtcaccctcctcggggccctctccatcaacgtcatggatcaagttcctcctgatgaccaagccacccaagagagctgatggttatgttcagttgactctgctgaggcagtcagggtagtgtgatctcctcctgggaattgctgtatttgaaatgattgaaataggctgggcgcagtggcttatgcctgtaatcccagcacttgggaggctgaggcaggcggatcacgaggtcaggagatcaagaccatcctggctaacacagtgaaaccccgcctctactaaaaatacaaaaaaattagccaggcgtggtggcaggtgcctgtagtcccagctactctggaggctgaggcagaagaatggcatgaacctgggaggcggagcttgcagtgagccgagatcgcgccactagagtgagactccgtctcaaaaaaaaaaaaaaaaaa

SEQ ID NO: 235180 - DNA, 575 bp, Homo Sapiens
gtagataatttatctccactaatatttttttaagaaactgtgaagagattaactgggaataattttatttcagattttactaatgtagtatgtagctacaacttcttgaacttcaagttaaggctagacatttactttgaaaaaattccactgggtgtttccagggctatttcattttagaaataagtgtttgccattcttctgcaaaaactggacaaggggaatactacaaaaaatactcagagataaaatcctcatttcaagttctacaaaatatttatcaaatgaatgttaatttttttttaattccctgctaaagacgttttcattagtcttagagggtatatgctttctagaacttgtttttgttaacatgtgctttgatgtaaagaacatattttgtatgcaaaacataacttgcattatggttgtacaatacactatattgtttagggattccggaaagcagtttaatgcagaaataactatatctagtatgcagttcatattgtgaatgaagctttgcttttgtaataaataaataagactttctaatgaaaaaaaaaaaaaaaaaa

SEQ ID NO: 235181 - DNA, 608 bp, Homo Sapiens
acgggcaataagaagcagcctgttatagtgcccatgtatgcagcaggattgggtatgttagagcccaccaaggaaccactgaaaccactttctgctgcagaaaaaatagcttccatcggtcagacagccaccatgtcaccagatatgaacacatgtacatctgatcagttccaggagtctctaccacccgtccagtttgactggagtagcagtggccttactaaccctttagatggtgtggatccggagttgtatgagttaacaacttctaagctggaaatctccacctcaagcctcaaagtgactgatgcatttgcaagactcatgtctacagtagagaagacaagcacatctaccagtaggaaaccgaaaagagaagagcacctaagtgaagaagctatcaaggtgatcgctggccttcctgacttaacattcatgcatgccaaggtgttgatgttcccagccacgttaacaccttccacaagctctcaagaaaaagcagacggataactgatgtgaattggacagtttctattgcttttccttttttccatcccttccctaccatcaaaagcatacctgctctaattaaaaaaaaaaaaaaaaaa

SEQ ID NO: 235182 - DNA, 619 bp, Homo Sapiens
cagcggcgggggtcgagagccggtgtttgcaagaggtgttcttttttcaaagtgtcacgaaacggggttgaagcatcttaagttttttccttttgttatttaattaccgattggaaagagggagggtttctgagcagaaaccaagttgggattgcagaacagagaagattcacagtgctttaccgttgtgagttgtttgggtaatcgtgcctggttttaaaccgaaaggattgtcctttaaaaatggaacatggactttattataaatgggacttagattggaaaagacattggtcccctattttaagccatgtgaagctgttttaggtaccaggatccccagtaaagtctttctagactcacatggttaggacacgtacttaagtacatcataagcaatgtaggtaggagcgcagatctactctggatttgtattcacgtttgaaatgtgcgctctctacttgggggttggaatccaaacagaatttgtatttagttaccttttttgtgtcatgcaaacttaccttaactgtcatgcatttttctagtaatagctcttcaagtctgcaataaaaaatggcctccaacaaaactacattgcaaaaaaaaaaaaaaaaaa

SEQ ID NO: 235183 - DNA, 546 bp, Homo Sapiens
cttacagtcttgccctgatttacacagcagtcacattcctggaaaattcaagtgtttattaaaactatgcaacagttactgtgtgttatacgttgaaaggtcttcactaatatctcactaagtaatgagaatgcctacatatcagaattttttttttcaggagccaagcacatatactgatttggaaaaaggcacaggtagctcagtttatttgctttctaccctgcctggccacttgctgtttcttcagtttctaatttgagctgtaactacacaaggaaagctaaatagtctggaaaatttttggaaagaatccacaaagccaaaggagactggcctatactcattttatctggggatgtaccttacccttagagactttgaaaaatatgaagctcttattttgtaacctgggtaaatgttagtttctagattttcggcttaacatctaataataacatttaaaaagtgcttttgtaactattagttatttgcaataaaatgctttccttctacagtcccaagttcaaaaaaaaaaaaaaaaaa

SEQ ID NO: 235184 - DNA, 729 bp, Homo Sapiens
  misc_feature (69)..(69): n is a, c, g, or t
atatgctgcaacaaaatgtagaatattcagacaaaatggatacataaagactaagtagcccataagggntcaaatttgctgccaaatgcgtatgccaccaacttacaaaaacacttcgttcgcagagcttttcagattgtggaatgttggataaggaattatagacctctagtagctgaaatgcaagaccccaagaggaagttcagatcttaatataaattcactttcatttttgatagctgtcccatctggtcatttggttggcactagactggtggcaggggcttctagctgactcgcacagggattctcacaatagccgatatcagaatttgtgttgaaggaacttgtctcttcatctaatatgatagcgggaaaaggagaggaaactactgcctttagaaaatataagtaaagtgattaaagtgctcacgttaccttgacacatagtttttcagtctatgggtttagttactttagatggcaagcatgtaacttatattaatagtaatttgtaaagttggttggataagctatccatgttgcaggttcatggattacttctctataaaaaatatgtatttaccaaaaaattttgtgacattccttctcccatctcttccttgacatgcattgtaaataggttcttcttgttctgagattcaatattgaatttctcctatgctattgacaataaaatattattgaactaaaaaaaaaaaaaaaaaa

SEQ ID NO: 235185 - DNA, 776 bp, Homo Sapiens
cagccaggagccaagcccagtggttcgcgccgtggccatgtcacgcccaacctttcccgagccagcagcgacgcagaccatggggcagaggaggacaaggaggagcaggtagacagccagccagacgcctcctccagccagacagtgaccccggtggctgaacccccgagcacagagcccacccagcctgacgggcccaccaccctgggccccttggatctgctgcccagtgaggagctattgacagacacaagtaactcctcttcatccactggggaggaaggtgaggcaggcgggcccaattcattcgcctccggtacttgcaagcctcgctcagtcttaagcaagaggggatggattcgcccgcagcactgagaatccaggggcaggcgggatggcgttcaggcgctgttgctagaaatctctgtctttactctgttttgaaggcagcatggcagggtgaacacaagcacagactgaaggcagcttgccgcggttcacatcctggtcacaccacttcctgaccatgtcacgtgggcaaattatgtaacttctctgagcttgctttcctcctctgaaaatggggttaacaatgataatacccacttcataggattgttgttaagagactataaatgaggctgggtgtgatggctcacacctgtaatcccagcactttgggaggccaaggtaggaaggattgctagaggccaagagttggagaacagcctgggcagcaaagcaagaccccgttttgtacaaaaaaaaaaaaaaaa

SEQ ID NO: 235186 - DNA, 711 bp, Homo Sapiens
cagctcttagaaacactaatcgagaccagaacctggaaaatttaattgaagtaaattctcatgtgtctgaaaacaagaatggaagctctaacactggagccaagcaggcaggaccacaggatactgttgtgtacacaaggacatatgtggagaatagtaaatcacccaaggatggatatcaggagaatatctctggaaaatacatacaaactgtttattcaacttctgataggtctgtcattgaaagagatatgtgcacttactgccgaaaacccttgggtgtagaaactaaaatgattttagatgaattacaaatttgctgccattctacttgctttaagtgtgaaatatgcaagcagcctttggaaaatctacaagcgggtgatagtatttggatttatagacagacaatacattgtgaaccttgctactctaaaattatggcaaagtggattccataactctggcacaaggaaatcaagatgaaaagcactcattaaggaattaaagttacaagttttatcttaataatatgtaatctagaaaagctttcacattgaagatcaactcttgtacaaaattaacaattctgttattgcataagtaatctaattgtcttcaataaggtcacacacataaaaagagccatctggtctctggctagagttagcaataaaaagttcaaatggttccagaaaaaaaaaaaaaaaa

SEQ ID NO: 235187 - DNA, 690 bp, Homo Sapiens
  misc_feature (41)..(41): n is a, c, g, or t
  misc_feature (619)..(619): n is a, c, g, or t
aaaagtgacgtcagtgattcctggcctgaacaacatcatgnacataaaggtcactgacccccagctgctggaacttggccttgtgcagagccctgatggccaccgtctctatgtcaccatccctctcggcataaagctccaagtgaatacgcccctggtcggtgcaagtctgttgaggctggctgtgaagctggacatcactgcagaaatcttagctgtgagagataagcaggagaggatccacctggtccttggtgactgcacccattcccctggaagcctgcaaatttctctgcttgatggacttggccccctccccattcaaggtcttctggacagcctcacagggatcttgaataaagtcctgcctgagttggttcagggcaacgtgtgccctctggtcaatgaggttctcagaggcttggacatcaccctggtgcatgacattgttaacatgctgatccacggactacagtttgtcatcaaggtctaagccttccaggaaggggctggcctctgctgagctgcttcccagtgctcacagatggctggcccatgtgctggaagatgacacagttgccttctctccgaggaacctgccccctctcctttcccaccnaggcgtgtgtaacatcccatgtgcctcacctaataaaatggctcttcttctgcaaaaaaaaaaaaaaaaaa

SEQ ID NO: 235188 - DNA, 682 bp, Homo Sapiens
aggaggaacaaggaccactctggaaaaacattccaaagcccattgcatacctgtggtagagactaggggagtgattccagggataagacggacaaattgttccaggccccagctgatggtgggtgtggtcttcataatgagaggtggagctgagatttgggcctgggctgggaagaggagtacacagtccatctgatccacctctcttatggttccattggcaaaatcattcatcagtcgtcctatcttttcctggcgagcgctcacaatggcttcataagtgtttcaatacagtgtcccaggcagtcactacctatagattagagctgatgtgctggcctggggctctagagctgggcttcaggaagaatgtggtcagggccatcaggatggaacaaggtagctcaagaccttggaaagacaccctgagggcacaatcgtccttgcagtttaagatgacactttaaaaataaattctttcctaatgatggcttgagtcctgccactcaatgggagcatcagcggaacctgtagcatcttatttggaattgacattctctattgtaattttgttcctgtttatttttaagttttctttttgtttcactggaaaggaaagatgatgctctgttttaaacattaaaagtatacaagttgctttgttaaaaaaaaaaaaaaaaaa

SEQ ID NO: 235189 - DNA, 519 bp, Homo Sapiens
tcacatcctggtcctcctaccccaattctcaaacacaaagtactctgttgccctattatagtcctgcgatagttctggctaggattaggttgacggtctaagccccaagaaaggcctggcattttcatagcaggctttccccagtgctttgagtcttcctctctcactccctttttctttttccctcggaggagggggtgttgggggtgggaggtgattagtaaatgtttcaggtaatctgtgaattcttaatagtcatatttccgtggtggaagatctccctatttctctgatgtgacaggttacagaaaccttggtgttgggggttttacagatatttacaagttctaggagtttgaactttgggtcaagatgttgattccttttaatgtgcgagggtgaaggaggttttattttgctttattcttttggatattatgagatgagattgtatccagtcttggctgtaacctataccataaatgcagagctgcaaccattaaaaaaaaaaaaaaaaaa

SEQ ID NO: 235190 - DNA, 628 bp, Homo Sapiens
tgagtgagttcatgtgcctctgaactctctgactggatatgaccagtaaacttggataattagatcctggagtttaggggagagggctagagatagagatgatggatgtcagcatatttttaaaacagaaaatagttaagatcacccaagacaatctggaatcgttagaagggagtaaggaaggcattattgggaaactttccagcttcaattctcatattttttctaatctcctggttgagtctttggagttgctgttctctctatgcaaaacccctcccttgaccctctctccctcactctattttttaatttgtcacctccttctcctgttctaggtctcagtttagatagcacctttctctagaagttcatagcactgtgtattcccccctttattgttcttatcacataatttttgatggtttggacactagttgttattcctcactaaattttatgttttatgaactcaggggtaagggcaccagctagcacaatgaatgcacaatacttgtcagagtgaatgcatttaagttccaagaaccaaggaaaggcggtatttcaagaagagaagtatcaaatcttccagattagtcaaataaactccaaaaaaaaaaaaaaaaaa

SEQ ID NO: 235191 - DNA, 630 bp, Homo Sapiens
ggggcgaggtgcccagggcccaggaaggccaagcagcatgtggcagggcagcatcaggtgactcccaagaaggaatgaggagaggatgtgaggaaagagccacagcacagaggcctgctgttaggtcagcggagaccacggcccatgggacctggatctacccttgatgctaacaatgttctttggggaaaaaatctataatcacaaagtttctgcaactggactgtagtcatggttgcagaactgtatagatttactaggaaccatcaaattgttcacttacaatgggtaaattgtacagtacataggttatccctcagtaaagctgtatgaaatttatagtcatgaaactaatagtgacaaacgagctgggtaagtaggtctcagctgttctgtaggcactttgagaagaggaagagtagcatctcggttttaataaaagaaagcctggcccatggcgtccagcttctgcttgaatactttcagtgcccgggagctcagtatctcaaagcagcccactcctgtttaagagaactctaaaccttagaatgttgaaatacatcattattattctagtactgctgtgaaaaataaatgtctttgttttgccacataaaaaaaaaaaaaaaa

SEQ ID NO: 235192 - DNA, 764 bp, Homo Sapiens
  misc_feature (16)..(16): n is a, c, g, or t
  misc_feature (157)..(157): n is a, c, g, or t
aatttcccctcctgcntcagccatgtccttgtcacttggcattctaagctaaagctttagcttcccaattcgtgatgtgctaggccaagattcgggagctgttgccagcctcgtcaaatatggaagagaaacaacctgcggtcaaaagggagtgatntgttaagtggtgcgcgtctatctcataactagatgtaccaaccagggaagggccaaggatggaaaggggtaacttttgtgcttccaaagtagctaagcagaagtgggggagcagtttagccagatgatctttgattaggcaaacattgagttttaaagaggctgtcaagttgaggccacttggtccattagctggggcagcaagatcactactcaacgttttcacactgtggcaagattgctcttctagtggaataatgccctagtttctctgagatgatgtaagtggcatgatgttacctaaggcttaggcttagcttgatttctgggcccactgtctgtgttcttaagatgccaacctgttgctttttttttttttttcccccatttaaaaggatagtacctactccctctaaccacctcaccccattcttgaatgacattttatccttcggaaagaacaaggctgtgatgtagtgactattgtctgtgtctcctgtgtgtgtctgttcttgtcacaaatgtatttggggacgttggatgcattcattttctgtaataaagtttcttaatcactcttcccaaaaagtaaaaaaaaaaaaaaaaaa

SEQ ID NO: 235193 - DNA, 592 bp, Homo Sapiens
catgtttattttcagtaatggctgaaagtgttaactgttccatacttttagcacaatgtgctgcataaggttacctgtgtacagagttttactttagattaactaaatattgcctgggttcagtttttatttccattctgaaatgcttcctttttattgtttgaaactgaaaataaacaattgttgaacccttttgattttacctcattttaaaactgttttaatttattatttggcttgttcttaatattagtcactaaaagcagtgggagcattgtcttatgaaatgcttaggaatcattttatatagtacatgtacaacattaaacgtgtttaaaaaagaaaaaggtaccagcgatcacttgtcccttgccattttttcttgtaattatgttagacaaatcttggcggcggggggatcaaaacataattgttttaattctacagctgtaggagctttgtattgctgaactttcatctggaaaagtttcacagtgacatttttaaaagagaatttttttatctgccgaattctaccagtgtaccttttttctaaataaacaatagttttctcaaaaaaaaaaaaaaaaaa

SEQ ID NO: 235194 - DNA, 656 bp, Homo Sapiens
  misc_feature (56)..(56): n is a, c, g, or t
gcacgagggcaattcttgttttagtttctttgcgaagcctgctcctccttcccttncataaggactttttttgtctttctttaacgcccaggcttcgtcttatttctactgtttttgtcgcaacttccattgatttatgtcccttccctcccccctaagtacatcagggaacctttccacactataaatgatatgactactgtttggggtttctgggcccccatccgtgtacgtatgtggcatttccaggtatgactgagtgtgagagacatgtcagaggctcttcagtgatttcttgctattgaccgatgcttcactgtgccaaaagagaaaaaaaatgttgggttttgtaattaaattatttatatatttttgaaacccgaattgaaaatgttgcaggcaacgggctacagctttattagtggttctctaactgtggtctccttgggccaagcaatttctttaaaggaaaagttgattatgtatgtggggtgccaggaccactgccttgaaagcaagtgtgatttttatttttaatattattttatttgtgtctgtgtacatattcatgtataaattttatgaaacccaagcatagtgcttattttttaataaaacaactgacttaacacattgtgaaacaaaaaaaaaaaaaa

SEQ ID NO: 235195 - DNA, 665 bp, Homo Sapiens
caagaattcggcacgagggggtagtcaaagaatatgtttaataaaaaataattaaacttccatttgctctatagaacatcatagaaagtaatttaataaattacaaatgactttttaagacgtttgctcaactacagaaagcaaattcagactacacaaaacacaactggtaaatattgcaaatgtccaaaagaaagattggactaagacttgaatcataaaacctgaaacaagggctataaatacaaggcaataacagctataattcttttagtaactaccaacacatacttggatattctttcaactgcaactttagtattatgtaattctactgatttttttttccttataacccttaactttacacaaccatatttgcatgtgttttcttagctgatagctggacaacttttccccaatgaatattaaatagaagtgtcttgaaacctaagagaatgtttaaagttatgttagacttaatgctttgaaaactgtaattgccttattatatagaaagagaatcactaggatgttaaccaaatttatttgaccataattaggaaaatactttctctcataaatttgatataaattagattttagtgacaagatctacagattttttttccttcctttcgccaattaaaaaaaaaaaaaaaaaa

SEQ ID NO: 235196 - DNA, 641 bp, Homo Sapiens
aaattgccaaacactcacctcttactcaaaacttcaaataaaatacacattttcaagagggagcaccttttatatttgataagttttcattataaaccttataataccagtcacaaagaggttgtctgtctatggtttagcaaacatttgcttttctttttggaagtgtgattgcaattgcagaacagaaagtgagaaaacactgccagcggtgattgctacttgaggtagttttttacaactaccatttcccctccatgaaattatgtgaaatttattttatctttgggaaaagttgagaagatagtaaaagaattaggaatttaaaattacagggaaaaatatgtaagtgaaaagcaataaatattttgttcactttgctatcaagatgttcactatcagatatttattatatggcagcaatttatatttttaatcattgcccattaatagacgcagtaaaatatttttgaatcagacatttggggtttgtatgtgcattaaaattgtcttttgtactgtaagttactgttaatttgaatattttattgaactgtctccctgtgcctttataatataaagttgtttctacaacttttaatgatcttaataaagaatactttaagaaaaaaaaaaaaaaa

SEQ ID NO: 235197 - DNA, 750 bp, Homo Sapiens
aaggaaggaaacctcataccctccattcccatccctggatattgccttttcagcagcctcgggttcagtgtgcttgggcacaggagtgccaggttcccaagagcagcgtaaaacatccctgtaccccttgacagttataagcatttctgcgttaaacttgaagattccagagattccccacgacctaatgatctaagaatgcagattggattctttgatgttcaaatttctcatttacttatgaaaatccctaattatatagttttatataatgtgtatacagagtaggattgttgatgaaattgagcggttggaacaccctcatggaacactggcaacatggaatgtagagagctgatgtcttccccctcatagaggccattggcttcctttgtataaggagagggagaagtgattctggaaggagaagttggtatgtctagcttcattgcggcccctcgggctacccagcaagaggattctgcatcaaggaactggacgagccgctacccaaactgccaccatctttactctttacaaaatggacccatcgagaatgttgaaaagcttggaagtatcacttttgaaaaaaaaaaaaattattttgcattcagcatggactcgaccaggcatctatggagattatttttttgcttcattttataaagttgtatttagaaaagtcttaagtattgtgctttgtaaagaagatgattaaaatgaaattttgtgagaaaaaaaaaaaaaaaa

SEQ ID NO: 235198 - DNA, 609 bp, Homo Sapiens
  misc_feature (38)..(38): n is a, c, g, or t
caggtcatctaagcagagtgctgcaaaagaaaaggatntgttgccttctcccgctgggcctgttccttcaaaagatccaaaaacagagcatggctctcggaagaggactattagtcagtcttcttccttaaagtcaagcagtaacagcaacaaggagacgagtggcagcagcaaaaacagttcctccacatcaaagcagaagaagaccgaagggaagacttccagtagctccaaggaggttaaggtaaagtgttgggggcctggggcttttgaaaatcattcaacttgccatgtgacttttccagggtgacactgtgctttgaaattattgtaacatctcagtaaatatataggcctatgtcttttaccctctatatgtaataatcctgataaatgaatacagtgatataagactgtgaaggcggtaagtcagctggtcacatacatattgaaagaaaaacccttgggtacagtggctcatacctgtagtcccagctatttgggaggctaagatggaaggatcatttgaggaatttgagtccagcctgggcaatgtggtgagaccctgtctgtaaaagaactttaaaatttaaaaaaaaaaaaaaaaaa

SEQ ID NO: 235199 - DNA, 567 bp, Homo Sapiens
tcccactacttgggggcttagccggaattgcttagaccccggaggcggagcttcagtgaccgagatcccgccattgcaatccagcctggcgacagagcgagatccgtctcaaaaaaacacaaagatggaaagttcgatgtgactgcagtatgagattaaagccacaactattgtttattttggggactctaggccaccaagtattagcacacatacttatgttttctctactaatctggtccaggtcctcatggaccacaggacaaagctttcattttcattcattcttctattgaaattataccaaattcagctgaggaatatggaagtaactttagacttaaacaagacaaaagttttttcactgaagaattgacaagtatttgctccttaaaacaatgcagattagtgaacgtggattcctgctgagggagtgcatcccataatatggcaataattttcagtttctccaacgaaaagatagtgaaggaattaaatcttttgtcctcccatggttaaaaaaaaaaaaaaagctgtgttcatttttactgtaaaaaaaaaaaaaaa

SEQ ID NO: 235200 - DNA, 721 bp, Homo Sapiens
  misc_feature (80)..(80): n is a, c, g, or t
acatgtcagtcctctgtgggagttgatcaaatggtgcctgggtctgtcagtgtacaccatcccttccattggactggctntgttggaagaaaagctcagatatagcaatgagaaataccaaaagtttaaggcagtggaagaaagcctgcgtaaagagctggtggatatgctaggtaatgatggtgtgttcttatatccctcacatcccacagtggcacctaagcatcatgtccctctaacacggcccttcaactttgcttacacaggtgtcttcagtgccctgggtttgcctgtgacccaatgcccactgggactgaatgccaaaggactccctttaggcatccaggttgtggctggaccctttaatgatcatctgaccctggctgtggcccagtacttggagaaaacttttgggggctgggtctgtccaggaaagttttaggaggaccttctgcaaggttaatgtgtgtgtgtgtttgtgttcgtgtggtggtgtttctattaattgggtgaaaccaagcaccagcagacaagcagagaaacaactggggaatttattgactcatttagttattctttctacttttatttccttctctaactgttggtcttactaaaatggtaatatttgcttcttgcttttatgttactggaaaattaggacatgtaaatggataagtgcaataaagtttcctaaatgctgaaaaaaaaaaaaaaaaaa

SEQ ID NO: 235201 - DNA, 717 bp, Homo Sapiens
aggagctggatgatctgatagattctcagaagaacttagagacttcatcagccttccagtcctcatctcagaaattgactagccagaaggaacagaaaaacttagagtcttcaacaggctttcagattccatctcaggagttagctagccagatagatcctcagaaagacatagagcctagaacaacgtatcagattgagaactttgcacaagcgtttggttctcagtttaagtcgggcagcagggtgccaatgacctttatcactaactctaatggagaagtggaccatagagtaaggacttcagtgtcagatttctcagggtatacaaatatgatgtctgatgtaagtgagccatgtagtacaagagtaaagacacccaccagccagagttacaggtaaggtcccaaaagtggccaggctggaggtcttctaatgtaattttgttttattttgagaacactgccattggaatgtttctacacgatcctattaagaataatgtgatgccctttcaatgcaacttttcatatttagtttattttgttagcgtgattttagctctgtttgtattatgatttttaatcaaaatcaatagattaaaaatagtttgacattcaaagtgacaatgtttagtaatcaaatttacatgtatagatcgtcagggaatagcccaaatgttttaaacgcaaaaaaaaagacaaaaaaaaaaaaaaaa

SEQ ID NO: 235202 - DNA, 725 bp, Homo Sapiens
  misc_feature (22)..(22): n is a, c, g, or t
acaaacaaacaaaaaccctctnaacaaactaggaatagagggaaacatcttaggaatagagggaaattctttaatgtggtaaaaggttttatcagaaacatacattaatcatcagacccagtggtggtaaaaaaaaaaaaaaaaaaattcccagaaaaccaggaacaagacaagaatacctactattgctactttaattaacactgtactgcaaatcttagctagcagagaagacaaaaagaaataaagtacagatagctcttgacttacgatggtgcaactttaggatgatgcaaagaaactgtactttgagtacccatacaaccatgccgtttgtcagtttcagtacagtattcaataaattacatgagctggtgaatacctgatgataaaataggctttgtcttggataattttccccaactataagctaatgtaagtcttctgaatatatttaaagtaggctaagctaagctatgatgtttgccaggttagtttattaaatacatttttgactataatattttcagcctacagtataagtattgcaacagaagaaatcaaactgtcatttttcaagtgagcctcaattatttaaccaggttactagatacaaaatcaatatacaaaagtaattatatacccctgtatcagcagcaaacttaaaaagtcatttttaaaaaggatactactggagatagccagccaaaaaaaaaaaaaaaaaa

SEQ ID NO: 235203 - DNA, 747 bp, Homo Sapiens
caaagccaaacagcacatgtggcgagcaattcgaactgcatttaaaaacagaaagcgggctgctattctgaccactcactatatggaggaggcagaggctgtctgtgatcgagtagctatcatggtgtctgggcagttaagatgtatcggaacagtacaacatctaaagagtaaatttggaaaaggctactttttggaaattaaattgaaggactggatagaaaacctagaagtagaccgccttcaaagagaaattcagtatattttcccaaatgcaagccgtcaggaaagtttttcttctattttggcttataaaattcctaaggaagatgttcagtccctttcacaatctttttttaagctggaagaagctaaacatgcttttgccattgaagaatatagcttttctcaagcaacattggaacaggtttttgtagaactcactaaagaacaagaggaggaagataatagttgtggaactttaaacagcacactttggtgggaacgaacacaagaagatagagtagtattttgaatttgtattgttcggtctgcttactgggacttctttctttttcacttaattttaactttggtttaaaaagttttttattggaatggtaactggagaaccaagaacgcacttgaaatttttctaagctccttaattgaaatgctgtggttgtgtgttttgcttttctttaaataaaacgtatgtataattaagtgaaaaaaaaaaaaaaaaaa

SEQ ID NO: 235204 - DNA, 667 bp, Homo Sapiens
gctccagcaattccccccggcttggcctcccaaagggctgggattacaggtgtgagctcctgcacctggcccgaatgctgctttgatttccagtctgttgaaggtggggggaaccagccttttgttaatgtgagcttccagtgtttctttgtcttttgtattctaaattaataacacagtgatgtgtcttggtatgggtctttttttttttctttttttttttcatttttaaagagactcctgctatgttgcacagacttgtgaattcctggtttcaagttatctttccccctatgtcactcaagtaatgtggactacactcatgtgacaccatgcccatctttatgttgtgtatcttatttttgttttgttttactcttgaatcagctcagtctgaaaatctgtcttttaattcatggggattttttagaatgatttcttggagggttttgtcttttgaatgtgtggtcccttctctgcctagaatttttttgtttgaatgagacatggtcttgctgttgtccaggttggagagcagtggtgcaactatagctcactacattcttgaatttctgggctcaagccatcttcccatctcagctttcagaatatcttggctacaggcatgtgacactatgcccagataattaaaaaaaaaaaaaaaaaa

SEQ ID NO: 235205 - DNA, 684 bp, Homo Sapiens
actgcaatgagcgatcccagctcagtacaacctccgcctcccaggttcaagcaattctcctgcctcagcctccagagtagctaggattacaggcatgagccaccacgcccagataattttgtatttttagtagagatggggtttctccatgttggttaggctggtcttgaactcccagcctcagatgatccacccacctcggcctcccaaagtgctgggattacaggcgtgagccaatgcgcccagccccagtgataaggatttttatgggtaccgtgttgaatctaaatcacattgggttatataatcatttaacaatattaatttttccaaaccataagtatgggttgtagctctatgtttctaatcattttgatcaatgtttgtagatttcaaggtaaaaacctctgacctttttacgtttatttctaagtatttcttactttaagttctccagccaatggaagtgttttaaaattttcttttaaagttgtttattgttaaaagtatggaaattcaactaatttttggtgctgatactgtattgtgcaaatccactgaatatgttacttagttccagtagtattttggttgactctttgtgattttctgcacagaagatcatgtcgtctacaaaccaaatataattttacttctttctttttgaaaaaaaaaaaaaaaaaa

SEQ ID NO: 235206 - DNA, 702 bp, Homo Sapiens
acatgaaacatttggtttaaacaaaatcttaagaattctctattttctcactgagactcccagggcttttactatctccagaatgtatttttcctttttccgtaagactcaaaagtaatataaggtctacaaaatctactaaaaagtctctgcaaaaagtagatgaagaggactctgatgaagaaagccatcatgatgagatgagtgagcaggaagaggagcttgaggatgatcctactgtagtcaaaaactataaagacctggaaaaagcagttcagtcttttcggtatgatgttgtcctgaagacggggctagatattgggagaaacaaagtggaagatgctttctacaaaggtgaactcaggctgaatgaggaaaaattatggaagaaaagcagaacggtgaaagtgggagatacattggatcttctcattggagaggataaagaagcaggaacagagacagttatgcggattctcttgaaaaaagtgtttgaagagaagactgaaagtgaaaaatacagagtggtgttacggcggtggaaaagtttaaagttgcctaagaagagaatgtctaaataaatggattgctttttagcaatagagctgctttctagtggtaaaggaaggggtcacctgaaaaataggacatttttattaaaataaagttcttttagcgtttgtgaaaaaaaaaaaaaaaaaa

SEQ ID NO: 235207 - DNA, 635 bp, Homo Sapiens
ggcacgagggcggctgtaggcttttttttttttttttcttcgtgtaactgtaaatccagaatctatcctgcatcgcagcccaccgtgtatagagatataaatagagggaaagatataagaactaaatttgctaatgacatagttttaacctaaatgctatttatctctgagccgtccccgtcctccgtgcagagcaagttgaggtcattccttcttttcttctccgatcttttttcttggcttctgaccaaaaaccaagctctaccccatccccatcccagacctgcaggagacgagcgagcgggaaggcgccgggcccgggactgtccgttctcggggccagagctgctgggggaccgagtttgtacattttccattttggaattttgagttccaattgttgtaaaacttaatttctccccagtttttatatatatattttttagagttccgtttttatttattaaaaacaaaagccccagccctgccgaggcctgggcggcgtcctcagtcgggtggtcccggggcctttgcggtcccgcccggctgagacgctcgccccgacgcatggacccgagaggcgacgacacgagtgaataaagtgcacatggaccctgaaaaaaaaaaaaaaaaaa

SEQ ID NO: 235208 - DNA, 707 bp, Homo Sapiens
atatccactgtgcctggccccaagtttgcatctttattgccctctgaacaaatacatagagaaaactctcagaacaattaaaacctgcagagcaacagtgtcctccatgtcttaggtttcaagtttgcctctaaaattctaatccatatttttctacttctcagataatttatgtgtgtgtactcttcctagacgtacaagagactttttaatgctaaatatttgtcagtgcttaacaaaaactcaatttcacattactcatattgtttttgttttaattgaatgtgaattaaatttttattagttatttgatttggaatgttatgtatgccattaacactattaggggaatctctagcatttctgtatttttaaagaatttgattcttttgtagattctgcctgtgtggtcattttaaaacatgtgtgacatatatcagtaccttcattcttctatattttgtgtctcctccaacctccaactttttttgttttttgaaaaatgtttctctaacacctcaacagtttaaggtaatttagtacacatatatcagtatttttgtgatctgaaaaagcaacccattttctaaattcatatttttcctaaaactttactatgtttttattttaagaggtttcctgttatatacactttttacacatgcaaataaactttataccaagtgagtaaaaaaaaaaaaaaaaaa

SEQ ID NO: 235209 - DNA, 729 bp, Homo Sapiens
  misc_feature (58)..(58): n is a, c, g, or t
ctgcccacttgctttctgcattctttttttctctttaaaattcttagcgtcaagttgngaatgacggaaacaccaatttatgtcccaaattcttcccctttctggcacactgctttattataggcggttcccaggtcttatgctgttatcattcaaactgcagattacaagttgcacagtcagcaggaatgaaaaggatcaacagagtcttttgttttttccagcaaatatcctgagtttccagttagccatgcagggaaacacagtcattttcatagtattcactgtggtggctttcctctggatcacatcccaggctgcctcaaacctgttggtatttgtggcggtcatcccagagtccaaggtttcttcttcgtcagaaagccttggttcctgttctgagaacagcattttcctatttgtttttctccagcagtgcaaagttcctttcccttttctgggttacactgcttctttatttatttatttatttatttttggtaaacagatgggagagtctcactgtgttgcccaggctggcctcaaattcctatgctcaagcagtcctaccgcctcagcctgctgagtagctgggggactaggagtgcaccactgcacacagcttattgctcttcttttgatgttcctaccttacctatttcctgatttccctttaaaaatagcctgggcaacagagtgagaccctgtctcaaaaaaaaaaaaaaaaaa

SEQ ID NO: 235210 - DNA, 675 bp, Homo Sapiens
acccaccccgatgtggaaactgatactagctagagggagctgtagaaaacaaagatttcaggattgcacagtgtgtgggcaatgggatggagactttttcccctattcccagccacagtgcccaagcgttcaagtctcctggatcagacagatgggattttagctgctgctttaaatcctagtgctggaataagtcaaggtacttcagttcagctcttgcctctgtcactaatcttgctttatgaactcctttgattttctgaataagttccagaaggttctctattattctgtccttcttccaaactggaaatggctgtatctaattctcaggatattttggatgtgtgcctcaggtaatttatgtggaatgtgtaaagcaagatgtctccaattctgaatattccttccccttttcccaatcctccactcttggactacctttataacaacaccgagtacgcacagacctgaacccatgcccaagaagcacacacaatgactggagctgtcgggaattcctgtcagtggcattccctgagcactggctctgtacaactcaattataattttttaagaatcatacctctgtatagatcttttggactgtactgattaaactttgatattgtggagtaaattcagaagtgcaattttaaaaaaaaaaaaaaaaaa

SEQ ID NO: 235211 - DNA, 714 bp, Homo Sapiens
catgctgtatgtcttcactgctgagctctacccaaccctggtcaggaacatggcggtggggtcacatccacggcctccagagtgggcagcatcattgccccctactgtgtttacctcggtgcttacaacagaatgctgccctacatcgtcatgggtagtctgactgtcctgattggaatcctcaccctttttttccctgaaagtttgggaatgactcttccagaaaccttagagcagatgcagaaagtgaaatggttcagatctgggaaaaaaacaagagactcaatggagacagaagaaaatcccaaggttctaataactgcattctgaaaaaatatctaccccatttggtgaagtgaaaaacagaaaaataagaccctgtggagaaattcgttgttcccactgaaatggactgactgtaacgattgacaccaaaatgaaccttgctatcaagaaatgctcgtcatacagtaaactctggatgattcttccagataatgtccttgctttacaaaccaaccatttctagagagtctccttactcattaattcaatgaaatggattggtaagatgtcttgaaaacatgttagtcaaggactggtaaaatacatataaagattaacactcatttccaatcatacaaatactatccaaataaaaataacatcattgtattaacgcaaatattaggtgacaacaaaaaaaaaaaaaaa

SEQ ID NO: 235212 - DNA, 656 bp, Homo Sapiens
  misc_feature (12)..(12): n is a, c, g, or t
  misc_feature (577)..(577): n is a, c, g, or t
gacctcacttgngaggaagacagatgccaagggaaaccctgccagctccgctagcaaaggaaagaataaggcagcataatgacatcaatagaaaaatgaagaaatcctacagcataaagcacattgctgagccagagtcaaaagaactcttcttgtaaatcactttttaaattttctctcactgatgccctttggaaattattggaaatttctggactatcctctttggaaagagaaccatgaaaacaatgcctcaccagcagaagaacagaatatcaggatgccttaaatttatagtagtagactgtaaaagattcattttggggtgatatctgtatatataacttgtttttttaaaagatgccgtttaaaagcatgattgggaaaatgtatgttttttaagagtagattgattcaccctacccacaggacattcaccaagccactgataccattttatatttcatcaattgcatgagtatttgctaatgttgattgaacctccctttccccataatgtgggcagatttggctcagctccttcatgagatcaggtcagtggtattgtttctgtcanagagtgttttttctgtcatttctactttttgtataaaggaaataaaacaatgttaacagccaaaaaaaaaaaaaaaaaa

SEQ ID NO: 235213 - DNA, 726 bp, Homo Sapiens
ctttctctcctttttgctgtcctccttacggaccagttaccagattcagaggctaacagttagttacctgttaatgctagtcacagccaggaggtcagaaggaattttctacttctggatccaaatgttacctcttaggggaagttatgccccctcaactattgtcttattataatgaatctttcctttttggtccttttaagtagccactcaaaacttttcatttcactgaaaaaatatgaaaaaccatgacaatagggctgggtgcagtggctcacgcctgtaatcttagcactttgggagaccaaggcaggcggatcgtttgaggccaggagtttgagaccagcctgggcaatgtagcaagactctgtctctgcaaaaaaaattaaaagatacctgagagctcactttaatatcaaggtatttgcatccattcccaccctgttagctcttaagggaggagggaaatcaattccaaccatactttcctgtgatggaagatgtttcctcttgaaaaaatgccaatacagatttttaaaacctattgttttccaaatgcactttgtaagtttttgcttttaaaatagcttcttggaaccaattttattgtatttgtacttaatttttgttctcatctaaatgtgcattttctgactgtatagaagaagctttggtatgtaatttaataataaattagaaatctaaatgaaaaaaaaaaaaaaaaaa

SEQ ID NO: 235214 - DNA, 627 bp, Homo Sapiens
  misc_feature (45)..(45): n is a, c, g, or t
gtgagtttagtactctacagagtgccccataagagcagtagcttntgaaactcataattctctgaaataaatgaaagacatttaattcaaggatcaaaaattgtggccatctttgcaaatgactacctatagcctgtgaaaatacatttcaaaaaatgttatgtgcaatgaacactaaatttaagagcagttacagtgtgactcactcatgtttaaaaaaaatcgaagagctaaaaaatacgtctaatttatgtaacccattggaatgtatttctaggttctcttcaggattaattaaataaacatgcaatttatgaaaacatataaacaattatttatcacttttatgacccaaatcacaataaaattgtcatttaggataaactggggagaatagactgaacatatggttatattcacagttatttattaacttaaatgttattccaacattagagctaatgttaaaaagatttaaactgtaacgtctaatatttggaataatatattaaagtattagcactgtggttgattttcttgaattatgttgcatcttgtactactaagcttgtgaaaataaacatttggatgttttaaaaggtaaacattaaaaaaaaaaaaaaaaaa

SEQ ID NO: 235215 - DNA, 614 bp, Homo Sapiens
tacgactgtaagtaagttggatgttggcaaaattaaattgttacagtatttagagctgctgtagctgttccttcacaacataaaataggataaatgactagtacgtctttcaggtgggtggcaagcagaacatgcgtaatattctctacctggtctgtagctgtaactgtgatgtacagacaaagcaaaaattaaaagaacttatgaaaacaaatgcaatgatactaggatatacacttttgtatttttattcttatataaggttatttgctggctattgttggcctctagttcagtctgtgttatttaaattctaatatatgaattatttgaattgaattcatgttcggggccacgttgttgtatgtattgatgtacagccttgaatgtgaataattattgtaaactatattttacaactttttttctggctttattatataaattttctattgggtcagtgatttaatcatataatttaatgaatctgtttatcctttttttttttccaaatacttgtgctttaggtgtagttaccagatgatgaattttcctcgtatggtcagtagtcttgtaataaaaagcatgtagagtgtaaaaaaaaaaaaaaaaaa

SEQ ID NO: 235216 - DNA, 628 bp, Homo Sapiens
cttacccttattcctctctgtccacattttctgccccaccttacttctcctccctgacagacatccagcccctagtaatacttaaggcactatggcacttagctttgaagtgacacgaccctgtcttccttccgcccgctggtgggtaaccagtgccttccctgtaacggtaatgctgcagaactgcaaccttttgtacctttctttggggaatggggtgggggtgggagaggaggtagatggggaagaaataccccagacccaacaaacctccagccagaaagccagctattttgcatttgaaggaattgacttcctcattcattgagctttttaaaagatcacaacctcaagatggttaaaatccattgacatttgcactttcaaacatgacaagtctcggagctgctgagatgacaggcccctggcctttccacttatgcctccttttctccttattcctcctacctcccgccccgcccaggtctggagttactttcatagcatttttcactcttggcttcttttctcccttgatggtcaagtctcttatgtttcaatatttcttaactggggtgtcttataacaaaaaactcttaggtctaaaatgagaaaaaaaaaaaaaaaa

SEQ ID NO: 235217 - DNA, 608 bp, Homo Sapiens
acgcagccgcctgggaagccaccctctgctcttctcaggggaggtagactgcacagacccccaagccccatccacacagcccccaacctgctatgtggagctcaagacctccaaggagatgcacagccctggccaatggaggagtttctacagacacaagctcctgaaatggtgggctcagtcattcctcccaggggtcccgaatgttgttgctggcttccgtaacccagacggttttgtctcttccctcaagacctttcctaccatgaagatgtttgaatatgtcaggaatgaccgtgacggctggaatccctctgtgtgcatgaacttctgtgccgccttccttagctttgcccagagcacggttgtccaggatgaccccaggctcgttcatctcttctcttgggagcctggcggcccagtcaccgtgtctgtacaccaagatgcaccttacgccttcctgcccatatggtatgtggaagctatgactcaggacctcccatcaccccccaagactccctctcccaaatagtaatgctttagagggaggcagtcatatctctgtgtgcagataataaaagcatatttctaaaaaaaaaaaaaaaaaa

SEQ ID NO: 235218 - DNA, 743 bp, Homo Sapiens
  misc_feature (46)..(46): n is a, c, g, or t
  misc_feature (688)..(688): n is a, c, g, or t
attcggcacgagtgctttttcatgtgtcatcatactgtcagtatantaaaagaaataccagcctaaaacttaacatataccatacatatatattaaggtgtcaaatagctattctcactcatcttacaaatattgtaagagcaataaaaattaattgaggaattataagcctacaggtcatcagccttgaggtgattactgatgatttgggcttacacacatgtcagcaagatagggagtgtggataggggagggctggtagctaacaaggggcctcacagagaaatattagtgactttaaccaggtttcagaatctgggccttacctttacaggttcaacaaaagaatggcatcaatagaggcagaagtatagacattgttttaaaaatacacacatgcacacacacacaaaacattttagcattatagctgtctgaatccttcaataagaaggagaggcacacacaaatacacacactcacacaaaactcaacaaccataaaacaaccctgcatgttataaaaggcagaattaaattttatttatttaaatccatggaactctggtaggccaggatatattatagtaccattatcaatgtgatattctgaaaatatgaactgagcgtcattaacaattgttggtacctaaacacaaaatgaatttcaaaagttactttgttctcanagatatgtcattcttttgggaataaatacttctggtgacaaaaaaaaaaaaaaaa

SEQ ID NO: 235219 - DNA, 722 bp, Homo Sapiens
  misc_feature (9)..(9): n is a, c, g, or t
tatagtttntgtaaataaattaccatccttccacaattagggatgctttagtccccccatcactaattgcagttgtttgataccaataaatttacgtagagatccttaacttaaaataaattaattttttcaaaaaacataaatctggaactgttgtttctatatttgataacaaatacagtatattttatttataagccatggtctactgatactgtatgaggactttccttatatataaaagttgcagggattgtgttttattagctgctttaattatgttaattttagagagtttttaaatggaaatagaggacatttatgaaacgctggaattgcagttacaaattctttttgttgttgttgttcctgaacatgccttggaataattctaccattttttccccctccataaatctttctaataaagcatagaaaaagcctatatgattttaaatgcttctcttaagctggtaaacagatttgagttatgagttcattgttattgcttcaagatgaaaagacagtgatataatttttctatttcaacttaaaagtaatagttaatatgctaaagtagtacagaataaactttattgctgcttactaactacaaaatactgtagatggcatctgtatgattaaacatataaagtaaaacaggtctgagggctttgtagatgattaaagtctccaccttcatgaaaaaaaaaaaaaaaaaa

SEQ ID NO: 235220 - DNA, 725 bp, Homo Sapiens
  misc_feature (81)..(81): n is a, c, g, or t
cccacaggactgctccatcgcagccactgcaaaaaggtaaggtgcagggtcccagccagctgactagaggctcccagctcntaccccagtcctgacactccctctccctacgcaggccatctgcccgcttcccccaccagcggaggaagaagaggagggagatggatgatgggctggctgagggagggccgcagcgatccaacacatatgtgatcaagctgttcgaccggagcgtggacttggcccagttcagcgagaacacgccactgtacccaatctgccgcgcctggatgcgcaacagcccctctgtgcgcgagcgtgaatgctctcccagctcacccctgcccccgctgcctgaggatgaggagggctcagaggtaaccaacagcaagagtcgtgatgtgtacaagctgccgccacccacacccccggggccacccggagatgcctgcagatcccgcatcccatctccactgcagcctgagatgcagggcacccctgacgatgagccctctgagcccgagccctcaccctccacactcatctatcgcaacatgcagcgctggaaacgcatccgccagaggtggaaggaggcctctcatcggaaccagcttcgttactcagaaagcatgaagatcctacgagagatgtacgaacgacagtgatgttcccaggtccccccacaccagtaaacatcccccagctccaaaaaaaaaaaaaaaaaa

SEQ ID NO: 235221 - DNA, 603 bp, Homo Sapiens
acaagcatgctgtcttacccaagtacagctatcaagttcagaaatttaacattgccataatactttacagtccatatttcaatttcatatgctgttttattggtaatttttttcagctccacgatccagcctaggatcatatgttgtattgccataaccctctaatctggagcagttcctcagcttttctttgttttttataatagtaatatatttgaaaaatacaggacagctaaaggatagagtatccttctatttgggtttttctgatgtttcctcatggttagattggggtagtgcagtgagggttgaaatgctgtaagtgatatgtattgcaggtatacatccagatgcacagaatgtccatttgtcccttattggtgatgctaattttgatcacttgggtaagatgtccagtttctccagtgtatcgttattgtttttccttttgcaattagtgggtaatttgtgaggagaaactttgagaccttgttgacaattctgttcctcatcaaatctacccctcctaggtttagcatcctttgacgattcttgtctgaataaatttttgacttggatgtttccaaaaaaaaaaaaaaaaaa

SEQ ID NO: 235222 - DNA, 701 bp, Homo Sapiens
  misc_feature (95)..(95): n is a, c, g, or t
atatgacccagcaagtccactcctgggcatatactgaaaagaactgaaaacaggtgttcaagcaaaaactttcacgcaaatattcatcgcagcantagtcacagtagccaaaaaagaggaaacaacccaaatggccatcagctgatgaatgaataaacaaattgtggtatctccacacggcacaatagaatattcagccataaagagaaatgagggactgatacatgctaaagcatggatgagccttgagcgcatttttgccaagtgaaagaaggcagacacaaaaggcaacgtattgcatgagtgcatttatatgaaatatccaaaataggcaaatccatggagacagaaagcagataaatggttgtaagaagctgagagaaaggagtggggagagattgctaaaaaggagtttccttctagggtgatgaaaatgttctggaactacttattggggatgattgcacaacatggtgaaggtactcaatgtcactaatggtaaatttcacatacactttaccataatttttaaaaagctttattagctacattatgttatgatacttaaatgtcataacaatagcattctgtacgcttcactaggataaaaacttcggatttatatgcatctggaagagaaatttttcactgtaatttgcaaataaatgaatttttaaaaatctaaaaaaaaaaaaaaaaaa

SEQ ID NO: 235223 - DNA, 680 bp, Homo Sapiens
  misc_feature (26)..(26): n is a, c, g, or t
gaagagcctgatggaggagagctgtncctgggggctcggacccggcacactacatcccacccctcaccttcgtgccagtcacggtccctgcctactggcagatccacatggagcgtgtgaaggtgggcccagggctgactctctgtgccaagggctgtgctgccatcctggatacgggcacgtccctcatcacaggacccactgaggagatccgggccctgcatgcagccattgggggaatccccttgctggctggggagtacatcatcctgtgctcggaaatcccaaagctccccgcagtctccttccttcttgggggggtctggtttaacctcacggcccatgattacgtcatccagactactcgaaatggcgtccgcctctgcttgtccggtttccaggccctggatgtccctccgcctgcagggcccttctggatcctcggtgacgtcttcttggggacgtatgtggccgtcttcgaccgcggggacatgaagagcagcgcccgggtgggcctggcgcgcgctcgcactcgcggagcggacctcggatggggagagactgcgcaggcgcagttccccgggtgacgcccaagtgaagcgcatgcgcagcgggtggtcgcggaggtcctgctacccagtaaaaatccactatttccattgaaaaaaaaaaaaaaaaaa

SEQ ID NO: 235224 - DNA, 723 bp, Homo Sapiens
  misc_feature (29)..(29): n is a, c, g, or t
agaactcacggacggccccacctctgggnccacgagccgccccccagctgcccagcgcatgcggacgctcttgcctcagcgctgcggttatacaatcttgcacctccttgggcagctgcggccaccagatgcccgttccagctcccattctggccgagaggttgtcatgagggtcactacagtctgaactggactccaggagcagggatcttgagtcaatgcatcagtcagagaagaactctcatggctgctggaggtaccagctggacaaggtgtttggggcatgctgcccccgtcaccgaggatctgtgtgggtagcctcaagctggagacattgtctggcctcactgcccactgggtagagacacctggatgacatttcagtacccgctggcagctcctcccactcatccagagacggccggtgggcaggcggggagagcagctttccttccctggagagaaccgtctttacctcagctcctagggcctccagccccccagctccaccacggtgacttggtgaagggggaccaatgccagaagaaaggggctgtagacccctattccccaccccatggccacagggcatctggcaataagactagtatacattgacctcccgttccctgcatgagggcggggagttccccctgctccatcccccattgcatgggggaagggcataaagaatcatttatatgcaaaaaaaaaaaaaaaaaa

SEQ ID NO: 235225 - DNA, 692 bp, Homo Sapiens
cgaccgcgacgtccacgcagcagagggacatgggccattccatgacgtgcccaggccaacgtcgcaggacagttgtgaaaataacatgacgctcgtccaaggccacttcctgagggcaagtcctaatagccctgagacaccgagacggcatgttcttcattagacggaaagggaaactgaggctcaggagagaggcgctccaggccgctgcagccaacaaaccggcgcccttttcacacgtagctcctcaggccattccccatgagtcccccacacccaccccatcctcggtctttgcaaagaagggcccgagcttagtttccccaggactggcctaggaaggagcaccggccacagctgctccccgtgccactcagggtggacccagcatctcaggagcacctcagggtgtcggttaagagacaggcctccacccctgcaccagagcctgctcttagctcccggtgcccccagaccccgcagctctgtgcccggcaagaagcagctagacacacgccagggcgccaagcacggccagctccgcggacccatggacaagcccagccccgcctcagggaaaacagggcctttccctacaggacacgccccagagctgtggcagattgcaggagccatcgtgtggggagaatttaataaaagcctttttgaaaatgaaaaaaaaaaaaaaaaaa

SEQ ID NO: 235226 - DNA, 769 bp, Homo Sapiens
  misc_feature (84)..(84): n is a, c, g, or t
  misc_feature (489)..(489): n is a, c, g, or t
ggctcagaccactcagcttcattaacagatgcagagaggtgtatgtttgggaagcaacaagcatgggcaactggctaatgagcntgctttccttcctgtgccccagaaaatagaagcacattgtttccagaatgaaaaggtcactgccatctggagtggatggacacacctggttgctcagacagaaactggcaagatgtttacctggggccgagcagactatggtcagctagggaggaagttggagacttatgaaggctggaaactagaaaagcaagattcatttctcccctgttcaagaccaccgaacagcatgccttcatctccgcattgcttaactggagcaactgaggtctcttgtggctcagagcataatttggcaataattggtggagtgtgttactcttggggctggaatgagcatggcatgtgcggagatggcactgaagccaacgtctgggccccaaagccggtgcaggctctgctgtnatcgtcaggactccttgtgggctgtggggctggccactccttggccctctgccagctgccagctcaccctgcattggtccaggaccccaaggtcacctacctttccccagatgccatcgaggacactgaatctcagaaagccatggacaaagagagaaactggaaggaaagacaatcagaaacttcaacccaaagccaatctgactggtccagaaatgggggactgtgatagagaatctttaataaagtggcttttccccccaaaaaaaaaaaaaaaaaa

SEQ ID NO: 235227 - DNA, 776 bp, Homo Sapiens
  misc_feature (40)..(40): n is a, c, g, or t
  misc_feature (726)..(726): n is a, c, g, or t
tgatttccaaaacaaagaaatcccatcttacccaaattcntggagttgatgttgactgtggaattctaatgtgcttggctcttagggtatgactggtttccctggtgctgctggacggactgttcccccaggaccctctgtaagtaaatcactgtaaacgtgtcttcatttactctagccaaaaggcctggcttctgataggaaactggtaagaaactcttcatgaaaacacatcactaatattcgctattactctcctggtctgaagtcagcttttctgaaccattaaggtatttcatcacaagttatattttataatatcagtttaagaggcttttattcatgtgaacaccagtcccctttcaggggcatggtctttttgaaaaaaaaaaacaaaaaaacgaacagttttagccacatatcagatatttctatatctaattatcctttatggctaacattctgcctccattgttaaggtataattgttcctgaatttaaaggtggtttggcctctaatttaattctgattcagactctcctgtcaggactcaagaaaatttaattaattaccaaggattaagtcttctggttaaggtttctgggaaaaaaaaatagcaaagatgttgatttcttggaatccttttacaggttcataacagaaaaatcttcattccctgtaggcatttaattaaacctagttgagaagtgtgtgggattcctcanattatgaacaaaacacgtatattggctttcttaaaaaaaaaaaaaaaaaa

SEQ ID NO: 235228 - DNA, 770 bp, Homo Sapiens
  misc_feature (25)..(26): n is a, c, g, or t
aaaaaggatgcagcatgtgatgcannggcaacctgtgagggacacgagagccacctgccaccagcagggttcagggctcccagctgtgggttacttccaccttctttcactttccctcttccattgtattctagagaatttaggcccagacaagacactgattgattgattgattgattgattgacagaggctcgctctgagcccaggctggagttcagtgatggatctcagctcactgcagccgccacctcctgggctcaggagaatcacttgaatccgggaggtggaggtggcagtgagcctgattgcaccactgcactccagcctgggcaacaagagcaaaactctgtctcaataaacaaacaaacaaacaaaacctgtataacagagtgtcattgaatttctaaacgttgaaagacttcacattaaaaaaaaactcacaatttaatattattgagtgaaagaaaccagacacaaaagggtacattctatatgatgctgtttatgtgacattcaaaaacaggccacatgacaacatggtaataaggacagtggctgtccttgttaggagttatgactggaaggaggcaggagggagctttctggaaacactgtacatcttgctcttgagagtgcacgtatatacatcaagtgtttatcaagctgtgtggttaagatttgcacacttgtatatgttatacctcgatttaaaaaatctaaataagtaaataaagataccttcaaatcttttaaaaaaaaaaaaaaaaaa

SEQ ID NO: 235229 - DNA, 709 bp, Homo Sapiens
agcagcgaaggcagcaaaacccacaccccgctgctggattttagcttttactcaaggacagagacctctgaagatgagggagcagaaaacagtttttccagaaccccagacacagattttactggacactcactctttgattcggatgtggacatggatgactatacagaccacgaacagtgcaagtgacgtccagcctcactgaccctcttccttgggacctgccactccctgggtcggtccattttcccaggtagcaatccatccgagctgggaggagatcttcgtgcttggcagagttttcacatgctaactggactatagcagccttatttcttttttgtacaaacaaaacacagaaccattcagatgactccattgaaaacaaacaggcaaaaaataatgtcagcatggttcctgaaatccatttttgttttcattagaaaactattaataatattgtgtggtagagcaggtgtaagagctggttgtcagctgatagtttttatgatgatcctcttcaaccctgaggtcttaattgtgagatggattcttgaacctccttcctccaccaggatttgaagtaatgagagatatcatcagaaaaatgttttacggtggctgcttgtactttatgtgtgtatattgtatgttgagacataagtcaaataaaatccacagatattaaacgaaaaaaaaaaaaaaaaaa

SEQ ID NO: 235230 - DNA, 707 bp, Homo Sapiens
caagcgtagagggtgggttgcatccagagagttcccggttgcctctgcacaatgccattccttggccagctccctccaccccaagggacccagactgcacacttaacaaacaggacacaggtgtctttgaacaaacttttttgtattattatttttacatctagaataaattatttaaattatttcacagcaagggagagggataggtaatttttatcagatatttttttaaaccatctgttttttaaattacatttttgtttatgttcttgagctgatgtagtggaacttgcctagcacattcaggtcccagccagttggcagagcatgctctcatctccttattccataccctgggcgtcccctttctgttgactcaggaactttctgagaatgaggacagcactaggagatgagctttggcaggtatccaccttaacgctacaataattgtgcttcctgaaacaaaacttgagattgtatcatagaaggaaacaggaagtcagaaatcaaatctatgcttttaattgaaaccgtgcctgaaacagtttgaatgattgttttaatgttgtttctgaaattccttgtacctttgtgaaaaataatgataataaataaaagtgaaaataaatagatgtggaatatgcaatggaaataatgtaacaaaataataaacatctggccattttaaaaaaaaaaaaaaaaaa

SEQ ID NO: 235231 - DNA, 758 bp, Homo Sapiens
  misc_feature (24)..(24): n is a, c, g, or t
gtgctgtatcgatggcccaacccntgcagggaatcacaatgagccacaccaccactcccatggtgacttaccctatcgcttcccagagcatgcgcatcacggccatgccacactgatggggctaatggacactcccctggtatagcctcgcagggctggggtcagggggcccttgcccactcacctagccttccccatccctgtctgaagggctcccttgagaactaggacaagagactacaaggagtatgtcctgaggaggggttgggatggtgtgttttctctcacctcccttttatgagggtcctcttgtccatcttcaagcctcacagtgggggcttgcagaggagtgcagactgaagccagcagagaggaaggactgactgaggggctgtgtcctcttatgggaatttgggaacatccctcgtcttgtcctctcttctgcacagcacaggttccagcactggttttagaagaaaaaaataccctgcccagagggaaagccaggaaagattgggaagtgggtggtcaggagagaaggcctgataggagccttcagacaatttgggtcctagttgcttgggttggacaatacaggaattgcttctgggccctgggaaagctgggaccatagtgctccagcccaaagactaggggagcattcattaccctagtttgacctgaaaatccatagggcagggcccactactttccaaagaaataaaagaacaattatttttaaaaaaaaaaaaaaaaaa

SEQ ID NO: 235232 - DNA, 656 bp, Homo Sapiens
cagtgaaagtggaattattaagatataaatttatatttgtgctttttgtcagtgtgtaagctgtgtagaaattctttgatgtattagttgtattaatgtaaagtagaaacccattgttgaaactcctgtagctattatgcttttaatattgttttaatgatcttccttagaaataggcccataaaaatggtctggaagccaaaccaaagtatggtataatgtagatattgtaaagcagtaaactgaaaacatgtcctggcatgtattcagccatgtttaagtgacttttctgtaattgtaaaataaaaacttcaaatgggacctaaaacagtgatgtaaaagaactggttttggaaatttagcctaatttatctataagatggctgctaaattgatttttcagttctttttatcatctagaatataatagatatagaaatgaataatatgaagaacagtagtttgctttgaaatactaataaacttttatttaaaatgcttcatttttacttcttaaaatgtgctttggattcttaaattttgtttcactgaatgttcaatgttttaaatggcgattaaaatactctgctgtatatagtagtttttgagtaaatatttgcaataaaaatctgcccccgaataaaaaaaaaaaaaaa

SEQ ID NO: 235233 - DNA, 673 bp, Homo Sapiens
ccacgtgtgcaccagctccagcaactgcaagcattctgtgtctgcccggccagctctcgcttctgcaagaccacgaacacagtggagcctctgagggggaatctggtgaagaaggactgtgcggagtcgtgcacacccagctacaccctgcaaggccaggtcagcagcggcaccagctccacccagtgctgccaggaggacctgtgcaatgagaagctgcacaacgttgcacccacccgcaccgccctcgcccacagtgccctcagcctggggctggccctgagcctcctggccgtcatcttagcccccagcctgtgaccttccccccagggaaggcccctcatgcctttccttccctttctctggggattccacacctctcttccccagccgcaacgggggtgccaggagccccaggctgagggcttccccgaaagtctgggaccaggtccaggtgggcatggaatgctgatgacttggagcaggccccacagaccccacagaggatgaagccaccccacagaggatgcagcccccagctgcatggaaggtggaggacagaagccctgtggatccccggatttcacactccttctgttttgttgccgtttatttttgtactcaaatctctacatggagataaatgatttaaaccagaaaaaaaaaaaaaaaa

SEQ ID NO: 235234 - DNA, 663 bp, Homo Sapiens
ctttactcagtctaccagtagaaatgtcaatgacttccagaaacaccctcaccaacacacgtggaaataatgttttaccaggtatctgggcatcccttggttcactcaagttgacacaaaattaaccatcacagaaggagactggccttactctgaaattaggaaactaaagaagtgaccagaatggagactaggtagagacaactagttctctaccaaacatgtacagttattcgttggtatctgaaggggattggttccaggaactctcagggataccaaaatctgcaggtgctcaagtcatttatataaaatattacagtatttgcatataacctttgcacatcttccatatactttaaatcatctctacattacttataataatgaatgtgtaaatgctatgaaaatagttactacactattgtttatttgtatttttattgaattgttttggggtggggggcagctgtatctttcttagtaatagaacccctggttttagctgggcacatgactgccctcaataaagattaaagtaccccagccttccttgagattgtggccatgtgactgaactttagacagtgagatataagcagatatcttctgtggcagtgttaggaaactattaaagacagtaagaacaaaaaaaaaaaaaaa

SEQ ID NO: 235235 - DNA, 756 bp, Homo Sapiens
  misc_feature (737)..(737): n is a, c, g, or t
ctttaagcaaactactacagccaactcaaaagctaaaactgaacaaatttgatgttatgcaaacatcttgcatttttagtagttgatattaagttgatgacttgtttcccttcaaggaaacattaaattgtatggactcagctagctgttcaatgaaattgtgaattagaaacatttttaaaagtttttgaaagagataagtgcatcatgaattacatgtacatgagaggagatagtgatatcagcataatgattttgaggtcagtacctgagctgtctaaaaatatattatacaaactaaaatgtagatgaattaacctctcaaagcacagaatgtgcaagaacttttgcattttaatcgttgtaaactaacagcttaaactattgactctatacctctaaagaattgctgctactttgtgcaagaactttgaaggtcaaattaggcaaattccagatagtaaaacaatccctaagccttaagtcttttttttttcctaaaaattcccatagaataaaattctctctagtttacttgtgtgtgcatacatctcatccacaggggaagataaagatggtcacacaaacagtttccataaagatgtacatattcattatacttctgacctttgggctttcttttctactaagctaaaaattcctttttatcaaagtgtacactactgatgctgtttgttgtactgagagcacgtaccaataaaaatgttaacaaaatntaaaaaaaaaaaaaaaaaa

SEQ ID NO: 235236 - DNA, 687 bp, Homo Sapiens
tcagtttccaaaatggaaccacctcacctccgcagcacccgacttaccaggacgcatgcccctccctctgccctcatcaaacccacagacccggactccctttctgccaccccaggctggtccggccccaggtgtggggtccgctctctccactcccagggctccgcgcccaagtgagggggcccctgccggagcctcagacacactccagttcagggctgtggggggccttggccacatacctgtcccttggctatgagcaggctttgggggcccttccgcggcagccccgggggccgaggtagggtcgggggcttagaggctgggatggctcctggccccaccgccagggggcagcgcaggccgggctgggaggcggcggcggcggctcgggctggggggtcaggtggacgccgccctccggggctggacgcgcatccctcagtccctcggccacccgggggtcgctccctcgtgcccaccgcacctgccgagcctctttggacccagatctgttcatgcttttgtcttcgtcactgcggcggggccctttgatgtcttcatctgtatggggtggaaaaatcaccgggaatcccccttcagttctttgaaaaagttccatgactcgaatatctgaaatgaagaaaacaaaccgactcacaaacctccaaaaaaaaaaaaaaaaaa

SEQ ID NO: 235237 - DNA, 679 bp, Homo Sapiens
aagctgctgttcaacaagaaaatttataaatttactaatgtcttagcatggtaaagttgcacattaacagaaattaagactgcaaagcaggttaaacttgcttctttataaaacagatgttgggttaatagcatggtttactgtattaaagacttatacacccatttttaacctcattcagacatcaagttatgtgtagcttcacaatggttcaagtggcttacttcaagaaatcttatacttgacagtacaccaattttattgactaaaaatggatgaactttcctaaagattcaaagggcccatcttagtatcacgcagctgactgagcccttcaaaactgacatcttaaggcccaatcaagatccacatatcctgattttgaactatgtgaaagtgggactgttaagtgcaagactaaaataaattatagcagactttttagtaataactttccattttcaaacagtatatcctgtgggccaaagggctatttcttaaagaggcatgtaaatgtatttatttatctaatgtttttttccccatgtaaacttgatatacaaggtttagtatttgctcctctttcatattattttcacacgtatactcagatttggcatgtacctttcaacatctccataaaattaaacaccttttggagaaaagaaaaaaaaaaaaa

SEQ ID NO: 235238 - DNA, 804 bp, Homo Sapiens
  misc_feature (29)..(30): n is a, c, g, or t
  misc_feature (41)..(41): n is a, c, g, or t
  misc_feature (111)..(111): n is a, c, g, or t
aaaaatttagaagagtggcaaatactatnntaaaagaaganccaagaactgtaaaacatatagaaaagagcaagaatgcacatgtataaagtttacataaagaagtttttntaagttattgagataggaaatatattcactgctgcttttaattgtattttatccaattacatttaatacactaaaaaaaatcttgttggaattctgttatcaaggcccacattcttaaatactgtgcataaattattatggtgttttgcctatatattgctccaaactactgtgtatatatgtatgtgtgttaaatcaccaattatattaatcaaatggaaattaattgcatgttactatctgggtgatatattcttctttatatctctgacatgacatattttcattaatagtttaaatcagtgaccatcataataaagataaaatttagttgagtttttaatgtttacatgtttacatctttaaataaaatttgcttatttgaaatgttaatgctctttagaaaaatgactttctagtaccaaaggaaaactacttgaaagagctgtaatcatatagctaaagtgataagatagccttgattttaaaagctgattcattaatatcaaaatactttaataagtgtcacagttattaatatgttacatttgtttagtttccacgtaatctttatctctacctagatttagtgagtttgcctctttcagaatactacctccttttgttaaggcatattctttcgaaaatatagattctaaataaataggggcttatacaaaaaaaaaaaaaaaa

SEQ ID NO: 235239 - DNA, 700 bp, Homo Sapiens
  misc_feature (45)..(45): n is a, c, g, or t
cattctatactgtaaaatccaaaaatgctagttgccctcagcttntgagttgacttccagaaagttgagatcttttgaccattttttctcatgtcatataaaatgtgccacatggtagttgtcaagctgtggtagtcatgtacacttttttcttttttttaactttctaaaaggaaaagttcaaagtcctttccacagttagtcttcgcttcttttggatttttctttttagagctaaattattcataccaatgaataagtgagtctgttctaagatataggggccattatctatttttgcttaatggactcatgtggcattgttcactatcatgcctttccatacttgtaatatttctgagtcacttattaatgtgaccaacagataaactgttcaagctaatacagcatttcctaacttcatagttgtcgcagatgtttgttctagtagcgattatttaataaacatacattgtactgaatcttactagcaactaactattttcaggtaatctcagtctgcttattcactttttccatttgatttgctaatgccacaatcatttttctagaaaatagtaggataatgtattttttcctgtctgctataatggagactatatttctgcattcattacctctcataggtgaaaatattaaattaaataatattgttttgaataagaaaaaaaaaaaaaaa

SEQ ID NO: 235240 - DNA, 671 bp, Homo Sapiens
tcagcaacatctacagcaaataatagccgttgcgagggggaactccgcctcggagagagagtgttagtggtaggacagagactgggcaccattaggttctttgggacaacaaacttcgctccaggatattggtatggtatagagcttgaaaaaccccatggcaagaatgatggttcagttggaggtgtgcagtattttagctgttctccaagatatggaatatttgctcccccatccagggtgcaaagagtaacagattccctggataccctttcagaaatttcttcaaataaacagaaccattcttatcctggttttaggagaagttttagcacaacttctgcttcttcccaaaaggagattaacagaagaaatgctttttccaagtgagtattaagaagatttagaaaaacacctttcaagatgaacatgatgggattctgtgaagaaagaaaagtggagtgctgtatcttttgcattgcttggtagagttttaacacgtaggagaaaaggtgtgataagtgtattgagaagcgttcttcctccctcctttgcaagcgcaattaaaaatgtcaccagtgactaaaactagtgcactgcatatattttatcttcatagaggtcagaactgttaataaaagttaaaggaatttaaaaaaaaaaaaaaaaaa

SEQ ID NO: 235241 - DNA, 490 bp, Homo Sapiens
atgtcattttttattgtcccttgccattttttaatcacacatgtatgttctccaaacatactgtttcattttttgaagctttctacatatagtgtctgaatgtgaagtcttactcaacttgcttttttgagtttatgtttaaaattcattcttgcgcttatatgcatggatggtttacttgctctatagtattctgtgtgagtataccacaatttaagtgttcattttcctatcagttgacatttgtttttagtttttgttggtagaaacagtacactcaaaacatccttgactgtcccctggtacacatatgcaagagactttatgcgtaagagtggagttgttggcttgtcaagttttgcaaaataatgccaggtattttccaaaatgatgatattctcttgagtattacttccctttgcaatgtttttattgttaatgtagcatatataaaaaagtatctcataattttaaaaaaaaaaaaaaaaaa

SEQ ID NO: 235242 - DNA, 406 bp, Homo Sapiens
tccccttcagctcttttgaggagttttgctgtcaatatgaacactggaacagtggctggggaggatgagatctcaatacttccctgacatcccttaagactcaagtcttgatactttgtctgctctctggctctttctttgtcattactattatttttatcttcttgatgttgactcttgctaaaattttttgtcttccttattgttaatgcttatagaaaatgattccttgttatcttttagcccatgtcatccgaatcatttgctgtttctagcctaggtgctttgactatgccagcttgtatttcttcagaattttcattaactatatgtgtggtattgtaggcattacatattttaaaataaatttagccattgcttcaatcccaaaaaaaaaaaaaaaaaa

SEQ ID NO: 235243 - DNA, 422 bp, Homo Sapiens
ctccagcgccgccccgcccgccgccccgcccgccgcttgcgccaatccccgacgggcccgtcttccagccccgaagcggtcacctcctgacctctagtggcgagcgcggggaactgcgccccggcccgtccgcccgccgagcccgggccgtgcatgccgagcccgttgttccttcgcaaaccgagtgaacctcccgatgcatggactctggctgtcgtcgacgcagactctcgtgcactgcttaaccccgttttgctgccatgtgacggctgcagacactgtcctcaaactgcagtcccacagacaagttttgtattttggtctgacctacccgaaggtgtcctttttaagtcttatttgttaatatttataatgacatataatccaaagtaaatggaaacgtcaaaaaaaaaaaaaaaaaa

SEQ ID NO: 235244 - DNA, 535 bp, Homo Sapiens
  misc_feature (97)..(97): n is a, c, g, or t
actcccggcagttcatcacctcctgcccctgctggctggagatcctcctcaacaaccccagatagtggcggccccggcgggaggggcgggtgggagnccgcggccaccgccacctgccggcctcgagaggggccgatgcccagagacacagcccccacggacaaaaccccccagatatcatctacctagatttaatataaagttttatatattatatggaaatatatattatacttgtaattatggagtcatttttacaatgtaattatttatgtatggtgcaatgtgtgtatatggacaaaacaagaaagacgcactttggcttataattctttcaatacagatatattttctttctcttcctccttcctcttccttactttttatatatatatataaagaaaatgatacagcagagctaggtggaaaagcctgggtttggtgtatggtttttgagatattaatgcccagacaaaaagctaataccagtcactcgataataaagtattcgcattataaaaaaaaaaaaaaaaaa

SEQ ID NO: 235245 - DNA, 520 bp, Homo Sapiens
tgaggatggagataaaatcccgaaagaaagtagaggaagaaaggagctctaggaaagaagaacatggagaagcacacatggctcccctgtttgaaaaagggcctgaataatactctgcttctgcctcatgacatcagatgctactgttttggtttttttctttgagccccaattcaccatttcaggatgtggatgggggcggggttgggggtaaaaacagctataaaaagcaactgcagatgctgactgactgcagtgggcagggtatgtagctgctccaagatgacttgcatcataccccaattactgctggcatcttagttgagagtataatctgcttggttgcctttttatgggaataaagagaataaaaggtattttaatagaataaagaaaaatttgaaaatataatggaaggtatttaaagagccacccacatagcttcaccaacccttctcacacatcaactcataaatcatcttaaataaaagtcattggtatgaaaaaaaaaaaaaaaaaa

SEQ ID NO: 235246 - DNA, 265 bp, Homo Sapiens
gtgtatttatttttcacctatctccttcctgtcaaggcaggccgggctccagggctccccttgcgtggggcatgtaggtgggggaggcgtctgcaggtcacctggggggcccagccctctcccagccttgcctggctgagctgtgttccaggggagccctggacaagccctcataggcagggagggggtttccgaggccaggcatccgccgccccgtgtcgcatcctggaataaaatgtggctctggaaaaaaaaaaaaaaaaaa

SEQ ID NO: 235247 - DNA, 651 bp, Homo Sapiens
gggggagctgtggttacaagggcttcaatcatattggaggcttcaatcatcctttgatttgtactgagtactggttgcaagctggcctgttaagtatatattgtgttgccataacaaaggcctaggaaaatttgaagaaaaaaaacactgaactgttattttttgtaatttatttaaaaatggacaaaatggttattagaatccaaagataatctaaaaacagttctactctttggaaatattatgtgtactcaaatttgcacttaagttggagaatgttttgagaccatttaaattgttttaaaaatagcttgatcttgatccttatgcaaaagaaactaagactttgtgtcattatttgaggtagctaaggactgatgttgaaagtgtattcagtctatagtaagctgatgtcaggtcagtaaattttgtttggggatgttggtattttcgatcaagttaaaatcttaaagcagacaaaaatagtaaacgctcctatttgtgttagattttgaacaattgtattaccctatattttctttaattagtcaaaggtaagccagattatttcattctaaatgaaaattaaagcactttggccatttattttttcaacaaatgctaatactaagtaaaaaaaaaaaaaaaaaa

SEQ ID NO: 235248 - DNA, 605 bp, Homo Sapiens
acaagaatggggacggcaccattgacttccgagagttcatttgcgctctgtccatcacctccaggggcagctttgagcagaagctgaactgggccttcaatatgtatgacctggatggtgatggcaagatcacccgagtggagatgctggagatcatcgaggctatctacaaaatggtaggcactgtgatcatgatgaaaatgaatgaggatggcctgacgcctgagcagcgagtagacaagattttcagcaagatggataagaacaaagatgaccagattacactggatgaattcaaagaagctgcaaagagcgacccttccattgtattacttctgcagtgcgacatccagaaatgagctgatgtcaatgctatggactgcacaaaagtctcaatgttccattcagtctgcagctattcacacacacacacacacacacacacacacacacacacacacacacacaaatattgcttggactacctataaatggacttgcttcttgtgtttgaaacactcgtgtgcatgagaatgtcatttgctaatgaattttaaaagcatatataaaacaaaacaaacaacctgaaaaaaaaaaaaaaaaaa

SEQ ID NO: 235249 - DNA, 671 bp, Homo Sapiens
  misc_feature (9)..(9): n is a, c, g, or t
  misc_feature (39)..(39): n is a, c, g, or t
gaattcgcnacgaggcggcctctcaaagtgctgggatancaggcgtgagccaccgcgcccggctgccttcacctcttaaggagctctgagactccacttctgagagtccctgcggcctcccacctccctgcctttcaaagctctctcccccatgacccaggataaccctatgtctcctcccccagaatccttcagtggctctcatcaccttcaggaaaagcccaaactccttccaccctccaggttcctccctccccacgaggctttgttctcctggggttgcttcctggaccctgaacaagttgtgctctcattggccgggcctggccagcagtgcacagtgcctggcaggttgactctaccatccccggggctggccccgctctcctccgagacccaggctgagcccagtcccctcacccttccttgacttacctccccacctgaggctgactttggggttcccagacaccctacccacacacatgccttgatcatagcacttgcctgcgcttcttcagagtcattaatttgcttctcggcttccccactggactgtgagctgcctgaggtcagggattgcgctttggatggtttccagcctgagcctggtgcttgaacagacgtgtgcaataaatgctcgttaaatgatgaaaaaaaaaaaaaaaaaa

SEQ ID NO: 235250 - DNA, 607 bp, Homo Sapiens
gcagacccctggcccgggctggcgccgacgctcagaacctgcaggtacttcataagcacacaggggcctcgagggagctctgtgtctgaccgcacagcagcctctgaatgccgctggaagtgatgatcaaagtaaagattcagttgggacttgagttttttttttttttcatgtgtcttgctgaagattaaggggaaatgttacagtgttgggacttcctttcatggcagaatctacaatttgagcgacttcagtagtatctcttagtctacgcttttcatacacaaaacactgtggaaccacaagccattaccaagcaaaactctttcactggaaacaagggggcagtctagaagtaaaagtgaccttaagaagactctttacaggcaacaaatgaagcttttctaagggatttttgcatcagttcagtcataagaatacttttttccagggtaattaggcaatagcttcactgaaaatgacagcttttcattgcattatttaatccttatatttggaattgaagtcgttaacttcttttaaagaatgtactattagaaaaattaaaaatgaaatgttgagagacttcaaaaaaaaaaaaaaaaaa

SEQ ID NO: 235251 - DNA, 656 bp, Homo Sapiens
  misc_feature (24)..(24): n is a, c, g, or t
ttcggcacgaggagtttagacttntgggaagttggactagagaggggagttgttggggtcagtgctggcttaacagaaaacacagcgaatttcccctccagttctccccaagtccactgaacaaggctagttcctgcaccacccaggattcaaaggaaagacgaagggagcagaacttgtggcagcaacaggtaaacttcaagaaggagggcaggagccccaccctacagggctgggaggagcccagaggccccatctgtttctcctccaggagttgtcaaggcagcagaaaggagtcacccagccaaaggaggagatggctcagcggggctgcaccaaggggccaagaggccctacccgtgtctaaaccctcctctcactcccctaagcctggtgaaagagtcagaagccccaggctcctttttctgtttcttaactcaacagctaaaaaatggctccaggtagtgagtcaatgaagttcagacatgttggtgtaaagtttctcctctgctcctgaaaacttcatcttcttggtgtctcatgtcctcattctcccctatatgacatgcaaaaacgatctttctttgaaatccctctgggaagaagacatgtttattgaaactgtccttcagccttaaatacaaaaataaaaaaac

SEQ ID NO: 235252 - DNA, 306 bp, Homo Sapiens
tcttcaaccgcccccaccccctagtactggtctcagcttctccagcgggcctcagccccgtccacccccaaccccgacgcccctttctccgcgccagttctggcccttctcccatatttataagtgtccggccgggacgggcggtgggcgcggcgtccccggcgcgtatcgtaggcagtgtaccgtggccgtgccgtcagagtgtgcgtgtgcgtgtgtgccgtgtcgaggctgtgtagagtgcattgtacagcatattttcatgaataaaattgctttaagtcttttaaaaaaaaaaaaaaaaaa

SEQ ID NO: 235253 - DNA, 394 bp, Homo Sapiens
ggcacgaggggtgaatacctgggtttatttactattactctgtgttgctattttctaagaaagaatacagcactagacttcatcctagagtttcaggtaggctaatgcttagtgcctgagtatttaaattttcttttcaaacaggcacagttcacattgctagtatggtcctaactttctgttattttagaatgttaacatgattcacattatactttctcttagttaataatacagtaggccttttgtttattaatggaagagtactccccacacctaagaccagattcttatatctccctggttacagtgcaatttggagatttttttttttttcctggatggtaagatttgaaatatttacattaacataggcaaaaaaaaaaaaaaaaaa

SEQ ID NO: 235254 - DNA, 652 bp, Homo Sapiens
  misc_feature (38)..(38): n is a, c, g, or t
aggcactgtggcgctcacctgtaatcccaccattttgngaggctgaggcggaggaccgcctgaggcaaggaattcagaaccactctgggcaacataatgacactaaaaaagactatctctaatcaaggctagaaccaagggaaggctaagaattgcccagtactgtgcaactacgaaagccctacccaaggccaccagccttgtcttcctctttcctctgtcagttcaaaaagaacagaaacctccagctcttttacatagcaggtaccaggcatttatcagaagaggccaagcttctggttcccatgcagccctttgaatagtgtgtctaaacaaaaataggtgtccaagtagtcacactgagactttaactggtaacccagcctgtggcgtcagtcgcagtgctctggccaacactatagcagggcttattcttctccctcatgtgtagtgaaacaaaatgtaacaccttgggttcattcagttccattccctatatctacctgtgtcaatataattccctgatttggaggcagctctcctcattttccccaaaacagggaaagcaaggagtaaattcctcttaaaatcaaaagctaataatatgcttcctaaaataaagactcatcaaggtaaaaaaaaaaaaaaaaaa

SEQ ID NO: 235255 - DNA, 576 bp, Homo Sapiens
ggtttcatctgggtaggaggccagagaaggaaggaattcacacggcaaatacagtgatataggtaatgctctagttcagcagtgtccagtagatctttttgcaacaatggaaatgttccatatcggtgctgttcagtatagtagctaccagctttctgtggctattgagcactccagagagtggcttgtgtgactgaggaactgaatttttaattctctttaagtttaagcgggcacatatggctagtaactcatattggatagtgcaattctagttctagtggcaaatagacctatgtttattgttaggcatgaaaatttacacgtatgttaaaatagtcttaggtatatctaaaatgcagcataatcttaaaaagccatttaaaacaaaaagtaagcttcagaactcactttggtaactatagttctgctgcttccgtaggatctcagcatgacccagttagtccccaggccagcacagcaggtgataattaacccttctttacatttagcctcagaaaataccaggcatcagaacaaggatccctgaggagtaagagaaaaaaaaaaaaaaaa

SEQ ID NO: 235256 - DNA, 674 bp, Homo Sapiens
  misc_feature (73)..(73): n is a, c, g, or t
  misc_feature (96)..(96): n is a, c, g, or t
cactacattgacgtgaaggcaccagtcaagaaaacatcgagaaggaagttgtaggaatagcacataaattctntggagctgaaaatagcgtgaacntgaaggatatttggatgtttcgagctcgacttgtgaaaggagaaagaaccaatctttgaaatagccatctgctataactctttcaacagaaaaccaaaaccaaacgaaatgtctaaggaaaatgttttcttaatgagatgatgtaaccttttctatcacttgttaaaagcagaaaacatgtatcaggtacttaattgcatagagttagttttgcagcacaatggtgttgctttaatggaaaaaaaaaacagtaaaagtgaaatattactgttttaaggaaaactaatttagggtggcagccaataaaggtggttggtgtctaatttaagtgttaaatcaatttctttcattcagttagctctttacccaagaagaagtgaatgatttggagcttagggtatgttttgtatcccctttctgataaacccattccctaccaattttatgtcataagagatttttttcccccaaatctagaacaatgtataatacattcacatctagtcaagggcataggaacggtgtcatggagtccaaataaagtggatattcctgctcggaaaaaaaaaaaaaaaaaa

SEQ ID NO: 235257 - DNA, 614 bp, Homo Sapiens
aaagccaaatgcagcttctgctgtgcgacgcactcctggccatcttgccgtgtcaccccctgtccggcctccacttgccatgggggatggatggatttagggtgggagggcctgtgggggccctggacagtcacaccccagcagcagtgagtgggcaggtttggaggagcagccagggagccccgagtggcccaggagtccccccacacacagatgcataggcctgccttccggagaccctgtccacattgccgggaccaccctggtggggccactggtgggtgccagggacaggttagggccactctggggaaggcattttggttttttattccacgctgtgctgtttggatgggagccccacagaggcaggtcctggaaccaccccacccccacacctggacgctcgctctggtgggggcacacgcaggtggaggtggttgtgggtgcaggtgtgtgcaggggtgtggggggcgcaggggtgtggcttagctggccccgcacccaggccggggaggctcaagttcgccactttactcagaccgatgcacagtcttcccattttacacttttttaataaacataattgcaatattaaaaaaaaaaaaaaaaaa

SEQ ID NO: 235258 - DNA, 677 bp, Homo Sapiens
gcaaactgctctgcgagacgtcactgggctacaagatggatgacctcctgacttcctacattagccagatgctcacagccatgagcaaacagcggggctccaggagcggcaagtgaacagtcacggggaggtgctggttccatgcctgctctcgaggcagcagtgggttcaggcccatcagctacccctgcagctggggaagacttatgccatcccggcagcgaggctgggctggccagccaccactgactataccaactgggcctctgatgttcttccagtgaggcatctctctgggatgcagaacttccctccatccacccctctggcacctgggttggtctaatcctagtttgctgtggccttcccggttgtgagagcctgtgatccttagatgtgtctcctgtttcagaccagccccaccatgcaacttcctttgactttctgtgtaccactgggatagaggaatcaagaggacaatctagctctccatactttgaacaaccaaatgtgcattgaatactctgaaaccgaagggactggatctgcaggtgggatgagggagacagaccacttttctatattgcagtgtgaatgctgggcccctgctcaagtctaccctgatcacctcagggcataaagcatgtttcattctctggaaaaaaaaaaaaaaaaaa

SEQ ID NO: 235259 - DNA, 641 bp, Homo Sapiens
gcctcccagggctgcatgaacaacgtgaccctgggcaacgcccacatgggctactacgagacggtggcgggcggcgcgggcgcgggtcccagctggcacgggcgcagcggtgtgcacagccacatgaccaacacacgcatcaccgaccctgagatcctggagagccggtacccggtcatcctgcgccgcttcgagctgcggcggggctcggggggcagaggccgcttccgaggcggcgacggcgtcacccgcgagctgctctttcgtgaggaggcgctgctgtcagtgctgaccgagcgccgcgccttccggccatacgggctccacgggggcgagcctggcgcccgcggcctaaacctgctgatccgcaaaaacggccggacggtgaatctgggcggcaagacgtcggtgaccgtgtaccccggggatgtgttctgtctccacacgcccggcggcggtggctatggggacccggaggaccccgccccaccgccggggtcgcccccgcaagcactggcctttcccgagcacggcagcgtctatgagtatcgccgggcccaggaggccgtgtgaggatcccgcaataaagatgccttaagtctcccggttctggggacgcagctaaaaaaaaaaaaaaaaaa

SEQ ID NO: 235260 - DNA, 752 bp, Homo Sapiens
ggggaaaatagtagcagagtcattgtaccaggtgtactatggctgtatttttagagattaatttgtgtagattgtgtaaattcctgttgtctgaccttggtggtgggagggggagactatgtgtcatgatttcaatgattgtttaattgtaggtcaatgaaatatttgcttatttatattcagagatgtaccatgttaaagaggcgtcttgtattttcttcccatttgtaatgtatcttatttatatatgaagtaagttctgaaaactgtttatggtattttcgtgcatttgtgagccaaagagaaaagattaaaattagtgagatttgtatttatattagagtgcccttaaaataatgatttaagcattttactgtctgtaagagaattctaagattgtacataaagtcatatatatggaaatcctgttacttaaatagcatctgctcttctcttacgctctctgtctggctgtacgtctggtgttctcaatgcttttctagcaactgttggataataactagatctcctgtaattttgtagtagttgatgaccaatctctgtgactcgcttagctgaaacctaaggcaacatttccgaagaccttctgaagatctcagataaagtgaccaggctcacaactgtttttgaagaagggaaattcacactgtgcgttttagagtatgcaagaagaatataaataaataaaaatattctccatggagaatttgaacaaaaaaaaaaaaaaaaaa

SEQ ID NO: 235261 - DNA, 583 bp, Homo Sapiens
  misc_feature (37)..(37): n is a, c, g, or t
agaattcggcacgaggcctattttttttttttttttntaaactatcaaagctacaggaaaatcctccagaaacaaactttggtaagtagtgaatggcaaaggctcagggggtttgcagcaggacctccttggggtcagatctgccagcctcgggttggcctttcagacccctcatcgtctatgaggcatcctgtaagtgcagctgtggccagggcttgcatatgcaatcaattcctgattcacctagttcttggcaggaagagaaaatactcgttaatcagaggactaaacaatccaaagcgcattctctctctgggaatggaatataatttatatttctgttgctattgaattatccttctaattccactggactaaacttaataccagtaatactaaaatttgttttgggcaaagccgactgaaggaggagtcagtggcgcaagcctatgctgactgtgaaaaataaacacctctgagatcaagaatcccacagtgagagctaggatttgaaggtatccagagattgcaaactctgtgactaacagcaatttttaaacaaggcaaaaaaaaaaaaaaaaaa

SEQ ID NO: 235262 - DNA, 536 bp, Homo Sapiens
ggcacgaggcgaacactgacatttaaaagggtaacagctgggaggcagggaaggggcagccgcacactttcggagtgcctcgcggtcccgtggccggtccgggcctcctggctcacgttccagcttgcggagctttgggacacatctttcctagtcagttgcgctcgttcctatggcaaaagagaacttcagcttcggttttccagctcccaaacagttaagtgacttcctgcaaacgctacagtcccagcaaccagccttccaatcaaaagtaagttggttgatgtcactggcattggctcggccaatcacaagggcgttccgaaagcaagcgctcgacacttgtaaacgcgaagagctgtagtgaaactggacacatctttgtattttgtgttgctggtagtaaatttgagttatggatgagaggacaggggtgatgaataaatgcagtgtgaatctataattaaaaaaaccccattatgtcaggataagtccaagaataaacacaaatgagtaagaaaaaaaaaaaaaaaaaa

SEQ ID NO: 235263 - DNA, 584 bp, Homo Sapiens
gaggcattcccagacctaacctcagataatgtgcatgtgatgaacactcccaagtggctaggcctcttgcacctgagcaggtggattctgccccagcactggggctttctctgggctgtccatcatgggtatatctctggattccaggattgctagttagcacctcacatttgagggtctgtgctattcagtctagaatcagagttggatgagaaatcaactttgaacaccacctttggggtggctgcattggctcacacctgtaatctcagcactttaggaggctgaggcaggaggatagcttgaggccaggagttcgagactaaccggagcaacatagtaaggccacatctgtacaaaaaaaagaaagaaaaaattacccaggtttggtggcatgcacttgtagtcccagttgtgggctgaggattatgcaggtgacaaggcaagagactgaaggcacaaactgtttcagtataataaagaaaatagaataataatagtcataattatatatagagatgatcatgaacaattatcaatcattataataaacattattaatcattaaaaaaaaaaaaaaaaaa

SEQ ID NO: 235264 - DNA, 573 bp, Homo Sapiens
  misc_feature (23)..(23): n is a, c, g, or t
ggaagataataggaggcattggngaaactgctccccaatatattcctcttttcctttcttcaagctgcgtagcagggggcctttagctagtttctcccgagaggggcgggaagtacagctggtggagacagtgctgggagatgatcagaaatctcagggcacagcctcaggtctacctggacactcatccactgttggagatgctcaacagctagacacagatgctcacagccgacctgtggcctcttgctctgaagccatcccccatcttccctagacacagcagacatctgagaaagcttcagcatttctcttgctaacagattcagaaaagtgtctcaaagcagagcacagagttatttggtgtttgctgaagacagcctttgtgccacaatcacttattaaataagcgatcaatttcccattgaactgaacatgcaacatttatcatacattcagttctcattcacactccttaagatttggtcagaatttttatttctgttcatgtcttctacttttctactcctgtatgaataaaatattgatttgattaaaaaaaaaaaaaaaaaa

SEQ ID NO: 235265 - DNA, 625 bp, Homo Sapiens
gactggatgagagtggagcctccgtttcttttccctcttctatccttgttacatgaacaatctcagtctctaagtggtgggtggggacatgaagaggtgtgggtccaggttaggcaggagagagaacttctttggtctcggagtttggggtctcaagaattcaagtagccccatctctctctcgggcaagcccaaagctcaggtcccatacgctacccttagatcctatccccagggctagggtgaaccatgccaaaggaaggggccagcttctctgtgtgtgtgtgtagcctgtctcctagtctgcctatgtctttctctgctatatgtttctgtcctgctgtctgtcaaaagtctcacagagagagggcctcagggagctgctgaggggtgctgagcctggctcagggagctgggacccctcccctccaacacacatactcacagtgctttcctccttgtccctcctacactaggagcaagaggagggggctccaatgacactccggggttttaagacccaaggcacattcaatgcaaggggagcaaggatgggacaactccatcttctgctgcccatgtgaaaaataataaaaatcaagagccaaaaaacgaaaaaaaaaaa

SEQ ID NO: 235266 - DNA, 565 bp, Homo Sapiens
  misc_feature (79)..(79): n is a, c, g, or t
cttgcccacctcactcccacatcccagtggacggccacgggggcactaggccccagggaaagagccccatgccgccccntaaggagccgcccagacctagggctggactcaggagctggggggcctcacctgttcccctgaggaccccgccggacccggaggctcacagggaacaagacacggctgggttggatatgcctttgccggggttctggggcagggcgctccctggccgcagcagatgccctcccaggagtggaggggctggagagggggaggccttcgggaagaggcttcctgggccccctggtcttcggccgggtccccagcccccgctcctgccccaccccacctcctccgggcttcctcccggaaactcagcgcctgctgcacttgcctgccctgccttgcttggcacccgctccggcgaccctccccgctcccctgtcatttcatcgcggactgtgcggcctgggggtggggggcgggactctcacggtgacatgtttacagctgggtgtgactcagtaaagtggatttttttttcaaaaaaaaaaaaaaaaaa

SEQ ID NO: 235267 - DNA, 663 bp, Homo Sapiens
gagttggggaacattggctgcaaggttgttcctgattgtaacaactacagacagaagatcacctcctggatggagccgatagtcaagttcccgggggccgtggacggcgcaacctatatcctggtgatggtggatccagatgcccctagcagagcagaacccagacagagattctggagacattggctggtaacagatatcaagggcgccgacctgaagaaagggaagattcagggccaggagttatcagcctaccaggctccctccccaccggcacacagtggcttccatcgctaccagttctttgtctatcttcaggaaggaaaagtcatctctctccttcccaaggaaaacaaaactcgaggctcttggaaaatggacagatttctgaaccgtttccacctgggcgaacctgaagcaagcacccagttcatgacccagaactaccaggactcaccaaccctccaggctcccagagaaagggccagcgagcccaagcacaaaaaccaggcggagatagctgcctgctagatagccggctttgccatccgggcatgtggccacactgcccaccaccgacgatgtgggtatggaaccccctctggatacagaaccccttcttttccaaataaaaaaaaaatcatcaaaaaaaaaaaaaaaaaa

SEQ ID NO: 235268 - DNA, 590 bp, Homo Sapiens
  misc_feature (120)..(120): n is a, c, g, or t
cctgtttacagttgcacatctgggcccctcactgtggggattgatcattctcatgaaggaatcacagttatatggcaactgcagaaggctgagcctcctcatggtgctataaccccttgngacactcatccagacttctctgaagcagaaaacctgagctccccactcactgccctagaatttatggcaaggagcaaatctacagcattctctcccacctacgtcctgcttcttggttgagactactgggatccttcagaaaagaaacactgggtcccatagctaaattctcaaccgccaggcaccttcagaagaatccagcctaatactggaatttgtgctattatcttcctctccagccccccaactccatccctcaccacagttgtctaggaaatgacatgaattcaatatctaatgtcaaccaatggggagagccacaactccaggagaggttcctgagctgagtcccttaatttctggatgaagaagaccaacaagttttgtccaatgtatttgtttctcagaccttgcctaggcactaaaaataaaatactaggtcattggaggctaaaaaaaaaaaaaaaaaa

SEQ ID NO: 235269 - DNA, 733 bp, Homo Sapiens
ggaccgagtctgcagatgcagaggacatccgagggcccggcccgagcccagattcggctccgtggtgcggcgtgcagccaacgtctcgctgggcgtcctgctggcctggctcagcgtgcccgtggtcctcaacttgctgagctccaggcaggtcatgaacacccacttcaactctcttcacatcgtcaacacttacggggccttcggaagcatcaccaaggagcgggcggaggtgatcctgcagggcacagccagctccaacgccagcgcccccgatgccatgtgggaggactacgagttcaagtgcaagccaggtgaccccagcagacggccctgcctcatctccccgtaccactaccgcctggactggctgatgtggttcgcggccttccagacctacgagcacaacgactggatcatccacctggctggcaagctcctggccagcgacgccgaggccttgtccctgctggcacacaaccccttcgcgggcaggcccccgcccaggtgggtccgaggagagcactacaggtacaagttcagccgtcctgggggcaggcacgccgccgagggcaagtggtgggtgcggaagaggatcggagcctacttccctccgctcagcctggaggagctgaggccctacttcagggaccgtgggtggcctctgcccgggcccctctagacgtgcaccagaaataaaggcgaagacccagccaaaaaaaaaaaaaaaaaa

SEQ ID NO: 235270 - DNA, 709 bp, Homo Sapiens
  misc_feature (16)..(16): n is a, c, g, or t
gaacctggcgggcccnccgtgaatgaagagcctggccacgcgaaggtgaccccactcagcctccagccgtgccctccacgccccagacaccgccgtcttcggaggcgactccgcggtcgtgtggacggggtcccatttggactccggggtctgcaggatcggcaggaaggactttgctctctgctgctgggcggggaggggtacgctatctgccgggactccctaaccctttagaaggagcaagtgcgtccaaatggtttgaaagtggacctttattgttttccaggagtaagaagatagaacagttgaccagttttgtttgtaaaacttctttccttgcctcggacttgtgctataaagtgaccagggcgtagtgagtacagttagtaccgcacacgttagcacgctcgaccttaacgatctttttatagagacaataaacctgcagcgtttcatgccacgtctttgtacgcatcggatgtctctccgtgtagttactaggtgaaatcctcttggcgtgcgcaaattaggttaaaaaaatagctgtcaaacctgagacaggagttggaggagtagagggtggcgcttgttaagtgaaacatttaaccaggaatggtattgtgtgccatcctgtattaaacaatgtatggacagagtggaacaacagcaaagcaaaaaataaaaattttttaaaaaaaaaaaaaaaaaa

SEQ ID NO: 235271 - DNA, 750 bp, Homo Sapiens
  misc_feature (164)..(164): n is a, c, g, or t
ctactcatcacacgctgtggatgggactgcccctgctgggggtgctgggcgacctgcaggcagcaccggaggcccaggtctccgtgcagcccaacttccagcaggacaagttcctggggcgctggttcagcgcgggcctcgcctccaactcgagctggctccgngagaagaaggcggcgttgtccatgtgcaagtctgtggtggcccctgccacggatggtggcctcaacctgacctccaccttcctcaggaaaaaccagtgtgagacccgaaccatgctgctgcagcccgcggggtccctcggctcctacagctaccggagtccccactggggcagcacctactccgtgtcagtggtggagaccgactacgaccagtacgccctgctgtacagccagggcagcaagggccctggcgaggacttccgcatggccaccctctacagccgaacccagacccccagggctgagttaaaggagaaattcaccgccttctgcaaggcccagggcttcacagaggataccattgtcttcctgccccaaaccgataagtgcatgacggaacaataggactccccagggctgaagctgggatcccggccagccaggtgacccccacgctctggatgtctctgctctgttccttccccgagcccctgccccggctccccgccaaagcaaccctgcccactcgggcttcatcctgcacaataaactccggaagcaagtcagtaaaaaaaaaaaaaaaaaa

SEQ ID NO: 235272 - DNA, 671 bp, Homo Sapiens
  misc_feature (401)..(401): n is a, c, g, or t
gcccagccgccagccatgccaaggacaacagcaatagtcccctgggctctcccagcggccctcagccatagatggcaaggtgggcagcctgcccccccatgggaagtctcttctgtatccaggtctgctttccacctcccttcagattccttttggcacattctcctcttgaggaagtaccagtctttctgaaactaagagagggagggcagcgtcctttaaaaataccaaaaatgtttacagagttgggtgctgagctgcagggctcaggcctgaccagtcataaccaaagggtgaggcaggccttgctgactgccaccccccaggcctgttagaatagaagccttagtcccactcccaccacacccccacgccccaccacctgccttctctttgatttntaaagagggattcagcagagaccccccacccctccctggctcggtctgagtcccactgcccaccccatcacagccttcacgtctcagcccctcccgtctggtctgtccgtgtgccgtctgtttctctgggccatgtgtgagcagtgtccccatctccccatccgtccctgctgtccccgcatcattgggcctgagtgtgctctgtatacaacgtcatgtctgttacaccaattaaagaagcgggaaggcttcaaaaaaaaaaaaaaaaaa

SEQ ID NO: 235273 - DNA, 497 bp, Homo Sapiens
ggcacgaggtgctctgtcctgaaatctggaactcattacctcatcaccaagaaactgcacgaaatctctcccccaccgccccaacacccacttgggaaaggaacgagcaaacatccctctaagaaagaaacctacacttgaatgatttaaattaaggtggatggaagttatttccctttctggcgcttgccagatttcaagaaaagctgaaaaatgggagcgggggagggaagcaacagacggctggagggcagcagcagaacaagcgaggggcagcagccgagttaaagtgggggccatccatttcgggcagaggagacaaatgaaagccgaccccgctgggatcacgtaggttcgtggctgcagcaaaagttgggtttcacaaagttgaaaaacagccggtttctcaaacaattgtgatttggaaggtttcgctgggtttgcccagatgtttacgaataaataagaaacgcagttttaaaaaaaaaaaaaaaaaa

SEQ ID NO: 235274 - DNA, 674 bp, Homo Sapiens
gagaggtacgggtctgttcttcggtccagggaggctgtggcaggtgcagatgtgatcatcacagtcaccctggcaacagagcccattttgtttggtgaatgggtgaagccaggggctcacatcaatgctgttggagccagcagacctgactggagagaactggatgatgagctcatgaaagaagctgtgctgtacgtggattcccaggaggctgccctgaaggagtctggagatgtcctgctgtcaggggccgagatctttgctgagctgggagaagtgattaagggagtgaaaccagcccactgtgagaagaccacggtgttcaagtctttgggaatggcagtggaagacacagttgcagccaaactcatctatgattcctggtcatctggtaaataaaacaaaggaacttgatgttgagatggatgcttgaggaatattgctgctggttctcataatttctagagtaaatgagggagtccagtccccagtgaactctccttttgtgcttatcatgttttaccttaaatgctgagatcctcatttatgtttgtagttggaaagcaaagctaggtagccatttcttctgttctaccaagttataatagcattcatttccctttatatttccctgaaataaagcacattccacttgtaaaaaaaaaaaaaaaaaa

SEQ ID NO: 235275 - DNA, 611 bp, Homo Sapiens
  misc_feature (146)..(146): n is a, c, g, or t
ctcagtggggacagccacgaaagttagactctagattaaattcctcccgcggttagcctgacccgtgcccgggactcagtggggacagccacacaagttaaactctagattaaattcctcccgcggttagcctgacccgtgcccgngactcagtggagtcagccacgcaagttagactctagattaaattcctcccgcggttagcctgacccgtgcccgggactcagtggagtcagccacgcaagttagactctagattaaattcctcccgcggttagcctgacccgtgcccgggactcagtggagtcagccacgcaagttagactctagattaaattcctcccgcggttagcctgacccgtgcccgggactcagtggagtcagccacgcaagttaaactctagattaaattcctcccgcggttagcctgacccgtgcccgggactcagtggagtcagccacacaagttaaactctagattaaattcctcccgcggttagcctgacccatgcccgggactcggtggaatcagccaccccagacctctctcactgttatcatttttgcacaggtggtttcagcagcttgatgccaaaaaaaaaaaaaaaaaa

SEQ ID NO: 235276 - DNA, 655 bp, Homo Sapiens
  misc_feature (92)..(92): n is a, c, g, or t
cattcagtctctgactaggaaaataagtctgacctgataggtccgatgtcatcagctcttcaacatgagacaaaagaggggattttatgttntgagtcattagaatgatataataattttctgaattgacatctggatgttgaaattaggatggtgcaaaaggggtccagggcctcaggctgggcgcagcagccagctcccaatgacgcagaagctgcttcaaaaccccctcaacaaagaggggcacatgcaagtcaccaaagtgggaagccttcaccaaggccacacccaaagtctactgattgtctgtccaaagttcgttgattcctggccatgaacaagcacaatagaaaaagacacagggtcctagtggctacaagtcaatgtgaattggcacatggtctagcagttttaaaatctgacagtagagtatggcaatgggcaagggccaagaagtcctgagatgggaggtcagcgctctaactgggctcagtggaggtctgtgaccagtgtctggacactagctacaggggaccgggcagaggattctgggcagaaggaaaatgtctaaaagtactttgggagggtaaaggacaggggccttatttaaaataaagactgaaggataataagtgtcaaaaaaaaaaaaaaaaaa

SEQ ID NO: 235277 - DNA, 634 bp, Homo Sapiens
gccccggaccagaccaactcgctcaccgtctacctggtggtggcgttggcctcggtgtcttcgctcttcctcctctcggtgctcctgttcgtggcggtgcggctgtgcaggaggagctgggcggccccggtgggtcgctgctcggtgcctgagggcccctttccacgacatctggtggacttgagcggcaccgggaccctatcccagagctaccagtatgaggtgtgcctgactggaggctccgggacaaatgagttcaagtttctgaaaccaattatccccaacctgctaccccagagcacaggcagggaagtggaagaaaatcgcccatttcagaataatttgggtttctgataaagaatgtaaactaaatccgcgtctgtgaatacgtttctgattaggaacttattgcgaggttcccttaagggagtgtctttacatcatttcaaatatgtactcttgaagtcaagcaataaatttctatacataaaataggatcctgatttagtatcaagaacccttcacaaagcatgaaatgtatatgtgtaatgttttatgtcaaacaattatgcttaatatacagtctattaaatgtaagtcttgtttgagatattttaaaaaaaaaaaaaaaaaa

SEQ ID NO: 235278 - DNA, 556 bp, Homo Sapiens
ccccaggagcacagtatcctcctgtccatctcgtccctgggtcggaccctgcgcggggcggtgcccggggaccgccgcggggccctggagagagctgcttggaccgtggctgtgcgcaccgaggcggtgatgcggcgccactgcaggacgctgcgccagcggagccggcggcccaagatgcgccctgcccggcgtcgcggcggccgaaggcagctcctgctgcgcgccctggacaccgtcgccacctgctgggagaagctcttcgcgctgcgcgccccggcctccagggactcctagcgcggcccgtcctggccctgcgcggggaggagaaccagcggggccgcggcagagcctggagacgcgcctcgttctgtagacttgttggtgacctcggcccctcgctcgacgcagcccgcgctccccggagggcccaggacttggagaagggagcgcgcctggccgccgctgggtcacggaggaggcccgccctccacgcgccgaaggcctcaataaacggagctggcgctgcgggtccggcaaaaaaaaaaaaaaaaaa

SEQ ID NO: 235279 - DNA, 664 bp, Homo Sapiens
gaagctagaaatatttgggatcacagtaatagcttttctcaaatatacttttagaattgaatgtacattatcctatatgtaaaaaagcaaattattaattttaatggagctctcgattgacctttttagcatacttttatagcatgtatattaaaatagaatatattttagcaaaagattgccataaaaccctgacttggctcattttgatatttgcactgtgaagagggcttaaattccaatgtagcaatgtggtggcagacaaatgaaaaactaggaagttctttcacagtaatgcctagttgttccaaatttgctatatttggaggtgctctactggtacttcctgcttgactctctgacctgtgggatgcacattcttcctcagcgctttttccttgttgtggtgacgtacattcactatctgagagtgaaagaccacacacacccctctttttaaaattattgtatctcttccttttcactttggtttgaacaaagatagtgtcaccttgttccgtgaaaaagaaaaagcataaacagtgtatatttagggtatatgggtgatagcttatgatgtgtgtcaatcagttctctgaatcttttactgaaactgagacaggaaaataaaactgaaacaaatcttaaaaaaaaaaaaaaaaaa

SEQ ID NO: 235280 - DNA, 618 bp, Homo Sapiens
gaaagggactgtcatgtcccatcctttggccagattgactggggatgtccggacagatgcctgcatgggtggtgagggccacatctgcacacgagccagtggctgcttgcagttcactgctgtgatgccagagtgtgttcaaaggtgactctcctgctcttctggactcttctctcaggcaagaaaggctgcaggctgcctgctatgtgatgcctgagcacaaagccaaggaactgaactaagtctttctgttaagtcctgagtttgtcattggcaggtttacttgtggccagctctctctgcccttgggtgtctgagcaggcagaccagaagaccaggcactggacctgcatgccaaagggactggtcatctcctgaggacctgtacatgaccctgtggactgttccgcacgatccggaacccactttttattcactccccatgtctttggccttcctcttctttctctttccctctgccatcctgacactgatagtttgtcatataaattcccccgggttgtgtttttttttctagaaaaaaattaaaagggaaaacaaaaccaaaaaaaccagaaaccccgaataagaatggaattgaaaaaaaaaaaaaaaaaa

SEQ ID NO: 235281 - DNA, 543 bp, Homo Sapiens
ggaacgaggctcgaagttcctttgggaggggctggcgggactccagcaggccgtcctcacctttcttagaaagtccacccagggcaagttgatgttgggggaaagcagaagtcaagccagccgcgggccccacacgccccgacccgctcaaccgacttgtcccttaaatgtgtcttggatcccgcagtgatgacgtgagccagccaggcccgaaagggtgaggccagtgcagagaagcttcccaggggattcctgggttcccccgaaagacaagcgaggtcattgcagttcacctgatgttgctcctgtcccgtgcgtcccggggaggctgtccttggtccgaggctgctcgttgcagcccctcccctgctggcggttacgatgcgtggggtccccctccccacccagccccggccacgtcgccgtgtcccgcctgtgcctgtgacgtccctgtggacctgtgagccatccccccccttatctctgctctgaatactgcatgaagcattaaacgtgcaatgaagtaaaaaaaaaaaaaaaaaa

SEQ ID NO: 235282 - DNA, 695 bp, Homo Sapiens
  misc_feature (98)..(98): n is a, c, g, or t
ttttcatctgatcttgtggatgtaaaggactcgggggactatcctctgacagctccaggtctatcctggaagaagttccagggcagcttctgtgagtntgtggggacattggtctgtcggtgccagtacatcctcctccatgatgacttccctatggacaacctcatctccctgctcactggcttctcagactcacaagtctgcgccttctgtcacactagcaccctggctgctatgaaactgatgacctccctggtaagagttgccctccaactgagtctgcacgaagatatcaatcagcgtcagtatgaggctgaaagaaacaaggggccagggcagagggcacctgagcggctggagagcctgttggagaaacacaaagagctgcattaatactacattgtcaaagacaaagacgaacatgagacatgcgatatgagttttaaaaggagagaagagcaaaaaaacaatacagctatccaaggagcaagtgctgagcttgtgaaaaaacagcttctattttattaaataatagtgttcctgcagggatgtctgaagtactctgcaaggctaattaggacagatcaatgtacacttacctctccagaaggctgaaaggtgtgtagtgactatgtgtcattaaaaatttacttgaccatgggcaacagatgtccatgaaagaaaaaaaaaaaaaa

SEQ ID NO: 235283 - DNA, 725 bp, Homo Sapiens
agcccaaactcagacggcgtcaggacccggacccagcagccgtttcacgccaatagatagggcgcatgcgcagaaatcctcctcggctctctagcgtgagctttcccaaggggccacgcccagcttgccttctgattggtccagctggtgggttgtcttccgccatctttgatcagggcactaaggatgctcccgacggccttcacagtgacggcggagaccctgccccgccagctgctcagtacgtgccgcgtagcccgtgcgagccaagtgtgagtccgggcgagcgcctgcggagctagcactgggcccagaatgagagggaggcggaggagcagcgatcacgtggttttagggactgtctaataattccacgccagcattgccggtgtttcagggggtgggaaccgctgcgttccccatcaacttttctcccacccaccaccctccccaacctacaagcccagctcagcttgaggtaactgctgaccggactgtcctatacagccctacaagacagaggcgcctagggctgaaagcgggggcctccgtagggagccagcgggggcctcaatagttactcattttctctacctttgatgaaaataagagctaattcttaataaggcctaccgggtatcacgcaaaaaccctgtgcttactattatactttgggttgttgcaaagattaaaggaaataagccgtgaaaaaaaaaaaaaaaaaa

SEQ ID NO: 235284 - DNA, 649 bp, Homo Sapiens
  misc_feature (29)..(29): n is a, c, g, or t
agaattcggcacgaggctggtttccaatntgggttctgatgtgtgactctgggcaagtcactctccctctctgggcatgtctgctacaaatggacaagattatttcagaggtcactgaagactgtgattacatgcacctgccttagaaggtaggattttcttcccagggacctcctatcaccctaccctgcttcttgaggtccctggagccccaggtgggctgaggggcagggagccggctgtgcccagtatgcctcctggaccctccagttctgccacaggtctgccgatgccctgtccactgcctacacatgacagacaagtaaccccctcatgggggatggggacctacctggctcctcagccagcacccagcttaacccctgccatcccatgctgggccctccaggccaagagtctcagctggccgagagtccaggccttgcctccccgaccgccatggagggggcagcccggcacagctgctgggagcccttgtgtgtctggtcacactttttaggcgtcacgccaaaggccagcctcctggccccaatacccattttggaagcccctgtggccgtgtggatgtcggtaacagttgtataaaataaattctatttatcgctattgtaaaaaaaaaaaaaaaaaa

SEQ ID NO: 235285 - DNA, 368 bp, Homo Sapiens
ggcacgagggtgatccgcccaccttgacctctcaaagtgctgggattacaggcatgagccatcacgcccggccacgctgttggttcttaatgacacagcttaactttattgtgaaaagattgcagcaacaaatgagattttacctgtatttgttaaaaatgcttatccttgtctaagactggcaacataagcagttcttaggcttctatgccaatggacactaggcagtaatacatgtgcagtgctaatagaaaatattggagtaagggtgtactaaggaagttctcaatctttccccttcactatcttctgtaatgtaacttcaataaatgtgattctcatcttggcccaaaaaaaaaaaaaaaaaa

SEQ ID NO: 235286 - DNA, 545 bp, Homo Sapiens
gttttctgttcctgtcttagtttgctgaggataatggcctctagctccatctgtgttcctgcaaaagacatgatctcgctgttttttatggttgcacatcttttgttctaacatttggtccttaaacctggttcctgacacagagctcctaaatcccttggaattttctgggtgatagaagcgtcctttgttctcatgaggtgactcttggtgggctccttatttggggactggtcaccaaaaagacctatggttggaagcgttgtgctgtcagccccattccccatcctctggcgtggggagtagagctggagctcaatcatgcctatgtgataaagcctccagaaaactccttaaaagacaggacttggagagcttccgggttggcgaacacatccatgttccaggagagtggtgcaccccaactccacaaggacccttccaaacctcaccctgtgtatctcttcaactggcttcatcatttgtgtcctttaaaatatcctttgtaataaatcagcactagtaagaaaaaaaaaaaaaaaaaa

SEQ ID NO: 235287 - DNA, 384 bp, Homo Sapiens
tgtctgtggaaaaattgtctttcatgcaaccagtccctggtgccaaatctgtgggagatcactggcttagaatcttcaaaagagtattgcccccaatgtaaactatggactttgtgtgataatgacatgtcaatgtaagttcatcaactgtaacaaatgtgccattctggagagagatgttgatagtctaggaggctatgcatgtgtggaggcaggggttatatgggaactttctgtacttcctgctcaattttgctgtgaatctgaaactactctaaaaaataaggtctattttcttaaaggtcattttgcctccatagtgggaaagaaaatagcagttgactaatagctgctcttatcctgcctaaaaaaaaaaaaaaaaaa

SEQ ID NO: 235288 - DNA, 543 bp, Homo Sapiens
ccccagaggtcatgctgaaagtacgtctaatagacaggatgcaatggtggtgtcctccagacccaaagccacaacccatcgcaagtcaagaacactttccagaagataaacatgagtgggttcatgtctctctccttcaaagccaggacaaaatccccacttctttgctgccgcgagtcaatttgtgatttattttgtctgcacctgtttgatgccaggtcgacatttcctaaggcaagcccctgtatttgttgtggatttaagtggaggcggccagcacacaccttggatgtaatttaaaaccatttcctgaggaaagatgtgtgatatgctttcctttgtttagcaaatgtttatggttttaactttaaatctcaccgcaaatcacttacacttgaaaacagggctggtctgaaagtaattaccctccctgagtgccaagacctccagaagttgttttcattcccgaatggcaatcactgtactcatgcgctccacgcatcttaaataaactcagttcaaagcaaaaaaaaaaaaaaaaaa

SEQ ID NO: 235289 - DNA, 762 bp, Homo Sapiens
  misc_feature (52)..(52): n is a, c, g, or t
  misc_feature (81)..(81): n is a, c, g, or t
acagagtgacctgaagtttgaaagtgaagctcaagtgagctactcaaagctntggagatatctcactaaccagcattactntgcagaagtgggactaaggctcggaggctgggttgcttggaggccaagccagttccagaacccaggattttgactctgccccatttagctcaatgcagtgccgccttccttctttgactgtggacacttaacttgcctttaaaacttggccacatttattttcatagtttatgacattgacatacctgtgcataactctgtctcagcattttaaggccctggtggtgcacaggaagccgtgactaaaatgataggtacactgttcctaatacgggatataaaagactcaacaccacacctgacaaaagaagctgttgtcttaaagatgcatcttcctttaaagtaaatgaataacaaaggtaggccataaggagcttcttatctactttaagctcttggctggcttttccaggaagtttgaggagataaatcatgactcattttctgcagggtcagtggggaaactggagaggtggctgtccctgttcctgccggtgcctgaagctttcagtgttgttccatcacactctggctccatacctttcctcctgtcctccctccctgttggctggagtctaatgtgacacttcttccaaaacacagaaccgcctacattgtgtaagaagactctcaaaaaccattgattgaaatgctgctgatgccaaaaaaaaaaaaaaaaaa

SEQ ID NO: 235290 - DNA, 711 bp, Homo Sapiens
tgtcatctgtgcaggcaggtagcgggctgccgggtgcagcaggcagcgtgactgatgtgaaggccgcccaatcctcacgtgctaagacccgagtatcgtgtttaattgcagtgtaggcacgtcgccattcaaactcagttctggggtggttttgcataaagttttgccaacgtgttcttttttctgtatgtattattgcctttttataaaaggtgttgaagtattgtctcagtgataaaaagagagagatgttaatggttgttgtatatttcaccgtatccaattgtaagtatttgcagggtacagcagagccttagcttgcaagagcgtttgtgcaggaggtgtccctcaacacccaggagctgaagggattggaaaggtttggattctttgtaaatgtcctgcttttctttctctctgtgtgtatctatttacatgccttagcacacgccctcccatcctgatccctttgccctgtcgccggaacaaccagaatgctggtgcgctgccggcacagtacaagttgatgaaaccctaatcagttatcttgtgtgacaggggaagaagagaaactccatagtattccttgtagaatatacatacctgtaggatgctgtgtaatgggaaaccatagaattgggcttttgtcatttcaaagttggagaaatgtttgaataaaatgtataaaacatgaaaaaaaaaaaaaaaaaa

SEQ ID NO: 235291 - DNA, 749 bp, Homo Sapiens
gaaagtcacttccaagttctccggatattcacaaaactgccttccatggaggtcccctcctctcctagcttcccgcctctgcccctgtgaacacccatctgcagtatcccctgctcctgcccctcctactgcaggtctgggctgccaagcttcttcccccctgacaaacgcccacctgacctgaggccccagcttccctctgccctaggacttaccaagctgtagggccagggctgctgcctgccagcctggggtccctggaggacaggtcacatctgatccctttggggtgcgggggtggggtccagcccagagcaggcactgagtgaatgccccctggctgcggagctgagccccgccctgccatgaggttttcctccccaggcaggcaggaggccgcggggagcacgtggaaagttggctgctgcctggggaagcttctcctccccaaggcggccatggggcagcctgcagaggacagtggacgtggagctgcggggtgtgaggactgagccggcttccccttcccacgcagctctgggatgcagcagccgctcgcatggaagtgccgcccagaggcatgcaggctgctgggcaccaccccctcatccagggaacgagtgtgtctcaaggggcatttgtgagctttgctgtaaatggattcccagtgttgcttgtactgtatgtttctctactgtatggaaaataaagtttacaagcacacggttctcaaaaaaaaaaaaaaaaaa

SEQ ID NO: 235292 - DNA, 718 bp, Homo Sapiens
ctgttctcgcgggtgtacagcaagtactcagtgactgtgtggtggggggagctggggcccgggcattaatagatgatccacagagctgtcattctaagtctcagtgcagagccatagggttcccagcagagaatggtcactgaggtcagggtcctccaccacaggaggggccttgacagatgtagaccacttctgactgggacccactaacttctcactgggagcagagttaatcaagtcacagagatgggtaagaaggcaaggggccacttctcatgtggtgagcggtacaggtgagcagagcacagggctccagcagccggatagggaagggggccccagcccaccctacagctctactccctccatcctgctgcagaccccccattcacacagtgagtcagtaacaggaaggagcccttggactgcggcaatgccattagcgaccccatgggggaaaggggaagtggggagggaaaggaagaggcgaggcatcctagctccctcaggccggaaggctgcaacagctgcagccagcctcccactctgccctcaccccgtcccggccccaccactccactcactcagaggtcggtggccaggagcctggccaatcagaagcaccaagggcatcttgagacctctccccagatctactgaataagaatgtctaagatttctagccattacaactacaaagaaaaaaaaaaaaaaaaaa

SEQ ID NO: 235293 - DNA, 668 bp, Homo Sapiens
tcaactcccacattactgagtcaaacagtcttcttacataacaatgcaaccaaatatatgttgaattaaagacccatttataattctgctttaaatacatctgcttgctaagaacagatttcagtgctccaagcttcaaatatggagatttgtaagagggaattcaatattattctaatttctctcttacagagtacaaataaaaggtgtatacaaactccgaacatatccagtattccaattcctttgtcaatcagaagagtaaaataattaacaaaagactgttgttatggtttgcattgtaaccgatacgcagagtctgaccgttgggcaacaagtttttctatcctgatgcgcaacacagtctctagagactaatccaggaagactttagcctcctttccatattctcacccccgaatcaagatttacagaagcccacgaagaatttacagcctgcttgagatcatcttgcctataaactgagttattgctttgtcctaaaaattagtcggttttttttttttctatgaggcttttcagaaatttacaggatgcccagactttacatgtgtaccaaaaaaaaaaaaaaagataaaaaataaaggtgcaaagaaagtttagtattttggaatggtgctataaagttgaaaaaaaaaaaaaaaaaa

SEQ ID NO: 235294 - DNA, 638 bp, Homo Sapiens
tgacaacgagtacaccacggaactcgaactctcgcctttcagtaccatacgccgtgaaatgtccacttttgcttctgtcggaactcattgctgaaggacagtacttggttgggtcagatttatttgtttgattttcatatcccgtgaaagtttttaattcatatttttccttatagggaaaaatgcaaaaaagaaacaataaagaaagaaatattaactactgtagaactgattttacaaattaatatttgtgctttgaaaaaaagtttctatttagttatttaagaagaatgagaaggccaatagttttagattattttatctggtatggtgctaatattttatttgaaaaaagttactgcaacttaacttaaaattgctaacgttttttcttcttttaaaaatacaattattgtatattgattatagcaatgtgattttgtaggttattttatatttgagttgtgattgaaagtatgttgtatatggtattgtgagatgatttgtacttggaagcattcacaaagtagcaccaaataaattacactttattctttaatgtcattgtcaatctacttttaaccaatattcaataaatcttctaattgccttaaagatccaaaaaaaaaaaaaaaaaa

SEQ ID NO: 235295 - DNA, 710 bp, Homo Sapiens
  misc_feature (74)..(74): n is a, c, g, or t
  misc_feature (119)..(119): n is a, c, g, or t
  misc_feature (189)..(189): n is a, c, g, or t
cagtgggtggtggtagtaaaatagctgaaacaatttttccactttgtcattgaacatcattgtatatttacatntgaatcttagactttaagtaatctgaacttataaattacatgttntaaaaaaattttctagatggtaaacctatgctacgccagggagatacaggagactggattggaacatttntgggtcataaaggtgctgtttggggtgcaacactgaataaggatgccaccaaagcagctacagcagctgcagatttcacagcgtaagtgtagccaagatggctaactttggtgttctctgtagcttgtgtcctgaaataatcaaaaacttcagtgtcagatattcataaaattctgactcactggctgccatacagaacgcatgtttgatcccaccaaaattccatcgtggtccatcgtggtcctgtgtgcttctttgtcttcagtggttctcaaaattttcagaggcctaaatgacttattccgtatattttgattgagactcaggaatctgcattaacaaacgcaccagataatgaatgttgatctcctttacgaatgctgctctgtgtgtactccttagtgatatcctacattgatggccctaggtttttatttcaatcccggtttttgttaactggctttaggcatcattaaaactcattgtgtcaaaaacaaacaaacaaaaaaaaaaaaaaaaaa

SEQ ID NO: 235296 - DNA, 515 bp, Homo Sapiens
ggcacgagggcgtttctgctcccgagttgggactgtggaatggtgtgggtgctgtggtctgctccatcgctggctcctccctgggtgggaccttgctggccaagcactggaaactgctgcctctgttgaggtcggtgctgcgcttccgcctcgggggcctagcctgtcagactgccttggtcttccacctggacaccctgggggccagcatggacgctggcacaatcttgagagggtcagccttgctgagcctatgtctgcagcacttcttgggaggcctggtcaccacagtcaccttcactgggatgatgcgctgcagccagctggggaagctgctgctgggcactctggccggaggcctggctgatgggttggggccacatccctgcttcttgctcctgctcatcctctctgcctttcccgttctgtacctggacctagcacccagcacctttctctgagctgagtggctggagtggtcaataaagccacatgtgcctgtgaaaaaaaaaaaa

SEQ ID NO: 235297 - DNA, 617 bp, Homo Sapiens
  misc_feature (128)..(128): n is a, c, g, or t
agcagtcataaaagtcctttttcctctaaacccacctcctctttgcctcacactgcagtatccactctgtcgccagcagcgaggcattatagcaggaggcttctgaattggccagaacagcagctccncaggtggggtgtctgagaacctcatttcctcattacatccctccctggtcagccatatgtgttcagcagccaaatggcaaaattcacccccagaactgtgattgtcttccctaatctggaaggcccacaagtgtggagaagcactggagaccctccagaagcagtagtgctagcagtcaggggctactctccctgccgggccccgtgcaagggcctggccaccctatcccaggtatgtgacacttggctggctgttctttattgtcctgctagtacctgttgtaaagcttcttttattaaagaagagcaggagattgaagtgtcataaattgaagagattcacaccaacacggcacatgtatacatatgtaacaaacctgcacgttgtgcacatgtaccctagaacttaaagtataataacaaaatatgtattaaaaaaataaataaataaattgaagagattgaatggtgaaaaaaaaaaaaaaaaaa

SEQ ID NO: 235298 - DNA, 650 bp, Homo Sapiens
tgtgcccccacccttgcctggttcctggtggctcagggcaaggagtggccctgggcgcccgtgtcggtcctgtttccgctgcccttatctcaaagtccgtggctgtttccccttcactgactcagctagacccgtaagcccacccttcccacagggaacaggctgctcccacctgggtcccgctgtggccacggtgggcagcccaaaagatcaggggtggaggggcttccaggctgtactcctgccccgtgggccccgttctagaggtgcccttggcaggaccgtgcaggcagctcccctctgtggggcagtatctggtcctgtgccccagctgccaaaggagagtgggggccatgccccgcagtcagtgttggggggctcctgcctacagggagagggatggtggggaaggggtggagctgggggcagggcagcacagggaatatttttgtaactaactaactgctgtggttggagcgaatggaagttgggtgattttaagttattgttgccaaagagatgtaaagtttattgttgcttcgcagggggatttgttttgtgttttgtttgaggcttagaacgctggtgcaatgttttcttgttccttgttttttaagagaaatgaagctaagaaaaaaaaaaaaaaaaaa

SEQ ID NO: 235299 - DNA, 535 bp, Homo Sapiens
acagaacaaaacaaagatgtgtttagagtgactctggcctgactcttgtccatcagcccctagtagcctatcttcagcctttgggaagtcttaacttcccaggttaaactagaatattctggaactgagctgtccaaatttcatcttaaagtggatcatttgactctgaaacacgattctcatggcagaaaaagccctggtgtttccttggagctggggataaaggccagtgagccagcctgtgatgagagctgcccctggcactatctgagtggaaagctcattgggacagccatgcagctatcagagccgactgaagccctgtcccttacccctcaggcacctgatgcttaacttgcctcctgggaaataatgatctagcatttacttggaacaatgattaatcatgttctttaataattgctgacatttgtattttaagctgtataccaatgttcgtatttgacattgattttctaaccattagagatatttaattaaaacttggaaatgaaagaaacaaaaaaaaaaaaaa

SEQ ID NO: 235300 - DNA, 624 bp, Homo Sapiens
agaattcggcacgaggggcaaaggcacacagtgtgaaaagctggtggaaaaatatggatttacacatctctcaactggcgagctcctgcgtgaggaactggcatcagaatctgaaagaagcaaattgatcagagacattatggaacgtggagacctggtgccctcaggcatcgttttggagctcctgaaggaggccatggtggccagcctcggggacaccaggggcttcctgattgacggctatcctcgggaggtgaagcaaggggaagagttcggacgcaggattggagacccacagttggtgatctgtatggactgctcggcagacaccatgaccaaccgccttctccaaaggagccggagcagcctgcctgtggacgacaccaccaagaccatcgccaagcgcctagaagcctactaccgagcgtccatccccgtgatcgcctactacgagacaaaaacacagctacacaagataaatgcagagggaacaccagaggacgtttttcttcaactctgcacagctattgactctattattttctgaaggcaaaaatgcatgtttgttagaatggaaacagaaaaacattaaaaagttcattccttaaaaaaaaaaaaaaaaaa

SEQ ID NO: 235301 - DNA, 600 bp, Homo Sapiens
atcagtcaagaaggagacaaagtggtcatcaggactctcagcacattcaagaacacggagattagtttccagctgggagaagagtttgatgaaaccactgcagatgatagaaactgtaagtctgttgttagcctggatggagacaaacttgttcacatacagaaatgggatggcaaagaaacaaattttgtaagagaaattaaggatggcaaaatggttatgacccttacttttggtgatgtggttgctgttcgccactatgagaaggcataaaaatgttcctggtcggggcttggaagagctcttcagtttttctgtttcctcaagtctcagtgctatcctattacaacatggctgatcattaattagaaggttatccttggtgtggaggtggaaaatggtgatttaaaaacttgttactccaagcaacttgcccaattttaatctgaaaatttatcatgttttataatttgaattaaagttttgtccccccccccttttttttataaacaagtgaatacattttataatttcttttggaatgtaaatcaaatttgaataaaaatcttacacgtgaaatttaaaaaaaaaaaaaaaaaa

SEQ ID NO: 235302 - DNA, 634 bp, Homo Sapiens
caagattactttctatgaagacaaaaattttcaaggccgtcgctatgactgtgattgcgactgtgcagatttccacacatacctaagtcgctgcaactccattaaagtggaaggaggcacctgggctgtttatgaaaggcccaactttgctgggtacatgtacatcttaccacagggagagtaccctgaataccagcgttggatgggcctcaacgaccgcctcagctcctgcagagctgttcatctgcctagtggaggccagtataagattcagatctttgagaaaggggattttagtggtcagatgtatgaaaccaccgaagattgcccttccatcatggagcaatttcacatgcgagagatccactcctgtaaggtgctggagggtgtctggattttctatgagctacccaactaccgtggcaggcagtacctcctggacaagaaggagtaccggaagcccatcgattggggtgcagcctccccagctgtccagtctttccgccgcattgtggagtaatgacatgaatggggccatattcttcctggggcccaaatgctggctggccttgtggtccaaataggcatcatcaataaaacagttggcatgcatcccaaaaaaaaaaaaaaaaaa

SEQ ID NO: 235303 - DNA, 539 bp, Homo Sapiens
  misc_feature (49)..(49): n is a, c, g, or t
gctggaggacgaccctgcggaggcccagctgttgttttcacggctccgngaccaggcggatcctcagccaagagcttcccaggagagccctcatcttcaacccctagtggcgaccagagccagcccgggcaggaggggaaggaaggcggccgcggccccggggaagccatcctggcagcttggccactggcccggctcctgtctgaccaggaaaggcatcaaagccggactcggatggaggctggaaaaccccgagacttctgctggactcgacccagccacacaccaggctgtgctcaaggccacggaatgagccttgatcctggccccagacggagcccagaccttgctggtcacaggctgagccctgctggcaatatgatgtactagatcccttaaaaggccttccagcaacaaccaacttctggatgaattactatgagcgtacatttttaatagactgttgtgtttccaagaaagtaaatatctccgaggctcccccaaaattaaacagcaaaaataaataagaaaaaaaaaaa

SEQ ID NO: 235304 - DNA, 606 bp, Homo Sapiens
aaccagtgataaacagaaaatcctaaaaccagtcagaggacaagggcatgttctgttgggaggcacaaagctgatgaggatggctgactcctcaggagcagcatgggtgagaggcagtggaatgtactaaggagaaaactgccaaattcacattctgtacctgacaaaatctttccgaagcgatggtgacataaagacattttcatacacacagaaactaagagtttcatccccagcagacctgcactacaagaaatgttaaatgatgtgcttcagggaaaagaaaaatgaagagcatgtgcaccatccaggattttcctcgttatttaaatccctttagcccatctcccatttgccccaaggaatgagtgctggcagtgagctgcactttttttttctctaaacgggaaatgggttaaaagatgagtggcttggccgggtgcggtggctcatgtctctaatcccagcactttgggaggctgaggccagaggatcacttgacttgagcccaggaactggggggtcatgctgggaaacatggcaagaccgcatctctattaaaaataaataaaagttaactgactgtttaaaaaaaaaaaaaaaaaa

SEQ ID NO: 235305 - DNA, 594 bp, Homo Sapiens
ttctatggctctctttttaatatatatatatatatatatatatatatatatatatatatatatatatctatctggtagatcacatgtagatgtacagtgtgtatattaagcagaatttcaaccaactttacaactaagaccagcctagcagggcattcatctttgatgttcttccttttcacatttcagaatcggcaatgcctggcccactcctgagagctctagttttctagttttccatttccagattgcgccagcattacagtaactaactctttctaaccaaccgtgatgccacgtaacttaccctatggacaaaagcaggaatgactaacacatcctaggagggaaagtccagtgtacctgtcatcacggacgcactgtggtcacagactggaatacgaaatactacagccctgctcccaggtgtgcatcttactggatgaggttgctgtgattgagatagttaaatacatgctaatttaaaaatgcagatgttttacatttgatttctaccaagagttgaaatgttgagagatgattaaaaataataataataaagtgtcttccattgttaaaaaaaaaaaaaaaaaa

SEQ ID NO: 235306 - DNA, 589 bp, Homo Sapiens
  misc_feature (19)..(19): n is a, c, g, or t
  misc_feature (92)..(92): n is a, c, g, or t
agactcccaccgttacccncaggagatcctggactgcctgactcccctccccagactggcttgggagcctgggccccatggtagatgcaagngaaacctcaaggccagctcaatgcctggtatctgcccccagtccaggccaggcggaggggaggggctgtccggctgcctctcccttctcggtggcttcccctgcgccctgggagtttgatctcttaagggaacttgcctctccctcttgttttgctcctggccctgcccctaggtctgggtgggcagtggccccatagcctctggaactgtgcgttctgcatagaattcaaacgagattcacccagcgcgaggaggaagaaacagcagttcctgggaaccacaattatggggggtggggggtgtgatctgagtgcctcaagatggttttcaaaaaattttttttaaagaaaataattgtatacgtgtcaacacagctggctggatgattgggactttaaaacgaccctctttcaggtggattcagagacctgtcctgtatataacagcactgtagcaataaacgtgacattttataacgataaaaaaaaaaaaaaaa

SEQ ID NO: 235307 - DNA, 664 bp, Homo Sapiens
gctattagcacagataatgggcatgtactttgtctcctctgtgctgctgatccgaatgagtatgcctttagaataccgcaccataatcactgaagtccttggagaactgcagttcaacttctatcaccgttggtttgatgtgatcttcctggtcagcgctctctctagcatactcttcctctatttggctcacaaacaggcaccagagaagcaaatggcaccttgaacttaagcctactacagactgttagaggccagtggtttcaaaatttagatataagaggggggaaaaatggaaccagggcctgacattttataaacaaacaaaatgctatggtagcatttttcaccttcatagcatactccttccccctcaggtgatactatgaccatgagtagcatcagccagaacatgagagggagaactaactcaagacaatactcagcagagagcatcccgtgtggatatgaggctggtgtagaggcggagaggagccaagaaactaaaggtgaaaaatacactggaactctggggcaagagatgtctatggtagctgagccaaacacgtaggatttccgttttaaggttcacatggaaaaggttatagctttgccttgagattgactcattaaaatcagagactgtaaaaaaaaaaaaaaaaaa

SEQ ID NO: 235308 - DNA, 652 bp, Homo Sapiens
cagagctgttgtatcataaagcttttcagggggaaaaaaataaaaaatgttcatcacaaatctattgtgcttgttataatctaacaaagtccactaaatgtagtaacgaaatgtctccccaataaaaaattaagattccctttggagcttaggcatgtggccttataaagagcttaactggactgctacctgttggtatgttcagggcttcattaggttcatgcttaagtataatgcctgtgcctcacagaacaatttaaatttagcttaacaccccacccatacttaaagagcaaataaattatatttcgaaaagattttaaaataatctcaatataaaaaccaacagtgggaactgagtctggaataaatgtgtgcagaatcctaattcttttctgagctccactcagtgaggatatgcaccctctactgtccagcctgtggtttgcagtaagctcactcttctgttcagaatgaccacaggagggcctttacctaggaatagcaggaaaagctaagtaagtactcaaacttccctcccagtaagcatgaattgcttcagatgtaaagcttacatgtgatgagtaatactataatatcatacattaatatatcctaataaactttaattttcaaacaaaaaaaaaaaaaa

SEQ ID NO: 235309 - DNA, 651 bp, Homo Sapiens
  misc_feature (41)..(41): n is a, c, g, or t
cccagatccaggaatatgtggactataacgggggcgctggngtccagcacatcgctctcaagaccgaagacatcatcacagcgattcgccacttgagagagagaggcctggagttcttatctgttccctccacgtactacaaacaactgcgggagaagctgaagacggccaagatcaaggtgaaggagaacattgatgccctggaggagctgaaaatcctggtggactacgacgagaaaggctacctcctgcagatcttcaccaaaccggtgcaggaccggcccacgctcttcctggaagtcatccagcgccacaaccaccagggttttggagccggcaacttcaactcactgttcaaggctttcgaggaggagcagaacctgcggggtaacctcaccaacatggagaccaatggggtggtgcccggcatgtaagccccgcccaccccacggaggccacagccacacagccacgccccctgattctggaactcgcccaacttccctactggctgctccccttgggtcccgcccaccagcggactcggcccccaaggctccgcccacactgaccacgcccctcggcggggccgccctctgctccagccctcccgattaaagcgtgccccggtccaaaaaaaaaaaaaaaaaa

SEQ ID NO: 235310 - DNA, 540 bp, Homo Sapiens
gtgcatatatattacatcttggtgaattttcaaactttttaaatttcaacatgaagatgaaattataggatgtctgggatttcctttgaatccgtggggctgggagtaactataaatgaaacaagattggccgggaatttgaggctgcaaggataggtacacacaggggagtgaagcagggcttggagcagatggtaaagattgttggcttttccagccatggggctctcttgccacttggcagtagtggcatgaagccgccaccagggggccacgcaccagtgcatgtggctgtgttccaaactttttggacaataaaatctgaatttcacatacttttcttatgtcattagatattacccttttacatcttttcactatttaaaaatgtaaaaatcattcttaacatttgggctgtgcaaaaacagctggtgggcccaattttggcctgtatttcacttgccaacccgatttatacttttgtatctatttgacattttccattaaaagttatataaccctaaaaaaaaaaaaaaaaaa

SEQ ID NO: 235311 - DNA, 676 bp, Homo Sapiens
ttcagggctcatcatcccccagggtcctccctgggctccagggaactccaagagactcccactgtgactccaaagatcatgatagcagctctggactatgatcctggggatgggcaaatggggggccaggggaagggcaggctggcgctgagggcaggagacgtggtcatggtttacgggcccatggatgaccaaggattctattatggagagttgggcggccacaggggcctggttcctgcccacctgctggatcacatgtccctccatggacactgagcaagcatccttgcccaggtagtggcctctggctgctcacaccctgccagaggagaagcaagcgttcagaccctcacaccagcacccctcctcaccaccataagtagcatgtgctccaagtgccactgtgttaaactgatggtagtccttaagtgtcccctaggctctgaaagtagcaggacttaagcctgagttatttgcaaaagcaaacacaacaagccaacccctgagagtctgagaagccatttcaaagttgctgataactatggcaggtatacggagaagcgcctttttctgtggccaatgtgtgttttctctgggaggttaaggttatctgtccattgccttgtacgaaagtctcaagaaaagtctacatcttaaaaaagaaaaaaaaaaa

SEQ ID NO: 235312 - DNA, 544 bp, Homo Sapiens
ggcacgaggagcattaagtggcccaattaaccattaccgaaatatcttcagctgcctgcctctcaaacatcacatggtgaccactccaacactactactgtggggagagaatgacgcattcatggaggttgagatggctgaagtcacaaagatttatgttaaaaactatttcaggctaactattttgtcagaagccagtcattggcttcagcaagaccaacctgacatagtgaacaaattgatatggacatttctaaaagaagaaacaagaaaaaaagattgacttttctttatcttctatgaagggtctgtaatgaaatctctaaataatttttaaaaattgttcatcaacttctttatgttttattagaaaaaaactgttttaatgtgctttatcataaataaatatcctgacaaatggtattgaaaaaaatctgagatcatgtgaacatataatacaatgttgattttcttctggtgtattttgcacagacaagcatctgccttaaaatatatacacttgtccaaaaaaaaaaaaaaaaaa

SEQ ID NO: 235313 - DNA, 603 bp, Homo Sapiens
  misc_feature (54)..(54): n is a, c, g, or t
cgactggagagatgaagatcacctacggccagtgcggggatgtactgcgggccntgggccagaaccctaccaatgccgaggtgctgcgtgtgctgggcaagcccaagcctgaagagatgaatgtcaagatgctggactttgagacgttcttgcccatcctgcagcacatttcccgcaacaaggagcagggcacctatgaggacttcgtggagggcctgcgtgtctttgacaaggagagcaatggcacggtcatgggtgctgagcttcggcacgtccttgccaccctgggagagaagatgactgaggctgaagtggagcagctgttagctgggcaagaggatgccaatggctgcatcaattatgaagcctttgtcaagcacatcatgtcagggtgaagcagagtcttccaggtgcctggcccttggctttagccataccagggtgagttaaagagaggccccggctgggtgagctgagatggagtcctcgacttatcaccacaccactgccccaaggaccttacaggccctccctgttaataaacagctctaacacggccaggctgggctctgggattctgaaaacaaaaaaaaaaaaaaaaaa

SEQ ID NO: 235314 - DNA, 627 bp, Homo Sapiens
  misc_feature (78)..(78): n is a, c, g, or t
ggctcatcttagtcttccctcatcccccctgcctttccttcacagtcagcctgcatggtggtctgaggccttcccccntacagcctctcccctttatctttcacggtaatcacccctcattactcgtacttctaactccatcttgaaagctgcttcctggaagatccaaacggacacaaggagggactgaaggattagaatgagggaagtaacccatgcactgcttatttgagatggggaaccgaaggactttggcagttcctacacagagacagatggcagagatgacaaggtttctcagagaatgcgtgagtaactggaatggcttttcctgatgacccagacagcctgctcaagagcacactgttgcagctgccctccttggatggaactatggaatgatttttattcttctacttcccaggtgaatgggaaaccaaggacacagtcagcatttaacaaaaaggaatctgcatctcagtcagaactgtattgcatttgcttctctctggattaccttgaagttactccccttccctcaataataatggcattatgaaaaaatttggaattgatcaaatgaagtaaagagtaaacagaggaaagactaaaaaaaaaaaaaaaaaa

SEQ ID NO: 235315 - DNA, 637 bp, Homo Sapiens
  misc_feature (33)..(33): n is a, c, g, or t
  misc_feature (76)..(76): n is a, c, g, or t
catcatctccggcgggcagggctaccgcaactntggcagcgctctgggcagcagtgggaggcaggccccgtgtggngagacggacagcaccctcctcatctggcaggtgcccttgatgctatagcgcctcccctctcccctcagagggcacagctgcaggcctgaccaaggccacgcccggctctcgtgctctaggacctgcacgggacttgtggatgggcctggactctccagaaactacttgggccagagcaaaggaaaacctcttgttttaaaaaaatttttttcagagtgttttggggaggagttttagggcttggggagagggaggacacatctggaggaaatggccttctttttaaaagcaaaaaacacaaaacctcacaactgcctggcaagcccagtatcacttgtttgggccctagcgggactccaaggcagccacacgcccctcctggaagggtgtgtgcgtgtgagtgtgtgcgagtgtgtgggctggtgtgtgaatatctataaataagtatatatggtgtatattatatgtgtataaataaagtctgtacatattggagctctgggagatgctggaataaaagacaagagttacatctggacttggaaaaaaaaaaaaaaaaaa

SEQ ID NO: 235316 - DNA, 431 bp, Homo Sapiens
ggcacgagggtaatcattaccttaggggctgaaggatgtgtggtgctgtcacagacagaacctgagccaaagcacattcccacagagaaagtcaaggctgtggataccacgggtgctggtgacagctttgtgggagctctggccttctacctggcttactatccaaatctgtccttggaagacatgctcaacagatccaatttcattgcagcagtcagtgtccaggctgcaggaacacagtcatcttacccttacaaaaaagaccttccgcttactctgttttgattgctattagtcccaaaataaatatacctgggaataaaatgtacttgggggtggctgctcctggctaatgcttattagaaaatgtcctcgtcccctttctttgcaaatattagttcttttacgaagtcaaaaaaaaaaaaaaaaaa

SEQ ID NO: 235317 - DNA, 540 bp, Homo Sapiens
agaattcggcacgagggagatgctaaagaattagacagcaaatcaaaaggcctccagtggataatagatacaacgatagcttatcccaaagctgaacctatagatattcaaacctggatccttggatacaggaaaccaacagtcacacatgtacattacaggatctttccaattaaagatgtacccctggagactgatgaccttaccacttggctctatcagcggtttgttgaaaaagaagacctcttatcacatttttatgaaacaggagcttttccaccttccaagggccataaggaagctgtttccagggagatgaccctcagcaacttgtggatatttctcatacagtcttttgcatttttgtcaggctatatgtggtacaacatcattcagtatttttaccattgcctgttttaggaattgacgtggacttgtcaaggtcaccgtaggagttcagactttctttcataagtgtgcattattttacatgtgcaaatcagaatatatttaaaaaaaaccaaaaaaaaaaaaaaaaaa

SEQ ID NO: 235318 - DNA, 730 bp, Homo Sapiens
catcccccatcccttgttcacacgccctgattcacggtgagacattttgccaccttcttgtgtatattacttggcatgagatgatattgtacttgtaaaggattctagcaattcataataaatatgtaagactaggctttactgtcttatgcttatggacattgtatatttgtattttatgaccaagtagaccaagtcagaaagatctctctcgagcgcaccataaacctgcagagagaagtctcgaaaggctccaccaggtaccaagggcagctgcttttcctgtcttttgtgcatgggcgacccattacagtatgagataagattgagttctgatgcgttaaacggaggtggcagaaatttgtcaagaaggccttatccatttcgattgtgtgacagattgaaatttattgtttacattggggaatgtatctcaaatttttaaatagaagagtaataaacagactttaaagcaaatattaagatttttactcattcaaggcaagtaaatgaatggaattatctgagctctatggcactggttgtttagagtgactgatgaagtgcaactttcaaaaacatttttgatgacatcaccagcctactgcagaagtgcagggcaccagtaaacaccatgtattattgaagatgaatctgtttgtatgtatccttgtcaaatatattctataatgaaataaaatctgaaaagtggaaaaaaaaaaaaaaaaaa

SEQ ID NO: 235319 - DNA, 720 bp, Homo Sapiens
tcataggacatgggggcactctgtaaagtatcagagtaaggttgtgaaaactagaaagttctgttagtacccttcttatagagatatattatgtagaactccaggagggacattaaatcactttaagtataaactgactactcccacagttgagagaagttgtgacctgtacttgtactatggaaggaaggatatcaacgtgtgtatattgatgtttatataagtaactcttgaaggagacttgttctagcgtgccccatggtacctagtgtgtgtctgatgccggttggtgtcaaagatagagggcttcttgaaggaacttgccattccttgctttgaccactgcatgaactgcttctaaattattttattacctaaaaatttaaaatatgccattcattgcacacacccacaaatgcaaatcattcctctctgtagatgctaggatatatataaattattttataaattcttgttttaaatgtcagtgtttctatgattgtaaactattaaattcttttcctattaaagtacagatctaatctaagtattattaagttgatagccctctagtcagttatattgctattgtaaattcttgtttgttgagtaaaatgtttaaatactatatgtatctcatgtacaaagttgacatacattatattcatgtacataaaattaaagagattagattatatactgaaaaaaaaaaaaaaaaaa

SEQ ID NO: 235320 - DNA, 789 bp, Homo Sapiens
  misc_feature (24)..(24): n is a, c, g, or t
atgtcatgacagatcaaaatcatntgatatccctttctccattctaggttttctttttttcagtaactgatttaccttgatcacttttcaacttccatattcttcatatagtaaaaggcaaagtgttgaagatactacggtgtggtagtagttgaaaattattgccgtcattatttacatacttaagacatattagcaagttgatccaaaatgggaggccttatagatgtgcttgggggaaaatgaaggggagaaagtagccatacaggagttcaaagaattccatgcccttcagattagcccaattaccagaaacatcatgaaagatattttaaaaactaattatttactacagtgtatttcacttgtcttgtgtgtctgaacacacagaagctaattagcaagtttttaagaagtatttaaaaatcttactaggattgacattttttctgaattctgtataaatagcttatagtgagaagtactgtgctcaaattttacatttttttcctttgcaaattctgtaatttcactcaacgattaagtctaccaaagaacacactgcatgtaaaagatgtattacaatctcaaagccagtaaaagaaatcttgcttcactgttcacctgctacaagtaagagtttggtgctggtagaaacatttgactctgatgtctattttattctacataagagccatatgtaatgtactgtaacaaaggagcttcttgtccccttggtcttttaattaaaagaaattccaactgacttttaaaaaaaaaaaaaaaaaa

SEQ ID NO: 235321 - DNA, 720 bp, Homo Sapiens
  misc_feature (83)..(83): n is a, c, g, or t
gaccaggtcaccaccgagccaccaacccagaagcccaagaagattgtaaatgccaagaaagatgttgtgaacacaaagatgtntgaggagctcaagagccgtctggacaccctggcccaggaggtggccctgctgaaggagcagcaggccctgcagacggtctgcctgaaggggaccaaggtgcacatgaaatgctttctggccttcacccagacgaagaccttccacgaggccagcgaggactgcatctcgcgcgggggcaccctgagcacccctcagactggctcggagaacgacgccctgtatgagtacctgcgccagagcgtgggcaacgaggccgagatctggctgggcctcaacgacatggcggccgagggcacctgggtggacatgaccggcgcccgcatcgcctacaagaactgggagactgagatcaccgcgcaacccgatggcggcaagaccgagaactgcgcggtcctgtcaggcgcggccaacggcaagtggttcgacaagcgctgccgcgatcagctgccctacatctgccagttcgggatcgtgtagccggcggggctggggccgtggggggcctggaggagggcaggagccgcgggaggccgggaggagggtggggaccttgcagcccccatcctctccgtgcgcttggagcctctttttgcaaataaagttggtgcagcttcgcggaaaaaaaaaaaaaaaaaa

SEQ ID NO: 235322 - DNA, 694 bp, Homo Sapiens
aataaagctttacattagcagcttccataacaccaataacatgaatgaccatctactgagcaattgcagtgcaccaggattatggcttatgagcactttatgtttattatctcacaactcactgagttagatactctccacaacccagtgagcctctcaagcactgtgaaaaatcactttctcttgttgtattcttggagcccctgctaattcattattgaaaaatacctgctgcctgcatttggccttatgttgtcatttacttggtacttcctaagcgtggctactccaatgaagctttagtatatgtactgaaagaagatcctctcatactgccacagccaagagataaggttgtaaatctttattgggagaagccgtcaaggacagttctgtgaaatgaaaggatctctggatcaccacaaagtctggctcagtgactatggctttgcaaacactaaacattcctgtctcaagtcctgtagatggcttgaaatagtatacataagcatgccttataaacatcttcagtctttatcaactctttggagattcagccattcttttttgtactttagggaattaaatcattttataatgtataaatctgagcatggccgatggcagaagaaattttgtcatacgtttttaaagaaataaaaatgtattatgttttaaaaaaaaaaaaaaaaaa

SEQ ID NO: 235323 - DNA, 682 bp, Homo Sapiens
gtagtcactgccgcggcgccttgagtctccgggccgccttgccatggctgcccgtggtgtcatcgctccagttggcgagagtttgcgctacgctgagtacttgcagccctcggccaaacggccagacgccgacgtcgaccagcagagactggtaagaagtttgatagctgtaggactgggtgttgcagctcttgcatttgcaggtcgctacgcatttcggatctggaaacctctagaacaagttatcacagaaactgcaaagaagatttcaactcctagcttttcatcctactataaaggaggatttgaacagaaaatgagtaggcgagaagctggtcttattttaggtgtaagcccatctgctggcaaggctaagattagaacagctcataggagagtcatgattttgaatcacccagataaaggtggatctccttacgtagcagccaaaataaatgaagcaaaagacttgctagaaacaaccaccaaacattgatgcttaaggaccacactgaaggaaaaaaaaagaggggacttcgaaaaaaaaaaaagccctgcaaaatattctaaaacatggtcttcttaattttctatatggattgaccacagtcttatcttccaccattaagctgtataacaataaaatgttaatagtcttgcttttaaaaaaaaaaaaaaaaaa

SEQ ID NO: 235324 - DNA, 618 bp, Homo Sapiens
aggtggtaaactatgggatggtaaatatccgagaggaagctgatgcaacaggatttgtctgcagcagcctctggtaccacctctgagtcaagggttgtgtccagtgatggagagtttatatcgtgcctttaggcagaaaaggggagggaaacctgaacttttcctgcactttctgcttcttaattgccttcagctgaaaatcattttttatgtgaaaaaggcatagtctgagctgacgcctctgctttcctccacctgaagagaacctgcgtgctgctcctttgcttcggacctccgcctctgcccgggagaaagcccaggccagcctgctggacaagcagagaccatgagaaggagagttcaggggtcccaatccaggccatcctagaccagccagctccagctgatccgcacgcagccacttcggctaccttctactggccaaagggagtcccagggctcacccagattcagaggtggggaaactgagtccaccacttgagaagagtagctataaagacatatgagcgagaccagctgagcccagcactgcggccaagtcgaagactttaggagcaataaaagtgcttattgtgtttcaaaaaaaaaaaaaaaaaa

SEQ ID NO: 235325 - DNA, 521 bp, Homo Sapiens
gtaagtagaaacctgctcgtgatatcggtccatttacattttacaaaaggagtaaatcttagtaaaaattttacgaagaaataaattacttttgtaggcccaatatttggtatatttttgagaagctgttaatcttttagctgaataatgaagttagactgaattacgtgtctccctggactgtgacatctattttctcattacagtttatcctggtcagcagggtgtcacacctggaaacctgagtatgatagctgacatttgcttttctccctctgcgatgtcattcctcctccattcctctccttccctgtgttccgttccctctcctttcctctagacaaaacaaaatggggcactttttagggaatgctgagatcattattgtggtttttcatcattcatgccctagtcattaaacatgcaccactggaatgtaaacaatgttatctagtatgtcaattggttataatattttaaataaaaaagaaaaaagtggtttgaaaaaaaaaaaaaaaaaa

SEQ ID NO: 235326 - DNA, 742 bp, Homo Sapiens
gccgggtgcactggcgcgtgaacccctctcggacaccggggggcaggcaccgcgtatcagaggagcagtggcctcacacctggggcccctttccaccctatgcctcaggcacggggtatgtgctgtcagcgtctgctgtgcagctcattctcaaggtggccagccgggcaccccttctcccattagaggatgtctttgtgggggtaagtgcccgacgaggaggcctcgccccaacacagtgtgtcaagctggctggtgccacccactacccgctagaccggtgctgctatgggaaattcctgctgacgtcccacaggctggacccctggaagatgcaggaagcctggaagctggtgggtggctctgacggggaaaggactgcgcccttttgctcctggttccagggagtcctgggcatcctgcggtgtcgagcaatagcctggcttcagagctgagagtgcctggggccacaggaaaggcaggaacaggaccttctctctcccaggcccaacgcaggggccctcactggctgcagctgatctgtttccttataccagatcctcagtctcactaaagacagcgatatgggagacacccaggggcctggcccgccagcccaaaagatggtcatcgggaagagaaaaagaaaaaaatgctgcagttgttctctcaagctagggcagaagaggggtgtcaagctcctcaataaacttgtctccacttcaaaaaaaaaaaaaaaaaa

SEQ ID NO: 235327 - DNA, 793 bp, Homo Sapiens
  misc_feature (44)..(44): n is a, c, g, or t
  misc_feature (49)..(49): n is a, c, g, or t
  misc_feature (190)..(190): n is a, c, g, or t
gaaatagtgacctagcgaaagcaagcacatgtggatgtgaaatntcagntgccaatatgatctgaaaacccagtggatggctgaaggtgttaaatgtgctataatcattaagaatactgtgttctgtgttattgttctttttctttttagtgtgtggagattgtaattgccatctaggcacacaaacatntaaaaggatttggactgcatttaattgtaccattcagaatggactgtttgtacgaagcatgtataatgcagttatcttctttctttcgtcgcagccagtcttttttgcttctcctacaaaacgtaacttgcaatttgccagtttattattgttggatacaaagttcttcattgataagagtcctataaataagataaatacgaagataaagctttattctttagtgttaaaatacagtatatctaataactagcctcattagtagagcagtatattaaaacaatgttttatgtaaaaagtgtttatcttcagcaccaaatacatgataaatgtatcaatcactatttataaacagagctttcaaacactcctcagaatattcttctaagtattttgatgaagtaactttgtaattatttgaacattgttttaatcattaggaaacactgattaactgcaagtcttcatgattctgtcatattaagaaacacctgtaggtttgcttcaaataaaggcatatataccaaggacttacagacaaaattaagaatgtcaatttaagttaataaaaatctccccaatatgaaaaaaaaaaaaaaaaaa

SEQ ID NO: 235328 - DNA, 761 bp, Homo Sapiens
  misc_feature (46)..(46): n is a, c, g, or t
ataaatagcaaaaggtataatgtgatcttctcaacgtgattatttnttaagaataacaaacaaaaataatgttacatagtgttaatatttttatatcctattcagaaagctgtgcatacaatttatttaaaggataccagcccaaagggttactaagatttcatactgttcccattctcaaccgtctggcgattataactactttagatgttccaaataagtcagtgtgagctaccccacaaaaagtactcttttctcaaacctgtctattaaaaataaataaaagctggtggcagctttactcctgctgggggggcagtctccattgtactgttgtctttgaaattgtgatttcacaggactatttactaatcgactgttgttactatggcaattaatagctcagaaaattgcagatgctacatttcaacaccaagctctgggcaaaaggaaatgcacataccaactgaagtgcatggttgcttccgatttgcagcagcctgctttatcttacagatcacctctttagcatgcatgcccttctgtatcttcttcgcttgcttcaataaactaatttgcctcaactacgtttcattttcctcataaaaaaaataaaaatctttgctagccttaataataatggaagggtaacatcatcaggagtctactatggacttttgaagacaattatctcattattaccaagttccttttgtattaaaacatacttaaatatgccaggtaaaaaaacaaaaaaaaaa

SEQ ID NO: 235329 - DNA, 654 bp, Homo Sapiens
atgggaaagccctggccaccacaccggcctgtgccccttgaagcccaccaaagcggccctcacttgtggtcagtatatcagttatgacgcccattgcccagcttcagtccatccatgttagatggacagaaattatggccagttgaaaataccagctttggttggacaactgtggacacacaaggtgaagaggactccgaagtcctttgtcagggctgacaacctcgtaagcccttgcttagaaatacagtattagtctaattgagtaattagtgcaatttcctgcttacttttcattctcatgactgaactgtgattaggaagttgtgattatagattctggttttggccggaattttgaatcagcattaattgaattgctaaatgactgacattcattccatttaattgggggaacaaaaggcctcaggtaaggatgaggaactctgaaatcagatggaaaagagcggtgttaatttttatggtctgtgatcgtagctgtgataagggactgaggaataaattgtgctctttgtcatggcaaccagcttctgaaaagcccactgaaaattgcctgtcctgctggtaactgctacggggtaagatttgccttaacagtactattttctcgcccccaaaaaaaaaaaaaaaaaa

SEQ ID NO: 235330 - DNA, 715 bp, Homo Sapiens
tcactttactgaagcatgtgcaaggcagtttacaaacaagactaatatttttacaaaatgtcattaaagaagcatcaaggtttaaaaaacgaatgctaatagaacaactggagaacttcttggatgaaattcatcgaagagccaatcagatcaaccatattaatagcaattaaaagaaaatagaatgtggccacttatttcactatcttcttcaaatacaaagtaaatacaagactgttgtgatcttgcattcattttctgacatgcattgttggctatttgaaatactaaaagcaaatctacagatcctttttccatcattttacagtgaccttttcttcattttggtttatttttgtaatgtgaaaagtatcactctaaaaaacatttttaatttaacaaactaaaaatattcctccaaatctcttgcttgtcattgactcttgcgtgtcaatttccctcaggttctattttcttaaaccaacctttaaaattgtcacctctgttaaggttgaactttgccaaaaaaaaaagaagttactttgtaatttttggggaaaaaagcacatacattaaaactaggtaatgttttgtatatacagttattttggatatattattgtaagttgtacaaatgtattttgaagaatatttaagaaaagcacttttgttattccatcaataaatgctctattttaaaaaaaaaaaaaaaaaa

SEQ ID NO: 235331 - DNA, 741 bp, Homo Sapiens
  misc_feature (113)..(113): n is a, c, g, or t
  misc_feature (140)..(140): n is a, c, g, or t
tcaacaaagagggatgatcacccttgcccagcctccccacaaagcctgaccctgggcaggtgagtgacgggtgtgtcctcgtagagtcttttgctgcctggacacctttcttntgggagctcaaagcaagtgagctcacntacctgccaccgcccaggaccagtctgcccactgcctaaatgatgcccggccagcaggacctggcctgcagatcccagtgagtcatgagcctcagccccctccagcccactggggctctcacctccacatgtgggtagaagctttcctgccccctcttcctccagtagccctcagtgtcgaaggtgagcttgtaggtgcctgccttcatctggtccaggacagtgaccatctgggtctgtgtagctggggagaggatgaggctgcagagatggggaccagaagccccccaccccagctttcctgggtctgcatcccagtgggcctcagacactgccctgccacctgtcagacttgggtgagcagacacagtgaggctgttaggtcctgcagttccagagcagtctagggacaccactgccctgtctttaggaaatcacaacacagagaagcaaaaagggaaaaagtctcccacaatttatcccatgagcaataaccactttatagctggcatatatttttccagattttctctatgcataagtatatttgtttaaaaacttataaagtggattatactatttgaaaaaaaaaaaaaaaaaa

SEQ ID NO: 235332 - DNA, 615 bp, Homo Sapiens
ggcacgaggggaaccccagttgacagtttaaaagcactttcacacctctcctcgcttcctcaaaaagatcacagagggaggagctctgagaacagtctccttcaacagctcggccaagcagaactgctgtacctctgaccacttgtgttaggaaaactatcggctccctgtataataaatcaagccaggtcctccaagtggtaattcatgaaaaatatccccactaccaccaccaaggggaagaaaggactcagaagagaggacttgaggccatgaggtctggcctcttccctccccatctggagactctttctcccttgctggctttgggcccaagtttgatgtttatgaggatgattgctggtttcccttacacatagcagagctcactcagttctcacagtagccaaatgaagcagttatgtgttgtccagttttccagaccaggactgaaatccagagagggtcaggaatttggccccatgatgaagccaaatctgaacccatgtcctcacttcaaggttatcaatcttggattgtgatgctattggtacttgagaataccccttatctgagtataaagaatccttgagttttaaaaaaaaaaaaaaaaaa

SEQ ID NO: 235333 - DNA, 689 bp, Homo Sapiens
  misc_feature (106)..(106): n is a, c, g, or t
  misc_feature (608)..(608): n is a, c, g, or t
gcaagttgcaatttagaagatgccatacgtcgtgtgacagctcatgagcctttcactgggctggcaattgtctgaacacttgggttcagttgaaatatatgtattntggccaaaagccagcagcacttcacaaaaacaaaacacaaacctaagctaacaaaatgactgcattcgtctcttttttaaaggtagagattaaactgtatagacagcatagggatgaaaggaaccaagcgtttctgtgggattgagactggtacgtgtacgatgaacctgctgctttgttttctgagaagaggtttgaagacattttattaacagcttaatttttctcttttactccataggaacttattttaatagtaacattaacaacaagaatactaagactgtttgggaattttaaaaagctactagtgagaaaccaaatgataggttgtagagcctgatgactccaaacaaagccatcacccgcattcttcctccttcttctggtgctacagctccaagggcccttcaccttcatgtctgaaatggaactttggctttttcagtggaagaatatgttgaaggtttcattttgttctagaaaaaaaaaatccctcccnaaagtggggcaaaaagctttatatttatttgattatccaaaatacagatcaaagtttagatctacaaaaaaaaaaaaaaaa

SEQ ID NO: 235334 - DNA, 586 bp, Homo Sapiens
ctgttcatttttcccctttctcccccacattcattaagaaccctactgaaaccctaggtgacaaaaggtgtgccttctgttgccacatttgacccaccacaggactcactggactggacttctatttatattgtattaagtaactgatatatatatatatatatatttttgattgacaccaaaaaattaccttggcacaaatgccagacctgtgaaggtcagaggcccgctgcttctcccaggagggagggaactttttggttgtctgtggcaattcctctgtacagattgtaactttttaaaaatttcccttcaccccgtcacttgaatatatgttcatagtaatttgtaagatacttcttttccttattttggttgcaagacccttccgaacacattcctgtataaagtattttgcactatttaaagaaacccatatggatgaagtcaggatgtgcaatatgatggcgtcacagtgctcatcgttgtacctgtaatgtaactaatcagtttaaatgtactattttaaatatgtaaaataaattttcaccatgagcatgttttaatgaaaaaaaaaaaaaaaaaa

SEQ ID NO: 235335 - DNA, 695 bp, Homo Sapiens
  misc_feature (105)..(105): n is a, c, g, or t
gctgctgctgcgcacctggcccatgctgtcctggcttccatgccgtccaggccctgccagaaaaggaaattggcatgcaattctaaactgcagtgactgggatgngaggggaggggagcagtgttgatgccaaaatacccacggggtctaccagccatggggtttgcttgcttaggagtagttgtttcagaggtgattacaggcctgggtttgactgtgcttaccaatgagtggtttttgagctatgagaaagtggatgggagtgggaggaggagagatgggtgaagacaaaagagttctttatgagcctcgatgttccctggtaaacttttaaaaaggccttctctcatgatctaagtcttggactggtggcatcatgtaactgctaaccttacagtaaaaacccaagaatgggtcaaaaatgtcttcccagtttctccaagctgcttctggaatgcaggtctgtcggctgggtgctctccagcagctgctcctgcctgattcaactgtagcctgtaatgggtaaaagccacatttaggaggtggtctgatcatagaacaccttaggaagaaagtccatgagactttctgactaggaaaccatgtggtttgaacttgaagaaaaatgtagacccatctgggttaattttcctacaatctgactcaactgccaggtgaaaaaaaaaaaaaaaaaa

SEQ ID NO: 235336 - DNA, 538 bp, Homo Sapiens
gccacggggccaaaaggaggagcaggtggaagaaatccaggctcagaccgtcggagtccccacccatgagcacccttctccactgatcactcagaacatggtaggccctagagagacagcagcccgaatcttcccagaaaccctgcaggagattccttcttcccattttatagaagggaggctgaggctcggcacgttgaaatggcttgaccaaggtcccacaggcaaaaaaatggtacagcaagatattgtaacccaatatctggctgcaaaacccagtctctccccaacccacctatcgtcaccgagattgtaaaacttctaaccgggaagaatcaaatacatgcacaacgggttacaggttaacagacagatgggagcggaaagggacattccagcgcttccctgggcgtgtcgcacagggcaactccaaccacaggcgaattttcctgggtgacagttaaactcctttttgcatgaaaaaatacagattcttattaaaacaataatcgattagactataaaaaaaaaaaaaaaa

SEQ ID NO: 235337 - DNA, 637 bp, Homo Sapiens
ccaagtaaaatattttgactgaaatgatcctttgaaatgcatattgatttattatgtattgactttttaaaaattgaggtataattttcacaaaattctccaattttcagtgtcaaattcagtgaattttgaaaacatatatacagttgtctgtctgccacagtgatcatgatacagaacactttctttaccctgaaaacttctcatttttccttttgcagtcaatcccctgctcctatccttggcccctggcaaacactggtttgctttctatcattagttctgctgtttgagaatttcatataaatggaatcatgcaatgtgtaatctattgtgcctggcttctttcacgtagcattttgagaaaagcatttatactatttacagattgttgacaaatatttatccactaagtaaaatgttagactgaaatgattctttgacaagcttgccaatttactgattttgtcaaagaaaaatatgttatttttgaagtttgttcatcctttgagtgtgtgagtatagtatcagaggcttaattttgtatttatggagctattctaacttgttatttaaaaggaaaaaggtattaaacttgaagcaaacttctcatgatctcaaaaaaaaaaaaaaaaaa

SEQ ID NO: 235338 - DNA, 554 bp, Homo Sapiens
  misc_feature (462)..(462): n is a, c, g, or t
cagggttccctctcccgctgctcacctgtgtcagggctaggaggcaggggctgcaggctcagcctgacccaggccggccagcatggcagagaggtcctgcatgaacagcttcacctgggggggcccagcacgaagtcacatcccagccccagagtcactgtccagcccccacccctcaacacgcgggggaggccgaaaggtagggcggggactggagatcccctcattaaaagaacagtgatgatggtggttcccagaggtggtgactgagatcctaaaccgttctgggttttgaaagcctcaggccaaccttcccaactgctgcgtgagcagacaccttcacagcttcctcgctgctgtcacctgcactatccaattagtattttcatttacatcaatcagctttattttcttgtaactggatcagtcatattcattggtttgtgacctactcttatctcncgtgggtggctctccttttgttttaattaacttctttatgaatatgaacttaataaataccatggatccattgtaaaaaaaaaaaaaaaaaa

SEQ ID NO: 235339 - DNA, 618 bp, Homo Sapiens
tctcggacttcccagtctccagaactgtgggaaacacatttctgttgtttatgagccacccagtttaaggtattttgttatagcagcccagatggactaggccaccaccatagtcagggaagagctggctgatttgtgcgtgtctgcgctgtgtcccaatgaaagcacaataatcaatgaacattgattctgcaatcgatgtttgaaggtcaaaggagttgggaaagggggtctcctgaagccaaggaaaagcattgtactccccaaaactgtgccagccaggttaactttttgcgagatgctacagattgagatgctttagttttacttctggctctttaagccctactcaagctctaattttgatatctcgttctagacgccttagtttgggcccctcccaggctcccttctgtttttgttctttttttctaacatcatccttggcttttcttctcctttaggtttgatctcctgtctcttgggttgagaaaccatcccctctgactcctggccccctgtgacccctccaaagccccctgtacaggtctttggccacacagagattcaacagtctaataatctaaaattgtaaatgccaaaaaaaaaaaaaaaaaa

SEQ ID NO: 235340 - DNA, 663 bp, Homo Sapiens
  misc_feature (57)..(57): n is a, c, g, or t
  misc_feature (87)..(87): n is a, c, g, or t
atacccaatgacaaactatggagaacaagcaaagtatgcaggccccctgcagcctcncaggacaggctggcaagggaggagggccgnccagcatttggtggcccatcagtctggccatctgtcacgtcacagaagcaaaccgtgccttctggctctgcgccccatattcccagcatcatagacatccaacagcaccagcaggagagtgggctagcctgctggatgctgttcgtgcctgtccctgctctgcctcccacccagttgcctgaatcatcccagctcagatgcagccactgtctcttgtcaagtgggacctcatactattctcagaaggctaacttgagaggtttggggccttgttccccagagggtccccagggactctgcagtgtccttggcaaatccccactgtactcaatgccctacattctcttctgtggtctctcccctggcttgcttcatggccactgaaccaatcactttgtatgctatgctcctactgtgatggaaaacaaaatgagtataacttattttatatccatattcagactatatagagaatattctatgcatctatgacgtgcttactactgcagtgcatttgtcattagtcttcatgttaatacagtacatttattctttggtaaaaaaaaaaaaaaaaaa

SEQ ID NO: 235341 - DNA, 538 bp, Homo Sapiens
agttctccaagtccccagccagcccctcaagacaccgctggctgctggacaccctcttcacttgtgtgtgtgtgtgtagcggaaaaggacaagacggtgcagtcggctgcatactcccagtcgggagtgtggtcagtctgcctgctgctgtgcggtagctccagaaccacctcgttcctggttttgtttggattttggcatcttgtttttctaacaacaaacaatggagaaaaagaattgattcttagtgacacagaagattgccttacgctcgtgagcgtgagaagccataagagagagaccgaattctgtggctcagcacacaggactgacccacagcccaggcagcgggtgtgtggagatggcgccctgtcctgccaaggggcgccaggagcagagccagggcctggcgagctggcgtggagcccacaggattcagcagcatggacagtcactcttgcactattccttctccaagccagaaaccacatttaatttcttaaataaatttatgaaaagtaaaaaaaaaaaaaaaaaa

SEQ ID NO: 235342 - DNA, 624 bp, Homo Sapiens
tgctctgcaggcagcgttgcccattctctaagcctggcttagaaggcactgggaatgtcctgtagagagagacctagataggtcatgcaagtgagaaagacatctgaggaaaatggaagacctaaggcagacaggaaggaagcacaaaagacaagcattgggtcagacccataaaccacctcccaaaggctgtcatttcattgcactggaattttgctttatcagaagcaaggaagtaagggagtcattgccttgggcctgggaatctaagtgggagacaatattaatttggatccgattaattggagattactaactgtggacaaaagtttatctttgcacaatcaataaaaatggcatttttttagtaaattaagagcataaacaatattgctagaggtggcatgtttagtctaccaaaaacaatacttttcaggcactttagaaatatccttttagaagcagcgagtgcatgggctaattatcatcaatctttatgtatttgttaaagaaacatctacaggatctttattggtgaccttttgtaagacattagtttgaggtactacctatgtacttgaaaataataaagttcatttctttttgaaaaaaaaaaaaaaaaaa

SEQ ID NO: 235343 - DNA, 623 bp, Homo Sapiens
aggacaaatgctccccaaaaggctgagtggctgactgaattaagtaccagtgacatgcagtaactgctaagatagatgagccatctgtatgctctgacagttacagactgaataagttggagacttccctaaagggtggcatttccccagggtaacaacgcagagctcaggtgtgggaaggtgccaggggcaggggtgcagaggggctgaggctgaggggggtgcagaggctggagaaaggataacaggagagagtatacaggcatgccttgatttattgcacttcacaggtagcagaatttttaaagaaattgaaggttttgggacatatatgtgacagcaataggttaagaaaagcaaagcagagaaattgaagatttgtgtcaacactgctttaagcaaatctgttggcaccatttttccaatagcatgtgcccattttgggtctctacattgcattttggtaattgcttgcaatatttcaagcattttcattgttattatatgtgttatagtgatctgtgatcagtgatctttgatatattattgtaattgtttcggggcgccatgaaccgcacccatataacacggtaaacttaatcagcaaaaaaaaaataaaaaaa

SEQ ID NO: 235344 - DNA, 612 bp, Homo Sapiens
gggatggttgtggggggctggcccctctagcctttccggtccttcctgggcaaatctaagccttggccagggccgaagtttaggcccctgtcttgttcatgtagccgaggggcaggcgggggacctctacacctctgctgtgggcacggggctgctgagggtctgtggaactccagcagctctgcactgggtagagctgggcctagagctcagtcacaggcctgggcttcctggcctgagtgggtagacgcaggcggcagaggtgctggaccacatctccgccaagtcactgcccagcagccttctccgtcctgtccccagcccacgtgctccttgggtgtcagcttcctgtgcctctgtgggagagggcagctgccttgtgttatgtctggggccacagttgctgcaaagtcctggatctgccactcaaccccgggagtggtgttcccagtgtggctcccagagctttgaccagattgtgatcccagctggcccctatgttgtgttctggactgaggcctttgctgtgaactgcagtgtttcatacgaaccatctttcctagtgcatgagaaataaagattatttaagtaatgagaaaaaaaaaaaaaaaa

SEQ ID NO: 235345 - DNA, 648 bp, Homo Sapiens
cgtcgggtattgtaggtgagaatggcatataagcagaacaaccttgccattagagagaatggaactgtatttctgttttaccagttatgagtcaacattttgtttcttttattttgaacatggcatcatgtatatatttcttttatagtgaaatgatacatttatgtgccaagaggtaaagcatcccttttcctgtccagccttccaccctccctcacatcttagtggggagccactgttctcaattctgtgggaagggtcagtgcaagtcctgtagaaatgtattttgacatcattatgagatttaaacaaattcctcagtgaatgtttggttgtgatatgttaacctgcaagttttgaacattgacatgttttcgtgttaggaaacaggagctcacttttctacatccttgttggagcatgctgggaatgaagacaggtggatcttttaactttctcacttctataaagaatgccacacagggtgctgcatggtggctcacacctgtaatcccagcacttgtggaagccaaggtgggaggatcatttgagccccagagattgaggctgcagtgagccatgatagtgccactgcacttcagcctgagtgttagaacaagaccttgtctcaaaaaaaaaaaaaaaaaa

SEQ ID NO: 235346 - DNA, 700 bp, Homo Sapiens
  misc_feature (23)..(23): n is a, c, g, or t
attgtcttaattgatggtacatntgccaagacaaaggttcagaattactaattttagatattatgatattctgaaataactatttttatcctgtagttctatgattatatgatttgtaaataagaagcctaaccaatttaaaattcctgactttagtctcatatatcttgtcagactgtctcggttcaaattccaaacctaccatcttcagttgtgcgaccttgggcatgctacctaatctctttgtgcctcaatttcctccttttaaaatggggatgatgatgataacaataatacctacctcacaaggttgttgtgagcatcaaatgagataacacaagtaaaatgcatagaacagttccaagcacagagtaattcaataaatattaactagtaatagtagtggtagtaactcgtgaatctttttaataacataataggctttgattttattatctctttaagttgttaacttttttcccttgttataagttttatgtcaagtaaggtagtttgtttaagttagttacccatgtccccaatcaagggaacctaaatgaagatatatcattaaataattaacctttttttattgtgtcaagcaatactaatttgtgtcataaaatttgttttgcatcattcaacaatttatgcccagaaataaacaatattctacaacaggaaaaaaaaaaaaaaaaaa

SEQ ID NO: 235347 - DNA, 581 bp, Homo Sapiens
gtcaggagggcctcacatcagaacgcctgagcaaatacagttttgaaggatactaattttttaaaaagttcattcatatgagttagacaaagagaaagaagcaggacattctaggaagaaggaacggcccaggcaaaagcgacgcgtacattggcgtgggtccattcaagaattgtgcccacaatataccaggcacttgtccagacctgcatcgtccaatgcccacctcgacctcccaaagtgttgggattagaggcgtgagccaccgcgccctgcctgcatgtggctattgagatgtgctgtatgatacacaccggactttgaagactcagtgtgaaaaataaaaagaattttaagaggggtgggggtcgaggggaggcagagcagtaggacaaatagctaatgcacgcagggcttaaaacctagacaacaggttgatgggtgcagcaaaccaccatgacacatgtttatctatatagcacctacatgttctgcacttgtatcctggaacttaaaattagaaaaaaaaaataataaaagccaacatggcattcattactgccaaaaaaaaaaaaaaaaaa

SEQ ID NO: 235348 - DNA, 602 bp, Homo Sapiens
gcgccgtcagcgaggtgagcaacggcacgtcgaggagggcaggctgcgtctggctgctgcctcttctggtcttgcacctgcttctcaaattttgatgtgagtgccacttccccacccgggaaaggctgccgccaccaccaccaccaacacaacagcaatggcaacaccgacagcaaccaatcagatatatacaaatgaaattagaagaaacacagcctcatgggacagaaatttgagggaggggaacaaagaatactttggggggaaaagagttttaaaaaagaaattgaaaattgccttgcagatatttaggtacaatggagttttcttttcccaaacgggaagaacacagcacacccggcttggacccactgcaagctgcatcgtgcaacctctttggtgccagtgtgggcaagggctcagcctctctgcccacagagtgcccccacgtggaacattctggagctggccatcccaaattcaatcagtccatagagacgaacagaatgagaccttccggcccaagcgtggcgctgcgggcactttggtagactgtgccaccacggcgtgtgttgtgaaacgtgaaataaaaagaaaaaaaa

SEQ ID NO: 235349 - DNA, 709 bp, Homo Sapiens
gaagggctctgggcatgctgaaagctaaatgaaaagcacatcactggctctctctttcttggattggtcaattggccctttttgcagtagttgctccaactgttctaaacagtgagtgactggagccaaaaagagagagctcagcaaagccatcccatccacactctgcttggtaggaccacactaaaagcacagtttcatgctgctagctctggtaaggagacagctgcaggtttgggaggtgcaccaagcattcctttgcttagggaggcagagcacaggtgaacagaggaaggacacccccactctcatctattgcccaccgagaggcaagaatcacaccaactttcccacttgaggactgtgttcggccaaacaagcaggttcagggctgcgggattccagaagttgctctgagcttgcaatcagacctcaaagccccagatcccctcagctctggatcgttgccctcatccttcacaatgtaaattttgtacagttaaagagaaatgaagtctcgtttcctgtggaaaaaaaagaaaaaaagaaaaaaaaaaagacccacccatccttatttattgccatatgactttggaaaacagaagctggtgcgtttgtttgtatatgcctcctgtgtgttggcatgagatgtgtacggtaaaattatgtaaaataaatatggaaattctttaaaaaaaaaaaaaaaaaa

SEQ ID NO: 235350 - DNA, 729 bp, Homo Sapiens
gaggctcagccgacttgtcatcacttaaaacccaattcagagcggggggcactgccagtgaatagttcatcaccgactcaggtgagtttgggaagttgaaatttgcaggggtgagtgacgggttaatacaagtgggcacagaagcattgacaaagctgtctgtgaagccctcctgctgttctaagatgatggattagagcccaaggggatccttggtgttacctttgaggttccagccatggaggcaagtaggggttgggctccagttctcctcctgtcactaatttgccttcgtttttggggcctcagtttccccatgtgtatgctgtggtattggatcagcaacgagataagaagatctctcccatttccaagcgtctatgatgattctgaggcacaaggtcacatttgacagtactaggaaacccaggaaacaagaagcaaagatgacaaaggatgtgtctgcctgggcagacgatctatttggacaagataatagacccaggcatggacatgctctccaagaaagatgccctgacagctgctcacactgaagctgaatcgaacattccaatccttagaggttccagcgaagatcttgaagtctccctgagccattgacacaatggccatgccatcccagtgataaaacacaaattgtggccttgttttggacagaaataaagagcccagtttgttagtgatttactgaaaaaaaaaaaaaaaaaa

SEQ ID NO: 235351 - DNA, 688 bp, Homo Sapiens
ttcttctgtatataaacctgattaaggaattttttttttaaagcaaggagccgttttctgtcactaggtggataccttagtaaacatgaggggaattatcagatagatgtctttggagcccagccttccctgtgtagtgagctggaaactcctttagattgtattcattggtgtgtatgtatatgtacatatatgtataaatagttaaatacataaacataaaacttaacatcgcattgttgtgatgacaagaagtagtaaggtgctaggtggttacattaaaaagcacagcacagtgtataatcagtcactatgactggtggttttgtaagctgggttcagtttttgaaccacccagaatacctcatgtgtaaatacagtgttcatgacttaattgaaatacagttattgtttaaaaaaaaaaaaaaagaatgtgaagccactggttggcttatgccttctgatctatcattcttgcctctttttttgtaaaggggttttcttcttgttgttctgttttttaatagggtttacagctagaattttgaatgccaaagttctatttattaaattaagaaaaaagttttcaatgttaatggctagtatttttccactggactattgtttgttgatgttggaatttgtatttacagagaaataaattttttataaaaagaaaaaaaaaaaa

SEQ ID NO: 235352 - DNA, 716 bp, Homo Sapiens
acaatgccaaaatgaatttaattccagtactcaggtttttccctttaacagactctatgtgtatcagggctttctaatggtttttcctcttcgtttttaaaatgtgagtagcatttgaccaatttccagtgctcttagcattttacttaaagaacaaccactacaaaagaaaatctttgtaatttgattgtcttttgctttgcttcattaatgcctaagaacttaagaatactcctacctcattagctactcaagatgctgtgacgatcaaatctattctacataatgcgtttagaaacaaagacttgggtgaaaaatgaaataagtatattctgacttggctattgaggggaaaattcagtattaagtgttcctcacaggagatatgttagcagaatactataaaagtttgaaatttttaaaaagtaaaagtacttaaatttaggtatctctcctgaaattctttgcagttcattttttatggcagttaatccagtgaaacactcaaaagtttttttttttttaaaagtgtttttccagataaactgtagggtgaacattcacataatcacaaatatgtaattctgtaattgtggaatgcttgtatgctttgttttcgtacatcttccatggagatgtctgaatataatactccatctgtgaatattttaaatgttgaaataaaagtaagaaatgtgaaaaaaaaaaaaaaaaaa

SEQ ID NO: 235353 - DNA, 677 bp, Homo Sapiens
  misc_feature (29)..(29): n is a, c, g, or t
  misc_feature (115)..(115): n is a, c, g, or t
atccagaaggagcgttcatgaagatgtancaagcccggaagcagcacatgagcactcagctgactattgagtcggaggcgccctcagacagcagtggcatcaacttgtcaggctntgggggtgatcagcttgaaattcagctaaccgagcagctacggtccctcatccccaacgaggatgtgagaaagttcatgtctcatgttatccggaccttgaaaatggaatgttcagaaacacatgtgcaagggagctgtgccaagctcatgttgcgaacaggcctcctgatgaagcttctcagcgagcagcaggaagcaaaggcattgaatgtagaatgggatacggaccaacaaaaaaacaaattatattaatgagaacatggaacagaatgaacagaaagagcagaagtcaagtgagctcatgaaagaagttccaggagatgactataagaacaaactcatcttcgcaatatctgtgactgtaatactaataattttgattataattttttgtcttatagaggtgaattcacataaaagggcatcagaaaaatacaaagacaacccatcaatatcaggagcctgagcatgagttaaagcatgtggatggcctggagctatgtttttaaaattgttattaaatattggttttttacttaaatcaaaaaaaaaaaaaaaaaa

SEQ ID NO: 235354 - DNA, 723 bp, Homo Sapiens
  misc_feature (37)..(37): n is a, c, g, or t
cagtactccaattatatcgggtaggtcaaggaagctntgcagcctgagtctcgtatggtgattctcaaacctcagcaaacatagatatcatctggggaatctggttcaaaatgcagacctgagactattctcctgcagaatatctgagtcagtggatttgggtggggcccaggaatctgcactttaaacagccactccctggggttattctgatactgatggtccagggtccacactttgagaatcactggtttaatggttctgagcatgtgctgagggctcagagatgcaagttcaaatcccagctccaccctagctttgaccttggtaagtagctttgcttttcagagcctcagttttctcctctaaaaaactgagttggctgggattataggtgtgagctaccacacccagccttgtgacagtgattcttatctcatagtgcaaaagatggcatttggatgggagataatagttcagaaaagttccattctacagcaactcacaatttgaggaccatagttctaagaaatatccacaaagtcagttgaactatgatttttagctacttggcatataaagttttgctggtaagtaatgacttaaatccataacttttcaaaaacataagccttacttcaaaagcattatttgtacattgtagaaaattagaaaatacagataatcatctgcggtaactttcccaaaaaaaaaaaaaaaaaa

SEQ ID NO: 235355 - DNA, 711 bp, Homo Sapiens
atatgtttatcacatttttctattaagagaaattccacttagagtcagttcctttccaaagttgattttgttggctctctctcatggcattgcatttcttcacattttacagttgtgatttgcaagttttttaagtagactttttagtttgtttcattctttggtagattgtattaatgtttctaattctttactccttcccttttacagaattataactggacatcttttgccaggtgacttttcagtgccttccactatagtagatggaatatacttccccactccattgagtccattttttgttggctaacctgtagttttaagattgtaatttttttaaatctagttaccttgattgctttttagagagctattagtcccaataacttagaccaccattatttaaaaatggaattcctaaccacaatgtgtgcacctcatcataggaaggaacacaaatgggggagtagaagaaaacagaaatgtattaataggcgacagtgagtacttcagctttatgtgtaatgttttatttcttgtattacaaagtaaaagatatgaagcatttgactaaaaatgttaatttatataatttgaatgatgggtacatgggcagttgttatatttatatatacttttatgtattctaaatttttttctcaaaataaaaaagagaaacagtcaagggttaaaaaaaaaaaaaaaaaa

SEQ ID NO: 235356 - DNA, 673 bp, Homo Sapiens
tccttgagcccactgggtcatatgcgtgtcaccacacgtgaactagtgtggtggctgcctgcggacaccctcctgttttgagccctgggcctgtttcttctcagacactcccagactgaggggtggtgtgtggcgggtggcagggtggctgtggagactggggatctggagcctggtgctggcacctggcctgagtttccgtgggcagctggcggggacctgtgctgctgctgctgactgtgggtgggcgggcggcgcctgggagtggctcttgctcaggaattgataggaaccctaaaaactaggataccccctcctcggcccatgaggcacgcacagtgacttatttaagacttcccccttaatttatctgcccccaggatgcgtcagtctgttcagtggtcagcaggccccccaccccccgccgactgccctcgccatcgtggtcagacccccctcccaacacaacacgctgctggtctgtgtcagcctttgtaacgtgggaggctctgccgtgtcttccgggtgaactgtatttggattgcgcgcattgtcacggtccgcccctgggctgcaggcgccccttcctctgggcacccctgcattctgcatccccacctctagacgctgtaataaacagactgttttcactcggaaaaaaaaaaaaaaaaaa

SEQ ID NO: 235357 - DNA, 703 bp, Homo Sapiens
tgatcagggagaggaaaaagttcacaatgatagaaataaaaatgcgaaatgccgagcgagcaaaagaagatgccgagaaaagaaatgacatgctacagaaagaaatggagcagtttttttccacgtttggagaactgacagtggaacccaggagaaccgagagaggaaacacaatatggattcagtgagcctgctttcgcctgctgtctctgatggctctggcaaggactccagggattctggtgggatatgacttagaaccaggtggctggtcacctggatgtacagaagtctaactggtgaaggaatatcatttacagacattaaacatccatatctgcaatgtgtaccaaagttatatcatgccccataatgctactgtcaagtgttacaactggatatgtgtatatagagtagtttttcaaaagtaaactaaaaatgagaagcatatttcaagaattattttattgcaagtcttgtatttaaatgttaaatcaatatgttgttgcaatttagcttgctttcaagcttcaccccttgcacttaacataagctatttttggcattgtgttatcatcggcttattttatagatcaatatttttatttcccttttttgctgaggaaatgaagataagcaaaaatataaatatatatataaatatatgagttattaaaatcagaagaataaaaaaaaaaaaaaa

SEQ ID NO: 235358 - DNA, 751 bp, Homo Sapiens
gagccacatatagagttaagaagaaataagtaaaattcattttaatgaagtattgcgtttcactccatgtactttgaaaatagtatttcaacaatgtaatctatataaaaattgtcacatcttttttactcttttttttgtagagtctgggaaagccagcaggtgttttacatttacaacacttgagtttagactggcagcttctgcgcccaataaccacaaggctgacaacagggaggtgtggggggtccagaacaatataccctctgtgagtgcttatctcatgcccatgctgttcccaggcgcctgctgtctgtctcctcatcctctacctcatcggctctatggtttgaggccagacctcatgcatcaggccagagtgtcctgccgagacccaggatgcacccctcacttggcacagacaaaccagacacaccagcttctgtctttccccatttcagtgggtgaacctggaaccacccagatgactgggctagaagttgacagtcattctcctctcctcactcccctgtcctcccacccagcacacccagccaggcaggtccttagcttccacctcctgaatctctgacctgaatttcactagaaaataaggaatactacgtcaaaatttatgggatgcagctaaagcaatccttaaaggaaaactagcttgtgcttatatgggaaaagaagaaaggtctagaatcttaaggttttaccttaagaaaccaaaaaaaaaaaaaaaaaa

SEQ ID NO: 235359 - DNA, 711 bp, Homo Sapiens
cacaaaggtgtgcactgcgtgacaatgacccaagccagtgtgtgctagtgaggagacagagaagacctacatgcccagaggacccgtggccgttgtgctggttttctggtctcctgtgaagaacatgtggatctcttcccgaaggaaaaggtcccaggagaccagtttgaggcactcactctagaaatagcctgtgttagctgatgtgtgaaagcgtagccggccagccacactagagatgccttttctgaataatgtattatgagcagtgtcagatttataaagccgaggagtggtttggaatatacagctggtcgcaggtgcaggtccagtgtttagatccaaatggaaaacagcagcttctaagaggtacaactgttggaagaaaacacagttgaaatgcaccaggcaggtactagcaagtgtgcaaagagcacgtctacatttgagtaaaatgtctacacagatatttgtcagtgatgagaatgcaggaaaaggcagacatttcaaacatacctgaagtctttttactcattatcttgttaaagaatcactgaggtgcatgatttctacacatcgtgactgctctgctctgcgtttacaaaaccaacagcccgcgcaggtacctagctacctgcattcatgtgacatgtctggggaacagaagataaataaaggatcttgctgaaaaccaaaaaaaaaaaaaaaaaa

SEQ ID NO: 235360 - DNA, 633 bp, Homo Sapiens
aaaggaagagatttgtccacagtgtgcaggagactcactcccagctgctgggctcttgggacccgtgggaagaaccggaagacgcagcccctgtggccccctccgtccctgcctctgggtaccctgagctgcccacacccaggagagaggtccagtctgaaagtgcccaggagccaggagccagggatgtggaggcgcagctgcggcggctgcaggaggagaggacgtgcaaggtgtgcctggaccgcgccgtgtccatcgtctttgtgccgtgcggccacctggtctgtgctgagtgtgcccccggcctgcagctgtgccccatctgcagagcccccgtccgcagccgcgtgcgcaccttcctgtcctaggccaggtgccatggccggccaggtgggctgcagagtgggctccctgcccctctctgcctgttctggactgtgttctgggcctgctgaggatggcagagctggtgtccatccagcactgaccagccctgattccccgaccaccgcccagggtggagaaggaggcccttgcttggcgtgggggatggcttaactgtacctgtttggatgcttctgaatagaaataaagtgggttttccctggaggtaaaaaaaaaaaaaaaaaa

SEQ ID NO: 235361 - DNA, 752 bp, Homo Sapiens
ttcccggcgaggctgccgaggacgacctgcttggagcacctgccttgtcacaggcctcctcaggtacctgcttccctcggaagaggatcagcagcaagtcattgaaggtggcatgattccagctcccaagagagtgtgtctcatccaggagccaaaagtccatgaaccagttcgaattgcctatgacaggcctcggggtcgtcccatgtccaaaaagaagaaacccaaggacttggacttcgcccagcagaagctgaccgataagaacctgggcttccagatgctgcagaagatgggctggaaggagggccatggcctgggctccctcggaaagggcatcagggagccggtcagcgtgggaaccccctcggaaggggaagggttgggtgctgacgggcaggagcacaaagaagacacattcgatgtgttccgacagaggatgatgcagatgtacagacacaagcgggccaacaaatagttccagggtcacccccgagaggacaacaggcatctggaagtgctctctcgccactctgggtgctttactgtctctggcttgtttccatcactggaaatcacttagagaattgtagtgtttttggtccttgataaagcctagaagacatttgtgatgttacaaaatggaagttttcttttgtttctgttttttaagatctaagaagttgtgaatgttgttaatcatttagccgttgcaataaatgtagaggaaatgcaaaaaaaaaaaaaaaaaa

SEQ ID NO: 235362 - DNA, 666 bp, Homo Sapiens
  misc_feature (24)..(24): n is a, c, g, or t
aggaaagtttttatactagttttnttaaccctatgtattattacagatggaagtaattatggcatgtgtgagttataatctaaattaggggcaagtatccctttttttatatgatgaaattgtgcataataacttggctagggcaagtctccaaagtaattcagatttaactcttcactgctagacccagttgtgttcaactttttacatattattgccaacacactttatctctctgtgtacagtgttaatctgatcttataaatctatatttttttctttaagcaaatttttgttttaaaatttgaagccaatcataaagataatatagcataagacattttcttttctaaaaacaatcagcatcattttaaaaggatgaactaatacaggtgtatgtaatagcagtgtttccaaactggcaatttatgctttaaatttaaaaataaggtcatttttctccatcaggggcaaatgtttacttgtaattttcttcctacagttcgtgttaaattactttttactattattatattgtaaactccttgggatttggcaccatttaaaaattcatctttgtattcccttaatatttggaacagtattgtacatatggtaggtacttaataaaggtttgaatgagtgtgtaaaaaaaaaaaaaaaaaa

SEQ ID NO: 235363 - DNA, 600 bp, Homo Sapiens
ccaaagtactgagtcgagatggctttcagttgagtttaatttcatatttaacttttgcatttaacttgtataatacactactgctgagaaaaacaattatgaatgccttctgcatgttgtacattatctctaacagagatggtgcaattttaagaatacaaaggggtttagagttagaatggatgtgttcgtgcatatatatgttgtatttaaatattaatgtttacaagaagattttttttaaatttttcaaatacttcacttagtgaaataatgggccaatttggaatagagacattttatttggtttgtgcaagagtgaaagctagcatttgttaaccttcacatatttatctgtgtacaattgtttttgcttttggtaatgaattattagaaaatggaagattttgttcaatgtttttggccctcaggtttactgtgtaaatctgcatttttggtggtaaatccctttgccacagattcagtagcttttggtaaacttcactgtttttaaagtaccttttgtgtaaaataaagaaccaatttttttaacaaatggcaaataaaaaccgtaaatggtggaaaaaaaaaaaaaaaaaa

SEQ ID NO: 235364 - DNA, 765 bp, Homo Sapiens
  misc_feature (79)..(79): n is a, c, g, or t
acaatcaatgcctcaaattgatgttaaattggagaacaccctactgctttctgagtctacgagcaacagaaagactgtncttagtgcaattaggcaggagggatttggactcagaaacagccacagaagtatttctcagcactcccagttcctgccaacttagctggaaacgatgccacagcgagaccagaaagaggagtcgccttaaggtatccctacaaagtcacctttctgataaaaaggagggaaaaaaaagttagatatctaaaataagcctagaatctcacacacagctgtgacttctaagtgaaactcttttctccctcatgtccttaaatagtcacagaatcacacacagcctgacttttaaagacaagcttggctacaggaaatgaaccaaccccaaagactcttctaacctgtctcctgactgggctccttcagaaagtgttctcctgttccatctgtagggctgcttactactggaacctaaaacaaaacctgttgtttgtaccatcactttttctggtgtttcctgtgcttttgtgattccaagtctgttcataagttctgaagataaattatgtgaaatcatattttggcatatgggggtggaggatgaattctttacagactttttaagatgatccatttgtaccacagaaaacattttggaagttgttatatatgagtatataaatttttcttttcatattttacattaaaataaagctttattcagtcattaaaaaaaaaaaaaaaaaa

SEQ ID NO: 235365 - DNA, 653 bp, Homo Sapiens
ccgttcccacccatctcgcccagccccgaagagcagctccagcctcgggagtgccacaccttctccgaccccacctgccccggagcccctgcggtgctgcactttcctctggtcagcgactccttccgggagtactcggcccctggggtccggcggacacccgaggaggcggcagctggggaggtgaacctgtcttcatcggactctccctaccactacacgaaggtgacctacagccaggaggacgtggacaagctgctgcacctgacacattacaatgtctgcaacaaccaggagcagctgctggaggctctgcgccaggcagtgcagcggaggcggcagcgcaggccccactgatggccggggcccctgccacccctaactctcattcattccctggctgctgagttgcaggtgggaactgtcatcacgcagtgcttcagagcctcgggctcaggtggcactgtcccagggtccaggctgagggctgggagctcccttgcgcctcagcagtttgcagtggggtaaggaggccaagcccatttgtgtaatcacccaaaaccccccggcctgtgcctgttttcccttctgcgctaccttgagtagttggagcacttgatacatcacagactcatacaaaaaaaaaaaaaaaa

SEQ ID NO: 235366 - DNA, 704 bp, Homo Sapiens
aaaacacggcgctggacaagtcgacagacgcggcgctgcagacagtgacgccatcgggcccggcctcggagctctccaacgcctcgctcagcccctccagcacgcccaccaccctgacagacttgactagccccaccctgccaactgtgacgtccgtcttaacttctgtgcctggcaacctggagggccatgagcctcacagcccctcacaaacgactcttaccaaccttttataatgactcgcaacccctcaccccacaatttctttaaaaaagaaattatctttagttgaattccaagtgtattttaaaatagaggctttgagcaactaactaaccacattttaggatctcgcctggaaacagaggtaaaaaaaagaagtgtgcgcccggctaatgcagcggtgtggaccgaggaacaacttggaagatctacctgcaacacaacatttgtgtcactgtacagttttgtggactgagcgaggaaaaacaacaaataatttaagttggctagagcttctgtattttcaaagactgccacgtgccttaggaatactgttttatctccatactttggatgacttgttcatttttctctccctctttttctctgtatatttatgaccagagcaaaaatgtaaaaaacaaaaaaaacaacaaaaaaagtttgttactttgaatagtcctaaaaagaaaaaaaaaaaa

SEQ ID NO: 235367 - DNA, 683 bp, Homo Sapiens
  misc_feature (33)..(33): n is a, c, g, or t
gagaaaactaggtttttgaattcttttactttntaaagtaacttcctcccatttttatgtcaattatagaaaattttaaaaagaaaattaaatgtgcctataattttataagccggaggtaactaagttggtatttttcttcttagtacctctttgtctcatcataaattgttcatcaatgtcaaaaacttggaaaataaagataagcatatagaaaaaaataaaaaccacccataatcacaaatcccagaagcaatgttaatattttggtggatttatttccagtctttttctatggctatatgtgcacatatataatttttacatagaaaaagtcataatgcatacagctttgttgcttttagcatttttatcatgaatattttcctacatttatgcaaagtatttgtaaatatcattttcaatggtgtataatatttcatcataggatgacatcatggtttagttaaccattttcttttgttggatatttgagggtctttccaaatttggccattgtaatttcacaatgtctttttcattacctaactgaaaatatttgctttggtgaaagcagaggattttttgttgtttgtttgtttgtttttgaagaagtccttttaatagctacatttcattgactaagtggaacttcaagagacaggtaaaaaaaaaaaaaaaaa

SEQ ID NO: 235368 - DNA, 761 bp, Homo Sapiens
agcatcgaacgacctctgaagtcacccttagtctccaaggtcatcaccccacccactcccatcagtgtgggccttgctgccattccagtcacgcactccttgtccctgtctcgcatggagatcaaagaaatagcaagcaggacccgcagggaactactgggcctctcggatgaaggtggacccaagtcagaaggagcgccaaaggccaaatcaaaaccccggaagcggttagaagaaagccaaggaggccccaagccaggggcagtgaggtcatctagcagtgacaggatcccatcaggctccttggaaagtgcttctacttccgaagccaaccctgaggggcactcagccagctctgaccaggaccctgtggcagacagagagggcagcccggtctccggcagcagccccttccagctcacggctttctccgatgaagacattatagacttgaagtaacagagttgaatctcatttgccatctttagttttcttatggaggtttatactctttaaacagttctgatgtaatttctcaacaaaatgtggcttttagcctgtcagtgatctattggaccaaaccttctgcacactcggccagttccctctccaatgtccggtgccatctttcctgacctttgtttctttctgttcaggaaccatcagtccccttgtaataaaggtggtagatttcattgaggttttagattgaaactttgaataaatcaaaaatactcattcttaaaaaaaaaaaaaaaaaa

SEQ ID NO: 235369 - DNA, 742 bp, Homo Sapiens
  misc_feature (21)..(21): n is a, c, g, or t
  misc_feature (42)..(42): n is a, c, g, or t
  misc_feature (58)..(58): n is a, c, g, or t
  misc_feature (94)..(94): n is a, c, g, or t
tattcagtagcatagacattntgcatatcaaagatgttcatntggcactaatgttgantgaaatcaaatccatctgagatgcctagctcgtatntgcattctggaagcctccatcgcaggggagctcggcagggtatgtgagctttgttggaggtgcggtgtttcattctgcagctgttgtgaggacagagaggcatggcccacaggcaaaaaaagtcaccacccagaagatgctctgggatagaggaactgctccttttcatcagctcttccaatgccgtgggagaggtgatcccagtcttctctgtacatcttgtgcttttccattaagacttgttccagtgggaaggagctttggaaaaattgcaaaggtctgaatcttcagggcattttcatgacaggacttgccaataataataataataataataataataataataataaagctccagaggcctaactggtttctcaagtcatttcagtgatatcattgaaacgtttttgtggtacttccctttgtctttcactgtttcatttttatattgcttcatttacttctttgcttttggctttgttattagaaaaaataattatgaggtctgttgtgcatgttgactgtgatattaagttatggcatgccattaagttttccagacgatgttggatgtatctgattagttcatgtcatctgtaaatacaattcttttttgtagtactttggaaaaaaaaaaaaaaaaaa

SEQ ID NO: 235370 - DNA, 720 bp, Homo Sapiens
gaatccgatgaccagtcagagctgccttctccccctgcacttcccatgtctctgagtgcaaaggccaaacttaccaacatagtgagtcccactgcggccaccacgccaagaatcacccgctccaacagcatccccacccacgaggcggccttcgagctgtacagcggctcccaaatggggagcaccctgtccctggccgagagacccaagggaatgattcggtcaggatccttccgagaccccacggacgatgttcacggctcagtgctgtccctggcctccagtgcctcctccacctactcctcagctgaggagaggatgcaatctgagcaaatccggaagcttcgtagggaactggaatcatcccaggaaaaagtggccaccttgacgtctcagctttctgccaatgctaatctggtggctgcttttgagcagagcctggtgaatatgacatcccgcctgcgacacctggcagagacggccgaggagaaggacactgagctgctggatttgcgagaaaccatagactttctgaagaaaaagaactctgaggcccaggcagtcattcagggagcccttaatgcctcagaaaccacacccaaagaacttcggatcaagagacaaaactcctcagatagcatctcaagcctcaacagcatcactagccattccagcatcggcagcagcaaggatgctgatgcgaaaaaaaaaaaaaaaaaa

SEQ ID NO: 235371 - DNA, 693 bp, Homo Sapiens
agattcaatatacacaattaagtactacaactatgacaatgcttgacctacatttctaaaataaaaattcacattttttgataaataaactacagttttaccagaaattactatctaaatgtgtattagcagtattttttaaggtgaaattgccttggtatctaatgaatgtgtagacagggagataaaatgaaggattgccagactagttagaatagaatttaggattaggttagttttgaaaaatgatgttgtaatatatgggttctaacacatcctaccataaaaactggaggagatatgtgtaacctggttaatttgggatggtggacattttgggctaatactgacaaaatacatcttaggactagtatacatgtgacacggattgctaggaggaatgaaaaactaaactgtatagtttatattccgtaaaccattttataatgttcaaagattaggttttgttattgatagtattaaatacacagtttctcttaacagtgatgggtgaaaacattttaccggattatggaatgtttaccagaacatgttttgattcttgaatgtacataataatgccatctaacttatttacgttcttgtttacatgtgggagcttttgttttcaaaaattattttgttaaaaaatctcaataaagatttattattgttaaaaaaaaaaaaaaaaaa

SEQ ID NO: 235372 - DNA, 684 bp, Homo Sapiens
acttcatctgtgtgggaacgtggtcaggccgggtgctggtgttgacatcccagcaaagggtcccaacattgtactgagcgaggagctggctgggcaccagatgccaatcacagacattgccaccgagcctgcccagggacaggattgtgtggctgacatggtgacggcagatgactcaggcttgctgtgtgtctggcggtcagggccagaattcacattattgacccgcattccaggatttggagttccgtgcccctctgtgcagctgtggcaggggatcatagcagcaggctatgggaacggacaagtgcatctatatgaggccactacaggaaatctacatgtccagatcaatgcccatgcccgggccatctgcgccctggacctggcttctgaggtgggcaagctactctctgcaggtgaggacacctttgtgcatatctggaagctgagcagaaacccagagagtggctacattgaggtggaacactgtcatggtgagtgtgtcgccgacacccagctgtgtggtgctcgattttgtgattcctcaggcaactcctttgctgtgactggctatgaccttgcggagatccggagattcagcagtgtgtgagaagagcagccttcctttgtccctgtggtattcataaagtacccgctccacccaaaaaaaaaaaaaaaaaa

SEQ ID NO: 235373 - DNA, 582 bp, Homo Sapiens
ggcacgaggagggacttggccctagcagagacagtgtctttcatttaatgagtctgggtgaagccagaggtggctctgggacttcgccccctccagtggctcacctgctcctcagacttgcagggtggcaaatgttcctgttgccaggttaccacggtgtgcacagggcagagctgccgccaggcctcctcatggtgatgccagtgagtcggaccaggaaaggctcaccctggggagcccttcagcctgatccgcagtcctaacagggtgagaaagcacaagaggggccagctcggctgaggcctgaggagaaatgatgagaagttttgtttcgttcttgggctggggcatctcaggaacagtgagggcaacaagctgtccctcagggaccctcacctgccctcccatgtgaccaggcccttcccaggtggggactggggcttgctttattaagtgagctcttgggcttttgaagtaggacagagggccctggtttggcagagaggaggcaagggagggctttagaacatctgagaaatgttaataaataattcagaaaataggaaaaaaaaaaaaaaaaaa

SEQ ID NO: 235374 - DNA, 750 bp, Homo Sapiens
  misc_feature (102)..(102): n is a, c, g, or t
tcctgtgttttaaaaatttaaaaatttacttgattcccatctatgggctttagacctattactgggtggagtcttaaagttataattgttcaatatgttttntgaacagtgtgctaaatcaatagcaaacccactgccatattagttattctgaatatactaaaaaaatccagctagattgcagtttaataattaaactgtacatactgtgcatataatgaatttttatcttatgtaaattatttttagaacacaagttgggaaatgtggcttctgttcatttcgtttaattaaagctacctcctaaactatagtggctgccagtagcagactgttaaattgtggtttatatactttttgcattgtaaatagtctttgttgtacattgtcagtgtaataaaaacagaatctttgtatatcaaaatcatgtagtttgtataaaatgtgggaaggatttatttacagtgtgttgtaattttgtaaggccaactatttacaagttttaaaaattgctatcatgtatatttacacatctgataaatattaaatcataacttggtaagaaactcctaattaaaaggttttttccaaaattcaggttattgaaaatttttcattttattcatttaaaaactagaataacagatatataaaagtgttaatctttgtgctatatggtatgaaatacaatattgtactcagtgttttgaattattaaagtttctagaaagcaaaaaaaaaaaaaaaaaa

SEQ ID NO: 235375 - DNA, 611 bp, Homo Sapiens
tcataaccaggggaatgctcctagtggatagaagtcagggaggctgttaaacccattccacaatgcacaggactggaacaaagaatgatctctcactcagaatgtcagtgttgccaaggtggagacatcctgcagtagatgcttgtggcagagggtactggttgtcccccagtatccattctttcattcacctgtgttaatacatgctccagttttgtatttttttttataaacagctgtcaagcataaagataacattttccatctccttgtatgtaagtggaaataggactgtcatgtggggccagtttcttttttttcttcctctgtcctgctgcttgaaacatatgctgctatcttagatcatgaggtcgaggccatgcaaagtggagcaacaaggagctgtgtccctgacgccataagcaccacacctgtcctgaattgctgtgaatgacaccagctaactacaatgcattgtctcaacatcctagacataataaaaagccataaatatgtttgtcctatgcagcacaaaacctttgtatctttgccttttatgttgggatcttaattaaaaattacatcctctactgaaaaaaaaaaaaaaaaaa

SEQ ID NO: 235376 - DNA, 587 bp, Homo Sapiens
ggaacgaggaaggtcgcagcagtagctttggggaaagggaggaagatatggcacttctccaaccccggaaaacattgcttttgaaaactgctgataaaatatgagccggttattacttctgtttgggagactgtgctctctgtggtgcctctcttggctctactccacagataccagacctcttctaagaggatgagcagaccagctttgaggttgacctgtttctctttgtctgccttcccaaaacaccagcccccaggaagacattaagcagccttaagcttaaattcctactccctcttccaaatttggctcacttgccttagatccaaggcagggaaaggaaaagaaggggggtctctggctttattactcccctaagtctttactctgacttccccaaacccagaaagattttctccacagtgttcatttgaaagaggagtattttgtcccattttccccttcctcattatcaaacagccccagtcttccttgtctctgctaagaaagtagaggcatgatgatctgcctctcaactgccctaagtcctagctaagtatcaggggaaaaaaaaaaaaaaaaaa

SEQ ID NO: 235377 - DNA, 620 bp, Homo Sapiens
aggagctggaggtatgccgacaatgacatcggagccgtctcaaccacagggcatggggaaagcatcctgaaggtgaacctggctagactcaccctgttccacatagaacaaggaaagacggtagaagaggctgcggacctatcgttgggttatatgaagtcaagggttaaaggtttaggtggcctcatcgtggttagcaaaacaggagactgggtggcaaagtggacctccacctccatgccctgggcagccgccaaggacggcaagctgcacttcggaattgatcctgacgatactactatcaccgaccttccctaagccgctggaagattgtattccagatgctagcttagaggtcaagtacagtctcctcatgagacatagcctaatcaattagatctagaattggaaaaattgtcccgtctgtcacttgttttgttgccttaataagcatctgaatgtttggttgtggggcgggttctgaagcgatgagagaaatgcccgtattaggaggattacttgagccctggaggtcaaagctgaggtgagccatgattactccactgcactccagcctgggcaacagagccaggccctgtatcaaaaaaaaaaaaaaaaaa

SEQ ID NO: 235378 - DNA, 578 bp, Homo Sapiens
ggcacgaggttttttttttttttttttttaaaggagcaatgacatttcctagaagttactctaagaatttccctagagggtcgggtatcatctcagccagatctttctcatccttcaaggccctgtttggtacagcttgctaggaagctgttccagactgcagcagccctctctggggtctctctaccacttcccaggcactcagaacttgtgcctcagtagactgttttgtggcactgtcccattctctgattctccatgtgagctggttttatcccatccagcatggctgtgaaatcctaaaggttcaaaccccagccactcttcacctatatttcccccaaatggctagcacgggaaagggcccaaagtaggtgctcagtgctgatgagagagtagaatttaaataccccaggaagcattgtgagttactacggaggccatgaaatgctgccacctccccaagctgattaaagagtgatactaggaaaataggtagggaagggctaatcagaaatgcctctggttcagaagatgctgagttttaaagtccagagagccaaaaaaaaaaaaaaaaa

SEQ ID NO: 235379 - DNA, 335 bp, Homo Sapiens
aatttcccagtgatccctccaagtctgtgggatggcctggaatgtaaaaacacttagcaaatacttagtgattaaaagaaaacaatggcggaagctttaagaattgaaaaatcaaaataataagtagagaatttgtccaaacctccccctgccgacattcccccatccccagaaaggaagaaaatgtatgtagataaaaggacagagaaagacagggaaagctgtggtacggaaagaaagagtgtggccacgagcttccagtatgctcactgccaaggaatcctgacacgttctgtttctctgtataaaatcatgaacaaataaaaaaaaaaaaa

SEQ ID NO: 235380 - DNA, 627 bp, Homo Sapiens
tgatatttacctttatgttgaatgctattaaatgttttcctgtgtcaaagtaaaatattgttaataaacctaacaatgaccctgatagtacaggttaagtgagagaactatatgaattctaacaagtcataggttaatatttaagacactgaaaaatctaagtgatataaatcagattcttctctctcaattttatccctcacctgtagcagccagtcccgtttcatttagtcatgtgaccactctgtcttgtgtttccacagcctgcaagtcagtccaggatgctaacatctaaaaatagacttaaatctcattgcttacaagcctaagaatctttagagaagtatacataagtttaggataaaataatgggattttcttatcttttctctggtaatattgacttgtatattttaagaaataacagaaagcctgggtgacatttgggagacatgtgacatttatatattgaattaatatccctacatgtattgcacattgtaaaaagttttagttttgatgagttgtgagtttaccttgtatactgtaggcacactttgcactgatatatcatgagtgaataaatgtcttgcctactcacgtctcatccaaaaaaaaaaaaaaaaa

SEQ ID NO: 235381 - DNA, 438 bp, Homo Sapiens
ctgcaatgggcactgattgagggtcttcctggtgtggcatcatcaaatccctgttgctcaaacccactaattagctcattcttatctacaagtagcaggggccctaaagctctctgagaagatctcatactgtgtctcctacatttcatcttctataatctcttattcttagagacagaaagatggttaaaagacatcacttcatttctttctctggatttggaaagagttatatattgggattatgctgttagtttacacttgcattgtttaaattagaggaaaggttattttgtgcagaacaaataaaaattactctttaactacctttcagaatatcccaacttttaacataagctgttttgtaaaggctggttgtagtgacttgcttcataatagactattaaaataagatgcattgaaaaaaaaaaaaaaaaa

SEQ ID NO: 235382 - DNA, 617 bp, Homo Sapiens
ccgcagctcagcccgggctcggacgcctcccgaggtccgcgcctggctgcaggccaagggctttagctccgggaccgtggacgcgctgggtgtgctgaccggggcgcagcttttctcgctgcagagggaggagctgcgggcggtgagccccgaggagggggcacgtgtgtacagccaggtcaccgtgcagcgctcgctgctggaggacaaagagaaagtgtcagagctggaggcagtgatggagaagcaaaagaagaaggtggaaggcgaggtggaaatggaggtcatttgacctgccaggcgcccttcgcaaagagtgacgaggccccgtgggagaacggactcctcagactctccccaatagcggaagtcgatcttctgaaggatggccaatctgctccggccctggtcttcccccatcccggtggacagacttaacgatccttgctgcagtccctccggagaggatctggactggctgggagtggggagggcgtggagacagtctacggaaagcgctagcagacccccgagagggtgcagtggagccctgagcattgtaatatgcggcccagcctataaacagcctccgtgcttagcaaaaaaaaaaaaaaaaa

SEQ ID NO: 235383 - DNA, 695 bp, Homo Sapiens
ggtttctcattctacatcctctgatctctatagactgtaggatctttgctttcaaagataactgggttagagggtggggtgtgcaataggtgatttatcatggttttttcattatcaatattacatggatgattttctcagattcttctgaaagaagaaattgacaggcactgctagattcagctattgaatggctgaagagattgagtatttgaccttctctcaaaatcataaagtgagaattcataaggcacccaatgttaagatttatccagatttttacattttgatttcttctctctgtggggtggcaagttgagggagcattcttcattttagcttttacctgacaaccaaacttgcctttaccccatccctagaattggtgctcttggaatattgctgttaccatcatttttggggggccatcttcctaatgctacacacagcctgacaggggagcagcagatgaaagggtatgctattctgtttccagatgtttctttatgtaaatatgacgccaatgtaaatcctgtgtcaagatcatagagaatggtgctttttactacagttagcacatgcatttttagaaactactacatgttttagagaatctttgctgtgtatatgtaaactgtattgttcaactgttaacaaataataaattatttcattattaaagaaaaaaaaaaaaa

SEQ ID NO: 235384 - DNA, 700 bp, Homo Sapiens
  misc_feature (96)..(96): n is a, c, g, or t
tcattaggcttgcagacaatgtcacctaaattgctgaatgtactcattataatatgatatctgacaaaggtagtacagcgtttctgagtcatttgngaccaactgcagtggttgtttaaaatgctggttcctgcacacaattctctatctactgaagcacatctgttttctttgtttgttttgctttgctttttgtttttaaagtttcccccagtgattccagtgcacctgaaaagttgagaaccacaggcttagtggtacgttggggtttcccacgctaggctgcatagcattataacctgggaacgttaaaaaaaatacagacattcttgattcttagtgtagttatgatgtggatcctacgtattttttaaaaaactctccagataattttgatgtcacgagtcactagtatagactatctatctagtgagttgtattataagcgatgaaatactttaaaagctacccagtaactcttgggattaattttatgaaataaattctgagctgctgcttttgatatagtcagacttaagactgaaccccagtagacaggcaatagatatagaattctggttagctaattgaacttttgtgacctgtttaaaaacaaatcaaatttattgaacaaatgacaaggcacaaatactttcagaattgtatttcagttttgaagatttaaaaaaaaaaaaaaaaa

SEQ ID NO: 235385 - DNA, 681 bp, Homo Sapiens
  misc_feature (72)..(72): n is a, c, g, or t
tggacagccaccgaaacgtgatgatgaggttaatctacagctgaccatgggaaccttctctctttcgctctntggactaatgggagttgcttttggaatgaatttggaatcttcccttgaagaggaccatagaattttttggctgattacaggaattatgttcatgggaagtggcctcatctggaggcgcctgctttcattccttggacgacagctagaagctccattgcctcctatggtatgaaggatatggttcacggcggtattgtggaagggttatgatcatgggccctaaagtcagagcgcctgggattaagttgtcacaggcactatggcccttgcgagttgctttctcaaacttccttcagtttccctatctgtcagttaagtcggtattacctgcttcatagggttatgggaagaattaaacaatatgtgtaaagcacttactagcacactgcctaacacaataagttagaaatataatttgtgtagaactctgacaacatacatttaaacagatgttagtaattctggtataaggtttgtcataaccaaatggaaatgtaggaaacatttataatgttcttaaaagatagaaaattcacctccattttctttgtacttgaagatggcaccactggaataaatacttaagacactgaaaaaaaaaaaaaaaaa

SEQ ID NO: 235386 - DNA, 344 bp, Homo Sapiens
tagaaatgaaggaataaagtgatcccaaaatttcgtatcttcaaatcaatcttatagttttataacattttaaccctaacattttattgtattttgggttgcaattactcatggcagatgaaagccatggcttctttttctagaaaaataaatgcacacatactgccaatttcaccgacagcttgaggagtttcatgaacttgccatcatctggtggtccctagtctgaattcttgatagaaaataacctagtatgttcatgtatacatatgtaactaacctgcacattgtgcacatgtacactaaaacttaaagtataataataataaaataaaaaaaaaaaa

SEQ ID NO: 235387 - DNA, 626 bp, Homo Sapiens
attcggcacgagggaattactgcaaatctttcttccttacacattttgatattttattatctgttagtatcccaatgagaaggtggcccaaagaaatgaagaaacgcaatatttagtactgttttctttctagggaacagcagttaaaggtggtggtagaggaagctataacccttgattaaaatagaagcttgttttttgcctatggatttatccatatgttctggtctgtgggagccaggaataattgagaaattttaatttaagaattagtttcattgaagtacagggacttatacaacccagtattagttttgagcgtacagacatatgtggaactattcttggaaagtctacaaagtgaaatctatcgagttatttctcatttgcaaagtgatcctttgagtcatttctcataatctataatctgaatgttaatactggtatttttaaaagccctacatcccaacagaccaggccatctagatatttcagcgtggtgtctcaggatgagtaaacaaacagctaaaaatatatgacttatgtaaactagagttacaggagttactagcttttctgaaagggatatattctaagtattttttcttaaaaaaaaaaaaaaaaaa

SEQ ID NO: 235388 - DNA, 682 bp, Homo Sapiens
attcagagaaaagacagttggtgagcatattaagagatatagggaacagatttagatgatccaatatgcttattatcagaattccagaaaaaggcatgaaatcataaagaagacagaataccaggcaaaattaatgaaaaaatattaatccaaacacatataataaaaagtatcaatttcaagaataaaagaatatataagcatttaacacacataaacattggttacctgtaaaggtgaaaaaaaaaaacaggttcagattttctgcttaaatatcaaagggcaaatggaacatttttacgatcacctaaaattcttgaaataggccaagatttttcatatacaaaggcaacagccttcttgccacaactaagttcagtgtacaagggtgcatggactcttcctgaaagaaattactagaaataggattctgtatgataagagattaatctactgaagatcttaagaatgggaaagatgtgatatgaaagaaatggtggtaagcagtaaaccagtaagactcaggatgaatgtcaaaataattgtaattttctgaaacaaccagaaaatcttaattattaatagaagttacaagaaaatgatctggacttaaaagtccaggaggttaagatagtataaaaagtatatatatgcaaactctgttaaaaaaaaaaaaaaaaaa

SEQ ID NO: 235389 - DNA, 548 bp, Homo Sapiens
gcacgaggctcatgcccattctctttactgtctagcatgctgaaagaaggaagtgatctaaatgccagcgtgttcagtggtaaatattagttggtgcaaaagaaaaaccatgattacttttgcactaacctaatagctttgcaaattttaagaacttgctttatgaagatattcggatatggattctccccaccccacatacttagacattgttcaaatatactacttttaaaaaaacaccttttcaaacagaattagcgttttgccaagtctggtattaatggaattgtacaggagctttgaaagttttcaaactttattaaactaaaaaaaaaaaatcgaaaatctctgtctgttccgcatagtatgcatttatttgacccctatttatcaatactatgatggggttttttttttttaaagaaaatttaagagtaggtaggtggattttaaaataatattttaaagaccttttatatctatatgtagcatttatagaaaaataaaaactaaaaatagaattgaattgtaaaaaaaaaaaaaaaaaa

SEQ ID NO: 235390 - DNA, 641 bp, Homo Sapiens
tagaggagggattaaagcagtactggtaaaagatgaatttaactttagggtagaggctaaagtgggaacggtaaggaaggaactggaaatactgtgtgtgagacatgagtaggatatgggttttatcttggcttcctggagtgtagttttgaggaatctggggccccattttctaccgtgttgcctatgggtttaggagggagagcatttatttatgcttgggtatttgttatctctgggctttttggaaattactaaagatgaatggtaaagtcagtgtgggaaaccttgtggaggagaaataaatagccagtgtttataaagggtggttattttttagaggaattgttatcaaatgatagttaatgcttattgtagcaaaatttaagtagtttgaatttctttgggttgatctttttttaaaaaaaaaattaggataatccaaacctttttaaagttctaaattggcaggcagactacttgttcgttcttttgattgttcattaatagcagatgaatcctagggcagatttttaatattttagaaacatattttcatgtatttatgaacattaatcccaagatatttatatgaattttataaggaaggcagtgttacaagataaaaaaaaaaaaaaaaa

SEQ ID NO: 235391 - DNA, 551 bp, Homo Sapiens
gcacgaggttaatatccaaagaggctttattgagagtagaaagaaagacctcatgctagaagagaaaaataagaatctaatgaatgaatatgatcatttaaaagaaagtctctttcaatatgagagacagaaagcagaaacagtagtaagtatcaaggaagataaatattttcaaacttctagaaagaaagtttaaacatttggttctggatacatgttgaacctagttgaatataaaaatcagtagataaaaagtgtgtttactatactgtataattccatttacatgaagcatccagaaaagagaaaggtataggtacaaaaagtagaataatgtttgtgaagggctggggctggaagctggtagtgactgctaatgggcgtgagggatcttgcagtgatggaaatgctctaaagttggattgtagagatggctgcacagctcagaaaatgtactaaaaatcttttaactttatgttaaaacagatacattctatagtatgtaaattatatttcaacaaagctttttggtttaaaaaaaaaaaaaaaaa

SEQ ID NO: 235392 - DNA, 529 bp, Homo Sapiens
cgccacgaggagttaagccaggagaaagttcactttatttacataatttatacgtaaaaatttaataaatctccctgcttcttttcttttgcatcataacaaccactgaaaataatatttctatggcagttgggggtaaatggacaatagcttttgtgaccagaggtgaatggcccagggtctccagcactccaggtcccactgagcctgccccacagctgagggcatcggtatttccacacacctataatgtacagtgccccagaacagagatcggatgctctgctttattcagatggggtgttgagagtattgtcattgtaattgaattagtaagtaagtatttatacactgttaaaatctggttggatttgtgtcccttcacaaaacaaattgcttaaatgaaaccacagagttaacataattgactacatctgcttctatgagctgctgttctaacatttaactagaatctaatttgaaattagtcaataaaaagtttattcaactgaaaaaaaaaaaaaaaaaa

SEQ ID NO: 235393 - DNA, 569 bp, Homo Sapiens
gagagtctgcccgagcaactccctgtggccgacatgagggcactcctgacaggcaaggactgcccccatgtccgggagaagggctccgggaagcagaacaaggacctctatgagttggccttctcaatcagctatgaccgtggggaggaggaagcgtacctcaacttcattgccccctccaagcgggagttctacctgtggacagatgggctcagtgccttgctgggcagtcccatgggcagcgagcagacacggctggacctggagcagctgctgaccatggagaccaagctgcgtctgctggagctggagaacgtgcccatccccgagcggccaccccctgtgcccccaccccccaccaacttcaacttctgctatgactgcagcatcgctgaaccttgacagtgtggctggccatgggccacagctgcggccactgcagcagccatgaagggcagtgggtagaggagtgcaggcaccctgaccagcagagattgctgcagaaataaagtctgcttggctcttgggatatgttgagccagctctgtaccttgaaaaaaaaaaaaaaa

SEQ ID NO: 235394 - DNA, 511 bp, Homo Sapiens
tttgaaggaggaaactgatgacagatatacagggcacttgaaggagactctgatgctagttatataagtgcattaacttaagacacggactctgtgggtaacctgttaggttttactaagaatttaggaaaaatttactcctctttatcacaagttttccaaacctccttccccaccctatctaaagtgttccttacctttcatgggcccagcgagggtagaattcagaatagagagttatactcctgcatacatgctctccctctcattgaaaggtttcttagtctagctctgctcatgaatgaacaaagaagcaggcatgtaaaatggatccttgtcctaacgtcactttcccaagtttcaaaagtcacattttcaggtatttaaggaatagtttgaagctaataccatcaggctcagagtttacatgcatttttacttaggaagtggtaaacgggtgaaagagggtttcaataaaattttaaataaaaacagcaaaaaaaaaaaaaaa

SEQ ID NO: 235395 - DNA, 645 bp, Homo Sapiens
tcctctgcattattatgaatgaaaagcattcttaattttagttaaaattaagttagtcatatgttattttattaattgtacttctatgaaataatatgcagtctatttttaaattataaattatgtgtgaacttagcttttcaattcaacatttttaacatattaaatactattgtgaattcaatgaagtgttcttatgccactaactttaacctattcccttactcaaggatgtaggtaaaagatggtaacaatacactatttggtaagataatgtactgacatctctagcaatcttttttgccagtggctttaaattgccaataagttaaagaatattgttcctatgggttaaatttttattcttattttcacatttaaatttatttttcttaatttttgtggatacataatatgtgtatatatgtatgccatatatggtatattttgatgcaggcatactctatataataatcacattagaggaaatgagatatccattacctctagcatttattctttttattacaagcaattcaattgtacacttttagttatttttaaatttacaatgttattgattacagggtcatttttatggtcataataaaaaattttatacaaacgtgaaaaaaaaaaaaaaaa

SEQ ID NO: 235396 - DNA, 600 bp, Homo Sapiens
gagtagcaaggacgtttgagatgggtatatcagtaagaagagggcacaagaactggctctggagaccaaagcagttgttaaaaattctctttgctgggggccgggtgtggtggctcacacctgtaatctcggcactttggggggctgagacaggcggatcacctgaggccaggaattcaagaccagcctggccaacatggtgaaaccctatctccactaaaaatacaaaattagctgggtgtggtggcgcatgcctgtaatcccagctacttgggagactgaggcaagagaatcacttgaacccgggaggtggaggtggcagtgagccgagattgcgccattgcactccagcctgggcaaaaagagtgagactctgtctcaaaaaaaaaacaaaacaaaaaaaacctctttgctggtatatttgaagagcttgggatggatttgactaaatctgccccgaggagggtgaacaaggtgatctcagagatcactactgctcttggagttccttctcctaaagctaaggccagcctccatcacaaatgcccataaaatctggctcgtctttgatgaacaataaatatttgttgaacctcgtgc

SEQ ID NO: 235397 - DNA, 538 bp, Homo Sapiens
tccctgcagagggttaaggcgcagactacctgcagtgaggaggtactgcttgtagcatatagagcctctccctagctttggttatggaggctttgaggttttgcaaacctgaccaatttaagccataagatctggtcaaagggatacccttcccactaaggacttggtttctcaggaaattatatgtacagtgcttgctggcagttagatgtcaggacagtctaagctgagaaaaccccttctctgcccaccttaacagacctctagggttcttaacccagcaatcaagtttgcctatcctagaggtggcggatttgatcatttggtgtgttgggcaatttttgttttactgtctggttccttctgcgtgaattaccaccaccaccacttgtgcatctcagtcttgtgtgttgtctggttacgtattccctgggtgataccattcaatgtcttaatgtacttgtggctcagacctgagtgcaaggtggaaataaacatcaaacatcttttcattatccctaaaaaaaaaaaaaaaaaa

SEQ ID NO: 235398 - DNA, 634 bp, Homo Sapiens
taagatgtctactagatatctttaagattttcctgtaaactcactgcacaaactggaattactttccaaaagacttagggaatgcaaatatgttattcataagatgcattgagtattgtaaataaaacaaaccatttttgatttgtttaaattgctcgttacagttctcttgtggggagggactttgtcagtcattttgcatcttaagctagactaaactttttgttgttgttttcctaaaaccataggtgcaagctttgccgctgggaagtcatattgaattaagcacttttgaaaatgtcactgtttgtgacacacaatgttctctacagaaaacttcttctatcttatgtcattttagcagtagatgtaactgcctgccaccaggtgcaatatgtcatttgcatcagccttttcagttaaggaaattaaaacttggcatgcattagttcatatgtatgaggttggctgtgtccccaaacagcaattgcttgtacaagatagaagtttgcttctcagctgggcatggtggctcatgcctgtaatccaagctctttgggaggccaacgcgggaggattgtttgagcccaggagtttgaaaccatcctgagcaatagagagacccccatctcga

SEQ ID NO: 235399 - DNA, 575 bp, Homo Sapiens
acaaagagccagccagtagcccttcgagcctgtgggcttccctcagggtcgtgtagggataaaaagaactgtaaggtggtcttttcccagcaggaactgaggaagcggctaacacccctgcagtaccatgtcactcaggagaaagggaccgaaagtgcctttgaaggagaatacacacatcacaaagatcctggaatatataaatgtgttgtttgtggaactccattgtttaagtcagaaaccaaatttgactccggttcaggttggccttcattccacgatgtgatcaattctgaggcaatcacattcacagatgacttttcctatgggatgcacagggtggaaacaagctgctctcagtgtggtgctcaccttgggcacatttttgatgatgggcctcgtccaactgggaaaagatactgcataaattcggctgccttgtcttttacacctgcggatagcagtggcaccgccgagggaggcagtggggtcgccagcccggcccaggcagacaaagcggagctctagagtaatggagagtgatggaaacaaagtgtacttaatgcacagcttat

SEQ ID NO: 235400 - DNA, 606 bp, Homo Sapiens
tttttttttttttaaatcaaacactttatttccacataacaagcgcaaaaaactcccaaacactttaacaatacaattaacgcagttatgaattatatactactcaaagccccaaggtcagaaggtcaatcagcttaacgctccaaacatttccagacatggtttttcaaagctacctttggtttttggaaaaaccagtatggaagtcaatatacattgaacgcactgaataacatttgcttatagtaaggtgtccgacaacattagctcacacctggcaagttggagcatgatctgaagtcatacactgaaatccatacacaggtttcgcccccgagctcctgcagggagaagcgagggccgtgaagggggaagaaaaggccagtccgggtgtggcgtttctcgctttgtaacagaggtatgagagtttaacactagtacactgtcaagtcattaagcttcatgttccacatggtttcttgctgaggcttgagatgggcacaaatggtggggaagatgaagtcacagaagagttttgagcaacaagatcccaaagatgctcagagagggtgggaaggagcaagctacagtttccccggacgcgtg

SEQ ID NO: 235401 - DNA, 610 bp, Homo Sapiens
ccttttttttaaggctgagattcccaaaatgagaatactactttataccatttgtttataagtatgaactgttcttataaatattaatatttacatattcactaatttaacataaatgaaaattaggattaaaaattgcaccaaagcatcggcaaaaacaatactatattctttaaaagtgctcaggtagccaaggcccttgcttttggtatcaaccctcatgaacccataggagctgaatatttgtttcactgcttaataatcctcaatttacactattcataactcttaaaattattctctttttttctaagagcccctcccttccaaaagtgtatttttttcaaagattttcacttctcaattgttgcctttgtacatactatagagtgttgcttgtaagaaaggctaatatggaaccaaactcttgtaagtaatgtaaatagaaaggtgggtggataaagttttcaatactttctactacctcagtttacttgagtactacattatagtttattctttgcttatctggtctaagagacttttaatgctagtagtaaagttggtttctgctttcattgactattttcatcataatttcatcattgat

SEQ ID NO: 235402 - DNA, 642 bp, Homo Sapiens
cccgcatcctgcagacaggcgctcccgcagggggcccttgtggacctgcactggagtctgttgccttcactgagctgcctgtgctggccttgcatggtgcctgtagggggatttgctttgctgtgccattggggtacagctgctgctcttactctagaccaaaaagtcgggttgagtgactggtggcagggccacagatagagacagcggggagggtggctgaccctggcggccctggactgagcgtctggaggagtcgtggaggctctttcccttctttctcctctgagagctcgttcttcaggctcttccagcttgtcatgtcgagtgcctggccactgctcagggttggaggctcagtccctttgccctgtctgttccagctctggagctaactcagggatccctgatcagggttacataggtttggtaaaatgagtgctggaaattaactttctcccagtagtcttaggtcatgctcagtgaacttaaactttatccagatatggttttccttcagcctttctattccctttctagccagtgaaagacccgctgccctttgacctcagcccctccaagcccccaagtttaaaacgccaccccctgccaccagaaaaaacagaaaaaaaaaaaaaaaaa

SEQ ID NO: 235403 - DNA, 635 bp, Homo Sapiens
aattaagatttttctttgttccattgtacagtgtaaataactaagttgttaactgtcaagtccagttatgtattctgtaagttgtgttctagtctttgactaaaatttatcatctcttataatgggacttaatctttctctaaaagcatataagagcttgtcaatagagcaatcaatcaaaaagattttgtgattcataacattgaagttagtctggttaagagttttggtttagacttcatttatattttccttactaatatctaatatttaatgaataatgatcaattttttataaagttattaatatgatcagggaaacctttgggacttctgacaggcatctggtgaagagacaattcaagccttagtgactatttagaatagccagtgatcactagctaattctcatatccatgcctttttgtcctgtttacagtcttaaaagaggtaaaacagcaaatatttttttaagggaactataaccttaggattcctgaaaagaatttcaaaaaaaaaataaagacactgttgccaatgtgacccaaaacttaagaacatactaatggcatatatttgttacaattaaaaaataaatttactacttaatcctaaaaaaaaaaaaaaaaaaaaaa

SEQ ID NO: 235404 - DNA, 625 bp, Homo Sapiens
ttaaaattaagacaaatggaaaattatactttgagtatataatttgttaaatattactttatatggtaattttatgtataatttcatatattggtaaaattcaaaactacacttgagaatttttttatcttaagtttggggtgaatggggtggatgagactgattgaatagaaaagggctaatggcccaaacattatatagatttctttttttcagtcagaggccttatttgatattttataaataaatgacagtttttatttttaaactttttattgtttttgggaaagtattccttaatttaatgacacattcattcagatacttcttatccctgctaataaaggaaatctatttcaagctacaccattgagattaagtctgaggcagttcattgaggcagctctactataaaagcttacttgataaataattatttttgtaaacaagttgggttaacttattcttcgtctttttgcttggatatgaatttaaggtcttcatgtttaaagacatttactttgttatttagtgacacatttccatcctattttttttttttttttggttgttgttaaacagaaccttaagtttatgtttgaggtatgtactgcataggaaccta

SEQ ID NO: 235405 - DNA, 550 bp, Homo Sapiens
ggccacgtgtagccccagctgtctgcaggcaccaggctgggatgagctgtgtgcttgcgggtgcgtgtgtgtgtacgtgtctccaggtggccgctggtctcccgctgtgttcaggaggccacatatacagcccctcccagccacacctgcccctgctctggggcctgctgagccggctgccctgggcacccggttccaggcagcacagacgtggggcatccccagaaagactccatcccaggaccaggttcccctgcgtgctcttcgagagggtgtcagtgagcagactgcaccccaagctcccgactccaggtcccctgatcttggggcctgtttcccatgggattcaagagggacagccccagctttgtgtgtgtttaagcttaggaatcgcctttatggaaagggctatgtgggagagtcagctatcttgtctggttttcttgagacctcagatgtgtgttcagcagggctgaaagcttttattctttaataatgagaaatgtatattttactaataaattattggccgagaaaaaaaaaaaaaaaa

SEQ ID NO: 235406 - DNA, 601 bp, Homo Sapiens
tgaaagttactttttttccatcatctgtatataaaattatttttatcatgatgtatattatgtacataaataaaaggccatgattattgatttatataatagaattgtatagattatttttgcacagttttgtcataaattagggtggtaatgaactggattgaactactatatgtgcattatattgaattctgcttgtcattaagataaggtgaataagtgtcttaaacgtcctgtaaaaccggactcccctttgttacatgcacattttccattgttacctcgatgcaaaagaattcatttagtaggtacatctattgtagctgtgattattccagtttctgtgtgatgcaatcaaatgtcctattaattaattattatttcatgtcatttgtagctactgatacagcagaaatgaagggaactgtaattacttgtatttttgtaagccatacgttaaatgtttgttacatcatctttctgcttctatttttatgccaatgaaggcatttgtcttgttactaattacatgatgtaactacttcttgatataaataaatttttattttaattactaaaaaaaaacggcacgagctcgtgc

SEQ ID NO: 235407 - DNA, 615 bp, Homo Sapiens
gaggaatttgttaacagatgtttagggttagatggactgcttgcctgagtctgtctgaaagtgtgttggtttgcatgtttgatttttcagaacccattgtccctgccctttagtcttaaccagatcatttcctgcacatggctgtagaacatactggccttttctgtgtcctgcataatatattccactaaatgaagtgtgctttggctttttgtattttgtttttttacagaggattattttctaaagagatgttagctttctaagccagttgttaaaattcacatcatttcctgctttgtagatgtttaaccctcaatgctgcatccttgctttgcaataaattttcccaagtgtttcaggctgtgccaacatagtttttgcttccccagactaagcagtcaagtcacagtgtttaacagttcaaaaatttaatgaactataagacacactaaaagatgtttggattttagatcgttataatgtagtattcaggccttttttaggccaaggatgatcgcttgggattattttgttttttgccagcctggcgtgatgctgtgcacaccgtcagttcttaataaacattgacttgccagaaaaaaaaaaaaaaaa

SEQ ID NO: 235408 - DNA, 574 bp, Homo Sapiens
ctggaggagcagctcaccaagaatatgcacttgcacaaggatatggaagttctgtcccaggaaattgtgcggctcagcaaggagtgcgtggggcctcctgacccagacctagagccaggagaaaccagctaaagacctgcaggctgcacccacctcctccccttcctaccccctaggatgctattcccttgggctgtggtggaaaaatgagggctggagccaaaatcaaatagcttgggagactggacattaaaggggctagaggcctgatggttagtgttaatgatcctgtcttagggcagaggccaccagggagtggggatcctgagggaaggggcagggatttctccttcttcttggtcctggctcccaagggcttctgtcttcatctctgcatgagctctccttcccagagaccaactcttttttattttattttattttattttttaatttatgtctggagcctggctactctgcatttgggattggggatgctgggtgggtgtgtggtccatgttcagcgttctagcaacacgtgtgtgtgtgtgtgtgtaaaggctatgcagccaaa

SEQ ID NO: 235409 - DNA, 1000 bp, Homo Sapiens
  misc_feature (198)..(198): n is a, c, g, or t
  misc_feature (210)..(210): n is a, c, g, or t
  misc_feature (490)..(490): n is a, c, g, or t
  misc_feature (494)..(494): n is a, c, g, or t
tttttttttttttttttttttttttttgcatgtttgttgtttgttatttgcctcccaacatcagaacataagttccatgaaaacaggaacttggcctgtgttgttcaccccactgtctagaagagtatagacaataaatatttgttgaattgacaaagtagtaacttgtaaatagtctcatggataaattattaaaangctaaccaaggngatttatttcctgcttttgaataattttccagataaagtttcccatttactttctctggttatgttgaggaccagggcagaaacctcttgctaagctaggtaaggagcctcaactgaccggcagaaagagtacacactgtatgacctctgaagggtttttctgtaggcaccacattcagcacaaattagcttccacagccaaaagagctctaacaggccggccctcaggccactttttaaacacctctgcagtcgacactacacctagccaaagccaagngagngtcttccgttgttattcacactagtatcatcacagttgcattcaccaaatattctgaaacaaacaagttaatgatcaaaaaggaagacagaattttatatctggaacctcgacttatggacacaaccttcatttccattcctcaaaggttaaataaaaactgaacatgtaaatataacaggagaaaaatacagacgtgaaaacaactggaggcaggaaaaggagtatcaatgtgatttatgcaagaggctgctgaagagattaagtccggaacgctctctcaaaacccttactacaaaataaaaaagcccaaatttcggcgtcacctgctcagctaaaagacctatgttcttaccttggttacttagatctagtagttatcttctgtagtgttaccattgacaacagataccaaacttccacccctcgccaatcaattcaattatgtaggtaagagataaaaagaagctgttgcttttagcttatgtgttaattccagcctaccct

SEQ ID NO: 235410 - DNA, 341 bp, Homo Sapiens
gaattttaaagagatgcattttactatatcaaagaacatacgtgtatttgcctaaacactctgtacctttgtaatgataaaacttcccccttctttacggtgaagcttattctgattaagcctagactgtgttctttttttttttttttttttggtctgatgatgaatttgtgaactctatctttggtatatcttttattaaactgcactgttttgtttagtcaaggtaattaagtaattatgtatttgaataacttggtgtgtcttgagtgttgtggtatgaaaagcattgtggtctttctacactaatgaagtgcaaataaaattttgtatttatgaaa

SEQ ID NO: 235411 - DNA, 814 bp, Homo Sapiens
  misc_feature (27)..(27): n is a, c, g, or t
  misc_feature (37)..(38): n is a, c, g, or t
ccaggtttttttttttttttgtttttntttttttttnnttgcggtcatataatagcttttatttggatatttgccattttaatattgtagtcgttatctctccattttttaattccctgagggtaactgtgaaatatttgcatttcataatgctaaaaagtaaatgtaaagttaaattttcgatatggtggtaaagtcatgagtatttcaatgttgctgaaaaggctggttgttttaaatgaaagcattcatttaaaatatatgcagcagccaacaaaaagaaatgagacgaacccccttagaactaactgaaatattaaaccatatggattatttataactcctgatttccttaacggcatagtaataatattgaagaatctgcaatttttacaataaatggctttgtgggcatctggcttgggattttctacttgaaattcaacccagtgcactcagctgacttttccctcaagttggtagtctatgccttttaccactgttgatttcaaggtgttcctgtgaacctgctaaaatattatcctttgtgagaagatgcatcataagaagtgtctcctcttttgtcttgtagctggatacacagtatcgtcgctcatgtgcagttgagtatcctcatcaggcccgacctggcaggggatctgatgccaggtgatgcttattttcttcctaaagtaggttactggtcatatcttttttccaaatattaaatgcaccttgccagatattctcctgcagctcttgcctacgatggcatcaatttacacctaaggacctttgaagagaaaaattcccc

SEQ ID NO: 235412 - DNA, 362 bp, Homo Sapiens
  misc_feature (29)..(29): n is a, c, g, or t
  misc_feature (31)..(34): n is a, c, g, or t
acatgtttttttttttttttttttttttntnnnntgcctcatttttcttcttgtgtttttattttccctttttgcaggtctctgcatttaatgaggaagtgctgtcagcagaaaggagaggaagcttcaccccgaccatccgcaggacccacatccctctcagcgggaaggcagaatcattcatctattgctctccttgaagggcagctccagacactcacgtggacacaagtaggaaaagcacagagtgtgtcatcacactgtgtacctcatacaggtgacgtcctggagaaacctctgaaggcaggatgaccacaccggagaaaattctacagaaacagttttgcggtcacagcagcccc

SEQ ID NO: 235413 - DNA, 473 bp, Homo Sapiens
ggtagacaactgacaagctatcagaaccaatagagttgaaaaaggtaacagtacaagattaatacactaacatatagcaatattttatgggaaaaatggatatttatttataatagcaattaaaaatcacctagggaaagcctaacaagaaatatgctagagtcttatgttcttttttgaaagatagataagaaaacttcaataatggagcagaatatcatggccatgaatgggaaggttatattgtaaagaattcatttgaatcctgttttaaaactctcaataggacttagagctagtcaaactgattctaaaattcatgtgaaagtgtaaattcaagaatagccactacttaaaatggtacacattagatatgcccccatactatgcttaggaacttatacggacataccttagagatattgtgggtttggtttcagaccacggcaataaagcaaatatcacaataaagc

SEQ ID NO: 235414 - DNA, 699 bp, Homo Sapiens
  misc_feature (13)..(33): n is a, c, g, or t
  misc_feature (35)..(43): n is a, c, g, or t
cggcccgacatgnnnnnnnnnnnnnnnnnnnnntnnnnnnnnnggactaataaaattttatttcttaaatataaatttgacctaaaatattttctcaaactaattcatgaaacagcaacttttaccaatacctttgtatactctcagttctcattcagtataaataaaattttaaaatcctttcatagttctattagaaataagtagtaaattttgatatattgtacatacacacgtgtgtgtgtgtgtgtgtgtgtgtgtgtgtgtgtgtgtgtgtatttgtgtgcctctggtcaactctaaggatgacagacactgtgtaacaacacctgggtcaactcttttaatttatatacaaagcaaagaacaacattaatggagatgcacaatgattattcaaacaagctatatatatgtacaaaggcaaacagacacataacagtctctgcagactgattgtatatagtaagaaaagatcaaaagactttaaaacctaaatgacttttgacatacaaactcttcttgagaatgtttgttgtaaatggtttcaaaaatacaaattatagccaatcaaaacattgctttggttggtgcatttaagtatccaactcaaaaagcatatcaaatattttgggtactaggcagtttccaaagtagcatggtagtattacttgttaaaagggttctgttttcattacc

SEQ ID NO: 235415 - DNA, 629 bp, Homo Sapiens
  misc_feature (11)..(14): n is a, c, g, or t
  misc_feature (16)..(17): n is a, c, g, or t
  misc_feature (20)..(36): n is a, c, g, or t
gccgaccaagnnnntnnttnnnnnnnnnnnnnnnnnttttggaaaaaataaaaatcatttatttaaacaaaaatatacacacagtgtacaatgaatatggtttacacagaacaataaaacaaaaatgatatctcttaaatgccaacataaaatgatctatttatgcctagaaaaaatttctaggaatacacattattgattcatctaaaatacatatataacataaaaagaaaacaaatgccaacctttcagatgagtaccacaaaaacctaaaagttaaatgttagattaaataaaattataaaatatccacacgagaagtatgtgtatacaaagtattgtatgtatgcagtgaaatgagagtgcccatacagttatatgcaaacttttgaaagtttcatagttgtttaacaaaatatttttaatgttgatagtgacataaaaacatcacaagaattatctagataatatagcaatattgccaaaatttgagtcaatgttacctgtgagtgcaataggtcatcattgatcgcgtcctttcatgacctggcggtaatttagatgattgaaggaatattatgaatgtatttacactgtgagtgtgaaagggcaacatttttcttcctacc

SEQ ID NO: 235416 - DNA, 729 bp, Homo Sapiens
  misc_feature (152)..(152): n is a, c, g, or t
  misc_feature (154)..(154): n is a, c, g, or t
  misc_feature (159)..(160): n is a, c, g, or t
gggaatttcttccccttgggggagaaacccagggcttatggagccccagggttccccctttaaccctttactggggggcccgggggggcccaaaaaggaaattgtttttagaaaaagttttttggaggggccggaggcgggccgaccacgananttttnnttgttgtttgggttttttctaatggagacagggtttcatcatgttgaccaggctggtcttgaactcctgacctcaactgattctcccacctcagcctcccaaagtgctgggattacaggtatgagccactgtgcccagccaatttttttttttttttttgatacagtctcactgtcacccatgctggactgccatcacgtgatcttggttcactgtagccttgaactcctgggctcaggcaatcctcctgcctcagcctcccatgtagatgggactacagggtgtgctaccacacttagaaaatgtttttattttttgtagagacagggtctcactaggttgaccagagtagtcctggcatcaagcaatcctactgccttagtctcccagtgttgggatcacaggtgtgaccatgcccagctgtgttgtactttttttttttttttttttttgagacagagtctcgctctgttggccggatctcagctcactgtcagctcggcctcctgggtttatgccattctcctgcctcagcctcccaagtagctgggactacaggcgcccacccc

SEQ ID NO: 235417 - DNA, 826 bp, Homo Sapiens
  misc_feature (6)..(6): n is a, c, g, or t
  misc_feature (8)..(9): n is a, c, g, or t
  misc_feature (12)..(12): n is a, c, g, or t
  misc_feature (14)..(15): n is a, c, g, or t
  misc_feature (17)..(17): n is a, c, g, or t
  misc_feature (20)..(23): n is a, c, g, or t
  misc_feature (129)..(129): n is a, c, g, or t
  misc_feature (136)..(136): n is a, c, g, or t
  misc_feature (139)..(139): n is a, c, g, or t
  misc_feature (142)..(142): n is a, c, g, or t
  misc_feature (147)..(148): n is a, c, g, or t
  misc_feature (402)..(402): n is a, c, g, or t
attttntnnttntnntnttnnnntttttttggaggaataggggttttgcccatattgccccaagttgggagaaaaaagatttttaaaacttttcctttcatgacacttgttttttgggaaaacaaccancaaccancancancacanncaaaccctcaaaaaaatgtttaaaactgatataaaaccctatcacacagaaaaaaaaaaccatattttggttctcaagatttggtcttctacgttacccaggctgggtctggtcttcaactcctgggcttaagtgatcctcctgcctccacctgagccactgcccacagaccacttaagtattcttgtcaaaaatgtgttttgtttcgtttttgtttttgtttttttttgagatggagttttgctcttgttgcncaggctagagtgcaatggcacaacctcagctcaccgcaatctccacctcccgggcccaagcaattctcccgcctcagcctcccaagcagctgagatcacaggcgtgcaccaccatgcccagccaattttgtatttttagtagagatggggcctccccatgccggtcaggctggcctcaaacccccgatcccaggtgatctgcccgcctcggcctcccaaagtgctgggattacagatgtgggcaaccgtgcccggccatcaaaaatgttttaatgtgagtctaatcaagccactagacctaacttcaagtttataagaaatttaggtcaagaaaaagttaaacatgaacacacgtaaacaaaacatcctggtttacccaggactgaggggtttctcaggatgtaagatcagtgttcaaactacc

SEQ ID NO: 235418 - DNA, 764 bp, Homo Sapiens
  misc_feature (4)..(4): n is a, c, g, or t
  misc_feature (8)..(13): n is a, c, g, or t
  misc_feature (15)..(18): n is a, c, g, or t
  misc_feature (20)..(24): n is a, c, g, or t
  misc_feature (27)..(29): n is a, c, g, or t
  misc_feature (31)..(32): n is a, c, g, or t
  misc_feature (35)..(36): n is a, c, g, or t
  misc_feature (39)..(39): n is a, c, g, or t
  misc_feature (41)..(44): n is a, c, g, or t
  misc_feature (103)..(103): n is a, c, g, or t
aggnggtnnnnnnannnngnnnnnggnnntnnttnnttntnnnnatctccattaaataattttttattttggataagattgttgaaagtgatattttgggatnaatgctaacatttttaggtgaaaataaaactaaattcaccctgtttctctgtaaccttttttttttttgagatggagtctccctctgtcgcccaggctggagtgcagtggcgctatctcggctcactgcaagctctgcctaccgggttcacgccattctcccgcctcagcctctcgagcagccgggaccacaggcgcctgccaccacgcccagccaattttttgcattttcagtagagagggggtttcaccatgctggccaggatggtctcgatctcctgaccccgcgatccacccacctcagccttccaaagtgccgggattacaggcgtgagccaccgcagctggcctccctttcacttttctaaagtgactactagaaaatctaaaatgacgtatgtgtctggcattgtatttctattggaaactactgctgtagagagaaatggtctctagggaggcagaaacatgagaaccacaagaaaggtggatggagggcagtgacagacacatctggtgggtaccttcaggtgcggacagcgggaacccaggagatttgggtgtggacaggcccccatctatgcacagcaggagagtagcatgactgacactaggggtgctgagctgacatacagaactattcagctttataaacatgtgcc

SEQ ID NO: 235419 - DNA, 828 bp, Homo Sapiens
ccagccccttattgcctgggcccaaggttcttccttagggaaacaccggttagtgacccagttccaccttacccttacgggggacccgcgggcgcccaaaagcgaaagggttctaaaaaagtctttttcgaagggcccgaagggcggcccgaccaaggatgacaggatttacccgggccatgtttgtttaggaagagaatgggttttcccccatgttggtccagggcttggtcttgaacctgctgccttcgtgatccacccagcctcggcctcccaacatgctggaatttacaggcggaagccactgcgcctggtgagactggtttcaaactcccgacctcaagcaatccgcccacctcaccctcccaggagtgctgggattacaggcatgagccactgcgtctggcccagtcttcccctattctctggaccacagtttgaaaatcacagacaggtcaacctagatccttccagctctagttttctactgtgttctttcctcttgagaagttacagctcatcatgggcccttaataacagaattcaacagaaggcatcatctgaaaacaaagtcaattcagaaactgttgttgcaagaaggcaaacagaaaaacggcaccatgtcccactggaatctctttcagcgatggagagttttgttttctggtaaaaaatatagaaatagtggttgtccttgaggggacttgtggtttggttctaaacctccccatggagccgagtggtgtccctgagggtgaggagggcagaggtctctgctcagagctgctctgagcccatccgcaagtttttgatctccagttccaaccc

SEQ ID NO: 235420 - DNA, 777 bp, Homo Sapiens
  misc_feature (9)..(9): n is a, c, g, or t
  misc_feature (15)..(15): n is a, c, g, or t
  misc_feature (24)..(24): n is a, c, g, or t
  misc_feature (26)..(27): n is a, c, g, or t
  misc_feature (32)..(32): n is a, c, g, or t
  misc_feature (34)..(34): n is a, c, g, or t
  misc_feature (48)..(48): n is a, c, g, or t
  misc_feature (62)..(62): n is a, c, g, or t
  misc_feature (91)..(91): n is a, c, g, or t
ttttttttntttttnttttttttntnnttttntntttttttttttttntttttttttttttnggtttttttttttttaaggactgccaaanaatctaattttatttttgcatcctttataaataaaaagcaaccgataaccactttcctcttagatccaacttcaatgaccacattctcagaactaccaaaagacttcaagtacactgtctgtaaggaacagtttataattgctgaattttacatttttgcttaatatacaacatttctgcttaatatatcaagcatatttttgcttaatatatttttgtaaactatagttaactcttggaatgtctaaactaccttattttcttcattaataaaaatgagtaatttaaaacttcatgcacatgtaacattttactattattatttttgagacaaagtcttgctctgtcacccaggctggagtgcagtggcacgatctcgactcactgcaacctctgcctcctgggttcaagtgattctcctgcctcggcctcccaaatagctgagattacaggcatgcaccacaatgcccggctaattttttgtatttttttttttttttttgagagggagtctcgctctgtcgccaggctggagtgcagtggcgtgatctcggctcactgcaacctccacctcctgggttcaagtgattctcctgcctcagcctccctagtagttgggactacaggcatgcgccaccacgcccagctaatttttgtatttttaatagagacagggtttcaccacc

SEQ ID NO: 235421 - DNA, 900 bp, Homo Sapiens
  misc_feature (68)..(68): n is a, c, g, or t
  misc_feature (190)..(191): n is a, c, g, or t
tgtgagggtcttttattgggataggggctacttccctttttttcttgcctagagaacacaccatgggncttttgagcccgacagaactggggcttgaatcccggctcgtgttcttgctgcaggacctgggcaagaaacttcacctctgctgagccctcattcccccatgtgtaaaatgggacaacgcacnntacctcacagggttgttgtggggatgctgcctgatacataccctgtcaccatttggtctctgcttcctctctgggacagggcctagaattggaggcagagaaccttcctatagaaagtcttcgtgtgtcctaggacttggctatcgtagagtggtaccttaggcagtggatgtgactcacactttcaggagtcaccccccagcatttggggttgggttggccctactccagcctggagctccctgagggagcctgcactccctgctcccaatccccgctactggtgcagggatgcagcctggagctggcgtccttgttctgggcctgctgctgccgccaccccaggaggccccaggcctgtcctgaattgacatcagtgcttccctgaactgcctcccccacccctggcattatcccaggaaacttatgttttctagaagctaagcagctgctgggactcagggactggtgcaggtaggctgagtggcagctcagtcctagaaggtctctgaagatctggactgaggaccctgctactccccaagccagagcccatcagccaggcctgctgtgagccacctgcctgtggagtgctgagctcaaccaaaggctggcaagctctgggcctcatttaagggattctgatgagccgatgggccctggaggcagcccattaaagcatctggctcgttttgaaaaaaaaaaaaaa

SEQ ID NO: 235422 - DNA, 888 bp, Homo Sapiens
  misc_feature (100)..(100): n is a, c, g, or t
aagggccttcgttttttggcctgaaggttactttaatggctcccaaagtagcccacagtgggatgtggacaagaggggtcatggagacaaactactttgncccagttgctctaacgaaagcactcctgccctccatgatcaagaggaggcaaggccacattgtcgccatcagcagcatccagggcaagatgagcattccttttcgatcagcatatgcagcctccaagcacgcaacccaggctttctttgactgtctgcgtgccgagatggaacagtatgaaattgaggtgaccgtcatcagccccggctacatccacaccaacctctctgtaaatgccatcaccgcggatggatctaggtatggagttatggacaccaccacagcccagggccgaagccctgtggaggtggcccaggatgttcttgctgctgtggggaagaagaagaaagatgtgatcctggctgacttactgccttccttggctgtttatcttcgaactctggctcctgggctcttcttcagcctcatggcctccagggccagaaaagagcggaaatccaagaactcctagtactctgaccagccagggccagggcagagaagcagcactcttaggcttgcttactctacaagggacagttgcatttgttgagactttaatggagatttgtctcacaagtgggaaagactgaagaaacacatctcgtgcagatctgctggcagaggacaatcaaaaacgacaacaagcttcttcccagggtgaggggaaacacttaaggaataaatatggagctggggtttaacactaaaaactagaaataaacatctcaaacagtaagagttgtagtcttcaaaaaaaaaaaaaaaaaactcgagactagttctct

SEQ ID NO: 235423 - DNA, 551 bp, Homo Sapiens
ccaaaggggtgaacaaaagaggtttaaagtttgtatctagaaatgaaaaataagaatcattggtaagactagtaccgattattggcaattggtaattgataattggtaagagtagtaccaaatagtgggcatttttcttaaaatacatacctctaccccaaaccccaaatgttaatttagaatcctgaaacaggcaggtcaggctctgactcttttgtttaaggaaatgtaatactgtgtcaactaaactggcattaggttcttagtggagtgtgtgtttgtgtgtgtgtgtgtgtgttttgtgtagaggtatgtttgtgatgaaaggttttgcactgttgcataaagaagtttgattttgtgatttttaaaatgatattcatttggagactttttaaggtaatttaaaagatgtataatttccgtgtgtttaatgaaatctgttgtcgatgtactaatcttggtttacagcatcttgaatacttgattattgaaaattaagaaaaaagttaaaaatgaataaagtgtgttggactgaaaaaaactcgtgc

SEQ ID NO: 235424 - DNA, 560 bp, Homo Sapiens
aagaatcttctatggaaataatggtgccctgcaaaatcttcctttgaactcacaggttagggatcacacaacttacttaatcgttttttgtttttgttttttttccttatatgtcaatggcccatgtcctccgggaaaattagaaaagcaaaatgattacaaagtgctgttagatttcttgtgctgggccagccaagtagaagtggacttgacttggacctttaactattttattacagattggacatttgctgttcagatgttttttaacagagggattatctcagaatcctgtgacctccaggttgttttataatctatttttctctatttaacattcctcagatagataggcaaataggacattccttctgtgtcacagaagtatcgtggtagtggcagtctacagtttatatgattcattgtaactatgagataaagaacaaccagtcatgtggccaaaaggattagatttgatttgatgttcacttggagtttactttttgtacatacaagataaaataaatattggatttgtaaaataaaaaaaaaaaaaaaaa

SEQ ID NO: 235425 - DNA, 544 bp, Homo Sapiens
gaatttctttagggaaagcaacaaccatccctgtaagccatgggttttcatgcggaggaaggagagggctagttgtctgagagggtaactgcttaaggctgcagactaggaaatgggattccaggtttaagatagctcctttctggacctcagtccttcacctagtcacctagtcacagggtggattgcctctaaggatacttaggggaaaaggaaccaaatttgggatggttctccttgctttaagccttgataggagacggggaggccaacccttctctgcagaccgtgatcctcactagacagaggagctccaaacctgcccatctcatcccatgcaccgacggtgcctggcctggctccaaactcccgaaaggaactattttacaggtgccaaaaaggggacagtgttgataataataataaaatgaaacaatctgattggggcattgctggatcagaaaatgtgtgacctttttaaagttaaattgttaaaaaattttaactattaaacattttaaatattaaaaaaaaaaaaaaaaaa

SEQ ID NO: 235426 - DNA, 599 bp, Homo Sapiens
ttccttttccttttgatagatgagtttgagatgatggagtaggagtggggccctcaggcacttctggtaaagacattccacctgcaagcagcattttgagtaaagcactgctgtggtttgccgatttatggtccatttaatgttaggctaaagcacctttaatcatttttgttgttttaagataatgtatttgtgaagtggataaacactggaaatagggtgcttcttctggaaagttcagtgtaaaacacaaacaaggctttggcgggtttatctggctttataaacaagtctgaaaaatggatgaaagctaaatatataaagcagttggttgtctatcttttatcatttttactcagatctgtatttaacacttatttatttgttagtttttacattcaaaagaaatacactttgaactttggctaacattgtaggatattttttaattgtttctacatttttaaagcatgattcatcatttttgtaaacttagatcattttttaattgtcttttcttttccaatagaccagttaccactcatgtgtctgcagaacctctttattgtattcctataataaatgtaaaatatttgtag

SEQ ID NO: 235427 - DNA, 580 bp, Homo Sapiens
caaacgtgtgaagtcaatcatttttcctatagggctctgtttccttttctttaccttctagcttctcttgataaaacagttgggagaactgccaacgtgttcatcagtgagagggtgtggttctttccgatatgttcagcacgtgcatattcatttatgagaaaccaaagtaacttcttcaactcgggttactgtgggatgattaagtagatataaagtgatttaaaagacagcatggtactttcactcagcttaacatgcagctgggatgtctacaatacaagatgtggtgggttttattttattttattttgaggcaggagtgtaattatcttagggttgatataaaggcccatgggaagagttacggattgtacatgggaagaatccataaggagtattgccttgctcaagaatttaatccgctgacagtatgcttcttccagtttgccttacttcctctgcaagtttctttgctccttagggcagaggttttattgaatagattaaatgaggtcagtaagattagttaaaaatagtcattccttgtgggtgttggacacagcttgaaaggagtgtt

SEQ ID NO: 235428 - DNA, 461 bp, Homo Sapiens
gaaattccaaggttgggggcaatgatgaaactttgtacagtatatgaaacagtatattaaccctaaaacctagatgttgtccacctgatgccaaatttcttaattttttttgatgttgttgtctttttcaggagtgtagaaatctatgtattggtggttgtcatttgccagctctctcgtagcatttctggttagaatctttaactagagatgtatacatttctttaaaacttgttggttatccatgtcttgtctgtacatatgaccatgtttcttgacatggaaataccagtcagtgttcctatgtatttgtctatatttgtaaaccaagagaccggctgggtgtggtggctcacgcctgtaatcccagcactttgggaggccgaggtgggcagatcatgaggtcagaagatcgagaccatcctggctaacacggtgaaacccagcctctactaaaaata

SEQ ID NO: 235429 - DNA, 615 bp, Homo Sapiens
gctctccacacagagattttgaagcttttcccacaggctgcttggcaggaaagatattcctctttaatggcatgtaagttacctgtggaggatgtccaccctctgtctcaggcctttttcaaattaaaggcagtgaaacagaccttcaacctggaggaatacagcctctctcaggctaccttggagcaggtgttcttagaactctgtaaagagcaggcgctgggaaatgttgatgataaaattgatataacagttcgatggaaacttctcccacgggaagattcttaaaacgaagaacctcctaacattcaattttaagtcctactgcattattagtttccataattctacaagaatgtttccttttacttcagttaacaaaagaaaatattcaatagtttaaacatgcaacaatgattaaagttttcatttttaaaaattttaggatgaaggaaacaaggaaatatagggaaaagtagcagacaaaattaacaaactcagacatgttattcatccccaacatgggtctattttgtgcttaaaaataattttaaaatcataaaatattaggtttgtttttggttattatcaataaagttaacactgagcacattt

SEQ ID NO: 235430 - DNA, 442 bp, Homo Sapiens
acttttatataaattaggtatttaaagagatgttccttaaagtcataaagatccgtttttattgttaattttggttctttttttgctttccatagaatgttggctcaattaagaaacatcagggagataaattcaacccagtggtaagtaacttcaatttcttttggtagaaagttttcagcagccagttgcagtggcacatgcctctaatcccagcactttgggaggtcagtgcaggagtttgagaccagcctgggtaacatggcgaaacccccatctctgtagaaattacaaaaattagccaggcatggtggctggtggcatggtagtacccttgggaggctgaggtgggaggatcgcttgagcctgggagatcgaggctgcagtgagccaagatcgcaccactgcactccagcctgggcaacagagtgtgaccctgttt

SEQ ID NO: 235431 - DNA, 682 bp, Homo Sapiens
catagctatttctttttttttaaaaagaaacgtagaatattatttcttggttgtgaaatcgcccttcttggaccccaagttgttttttacagccctaaattctcttgtttatagagcctgtttatagagccatagacaggccaatgggtctctacagcaggcacctgcatgagttgactgggacctgagctatattccccctctgccatttactagcagtgtgaccttgggcatgctccttacagtctctgagtcagtttcctcctctgtgaaatgggcatgatactacctacctccttaagttagggttgaggattaatggagtaagaggcacactcctgtccagggccccagacagagtaggccgtcagtaaactgtagcagctattgtgatagggtttgaaattcaaattaacgcatatttcttgagcacccaaggtgtgtgctgctggatctttcaaggggtccagaattggtagtatagttgcttttctcaaaagactgtcgcctggcagaggaaaaggtgttaaggtatgagtgaagacagatcagccagacatggtgccgcttgcctgagatctcaacactttgggaggccgagataggaggattgcctgagcccaggagttcaagaccagcctgagcaacatagcaagattctgcctccacaaaaaaataaaat

SEQ ID NO: 235432 - DNA, 267 bp, Homo Sapiens
cagctaagagatttgatcagccaaatagaagagaccagcccatctcaccatccttaaaagatgggctggggtgagacatatcctacctgagcattggaagggatgagtttggtagacagagaatgggatcagaagcctccatcttggcccctgagtttgctggacaaagatattgtgggatgaaaagtcttcttgttggtctatgagtttggtacacaaacataatggagatgaaacctcggcaacatagcgagaccccatctctac

SEQ ID NO: 235433 - DNA, 381 bp, Homo Sapiens
attaaagaaagcacatgaatttgcatggagtacagactttttttggcattgaattctgtgaagaatatattatatgatcttactaggggatatctgtaacaatgaattataccttcactgctaattttgtaaaagatataaaagtaaacttcaaatgagcatttttcttactcttcttaaccattatcacatgaactcattgccaaggttttaggtatgatgatatcagatgaaaaggtacaagatatatgcttaagtgaagcatttacactaggttttagtgttgatgcaatgtatcttttttcattattttacttttaacctattagtctttatgtttaaagtgattttcttattataagtatgtagttgggtcttact

SEQ ID NO: 235434 - DNA, 410 bp, Homo Sapiens
  misc_feature (1)..(1): n is a, c, g, or t
natccttttaataaatgtgtggtctacatggcaaaatttgctgtagtattaacatacaatgttatctcaagacaattatacattgcagcttcatgaatgcattaagaaagctatgctggccaggcgcagtggctcaagcctgtaatcccagcactttgggaagctgaggtgggtggatcacttgaggtcaggagtttaagaccagcctggtcgacatggtgaaaccccacctctattaaaaacacaaaaattggctgggcgtggtggcacatgcctgtaatcccaggtacccggcagggtgaggcaggagaattacttgaacctggggagcagaggttgcagtgagcccatatcgtactgctgcagtccagcctgggtgacagagacaaatccgtctcaaaaaaaaaaaa

SEQ ID NO: 235435 - DNA, 456 bp, Homo Sapiens
gattggtcttgatagtcattgctataaagtcatggtatgaagggcatacaaggcagaaggagcagcataaggcaatttttttgtggtgtttctttgtttgtttttgagagctgttaagtaattccaggagagtaagagaatgaaggaagataaggttataaaatttggcaggaccaggcacagtggtggttcatgcctataatcccgaggccaaggcaggaggatcactggagcccaggagttcaagactagcctgggcaacatagacaaaaacaaaacaacaaaaatttttaaaaattttttaaattagctgggcattgtggtgtacacctgtactcccagctattgggaaggctgaggtgggaggatgcttgagcccaggaggtggaggctgcgagtgagcagtgatggcaccactgcactccagcctgggtgacacagtgagactttgtctca

SEQ ID NO: 235436 - DNA, 702 bp, Homo Sapiens
  misc_feature (40)..(40): n is a, c, g, or t
cttgtggtcaggaataatatcctttcccctgtagccaccnaaggagggcaaatagagaaaggtaacctaattgaaggattggtcatgtgaaaagggctacatttgggaagctgggaaaggcctccaggcttctagagcagctagcttgggctggattctcacacccaggctgccccttggattgttctacccaagcttttccctggggtctgggctcactccataaggtaaggtgccttttaccttatggtccttctttagcaggtaacaaaggagcatcaggggcaggctgccctggtggcatcacactggctagtgaggccgtgaatatcttgtcccccagcagggccgacagtttctatcacagaaaacagtgtgttcagtggtgaaaatcgttgcatgcatgttttcatctgagcgtgtccttctcccatactccctatcagccagccctgcctgtagctgctgtatggtgattgcacttggacatcagtccaatgactgcaagtcggcctggattttcacttgcagaggctacagctgcattgtcaggtctccccgccctgcagagagctccctccactggttagcagtgtgttgtgttttccattcatttcagaagagctacattgtgtcactggacatttttaaaaactgtgatttttaataaaaatttaaaatttgaaaaaaaaaaaaaaaaaa

SEQ ID NO: 235437 - DNA, 782 bp, Homo Sapiens
  misc_feature (23)..(23): n is a, c, g, or t
tcatgcacttggtgataaacgtnttctaaatttttagttaagtatatggataaaaagttatgaactattaaaaatgtgatgtggaccaaaggctaggttgtaatcttgatagtctaaaaaatgatcaaaacaaatgattttcaaggaatattcaatattctgcctttcagaaagtgtatttatatctgtgcttcataaatattaatgttcttcagaacatcattttaaaggagatacttgaattgttatttaaatcaaaccagatgtaaaacactcacatacaagttcatactttaaaagaggaaagctacttaacaatgacaaatatttcacaataataatttttacttatataccatctttcaactgaacatttcagttcttccaagagcttcttagagtagtatattttgggggcagtcaaggaataaactacagtgtaaacatatcccagatgaaaactgctgtatggaaaaatgacagaaagtaactgattgacactgttgattcacagttcagcctcctatctgggaaagacatttctttcctctgctcactttaagaacttttaccgactccaaaaatctcaggaattaaacttttaacagttacagcaataaagaatagttagtactccaaaaatattatatttaagatgctcaacaagaaaaaaatgcaaatgtaatatttttttcaaattacttctttattgacttgtccaaatttcaaaagtgcctacccttcaataaaacttttttattctgaaaaaaaaaaaaaaaaaa

SEQ ID NO: 235438 - DNA, 679 bp, Homo Sapiens
  misc_feature (35)..(36): n is a, c, g, or t
cacttggccagtgcccacccagcccctcaggtgcnnacatctggagggcaggggttgaggggccacccaccacacatgcctttctggggtgaagccctttggctgccccactctccttggatgggtgttgctcccttatccccaaatcactctatacatccaattcaggaaacaaacatggtggcaattctacacaaaaagagatgagattaacagtgcagggttggggtctgcattggaggtgccctataaaccagaagagaaaatactgaaagcacaggggcagggacagaccagaccagacccaggagtctccaaagcacagagtggcaaacaaaacccgagctgagcatcaggaccttgcctcgaattgtcttccagtattacggtgcctcttctctgccccctttcccagggtatctgtgggttgccaggctggggagggcaaccatagccacaccacaggatttcctgaaagtttacaatgcagtagcattttggggtgtagggtggcagctccccaaggccctgccccccagccccacccactcatgactctaagtgtgttgtattaatatttatttatttggagatgttatttattagatgatatttattgcagaatttctattcttgtattaacaaataaaatgcttgccccaaaaaaaaaaaaaaaaaa

SEQ ID NO: 235439 - DNA, 749 bp, Homo Sapiens
  misc_feature (30)..(30): n is a, c, g, or t
  misc_feature (100)..(100): n is a, c, g, or t
gggaagggtacagagaactgcgtcgcattnataaataaaggtttgactcgtggagcgggtattcacagctatcacttcacatcctgcagaggttgggtgngaaaagactagtggtgatgaatatggcactgataaggacactgaacatttagtgtacaacagatggacatccatttctcaattctcatttttctattttcattaccttcatgtttcacataagaaaactgaggtagaggtgaaataactcatctaaggctacacacgtaataagtgccaggattcaaacccttgtagtcaacttcagaatcctcaactgtcatccccacactaccctcctgatacactggtgatctagactaatgaaaggaccttataccacttactcaagttaagtacatttagaccaaaaataaagaataaagtgctcatcccaatagaaccaatgtcttctgactgtggttagctgctcactatcgaccaacagaagaatgctacaagaaggctgtgatgcagatctgggggatgcagcctaaaactgtggagcgtgctatgcttgagaatgcacagtgattctcagcttgtcagagtatgaatgagttcaaagctgacctcagagagggtactgaaattatgttaacatcgttttcctcgtttgttttttaatgaatgtctgtttatatactatatatattttgaaattatatatctcaaaataaatatgaaagctcaaaaaaaaaaaaaaaaaa

SEQ ID NO: 235440 - DNA, 680 bp, Homo Sapiens
taaagacaccagcaaagacaaatttgactacattgcctacatggatgatatcgctgcctgcataggcacaaagcccagcatcccacttctgttcctcaaggatcccagactagcttgggaagttttctttggaccatgtactccttatcagtaccgcctcatgggccctggaaaatgggatggagccagaaatgccatcctgacccagtgggacagaacattgaaacctttaaaaactcgaattgtccctgattcctccaagcctgcctccatgtcacattatttaaaagcctggggggcacctgtcctacttgcctctcttctacttatctgtaaatcttcacttttcttgaaattggtgagagataaactacaggacagaatgtccccttacctagtaagtctttggcgaggatgaacctgattgttacaagggttacaccaagtcatgctaattctatctccaagtatcttgtgcatccctcctctgctctccatcataactgctattagccaaattcaggcccagtcatctcctatctgaattattgtattatcttcttctttgttttcagtaccctctttcttgccaccctttccaatgcatcttctaccctgctacctcagtgattattctaaaataaatatatatgatatggtttaaaaaaaaaaaaaaaaaa

SEQ ID NO: 235441 - DNA, 809 bp, Homo Sapiens
cagcaggtgtgcagctctgcctccgatatcaagatcacctgcatcagtgtgcagagccgttgcttttgaccagaatgctttggttaaacgaatcaaagagactagatctgtctgtagaaactctgttcagcttcatgcaggagcgccagaaaagatacgccaagtatgccgagcagatccagaaagtgaacgagatgtccgccatcctccgccgcatacagatgggcatcgaccagactgtgcccctgctggacaggctcaacagcatgctgcccgagggcgagcggctggagcccttcagcatgaagcccgaccgcgagctcaggctgtagctgccgcccggcctgcctggggctgggagccccagacaccgacaccctgaggacgtgtggagctaaggtcatatcatctgaccaggtctggaggctggcgggaggctccctgaaagtgggtgcgaaggagtccggctggcatgaaaatctgactttgcccagctcttttccttgatgcagtttcccagtgtggaaggaacctaaccagttctcggtgataactgaagctggaacgtgtgaattattaggaattctttgaagaactctgcattgagaattatttttatttagttttttttttttttaattgagagtatatagtccagtccaggtaccggaataaaaatatggagacaaggggaaaatattttacgaagctctgtgttctcaacgccctcatgaacttttcagtaggctgtctggtttatgtgtggtcaacttgaaaaactaattgaatctaaaaaaaaaaaaaaaaaa

SEQ ID NO: 235442 - DNA, 722 bp, Homo Sapiens
  misc_feature (108)..(108): n is a, c, g, or t
ccagaggcaggtgcccaccctcgccgtcagggagggtgctggccccatccccagtgccacccagccccacccactgttggaagagagaccagcgcgaggtggtgcccnagggtgggcactgctgcttaatgcgaggcacacctggggcagctgagccccccgaaggctgcgggtttgccaaacacagagaggccaggccccagtgtcaggatgcagtcagcctctggcgcagctctttccacgacctggttcctggatgtcctgcttgctccacacccatctacagggaggatgtgagggggctctgcctcctagggccaggtcccccctctcgggagggggtattgggtaggaccatccaagaaagggcagaagaccaagggcagtcggggtctagaaaggagggcgctggccctgctgggcgcttcggagcccccactgtttcccactcagctttgtgctcagatcccaggtcccaaggagtgacaggggcttcctcccaccttctgtccttgtccagtcatgtaaataatgtgctatttctctccccgagtctttttttttaaaacctaccgtggttcctcagctaactgcattccctacccaggcagagactgtcctatgcctcgagcttccaaacgagactcagaccgcgacacagccaccgtatttatggaatgacaaaataaataaagcccaaacccaaaaaaaaaaaaaaaaaa

SEQ ID NO: 235443 - DNA, 741 bp, Homo Sapiens
  misc_feature (46)..(46): n is a, c, g, or t
tgcagcacttctgtgtctgctgctcacagcagctgctttcagcccncaggggcttgctcagccagttgggattaatacttcaactacctgctgctacagatttatcaataagaaaatccctaagcagaggctggagagctacagaaggaccaccagtagccactgtccccgggaagctgtaatcttcaagaccaaactggacaaggagatctgtgctgaccccacacagaagtgggtccaggactttatgaagcacctggacaagaaaacccaaactccaaagctttgaacattcatgactgaactgaaaacaagccatgacttgagaaacaaataatttgtataccctgtcctttctcagagtggttctgagattattttaatctaattctaaggaatatgagctttatgtaataatgtgaatcatggtttttcttagtagattttaaaagttattaatattttaatttaatcttccatggattttggtgggttttgaacataaagccttggatgtatatgtcatctcagtgctgtaaaaactgtgggatgctcctcccttctctacctcatgggggtattgtataagtccttgcaagaatcagtgcaaagatttgctttaattgttaagatatgatgtccctatggaagcatattgttattatataattacatatttgcatatgtatgactcccaaattttcacataaaatagatttttgtataaaaaaaaaaaaaaaa

SEQ ID NO: 235444 - DNA, 774 bp, Homo Sapiens
  misc_feature (82)..(82): n is a, c, g, or t
tagttcaacatacctcacagtgtacacttgttcagctgtcggtgtgggttgctgaccgaggaaataaaagaatccaagtatntgataaagacactggggagtggttaggagcatggaataattgtttcacagaagagagaccttcttcagtcaggtttactcctgatgggaagtacttgattgtggcccagctgaatcttagcaggctctcagtcgtagcagcacccccagtgggaagcattggggagtgttctgtgatcagcacaatccaactagcagatcaagttttgccacatctcctagaagtcgacagaaagactggagcagtctatgtagcagaaattggagcaaaacaagtacaaaaatatgtccctttgaatagctatgttccttcatttggttcataatgtttctttcccgggaatatttcaagtggcagttcagattctcaattcactaagtgcttaaaaatgatgttcaagcacaagaatttatttttctagtataaaagatctagtatcagaaagatttgtttttgtatcattaagaatcttatattttgttgccctcttgggacttagttttatttgtaagtgcataaggatattttaatgaaaggaaagtaactaaaaaatggggttgggaagagggactaaggtggtaacctcattatttgccctggtagactgattctccctgggtaaaaaaaatgggaataaaaatgagcttgcatgataatttattaaatttcatgtgaagaaaaaaaaaaaaaaa

SEQ ID NO: 235445 - DNA, 492 bp, Homo Sapiens
aatgtggcatcaaatgtcatgccaattttcacatcttccacaaactccatttagggagaaatgtttaaatctctggtataagtttactccataccagagtaaactatatattactctatataagcagtcttgcaataactaatcaccaccatagaagaaagaaacagactgcaaggaacagagttgagtgtctggagtcatcaaaggcattaaaaactccagtaaaagctggggccgtagcaaaaatcatgaaaaacacttcaacgtgtcctttcaatcatccaattaaatgtgggtagattaatgaaaatgtattacatcaatattaactcatctatagcactttgagtatctttgtagttcatgatatcctatcctataatgtggaggtaaatgattttatatgcattgggggtcatatataaaacttcaatgtaatttcactacaataaattgccttccttatttgaaagtaaaaaaaaaaaaaaaaaa

SEQ ID NO: 235446 - DNA, 654 bp, Homo Sapiens
aaggagaggggtggcgccatggacgtggccctaaacgctgtgggagagggaagaggaggctgggcctcgctgccctcttgtctctgctgacttcagcctggtcatgcttgctctgccacttgcgatttcatccctaatttcttcctccaccatgcctgcagacttttccctgggcttgttttttctcgcacatctctgaagagtttttaatcttcagctcatcatgtcccaggaagtggcatcataaaaggaaatatttttttttcctaggagcagtgttaaaatctgggtcacattcctgaccaaggacagcatcctgccttctgcccatccccttcagttcacaaaagctgacattttaaacaaatcatgactcacacgtattaattggttataaatatgttgtgtacactggttagataaaacttaaggccacaaggagggcccaggtaggcgatgtcagtgtgtgaaggggctggattgggcgtggtgaggatgttggcaaaccagtgcatgcacctggttggaagatgctcagcctcacaaaagctccaagccctttgggagccaaagtgtctgagagtgtgaccctctcctgtaaagtatttatcccacccattaatataatttctgtataataaaaaaaaaaaaaaa

SEQ ID NO: 235447 - DNA, 758 bp, Homo Sapiens
  misc_feature (15)..(15): n is a, c, g, or t
gataatctatgtatnaaaaatgtgagatgtgcgctcttatgatactgatttcctttaatgtaatatgccagaaagcatacatctaagggaacattgtccttcaaagtagacactttgggaagtatttctttattttaatgatgtatcattgttaaaaatgctgtcaaatccttaatagctacaggagctactgagggaaatcagtgtcattatttaaagtcacgccttgtgtttttactactttattcagcaggattaaacctgaataacttttggctgttgtgctaatagtgtaaataaaataagcctgccttcataaaacactaacttttaaaaggaataaacgacttctaaaattatgcctattaacatgtgtaattagtcggcagctcaaatgtttgggagtgcaagaaattaggcaccccaggatataggtcatacagggatatataaaagccatgctcattacaaaatgagcagttgatgttttatgtggcattaagacaatcaagtcctcacaactctggaatgtcttcttatactgatgctgaatttatgaatccaaattaatttccaacaggttggaatcagatttaatgtgagatcatgatagacaagaccacagaggacgtatgctctatttcttgttggccaacagcttctttctaatgttctgtgaaaaattattttaagtgtcttatataatggtgcttttatggttattaaaaattgtaaatggtaaaaaaaaaaaaaaaaaa

SEQ ID NO: 235448 - DNA, 672 bp, Homo Sapiens
tggattgccatgagcggaggctgctctattacaagaacccactggatgccttcgagcagggccaggtttttcttgggaacaaggagcagggatatgaagcctacgaagacctgcccaagggcatccgaggaaatcgctggaaagccggactcaccattgtcaccccagagcggagatttgtcctcacttgccccagtgagaaggaacagcaggaatggctggaaagtttgcggggtgtcctgtccagccccttgacgcccctcaaccggcttactgcatcaacagagagtggccgcagcagcaggtgacccattaactgaggaactggctgccactgaacacctggaactccttgtgggaagaagtttgcacctcggccctggctgcccaccatcagtgccccgcagtcagcagccattcctggcagtgaactctgccaggactgaagctgtggctttatccatcagctccctgggccttccccgcaacccacctcggggatctgaggatctggtgcatagatgaacatctatcccctcctcccccatacacacctaggcttgaaatgccctacaggcccagaactttctcacatctgaaatggaggcattgcaatgaaaaggcacccacagcatcatgcaagtggcatcttgtaaaaaaaaaaaaaaaaaa

SEQ ID NO: 235449 - DNA, 788 bp, Homo Sapiens
  misc_feature (70)..(70): n is a, c, g, or t
  misc_feature (87)..(87): n is a, c, g, or t
  misc_feature (144)..(144): n is a, c, g, or t
  misc_feature (169)..(169): n is a, c, g, or t
  misc_feature (179)..(179): n is a, c, g, or t
ggatggatggaaatcttggctcacataaaagacagactcagggaggatttatgacaaaaagtccctcctntgagggcaggattcccncaggaatcctggacactttagtgagaactggaccagcccttggcacaaaaccctgcntgccctgtcccccactcccaccccncagggaattntaggtgaaaatgtgaagctcagggcacagcaagcgcatgacacgggtgtattacattcggtccgagtgtgtccttagtttccctgtgtgcaaaatggggctagtccaggctcttcccacctcactgggacaattgcaagggtcataggagaggtgggtatgataggtggtcatatgaggtggtgagtatgagaggtgggtgcctcacaaactcggggtatggtcctgacctgcatggcagatgagcagagcacttgggaacgagcataggaagtgccatcttcccgggcatctctgctcagtgttaaggtctagccacagacactgtgggacctgcctcttcctatggaatgggggcctgcatgggttgtgtcctggggcaggagtgagggatggctgggaagaatctccaggtctgtggcccttgtgttgagtgattattttgtgacactctcattcctggaccacctgccaggtttatctgttatacctgtggcattcttattatgtcagacaagttattatagttcattcaactctaacaaatgaacaaaagaacaataaataggaggccattaaaggtcttttgtgcaaaaaaaaaaaaaaaaaa

SEQ ID NO: 235450 - DNA, 705 bp, Homo Sapiens
  misc_feature (47)..(47): n is a, c, g, or t
cggtgtcccctgcgtgtgtgtgtgtgtgtgtgtgtgtgtggatgtantgacctgtgtttcccaagacagcaggtgccacggcccgccccgcctgccagcccgaattcccgttctcctgtgtctactaacaaggacatgggggtgggcggtgacctccgcatccctcagagctcagagggtcctcgctgccaccggtccccccctagcccgtcatcagccggtggcagctccatcttccattcctggttttagggcagaatccatggagactgcttccagaaggcatctggctctgagttataaattacttccctggtcctgacagtcacctggggtcccccctctccctggttccacctttctgaggaggagcctggagtcagggctgggttttggattaacccatccttcctagttaacacctttttgtttttattttattttatttttgtttgttttctccgtgtgtgtgttttcctaatttatttacctctgtttcccctttttcctttttttttttaattaaagagcaaagctttttattactttgtaatttaaaaaactgaaaaaaaaaaaactgaagaactttggggggaattttgtacttttttcctgtgtaaatattggacttttttgagctttatcgtggttgttaatttgaagtaataaagtagaaaagataaagtgaaaaaaaaaaaaaaaaaa

SEQ ID NO: 235451 - DNA, 754 bp, Homo Sapiens
  misc_feature (82)..(82): n is a, c, g, or t
gaaagagggcagaccctggatgtgaaatggactacacgctagagaagttgccagcagccagaaagcttggcagataataagngacggagagatgcccaagaccctggcatgcacagagaggccttcaaagaattcccatccagtccaagtggggaggatcatactagaagactaccatgatcatggtttactgcgcgtccgaatggtcaaccttcaagtggaagattctggactgtatcagtgtgtgatctaccagcctcccaaggagcctcacatgctgttcgatcgcatccgcttggtggtgaccaagggtttttcagggacccctggctccaatgagaattctacccagaatgtgtataagattcctcctaccaccactaaggccttgtgcccactctataccagccccagaactgtgacccaagctccacccaagtcaactgccgatgtctccactcctgactctgaaatcaaccttacaaatgtgacagatatcatcagggttccggtgttcaacattgtcattctcctggctggtggattcctgagtaagagcctggtcttctctgtcctgtttgctgtcacgctgaggtcatttgtaccctaggcccacgaacccacgagaatgtcctctgacttccagccacatccatctggcagttgtgccaagggaggagggaggaggtaaaaggcagggagttaataacatgaattaaatctgtaatcaccagctaaaaaaaaaaaaaaaaaa

SEQ ID NO: 235452 - DNA, 713 bp, Homo Sapiens
actcagagatccctatatcatggttccaactttccaggaatcgtcaccagctttatccgcttctggcttttctggaagtacccccaggagcaagacaggaactactggctcctgcaaacctgaggctgctcatctgaccactgggcaccttagtgccaacctgaaccaaagagacctccttgtttcagctgggcctgctgtccagcttcccaggtgcagtgggttgtgggaacaagagatgactttgaggataaaaggaccaaagaaaaagctttacttagatgattgattggggcctaggagatgaaatcactttttattttttagagatttttttttttaattttggaggttggggtgcaatctttagaatatgccttaaaaggccgggcgcggtggctcacgcctgtaatcccagcactttgggaggccaaggtgggcggatcgcctgaggtcaggagttcaagaccaacctgactaacatggtgaaaccccatctctactaaaaatacaaaattagccaggcatgatggcacatgcctgtaatcccagatacttgggaggctgaggcaggagaattgcttgaacccaggaggtggaggttgcagtgagctgagatcgtgccattgtgatatgaatatgccttatatgctgatatgaatatgccttaaaataaagtgttccccacccctgccaaaaaaaaaaaaaaaaaa

SEQ ID NO: 235453 - DNA, 610 bp, Homo Sapiens
acattgcgtgtgggagtatacatcggtgcaggcttcctggatgacagttgggtgatatgtgtcatgtggcctaaaagcctccatgtcatttgacctacgaattctatctttgggaatttatcctaagaaaatacttaaggatttagttagtgataagatgttcatcccagcattgcaatggagaaaaatgggaagcaatggtttggttgggaatttattccttttctgctgtaacgaaagtttgcaataggggattgcttaagtaaattattgtatctccatccagatggtggagtaccgcgcagacattaaaagtcatgtaaaagaacatctgactgaaagaaaaatgctccttgaatattaaaaggttgtaaaaatagtgcatgttatgtgatttcaattttgttttttaaaatatgggtgtatgcttgtatacgtagagcagataaaaaagacggaaggcatactaaaaaatgttgagtggttatctttgtatggtggaacaaagtcactgtaattttcatctttggtttttctgtaatttccaaattttccacattttgtatttcatataataaatataatttaagggaaaaaaaaaaaaaaaaaa

SEQ ID NO: 235454 - DNA, 737 bp, Homo Sapiens
gaagtcatacaattctgggtgacagagcaagctctgtctcaaaaaaaaaaacaaaaacaaaaacaaaaaagactgatatcgcacctaaattattattatattaaaagaagcagagtatgagagacaggtacatggtccagtaggaagagaagcagccctgattctaccacttaaggtgatgtatgatcttaggctggacacttctctccctcatccgttttcctcttcaacataatgaaatagacttgaaagtctctaaggctctatcagttctgacattctaggcttcatatacattaagttgagccatatgtaatcactgtgtttgtaggttagaaacagctgagtatcgtagtttcatatatggttccagctaatacatgcaatgtggctggtgaacacttctgaattcagaaactatcccagatctcagctagaaccatccactgttctgtttgtccagtttcaacttaagggatctccatgcggtccctggaagtacccattgaaacctgcgtatttgtgtatagcagaactctgaaataatattctgatagcagttatctctgaggaattgggttataggtgattttccctttccgcatgataaatttatgtaatatttgactgacttgaccgtaagtatgttacttgtataataaaaggaaaaaaggtacttctattttgaaaaaataaaaataaaagcctttgggttcttgaaaaaaaaaaaaaaaaaa

SEQ ID NO: 235455 - DNA, 693 bp, Homo Sapiens
tccaggacactttctgtcttcatgacaggaacatcgagaagccaaggctagtggctgggttactgatggattactgatggatcttctcagcacttagtgacctttgaggatgtggctgtggactttacccaggaggagtggactttgttggatcaagcccagagagatctctacagagatgtgatgttggagaactacaagaatctcattatactagcagggtctgaattattcaaacgtagtctcatgtctggattggaacaaatggaagagctgaggacaggagtgacaggagttctgcaggaattggatttgcaactcaaaaccaaaggctccccactgctgcaagatatttctgcagaaagatcaccaaatggagtacaattggagagaagcaatactgcagagaaactgtatgactctaaccattctggaaaagtcttcaatgaacacccatttcttatgactcacatgataactcacattggagagaaaacttctgaggataatcagagtggaaaagccttaagaaagaactttcctcatagtttttacaagaaaagtcatgctgaggggaaaatgcctaagtgtgttaaacatgaaaaagccttcaaccagtttccaaatcttactaggcagaataaaactcacacacaagagaaattgtgtgaatgcaaaaaaaaaaaaaaaaaa

SEQ ID NO: 235456 - DNA, 689 bp, Homo Sapiens
  misc_feature (49)..(49): n is a, c, g, or t
ccagtcgaattgcctatgacaggcctcggggtcgtcccatgtccaaaanggaagaaacccaaggacttggacttcgcccagcagaagctgaccgataagaacctgggcttccagatgctgcagaagatgggctggaaggagggccatggcctgggctccctcggaaagggcatcagggagccggtcagcgtgggaaccccctcggaaggggaagggttgggtgctgacgggcaggagcacaaagaagacacattcgatgtgttccgacagaggatgatgcagatgtacagacacaagcgggccaacaaatagatcaaaaccactgatgtgaaagataagccttgaagcagcaattgcccttaaaacatcatccctgccctggatcggcctggagccagtgcccaagtacggtttgttccagggtcacccccgagaggacaacaggcatctggaagtgctctctcgccactctgggtgctttactgtctctggcttgtttccatcactggaaatcacttagagaattgtagtgtttttggtccttgataaagcctagaagacatttgtgatgttacaaaatggaagttttcttttgtttctgttttttaagatctaagaagttgtgaatgttgttaatcatttagccgttgcaataaatgtagaggaaatgcaaaaaaaaaaaaaaaaaa

SEQ ID NO: 235457 - DNA, 714 bp, Homo Sapiens
gagtcaccaggaatgtaaaagtcagtgggaacgtgactgccccaactcctggaagctgtgtccttgcacctgcatccgtagttccctgaaaacccagagaggaatcagacttcacactgcaagagccttggtgtccacctggccccatgtctctcagaattcttcaggtggaaaaacatctgaaagccacgttccttactgcagaatagcatatatatcgcttaatcttaaatttattagatatgagttgttttcagactcagactccatttgtattatagtctaatatacagggtagcaggtaccactgatttggagatatttatggggggagaacttacattgtgaaacttctgtacattaattattattgctgttgttattttacaagggtctagggagagacccttgtttgattttagctgcagaacgtattggtccagcttgctcttcagtgggagaaaacacttgtaagttgctaaacgagtcaatcccctcattaaggaaaactgacagaggagggcgtgactcacccaagcatatataactagctagaagtgggccaggacaggccgggcgcggtggctcacgcctgtaatcccagcagtttgggaggtcgaggtaggtggatcacctgaggtcgggagttcgagaccaacctgaccaacatggagaaaccctgtctctattaaaaatacaaaaaaaaaaaaaaaa

SEQ ID NO: 235458 - DNA, 740 bp, Homo Sapiens
  misc_feature (62)..(62): n is a, c, g, or t
  misc_feature (409)..(409): n is a, c, g, or t
agcccaactatgcaggtgagccatacgtcgccatcaaggcctacactgctgtggaggggacngaggtgtccctgctcgagggtgaagctgttgaggtcattcacaagctcctggacggctggtgggtcatcaggaaagacgacgtcacaggctacttcccgtccatgtacctgcaaaagtcagggcaagacgtgtcccaggcccaacgccagatcaagcggggggcgccgccccgcaggtcgtccatccgcaacgcgcacagcatccaccagcggtcgcggaagcgcctcagccaggacgcctatcgccgcaacagcgtccgttttctgcagcagcgacgccgccaggcgcggccgggaccgcagagccccgggagcccgctcgaggaggagcggcagacgcagcgctntaaaccgcagccggcggtgcccccgcggccgagcgccgacctcatcctgaaccgctgcagcgagagcaccaagcggaagctggcgtctgccgtctgaggctggagcgcagtccccagctagcgtctcggcccttgccgccccgtgcctgtacatacgtgttctatagagcctggcgtctggacgccgagggcagccccgacccctgtccagcgcggctcccgccaccctcaataaatgttgcttggagtggaccgaggctctgcaggaatgcagggagggccgggctccgcccccagggttatttctaagttgaaaaaaaaaaaaaaaaaa

SEQ ID NO: 235459 - DNA, 612 bp, Homo Sapiens
gagcttggtaggcattccagctcctccctgcttcctcagttacacaaaggacctcagctgcttctcccacttggccaagcagggaggaagaagcttaggcagggctctctttccttcttgccttcagatgttctcttcccaggggctggcttcaggagggagcatagaaggcaggtgagcaaccagttggctaggggagcagggggcccaccagagctgtggagaggggaccctaagactcctcggcctggctcctacccaccgcccttgccgaaccaggagctgctcactacctcctcagggatggccgttggccacgtcttccttctgcctgagcttcccccccaccacaggccctttcctcaggcaaggtctggcctcaggtgggccgcaggcgggaaaagcagcccttggccagaagtcaagcccagccacgtggagcctagagtgagggcctgaggtctggctgcttgcccccatgctggcgccaacaacttctccatcctttctgcctctcaacatcacttgaatcctagggcctgggttttcatgtttttgaaacagaaccataaagcatatgtgttggcttgttgtaaaaaaaaaaaaaaaaaa

SEQ ID NO: 235460 - DNA, 674 bp, Homo Sapiens
ggcacgaggcggcacggagggaaagttgcatgcggtacctgcacaggatttatgttcctctcatgctggttaatgcagctgacgatccgttggtgcatgaaagtcttctaaccattccaaaatctctttcagagaaacgagagaacgtcatgtttgtgctgcctctgcatgggggccacttgggcttctttgagggctctgtgctgttccccgagcccctgacatggatggataagctggtggtggagtacgccaacgccatttgccaatgggagcgtaacaagttgcagtgctctgacacggagcaggtggaggccgacctggagtgaggcctccggactctggcacgctccagcagccctcctctggaagctgcgtcccctcaccccctgtttcaggtctcccatctccctcagtgacctggatctgacctcacaccatcagcagggggcacccaccatgcacacctgtctcggagtaggcagctcttcctgggagctccaggctatttttgtgcttagttactggttttctccattgcattgttaggcatggtgacaagtgacagagttcttgccctctgtccagtttcagcatctggttgcttttaagccaagtacatctagtttccctattaaaaatgtgtctgaatagcgaaaaaaaaaaaaaaaaaa

SEQ ID NO: 235461 - DNA, 639 bp, Homo Sapiens
aagaggctgagtgatgaacatgaacctgaacaaagaaagaaaattaagaggaggaatcaagccatttacgctgcagtggatgatgatgatgatgatgcagcttaagatgatttacttgttttgtttttgtgtttgttttgcttttttgagatggagtttcactcttgtcacctagactggagtgcaatggcgtgatctcggctcaccgcaacctccgcctcccaggttcaagcaattctcctgcctcagcctcccaagtaggtgggactacaggtgcccgccaccacacccggctaatttttgcatttttagtaatgacagggtttcaccatgttggccaggctggtctccaactcctgacctcaggcgatccacctgtcttggccttctaaagtgctgggattacaggcgtgagccactgtgcctggccgacaatttacttgtcttagtattatatgtagatatgtgattttttgagactgtatttttagagctgaatttttgactaaagacttaactttataataatgaagatacattagagaattttagttagatattgactttatctttaggcttttgtatgtttcagatgcaaacatattaaagtttcatatatttaaaaaaaaaaaaaaaaaa

SEQ ID NO: 235462 - DNA, 553 bp, Homo Sapiens
cccacagctaggtgtagtgagccagacgaggcagcttactgaacctgggggttctctccattgtcaccgcattctccttcaccaggtgtggctgtctgggagccagggggtgactcgctctggagagaggggaaaagaggggggcctgctgcaatctccttgaggcaggaaacgtgggattcagccccagcctcacttagtggaggttcttttaccatggacccaggctgcctggtttgtatccaacctctgccccttctgacctggaagaggcgcttgaccttcctcccacatcccttccagtggggtgagtacaggtgttcctcagtttacaatgggttacattccggtgagtacatcataggttgaaagtattgcaagttgaaatgtgtttaatacacctaatctcccaaacatcacagcttagcatggtccatcttaagcttgttcagaacgccttagcctgtagttggggaaactcgtctaacacgaagcctgttttaataaagtattgaatgtcttatgtaatttattgaaaaaaaaaaaaaaaaaa

SEQ ID NO: 235463 - DNA, 613 bp, Homo Sapiens
ataaaacaggcggcaagactgtctccgatgggctccaccacccccagccagctgcattccaagttagagaatgaccagggaggcacaacctcacggtgagagcagcaagcacccctcctcaggccacagcttggcgtctttgttcgcctggtcaccttgggcaagcaccagccccatctctaaaacatgctgccgcctggctggacctcagaccagaagctggagaatccacaccgtgcacttcctgggccacctcctttcccctccccccagtgggagaagcggcactttgtcacttgggtgaatcaacagcctctgctttttccagaaagcaagagaactgaaaatcctggattaactaagtgacagtatttttttttgcacttactacacacctccactgtatagaaacctctacagattccaacagactttattcttgtacaattttaatcagttcttactgtagaatctggagtcaatgctctaatctgttttttataaataatatatattatgtatatgaaatgtgtatctatagtatgtctggagacagacaaggctgcacactaaaatgcagataaaggtgatttgtagaaaaaaaaaaaaaaaa

SEQ ID NO: 235464 - DNA, 548 bp, Homo Sapiens
  misc_feature (23)..(23): n is a, c, g, or t
  misc_feature (360)..(360): n is a, c, g, or t
gctgggtatggtggcttatgccngtagtcgcagctactcagaaggctgaggtgggaggattgcttgttccccggaggttgaagctacagtgagccttgattgtgtcactgcactccagcctgggcaacaggtaagactctgtctcaaaaaaaaacaaaaaagaagaagaaaagtacttctacagccatgtcctattccttgatcatccaaagcacctgcagagtccagtgaaatgatatattctggctgggcacagtggctcacacctgtaatcctagcactttgggaggccaaggcaggtggatcacctgaggtcagaagtttgaaaccagcctggactacatggtgaaactccatctntactaaaagtacaaaaattagctgggcatgatggcacgcacctgcagtccaagctacttgggaggctgaggcaggagaatcactcgaacccaggaggcagaggttgcagtgagccaagacagcaccattgcaccccagcctgagcaacaagagcgaaactccatctcaggaaaaaaaaaaaaaaaaaa

SEQ ID NO: 235465 - DNA, 558 bp, Homo Sapiens
gaagcttgggctgaggtccagagacagctcagcattgtggtgacagccctggagggtgcggcagccaccctgaggcctgtggctgacctctgaccccagccctctttcttcagccctccctttgctccaaccctctcctgcctgctttcctgagatgtcctggtcttccttggtgccagaagagggcactaccacaggaccctctcaagcttctcaggcaacagcttgaggtccctgaggggagtggcaagccctaatgcaactcaccctcatcctggtgcttaggtggcagagggtgggcagcaggggacagggatgggatggcaaaaccaccaactgcccttggtggcaggtgggtggagatgggatgcgtgccaacctcagatgccaactcaggtcatcaaggccaaggaccagtggcgaaagtgagtcttggggtaccttaggccttggctagtctgcgttcctctccctgcatgctgtgtatcctaactccctacaacagcccctcaaataaatcacatctagtgactggtaccaacaaaaaaaaaaaaaaaa

SEQ ID NO: 235466 - DNA, 723 bp, Homo Sapiens
  misc_feature (723)..(723): n is a, c, g, or t
actgtccatgtgtgtttggccccggatggtcagggtggggagcagggacggccatgggcacgcctggccacgctttaccgactgctgaccccctgggccaggtgaggttggggcctgtgggccgccagtccatacggtgctgtcactgcccatcttcggtgacaccctggggtgaggtgctcagcaccttcctctcgaggagccacattttcctcctttgtgttaggggacataacaagctctgctgggcttgagggacccagaccaggtgtctgcagtcagctcctgagacacagctggccggcacaacaggtgttacatcaggggtttcctgtggccgtttgaactttgagcatttatctaaattaaattggcccagggttggctggtgggtcacccagcagaggcttctccccatagcacgaggatgtgttgcctgggcacggtgactgcggttattcctggaggtcggcagacatgccaaccttgggctatttgagctggagaagctatgtgatgctagccggtggctttctgggctaggccccagtttgaggctcccctgggaactagagccaggaacagccagtggcactgacaaggggacggagtccaaggcgttattgggccacctgacagctggacagaaaaggggcagacacaccgaggatgcgatttaaaataaatgcagatgtttacttggagaaaaaaaaaaaaaaaaan

SEQ ID NO: 235467 - DNA, 683 bp, Homo Sapiens
  misc_feature (52)..(52): n is a, c, g, or t
ctacatgtgaatagatattaagtgccatatataattagttctcagaagaagngagaaatgatcataggactgggaattgttttgcaaacgttctaggagatgtgagagaaaatatgtaaccacatcttagtggcccaagaaaatacaggcctgaagggataagattgtgtctctatagagcttcaaagcatacaggtcaattaagaaagcccctctctctccagagccgtttccctagcttttggcacctggatgccacagtcctccattaggctgatgactccaaagatgtaactctagcctcttgcctgagcttcagactcgcgtcccactgcccacaggacacatccacctggatgtgactcacaggtacctccaacccatcatgtggagatactcatcctgttccccctagagctgctcttcctgctgcattctctctctcaattactgggaccaccaagctaggaacctgggagtcatccttgatactttctcttcctccttaatcctgtgtattcagcaagtaactaaaggttggtgttggccaggcatggtggctcatgcctgtaatcccagcattttgggaggccaaggcgggcggatcacttgaggtcaggagctcaagaccagcctggccaacatggtgaaaccccatctctactaaaaaaaaaaaaaaaaaa

SEQ ID NO: 235468 - DNA, 707 bp, Homo Sapiens
  misc_feature (47)..(47): n is a, c, g, or t
  misc_feature (350)..(350): n is a, c, g, or t
  misc_feature (590)..(590): n is a, c, g, or t
  misc_feature (630)..(630): n is a, c, g, or t
acatcacaggagccctcagccccgacacacaggtcactcagcccggngacatcagcacctgtgccagctccgcaaggtatccaccatgcggccagaactgaggcccagcaatagctgaaatgtcctttaaattaacatgtacaacacacaacccccaagagctgacatccccaaagccccaccacaaatagctgactcctacttatacctgcaggagcaggtagtgacctctgcaattctaaaccgtccactttgggcaaaattcatcaagctatggatatgaaaaaaggcccccaaggatatgattcatagtccagcgtttgagtgagcactccagtcagaacgaactntgcattgtgaacatctgaacagggtggaaacagacactttagttagagatccactgctgtgcgtgcacacatactcacacaggaaaagaaaatgagtttctcagtgaccgaacgctgaatgtgatacagggcaatgacggactcgctggcggactccactctacccaccgagttctgcttgtgctccatgagcttccggaaagatggctgcttggataacacctttcctcctgcacactntacgattgccttcatagtggaaagacttgggcagattccnaggtgtgatgtaaaaatattttgcctaaaattaaatgaaaatatatgtattatgttcttaaaaaaaaaaaaaaaaaa

SEQ ID NO: 235469 - DNA, 764 bp, Homo Sapiens
  misc_feature (26)..(26): n is a, c, g, or t
  misc_feature (86)..(86): n is a, c, g, or t
tacaactcaaaatacaccagctcatntggctgctcagtctaactctagaatggatgcttttgaattcatttcgatgtcaccacttntcgctctttaaaaacactgggtcaggtgaggacttgtttcagttcctataactaagtaaagggcggctttctcataacaaaggaaaaagtcttccccaaagatgaatttaagtctccacttttttctatacagaaaactcaaaactcaaagtttcaaagaaccaaaggactcttcctctgggcaccacaaacttccccttcctccactgagaagactgtctctcccgcaggaccctgaattattgaaatcgaaggctgacttcctttctgcagtgagcccaggggctaatgttattatcctgtcacacttgcaactagtgacttttgtttagtgatagaagatttggggaggacccaaaggactcagaactttctctccatacctccttttactcttttctttctgtgtaatgtatcaacaactgtttaatctcccttctaacaaaccttgatataagctttctgatatcaaagtatattgacagttaacccttactgattttaaacttgactatccagtctgttaattacctaagattttgttttcatttcatctctaattgttttgatcattggcagagaaagagtatttgaaattcatatcagttttgctccttattttaatctctttgaattaaaaataaaactttttcaaaatggaaaaaaaaaaaaaaaaaa

SEQ ID NO: 235470 - DNA, 757 bp, Homo Sapiens
  misc_feature (20)..(20): n is a, c, g, or t
cagattgcgctgagacctgnttatgagcaagccaatcttttgaatctagagaatggaattcttaggtttatatttctgttaagaactactataaatatgactcttatgagaagactttgttgctctgtagtgtttctgaatactgtatttgttggattgatcaaggctatttttcaaaaagctctctgcttcctgtttgtttgtttgtttgtttttgagacagagtcttgctctgtcgccggggctggagtgcaatggcgtgaactcagctcactgcaacctctgcctccctggttcaagctattctcctgcctcagcctcctgagtagctgggattacagggccacgcctggctaatttttgtatttttagtagagatggggtttcaccctgttggtcaggctggtctcaaactcctgaccttgtgatctgcccacctcagcctcccaaagtgctgggaagacaggcgttagccaccgtgcccggcctctgtttcctgttattagtgattttcctgcccaagattgcaacaacaaatatgtagaactacagactgtttagaatgctgagactgttctaagaaactttcaaaaacagtagcacttcaaggaatggtcactttctatgaaagaaactggtttgatagccataatcttattgctagctgcttttagcaaaagtcttttcttgaaaccaccacctatactctttaaacaaataaaaactaaaatctcttgctaaaaaaaaaaaaaaaaaa

SEQ ID NO: 235471 - DNA, 723 bp, Homo Sapiens
  misc_feature (35)..(35): n is a, c, g, or t
  misc_feature (723)..(723): n is a, c, g, or t
caggagcgtccgtccctgctgcagggtgctcttcngcagtctagccggcctgggtcttaccagctgtatcaggatccaaggaacgtttgggtttcctagccgctacatctgttacttttgttggtgttatgggaatgagatcctactactatggaaaattcatgcctgtaggtttaattgcaggtgccagtttgctgatggccgccaaagttggagttcgtatgttgatgacatctgattagcagaagtcatgttccagcttggactcatgaaggattaaaaatctgcatcttccactattttcaatgtattaagagaaataagtgcagcatttttgcatctgacattttacctaaaaaaaaaaaagacaccaaatttggcggaggggtggaaaatcagttgttaccattataaccctacagaggtggtgagcatgtaacatgagcttattgagaccatcatagagatcgattcttgtatattgattttatctctttctgtatctataggtaaatctcaagggtaaaatgttaggtgttgacattgagaaccctgaaaccccattccctgctcagaggaacagtgtgaaaaaaaatctcttgagagatttagaatatcttttcttttgctcatcttagaccacagactgactttgaaattatgttaagtgaaatatcaatgaaaataaagtttactataaataataaaaaaaaaaaaaaaaan

SEQ ID NO: 235472 - DNA, 621 bp, Homo Sapiens
cgttcgaggctccatccagcaagttacccacgagcttgagcggcaggactcagccatccacttgcgcgtgagcagactctatcggcagaaaagcagggtcttcgagccggtgcccgagggtgacggccactggcaggggcgcgtcaggacgctgctggagtgtggcgtgcggccggggcatggcgacttcctcttcactggccacatgcacttcggggaggcgcggctcggctgtgccccacgcttcaaggacttccagaggatgtacagggatgcccaggagagggggctgaacccttgtgaggttggcacggactgactccgtgggccgctgcccttcctctcctgatgagtcacaggctgcggtgggcgctgcggtcctggtggggccgtgcggtgagggccgcgcgctgggagccgcgtgccctgggcccaggcctgaccctggtaccgaagctgtggacgttctcgccacactcaaccccatgagcttccagccaaggatgccctggccgattggaaatgctgtaaaatgcaaactatgttattatatttttttttggtaaaaaagaaatgtccataggaaacaaattcccgtgtcttaaaaaaaacaaaaaaaaa

SEQ ID NO: 235473 - DNA, 703 bp, Homo Sapiens
aaaaggaggaactgaaagagcttccacctgtcacttcggaacagtgactctggagaggaagccagtggagctggtctgccaggggcttcccactttggcttatttttctgacttctagctgtctgtgaatatccagaaataaaacaactctgatgtggaatgcagtcctcatctccagcctccccaccccagtgggaactgtgcaaagggctgccttgctgttcttgaagctgggctgtctctctccatgttggcctgtcaccagacccgagtcaattaaacagctggtcctccactttgctggttcagccttcgtgtggctcctggtaacgtggctccaccttgatgggtcaacctttgtgtggctcctggtaacataacaacaacagttactatagtggtgagatggaaggaatcaaattttgccagagaaactaacttggtggccccgacaggtcttccggggccatgggcatttgtttagagccaaattcatcctcttaccagatccttttccagaaatacctgtctaggaaggtgtgatgtcagaaacaatgacatccagaaagctgaggaacaggttcctgtggagacactgagtcagaattcttcatcctaaattattttgttagtggaaaatggaattgcttctgtgtagtcaataaaatgaacctgatcacttttcaaaaaaaaaaaaaaaaaa

SEQ ID NO: 235474 - DNA, 574 bp, Homo Sapiens
ccccccccccgccaccctcccactgccaaagaacttggaaatagtgatttccacagtgactccactctgagtcccagagccaatcagtagccagcatctgcctccccttcactcccaccgcaggatttgggctcttggaatcctggggaacatagaactcatgacggaagagttgagacctaacgagaaatagaaatggggaactactgctggcagtggaactaagaaagcccttaggaagaatttttatatccactaaaatcaaacaattcagggagtgggctaagcacgggccatatgaataacatggtgtgcttcttaaaatagccataaaggggagggactcatcatttccatttacccttcttttctgactatttttcagaatctctcttcttttcaagttgggtgatatgttggtagattctaatggctttattgcagcgattaataacaggcaaaaggaagcagggttggtttcccttctttttgttcttcatctaagccttctggttttatgggtcagagttccgactgccatcttggacttgtcagcaaaaaaaaaaaaaaaaaa

SEQ ID NO: 235475 - DNA, 686 bp, Homo Sapiens
cgcccgccggaggctgccgtccgtctctcctgctgcgctcgtgccagctccgtgggtgtcctcccagagagcttctcttctcaacaggccttgcgaggctggggtgagaggtgatagaggcagcactgtgcatgattccgagagggtgtggtggcactgccagccgactgctgacagcttgggagctgctgtgcccaggacgtgggttcagcgtgggcgaggaaagcctggcgagcgtggccctgtaaaagctttctgaggcgggaggcgctcacttacctctgactgcctgggcgctgcgtgtagcatcttggcctacaggacagattttaggtgacacctggttatgacagtcagaaatttgagaagcttctcacaagtgatgcactttaaataatctgcatgccattgagacacctgcatgtctggtgtttgtggttcaagtgtcttgccgccggccttcggatgtaaacccactgataacggacagaaagagaatgcccacaagtgggtcttctgtggaagatgcagaaggaggaagttagtgcttacattttagtctttttctccctcaaaaaaataggttaagtttcagtgccagctagaaaatactgctttctgccatcgattgggggtggtttttgtcaaatatactgttgataaatattaaaaaaaaaaaaaaaaaa

SEQ ID NO: 235476 - DNA, 854 bp, Homo Sapiens
gagatgtcaaatgcaggagcaatgcagtgttagagctctgactgacccatcaataccaagcatgtccgcagagctcaagatgcaaggataaagatatgatcagcattgctgatttaagaagctcagggatagcaccagaagataaagctatccaggcagaattgctgaaagtcaaacaaaagataaaggcacagaaagataaagagaaggcagtatatgcaaaaatgtttgcttagaaaggattcagttttgcttattgtgtgttgattgtataaatgcaataagaaaatgtaaaggtttttgtctatgaatatgatccctaatgtgtttcttttgacaccttagttccttactgtttacagtttaggagtactgataggggttcatgcttaataaacatgtcacaatacagtaagtaaagtggttttgtttgtttctttgagatggagtcttgctctgtcacccaggctggagtgcggtggcgcaatctcggctcactgcatcctctgcctcccgggttcaagcaattctcctgcctcagcttcccaagtagctgggattacaggcacgtgccaccacgcccagctaatttttgtatttttagtagagatggggtttcaccatattggtcacgtcacgttggtcttgaactcctgaccttgtgatccaccccgccttggcctcccaaagtgctgggattacaggtgtgagccaccgtgcccggccaagtaaaatgttttttaaaatggttatgtgcattattcataaaaaataatggtgtccagtctttttaaacttgtaaagacacatcttattgaataaagagatgagagcttaaaaaaaaaaaaaaaaaa

SEQ ID NO: 235477 - DNA, 687 bp, Homo Sapiens
gtctctactaaaaatgcaaaaattagccaggcgtagtggtgcgcacctgtagtctcagatacttgggaggctgagggtggagaatcgcttgaacctgggaggtggagattgcagtgagtcaagatctcaccactgcactccagcctgggcgacagagggagactctgtctcaaaaaaaaagaagttacttccaagacagacttttaacatgtaaccagcacaaagcaatgtcagggaggagtgatacatgacaataaatgagtcagatgagcaagaaggccccagaacccatgccccaaggcacaaagaggagctcagggtaggcccaaagattcgaattccttagattactaaatcacatgagcggaccttgtctgtcagataagatttttacctggaaattccatgaccaatacatgtgcaaaagaaaatgatgggttgaatttactgattattgacctaatggatggctttttaaaatgttttaataaaaagcagaatagatgtttgtttttctagtggttataccaagttatacttcctgttttcacgtgtgaaagtaacatgggacatgcctttcttttccgatcagtttatttaagctatacagcaaactttggcatttatgtggagcatttctcattgttggaatctgaataaaccaattacaaaataaaaaaaaaaaaa

SEQ ID NO: 235478 - DNA, 758 bp, Homo Sapiens
ctctttagggttgccacatttagttttgcaaattgtgcacagctctaggaggcatcattcatatcatatgtagtctatgtgataggccctccttggcacggtgcagtgcagcttcactaactgtttgcagcagctctactcagaccttaaatgcattgacattcactaaatttctgtcagaagacctcttttatcataccatagtaggtgttcaaaattaggtgattctatgctaatcctctcccccagctcaaactgacacaaaatatgccattctgtatttctagactagaccacttttctgaattccagatttttcataaatttcatgtaggactcaccacctcaaattaaaccaaatctttttacccctccttctcccatcccctcaacctaaactgtcttcatttcctgtattgcctatttcaagtaccatccaagagccatcctgagttcctcctccagcctttcttctcttgtctagttagtcagcaagtcttgcagattctgcctcctcacctgaagttttcaaacagtacccctttacattcttgaaaattattaaagatccaaagaacttctgttatatgggttatagctgttaatatttgtcatattcgaaattgaaataagattttaaggtattttaaaataacagtacaaaaccattgtattttgacatgaataacacttttatgaaaataactatattccaaaacaataaaattaccaaaaagttgaaaaaaaaaaaaaaaaaa

SEQ ID NO: 235479 - DNA, 817 bp, Homo Sapiens
  misc_feature (192)..(192): n is a, c, g, or t
agacatgtccaagagtgcagtggatgaactgctgaaaacctttcctggacaaccctgatgcctttactactttccagacagtggttcttctgtgaagagaattccagtgatgatgatgtgattctgaaagaagaattcagaggggtcattatcaagcagggatgtttactgaagcaggggcatagaaggaanaactggaaagtgaggaagttcatcttgagagaagaccctgcctacctgcactactatgaccctgctggggcagaagatcccctgggagcaattcacttgagaggctgtgtggtgacttcagtggagagcaactcaaatggcaggaagagtgaggaagagaacctttttgagatcatcacagcagatgaagtgcactatttcttgcaagcagccacccccaaggagcgcacagagtggatcagagccatccagatggcctcccgaactgggaagtaaagagactcctgcattcctcctcccctcctgagggaagcccatggacaagctcagtccaggacctgtccacttctgtgacaaatcaacgggaaacagcccaggggtgggaagttttcatttgcaggggggtctgaatgtaactcaccatgtggtgtgcaaggttcccctgcattgtattgctcactgcagcccctctgcccctatccatgacccccaagcagatataacaagctgtgcagcctcagtaggctgcttgccctctccaggcctcagggcctcttctggaaaatgaagaaattcaactagtagattcctgaggtccccctagcttaaaaaaaaaaaaaaaaaa

SEQ ID NO: 235480 - DNA, 666 bp, Homo Sapiens
aaaagagaagacaaagggtggcctgtggcccccgtcctcctgctccctagtggcccagggcccccagggaataactggagtaggcaggcagtgtccccttctgtattttttagggactctcagcctcctggcagggttaaagggagagtactttaaacccatataccagctgtgcttcagtttctctcactttgccctgggtaagctgctgtagggtcagaagtaaccctttctgtgccagttgagaatgagcctgtgtggtagctgatgtcagaggacaaagctctctgcaagggctggacacagagctgcagagtcctgaacatccctcctttcaggctgcagaagggagaggcaatgaagacaggtgctccggaagcagcatcagggctcttggaggggactggtggggactcaggctgggtgcagcctccaaacagagaacggaacttaggtgtgtctctacagctaggcccagcctagcccagcccagaacaaacacccttcagagcctaaccaaagaacataagctgcaaaatgtgcacccatattttaagctgctttttcaggggataaatagtgtttggggacattgaaatggatgttctccaggttgtatttatttcggacaaataaactagagaattgtgtaaaaaaaaaaaaaaa

SEQ ID NO: 235481 - DNA, 690 bp, Homo Sapiens
  misc_feature (129)..(129): n is a, c, g, or t
ctagcaaatgtggaaaattcttccatccggttgagtgttcctactgccacagtgagagtatgatgggatttcgctaccgatgccaacagtgtcacaattaccagctctgtcaggactgcttctggaggngacatgccggtggttctcatagcaaccagcaccaaatgaaagagtacacgtcatggaaatcacctgctaagaagctgactaatgcattaagcaagtccctgagctgtgcttccagccgtgaacctttgcaccccatgttcccagatcagcctgagaagccactcaacttggctcacatcgtgcctcccagacctgtaaccagcatgaacgacaccctgttctcccactctgttccctcctcaggaagtccttttattaccaggagctcggacggtgcttttggtggatgcgtctagatggataacatgacttcttctaccctaaaatattcctataatactttgagctgttctggttcctccagggtgcatggtacccattaacccaaaatatgattatttcccttttttcccattttcagtcattttggaatgttctctgtgaaccacagttgtgttgtttaaagctcacatttctttctgtcaccacagagattggcctacggtttctgttttgagggtgctgttcaataaagctgtgtacactaaaaaaaaaaaaaaa

SEQ ID NO: 235482 - DNA, 749 bp, Homo Sapiens
  misc_feature (19)..(19): n is a, c, g, or t
  misc_feature (44)..(44): n is a, c, g, or t
gtcagtcacccggatgccnaagaagccaaggcactgccgccctntgcatgtgacgtgtgcgagaagaggtttacgtgtaattccaagctagtcatccacaagagatcacacacaggcgagagactctttcaatgtaatctctgtgggaagcgcttcatgcagcttattagcctccaatttcaccagcgaacccacactggcgagaggccctacacgtgtgacgtctgccagaagcagttcacccagaagtcctacttgaagtgtcacaagagaagccacacaggggagaagcccttcgaatgtaaagactgcaagaaagttttcacctacagggggagcctgaaggagcaccagcgcatccactccggagagaaaccctacaaatgttccaagtgtccaagagccttcagtcggctgaaattgttaagacgccaccagaaaacacatccagaagctacttctcagtgattgcataatccggtctatgccttctgcaccaagaagaagtgaatgatatttttcatcaatgttatcagatgacatttgacacatgcaagggcgtctgacacacagagggagtgccctagatatgaattgccaggatgtttgagtaaatatgtgtcctccccactgagctttgttttctgtttcattatgtccattgttttcttataggtttattttggtttgtgttgctgttcttccaataaacgatcatcttattagttttcaaaaaaaaaaaaaaaaaa

SEQ ID NO: 235483 - DNA, 780 bp, Homo Sapiens
  misc_feature (18)..(18): n is a, c, g, or t
  misc_feature (107)..(107): n is a, c, g, or t
cagtatagaatgagatcntcgtgtgaaagatctcaccctggaagatgtgtgcccctccaggctctggaggatggatgcctcccccagggctctccaagctgggcatntgggcctggtgatgccaacctggataacctgtggcccagcattgactgtccacccagccttgctgttaggcaccatgactccaagatgaagatgtggtccctgcctttgagtgacagcccagggacttaatgtggccatcgggcatcaagcacaaggccatgcaggtgatgatacgtcggaatagaggcaccagccctggtaactgcatcttctccccttgccaccccatggccccggctgaaagcttcggccctcctctgctgtcactcaatgatggggagccctaccccagaagtgtatcccacgagggcatcagggacgcagtgagtgttgctcaagggagtcaggaagagacggcaacgtaaaggatgtggctccatgtccatggtgccccctggtcaacataaggagcgtgggatccgatggaaaggtggagctcagggaaaatgggggtccttgcctctcgtgtaccccctcaaggctgaccccttagatggcccaggaatggcaggtgctacaaaaatggtacccacgtgggcatggaaatggggcagattaggggaccactggactcagaggggagggaagggctcatcagcacccgctcagggagcctgtccctttatgttcccaaataaagggtcctagaagactagaaaaaaaaaaaaaaaa

SEQ ID NO: 235484 - DNA, 768 bp, Homo Sapiens
  misc_feature (18)..(18): n is a, c, g, or t
  misc_feature (24)..(24): n is a, c, g, or t
  misc_feature (119)..(119): n is a, c, g, or t
atcagagacaggtagagngagatntgagtacagaagacaagatattcgtgtgatgatgcagacagagactggagtgatccaccacaagccaagcaatgcctggagccaccaggagctgngacaggcaggaaggattctcccttatacccctcagagcaatcttggcccctctgacgtcttgactttagacttctggtccccagaacggagagagaataaatctttcttgttttaaggctccaacaaattggtagtcacttgttacagcaaccacaggaaatgtatacagcttctgatacttctgaaaacctcacacagccaaagggtacatccttggtatagaggctcactcttactcaccagccaggcaaggaaggctcaatcctttggtgttagagagatagatgttgggttttcaaatttcaacatagagaaatcagtcatttgcaatgcttttgagaaagtactgtgtataccctacgagcctgcactccttatgtgtgagactgatgaccattggttggcttattatccattccactaagtgacaaaatcccactgactattcaaatccaggctcctggcatgcctgtaccttagaatcacaaccagctgcaattccaggatggagttcaaactaattgtgggggcatgtgcttcttacatgactgctagattgttcccagatggggaaggttgccctgataagcaacttaaatgaaaataataaatgtattgtttggcctctttaaaaaaaaaaaaaaaaaa

SEQ ID NO: 235485 - DNA, 762 bp, Homo Sapiens
ggaacgaggaaatgatgaagaccaaagaccaagtatcatctcaccacaccacaggttctcactagatgactgtaagtagacacgagcttaatcaacagaagtatcaagccatgtgctttagcataaaagaatatttagaaaaacatcccaagaaaatcacatcactacctagagtcaactctggccaggaactctaaggtacacactttcatttagtaattaaattttagtcagattttgcccaacctaatgctctcagggaaagcctctggcaagtagctttctccttcagaggtctaatttagtagaaaggtcatccaaagaacatctgcactcctgaacacaccctgaagaaatcctgggaattgaccttgtaatcgatttgtctgtcaaggtcctaaagtactggagtgaaataaattcagccaacatgtgactaattggaagaagagcaaagggtggtgacgtgttgatgaggcagatggagatcagaggttactagggtttaggaaacgtgaaaggctgtggcatcagggtaggggagcattctgcctaacagaaattagaattgtgtgttaatgtcttcactctatacttaatctcacattcattaatatatggaattcctctactgcccagcccctcctgatttctttggcccctggactatggtgctgtatataatgctttgcagtatctgttgcttgtcttgattaacttttttggataaaaccttttttgaacagaaaaaaaaaaaaaaaa

SEQ ID NO: 235486 - DNA, 833 bp, Homo Sapiens
  misc_feature (205)..(205): n is a, c, g, or t
gagcaacatgagagggacgtcttgacaccaggggccccagccacgtgtctcaggggctcccacttgccatgggactcgcagctggttccatccgatgccagccccagtgcatctatcactgtcttcacaaaacggggtcctccaggagttctggacagctgctctgcagattcttatatacctttaatcgaaggccttggacttntgagaggagcgcagtgccctccttttgtgttcaggaaggccaaattagagccttctccaccgccggggaatattcatgtgggaaatggaggcctgctgcagacctgaaggtcaatgattgtttaatctttctttgacagcattatgaaggtataatgggcatacaagaaactgcacgtctttaaagtgtacagttggagggtttttggcatgtgtggacacccatgaaacctcccccataatcaagacagtgaattgatccgccactcccaaaagtggccttgcgcctccagcaacccctctttcctgctcctcactgtcccccatccccaccgccactgcttggcttgctgtcactatagattaattcccattttctagaattccatagaaatggactcatacagtgtatgtctggcctctttcactcagcacaattcttttttcatcaggtgtttttgtgcatttcagtactccatttttttttattgttggtaggatcccattgtatgggtggaccacaatacctgttgaatacctgttgatggacatttgggttgttaccaggttttggccatgacaaataaagctgctgtgaacatttgtgtaccaaaaaaaaaaaaaaaaaa

SEQ ID NO: 235487 - DNA, 647 bp, Homo Sapiens
caaggccgccgggggcatgctggagcttccagcccccagcaacagggaccataggaaggctcagcctgccggggagggccgaacccacatgacaaagagtgactccctgccctccttccgggtctccaccctgcctctggagtcacaccaccccgacccaaacaccatgggcggggccagccaccgggacagggctctctcggtgactgccaccgtaggggaaaccaaagggaaggaccctgccccagcccagcctcccccagctaggaaacagaacgtgggcagagacgtgaccaagccatccccagccccaaacactgaccgccccatctctctttctaatgagaaggactttgtggtacggcagaggcgggggaaagagagtttgcgtagcagccctcacaaaaaggccttgtaacggggagggcccaggggcaggactgtggagacccgtcctgaacgggcgactgtgtcttgactacctttcaaaaccagcactgtgtgggaatgtccgccaggcagagctcggagcctcattgagacaggggagagagaaagacaaagaggggaccttcttccagatgccttcccagttgtaaccggtaaaactgttaccagatagtgtttgtacaaaaaaaaaaaaaaaa

SEQ ID NO: 235488 - DNA, 786 bp, Homo Sapiens
  misc_feature (51)..(51): n is a, c, g, or t
acaggctcttccatctctcatgacttcatggaccctcctctgccagttttntaaatcagatcaccctccatgttgttcctgacccacaggggaagctgtcctcagttgtagccgtcttgactggatagtcctggcagtctttctaggcgaaccaagaatgtttgtgtgagggaaggtgtttgctgttgctttactgctgtctgtatgtgccagtgctggaacagaatttggaagattctgaataattagttacttattctcaaagaaaatctttgaaagaatcaggaggtcaagtcaagaacatgaaaatttatattttagtacagtagaaagaacattgggctctgggaattttatctgggttttctcctggcttttttttccctctgtgtaattttgggtaaatcagcctccctagctttcagttttctcttctgtgaaacaggaagactgaaccacgtaattaatatccaaggtcccttccggctctaaaaggctatgattctagatgagaagttatatcaagaaagatgtggccaatcagattgagtcatccaggcatacctttttagcttctgtttgtggagttgtctccagataagaggagatgtgccttcccaataactctttttttttttcctttcagaacattttccagatggcgaggtcacagcagagagatgtggccacctagcctttccttatccccttcccttcccttcacccccatcctcttactcctttcatgtcccatttcagacagagtaaccattaacaaaaaaaaaa

SEQ ID NO: 235489 - DNA, 781 bp, Homo Sapiens
  misc_feature (15)..(15): n is a, c, g, or t
  misc_feature (74)..(74): n is a, c, g, or t
  misc_feature (117)..(117): n is a, c, g, or t
catgtaagagttctntgttaaattgaaagagcagttcttgcctgtagtaaaaaggtcagtgtgcaaagcatacnaaagagatgtgagactccctcccagtccacataaccagtctcntaccccagtggtagctatttttaaatgtcttgatttttcctcaagatagtcccagcatttacaaccttatgtatcccccttaaagaaacacgcacaaaaaatgaaaagcttaggatacagtctacaccttgcttttttcagtgtcttggagatggctttctattagcctgtaagatctacctcatttttttcactgctttgtgatatccattgtatgaatgtaccataattcatacagtccccctgttgatgggcctctaggttcttttctgccttttgctattacaaacagtactgtgccaaatatccccgcacactgtccctggataaattgatgaaattaaatcgtaggtgcatttgttattttgatagaaattggaaatgtagttcccagtgtgtgtatgaaaatgttcattcccctgaatcctctgaaactattgtgttgtttctgatctcataaatgaaaaatgctctcatattttaatttgcattcaactatgagtgaaactgggtaccacagcccatgtttaaaagtcatttgtatttattttctgtgactggcttatttgcgttctttagcagtttttctgttcatccttttaataatcaatttgtacaaactataaagaaattatccttatctgctaaaaaaaaaaaaaaaaaa

SEQ ID NO: 235490 - DNA, 819 bp, Homo Sapiens
  misc_feature (142)..(142): n is a, c, g, or t
atggcagcagctccaagccctccaaaaagactggggagaatcctctggctcttcaagccattcggagagtaaaaagagcaccacaggaagaaagtcagtggaagcagtgggaactacccctagaggatggtgtctcccacanatcgaaaaaaatgaaacctctctatgtgaacacagagacactgacccttcgggagcctgatggtttaaaaatgaaacttattctgtcaccaaaggagaagggaagcagctctgttgatgaggagtcttttcaatatccctcccaacaagcgactgtgaaaaaatcctcaaagaaatcagctcgggatgagcagggtgctttactcctaggacatgagttacagagctttctgaaaacagcccggaaaaagcacaagtcatcctcagacgcacattcatctcctggccctgaaggctgtgggtctgacgcctcccagttcgcagagtcccacagtgctaaccttgatctttcagggcttgaacctattctggtagaatcagactcatcctctggtggggaactagaggctggggagttagtgatagatgattcttaccgagaaatcaagaagaaaaagaagtcaaagaagagcaaaaagaagaaagacaaggagaagcataaagagaagcgacactccaagtccaagagaagtttaggactttctgccgtgccagtgggagaggtcacagtgacatctggccctcctcccagcatcccatacgctggagcagcagcacctcccctgccacttcctggcctccacacagatgggcatagtgaaaaaaaaaaaaaaaaaa

SEQ ID NO: 235491 - DNA, 701 bp, Homo Sapiens
  misc_feature (70)..(70): n is a, c, g, or t
aacagcagttgcacagagagttgggggtactgctgctgccttttcaccgaggcactgccaccaccagctntagcagggatgctcctgagcttggcggacatacttagatcctaacgtgccagtgagacctggctgtggagagtagcactggcagccctgcctggactccacttggcatgataccagctccagaagggaagggagtggagcaggcagtgaggagagagcctgggggtcggctggggacagccgtatgtgctaggtaggagtggagggagatatgtttaccaaatgcctgtcctgccatcctcccaggtagtcagagtgagctacatcctgccccgccttcatttccatggaaacatggcagctaggacacggggtacaacagcagccaaattcttccccacctcccttacttcgaaaaaaagtttggaaccctggtccctatactctgcagtcagaagtgggactgagccatacatgcccttgaattcctccctgtctggccctccctctccagcaagcagggttttctttaacttggcagtgtgcagaggagaagtggtaacacccccaccccattcccctgcatcggagctcagtattcctacagggtaagaggtaggaatcttgctgggacgaggggagccagaagtggcaataaaagcgtgttgacctggaaaaaaaaaaaaaaaaaa

SEQ ID NO: 235492 - DNA, 706 bp, Homo Sapiens
tgataaaataaaataaaatagtcgtgaatcttgttcaaaatgcagattcctcagattcaataatgagagctcagactgggaacagggcccaggaatctgtgtggtacaaacctgcatggtgtttatgcacacagagatttgagaaccattgttctgaatgctgcttccatttgacaaagtgccgtgataatttttgaaaagagaagcaaacaatggtgtctcttttatgttcagcttataatgaaatctgtttgttgacttattaggactttgaattatttctttattaaccctctgagtttttgtatgtattattattaaagaaaaatgcaatcaggattttaaacatgtaaatacaaattttgtataacttttgatgacttcagtgaaattttcaggtagtctgagtaatagattgttttgccacttagaatagcatttgccacttagtattttaaaaaataattgttggagtatttattgtcagttttgttcacttgttatctaatacaaaattataaagccttcagagggtttggaccacatctctttggaaaatagtttgcaacatatttaagagatacttgatgccaaaatgactttatacaacgattgtatttgtgacttttaaaaataattattttattgtgtaattgatttataaataacaaaattttttttacaacttaaaaaaaaaaaaaaaaaa

SEQ ID NO: 235493 - DNA, 500 bp, Homo Sapiens
ggaacgaggggagcggccgcggctgtaggcttttttttttttttttttttttcccagagggcactggcatgtaggagaagcggatttaccactagtagatgttaatgaaatttcagcttctaggcccctaacttgcaggacctgcccaaggccctgaacttaattttgttttcatcatttggtatttttttgttaaaagagccaccgaccacctccccgctaccccagaactgcacgtgtttctggccctacaaacccagatcgtcccttggaatatacacagggcaatttgtgtaggatcacactgcgctaaaagtgaggcatggtgggctaggcgcactggctcacacctgtaatcccagcactttgggagaccaagacaggaggtcttaagtgattaagcccaggagttcgagatcagcttagacaacatagcaagatgctgcctctacaaacacacacaccccctattataatatgtcaaaaaaaaaaaaaaaaaa

SEQ ID NO: 235494 - DNA, 706 bp, Homo Sapiens
caagaattcggcacgaggcttcaacctggcagacccagttctaagaatccatatgagatgcacttgcaagaatatgaaatagtatatgcacaaagatcttgattacagcactgtttctaatagctacagactggaagccagccaaatctccattgatagggaattgatggaaggaactagggtatatctatacaatgggatactacacagctgtagaaaggactgcgaactatttttgtagttctggtctggagaaatctccagaatataggaaatgaaaaatgtaaagcacagaagagaatgtatggtgtgctgtctgttgtataacgaagagacaaatggaaaaaatatgtatttgctttttttgtaaagcaatagaagaattagttataccaataactaataaaatgatctccttgttagtggtggtagggagctagacaaggatggcaactatttctgtatcttacataccttttattttgaggccctgtcaatgttttatataataaacattttttgaaaaggcaactcttaaaactaaaacaaacttaacagtctgtcaagttggtgatataaccccacagaagacttacttcaagtgacttgaaaacttagtattttgtctgtactttgctaatggaatatatcctacagaccaaacaaccacaaataaatcttaaactgcaaaaaaaaaaaaaaaaaa

SEQ ID NO: 235495 - DNA, 677 bp, Homo Sapiens
agaattcggcacgaggcaagtgtgcaaacagctatggaaagtgaactcggagagtctagtcccacaatcaataaaagactctgcaaaagtacaatagaactttcagaaaattctttacttccagcttcttctatgttgactggcacacaaagcttgctgcaacctcatttagagagggttgccatcgatgctctacagttatgttgtttgttacttcccccaccaaatcgtagaaagcttcaactcttaatgcgtatgatttcccgaatgagtcaaaatgttgatatgcccaaacttcatgatgcaatgggtacgaggtcactgatgatacataccttttctcgatgtgtgttatgctgtgctgaagaagtggatcttgatgagcttcttgctggaagattagtttctttcttaatggatcatcatcaggaaattcttcaagtaccctcttacttacagactgcagtggaaaaacatgttgactacgtaaaaaagggacatagtgaaaatcctggagatggactatatgctcctttgccaacttactcatactgtaagcagattagtgctcaggagtttgatgagcaaaaagtttctacctgtcaagctgcaattgcagaacttttagaaaatattattaaaaacaggagtttacctctaaaaaaaaaaaaaaaaaa

SEQ ID NO: 235496 - DNA, 778 bp, Homo Sapiens
  misc_feature (47)..(47): n is a, c, g, or t
agaattcggcacgaggattgcaggagtattaatagcaacccacattntcgccccaaaataatgagacctcacctggtctccacgtttccacgtccctgctcaaaaccaaatccattcctgccttctggctctcagaacttctctcccctacagctactacagtacttcctgacttctcccattcaaaccattctaggcctgcaatggggaacaggccctccccatcagtattggtaaagtgaccatgattcctacatagaggctctgctggtcaaatacttgactcccactcttgccactcctagctccagaagggctcagggccttccccacagatctaaggactgggctaccctgcctgtccactgaggtttctcctaaaacaagaggcttgactctggtctgggccctgtggccctctgggaagctttgtacctcttttgcaggatctgggggtggggagggacaagctagttccccaacctcctatgactgctttctatgctcacagccttttttccataagaaccttcttgaaacttctccccgcacatactcacggaaaggaaccaatggtgctatttcccctctctcctcctcaacctgggaatacttcagacatctccaaactcatccttgtgtatagtctcacacccttccccataagtataaatgggcccatatttaacacattttgtgattttgggttatttattttgtgcatctgtggcaataaatgagatctccagtggtggtatggaaaaaaaaaaaaaaaaaa

SEQ ID NO: 235497 - DNA, 693 bp, Homo Sapiens
attcggcacgaggtgtaggacacattgaccatctttatttgtcctctgccccaaaagaaacaaaacttaaagtcagagaagcttaatgaaacagtaggataaaggctccctatcttgtgtctagaagtaagaattgacagtgattccgttttcaaagcatttattgaatagtatcttccaaacagtatgctggcttttagacaggttatacaggtgaatgtaggggtctatccttaaaaagcctataaggcagttgttctcaactctattgggaagtttttagaaaatatctgtggctgggcattttttttttttaaagagacagagtcttgctctgtcatacagactggagtgtagtggtgtgatcataagtcactgcagccccaaactcctgggctcaagcaattctcccacctcagcctcctgagtagcagccataggcatgtgccacaacgcttggctaacacatttttttaaagcttcttaggagatgcagccatggtgaagagccagtattatgaattaattggggaaactgatgcatatagatcagtattaggagagtttgaggctgaggtggaaggatcacctgagcctcacctgaggcggaggttgcagtgaaccatgattctgccactgcattccagcctaggtgacagagggagaccctgtctcaaaaaaacaaaaaaaaaa

SEQ ID NO: 235498 - DNA, 749 bp, Homo Sapiens
gccatggctgtgtgtaacagcatctcaaaccctgtcaccaaaggagatgctgtttgagttcatcgacagatgtactgcagcttctcaaggacagaagcgaaaacatcatctggaccctgacacggagctcatgccaccaccacctcccaaaagaccacgccctttaacctaagacctgcctgtgacttgagggttaagaagaaagaggaatgaggaaaaaacgctgttgcccatttttgtagccagagaaattgaaaaacgactgtggcttgatgttgatacacatttgaattttttttaaaaaaagaaagttatcgtagccagcctgtaaatacttgatgcattcgtttcctcagtgctgcaatacatcgtggacttaaacatcttatttatctgataaactcagccttaccttgtggaatctgaagattgaaatatccaaaggtttaaacaagatggaaatcaatgaaaaagaggccttgtttatatatgggtagcttcacatttaatttataaagttaacaatctggaaactgtgagcccataaaacagtattttttagaagttgtgttacaactgtagcaaattttccttttaaaaaatccaggcaatggcattaaacattcttgctatcatttaccatggatttcctacatttctgagatccctgtattcaaaaacaaatgacagggttgttaagttgtactatattaaacaacttggtctggtttaaaaaaaaaaaaaaaaaa

SEQ ID NO: 235499 - DNA, 487 bp, Homo Sapiens
  misc_feature (104)..(104): n is a, c, g, or t
acaaaccttcatgataggttattctagtatattccctcataaagtccaataggtaaattagtcttggcagcagaaggaacagcaggagaagtaagtgattcatnatctagaatccagaaaatttgcaccaacagatggcaggtggttataacacaacagatcttgccctgagaatatctggggacccagccaacagccttcaaggcagggcactcctgcggaagagatggcttgtgaacatgactgtggacccagagtcaccccagagctcccatataaaatgcttcacagagaaactaagagcagccttggggcattcattccaattaataaccttaaagactagagccagatccacctgcattacaaaagcaggcattcgaggaactaaactttgcttttgttcatgctcttacctgccgttttaaatgggtttctaatgtcaaataaagccaccctgcctcttgggacaaaaaaaaaaaaaaaa

SEQ ID NO: 235500 - DNA, 488 bp, Homo Sapiens
ggcacgaggggaatgtgccataccgaatccgtgtgcggctgtccagaaaacgtaatgaggatgaagattcaccaaataagctatatactttggttacctatgtacctgttaccactttcaaaagtaagttctccatcccataaagccatttaaattcattagaaaaatgtccttacctcttaaaatgtgaattcatctgttaagctaggggtgacacacgtcattgtaccctttttaaattgttggtgtgggaagatgctaaagaatgcaaaactgatccatatctgggatgtaaaaaggttgtggaaaatagaatgtccagacccgtctacaaaaggtttttagagttgaaatatgaaatgtgatgtgggtatggaaattgactgttacttcctttacagatctacagacagtcaatgtggatgagaactaatcgctgatcgtcagatcaaataaagttataaaattgcaaaaaaaaaaaaaaaaaa

SEQ ID NO: 235501 - DNA, 670 bp, Homo Sapiens
tgcatttctcagtgtttacaaagatcagaaagagaaacttctaggagttgcaaagggaaactgtactcctcgaaagggtgctcacagatgtcatgtactgaatagctcccttttaaatgatcatttattttcatcaaagcctgttctatatatgccacttcattttctaacttttggtatgaaaaaatcagtttacttacagtatgttaattgtattgtactactataaacaggaacataatttccaattcagttttaaataattttaccagtactactaacttttaaggaaattaattcagttggttactcagtgtttgttacagaaagagtccagaaaagtattcaccctaagagaatgtcaatcatataatgataatttgtgaaagctttgagaatcaatcatcagtaagttactatcagtttataaaatattatcacatttgtttaaatgtgactttagatacttttatgccaaaaataaactcacatgagcacatgacagtctgagctctataatcagtgtgcttctgctgtgcagaaatgttagaaacgtattgtctaaatatctttgataattaaaatgtttaatatttaatgaaatttgttgttacttgttttaaatcttttttcttttaataaagatttaaataagaaaaaaaaaaaaaaa

SEQ ID NO: 235502 - DNA, 836 bp, Homo Sapiens
  misc_feature (15)..(15): n is a, c, g, or t
  misc_feature (41)..(41): n is a, c, g, or t
  misc_feature (108)..(108): n is a, c, g, or t
  misc_feature (153)..(153): n is a, c, g, or t
  misc_feature (169)..(169): n is a, c, g, or t
  misc_feature (191)..(191): n is a, c, g, or t
cagccaggcagtccntgagggccagcagggggctgactgcntagtgctcaacctcctgaacccacccactcccagcgatgctacccagaaccccaacggcatgaatcntgcacagtgccgggcagtgccagactccaaagggctcgctgtggngacagccccgccatgnccacagactctgtcctcacctntgattgtcaggatgacagcccccaccaccatgatgagcgtctgcagggcgtccgtgtagattacagcagccaggccccctgccagtggaagcaaggttgctggagggggccctggccccagggaggagggacacggggaggaacttctggggctcctgctggggccacttcctgggctgctccctcgggcctgtagggggaggtggccttctgacccctttacacgtcccctgggtggacctccctgctgcaggcaccatacctgcgatggtgtacagggctgtgatgccgagcgtgaggatggtggagaggtagaagttccagcccaggcagatgtgcacaaacagagcccccgcgtacaggtccagctgcggagggagagagccttgtgtggggctgttattcccagggctccagcaagccactccctgggtgacctcgggcaaggccctctctgggcctcggtggcctgtggataaggaggggagacccccactcgcctgcctgcctgcatcacggggccattgtgaggttgggggaagacctggccgtggagctacaagcttgtgcggatgtcaggggacattactgttgctaataaagtccaaagtggccaatgcctttcccaaaaaaaaaaaaaaaaaa

SEQ ID NO: 235503 - DNA, 516 bp, Homo Sapiens
ggcacgaggatccttgctaattagtgctgagtggatcagggactaaccagaatcaggcaacaagaaaatagacgagtgctctaaaccagtatcatggctccagttcctctgacaaggattcacatggggttgcaattctgactgtgctggtgatgctggttccaggtccctcaggaacccctcccccagtctggtctgcccttgaactctatactggccccagggtatcccaggattgtcagaaaggcctggccaggattcacctgggagagggatcagcatctctgcaaagttgttggattgaaagaactttcattttgagctacatcattgaagagctttaaatctgaaaataagaaagacgttgaaccctattactcacatctctttgtcatttgaagcagatcccgaaccactcaaaaggacaaaacaaggaaatagcaatgaaattggattcagtgaatggggtaagggtattaagtgtctgaaatataagagataaaaaaaaaaaaaaaa

SEQ ID NO: 235504 - DNA, 828 bp, Homo Sapiens
  misc_feature (56)..(56): n is a, c, g, or t
  misc_feature (81)..(81): n is a, c, g, or t
  misc_feature (97)..(97): n is a, c, g, or t
  misc_feature (121)..(121): n is a, c, g, or t
aagtctcaggcagggacagacccagaaagaacacagtctgccctcagagagctctntgcagtgtagtgacactgggttctngcagtcagggaggagngaggtggccaggctgacagctttntgcaagaggaggggaccagcaccagctgggaggcataggctaggacaggcccactcccatgctggtggccctggccccactgagcacgcctgagcctccggggccacgcttcgttctcaggaacaaaacctgaggcagccctttggatgccctcacagccttgcttctctcagcctaggttcccatttggggacttcaggaccccagagccactaggacttccttgggaagcccgttagcccagggtgggtcccgccaggacagtagggaaacagttgtttccctagccatttccgaatagcccatcattccgagtcatcatctctgtttgctgccttcctggccagccaggtggaagaaagtttccaagctaggtctggcccgttggggatctcagcagtggggcaggagggtgcctgatttcggggagtcctgacccgagcctgttgtcagagttgggaggggctctgagcagtgttgggcaggccgggtctcccatcccgaggccagcgttcctgtgcagagccccatccactggttcttgccctgagccacatatgtctgtgccatgggctgagtgccacgacaggcccgtgtgacagctactgcccacgcatgtggaagctaggtgggactcattcctaattctgccgttgtaatgagacttgattaaaacaccgccactttttaaaaaaaaaaaaaaaaaa

SEQ ID NO: 235505 - DNA, 750 bp, Homo Sapiens
  misc_feature (9)..(9): n is a, c, g, or t
  misc_feature (574)..(574): n is a, c, g, or t
tctgatccnctggacatgaagggagggcatattaatgatgccttcatgacagaggatgagaggctcacccctctctgaagggctgttgttctgcttcctcaagaaattaaacatttgtttctgtgtgactgctgagcatcctgaaataccaagagcagatcatatattttgtttcaccattcttcttttgtaataaattttgaatgtgcttgaaagtgaaaagcaatcaattatacccaccaacaccactgaaatcataagctattcacgactcaaaatattctaaaatatttttctgacagtatagtgtataaatgtggtcatgtggtatttgtagttattgatttaagcatttttagaaataagatcaggcatatgtatatattttcacacttcaaagacctaaggaaaaataaattttccagtggagaatacatataatatggtgtagaaatcattgaaaatggatcctttttgacgatcacttatatcactctgtatatgactaagtaaacaaaagtgagaagtaattattgtaaatggatggataaaaatggaattactcatatacagnggtggaattttatcctgttatcacaccaacagttgattatatattttctgaatatcagcccctaataggacaattctatttgttgaccatttctacaatttgtaaaagtccaatctgtgctaacttaataaagtaataatcatctctttttgattgtgaaaaaaaaaaaaaaaaaa

SEQ ID NO: 235506 - DNA, 734 bp, Homo Sapiens
  misc_feature (21)..(21): n is a, c, g, or t
  misc_feature (42)..(42): n is a, c, g, or t
aacaagaggaggagacacatntacgaaatgagcaggtacgcnaaagagcaaaagaatgttcccaagctctcagtctgattcttgacattgatcatggaaagccagtgaagaatgcattagatttaaagtttgatatggaacaactgaaggactctattgatagggaaaaaatagcagtaattggacattcttttggtggagcaacggttattcagactcttagtgaagatcagagattcagatgtggtattgccctggatgcatggatgtttccactgggtgatgaagtatattccagaattcctcagcccctcttttttatcaactctgaatatttccaatatcctgctaatatcataaaaatgaaaaaatgctactcacctgataaagaaagaaagatgattacaatcaggggttcagtccaccagaattttgctgacttcacttttgcaactggcaaaataattggacacatgctcaaattaaagggagacatagattcaaatgcagctattgatcttagcaacaaagcttcattagcattcttacaaaagcatttaggacttcataaagattttgatcagtgggactgcttgattgaaggagatgatgagaatcttattccagggaccaacattaacacaaccaatcaacacatcatgttacagaactcttcaggaatagagaaatacaattaggattaaaataggttttttaaaaaaaaaaaaaaaaaa

SEQ ID NO: 235507 - DNA, 594 bp, Homo Sapiens
ggcacgaggaattttttccccaacttaacagcttacatgagttctggaccacttgtcgccatgatattagctagacataaagccatctcttattggttagaacttttgggaccaaataatagcttagtagcgaaggagacacatccagacagtctgagggcaatttatggcacagatgacctaaggaatgcacttcatgggagtaatgactttgctgctgcggaaagagaaatacgttttatgtttcctgaagtgattgttgagcccattccaattggacaagctgctaaggactatttaaatttacatataatgccaactctgcttgaaggactcacagagctttgtaagcaaaaaccagcagatcctttgatttggctagctgattggctgctgaaaaataatcctaacaaacccaaactttgtcaccatccaattgtagaagaaccttattaaaaaaaaaatcctcgaaagaacaaatcatgaactatcttattataaaaggctgtacttctactgtttgaaaaaattatttctagggtttaagtaactacaagtaaaataaatttatttcttaaaaataaaaaaaaaaaa

SEQ ID NO: 235508 - DNA, 600 bp, Homo Sapiens
tgccagcttctgggtcattctatgggcaaagatgctgccttagttcaggtttgtcagaagcagggtctggaatggggcttcagcgagggagtcagggaagcaggggaggggagggagcagctgggcaaggaagtggcttcagaggacgtccagcctcagctggccccacggagagctccaggcagagcccacagtaccacagtgtgcccacaccaccggttactggctcctggatgagggggccagagaggagtgaataacttcccagacacttacctccagggcagggtgccttccagtagccaagggaagcctccagagagcacagatgtgaaccctcagcagcaggcatcaccccccagtggactcgggtgggccaccagtagcatcttctagatggcagaggggtgaatggcagggccaggaaccaggctgcccgggttcccattctgcttctgccacttccagctgtgtggctttaggtgagccttcaccttttggtgccttcgtttcctcatttagcacctacctcctagagctgttttgggagtcaaatgcgctgacgtatataaagtgctttgcaagaaaaaaaaaaaaaaa

SEQ ID NO: 235509 - DNA, 757 bp, Homo Sapiens
  misc_feature (35)..(35): n is a, c, g, or t
  misc_feature (45)..(45): n is a, c, g, or t
  misc_feature (101)..(101): n is a, c, g, or t
atgaagttcacgaaccagtggcatgcattatactnttctctgttntgcatcatttcacttgtttagattataaaagcatgtgggtttttatatatgaactntgctgttgattaagaagcacaatgttaataaatgatgtggtgatcaataaggtttatcttaaagaatgtaaagactttaggtttttgaaagttattttggagaaatgggacttaatctataatagttactatgtatttggtctacattttccaaataatatctttaacttgtacatttgaaaagtgttcagagtggccctcctaccatccttccttccactccagccaactcttcctgctaaactgtattccagtttccaagtttactaattgacttgggcctgttcaaataatacttcacagaaaccaaatgccaaacggaggaaataagtaagccctcccagtttctccaagataaagctttttttattattgctattaatattaaatataggtctcattcatacagtgtatgagtaggatcatttggacaattgtccacaaagaccaatttttaaaacattttcttgtgttatagttaaatagtctagtaatgttttgtcctttattttcaatatttgataaacatttgatgttcaaaacttagctaatagatgcttgtatatgaatgtgttgtaataaagtgaggttttcttgatatatatttattaagatgataaaaattcattaagttttttaaaaaaaaaaaaaaaaaa

SEQ ID NO: 235510 - DNA, 689 bp, Homo Sapiens
tgatttacttctttttacatgattctactttatgtgtctctttctgtaccatctaaaccccctaaaaataatcttgaaacctagtgaaggaacttgagtcactagtgacagtcggttgttgggatagcttgtgaaggctggtggatccatttggttgtagctaatggcgtgaaagaattattaaagttttaaggtttttaataggagtttggaagaaaccttagaacctatgaagtctaatcttgacccaaatagctgtttcttctaaatatctcttgtcagatggtcatctggtttacattccatttcttttatataaagattttcactgtgttgcccaggctggtcgtgaactactgggctcctcctgccttggcctcccaaaacttcgatagctcctcctgccttggcctcccaaagtgttggaattacaggaatgagccacagcacctggcctacattccgtttctagtgttaatacttatgtctgcattagaagaaattatagtgagcttgcctaccaaattgttgaagatctgagaaaggcaccaaggcaacaaaattggaatctcagaacatctcagcagtatgcaacagggatagaatataacaggatgaccttttttcttttttataaagaatatttttaaagttgtgaacaaggatgtgtcaaaaaaaaaaaaaaaaaa

SEQ ID NO: 235511 - DNA, 471 bp, Homo Sapiens
ggcacgagggagaagttggattctacatagctggtggccttgtagctgtgtcaaaaaaaagaactggctaaatacagacatttgtaaaacatagtcatgcttaagagactagggaaatgagtaacagtagaagaatttgtctttctctctctctctctcttttttttccttcactttgttctggaatttaaaaagtgtctagagcccattactttagccttagctttttggacagcgttatcttataactttccttgaagtgagctgctaagcagaagaaaacttgtttctttttctttttaacctttaccacaattctgtgggccaaagggatcaggagacagacatagagcagtagaaaacctgagacagagaaaagaagaatgagagagactcataacagatggtaaagtagaggaggggtgagggatttgccaagaggtgacaaaagtgaaaaaaaaaaaaaaaaaa

SEQ ID NO: 235512 - DNA, 691 bp, Homo Sapiens
cattttaggttcaatagctgaagtttttcatgtcccagaaggcagaatttatacagtatatcagctgagtcatgatattgatgttggtcgtttccaaacactaatggaatgttttaccagcacttttgaagacgtgaaaattttagcatttgatcttctgatgaagttatcaaaaacagctgtacattttcaggattcggggaaactgcaaggcttatttcaggcagcattggagctcagcacaagcaccaaaccatacgactgtgtgacagcttcctacctgctgaacttcttaatctggcaggatgctctaccgtcatccttgtctgcctacttaactcagcaagttgcatgtgataatggagataggcctgctgctgtggtggaaaggaacacattaatggttatcaaatgcttgatggaaaatcttgaggaagaagtatctcaggctgaaaattctctgcttcaggcagcagcagcatttccaatgtatgggcgagtccactgtataacaggagctttgcagaagttatctctaaagtaaggatttccacagctgcctcctgtctcagaaatccattcatttctgagctttaacctctggttggaatgtgtcctgggaaaggaatgcagtctattgctttgaataaaattgaaaatcagatttaaaaacataaaaaaaaaaaaaaaa

SEQ ID NO: 235513 - DNA, 676 bp, Homo Sapiens
caagaattcggcacgaggcagaagaattactggtttatgatatttgtaaatatcggtggtgtgaaaacattggaagagcccataagagtaataatataatgattctggttgatctgaaaaatgaagtttggtatcaaaaatgtcatgaccctgtatgtaaagcagaaaacttcaaatctgactgtttcccattacctgctgaagtatgtctcctgtttcttttcaaagaggaagaagagtttacaacagatgaagcagatgaaactaggagcaatgaaacccagaatcctcataaaccatcacctagcaggctgtcaacaggtgcatctgctgatgctgtctgggataatggcattgatgatgcttattttttagaagctactgaagatgctgaattagctgaagctgcagagaacagtcttctcagttataacagtgaagtggatgaaattcctgatgaactaattatagaagtattacaagagtaactaattcactatgaacacttttgtcaccaggctataatttgcctgatgtctgtgagatttgataaatatatcattcaacctgtttatataaactaagttttattactttgctttccaatttttgttttttacttctgtaaaccaatttcattaaaaattagctttggtgtaaaaaaaaaaaaaaaaaa

SEQ ID NO: 235514 - DNA, 757 bp, Homo Sapiens
  misc_feature (82)..(82): n is a, c, g, or t
tgatggaggctgtacgtgtccaggggatgtcgccaaagcctttggagctggagcagattttgtcatgctgggaggaatgttntcgggtcatacggagtgtgctggagaagtgattgagaggaacggacggaagctcaagctcttctacgggatgagctctgacaccgccatgaacaagcacgcaggaggagttgctgagtacagagcctctgagggtaagactgtggaagttccttacaaaggagatgtggaaaacactatcctggatattctcgggggactgaggtccacgtgcacctacgtgggggccgccaaactcaaggagctcagcaggagggcaacattcatccgggtgacccagcagcacaacaccgtgttcagctaaccctggggacaaagcagcgtctggctcgagtggaagcgtccaaacctgcttttcccatctccccccaagtctgttccgtcagagcttctggctgctcctgaatggtggaatgctgtgtcctctcttctgtctcctgccgcctggaggcttcggggctctcccgcctgccttgtcggggcccagacgcaaggcaccgattgggccaacatcagagccctgctgcccagaactcataacctcattgttcaaaccaacacttgcacctttctctttttctctttctctctccctttctttgtttttctttcttttttaaaagaagatggtttcactttaatataatgctattatcttaagaaaaaaaaaaaaaaa

SEQ ID NO: 235515 - DNA, 769 bp, Homo Sapiens
  misc_feature (51)..(51): n is a, c, g, or t
cgaggcaagtactgaaatcaaattaaatactccctgggtcctgggtcagtntgaccctagccctggggtgaggcaagccccctcctatgaggatgagcaaaaatactactctcttcgccctgagttgctttctggatctggggcttcaggacttgctgcttcagtcagcctttattagcaccaaagactttatgaagatcccacacacagacacacatcccttcccgcctcccccctgccttcagtaggatctggctccgtggctggaggaccaacccctatagtgggaatgcagagcttaacgtgtactgcttgtgtgtgtgcgtgagtgtgtgtgtgtgtatgagtgtgtgttccgcctcccaccctctccccatctgctctgggtatttttgtttttgtttagttttaggtttacaacagagaggaattaatttatcagcagcctaaaactgttgtgtttttcttatggtttaaaaaacgccatgtcattgataactccctttctcccttcccttctcccggtctgctgatcactctttcatgcctgtgtatccagggtgctctgtttccccaccgttcccaggtgtacgaggcagagggccgggacagctttcctctcagtcattgttcaccccacttgaaaattcagacaagaaaactttgcttaaaagatttcatgtgtgggaaccacagttcctggctgcctttctcctgtgtatgtgtaaattccttaataaatattgcagggaaaaaaaaaaaaaaaaaa

SEQ ID NO: 235516 - DNA, 726 bp, Homo Sapiens
agagccaatcaccaccttcttcccaaatgtagacgtcgtggacactggttcaggatggaccccactcatgagagtctctgcggtgtcgggaaatcagagggtgcctctcttctaattgatgctggggccaatgtgaatgtgaaggacagaaatggaaagacgccccttatggtggctgtgttaaataatcatgaagagttagttcagttacttcttgacaaaggggcagatgcaagtgtaaaaaatgaggtaaatgagtccatctttatgtaaagattttcctcggagggggagaaaacatttataagcatgtaaaatttttgttgtttcctgtttcagttcggcaaaggtgtcctagaaatggccagagtttttgacagacaggttgggatgctctttctgcctatcaaggctaatttttagtccttctagactcagaaaaaccaccaaaaccctggattacattcgcctgtctgttttgtttatctagagtgtagtctccttattagaagaaaggaaaaaaaagcagaggccaaagaagtcttgtgtctgctgatgagagcaccactcatctgcgaaacgcacgtaaaacaaagtgaaccgtgactgttaaactagggatgggaaattctgcatcttggggggctgtacatttatttatttagttgaagattcactgatcccactttgaaatacatctttttacctaaaaaaaaaaaaaaaaaa

SEQ ID NO: 235517 - DNA, 678 bp, Homo Sapiens
ggacacagtactgtctttctgctttcatcaagggttacaggtacaggaatgcctacatttcatatggagatccaaagaagatcgtggagttgcggagttgttttgtgaacctcaccaaacatttaaatctcaaagcaattcctgagctacatctgcttcccaccttacgtttccaattgacaatttctttcccttaaaatgagctaatttcatagactcctttgtgaaaccataaatcgattattaggaaatttcacaaatatgcatacatgtaggttgtaatgttaaaatgtttaatttcacagaagccccactacagatgcttccttgttaaatgttatattaatattggagtccagaatgttctgagcattttccaactctgttccaaccttcctaatcctctcccttgtgagctgatgtgtataagcagatttaaatccttccctttctgtactaaagggagaaagaaaaggaagagatcaccctcagtgcttctttgctgctccttttctttagacatttaaccccttttagttcagaaaatgtaaactagcactagcatggtcttttaaggattttgttcatatcagtcatatatctgttattattttgtatttaaagattgtgtttattcccacgatttgaagaagcctagccaaaaaaaaaaaaaaaaaa

SEQ ID NO: 235518 - DNA, 667 bp, Homo Sapiens
aacagactgtcctccatgtcagttccttctggcttcaggccctcaattctttccctttgagcttttttagaccccagatctcctaggcccaggctctctcttgaccccagagaagccactgtcaggaaaggaagtgaaccctactgaagccagagaattcaccccggccaaagcaggccctctgggtccagcccctcattccacaccacaccagtattgcatccatctactgcagctacacatcctgagggcagcaccacccactctggcctgctggcccatcgcaggactagcccaggcacctgccgggcattgcaggatatccagtggggcctgtgactgctccctgatgcgtcagaagagaagtgttgcactttagtggaggagctgaggagcacctgcccccttgtagcttgagttccttttggtaacagtagcagcctccatggtggtgtctgggatgcacgtgcacccgctgccttcagctgtatgtgtgtgttcctgctggagttgtgttactgacaggataatgacattacaaagaaattgtgttatattcaactttgccttgataattattgtaaacactttgttcattttttcttttttattcacaaactaaatccaccaggaaattataaagttatttaaaaaaaaaaaaaaaaaa

SEQ ID NO: 235519 - DNA, 746 bp, Homo Sapiens
  misc_feature (59)..(59): n is a, c, g, or t
  misc_feature (83)..(83): n is a, c, g, or t
atcactgtcattaaacaagctgtgcagaagttttaggaagttttctcttaaacattctntgtcccttttggacttggagcaanaactaaaagaaatcagaaatctcgttgagcagcataagtcttcttcttggattaataaagatggatccaaacctttattatgccattatatgatgccagatgaagaaactccattagcagtgcaggcctgtggactttctcctcgagacattaccactattaaacttctcaatgaaactagagacatgttggaaagcccagattttagtacagttttgaatacctgtttaaaccgaggttttagtagacttctagacaatatggctgagttctttcgacctactgaacaggacctgcaacatggtaactctatgaatagtctttccagtgtcagcctgcctttagctaagataattccaatagtaaacggacagatccattcagtttgcagtgaaacacctagtcattttgttcaggatctgttgacaatggagcaagtgaaagactttgctgctaatgtgtatgaagcttttagtacccctcagcaactggagaaatgatttttccttcaagaaaaactacagtgggattcatttactttttaaaatacactgggtaaatcacctatacttagagtaacagtttgttatcaaaatgcctgataaaatatattcttaataaaagtcttcatttcataatgaaatcaaaaaaaaaaaaaaaaaa

SEQ ID NO: 235520 - DNA, 753 bp, Homo Sapiens
  misc_feature (29)..(29): n is a, c, g, or t
gattcctgtgacccattctttctgatctntcgtagttcatagtcaccaggcatgagtaccttggatagccctctgaagtctgttaccacccagatttccaactcgggttaattggtactaattctattagctggtataaataatccaaaatctgtgcagactctgggagcaaaatgttctactcagtttggaatactgtgccttaaaatatatttcattgtaacagcaccttgtatatatagttggccaaggacagagttgttacaagttacgtggaactttcatagcaaatcttgacagtaaataccttgttcttgtattaggtctatatcctgaattgacctttagcaagaatctttagatctgctggagggctgggatggcttttggacttcagtgaaaaagaatttctgctactcattgttgataacgcttcagtactgtataaatgtttatccttttccacgtaatttgttttctatgatatgagaacttttattataatttgcctcagtcttgatagaatcttaacaaaaataaaatctgtggtcgtctgaggtattctccatgctataacccagtttagctgatgcatttggagcttgggtgctgaaattaaatataacctatttgagttaaggatttattactagtgctccagtggtcacaggaacaataaaaaaggaacaacgatagaaatacgtgatctaggaaagaaggcaactgaaaaacctgaaagaaaaaaaaaaaaaa

SEQ ID NO: 235521 - DNA, 711 bp, Homo Sapiens
  misc_feature (22)..(22): n is a, c, g, or t
gttaatgataatgtggttatanctgtgccttaatagtaatgctatttaagatatttatttttaagttttactatgctgcactctaaagaaaggaactttagatgtgacactgtaaaattatgtattcatctcatggcataaattatttagtaagtctagatgtagcgtattaaatattaacctattcaactaaagatgttgacttggatttatttaaattcatatgtgcactgtataagagagtactcttacattaacacattttagtttagtttttagatttttttttaaacgatatattgctagtttcatgcttcctcctctgattttgcctgtgtagatttcatttattggtaattcattagtttaacactattatgtagtttttaaatgctgctttacatttttcttctgaaactgcaatacttgcaatttttattcttaaactaaattgaatactattttacactgtattggatttttatacttgaacaatttcatacaagggaagacaggttagcatttttatggactttctccattatcactggatttactttaagtattcccatactagacagtgttatgtaatgtagacatgactctcctgtgcaaattatttattcgttgtgtatattgctttataacatttcagatcttctaatctattcacttgtattaaatataatttttaaaaaaaaaaaaaaaaaa

SEQ ID NO: 235522 - DNA, 603 bp, Homo Sapiens
ccggtacaactttcatcccagtctcctctagggtgccaagagatgcctttctgaagttggccacttcttgaagattcaaatatttatctctttatttagacatggttgcctgcaggtatttcactgtttactgttgttagagatataggcactggggcagctgaggaacctcaatatgttaagagccttggctttggtagcctcctggcaggagcagcagtttgccacaggtccggacctctccctccacacagccacactgcctcatgcagtttgacccacccagtgagggtgcatttgaacactgattatattctccatttgtttttaagctctgctttgtgttagagcttgtgactgccaaaaattttgtgcacagtgatatgactgttttaggatcttaagggtagaattttgtgaaaggtgagatcctttggaattgagttctttctcattgggtatgaaaatggatgtatgtttagaatatatgcccaacgaggcaggaccatgtggatagattccatttgtttccttgacctgatgtaataaaaactgataaaagccgtgcagtgcccggcatcttggaaaaaaaaaaaaaaaaaa

SEQ ID NO: 235523 - DNA, 749 bp, Homo Sapiens
  misc_feature (49)..(49): n is a, c, g, or t
gagctagctaaaaaatatccagggttcctagatgtgagggcagcccctntgttggccaatgacaagttacatggttaccccctgtcctatatcatcacctgtcaatatgacatcttaagagatgatggactcatgtacatcacgcgactttagaactctggagttcaagtgacacataaccacagtgaagatggattccatggagcactttcctataatgggcttaaaattgagtatggaatagaaaatcagtatatgagttggctaagtgaaaatctatagtaaaaatgtaagcaatggtttatttaaaatgtataaggctcagaacaggaaacaaattagtgaaaatcaaagggttgatgtttgaattggtctttatcatctgtgacctttctaaggtcctcatagccatagtgggttttggttttgtttttatttattggccgctagcaaattcttctccattttatttattatcctgttattcactcacttctgtgaagatactttagtattttcttctgctaccattactcacttgttaaatctctagtttacagctatagttttttgattgccgaatagtattacagatgagaagaaagttttaaacaaacacgtctgatttgtaaaatgccagttttagtcaacatgaatttagagacttaaaatgtttccctgtgagaactgatatgaaatatgtgccatctcttttaaaaagcatttgcctcaaaaaaaaaaaaaaaaaa

SEQ ID NO: 235524 - DNA, 697 bp, Homo Sapiens
  misc_feature (33)..(33): n is a, c, g, or t
  misc_feature (43)..(43): n is a, c, g, or t
  misc_feature (110)..(110): n is a, c, g, or t
aatctcacacagctggggctgtagcaacccttnccaacccctntgctggttgctgggcctcattctagcaccttgttcttagagcagattctagcacatcatggcagtgngaccaagcgtggtcccgaggaagggccagagcctggtagagactagggaagggaggtctcctctagactgactcacattgccttgagcttttcagttaagttgctgtaagcacctgggctgaggaggcagtttttgttccttcctgcgttatagcggggccttgtctcttcctctgcaggacacagatctggaggacgtggactggggtaggaaaccaccctgagggtgttagtacctagtggtgaaatggatgaggtcatttctaaggtgtgttgcccgtggatctgggcacaatcattggaattccttggagccactgggattcatggctttgtatccaactgcatccaggcctgaggctgctgacgtttgacaccagggccagtagagagtgcccttttgtatcttaagccaagaagtgaggcctgggggtgggggaggggggaaggggtgggagccaatactgagtgcctgcagcatctactactctgtcttcactattcagaacttgtaactaaagtatttaaagaaactgattttaaatgcaaattaaagggcagatattctcaaaaaaaaaaaaaaaaaa

SEQ ID NO: 235525 - DNA, 727 bp, Homo Sapiens
aaagcttattatttcttgcattattgtaaaaagttcagagttgaaatgcctttcaaccatttccttctgtggtcatttttcttgctgcctttttcacccaagattcagcagtcagatgtttactgcacacctattacctattatttgctgttcttgcatggttcaaaccaccattctgtagccacccatcctttgccttatctaacaaacatttttccaggaaggtggaaaaggaagtgttgctctcattgtgtgactcagtgctgctgtccatcccatggaaacatgggcacaatcaagtatttgtccagcctattgcaggcttttcctgactttaaaataaattgtgatcaataatagtacctttgattatacatttattattgtgtctctctctgatgtactgtggattgtacatttaactttggaatggctttgtaataatcagtcttaagaaaatgttgacaagctctggttgcttatttttagaaaatgaggacatttaataataataaaaaaaaagggattaatagcttttgacctcaagtcttttgtcttctgagtgttggagcttggctgaagacatgtttaatactgtacaatttctgaagatggttattaacactgtgctgttaagcatccatttaaaaatatttgttatcttctttgcctgcctgtattttaaaaagaaatacaaagttgtaaaagtaaaaaaaaaaaaaaaaaa

SEQ ID NO: 235526 - DNA, 597 bp, Homo Sapiens
  misc_feature (10)..(10): n is a, c, g, or t
ggcacgaggngacaccagaggaagcagagagcagtgaggatgaggctggcccatggatcctgctctccgatgacaagggagaccatcccccacccccggagtccaaaatacagagtttctttggcctatggtatcggggtaaagctgaatcctctgaggatgagaccagcagccctgcacccagcaagctagggggagaagaggaggcccaaccacagtctccagctcctgatccgccctgttctgccctccacgaacacctttgtctgggggcctcagccgccccagaggcctgacttaggggtctggctgtggaaggatgtgtggcctcaaatgaggacagggctcccgccttcacagccctcgccaggggtctgccccaatcctggcctgcatcagggcaggacggggtctcagcccgcctccctctctacgtctctgtaccgagcctctggggccagatataagagtgcctctctgagtctcagtttccccatccatgaaatgagagctgactgcctagctcccagggctttgtgcagacggcctgagctcatgtaataatgaactgcccgtaatacaaaaaaaaaaaaaaaa

SEQ ID NO: 235527 - DNA, 825 bp, Homo Sapiens
  misc_feature (44)..(44): n is a, c, g, or t
  misc_feature (53)..(53): n is a, c, g, or t
tcaggagagaacatttcctgttccatccgcccagcgaccgcccnttcatcccntatgagctgtacacgccggcaacctaccagctaactgaagagggcacctttaaggtggtggatgaagaggccatggagaaggtgccctgaatcccactggaccccttggcgccagacctagcacggtaccctagttacagtcaggcccaggcccttcgctgcacggtgcgggccggtgagatgctctatctgccggctctgtggttccaccacgtccagcagtcccagggctgcatcgcagtgaatttctggtatgacatggaatacgacctcaagtatagttacttccagctgctcgactccctcaccaaggcttcaggccttgactgatggagcactggtgaacaccaccaagcacgcctcgggggacggagccagcccctccctggccaggtcaattctcgagagagcctggagtgtgcatgctggctgctggccccgggtccagcatggcttgagatcagctttggaggatcttggaatgtggtcataaggactcaaggtgccaggcaggtctgggtgagggttctcaggaagttgccacacaggtgagcagagtggggatcaggtgcagcggcacctctccccagcgctgtgatgttgggcgagtcactgcgtctcgggcattggtgtcctgtcagtaaagagataataatggctgtacctcgcggggctgttgtgggcttggagatgatgtctatgaggaccagcatggagctggcacacaggacatgttgaataaaaggtagctgtgaaaaaaaaaaaaaaaaaa

SEQ ID NO: 235528 - DNA, 722 bp, Homo Sapiens
atcttgttatctctctatgaagacaaacagaatcctactaaaggagctctaaataaatcaagatgtacaatctgtggtaaactaactgagattcgccatgaagtcagctttaaaaatatgactcataagctgtgcagtgaccactgctttaatagatatagaatggccaatggtttaataatgaattgctgtgaacagtgtggagagtacttgcccagtaaaggtgctggaaataatgttctggtgattgatggtcaacagaaaagattttgctgtcaaagttgtgtcagtgaatacaaacaggtaggtagccatccaagcttcctgaaggaggttcgagatcacatgcaggactctttcttaatgcagcctgaggtaagcaggaatgtaaatggagttcaaggccttaacatttttgagcactgctactactgtcattaatatgtatctgaaaaatcttgtccaatttgaaatatattaaaatttccaaacttaaattgtatcaaatgatgaatgttttatctctgagacatagatttctaatttcactaattttacatgtattttcttgtgatatgctcatttgtctttagttatttatgttcttaggaaattattttcagatttttttagtgcacaataccttgtacacagtaggcatttaataaagggatataaaaatcctctcttttgtgcctacctgaaaaaaaaataaaaaaaaa

SEQ ID NO: 235529 - DNA, 768 bp, Homo Sapiens
  misc_feature (26)..(26): n is a, c, g, or t
gaggtcctcctttccattctcccacntagatactgacacaccgccacggtttccacattggaagggcagaacactgtgcagtatcgtgcacacttgctgggttaggaatagagctgccctagggtcaccttcatgcaagtattgacagctacaaattaaagtccttagagcagttgacacagatactacgttctagaagagaattaaatttaaacgtcaagtttaaagggatcataattctgcaggtatctttctctgagtgacttaatgtgactattgcattagggtaaatgaattaagacgtgcaagtgggatttactgtatgttagaaaggagttttgcagccaagactgccttgaataaaatgtgtttgcactgaaaaaaaattttaaattacttggtctctggttgctgtaaaggtcatccaagatggatgttctgtttatattgtatagtatttcatatgaaataattacagttcatgaaatgtcttccctaatgttactgatttataacagcacatttgtaacatggtttttatcgtgtcagtgtaccatactgtaaatgatgattacttgtcatgcttagtataataacttaaaagaaaaaaaaggacagggatttttgtaagtctatatttgaaagtccctccctatggtgatactgtgttcatgttgtttatgtagtgttgtgtgaaatatccattttggattgtgttactttttaagatattaaataacatttggttgtaaaaaaaaaaaaaaaaaa

SEQ ID NO: 235530 - DNA, 694 bp, Homo Sapiens
  misc_feature (24)..(24): n is a, c, g, or t
aaaagctccaggctatcaagagtntgaatacaatctttctggtcagtggtttcctgatggtgaggatgtttgattagttcatctacaggatttgatcttagcttgaagactattgatgctgatggttcccagggcagttgtttgaaggctgcaggacagaggtccagcaatgccaaagaggggcggtcatcatgacaaactacactactgaactaattgaaactggactcaggagacctcatctaatgtgtagaattctcattgattacaacttttatcagatatctttcatgactagaatacaatttaagctaattattttcctgtttaaacctaggcctgtgatacttgggctgtgatcctctagagccagcttggactcacatcattctatggggttgaagacaactcattccctctgaggagccttgtacatacaagccttttatttataacttattttgtattgaaacttttaaacaatactgaagaaaaaaaaacttttccgacatctgttcttggtcttttgtgacgcaggttgaagggggaggaatagaaaaagacaaactgccttggaggagataaaccaattttatgtctatcatgttatacaaaaatctagaaataatagatttgtacagaaaaaaatgataataaatgagaacacaaaacatgtaaaaaaaaaaaaaaaaaa

SEQ ID NO: 235531 - DNA, 667 bp, Homo Sapiens
ggcacgaggagatgtgcatctcagaaaggaaatataagtgagacaattgttattgatgatgaagaggacatagaaacaaatggaggagcagagaaaaagtcttcctgttttatcgaatggggacttcctggaactaaaaacaaaaccaacgatttggatttctccacttccagtctttcaagaagtaagaccaagactggagtaagaccttttaaccctggtagaatgaatgtggcaggagacttatttcagaatggagaatttgcaactcatcatagtcctgagatgcatctacaaagaaggctaatgtcattcttccagtagaatcaagcaaatccttccaagaattttatagtacatcttgtttgtctccctgtgaaaacaactggaatcttaaaaaaggagtttttaataagtcaagatgtacaatttgtagtaaattagcagaggtctggatttttatacctaagttgttgtttaggctaacagtgataattttaacttttaagtgctattatgtactctttcatctacataatgcacgtgttctggatgtataacatgaagctgaaaggaagaataaggatatgttagaactatcttatgggatattttataaataaaattccatttgcatagcatggaaagtacaaaaaaaaaaaaaaaa

SEQ ID NO: 235532 - DNA, 671 bp, Homo Sapiens
ggcacgaggtttttttttttttttttgtactttactaaacactttgtgtttaatatattgtaaattgtaaagaaattacaaggaactcctaaaaaaatttaatacaaaaatattacaagttaggacaattaagcattaagatgacatttaagaagcatgcagaaaaagtagcatagggttaacatttcattgatgacaaagcactttggtacagcagagaaaagcaccataaaactaccatctaaagtgtcttttcctccactgtattttttcaaatgaatatattggtaaaacagtaaactttgatctgatctgctacggattatactaggtaataaatctaatccattgtaaagtgttaactatgaaattaaaaataatcccttctattactgttcaaattagtttcagctttccctcaagcttataaggattctaatccttaggagtccaaccctttttggaaaagtatacaatgcaggatattactaataatctatgccatgcaataaaagttaaccccttgaaaatgaaagcatgtcagttctagcaactgcagtggcttatttctaataaaacataaaactatgcttgaatttatttctgtttaaggaaataaacaggaaaaatagaagacttagagagtgtaaattcttaaaaaaaaaaaaaaa

SEQ ID NO: 235533 - DNA, 721 bp, Homo Sapiens
  misc_feature (42)..(42): n is a, c, g, or t
accgagtgtctgcacacctgtacgtgccctgcccgcgccacncagggagggcgcgcccttcccagctctgtgctcttcagaaccttggcttttgtgttaccacacgcttttagctcaagcccgacaaaagcaggaaccaggaccaggggcagagacgatcttgaagataagtcagaaaagtcatttcacgctaaaggtcctgtgggtggtgtcagagcagatgaggcctcgcttaggagagcgaaacacaggagagaccccacattcctcccacggagcagcaaggccagtagccgctgtgacagtgctcactgctggcagtttccaaatctccagaggagttccttagatccttcaaaggggaaccttccagtgtgttcttcacacctgatgtgcgtcctcacacctgatgagtctgtgctttggtgttagaggactcacacctggggctggacctgagtgtttttctaagtgtggctaccgctgacgggcaggtgccatccatcaggctgaggctcggctcttatgctaacctgaggccccatggctggcggccctgctggtgtggacgaccgctgtgtgcgtctcttgatggctggggagcattttgtttaaacaggatctttaaaatgaagtgtacgcttataatacaagtgatgcttgtgtatttctcactttaggaaataaaatatttgccaatttgataaaaaaaaaaaaaaaa

SEQ ID NO: 235534 - DNA, 563 bp, Homo Sapiens
gaaatggaacgagttaaagaggaaagttcatacatactggaatccaatcggaagggtcccaagcaagacagaactgcagaagggcaagcactaagtgaagcaagaaagcatttaaaagaagagacacaattacgattggatgttgagaaagaactggagatgcagatcagcatgaggcaggagatggaattggctatgaagatgctggagaaggatgtctgtgagaagcaggatgccctggtatctcttcggcagcagctggatgacctcagagctctcaagcatgaacttgcctttaagctgcagagttcagacttaggagtaaaacagaaaagtgaactaaacagtcgcttggaagagaagactaatcagatggctgctaccattaaacaacttgaacaaagattgcgccaggctgagcgaagccgccaatctgctgagttggacaaccggctcttcaaacaggactttggagacaagatcaacagtctgcagctggaagtcgaggagctcaccaggcagcggaaccagcttgagttagaactaaaacaaaaaaaaaaaaa

SEQ ID NO: 235535 - DNA, 699 bp, Homo Sapiens
  misc_feature (17)..(17): n is a, c, g, or t
cgaggatgctgacaagngacatgcccgcatccggggaaccagtccaggttcttgttctgaaaaacatcaccagtgggttaagcaggcgtgggcccggcctagaaaggcctcatttagaaaaacagtaatgtggggggaggcttctgccacacccttaacaaaactactcgtcagggatgtgtcatgggaaaatctgaattgacctggtcctccccggggccagagtgagctggcagtcaaccctcttgtcaaccctctgccaccgagacaggctgacttccgttaggcagcgtcggcagctgagtttgagtcctttgctggtatcagcaccatctgtttactctcataacaccccctgagaggtggaggaaggcctctgcacccagacagaccctggatctccttccttccttcctcccgcccgcctgcctgacaagcacgccccacgccccgggaagacgcgagtcagacagatggcaaattgagggatcaggaggctccgctgaggagagctggcatctgacacgtgtctgggaggcaaagccacgtttcccaggacagaggagtcggggggggagggggcaccaagcaattctcagcttccttgtagtaagctgtgaattctcagaccaacagataaacctgtacacaaagatcagtttgaaatacagactaaacgataaataaaaaaaaaaaaaa

SEQ ID NO: 235536 - DNA, 710 bp, Homo Sapiens
  misc_feature (57)..(57): n is a, c, g, or t
caggggttaagtaactatccaagaatcacacaattaattagtggcgaagtcataatntgaagtctttctaatgcccaaatgtttccattgtgtcacatatcggagctgtgctctttccatcagccagtttcccattatcatagctgatgacatgcacacccaccatctggggcaggctttagtacagcactctgtgccatcatccagatcaccaaatcttagtaaatggacgtgtcataagagataaggctgccatagaatcacagcagcttctggcttagtaaattacctggatacacaccttttcctagaggaaatcccacatcttcgtaggagatctggtgtaatgctcttgggacctctctctagaggatgagctagtatcactgggtcctagtaagtttcagcaaatataatagagacagaactgtcatcattatcagaaaagaaacagagaaaaatgttaaaacaatggttttgtgaccttaaagtctgtgttagtcccttagcaccaccgctgagattttgctgaaagggacgttttgtgtgttgggcttcactgaaggaagcccctgaaagtgttcagaaatagggaaaatgagaaactgttccagctgaaaatacgggcaagggggaatcattgaagaagacagaatattgaagtgttcaaatgaataaagaagctaaaaactaaaaaaaaaaaaaaaaaa

SEQ ID NO: 235537 - DNA, 669 bp, Homo Sapiens
ctaaggtacctcagtggaatctgctacagtgcttccccctccctacccctccattttgtttataaccttttagctatctaaataatacgtattccatactcaggatagctggttagctagcaaaagaattaacatttgtgatatttacttgcaaactttactgaagccatattcattatcttccttgtcaccaaggctgttgaccttaaataaacattaagttgattttgcacaacactgtatttgtgtgtgtgcatgtgcctgtttttgtgtgtgtatgtttgtgggaaataattatgtttgtttccgcatatattcatttttaatgcattctgtaacttttctcgagtggtggtcattgagggtagggaagattttattttttaagttgtcgttaaggtatttcattagtgttcctgagtgtaaaacagttttttcccaaatacttatggcagataagagcatttttgtaaataataaactagcaccgtttgggtaaatttgcattattttttggacaggttcattgtcatgtaaaacaaatatctcaaaattcattttacatttagcaaaggtgcaacatttgtttttggagtttgagagatattttccttgtcttccatcattcaataaatactaaaattgataaccacaaaaaaaaaaaaaaaa

SEQ ID NO: 235538 - DNA, 791 bp, Homo Sapiens
  misc_feature (42)..(42): n is a, c, g, or t
  misc_feature (49)..(49): n is a, c, g, or t
tactactgtaggggcatattatagggaagctaacaaggtaantacgccntgagtgcgtgagtgtaaggctgtgtttttggtgggggtgtgtgtgtgttatctgtgcacacatacacacgtctgtgcctgtgtgtgtgtgtttgtgtgtgtgtgtgtgtgtggaattacattgatgcatttattgagaaaggtgcaagaatttcacctacacagagggacacatctgctttgttatttataatagaaagctaaattttaattttttaaaggacactgctaatgattgagaatcaagtttttagttttgctattttttttaattggtagaggatttttatatattttttccattttgttgggttgtgtccttatttatataaatactttatccgtaagaggcaaggaggaaaccttctttgcttttaattattgtggttgtcatcgtccctattttatttctggtgtgatttctctgtcttaccttctaaatgagaaaatgttttcttgtatttgtacattgtcagattctatagtttcctagataatttaaccaaattgctctatgtattattattctgtgagtataaagttctattttaatgtctgtaaatacttcagaactggcttcttttctcaaactcccactgtggggttattgtttacatcacagaaactgtagaatctctatgctcatgtactgtaaatagtgaagtgatctgcttataaataaacttaacaaatacactatggagattaaaaacaaaataccacccaaaaaaaaaaaaaaaaaa

SEQ ID NO: 235539 - DNA, 589 bp, Homo Sapiens
acgtggggtctggctgagagtacagggctgctggcggtcagtgatgagatcctcgaggtcaatggcattgaagtagccgggaagaccttggaccaagtgacggacatgatggttgccaacagccataacctcattgtcactgtcaagcccgccaaccagcgcaataacgtggtgcgaggggcatctgggcgtttgacaggtcctccctctgcagggcctgggcctgctgagcctgatagtgacgatgacagcagtgacctggtcattgagaaccgccagcctcccagttccaatgggctgtctcaggggcccccgtgctgggacctgcaccctggctgccgacatcctggtacccgcagctctctgccctccctggatgaccaggagcaggccagttctggctgggggagtcgcattcgaggagatggtagtggcttcagcctctgacagtcaggatgaagccccatgccactccacactgctgggacatggcagggacttcacagtgggggtttttagctggctcacagggctccctcagcctggggaacattaaaggttttctacaaatacaaaaaaaaaaaaaaaa

SEQ ID NO: 235540 - DNA, 783 bp, Homo Sapiens
  misc_feature (19)..(19): n is a, c, g, or t
  misc_feature (46)..(46): n is a, c, g, or t
aggagatatcataccaaanccaaaggaaagaaaatattatagcttntgaggaaatcattgagccatacagacttcatgaagatgataaagagcaagatattgcagataaaatgaaagaagatgaaccatggcgaataacagataatgagcttgaacttattaagaccaagacataccggcagatcaggttaaatgagttattaaaggaacattcaagcacagctaatattattgtcatgagtctcccagttgcacgaaaaggtgctgtgtctagtgctctctacatggcatggttagaagctctatctaaggacctaccaccaatcctcctagttcgtgggaatcatcagagtgtccttaccttctattcataaatgttctatacagtggacagccctccagaatggtacttcagtgcctagtgtagtaactgaaatcttcaatgacacattaacatcacaatggcgaatggtgacttttctttcacgatttcattaatttgaaagcacacaggaaagttgctccattgataacgtgtatggagacttcggttttagtcaattccatatctcaatcttaatggtgattcttctttgttgaactgaagtttgtgagagtagttttcctttgctacttgaatagcaataaaagcgtgttaactttttgattgatgaaagaagtacaaaaagcctttagccttgaggtgccttctgaaattaaccaaatttcatccatatatcctcttttataaacttatagaatgtcaaaaaaaaaaaaaaaaaa

SEQ ID NO: 235541 - DNA, 435 bp, Homo Sapiens
ggaacgaggattatataaaactatttgttatgttgttaaatcttgctgagacaaattatgactatagtgcatgatatatagtagattataaccttgtgggttgatgtgtctatctagtaataataaaaactaatgagatggcactagtatttccaaggtgttccttggtgttcagggtgtgcacaagagagattttggagcttatctgttatgtgttcatcagttagcaatgggacctgaagttcaacaacccagggtatagcccccttcctccaaagtccctgccacaggagaattactcctctctctgggtcttgaatgctctatggtgaatttgtatttagcctcaaggcagcatttcatttgtaaagcacttgggtaaccctttgttcttgcaataacaatattataatatttaaaaaaaaaaaaaaaaaa

SEQ ID NO: 235542 - DNA, 772 bp, Homo Sapiens
  misc_feature (262)..(262): n is a, c, g, or t
tgagcatgacccacacaggcacacagcagcaagcatccccgggcagtgccgtgcccactcaccagcttcttcctgcggtcatcgatctggcagaattctcctcatctatccccaaacatgggcttccttgaggcacagtcattcaaccaaccagccagcattcattgagcaccatctatgtcctgggcactgctaggggatggtgataacagggagaagactctgtccctgccttccaattgtgtagaggaagacatccccntacatgatgggtgagacatagcagaagtgagtaggggatgaggtgggggctcagaggagggcatggtcagcctgtctgggagggagttgcatgtgtgcatctgaggtagggacaggcatgcatcttacaggatgaatatcgagcagagttacagagagggggaaactccttgaggtttcaggaatcacctaatccactgtgactcacaaattcctgcctcttggctttgcctgcagcatatctcctggaagtgtgctggggcaaaactcatcccagaccaccatctccatcctcccccaatacaccctggctctccctggctacccttgagcacggtgcacgtgtgcatgggtgcatgcctgcatatatagctatcccccatgtatttcccaaagccctacataatgcttcagtttgctaaggaaaaaatgttaattactgcaaatgtgtttaaaactgtaaaagtacattaaacaaactctgtaaagtgtgaaaaaaaaaaaaaaaaaa

SEQ ID NO: 235543 - DNA, 744 bp, Homo Sapiens
aaagtcagttataggcatcattccccgtaaaccctaaatacttcagtgtgtaatactgaataattactaaaaatgattttctcagaaaaaaaaactcccacaattctggaactataatactgtaagccttagaataaataatactttcaagttccaatctaaagttctttttgagttttgttgcccgttttatgcttgatgtgtatagtaatagggtaggctatttattttattaaaattttttttagagacaaggttttgctgtgttgcccaagctggaacttgaacgactgggctgaagtgatcttcccacctcagcctcccaagtagctgggaatacaggtgtctgccaccatacccagtttcatttttgttttttatacccgaagttcatttcctttgtctccctaaaactgaactgtaattttgggaggttttcattagtggaagctcttcatttataaagctatttgaaggggtttaggaatttatatcacatggtaattgtagagaaaaagaagctatatacctcaaaatcgtgccctctttacatatgtcttatcaggtataacatgttgaaatgtcacattagtagtaaagtggggtttatttatatagtggttaagaaatgtcagtttacactgctgtatacttcttcttctgtgtccctaaggcctggtacagtgccaagcacatacttggtatccaataaatatttgttggatgaaaaaaaaaaaaaaaaaa

SEQ ID NO: 235544 - DNA, 733 bp, Homo Sapiens
  misc_feature (10)..(10): n is a, c, g, or t
tgtgctgtcntgagcaacttttaatattctcccgtcctgcaatatgagttaacttctctgatcgatgtagattccaggaagggggtccaggacaattaccttccttctggagaaacttcccttaatcaaataagagaacttcaaagaaaatccctccctgtgctttggaagggaagggaggtgggcagcagtgggtcagagatagacctttgttctcttatttctgaggcccttcagtctcctttattcaaagcactcagcatgccaaagcaccctattttagggtatctttttctgagccctaaacactgtgttggggatgtcaactgtgacaggaaaatatcttggggccccagaatcactaaggaaaactcaagcttagggaaacttcttagggcaaacccacctcccactctattcaaagttatctctctgctcactgagatagatacatatctgattgcctcctttggaaaggctaatcagaaactcaaaagaatgcaactgtttgtgtctcacctatctgtgacctggaagctccctccccactgaaccaatgttcttcttacatatattgattaatgtcttatgtctccctaaaatgtataaaaccaaggtatgccccaaccatcttggccacatgtcatcaggacttcctgagtctgtgtcacagtgtgtcctcaaccttggcaaaataaactttctaaattaactgaaaaaaaaaaaaaaaaaa

SEQ ID NO: 235545 - DNA, 665 bp, Homo Sapiens
gagcctgtcactctaaaccagcgtttaacgttcaaaaggcaaataactgatgaccaggcggcacattgttttgctccgtgagtgtctggcactgggaaaggtgtagattgtctagaatgacagcaattccgacgccccagtcagtcctgcgtgattgtggcgagggcgcgtctggcaccgggaaggtgtagatcatctagaatgacggcgattccgacgccccggtcagtcctgcgtgattggcgagggtgcatctgtcgtgagaattcccagttctgaagagagcaaggagactgatcccgcgtagtccaaggcattggctcccctgttgctcttccttgtggagctccccctgccccactccctcctgcctgcatcttcagagctgcctctgaagctcgcttggtccctagctcacactttccctgcggctgggaaggtaattgaatactcgagtttaaaaggaaagcacatccttttaaaccaaaacacacctgctgggctgtaaacagcttttagtgacattaccatctactctgaaaatctaacaaaggagtgatttgtgcagttgaaagtaggatttgcttcataaaagtcacaatttgaattcatttttgcttttaaatccagccaaccttttctgtcttaaaagaaaaaaaaaaaaa

SEQ ID NO: 235546 - DNA, 601 bp, Homo Sapiens
  misc_feature (43)..(43): n is a, c, g, or t
ggcacgaggcatacaatgtcagaccatcagaagatataaattnagatataaaatataaggaaagaagtacctgcatgaaagaaacacaaaaaccttattatggtgaagttataaaaaaatcattcagtacatttaggtcattaaacattggagccctggaagagctgcctgaagtgaataaacctgctttccttctagaccctgagaaatactttaggaaagaaccagaggaagagcgtccccaaattccggaggccccgtcactttttaaaactttgaaagctgtatttgatgagaaaaacctgtttcccaaggaaattctgcatcatgaacgaaaagccaagcaattatgccaagaaaaaagttgtgaagtgaagaaaaataagaagtaattacaacagaaaaaccttcactgttacataaggtacagatataaaatgcagaaaaagcatcaagaattctgccttttattttattttatatttaaacttcaggaagttttctcttcatgggataatttagtactgcttttatctatcatctgtcaatttctctgtattcttaataaaataaatattgaactaaaaaaaaaaaaaaaaaa

SEQ ID NO: 235547 - DNA, 641 bp, Homo Sapiens
cctgctgccctccccctcctctccaccatcgtcttcttggccatgggaggcctttccctaagccagctgcccccagagccacagttcccctatgtggaagtggggcgggcttcatagagacttgggaatgagctgaaggtgaaacattttctccctggatttttaccagtctcacatgattccagccatcaccttagaccaccaagccttgattggtgttgccagttgtcctccttccggggaaggattttgcagttctttggctgaaaggaagctgtgcgtgtgtgtgtgtgtatgtgtgtgtgtgtatgtgtatctcacactcatgcattgtcctctttttatttagattggcagtgtagggagttgtgggtagtggggaagagggttaggagggtttcattgtctgtgaagtgagaccttccttttacttttcttctattgcctctgagagcatcgcctagaggcctgactgccaagccatgggtagcctgggtgtaaaacctggagatggtggatgatccccacgccacagcccttttgtctctgcaaactgccttcttcggaaagaagaaggtgggaggatgtgaattgttagtttctgagttttaccaaataaagtagaatataagaagaaaaaa

SEQ ID NO: 235548 - DNA, 413 bp, Homo Sapiens
gtgtcattctgttagatattaacattttcactgatgagcaagacatacttaatgcatattttggtttgtgtatccatgcacctaccttagaaaacaagtattgtcagttacctctgcatggaacagcattaccctcctctctccctagatgtgactactgagggcagttctgagtgtttaatttcagattttttcctctgcatttacacacacacacaaaccacaccacacacacacacacacacacacacacacacaccaagtaccagtataagcatctcccatctgcttttcccattgccatgcgtcctggtcaggcttccctcactctgtttcctggtcagcatgtactcccctcatccgattcccctgtagcagtcactgacagtaaataaacctttgcaaacgttaaa

SEQ ID NO: 235549 - DNA, 486 bp, Homo Sapiens
ttattcttaatctcttactatgcctagtttataaattaaaatttataaggggtatgtattattggaaaaaacatatatagggtaggtaccgtccgcagttttaggcatccacttacataatgggggaccttggaatgtatcccctgtgaataatgggggctactgtacatctaccatatattacaaaacaccccccgtggagactggggctgtactatgtaacagtgatgtttttgtagtgaaatatatgacagctgtgctgtgtagctgtgtacactaaatgggtcaagttttgctgccatctgagtttttagagctttttgggtttcagatttgcaaacaagggagtgtgaattgatggctgtagaaaaaggacctgtgatatagaacaaaatgtaaaaactattgccaagttgttttggatcaaatagggaatttacttttcctgatttaaatcactttttatgcagcagacactgtgatggt

SEQ ID NO: 235550 - DNA, 486 bp, Homo Sapiens
gcactgttaacaatgcgagtgaaaccaagatggtgcaagttccctttgcagatggcgtgggcacacttgatttttattatgagtgaatgtaatctttctgtattttaccagagttacagcaattacctgaaaagtttcctaacattttaataatgttagggatttcgttttggttttagttgtcctcaagagacaacaggttcacagtaatttccatgatgttgggtgtggctaagctggggattggttctgttccccctgctcccgtgtagagaaaagctatatttatactgcattctttctcaactttcaggtaaaacaaactatgatttaaaaaaagaaaaaagaaaagacaggtacttttacttcaaagagtgctttgctacatttttatttaaaccaaaaatcaaataaaataaggaggggggctgggtatactttaaacaaaaccagtcctgaaatgctgttattctcaaagtacattcc

SEQ ID NO: 235551 - DNA, 542 bp, Homo Sapiens
ccagctccaggaactcaggtggattcataatttgttctgtttccttgctcttaggaaaagtactgacagctcataattggttgtatttcttaggatatttgcatttaaactagaagcaatgctttcttttcttggtataatttgtcttacatttttgaaagtaatagctattcattaaattacatttgaaaatgcaggaagaaagaaaaaattgtctataattctactactcatataaaaccactattcacatatgtgtactttcctctattaacctttcaaagcatgcctcaattttaattgtattcacacaaatacaattttatgccatacattttacttattaatatgctattagcatcaccaatgtcaatataaactccttgtaaacatcaatttaatggttgcaaagtattacatcaactggatatgccatggcttatttaatcactgtatttattgttaaatatttgcattgtttacattgtttagtattgaaaaccacgctgcaataaatatctttggatagaaaaaaaaaaaaa

SEQ ID NO: 235552 - DNA, 584 bp, Homo Sapiens
  misc_feature (125)..(125): n is a, c, g, or t
  misc_feature (137)..(137): n is a, c, g, or t
gagtagctggaattataggcacttgccaccaagcccagctaatttttgtgtttttagtagatatggggtttcaccatgttggtcaggctgatcttgaactcctgccctcaggtgatccacccgcntcggcctcccanagtgctcagattacaagcatgagccaccgagcccagcctgataatcttttcttaaataaaatatatttaaaacattttaaagatactctgaaaatgctacctttgatttaagaggccaaaaggcatgtaatttaacacacaataacatcaagtgttactgaacgcataggcaacagctgaaatactcccaattacatgttcatgtcacagtaattttatgtgatagagaacaaaatcaagagaaaaaatgttttatcatagttggaaaaaagacaatttaacatgcaagagtacattttaacataattatatttgagtaaactttataagacttaagagaaattaaatatttttctaaattccaaagacacaaagatgaaaaatttgctacaagttacataggagttttggtcaccattttcaaatattatcaacttaacttctttc

SEQ ID NO: 235553 - DNA, 535 bp, Homo Sapiens
cagcagatgaaatacatgaaggagacctagtggaagtggttctttcaggtaagtaagtggctttttagagtgattgccttttcccctcaaagagcctaattttctgtactaaatgctgcaattcgattatatttagtctttgtattattgttacttaatttctttcatctctaataatggtcaccatatgatttttcctttcaggcatgttatatcaccattaagaaagaaaaatacctggcaacggtggctcacacctgtaagcccagcactttgggaagctgaggcgggaggattgcttatctcaggagtttgagaccagcctgagcagcatacctcgtctctactaaaaatttaaaaaaaaaaaattagccaggcatggtcacatgcaactgtagtcttagctacttgggaggataaggtgggaggattgcctgatcctgggaggttgaggctgcagtgggccatgatcacactactgcacttccgcctggacaacagagcgagactcgtctctttaaaaaaaaaaaaaaag

SEQ ID NO: 235554 - DNA, 559 bp, Homo Sapiens
gctttatttgtgagtagacccatatttcattaagcaaactctgatagctacgtctagaatcagaagagcccaagccctctcatttcaccgaaagacattctggagcgtatagtggggaaaataaatttcctctgaagtctttttcagggaaatggaaaattacatattctggactgatacaaccaaaactcacacaagctctcccattccttcagtcttgaatttacttcctagttgattttatatacttcaatatatgaactaatcacttcattatccaaaaggatgtcaagctattttccaaattttcataagctagtaaaaatatgtatttctgaatttagtagaaatgaaaaagattttgggcaaccaaggacagaaaggtctcctatgcactgttttacattagaacattgtaaggaagtacttacactctaccaagtagggtggatatcaaaacaaatgtattgccaaaagttaaaagatgaaatcagaaaaatgatctaactttgaaaagactcaggtctattttcacatacacctgtaaacctaagcaaga

SEQ ID NO: 235555 - DNA, 569 bp, Homo Sapiens
caaaaaagactttacattgcatcatacagcagatatcctaaatcagtcaaactatcagaggaaactgttggcgtacagccttacaaacaatttaccctaataaaagttccccagtcagaaaatgtgtttcacacaaaacatttttcccttcttgcatttcactaccttacacattatgtgaaaaatcattaaaaacacctactacatatttaaaaaagccaaaatttcagcaacttttattgactaccttttaaaagccctatgctgctgttttacaaggcataatagaccagctcatttggtcaaagcattctacatcattagtttgaactaacttttactgaaacagctacagcatcaaaagagttaaggcaaattggaattcatagaaaaggataagacacttcacactacgttgaaagaaagacagaaagctaagaaaagagacactgacggcaacactgaattacagcaacactcgcactgcaagcacagaacaccatgggtgaagtcggactatttaaacttcagaaagcccatttcatacagctggaaaaaaaaaacacaaa

SEQ ID NO: 235556 - DNA, 648 bp, Homo Sapiens
  misc_feature (180)..(180): n is a, c, g, or t
ggctccttagactacagttactcgccagtgcagctgccttcatatgctccagagaattacaattcccctgcttctctggacaccagaacctgtggctaccccccagaagaccattcctaccaacacttgtcctcacacgcccagtacagctgcttctcctcggccaccacctccatctgntactgcgcatcgtgtgaggcagaggacttggatgctctccaggcagcagagtacttctacccgagcacagactgtgtggactttgccccctcagcagccgccaccagtgatttctataagagggaaacaaactgtgacatctgctatagttaatagaaattacagtaattcagaacatggcatgggtatatctatttttctaccacgtctagatgacactgcaaaatatgcaacttggtaacacaatatcccaagcacagtttacatgtcactatttccaattttctgatgctaagcattcatatgaagtcctcagacccggtcacagcgccactcctactttgtatgctcatagtttaaatttttgtaggaaactttcaattgttttactttttgtataacgaacaaatgctgtctccttttttactaataaataattttgtattactaaaaaaaaaaaaaaaaaag

SEQ ID NO: 235557 - DNA, 519 bp, Homo Sapiens
ttcaccccattaggcttggagagcagtggagaactagcccaccgcataacacaggttctcctgtcccccagatactgatcagaagggttttccatggtccatgagtccatcagagctcagatcccccgaaggcagtcccgcactctggcccttctcatctgctttctcgtattggccctaattccctagggagatgggcacaagtccttgatctgcctacagtcaaagaggccagtgatcggccaggcgcagtggcacacgcctgtaatcccagcactttgggaggccaaggcgggtggatcacgaggtcaggagttcgagaccagcctgaccaacatggtgaaaccccgtctctactaaaagtacaaaaattagctgggcgtggtggcacacgcctgtggtcccagccacttgggaggctgaggcaggagaattgcttgaacccgggaggcggaggttgcagtgagccaagatcaagccactgcactccagcctgggcaacacaatgagactctgtct

SEQ ID NO: 235558 - DNA, 529 bp, Homo Sapiens
agttgagttttgatctttctcagcacttgattagggttgcataaacagacgcttatttgccatggtgggattaagccacccatggacaattgtacaattggatacagtaagtgacatatttataaaagttctgttgtaattaacaaattctcattcaactgtgtgatgtaattcacacatcagatgagcaagttgaacctcttgtggactctgagggactggggcacaggacagggaagtttttattggaaggcgagagaaatctgaacgggaacaaaacaggttggaagcacaaaacaattaaagggacttcgaattgctgaatggggccactgagcctccttgctccctccagagagaccctgtagtaggccactgctttgcaacagggaaggtcagacatgggaaaacaatggaggaaaggcaggcagggtcaactgctggccacagcctggaaaggtccagggttacccaatcaagtttctgtacaactccaggcagctattgtctgtacctgttttcccgtttt

SEQ ID NO: 235559 - DNA, 585 bp, Homo Sapiens
ttttttttttttaatgaaaatagaagttttctttctgtcctcctttctctcctccttccttctcctttccggatctttccccaaataattttctaataattcagttgttttctgaatattgcttttaagttttttgattttaaagatacaattagaaataatgtatatgatgaaaaagctgtttcccactccaattcagatctgtgatctacactgggaaaaatgaccactcctcatgaagttttgttactgacctctcttggactttagctctccatctctgctgaggggatatgaaggtatttgcatttctcctgttaatgaagggatcttagaacagaaaataaataaatgcagttttagcgacacatagctggaaatatttccgtgaatattccttgacacaaatatatttgaaagtgccttaacttatgcaactcatataaacggagattggcaaaaattaaaggagagtataaagtagatttcattaacttcctgatcaaatgaaatcagtaatcaatccatgtgtcttagagacttgtcatataggctttgttggttttgagtttggacgatcacttg

SEQ ID NO: 235560 - DNA, 730 bp, Homo Sapiens
  misc_feature (69)..(69): n is a, c, g, or t
atcagatccactgactgtctccattagcaagaatattcctagaccaggaaattgatgggcaggccctgntgctccttacccttcccgctgttcaagaatgcatggacttaaaattgggccctgccatcaaactttgccatcacatagagaggatcaagtttgctttttatgagcagtttgccaactgagaaggacaaccaaagtgagctggatctttgaagcacaaatgcagcaaatccttcaccctgctttataagtggagctggaatagtcctggggctctggggcctgcaggtatcagcttgctctctttgcactttcggggaaggaggactcacagtgaggaagcaaaaactgtgcacagaagtggatcacctgctggtggaaatgtggacatctcttgttcagcagatggcagtttttaaaaaataaaggttgtgaggaaaagacttatataagaagaaaagcatttccagtggtgtggcctgaaaacaaagaataacctaggctgctggaaagcacccttttggttgttttcattctgttccctcccattgtagattgaactttgttctctgctttctttttcttggaaagagaggacttagctttaagtcagcactgatttgggactgttcctaaggcatatcagtgcttcattgtcattgtgtttttaaactttttaaaattaaaacagttcattttggggatgaaaaaaaaaaaaaaaaaa

SEQ ID NO: 235561 - DNA, 683 bp, Homo Sapiens
actgcaagttgaaagggaaaaatggaggattgtatttaggaaaagggacaactttgtggccacctgctctgaaagtcaaaaggaaatgtaaattagtgtcattagtgtgttggaagagaaatactattcagtaagcttcgccaaagaaaagtgagtcaaagttaatgtgtgtgcgcatttatatgtaggcagctcgtagaccacattttaaccagcaactggtaacaaagagcttagttttccttgtttgaatgctgtagatctgtacctagtacccctcccatctactgatttgtttgtttttgtaaccaaacacattttcagatagaaggagccttaaaaaaaaaaaaaatcacattgagtaacttcagtatgaatgaatgagagtgtgtggagctacccctcaccctccacccctttgtgctttttattcccgaattttcccagtctcttaaacagaaaaatgactgatataattatcttttggaaactgagccttaattttttttagagggggaaataagttttccccaactcacacagcataagcaatgtttgacagcaatataatgccgttgtaaactactgagagtattgtatctgttctggtaaccatgtacagaatgtgaaactgtcttatgaatataaataaattctatatttctaaaaaaaaaaaaaaaaaa

SEQ ID NO: 235562 - DNA, 771 bp, Homo Sapiens
  misc_feature (32)..(32): n is a, c, g, or t
  misc_feature (34)..(34): n is a, c, g, or t
ggaatagagcttgacaaataattagtgtactntnttctttagttcctcctggacaacactgtaaatataaagcctaaagatgaagtggcttcaggagtataaattcagctaattatttctatattattatttttcaaatgtcatttatcaggcatagctctgaaacattgatgatctaagaggtattgatttctgaatattcataattgtgttacctgggtatgagagtgttggaagctgaattctagccctagattttggagtaaaaccccttcagcacttgaccgaaataccaaaaatgtctccaaaaaattgatagttgcaggttatcgcaagatgtcttagagtagggttaaggttctcagtgacacaagaattcagtattaagtacataggtatttactatggagtataattctcacaattgtattttcagttttctgcccaatagagtttaaataactgtataaatgatgactttaaaaaaatgtaagcaacaagtccatgtcatagtcaataaaaacaatcctgcagttgggttttgtatctgatccctgcttggagttttagtttaaagaatctatatgtagcaaggaaaaggtgctttttaattttaatccctttgatcaatatggcttttttccaaattggctaatggatcaaaatgaaacctgttgatgtgaattcagttattgaacttgttacttgtttttgccagaaatgttattaataaatgtcaatgtgggagataataaaaaaaaaaaaaaaaaa

SEQ ID NO: 235563 - DNA, 680 bp, Homo Sapiens
gaattcggcacgaggattatatatatatacatatatatatatatatgcgccacataatcaacagaaagatggggctgtcccagccgtaagtcaggctcgagggagactgatcccctgaccaattcacctgataaactctagggacactggcagctgtggaaatgaatgaggcacagccgtagagctgtggctaagggcaagccccttcctgccccaccccattccttatattcagcaagcaacaaggcaatagaaaagccagggttgtctttatattctttatccccaaataatagggggtggggggaggggcggtgggaggggcaggagagaaaaccacttagactgcacttttctgttccgtttactctgtttacacattttgcacttgggaggagggaggctaaggctgggtcctcccctctgaggtttctcaggtggcaatgtaactcatttttttgtcccaccatttatcttctctgcccaagccctgtcttaaggcccagggggaggttaggagactgatagcatgtgatggctcaggctgaagaaccggggtgctgtttaagtccctgcttttatcctggtgcctgattggggtggggactgtcctactgtaacccctgtgaaaaaccttgaaatataacactccatgcaggcccaaaaaaaaaaaaaaaaaa

SEQ ID NO: 235564 - DNA, 728 bp, Homo Sapiens
  misc_feature (72)..(72): n is a, c, g, or t
tgcggaagggtcaggctcaactgctgatgtgtctcacacgtagcagacaaggggtgtctgactggcttcttntgcctcaagatggtgtatgtcgtaagtgatgcaatcagctgtctgctttttaaggttgggattgtgctgactttgggattaacatgagcttctttagcaaccaagcatgaacttgattaagaccagaagtttgggagatgagtcctggcattatgtctaggactaaagcagtggctttgtatagcaagctgagtaaaggttgacatattccaaaacccttctttttaaaatgaaaaaggatggagagaaggatggaaagcctggacttaaacctttagaaaaaacttctggagagaaatcccttttaaacagttacttttgtcattgcctctggtcatttgtctaaataggaatggaaaattaaaagaaaagcaacaatccaatcttttttctaaaaattatgctggggtctcgactaaaactgaatttgaattggaaaattctggtgttggttggagttccatcttgcaagggataatacaaatcctatgatctctatgcccaatatgctgcctcaactctgagctgtctgcaaggcttagtaagtattgagtggtgttttttttttctttttatacaataccatgttaaccacatgagttaaataaatttgagaagttgttttaaaacagtgcttcaaaaaaaaaaaaaaaaaa

SEQ ID NO: 235565 - DNA, 766 bp, Homo Sapiens
  misc_feature (72)..(72): n is a, c, g, or t
gccattgccctcacgatgtaccccatgcgtattgatgagagcattcacctccagctgcgggagaaatatggngacaagatgttgcgcatgcagaaaggtgacccacaagtctatgaagaacttttcagttactcctgccccaagttcctgtcgcctgtagtgcccaactatgataatgtgcaccccaactaccacaaagagcccttcctgcagcagctgaaggtgttttctgatgaagtacagcagcaggcccagctttcaaccatccgcagcttcctgaagctctacaccaccatgcctgtggccaagctggctggcttcctggacctcacagagcaggagttccggatccagcttcttgtcttcaaacacaagatgaagaacctcgtgtggaccagcggtatctcagccctggatggtgaatttcagtcagcctcagaggttgacttctacattgataaggacatgatccacatcgcggacaccaaggtcgccaggcgttatggggatttcttcatccgtcagatccacaaatttgaggagcttaatcgaaccctgaagaagatgggacagagaccttgatgatattcacacacattcaggaacctgttttgatgtattataggcaggaagtgtttttgctaccgtgaaacctttacctagatcagccatcagcctgtcaactcagttaacaagttaaggaccgaagtgtttcaagtggatctcagtaaaggatctttggagccagaaaaaaaaaaaaaaaaaa

SEQ ID NO: 235566 - DNA, 721 bp, Homo Sapiens
  misc_feature (12)..(12): n is a, c, g, or t
atagaaatgatntcttaattagctgttgtgagatatttctcgagtccttgcagaaaaaaacatacagactgtgaacaaatcattcacaaacagaataaaacagagccaacaacagtattttaagggtcacttgcctcctgttgacacaattgttgctaaatcaaaagaagcgttgtccaggtgtgtctacatctagtgttacttttaatgagaatttgaatgtttattgaacaatagtacttgaatgaacatttataaatgtaattattgcgatcactggttaagaatgttttatatatccttataatatttttcactgatcaaaatgttgttctgctttttcatttcttaaggaatacatgtttgggatttttattttttacgtgtccgaagataagctccaggtcttatcgtatcccttgccatctgaacttgtttgcactgcttctgtttgaaagagcatcttgaaaaacttccccggtatgatgattgttggtaacaactttttctatagtcattgatggagtagatcatgatggaggggaaatcactggagatcaaatatgtaaaatcatttcaaatataaaatccagtttactcatggattttagctattttttcactgggtaaattatactacatttatttacaaatgagtttatgcattttcatggctcttaataaacatattgttttcccttgtaaaaaaaaaaaaaaaaaa

SEQ ID NO: 235567 - DNA, 737 bp, Homo Sapiens
aaagatggtgtatttcaaagtatttcatattaatgtactatatctacttgaagttccaatagtacattatgacagaaaccaaaagatctaacaattctgcttagctttttggttaagactccatgctttcattaccagaaaagggtcttacgtagtcattatgattcatggaattctattccatgaagccttaagaaaaaaaactttttttaactttccctgaaactttatcatttgataagtaaatttacttttcaagaagagtataaccaaagagtaaagataatgtgacactaagttatcaatgttttatgaatacacataaggcataaatttcagctgtaaaaaagctacattcaatctgactctggttttaaaacaaaactgctgtcataattatacatgatactgcaacttttggaaggctaatttggtggaatgttgcctcatcatagaacaccatagatcattaaaaattctataaaaattttaccaagctaccatatagttaataaaagggtatacagtcacttttatttctgaaaatataaaacattgagcctttcagtgtatctgatgcttctcttttggtaaggaatacttttatttcatggatcccaggcaggcatataaaagttacggaatttataaaatcatttgggataattagaaaatgcaattattcataacagaaaaataaagactttctagaaagcttcaaaaaaaaaaaaaaaaaa

SEQ ID NO: 235568 - DNA, 724 bp, Homo Sapiens
  misc_feature (37)..(37): n is a, c, g, or t
tcaccccatcagggagcgtgatttccaagtttaattntacgacttcctctgccactcctcaggctttcgactcctcctctgccgtggtcttcatatttgtgagcacagcagtagtagtgttggtgatcttgaccatgacagtactggggcttgtcaagctctgctttcacgaaagcccctcttcccagccaaggaaggagtctatgggcccgccgggcctggagagtgatcctgagcccgctgctttgggctccagttctgcacattgcacaaacaatggggtgaaagtcggggactgtgatctgcgggacagagcagagggtgccttgctggcggagtcccctcttggctctagtgatgcatagggaaacaggggacatgggcactcctgtgaacagtttttcacttttgatgaaacggggaaccaagaggaacttacttgtgtaactgacaatttctgcagaaatcccccttcctctaaattccctttactccactgaggagctaaatcagaactgcacactccttccctgatgatagaggaagtggaagtgcctttaggatggtgatactgggggaccgggtagtgctggggagagatattttcttatgtttattcggagaatttggagaagtgattgaacttttcaagacattggaaacaaatagaacacaatataatttacattaaaaaataatttctcccaaaaaaaaaaaaaaaaaa

SEQ ID NO: 235569 - DNA, 675 bp, Homo Sapiens
  misc_feature (652)..(652): n is a, c, g, or t
atgagaataggagatttgtgagcacatctgatgataaaagcctaagagtttgggaatgggatatccctgtggatttcaagtacatagcagaacccagtatgcactcaatgcctgcagtgactttgtctccaaatggaaaatggctagcatgccaatcaatggacaaccaaatcttaatttttggagcacagaacagatttagattaaataagaaaaaaatttttaagggccatatggtagcaggctatgcttgtcaggtggacttttcaccagacatgagttatgtgatttcaggagatggaaatggaaaattaaacatttgggactggaagaccacaaaactctacagtcgatttaaagctcatgataaagtgtgtataggtgcagtgtggcatcctcatgaaacttctaaggtcataacatgtggttgggatggtctcattaaattgtgggattaatgagattaatccttaaactagctgggatcatttttgatccattgtcatatttatatttaattattaaatgtatctgatgataacttgatttacagataatgttgatgacattgaccctttgtttaaaaaaagaaactgtaaatttgacataatttcatttgcaacttcattttgttttttataaatgttatttntacagaaaaaaaaaaaaaaaaaa

SEQ ID NO: 235570 - DNA, 687 bp, Homo Sapiens
tcttcaaatacatgcaagaacacacattggagagaaacactatgaatgtaaggaatgcggaaaagcattcaattatttttcttccttgcatatacacgcaaggactcatatgggagagaagccatatgaatgtaaggattgtgggaaagcattcagctagcctggttccttttatggacatgaatagactcacactggaaggaagcactatgaatgcaagcaatgtggcaaaactttcacattttccagttcttttcgatatcatgaaaggactcacactggggagaaaccctatcaatgtaagcagtgtgggaaagccttcattccttttacttcttttcaatgtcatgaaaggactcacacgggagagaaaccctatgagtgtattctagttccgtttgatatcatgaaaggacttacactggagtgaaaccctatgaatgtaagcaatgtgggaaagccttcagatgtgcctcgcaccttcaacggcatggaagggttcacacttgggagaaactctatgaatgtaagcagtatgggaaagccttcagatctgccaagattctttgaatacagataattaatgtaaacaattatcataagtatactaacatgttattctttttaaataagaaggtataataaaatatcccattggttttatgtattaaaaaaaaaaaaaaaaaa

SEQ ID NO: 235571 - DNA, 717 bp, Homo Sapiens
  misc_feature (5)..(5): n is a, c, g, or t
tgtancataaatagagatgcagccaaaattttaggccttttatcctgcttctagcagaaaaatgcagggagagtcaagtagtctagggtttcaggttgcctcccctcatatggtttttggccaagtgactaaaacagttttccacaactgtaaacaaactgctaagccccacctcaaacttgttcactggggactttgcttaccgttctgtgggtgaccttttccgggatttcttgttcttatcaagcaagaattaagcacatgctaaacgtcttccatttgacttctctactcggtgtctcagacagtgtcttcccagaaaaccaccaccctctacccaaagatgaaacatgctcatgtcatttttctcatggtcacatttaacagttttgacatgttatacttgcgcatagatccaagcgtttcttgggaacctgacttttgagtgtttaataaagccggaagtggtgttgccctgaaccagcagattttcacctgggttctggctccggtgtttaacactggatacatctttgatgtgcgaaagtgagttcatcttcagacacatttggtacatccagaaatagatccaagaaatggggtggttgagtgggtccgcacgaaatgcttgattatgtcagcaacacccaacactgtctgttttccatttgttggttttaatcataaaattgtcaagtgaaaaaaaaaaaaaaaaaa

SEQ ID NO: 235572 - DNA, 746 bp, Homo Sapiens
  misc_feature (15)..(15): n is a, c, g, or t
  misc_feature (128)..(128): n is a, c, g, or t
aattccggttcattntacttgatgcatatgacttgagttcttgggcgtggatcagtttctccaaaatacgagcagtgtatgaagatattgagggagcacaatccaaatacggaactgaatagtcctcnaaggtgaattattcctttgagctgagaatctaatagattgtctttaaattcttcagctaccttttattcagcaggaagatggacaattaaggactttctgagccccagtttgtccagtttaatggaggattcagccaagaacagctaaactggttgaatgaagtgctaacattctctgacacaaaccaagaaaaggtggtgattgtgagccatcttcccatttacccggacgcctctgacaatgtgtgcctggcctggaactacagagatgccctggcagtcatttggtctcatgagtgtgtggtgtgtttctttgctggtcacacccatgatggtggctactctgaggatccttttggtgtataccacgtcaacctagaaggagttattgaaacagctccagacagccaagcctttggcacagttcatgtctatcctgacaaaatgatgttgaaagggagaggcagagttccagatagaattatgaattacaagaaaggaagagccttccattgttagtctaatttattttaacttgatagaaaatgagctttgtgtttgtccctcctaaacaaaaaaataaaaatcctctgtctcattaaaaaaaaaaaaaaaaaa

SEQ ID NO: 235573 - DNA, 765 bp, Homo Sapiens
agttgcatttattgtagtcatcatgaatcttcccttgcacataaatttaaaatgtacctgctgcacattttaatatgtcttaattgcttttaaacttggctgtattgtgtacaactattataccatcttttataaacacagttttttaagaaatttctttttgtaagttacaacattccactggatccttatattgcctgtagtggaagagggtcttgtgtgtctgccccttctagttttcactcatgcagaagcaacataaccttctgatttgcacaataaattacatatatttagcaggatttttatttgccgtgatatataggataatttagtctttggcatgtggcattatatttattttggtttttttttttaaacaggttatcaacgaaacttctcagcatcacgatgaccttgaataaaaattgcacacactcagtgcagcaatatattaccagcaagaataaaaaagaaatccatatcttaaagaaacagctttcaagtgcctttctgcagtttttcaggagcgcaagatagatttggaataggaataagctctagttcttaacaaccgacactcctacaagatttagaaaaaagtttacaacataatctagtttacagaaaaatcttgtgctagaatactttttaaaaggtattttgaatactattaaaactgcttttttttttccagcaagtatccaaccaacttggttctgcttcaataaatctttggaaaaactcaaaaaaaaaaaaaaaaaa

SEQ ID NO: 235574 - DNA, 661 bp, Homo Sapiens
caaggctgctgtagagcacagagacatggggctggccagtgttgactgacctgaggagacccctttgtttgttgccttcataactgtcactaaaccgacccctctgccctttcagtggcaactctggtctaagggaacattcagcactctagcggcatctgattggaagttccctcacccaagtaatctcaattccttcctctctccatccctgaaagaaacaggatggattttcctctcttctccctgctacattcactaccagatttttatgctacagtttcattcttgattgtgatttctccatggaattttttttttctggtgacatttctatcatggaaataggaagatttcggagtgctttgtgaagatttcaattgtctgtctctttctctctttgacttgtatgaaggagattgtacattgcctgatatctctttgtaaatgagaaatattgctaacatccaagcattctgaagtcttgcttatccttctgagtttagttctcattttgttttacattttgtttggggacttggggcaagctatttattagagttttgcaacagagttcttgtttgaagcctctaaagactacctgtaaaattcaaagaataaaattcattttaaacgctcttttaaaaaaaaaaaaaaaaaa

SEQ ID NO: 235575 - DNA, 773 bp, Homo Sapiens
  misc_feature (18)..(19): n is a, c, g, or t
  misc_feature (21)..(21): n is a, c, g, or t
  misc_feature (285)..(285): n is a, c, g, or t
ctcccagggtcgtgatanntnaagggaaatccctgaatatactctccagccaagaagggcagggctgccggggctgtacaagaagaggcagcagcctcctacagcaccactacaggcactgcgaggacataacaccagagagctgctcctctgccctccgaaacgacaactttcctaccatcttggaggcagagcaaaggggggccagggggaaaagtgcacccgctcccgataaagtacaaatttttacttctcatctctggaaaaaagtccacaccggccgtntacacccgcgcctgggggagaaagcagggaagaaacggggggtgcatgagaaacgttttcatttgctccagggggaaaaatgtttctgcatcttctgatggaaagaaatctttacaagacacaggttttccggtggttattgttttttattttctgtttttaatttttttcatgttagtgacagtgatattttaatatttttttaagccagtaataatttttctccattacagggctaagttctgtggctggtggtcagtttgtaaatttatacttaaagagacttaatagtaacttcatttatttgtctggttatgttattgtatatataaatatttatgttttcatatattgcatataaaaatttgtgttacatgttactctcagaacagattgctgtaagacaattgtaaaaaaacatgtctttcgtctgtttctcaaagcaatgtaaataaaacctatggactgtcaaaaaaaaaaaaaaaaaa

SEQ ID NO: 235576 - DNA, 647 bp, Homo Sapiens
aggacataggacggacccctgtacccagaagaggattcttgctcactaacccggatccgcctcgtgcccctgcctcctggagcttcccattccaggagaaaaggctccacttcccagcccttccttgcccctgacatttggactcttcccttgggccgaccactctgttctcattctccttcccaccaacatccatccgtccttctcagacaaaccactcactgggtaccccacctcctctctcatatgcccaacacgaccactgcctccctgcccccacacctgcacccaaacagacacatcaacgcaccccactcacagacaccccttaccccacccccactgtacagagaccaagaacagaaattgtttgtaaataatgaaccttattttttattattgccaatcccctaagatattgtattttacaaatctccctcttcccttcgcccctcccttgttttatattttatgaagttagtgcgggctttgctgctccctggcccaggaaagagggactacctgaccctcacctggcacccccctgctgctgcccaagccgctgggcctttttaattgccaaactgctctcttcatcagctcagcacatgctttaagaaagcaaaaccaaaaaaaaaaaaaaaaaa

SEQ ID NO: 235577 - DNA, 601 bp, Homo Sapiens
  misc_feature (551)..(551): n is a, c, g, or t
ccccccccaccccattcagacacatggatgttgggtctctgtgcggacggtgacaatgtttacaagcaccacatttacacatccacacacgcacacgggcactcgcgaggcgacttctcaagcttttgaatgggtgagtggtcgggtatctagtttttgcactgtcttactattcaaggtaagaggatacaaacaagaggaccacttgtctctaatttatgaatggtgtccatcctttccccatccctgcctcctgcccctgacgcccatttccccccttagagcagcgaaactgccccctcctgcccgcccttgcctgtcggtgaggcaggtttttactgtgaggtgaacgtggacctgtttctgtttccagtctgtggtgatgctgtctgtctgtctgagtctcgtggccgcccctggaccagtgatgactgatgaatcttatgagcttctgattgatctcggggtccatctgtgatatttctttgtgccaaaaagaaaaaaaaagagtggatcagtttgctaaatgaacattgaaattgaaatgcttnatctgtgttttctgtaaataaaagagtgcaataaaaaaaaaaaaaaaaaa

SEQ ID NO: 235578 - DNA, 714 bp, Homo Sapiens
cagaaaatcatctagtgcatttaaaaataatcgactctaaaactgaaagaaaccttatcacattttccccagttcaatgctatgccattaccaactccaaataatctcaaataattttccacttaataactgtaaagtttttttctgttaatttaggcatatagaatattaaattctgatattgcacttcttattttatataaaataatcctttaatatccaaatgaatctgttaaaatgtttgattccttgggaatggccttaaaaataaatgtaataaagtcagagtggtggtatgaaaacattcctagtgatcatgtagtaaatgtagggttaagcatggacagccagagctttctatgtactgttaaaattgaggtcacatattttcttttgtatcctggcaaatactcctgcaggccaggaagtataatagcaaaaagttgaacaaagatgaactaatgtattacattaccattgccactgatttttttttaaatggtaaatgaccttgtatataaatattgccatatcatggtacctataatggtgatatatttgtttctatgaaaaatgtattgtgctttgatactaaaaatctgtaaaatgttagttttggtaattttttttctgctggtggatttacatattaaattttttctgctggtggataaacattaaaattaatcatgtttcaaaaaaaaaaaaaaaaaa

SEQ ID NO: 235579 - DNA, 826 bp, Homo Sapiens
tcccatgcgtatgttatgttcactgtatatataatatatttgcatgcaagatcttgatgtaaaccaatccttgtaaagtgtaaaaagaaccctcctatcgtggaatgaaagattaagtatattaacacttttcagaatgatagtttctgtatttgatgttgctcagaaatgtctgagtatttgagtaagttttacatgacagtgggtactgaaattaagtcattttgttcagcactttaacgctttcttatagaattgtcttaaaacttctggatccttgagcaaatgattatagtctcctgactttcatgaggcttccattaggaacagaatgattgcatgttgtccccagaacactgccaccttgctatgcgaatgatgttctcagcagcacttctaagaaacactcttaaaagttatttattgaaaatttttcgtatgcttttaatattttaaagaattgacctaaggaaagcttatgattggacttattttccaaccagataacatttactctaagtacccagtttttataatttatatgaaatcagatttcaacacttactttgtcattttgtagatcattttttttaaatactgtgtaaaaactttttttacacctaagctgtgtttttgatactgatattttcctatgctgaatagttttcttactttcagggaaggtaagaaaatactttttttatatttgttacttatgtaacattcatatttttctcattttgatatttgtaacatactgtatgctttctacttgtaaatgtcaacaatagaattaaaatatttatttaaaaaaaaaaaaaaaaaa

SEQ ID NO: 235580 - DNA, 627 bp, Homo Sapiens
cctgggtcctggagtaaagtcaggagtgcagggatgactataggtaggagagattcccatcccttggtgtgggagagcaagttgcctatgtccatgttctgtgagatggctttcctcatagatggatgggaaaatgtcaggctctttgctgctggtttgaattggacacactgctgcggctcctcctgcaggcctgagggggcttccctctgcttgtggagtggttggcattcccagcagtatcaaccctcagaggagcgggaactggggaattctggccctacgtgcattcacaggcaatgatgggtttgtgtgtatggtgtcatgagatcctctacctcataacaaaaggacagtgggtagactaaggcagtagctcaaagggctttgcaaaattttaatatattaaaacaagaggcatctgctagaaaacattctattgtataaaacccgagttcttaaaaacatgttttctttggcactttcattccctccctcccctttccccagcatattgcaaaaagctctccagtgctaaggcattggcagggtgtgtaaacagcagccagcatatgtggaagaataatacaaagcttttttttttcttctaaaaaaaaaaaaaaaaaa

SEQ ID NO: 235581 - DNA, 751 bp, Homo Sapiens
  misc_feature (38)..(38): n is a, c, g, or t
  misc_feature (69)..(69): n is a, c, g, or t
  misc_feature (116)..(116): n is a, c, g, or t
gcataaagacgaaatatatgtgagagttgacagacttntaaatatcctctttcccaatttatgtatttntgttctgcgcacacagatttatcaatgaagtacattgcctctgcttnatcacaaggaaaaaggaatcaaacattgaacacaaatgtgttccaaaccagtcttgtccatcttgtcacttttatgtgactgctcctctgaaccagaaggggcacgatagaaggccataggaatgaaagtaaatcattcaggtgaagtgagaaattcttccatatacagagtgaaaatgtgtgatttcattcctgccttcctttaaacgttgtcttgatctctgcctagtagtagttgagccctcagtcgcccaaacatgaggagagacccaactccagcagccagaatttagtatttacatttgccttcccaagttgagaatagaatgtggtgttctgtgctttctgtttttattattccaaaatatttttttaaagaagtgttatttttcaacagattcataaattagttcctgatgtacggtaaattaaaactcccactgtgtcagtcaaactgagatgtgctcatttcataaccactcatttctagtctgtcagagctgcactggtggcttattgctggtttttaaaggtgtttttaacttacatgtaacatgtttaggacatgttttttttttctaatttgtgtgtctttacaactgattaaacagtagtttaaaaaaaaaaaaaaaaaa

SEQ ID NO: 235582 - DNA, 706 bp, Homo Sapiens
tgttttttcagaacgacctctttcattctgctgcctcattcccagaggagtgattttgtatttcccctcatccaaacacggagatgatttttcaggattgtaaaaaggaatgtgtgatcaatcttttatttaatacatatttatgaggtgcctctgtgtgtgaagttaagtgctgggtaaaagggcagtgtagcatcacagtcgcaagcatggattcgagagtccaactgcccgggttgataactgtgtgaggttgtgctgggtacacagtctttctgttctgtggtttccccttcaggaaaatggggctgttgaccatactgacctcataacgaagtccttggggtctgacacctagcaggtactaagcaagtgttagctgccactgctgccatttctgctcctgctgctctgctgttgatctcattactgttaccttcatctttactattattaggtgctgggaacaaagttgtccaccaaaacaaagcgaaactatacccaccatggttcctgtccttatggagcaccaagtttcctgagggaggcatacactgaataaaagactatagaccgggtatagtggctcatgcttgtgatcccaacgcttttggaggctgagcaggaggatggcttgaggccagctgttcgagaccagcctgggcaacagagcaagtccccatgtcttaaaaaaaaaaaaaaaaaa

SEQ ID NO: 235583 - DNA, 662 bp, Homo Sapiens
cttgttcatacctgtaccccaaattcctaggatggcatctgcccttcagggggcactaaaatgtattattgaaacagcattctgggcttaaataggtgtatgtatgtgttggttgtgactgtactatttctagtatagtgaactacatactgaatatccaagttctcagcacctacttttgtcaaatcttaacattttgccacttcgagatcacattgccattcctcccctccagaggtaacaattatccacaatttgatgtttatcattcctgtgttgttgtactttcactgtgtataacctaaaccatctactctttagtactgttttatatatttttaagcctcatacttgctcattctacagcttttttcactcattattgtataattatatctgaagctctcgttcattaattttagtcctgtgtagcagaattcaattacgggaactaccataatttatctgttctccagttgaaggcatgaagttgttgccagtttctgtattataacactgtagtggaacattcttctgcattgggctcactgcgtgttacctaagacgtatcacagaataaacacatttagccttatagacattgccaaattgctcttcaaagtaaatgtgagtttttgtgaattaaaaaaaaaaaaaaaaaa

SEQ ID NO: 235584 - DNA, 699 bp, Homo Sapiens
gtaaagtgaatccttcaacagtgttccccaatctttctcttgtgctaaaagtggactatctatcttagaaaagaccatgcaaaccaaaatagaatgacttggctacagagcagtttcactgtctactgattaccaacctgtcttaatccagtgagatagaacactcctccacgcaggttacctgaagccagtgtattacttacagataggacaacagaagcctatgattcgtaaaagcctcaagaaagctagtttggcagatggggtttcatctgcatgtgccacatttgcactgcagtcgagggtcccaagaaagcactccaccctaggttttataccccagcataacatgattcactgtgctaatgtgttgaaggacatgctgtttctatgagggattagaacagaacctaggctgttcaggctagtttctccctatcttaagatgttgcattctcagcatattctatatttattcttgagaactatgagtaaaaaagaggggtaactgtgtcagtccaaagatacctgaagaattgtcctgtgctaacagcagaaaagtttccaattgatttaaaatcaagtgatttgcaatgtagttacaaacaaaattattaagtgcctattttgtatttgaccccatggtaatactgattatgataataataaaatatattaagcaaaaaaaaaaaaaaaaaa

SEQ ID NO: 235585 - DNA, 659 bp, Homo Sapiens
  misc_feature (14)..(14): n is a, c, g, or t
  misc_feature (51)..(51): n is a, c, g, or t
  misc_feature (82)..(82): n is a, c, g, or t
gaaggcagtatgcntgttaaaagtcatcaccattctctaatctcaagtacncaggacacaatacactgtggaaggccacagngacctctgcctgggaaagccaggtattgcccaagatttctccccatgtgatagcctgagatatggcctcatgggaagggtaagacctgactgtcccccagcccgacatcccccagcccgacacccgaaaagggtctgtgctgaggaggattagtaaaagaggaaggcctctttgcagttcagataagaggaagtcatctgtctcctgctcgtccctgggcaatagaatgtctcagtgtaaaacccaattgtatgttctatttactgagataggagaaaaccaccttagggctggaggagagacatgctagtggtaatactgctctttaatgcaccgagatgtttgtacacgtgcacatcaaggcacagcaccttttcttaaccttgtttacgacacagagacttttgtttacatgttttcccgctgaccctctccccactattaccctattgtcctgccacatccccctctccgagatggtagagataatgatcaataaatactgagggaactcagagaccagtaagcaccggtcccctgggcccacttttctttctccaaaaaaaaaaaaaaaaaa

SEQ ID NO: 235586 - DNA, 680 bp, Homo Sapiens
  misc_feature (61)..(61): n is a, c, g, or t
aaagctcattatgttggtactgttttgtaagggctctctataaaatatattttatttcttntacttttttaataatttgaactttgactttgttttattaatttattaacaaattttaattcaaaataagtgaatattaattccatatctggcaacaggtggactagatgtctggcgaataacacctaatataaaacacctgtcacggtgattgaaaaaaatcaacagctatctcattaaatgcatggcaagtaaaatatatcttctggggccaaaaatagaccagaattatctgctacttgaatgtttggcaaaactctcctagaaaactgagtctgatgtttgatttgtgtaaagacttctttaacttttctaactcaatttttactaagttataggactactcagattttgtttcttttttgctcaattttggtcaattttgtttttgtctatgtcacctaagttttcaaatgtattggcatgaatattttcataatattcccttattatcttttacatttctgggatatctttagcgatgtttccctttttatccctaaaattgtttattcatgctttcttttttcttaatcaaacttgttagagatttgtcaattgtactcggtgttcaaaaaataaatcttggctttgtgagcttcaaaaaaaaaaaaaaaaaa

SEQ ID NO: 235587 - DNA, 700 bp, Homo Sapiens
aacccctcaaaatgaagaaatccgagcagttggcagactaaaaagagagcggtctatgagtgaaaatgctgttcgccaaaatggacagctggtcagaaatgattctctgtggcacagatcagattctgccccaagaaataaaatttcaaggttccaggcaccgatttctgcaccggagtacactgtgacaccatcgccacaacaggctcgggtctgtcctccccatatgttacctgaagatggagctaatctttcctctgctcgtggcattttgtcgcttatccagtcttctactcgtagggcataccagcagatcttggatgtgctggatgaaaatcgcagacctgtgttgcgtggtgggtctgctgccgccacttctaatcctcatcatgacaacgtcaggtatggcatttcaaatatagatacaaccattgaaggaacgtcagatgacctgactgttgtagatgcagcttcactaagacgacagataatcaaactaaatagacgtctacaacttctggaagaggagaacaaagaacgtgctaaaagagaaatggtcatgtattcaattactgtagctttctggctgcttaatagctggctctggtttcgccgctagaggtaacatcagccctcaaaaatactgtctcaacagctggaaatataaaagatttgcaaacttaaaaaaaaaaaaaaaaaa

SEQ ID NO: 235588 - DNA, 574 bp, Homo Sapiens
ggcacgaggagtgtcatgtccagcaacgtctccttttctgagtgaagtctaggatagtttcttccccttgtgtttgaacagggcagtttaggttctaggtagtggagggccaggtggggctcgaggaacgtagtgttctttgcatttctgtcccatatgggtgatgtagagatttacctgtttttcagtattttctaaatgcttttcctttgaatagcaggtagttagcttcagagtgttaatttatgaatattagtcgcacatgtattgctctttatctggtttaagagtaacagtttgatattttgttaaaaaaatggaaataccttctcccttattttgtgatctgtaacagggtagtgtggtattgtaataggcatttttttttttttttacaatgtgcaataactcagcagttaaatagtggaacaaaattgaagggtggtcagtagtttcatttccttgtcctgcttattcttttgttcttgaaaattatatatacctggctttgcttagcttgttgaagaaagtagcagaaattaaatcttaataaaagaaaaaaaaaaaaaaaaaa

SEQ ID NO: 235589 - DNA, 566 bp, Homo Sapiens
ctcttacaccgcactcagggagaccacttctcaggatggggtcagatggagagacctctagggagaaagacatccccattgtgtgagtggcatttccttaagctggcaggaacagggagcagccctgtgtcgggggctggaatagttctggccagaccccgttccccttcctctatgaaggaataagttggaccaagggaagtcggggacgtaaaaaatgaagcaaaacaatgccagggtgtctcccgctttactcttcaggaatggtgtcccaagttggaggctttgtgtcagctgcaaatcctaccagttatgtccaagaatggctttccctcgggcaggtggcagcggccatctcccactgggaatatggcgtagtatctccggtccattccttggatgctaaggactgcgggaatgagggagtcagataaagaacaaacctcgaaacgaacagttaaattgaaatgctatgtgcctgacccaatggtaggcacatagtaggcactcaactcatatgtttaattgaattgaaaatatcccttaggaaaaaaaaaaaaaaaaaa

SEQ ID NO: 235590 - DNA, 595 bp, Homo Sapiens
  misc_feature (147)..(147): n is a, c, g, or t
aaaaaagttggtgatgacattgccaaggcaacgggtgactggaagggcctgaggattacagtgaaactgaccattcagaacagacaggcccagattgaggtggtgccttctgcctctgccctgatcatcaaagccctcaaggaaccnccaagagacagaaagaaacagaaaaacattaaacacagtgggaatatcacttttgatgagattgtcaacattgctcgacagatgcggcaccgatccttagccagagaactctctggaaccattaaagagatcctggggactgcccagtcagtgggctgtaatgttgatggccgccatcctcatgacatcatcgatgacatcaacagtggtgctgtggaatgcccagccgtaagtgacattttcattgttacagtaggggtgaaaggggggccacccagtgtattcacagagataagctgggaagttttggaaatggttactggtggggtgggataatccttttaaactttttactgattttttttttctttcccacagagttaagcacaaaggaaaacatttcaataaaggatcatttgacaactggtggaaaaaaaaaaaaaaaaaa

SEQ ID NO: 235591 - DNA, 725 bp, Homo Sapiens
agagactatgtaacatgcaatcattagaatcaaaattagtactttggtcaaaatatttacaacattcacatacttgtcaaatattcatgtaattaactgaatttaaaaccttcaactattatgaagtgctcgtctgtacaatcgctaatttactcagtttagagtagctacaactcttcgatactatcatcaatatttgacatcttttccaatttgtgtatgaaaagtaaatctattcctgtagcaactggggagtcatatatgaggtcaaagacatataccttgttattataatatgtatactataataatagctggttatcctgagcaggggaaaaggttatttttaggaaaaccacttcaaatagaaagctgaagtacttctaatatactgagggaagtataatatgtggaacaaactctcaacaaaatgtttattgatgttgatgaaacagatcagtttttccatccggattattattggttcatgattttatatgtgaatatgtaagatatgttctgcaattttataaatgttcatgtctttttttaaaaaaggtgctattgaaattctgtgtctccagcaggcaagaatacttgactaactctttttgtctctttatggtattttcagaataaagtctgacttgtgtttttgagattattggtgcctcattaattcagcaataaaggaaaatatgcatctcaaaaaaaaaaaaaaaaaa

SEQ ID NO: 235592 - DNA, 753 bp, Homo Sapiens
gtgcggcagccctgggttgctaggaccggagtgggagaaggagcggtctcaccgaggtcagaggagctgagtaatgaagggactcccagcagagcccaggccagcagagcccgcttccggtggagcccgagcagggccccgctcctctgatggtgcagctgagcctcttgagggcagagactgatcggctgcgcgaaatcctggcggggaaggaacgggagtaccaggccctggtgcagcgggctctacagcggctgaatgaggaagcccggacctatgtcctggccccagagcctccaactgctctttcaacggaccagggcctggtgcagtggctacaggaactgaatgtggattcaggcaccatccaaatgctgttgaaccatagcttcaccctccacactctgctcacctatgccactcgagatgacctcatctacacccgcatcaggggagggatggtatgccgcatctggagggccatcttggcacagcgagcaggatccacaccagtcacctctggaccctgagagctgaatgagggcatcataggccagacaggcccaaggatggatgaatggagaggacaaaggcagcttctgacacaccagccccaggacctggggcgactggaggaagccaggcgagtggggcccaggactggttccagtgagagaaaccaaccacaggcacccaagcactaccagacaaagcgtattaaacagaacacttttgaaaaaaaaaaaaaaaaaa

SEQ ID NO: 235593 - DNA, 753 bp, Homo Sapiens
tagtatcatgactttcctctggaatgagaaatatgtcacaaactagactctatagaaggaaagcaacttgattatttctctgagccagcatcattgaaggaagcccgttgtttaatatggctgctagaagaacacagagacaagttcccagcattgcatagtgctttagatgaattctttgatataatggacagccgctgtactgtgttaaggaaacaagatagtggtgaagcaccgtttagttcaaccaaggtgaaaaacaaaagcaagaaaaagaagccaaaggattcaaagcctatgttagttgggtctggaacaacttcagtaacttcaaataatgagatcatcacttcaagtgaagaccatagcaatcgaaattcagattctgcaggcccatttgcagtgcctgaccatcttcggcaagatgtagaagaattcgaagctctctatgaccaacacagtaacgaatatgttgtccgcaataagaagctatgggacatgaacccaaaacaaaaatgttcaactctatatgattacttctctcagtttttggaggaacatggtcccttggacatgagtaacaagatgttctctgcagaatatgagtttttcccagaagaaactcgacagatactagaaaaagcaggaggtttaaaaccttttctcttgggatgccctcgttttgttgtgattgacaactgtattgcactgaagaaggttgcatcacggctcaagaaaaaaaaaaaaaaaaaa

SEQ ID NO: 235594 - DNA, 728 bp, Homo Sapiens
agatattcattccgagtgtttcgggagaaccactcccgatgacatgtcttgtgactatgacaacatggctgtgaacccatcagaaagtgggtttgtgactctggtgagcgtggagagtggatttgtgaccaatgacatttatgagttctccccagaccaaatggggaggagtaaggagtctggatgggtggaaaatgaaatatatggttattaggacatataaaaaactgaaactgacaacaatggaaaagaaatgataagcaaaatcctcttattttctataaggaaaatacacagaaggtctatgaacaagcttagatcaggtcctgtggatgagcatgtggtccccacgacctcctgttggacccccacgttttggctgtatcctttatcccagccagtcatccagctcgaccttatgagaaggtaccttgcccaggtctggcacatagtagagtctcaataaatgtcacttggttggttgtatctaacttttaagggacagagctttacctggcagtgataaagatgggctgtggagcttggaaaaccacctctgttttccttgctctatacagcagcacatattatcatacagacagaaaatccagaatcttttcaaagcccacatatggtagcacaggttggcctgtgcatcggcaattctcatatctgtttttttcaaagaataaaatcaaataaagagcaggaaaaaaaaaaaaaaaaaa

SEQ ID NO: 235595 - DNA, 670 bp, Homo Sapiens
ctgtttaaaaaaagtagcttatacagcatgtgcttgcaacttaaatataagttgggtatgtgtagtctttgctataccactgactgtattgaaaaccaaagtattaagaggggaaacgcccctgtttatatctgtaggggtattttacattcaaaaatgtatgtttttttttcttttcaaaattaaagtatttgggactgaattgcactaagatataacctgcaagcatataatacaaaaaaaaattgcaaaactgtttagaacgctaataaaatttatgcagttataaaaatggcattactgcacagttttaagatgatgcagatttttttacagttgtattgtggtgcagaactggattttctgtaacttaaaaaaaaatccacagttttaaaggcaataatcagtaaatgttattttcagggactgacatcctgtctttaaaaagaaatgaaaagtaaatcttaccacaataaatataaaaaaatcttgtcagttacttttcttttacatattttgctgtgcaaaattgttttatatcttgagttactaactaaccacgcgtgttgttcctatgtgcttttctttcattttcaattctggttatatcaagaaaagaataatctacaataataaacggcatttttttttgaaaaaaaaaaaaaaaaaa

SEQ ID NO: 235596 - DNA, 693 bp, Homo Sapiens
  misc_feature (20)..(20): n is a, c, g, or t
  misc_feature (121)..(121): n is a, c, g, or t
caaaagattagtgctagtanttgaagatttactaataaatgatctgttaaggaatttagttttttttggatatgttgttttggttgttgaaaactaaggtataattataatagttattttntgaagatatgtttggctagccatcaattagaagttagagagtttgtcctaacagataagctataaccctcacattttaaaacatgcatagtgaacaatgaacaaaaacaaattcaaaattttactaatgtaaagctgtatattgtgattgttaaaacacttttttttgcctaggagttccagatttaaatcctggttctacacttcccaaacctcaggtaccttctgtggcctctctaacctcaatttttttacttgtaaaatggggacatttaatagtatctacctcagtgtcgtgaagactaaatgaagtaccacttgtaaagagtttattacagtgcctgacatatactgtatggttagtactgctaaaatgacttcttaaggttaccaaaaggaaaattccacaagctgaccacctttcctattgtgatggtcactggtatttcagctatgatcctttgttgtgtatttatccagactgaaagatgtttttctagtaaccatcttgcatcgtcttagtctcccccattaaataaacttttcctacaaactaaaaaaaaaaaaaaaaaa

SEQ ID NO: 235597 - DNA, 710 bp, Homo Sapiens
agttggaggcccagagctcccatgacttcatagcagatgcggatgtgggcctaaaaagcatcgtcaaggagtgcgggaaccgctgctgtgcctttagcaacagcaagaaaaccagtaaggcagagaaggaaagtcaagtgcaggagttggtggagctgatagagaaaatggtgcagtgcaacgaaggggcttacttttctgatgacatatacaaggacacagaggaaaggctgaaacaacgggaagaggttttgaggaaaatctacactgaccaattaaatgaagaaattaaactagtagaagaggataagcataaatcagaggaagaaaaggagaaagaaattaaattactaaaattaaaatatgatgaaaaaataaaaaatataagggaagaagctgagagaaatatatttaaagatgtttttaataggatttggaagatgctttcagaaatatggcataggtttttgtcgaaatgtaagttttattcttcctaatttactgtgatttgttaatggatgaattgtattttgcaaagatagttagagaaatacctccttccccttagctttattaaggtatcattgataaataaaaataaaatatgtttaatgtatataatgtgatttttaaatatatatatatatatacacacattgtgaaataatgaaataaaggtaattaacacatctaaaaaaaaaaaaaaaaaa

SEQ ID NO: 235598 - DNA, 685 bp, Homo Sapiens
gcttgggaagagtactacaagaaaatgggtcaggcagttcctgctccgactggggctcctccaggtggtcagccagattatagtgcagcctgggctgagtattatagacaacaagcagcctattatgcccagacaagtccccagggaatgccacagcatcctccagcacctcaggtttgatccagccagtatagaactagctctgtaggggtgaggaggactgtgctgtgtatcatccttgattgtgttccttcaaggagcattgcacttgccttcccagaccttccaccttaggttctgttgcaaaaagcaccagtgctgaagatgctgcaagcaccaaatcatagctcataaaatcaggtcctgagatagttacccataaagaggaatcctttgagtgtatgccattggtgagccgatgagcatggaccatagaagggctcaatgtagaagaaactacccgtgtgtaaaaagaagattggcttaaaatggctactgtgatgggaacagtgtcttagggagatgcagcttggacttgaggtaaattgaatactttacaactgtggtttagagtttgctttaatgacattgtatgtaaaaggtcacatgattgctgtaattttgtattcattatggtttcctcaataaatgtacattgatgactattaaaaaaaaaaaaaaaaaa

SEQ ID NO: 235599 - DNA, 673 bp, Homo Sapiens
  misc_feature (138)..(138): n is a, c, g, or t
  misc_feature (260)..(260): n is a, c, g, or t
ctccccatcatcctcctcacctcttttcaggcagggtgggatagcagcaggaggagattttgggagcctggcaactcctgcaaggaccgcaggacagcccctctgtggggatgcgtggtgccccatctgccgcccttntgaagaatgcactgccttcactttttactgtgttagagtccatccagactgttctatccaaaaaagtttctttttcccccacaggcaatcaggaaatgattcctttcccgactgcttctgtntagtgcctgggaatcttgagtcaatccctcagtaagtcagtgactagggaaatccctctctgagcctcccagttcatgttgcttagggaacctgatattttcgtgaaacctgcctacacatgggcagcccaacagcagaacaaatggtggtgaccaaagtgaacaaagaagtatagttgtgccagcttcgtagttgcccatgtggacaagtcagcaggatcaggacacgaggaagagtaaatgtgagacagtcaatgtgacttttgcgataaacagatttttaaaccccgaaattttgcaaaattttggtgaaacctgaactttcttcgttgcatatactggcactatctgtaccatcatacaactgtctcacattaaagctatttttcttgggcaaaaaaaaaaaaaaaaaa

SEQ ID NO: 235600 - DNA, 580 bp, Homo Sapiens
atgtctcagtagagcttagggcattggggatccccttcttgagtcgtggggctggcttcttcatctgggttgacttgagaaagtacctgctcaagggcacctttgaggaggaaatgctgctctggcgccgctttttggacaacaaggtgctgctgtcctttggcaaggccttcgagtgtaaagagcctggttggtttcgctttgtcttctcagaccaggtccaccggctttgcctggggatgcagagggtccagcaggtgcttgcaggcaaatcccaagtggcagaagacccccgtccctctcagagccaggagccaagtgaccaacgcaggtgagctggtcattgtctcgtggccagagggcccagcagccactgtggacctggggcgttctggggctgcagaagactgactgtggatgtgccatttgccaggaaggtatctaacttggctttgtgcctgaagaactgtttcttgtctttcgctgtagcagtgggaaactccttaagctgtggttcagcctgggccctccctctctcctattaaacaaaactaggagagtcaaaaaaaaaaaaaaaaaa

SEQ ID NO: 235601 - DNA, 666 bp, Homo Sapiens
caacaagaccagccggactgagagtgagattgcattttttgggggtatgaccatcgtctacaagaacagcattgacctcttcctatacgtggtgggctcatcctacgagaatgagctgatgctcatgtctgttctcacctgcctgtttgagtctctgaaccacatgttaaggaagaacgtggagaagcgctggttgctggagaacatggacggagccttcttggtgctggacgagattgtggatggcggtgtgattctggagagtgacccccagcaagtgatccagaaggtgaattttagggcagatgatggcggcttgactgaacagagtgtggcccaggttcttcagtctgccaaggaacaaattaaatggtcgttattgaaatgaaggctgtggattcaaggctccctgccccccagaccatttccccaatcctggcaaaagcccaaagatcccagggtcaggagagacccctctgtatccccaggtccctcccagaactgactcctaaggtctccagccagggcttctgagatgcaaaggtttggcctcaggagagtcaccttttctcacggccctggccttaactcatatcttaggcattcctggcccccagggcccgtaataaacctgcttttgtcttctgcaaaaaaaaaaaaaaaaaa

SEQ ID NO: 235602 - DNA, 717 bp, Homo Sapiens
agtgctcacagctacaaggaaagaaaagatgaagaagaactgaaaaattactaacaaacagataggttagtgaagaaaaatgcaaagtagcaatgagaaggcttatggagtaaaaatgaagtcagttggtatttaatcccaaagtgttgttctgattatctaaaatttgacatggtagaccttgcaatttagaatcaagcaggtgagacagggagaagtatgcctgcttaattatttaaactgtgtacttttgttttgacactgaatattttaaaaagcaaataataaaataactaagcatttgaggaaaattttaaggataaattgaggaaactgattaatagagatagcaagggataattaaataaatattccctatgtagcaacagtggttagatgatctttgtctgaatgtaattaaactttgaatagttttagtgtgtccttaaagccaagtatatgctttaacatcaaatggaagtcaaattcctaatgcatagatagagagagctaaactgtgtaatttaatggtatcttccttgctggatgtggcagaatccacaccagcttatcaaccaacacagctaattttagaatagatcctttatctttccatatggcacacgtaagaaagtgtttttctactattaatattaaattaaaacctttacttttgtataataaattaaaactcagaataaaaaaaaaaaaaaaaaa

SEQ ID NO: 235603 - DNA, 672 bp, Homo Sapiens
taaacaagtgaatgttggaaattagtctgttaatgttcttaataaagtgttcttggagtttaacctagcagcggatggctttctttagcttagcccagtttccagggaagcattgttttttccaggctgtaaaatggcagaatctcctggatatataatttattctgttgaaaaaaaaaaaagcatgcagtatctatgacctatctgcagaaggagtttttgtaaatgtagattttgatgtattaggtcaccctgaaaacaatacaagaaaagggatccccaggtaatctggtggagcgaatactgcaataaatttttttacttctctttgttacttgtctgtttccatttgaatttcttattgtaaaaatctgtttaaatccatttatattattttacagtcttttatgtaaaatttattatatcactggttttcaaagcaaaacataaaatattgtttatacagtttgtataggctgacttctgaataattggtatctattattttcattcccataagagggtgtaaacaattaactccagggttttattgtatcctgcaatatttagtattaactatatatgatttagcactgtgccaaacacattttcaagagtacattttgatataaaaagaaactatagtttattcctaaaaaaaaaaaaaaaaaa

SEQ ID NO: 235604 - DNA, 730 bp, Homo Sapiens
  misc_feature (35)..(35): n is a, c, g, or t
  misc_feature (706)..(706): n is a, c, g, or t
ggggccagaagttgcccagaaagcagcaggtgctntgcctggctgtagagcccagctcattggctgtccctgggcttcgtctccctcttccgagtagttgctgcctttcttcagatcaggttaccacaatgcctccccgctgctgacgcttcatcccccacacctccagccccagttacctggagcttctcagaacccactttgccggtgctaaaacacaagagggggtgaaagtggctgccagtaatggccagaaaccaaccaccagaggccaggctgaaagacaagctccgggtgtccaggggctgacgggccaaccatgtggcaggtcccaggccccacccactgcgccatccgcctctgagctccacagtggtcccactaatgggaacctcctctagggagagtgatactgcaccttcacccgtaggactcatatttataacaatgtgtaatggctgtagcaaaaagcccttgtttctagatgtaaatggtcaaagaaacaagcgctctattgttttgaataaaatagttcaaatgagtcctgtatcattgtatctcctattctggattagtgccttttggacagtagactgttctgtaattaaaatgtagtatactgcttttttgtacagttttgttttaataaaacttttttttaatttgtgtttattttagtattgtacctattagagaataaaatgtntaactgaaaaaaaaaaaaaaaaaa

SEQ ID NO: 235605 - DNA, 731 bp, Homo Sapiens
  misc_feature (46)..(46): n is a, c, g, or t
cagctattaccactggtgtccaggctctggtgaagccctctgagcncaggaggaagagaaagcattgtccagaggtaggaacacagtctgggagcccagagctctgggaggagtgggaaaatgctgcttcctgctgcttgcttctaggcacctgcttccgccatctcacttaccatggctagagatgggggtgagaccggggaaggacaaaagcagggaacagataagggatggaaatcagaagggaatatagaaagaactctggatgtggagaaatgccggtacctgagcattttgtatcaatgggagtaccctctgtaactgctcagtaggttacaaatgaagagtccaccagtattagaaacaatttaaacttgccagtaccaactgggatgtgtgccttcaatttgaaaattgtatgttttattttttaaatttgttaacagcattaatttatagagtattgatgtcatttatgtttctgaggtgtttcaacacaattttggatcagctgcctgtttgcaaaaacataatatatttctgttaaacagttcttcacctaacagcatattgctcttataactggtagagctgtttcaaaggaagttggtttctggtccaagttttgacctaaaccatgtccatcttctattaccagcacttacaagcactgtgaaaactgatcatgacaaataagtaaaatttgctacattaaaaaaaaaaaaaaaaaa

SEQ ID NO: 235606 - DNA, 715 bp, Homo Sapiens
tcgagatgctcagcccattcgaggcagtggccacacgcttcaaggagcaatacaggacattcgccacggccctggacactaccaggcacgagctgcccgtgaggtccatccacctggagggagatgggcagcagctcttagacgccctgcagcatgaactggtgaccactcagcgcctcctgggagaacttgatgttggtgattcggaagaaaatgtgcaggtgctggacttactgagcgaactcaaggacgtgacggcgaaaaaggaccttgagctccgaaggagctttgcccaggtgctggaactctccgcagaggcaagcaaagaggcagccttggcaaaccaggaagtctgggaagagacccagggcatggcgccccccagccggtggtatttcaatcaagacagtgcctgcagagaatctgggggagcacccaagaacacgcccctgtctgaggacgacaacccgggtgcctcgtcagcccccgctcaggccacgttcatcagcccaagcgaagatttttcttcaagcagccaggcagaagtcccgccctctctctctcgttcagggagggacttgtcatgactcatggttacattcaggatacttgagcactttatatactaccgtagcactgtagctattttttatgtgataatcttgtttgataaaaaagtaaacctgttttgcaattgaaaaaaaaaaaaaaaaaa

SEQ ID NO: 235607 - DNA, 622 bp, Homo Sapiens
atgacaggctacaggacgcgggctctcgctggcccgagctctacctctactcgagggctgacgaagtagtcctggccagagacatagaacgcatggtggaggcacgcctggcacgccgggtcctggcgcgttctgtggatttcgtgtcatctgcacacgtcagccacctccgtgactaccctacttactacacaagcctctgtgtcgacttcatgcgcaactgcgtccgctgctgaggccattgctccatctcacctctgctccagaaataaatgcctgacacctccccacaacctgcaatctgtcgggcactcttctcgttcaactccctgtagccctttgggactttgcggtcccctaagtagaaaattcctatgggcctgtctcctgggggcctccgtctgctggtggtctgcttaccacagaatcctaaggggcaggagtgcctgggcatgtgtctgtgggagccttgcagtcagttgtgtttggacaagtgcaacaatcaggctgctgattcctgtggcatgcaggctgtagaggttgacaaatggaggggggtgttgagggtgagccctagttgattttttaaaatttaaactctggtaagaacaaaaaaaaaaaa

SEQ ID NO: 235608 - DNA, 637 bp, Homo Sapiens
  misc_feature (213)..(213): n is a, c, g, or t
agatgcgcaaatattatttgatttgcctccaacagattttgcaggatgatggaaaagaaggggctgagaaaaagattatgaatgctgctagcaaacttgctacaatggcaaaattactggaaacacctatttctagtaagtcccaaagcaaaactacacagtcaggtatgtcaaagtgagtcgcccaaatggtttttctatcttttcttcttnagctatttaatattttcagtatgaagaaggcagggaaggtaaggagtgagagttaatttgtgaagttttgtatgttttacttaaactagaagtttacgcaaaaagagtacacagtttccaatttaagtaggcagactgagcatgcccatcagtttcctattgctgcttccatccctcgaaatgatagaaaagattttaaacagcaaataaagaatgagaaaaagaagaaattataagtgggttttaaaaagttgcagtgggccgggcatcgtggctcacacctgtagtcccagcactttgggaggctgaggtgggaggatcccttgatcccgggaatttgaggttgcggtgagctatgattgtgccactgtactccagcctgggtgacagagtgaggccctgtctcaaaaaaaaaaaaaaaaaa

SEQ ID NO: 235609 - DNA, 723 bp, Homo Sapiens
tacccgcattgagaaaacccactcagcctgtaagacccgaaagcagaagtaatactgggaaccctttctgggtctgatggtctgcctcaacctgagagctttcataagtagttctgaattcccaagctgcctaaaaaggtataaatgtgtaaaaatctcattattgccaaaattggataaatgcccatcttagctaaaacctcaaattgctagaaaattcacagggaagaaaacatttcaagggctatacctcagcatctaggctttttggactaaggagctttcctttttgaagttatatgataatgtacaggtcacagatcccctttcccaacactttgaagatgaatctggagtctgcttacttggaaggcaaagagtgacttgtgtctattgaaagtatatccgttttccccccacatggggattcatacttgagaaatagtgcaaagatgcttatctggaactgtgttctggtgaaagaaccaaattactggcttgttagccaacagcttctgatagcaattcatataaccctctaagaatacctgtttaagtcttgagtgttgaaaggaattgtttactttggaatataggaaaacagttgaatgtcagactctcatttgtatgtgatctaaatttgcaatcaatttcaataatatttacaatttgtgataaaactgacttttacagattccttttcacaacaaaaaaaaaaaaaaa

SEQ ID NO: 235610 - DNA, 732 bp, Homo Sapiens
  misc_feature (34)..(34): n is a, c, g, or t
gaatatgcatgagcagcccatcagccaccactantatgacaacgtcttacccttttctggcttccatgccatgcccgaggaatttctccaactctggtatcttcataaaatcggtgcactgagaatgcagctggacccatgtgaagatacctcactccagcccacttcctaggaacaatggaagaagaaaggactgaaccagggtatttttgttaggttttctatgtgactccaagagggaatggtcaagttgtttcatgagtttgcatgggcccttggaaaaacaggaaaggagcaatgaagatccaagcaaaactttactttcagcgttggcttggaggacaaataagaaatgaaacatcctatgaaatactttatagcacatggcagatttgcaactagtaaaatgctggtgaaatgctgttggtaaagcacatggttcaaatctagaagatgcagttcaaaaacaagacagactcgagttgttagggctgaggaaccaatcaaggtagaacaaagaaaatgttggggtaaaagtgttgctgattgtcaacacaaactggcttaataatattaataagaacctgtcttattaagactggctttagaaccgtaggtttttttaaaaaattattatttatttttgccctctttggggaagtgggtgggtagatttaaaaaatcccttcctgagtaataaagatacaaaatgttaaaaaaaaaaaaaaaaaa

SEQ ID NO: 235611 - DNA, 645 bp, Homo Sapiens
tgtctcagaacacagtatccttcaaataagaaaaactgagtgggaagtgcagtgtttccaaacaatacctatcataactacgtattcattgtctacctgctaagtcaagggttcactgcatttctccttcctcagaatacactctggacctgtgctgtctaatatggtagccactaacaaaatgtggccattttgatggaaatccattaaaatcaaagaaaatttaaaactcaattcctcaattgggctggccacatttcaaatgctcactacccacctgtggctagggtctacttctactgtattggcgagcatggatatagaacatttcatcacagttctgttggaccaatctagatagattcattatcccatctagagaagagactttagtcactgtcttcttgcttcagacccatctatatttaaaacaaatttccctaaatcctgagactgagacggagctacaaattctcagatggcgaccgtgtaaatggtattagcggctgaagaaaaaaaatttttcaagacctctgttttttaactgaactttatcattggcattgtgggtctttgaagttgctgggataaattaatataattaaataaaagactgaatttaattgcaaaaaaaaaaaaaaaaaa

SEQ ID NO: 235612 - DNA, 737 bp, Homo Sapiens
catatcacctctcttcttagtaaaaagccctatgtgaaaagatcccaagatggagaggaagaaacgctaattcagcatgtgttcattctgcactgagaaggaactgatacatctgatgcatgctttgagaccagaagaaaagacttacctgaataattactacattagggaagctactgtctacgttaagataaagggtattgccttggctctatttggcatggatggagcccagttggaaaattcccaaatattacaacaagtccttgaacccagaccatgtggttagacgttggtgttaaggttagaccttatgttagagtcatttctgatgttccagcttctagccatgtagtgctctcagtcttcataccccagaaattattggtatatttgtagataccgagaatgatccctcagtctgagaggttagaatgatcatctgtaatctgagggttaatttctaggcaggtggagagagtggtaaaaaagaaatgaaattgacaagctaggaaagaggaggcagaaagatttggaaaattcacagagtttcacccttaagctgtaaagagtgggtcacatttgttagccacggaaacatagaaacatacacaaggccagaaaaagaagaaggagctcaactaaaagtggcatagagaatacacatataaaaacaatatatttgtcatatgctcctagagaggagaaaggggtgattgaaagaaaaaaaaaaaaaa

SEQ ID NO: 235613 - DNA, 693 bp, Homo Sapiens
ccactaaacagaaaggccaccttcactctttgaaaaaggcaagctgtgcctagaaacactgcttttaagagtagcacatttgagtgtgactttttccccccttcactatttcaaaatggttttgaaatggggtcttaaaggtaagcgccctcatacatgactgaaactttgtgagaggtcttatatttgaatggacccttaatgatttatgtgaaatagaatgaagtcctgtctctgtgagagaacgtgcctcctcactcatttgtctctgtctgttttcatagccatcaatatagtaacatatttactatattcttgaatacccttgaagaaagaaatccgttttctattgtgcattgctatacgaagtgaagccagtaaactagatactgtaaatctagatattgtacctagacaaaatatcattggttctatctctttttgtatctgttgtgccagggaaggtttataatcccttctcagtatacactcactagtgcacgtctgaaatagtatcccacgggagatgctgctccacgtctgaggtcacctgccctgtgtggggcacaccaccgtcagcaccaccgtttttacagttactttggagctgctagactggttttctgtgttggtaaattgcctatataaatctgaataaaaaggatctgtacaaagaaaaaaaaaaaaaaaaaa

SEQ ID NO: 235614 - DNA, 592 bp, Homo Sapiens
cagttatggcagtgggagtcgaagcgagggtctgaagttcacgactactagaaggggaggggagtggaaaggctctcagtgaaaaaggtattagaattatttctgaattatcagtctctcatttgtgctttggagaagcagaaaaggcaaaaggggtctttggccatcttctgctggagcttccagggaggatgtgtctccaagagaccagatgtaccgagtttgaaatcccagaagcccaagaggaaaagaatcacagggaggaaaagactgtccaaaggctcctggagtcttctgttctctaaccttggaaggttttgaacaatatttctcagaggatagcctttcacttattcatctgtccagcatgactcatccccgggagtgttgatgtctgtcttcaccaagaaggacgactttgattggctgtaattggccactgttgctaatggagtagagagagtcttgctacatgcgggaactagaattacatcactgcgttttttggctttgtttcttcaatgggttgtagtgtatgaatattattacaaaataaaatgatttaaaaatatccaaaaaaaaaaaaaaaaaa

SEQ ID NO: 235615 - DNA, 716 bp, Homo Sapiens
cgccgggcgccctcagctccctgcttggctctgtctctccacacccggcagggccgcgggctgccccagccctgggggtcgtgggcagctgctactcagtgccaaccccgtggggcacagagccatatacctcgctgtccggcccccaccccagcctcgccttcccaccccatcgtctccacttcaggaaaagccgcactttacacccccacctgcctcttccccctccatccctgctccccgatcctgagcggttggggtggggtccctcagcaaccccaggcgtgggtttgaggagacaggtgatttacatcccctttgctgtcctcccccggtaccaaggcagggagcctccggaggagccggccctgctggccacgcaggggccagactccagcctgtttccccagccctgcaggtcttccttctgtgggaagcttcctagcaagatggcttggagtcctggtccccctcctccctggccctctcgttcgtttctgtttctgtttacacgttggagtggggtcctccgtgggcggcggcgcgccctgccccgggtgtcgtccggcctcttgtgctcgagcccctttccgagttggactcgaccatccctcaccccaccaaggaccacactgtgaagtgataactgccttgaacccccctttgctgttttatttattaaacttgatttgaagcccaaaaaaaaaaaaaaaaaa

SEQ ID NO: 235616 - DNA, 696 bp, Homo Sapiens
gcatcacgacccacgaggccctgcccaaccgtgcgtcccatggggcaccttgactcttcaaaccaaaattccttaaaggggcacagcccagccttgtccgcaacctcaggggcctgggattcctgtggcgcttcctgaattccaggttggcacagatgatgaggtctgagaccagccggaaggagggctcctgccataacccaggtgccagccggtctccgcctaggaccttccctcccgcccagccagggtgggcggcatcctacgcggtgaaacgagctcatggactgacccggggctgggcctcgccagccaggagagagcgagggccgcacggcagggctggcccaggcagctcgtccagggccattcagatcccaagcatcaggaaatcattttgtacaaccacccgaagcagagatattttttaagaagcgtaaattattttcagttgttttctgatcctgcctttttcttttccccacaacttcacgccagtgattcgttcacatcaggtaaatcttgagaaagccttggtgccctcctccccaccccccactcagtaaccacgtgcgtgcacccccgcatcctttctcagtagttaagacgttctaggcaataccatagacacatctgactgtgtctctctctttgagtgcaagaaactcaagtcatcttaaaaaaaaaaaaaaaaaa

SEQ ID NO: 235617 - DNA, 631 bp, Homo Sapiens
gctgtacgtggtgatccctacccgacgctccaccgccgaggccttccagatcgtgctgtcccacctgctgggtgatgctgggagcccctacctcattggcctgatctctgaccgcctgcgccggaactggcccccctccttcttgtccgagttccgggctctgcagttctcgctcatgctctgcgcgtttgttggggcactgggcggcgcagccttcctgggcaccgccatcttcattgaggccgaccgccggcgggcacagctgcacgtgcagggcctgctgcacgaagcagggtccacagacgaccggattgtggtgccccagcggggccgctccacccgcgtgcccgtggccagtgtgctcatctgagaggctgccgctcacctacctgcacatctgccacagctggccctgggcccaccccacgaagggcctgggcctaaccccttggcctggcccagcttccagagggaccctgggccgtgtgccagctcccagacactacatgggtagctcaggggaggaggtgggggtccaggagggggatccctctccacaggggcagccccaagggctcggtgctatttgtaacggaataaaatttgtagccagaaaaaaaaaaaaaaaaaa

SEQ ID NO: 235618 - DNA, 736 bp, Homo Sapiens
  misc_feature (88)..(88): n is a, c, g, or t
atctccagataatcagattatttcatttggtaaattttaaaaaatatgcaatcaggcacagtgcctcatgcctataatcccagcactntgggaggccaaggtgggtggatcacttgagttcaggagttcgagatcagcctaggcaacatggtgaaatcctgtctttaccaaaagtttaaaaattagcttggtgtggtgccctctgcctatagccccagctacttgggaggctgaggtgggaggatcgcttgagcccaggcggttgaggctgcagtgagccatgatcattccactgcatttcagcctgggggatacagtgagaccttgtctttaaaaaaaaaatgctgcaaaaccaaaaataaatagccataatttgccatctttggagagattatggagataatctccttgtctattagccactagcatggctaattgatcattgattggacctcattacataagggggctgtggacgtctttggaatttgttaggggaaggctatgtggtaagctctactaaatgtatctgtacaaggatgaagaaaaacaaaataactactacttttggaggaaacttggaacaagaagagtacatagtttgatccattcctacggtcgagtctaatcaattccatttcttagtgtatgcatctaatgaggcttacaacttgctaaccccaaaagaagcaataaatgttaagcaattttagtaaccaaaaaaaaaaaaaaaaaa

SEQ ID NO: 235619 - DNA, 677 bp, Homo Sapiens
  misc_feature (44)..(44): n is a, c, g, or t
  misc_feature (83)..(83): n is a, c, g, or t
gacaaatgttgttatgagagtgaaggataaagaagctgaactanaggaggcagagaaagagcttcacgagaagtttgaccttntaaagcggacacaccaagaagaaaagaagaaagtggaagacaagaagaaggagcttgaggaggaggtgaacaacttccagaagaagaaagcagcggctcagttactacagtcccaggcccagcaatctggggcccagcaaaccaagaaagacaaggataagaaaaactgaccatctgcctcttgagagagagagaagtgggcatccttcctttaaattcaggaaccactgttgttttatttgactttttctgttacttgcatcccttatataagttgttttggatttgggactatgttttgggggagaaaaactccagttagttctgttttttgtattggttattcagcttacttttggtatcaaaattatgccagttttaagctcacttgagtgaagtttaagtcacaagattctgtttaacatgctttccttgttttggaaacaaccaaaaacttcccttttttgttacgggattttgacctacaaatcctaatcatgtttaaaatgtgccggtgttgggtagatgacttttctgcctctggggttcaatttatatttaaagataccttaaaataaaaaaaaaaaaaaaaaa

SEQ ID NO: 235620 - DNA, 617 bp, Homo Sapiens
gcaatgagaaatgtctatccaccgaggggttttcctccttaccttcccccaagacctggatttttccccccacccccacattctgaaggtagaagtgagttcccctcaggtttgattccaccttcaaatgagcctgctactgaacatccagaaccacagcaagaaacctgacaatatttttgctctcttcaaaagtaattttgactgatctcattttcagtttaagtaactgctgttacttaagtgattacacttttgctcaaattgaagcttaatggaattataattctcaggatagtattttgtaaataaagatgatttaaatatgaatcttatgagtaaattatttcaattttattttagacggtataactatttcaatttgattaatccactattatataaacaatagtgggagttttatatatgtaatctttcaggtggggaggctttaaattctgaagtctgtgtctttatgccaagaactgtatttactgtggttgtggacaaatgtgaaagtaactttatgcttaaataaattatagttgatttaaagatttgtttggcattgataataataaaatcagtagtttttctataaaaaaaaaaaaaaaaaa

SEQ ID NO: 235621 - DNA, 692 bp, Homo Sapiens
gaccactgacagaaagaccctgacctctgtggttatcagtctgtgacccctggggaaaagaccctgacccctgtgggtcatcagtctgtgacccctgtgagtcatcagtctgtgagccctggaggaacgactatgacccctgtccattttcagactgagacccttagacagaatacagtggcccctagaaggaaggctgtggcccgtgaaaaggtgactgtcccctccagaaacatatcagtcacccctgaagggcagactatgcctttaagaggggagaatttgacttctgaggtgggcactcaccccaggatgggtaacttgggtcttcagatggaagctgaaaacaggatgatgctgtcctccagccccgtcatccagctcccggaacaaactcctctagcttttgacaaccgctttgttcccatctatggaaaccattcctctgtcaactcagtaacccctcaaacaagtcctctttctctaaaaaaagaaatcccagaaaactctgctgtggatgaagaagcctaagcccctctggtgtcagaaaccagggaaaacccttgtcttttcttctaagtgacatgttggaagccttctcatcccggggcaaagcaggcatcaaaaccagaataggccaatctcttttccattaaataaactgtaaacacaagaaaaaaaaaaaaaaaaaa

SEQ ID NO: 235622 - DNA, 605 bp, Homo Sapiens
  misc_feature (45)..(45): n is a, c, g, or t
tgagaaaattcaactctctcctgtgagaacaaaatatttccttanaggaaatgaatcctcctgataacatcaaggatacaaaaagtgacatcatattctttcagagaagtgtcccaggacatgataataagatgcaatttgaatcttcatcatacgaaggatactttctagcttgtgaaaaagagagagacctttttaaactcattttgaaaaaagaggatgaattgggggatagatctataatgttcactgttcaaaacgaagactagctattaaaatttcatgccgggcgcagtggctcacgcctgtaatcccagccctttgggaggctgaggcgggcagatcaccagaggtcaggtgttcaagaccagcctgaccaacatggtgaaacctcatctctactaaaaatacaaaaaattagctgagtgtagtgacccatgccctcaatcccagctactcaagaggctgaggcaggagaatcacttgcactccggaggtggaggttgtggtgagccgagattgcaccattgcgctctagcctgggcaacaacagcaaaactccatctcaaaaaataaaataaataaataaacaaataaaaaattaa

SEQ ID NO: 235623 - DNA, 676 bp, Homo Sapiens
agaaaaagagtctaagaagagcagaaaagagtccagtgattcaagctctaaagaatcccaagaagagtttctggaaaatccctggaaggatcgaacaaaggctgaagaaccatcagatttaattggcccagaggctccaaaaacacttacctctcaagatgataaacctttgaactatggccatgctctgttacctggtgaaggtgcagctatggctgaatatgtaaaagctggaaaacgtatcccacgaagaggtgaaattggcttgacaagtgaagaaattgcatcatttgaatgctcaggttatgtaatgagtggtagcaggcatcgccgaatggaggctgtgcgactgcgaaaagagaaccagatctacagtgctgatgagaagagagcccttgcatcctttaaccaagaagagagacgaaagagagagaacaagattctggccagttttcgagaaatggtttacagaaagaccaaagggaaggatgacaaataaagattttctgattgtccagaagacatttttaacaacaaaaaagaaagtctgggttccacacatacatagaaaaagattattatgttctgagaaagctttacagtgctactgtgccttctatttaattctttcagtccttcaataaaaagctgcttattgaaaaaaaaaaaaaaaaaa

SEQ ID NO: 235624 - DNA, 693 bp, Homo Sapiens
tggacaacaagagcgaaactctgtgtaaaaaaaaaaaaaaaaaacacacacacacacaacacaatgttttcacgcctgtaaacctagcacattgggaagccaaggtgggaggattgcttgaggccaggagttcaaggctgcagtgagctatgattgcacactgtactctagcctgggagacagagtgagacactgtctctaaaaaaaaaaaaaaaaaaaaaaaaagtttttgaaccttaaaatactttgtttgaatttctaatcatcattcaaaagagcagtaaaaaatggttacttgttcttgtacaagctactaattagactatagtaggatattttaaagagctgaatcacttttggtattttggtataaatattttcatttgttatgtcccagtatattcttactggaaaattcttgttttgatctgcctgaagaaaatatctgttttctatataaaaaaattttttaaaataattgtaaagttagatttaaaattgtaaaatataaaatcacaaaggaatgtaccttatgaatgttgttgacattttatgaaattatgtggattcatattactgttacaagatagaattgaatgcaaaaagaccaaaacctcaataaaatttgaggaaaacgtgttattatgtaattgaaataaaaacattttataattgaaaaaaaaaaaaaaaaaa

SEQ ID NO: 235625 - DNA, 732 bp, Homo Sapiens
  misc_feature (59)..(59): n is a, c, g, or t
aactacaggcacacatcatcatgcctggataattttgtatttttagcagagacgaggtntgccatgttgtccaggctggtctggaactcctgggctcaagtgttctcccacctggcctcccaaagtgctgggattataccatgccaggccctcgttggcattttagatttgaacttctcgaagagctaccaacacccaagttcagctttggaggcagatctggaaacagtgtagcagcattggttttccaaaaaatgtgagactttttcttggacgaattcaggtagctacacagaatctacacagcaaagttaacctgacacagaaaatccttgtgcaaataaatgcttagtaagtacacaggatgcacatgttgaatagagtatactggattggtgaaagaaaataataataatgagcatctaagtggttgggttttagagatcaatcaagaataattttaattttcttttgtatttgaaatgtaaatagttttcttttcgattaaaaaaatttcctataactgctaaacagttaaaaactttaaagtagtaaatgagtttatagaaagcatgtattcttgatttttgtgccttggtaaagttgataactatttatgaatatttgaccaaattattccagcatcagaataataagcaaaataactttgttagtgttttgttagactgtttatgaaatataacaagaaatactaaaaaaaaaaaaaaaaaa

SEQ ID NO: 235626 - DNA, 796 bp, Homo Sapiens
  misc_feature (41)..(41): n is a, c, g, or t
aacaagtgaagatgaattttgtccagggtccatccaacatntgacctttagatacattatttcacctcccaaagactcagttttcctttctgtaaaatggggataataatatttacctattgtgatcttatacaacagagcaagatttatttttttattttaatgatcaaaaaggtgtatttgaaagcactatgaaaactgtgacgggtacaaacatatgataatactaactgggaaataatttaagaaaaagtggcacgggaaaaagggagaaaaatataaggatagatatcaattttatcagggccttgtattttaaaaaaagagagagagatgtttaacctcaagattttctgaaaacttttaatgacaactgatgcttatactttatgactgggtatatagaacataaaataaaaactgaaaattgaaagtgtttagacgagtgaaattttccttttctgttgatccacgtgtttggtgttggttatacattaagatggggcgggagtgagaacaatctcttaacattcattgaaaaaaatactgaaacatattttcagcacaaatattaaactgtctcttctctaccgattggtaaaaaaatatattatattttgattttttttttttctttttaaattatatggttatccatcccagccaaagtcgtgcccggtcatctggtagaacttgaggttgaaaggccggtagaactcgcgcagcctgcgcaccacctcgcggtcgatctctggatgggatggataaccatataatttaaaaaaaaaaaaaaaaa

SEQ ID NO: 235627 - DNA, 746 bp, Homo Sapiens
acatcagtgaatatctagatctgcattcagaaatataagaaaccttggcatagtgtcagtgacttctacagatatcagttctttatatgccaaggcacagcatgttgcccggcgtcactacggatgtaacattgtccgaactgaatattacaaggaactagcagccagaattgttgtagctgcagtggcaagagctgcagcccgatgcaacaaaggcatagaagtactgtttgcagtggctctggaacattttgtgttggtagttgtgagagttttgaggggacctacttcagcagatgaaacagccaagaagattcaatacctgatccattgtcagtggtgtgaagagagaatttttcagaaggatggtaatatggtagaagaaaacccatatagacagctgccttgtaactgtcatggaagcatgcctggaaagacagcaatagaacttggacctctgtggtcaagttcccttttcaatactggattcctcaaaagaatgctatttgaatctcttcaccatggtttggatgacattcagaccctaataaagacattaatctttgaatcagagtgtacgcctcaaagtcagttttcaattcatgcatcttcaaatgtcaacaagcaaggtgactaactgaacgctagcttactagctttaaactgcttaccaaaaatactgtatctttttcaattgtatttgatgttataataaaaccaatataattataaaaaaaaaaaaaaaa

SEQ ID NO: 235628 - DNA, 702 bp, Homo Sapiens
  misc_feature (50)..(50): n is a, c, g, or t
cagcacttaagaaagtgacagtgctaaaactgtggcataacagcatcacntacatcccagagcatataaagaaactcaccagcctggaacgcctgtcctttagtcacaataaaatagaggtgctgccttcccacctcttcctatgcaacaagatccgatacttggacttatcgtacaatgacattcgatttatcccccctgaaattggagttctacaaagtttacagtatttttccatcacatgtaacaaagtggaaagccttccagatgaactctacttctgcaagaaacttaaaactctgaagattggaaaaaacagcctatctgtactttcaccgaaaattggaaatttgctatttctttcctacttagatgtaaaaggtaatcactttgaaatcctccctcctgaactgggtgactgtcgggctctgaagcgagctggtttagttgtagaagatgctctgtttgaaactctgccttctgacgtccgggagcaaatgaaaacagaataacttatttttcgttaaagtttgactgaaacacgcttctaccaaatacagtataaataattaggtagtcttaatgcctttcctatttttttttccttttcacacaaaatgtacacaaagatcgcgtaaggagtatgtatttttaataaaaatttaattgtattttttcaatattaaaaaaaaaaaaaaaaaa

SEQ ID NO: 235629 - DNA, 731 bp, Homo Sapiens
  misc_feature (94)..(94): n is a, c, g, or t
tgaaagtaactataatcttttcacatcccatggaactgccgtgtacacattgcaactttgtaaacttaaccatatttttcaaaattaacgtttntggagggagaaaaatccccgcttgctaaatgatactaaaccgttgtttgggctcttataattaggtcctgagattttataaaaatttagtctgtagctttttaggttcttcactagagttggttgtacataaaaataataaagaatataaagtatcccaaaattcttttaaagtctggatttttccgctaatatgtactttagagaatattttgttcatgcatacttccacgttaaattgaaaatgtcttcagcttctcttggtaaatgtgaaccatttgttttttattgtgcttgggggagagggtattttaatataatttttgcctaaatcaagaagtcccctctgaatgttaatttttaaatgtcaaaatatgatgaacgatatatcttgaaagtgagattgcaatatgcttaaacttaagtggtatttcaaaaacgagaaaattctggaatttgtcatttgaagctccataagagaaattgataggacttcgtttttgatcagtctgaatagataccaatgtcattgtgtgggaattttttttaacttgtttatgtattattttgatccatttttctgtggcatttggtgcaataaaacttttgaatttatcttgaaaaaaaaaaaaaaaaaa

SEQ ID NO: 235630 - DNA, 696 bp, Homo Sapiens
gttcccagtcccagagagtttctttttttcaaatttgtaaatagctttattgagatgtaattcacaaaccagtaaaatttactttttatgattttaatatgtaaacttaaaaattttttttttatttttttagagatggggtctcactgtgttgcctaggctgatctcaaactcctggcctcaagtaatcttcccaccttggcctcccaaaatgtagggattacaggtgtgagccaccacgcccagcccaatatgtaaactttaacatgatttttatgagagtcacagatttgtgcaaccatcaccactgtctagttccaggacatatcatcaccccaaagagaaacccggtacccattcgcagccacccctcattccctcattcctcccactccttggcaaccactcaactgtttttcatctccatggatttacctattccggacatctcatattaatagaatcatacagtatgtggtcttttgtaactgactcttttcactagcatagtgttttcaaggttcatccatgctgtagctggtaccagtacttcatccctttttagtgccaaataatagtacatgctgaggaccgttttatttacccattcactagttgatggatatttggattgttttccactttcaggctattaaataatgctaaacattcaaatacaaaaaaaaaaaaaaaaaa

SEQ ID NO: 235631 - DNA, 678 bp, Homo Sapiens
  misc_feature (12)..(12): n is a, c, g, or t
  misc_feature (71)..(71): n is a, c, g, or t
  misc_feature (164)..(164): n is a, c, g, or t
tttcagagagcncaggctgctagacaggctgccacgagtgtccctaaccctccctgatggatatccactgngagcacttcatcctgttctgacagcttgataacattcctgttataaccaaggatggaagtgtacaccagtccgtaggtattgcttttcttgtntgaaggaaccaagaggggctctgccattagttggaccctgggtcctggagtaaagtcaggagtgcagggatgactataggtaggagagattcccatcccttggtgtgggagagcaagttgcctatgtccatgttctgtgagatggctttcctcatagatggatgggaaaatgtcaggctctttgctgctggtttgaattggacacactgctgcggctcctcctgcaggcctgagggggcttccctctgcttgtggagtggttggcattcccagcagtatcaaccctcagaggagcgggaactggggaattctggccctacgtgcattcacaggcaatgatgggtttgtgtgtatggtgtcatgagatcctctacctcataacaaaaggacagtgggtagactaaggcagtagctcaaagggctttgcaaaattttaatatattaaaacaagaggcatctgctagaaaacattctattgtataaaacccgagttcttaaaaaaaaaaaaaaaaaa

SEQ ID NO: 235632 - DNA, 758 bp, Homo Sapiens
gattcgtatgaataatgtttatagtgtgctgttgaggaggtatcctgttgtcttactcactcttctcataaaataggaaatattttagttctgtttcttggggaatatgttactctttaccctaggatgctatttaagttgtactgtattagaacactgggtgtgtcataccgttatctgtgcagaatatatttccttattcagaatttctaaaaatttaagttctgtaagggctaatatattctcttcctatggttttagatgtttgatgtcttcttagtatggcataatgtcatgatttactcattaaactttgattttgtatgctattttttcactataggatgactataattctggtcactaaatatacactttagatagatgaagaagcccaaaaacagataaattcctgattgctaatttacatagaaatgtattctcttggttttttaaataaaagcaaaattaacaatgatctgtgctctgaaagttttgaaaatatatttgaacaatttgaatataaattcatcatttagtcctcaaaatatatacagcattgctaagattttcagatatctattgtggatcttttaaaggttttgaccattttgttatgaggaattatacatgtatcacattcactatattaaaattgcacttttattttttcctgtgtgtcatgttggtttttggtacttgtattgtcatttggagaaacaataaaagatttctaaaccaaaaaaaaaaaaaaaaaa

SEQ ID NO: 235633 - DNA, 686 bp, Homo Sapiens
ccactcccagcccccttgtccccttggaagcttgccctgccctcatcttgcccatgccttctactgccaggagacttgcacccatttcaaccttagggcgggggcaagtggggcaaggatggaccagcagaaggggggtaaggctctgttcacttccccctgcctccacagaacgaagccacggattccgttatcttcctccagttttgttccttctccagcctcagttccaccaggtgtcaggactgcatgggggcctggggcaggcagaggagtcaggccagggtccctgacggagcagcactcagcatgtgagtgaggccacagaaaaactctgccccactgcttcttacctcacgggggtggctttcagggattctttagcgcagcagattaaaatcttgccacagtcgagaaattgacaacaagcttccatgctgtacatggttctctttttctctcttttatttttaaaaagaaaacccagaaagatgtaccagatttgtgtaaatgagggtatgccagaaggtggccagttttgctttatgatcttatgaaggaagatttgtgaccctacgtatatatatacacacacatacatatatatatatatcccgaaccaacaacgggactttgtttatattgcaaataaatattattttttctttaaaaaaaaaaaaaaaaaa

SEQ ID NO: 235634 - DNA, 695 bp, Homo Sapiens
gacagggtagaggaggtgggagatgagatcttccgcacaggaacacgccagtccccctttctccagggctgccttccccttgcatcctgggagccccactgccctgccatccccagtactgccgggaagtgtcggccgtccttgtcattagtggtcatatgaaaatggccccaagaaggagatgattctttcaagggacacaggcagcttctctccttgtcctctggggaggtgctgacccctcagaaaccccttcccccaacttgaccccaggctgaacagaccactgcatctcactgggccagcagcccccccagcccccagccttggtggggaccaagcagcctttcccgtcccctcctcgacccgtacagttgagagccaggggctggtgtgtgggagctgctacctggcagtttctcgaggggtcaccgagcctctggtgggacacctgggcaggagtgctctcaccacgaggctgcttccgcagggaaccctggcctgcccgcgacttcgcatcagggaccgcatgctgatttgtactgctctctgctgggttttctatgttcttttcgagtgtgggaaaagggttttagtagaagggtgaatcgtattttacacagcggtcttatttatataaatgtcttggtttttacaattaaaatgaccaaaaactgaaaaaaaaaaaaaaaaaa

SEQ ID NO: 235635 - DNA, 724 bp, Homo Sapiens
gacagcaacaacgtcccacaaacaagtcacaaaagataccgttaaacttttttttttttttatcattgtactacatgaacatcatggataacaagggattctgattcattattaatttcattaattatattttctgatatgagtctagaacttactgcaaaaacaagacaaaactaaaaaaatacaactgagaagggtgaagagaagtatgtttgttaaacagtaaaaatgaatagtatacttcttaactaggtttacaactggtggaccacacaccaggcactaatcacctggtgaggatttggcatatccaccaaaaaatgcatccgatttaaccaacatctccaccagcgctacggactcctcccaattctgacatctcttgcagacaatactatgctctctacacactgtttagaaatggaaaggtgatctgcactgtatcttgggtttgttggctatgcttcctttgatgacatatattatacagtatatatatacatatattttttttgttagagttctagccattttatttctccgcagggtcctttctcagacattactgcatgctgtatatggcgttagctgtgtgttgatcttctaaaagatgatagagtttactggtaattgtgtaatcagctcctgcctttttattttcttgggttatttacatgtcagagacatttataaaaagtgaaaggataaaaaaaaaaaaaaaaaa

SEQ ID NO: 235636 - DNA, 807 bp, Homo Sapiens
  misc_feature (33)..(33): n is a, c, g, or t
  misc_feature (109)..(109): n is a, c, g, or t
agattgagagaataaaagacagtacctttctcntcaaagataaaatgaaaagcacatgcatcttttcttcctaaaaaaatgcaaagattaccattgctgccaaatcatntcaactgaaaagaacagtattgctttgtaatagagtctgtaataggatttcccataggaagagatctgccagacgcgaactcaggtgccttaaaaagtattccaagtttactccattacatgtcggttgtctggttgccattgttgaactaaagcctttttttgattacctgtagtgctttaaagtatatttttaaaagggaggaaaaaaataacaagaacaaaacacaggagaatgtattaaaagtatttttgttttgttttgtttttgccaattaacagtatgtgccttgggggaggagggaaagattagctttgaacattcctggcgcatgctccattgtcttactattttaaaacattttaataatttttgaaaattaattaaagatgggaataagtgcaaaagaggattcttacaaattcattaatgtacttaaactatttcaaatgcataccacaaatgcaataatacaataccccttccaagtgcctttttaaattgtatagttgatgagtcaatgtaaatttgtgtttatttttatatgattgaatgagttctgtatgaaactgagatgttgtctatagctatgtctataaacaacctgaagacttgtgaaatcaatgtttcttttttaaaaaacaattttcaagtttttttacaataaacagttttgatttaaaaaaaaaaaaaaaaaa

SEQ ID NO: 235637 - DNA, 635 bp, Homo Sapiens
gaattcggcacgagggggactatccgtatcaactcggtgtttgttcgttttcttcaccttgcggtttgtgccctctccacatttcctctctgtgtctaccattctcctgggggacgtggcaaaccgtgagccgctgcgtttgagttttgggaaaccctgcggaaacgccctggcgccggtggttttgcgcgtcctaccctgtgtcacctcagggttatgatctggcccctggcaaggctccccaagtgtgatgcctccccccgtccagatgactgcattttgaggatggagtcagtctggtggcattttttgcttaagtaaacaattgtaaccgtttgtgtagcatcagcgttcaacagctgcctgtgcaaatcgaaaaaagcgaaactttggaaactaggaagcatcagatgaataattctgaagacttgatgtcaacgggagtatcttgtttttaaacttttggttttctgttctggagacaaacagttcatatgcactaaagaaaaaagtgtcattatttcagatgctcattgccagcaaagagaactgtattgcaagtcaggcttcactcccagtattttctgaatgtttcaataaaatgaaatatatacgtcaaaaaaaaaaaaaaaaaa

SEQ ID NO: 235638 - DNA, 750 bp, Homo Sapiens
  misc_feature (87)..(87): n is a, c, g, or t
gaccccacaaagaactagacagaaactcatgccagtgtgtctgtaaaaacaaatcttccccagccaatgtggggccaaccgagaatntgatgaaaacacatgccagtgtgtatgtaaaagaacctgccccagaaatcaacccctaaatcctggaaaatgtgcctgtgaatgtacagaaagtccacagaaatgcttgttaaaaggaaagaagttccaccaccaaacatgcagctgttacagacggccatgtacgaaccgccagaaggcttgtgagccaggattttcatatagtgaagaagtgtgtcgttgtgtcccttcatattggaaaagaccacaaatgagctaagattgtactgttttccagttcatcgattttctattatggaaaactgtgttgccacagtagaactgtctgtgaacagagagacccttgtgggtccatgctaacaaagacaaaagtctgtctttcctgaaccatgtggataactttacagaaatggactggagctcatctgcaaaaggcctcttgtaaagactggttttctgccaatgaccaaacagccaagattttcctcttgtgatttctttaaaagaatgactatataatttatttccactaaaaatattgtttctgcattcatttttatagcaacaacaattggtaaaactcactgtgatcaatatttttatatcatgcaaaatatgtttaaaataaaatgaaaattgtattgtaaaaaaaaaaaaaaaaaa

SEQ ID NO: 235639 - DNA, 723 bp, Homo Sapiens
tccagccggatacagagtgaatagttaaccacacttaggtcaaataggatctaaattttgttcctgctccgtgtaaagaggccagtgtttgtgtgttgcaagcagccttggaatagtaactcttctcatttgtttgggatctggccaccaagttccagaatgatacacggatcagtgcagaagttcatcaggctctcggaccttagggctgttggagaaggcttcagcagcagaactgatggtgaaggctcgtgttctccatcctcaactttctttgcttcgatcatacacaagaatacatttggaagggcaaaaaatgaacactgttgttcattgcagccgtgttttgtgacacagatgcacagtctgctgtgaagaccttctctcaagtggcatttgggagtccatgccagatcatggtgcttcatgagagactgacagctatcaggggttgtggcacttagtgaggactctcctcccccagtgtgtgctgatgacacatacacacctgacaatagcttgagtcttctctgttccttttactctgtagccaacatacacatgatttaaaaccctttctaaatatctatcatggttcatccttgtccaaatgcagagtcagagctatttgtacttcattattatttcccaaggcgaatagttggctttctttttgcaaaaataattaaaatttttgtatgttgcaaaaaaaaaaaaaaaaaa

SEQ ID NO: 235640 - DNA, 663 bp, Homo Sapiens
  misc_feature (99)..(99): n is a, c, g, or t
caggctcaagtgattctcctgcctcagccttccaagtagctggggctacaggtgcacgccgccatgcccagctaatttttgtatttttagtagagatgngatttcaccatgttggccaggatggtctcgatctcttgacctcgtgatctgctctccttggctcctcaaagtgctgggattacaggcatgagccactgcacctggccagttttattaatttttaaagtgtggacttttagtttatgactactagcattgtcattattattattgttgttgttgttgttgttgttttcagcctgcagatagctcttatctgacccctagctgatttgaattatatatcagactaggaaagcaatggcgaaatcttcatctaaatctttacctactttagataagtgacctcagcacagtttcttggccatcaaaggactatgagttagcaacttgtattatgtcataccccagtgggacaagaggcttccttgttgtccttttctttcagccttggtgataatttacaaagatgaacacttgagcaccctagatgcttatagacccaagctagtacatgcaaaatgttattatgtctacactgacaggtggatattaaattggtaaagtgtatcaaactagctgtttaaaaaaaaaaaaaaaaaa

SEQ ID NO: 235641 - DNA, 673 bp, Homo Sapiens
cacaccgcaaaggagttggacaaaggcgtccaggggctcaaccacggcatggacaaggttgcccatgagatcaaccatggtattggacaagcaggaaaggaagcagagaagcttggccatggggtcaacaacgctgctggacaggccgggaaggaagcagacaaagcggtccaagggttccacactggggtccaccaggctgggaaggaagcagagaaacttggccaaggggtcaaccatgctgctgaccaggctggaaaggaagtggagaagcttggccaaggtgcccaccatgctgctggccaggccgggaaggagctgcagaatgctcataatggggtcaaccaagccagcaaggaggccaaccagctgctgaatggcaaccatcaaagcggatcttccagccatcaaggaggggccacaaccacgccgttagcctctggggcctcggtcaacacgcctttcatcaaccttcccgccctgtggaggagcgtcgccaacatcatgccctaaactggcatccggccttgctgggagaataatgtcgccgttgtcacatcagctgacatgacctggaggggttgggggtgggggacaggtttctgaaatccctgaagggggttgtactgggatttgtgaataaacttgatacactaaaaaaaaaaaaaaaaaa

SEQ ID NO: 235642 - DNA, 629 bp, Homo Sapiens
gagcccacggacaccacctcaacggtttactcaagtgaacatgaatacagtggattaaatatagttcgaccttcaactgggaaaattgtgaatgaacttttcaaagaggcaagggaacatggggctgtccctctgaatgaagccacaagagcttcaggtgatgataaatctaagtcatttacaggtggaggatacagattgggtagttctttttgtaagcggtctgaatatatctatggagaaaatcagctgcaagatgttcagattttgcttaaactgtggagcaatggtttcagtttagatgatggagaattgagaccttacaatgaaccaacaaatgctcaatttctggagtctgttaagagaggggtgactctcattgcatgtatgcctgaaattcagcaacttatgttagaaatcttttaatgtggcattactgctggcagaagatttcaaaaggttagtttgaagttataatttgtgaaagtaaactcagatattcagtgctctcacccatccaaagaacattgtaacttaccagctcttcttgctaaaggatgaggaatcaagtgattttgctatgataataaaagcttttctgtgttatgattaaaaaaaaaaaaaaaaaa

SEQ ID NO: 235643 - DNA, 678 bp, Homo Sapiens
ctcctccctgggcacttgaggtcaggcttttgcctttttgtcacattgagccacatgcctttgatacacagttgtagcaaagaagggaggtgatgaacttgctcactttcttttctgatttccctccctactcatcctgcactccccaccgaaacccagatatcttatagtctaaggcttgtagaggattaaggaaaggaattggagatgggttttacttagttcacagaaaagctttctttgggatttttcctcccccttagggcttttaagtctaggtgaagtgaaagttcacacatgtgtttgtttggttgctctgtaattagctactagtttttatccctagaccttctctgctccagtgtcttgttcatgtgtcctgaccccgtgtccttgaattcccactttgctttgggatttaagttattgtatgttgtcaacaatatttaaagatgaaaaagtcctgaaggaaacttaccaggttctttcctttggcttttttttttttttctttcgaggtactgtaaattgttaactagggatgccaagcaggcttggttcaatggctaaacctcttattgtattacagtgtaatgctgatctcagcctggtctcaatgccagagcacacagagacttgaataaaactgttataacgattaaaaaaaaaaaaaaaaaa

SEQ ID NO: 235644 - DNA, 711 bp, Homo Sapiens
  misc_feature (78)..(78): n is a, c, g, or t
ctgatggggctggaatagttgaggtggatgttctaccctttctgccttctgtttgggacccagctggtgtctttggtntctttcttcaggctctagggctgtgctatccaatacagtaaccacatgcggctgtttaaagttaagccaattaaaatcacataagattaaaaattccttcctcagttgcactaaccacgtttctagaggcgtcactgtatgtagttcatggctactgtactgacagcgagagcatgtccatctgttggacagcactattctagagaactaaactggcttaacgagtcacagcctcagctgtgctgggacgacccttgtctccctgggtaggggggggggaatgggggagggctgatgaggccccagctggggcctgttgtctgggaccctccctctcctgagaggggaggcctggtggcttagcctgggcaggtcgtgtctcctcctgaccccagtggctgcggtgaggggaaccaccctcccttgctgcaccagtggccattagctcccgtcaccactgcaacccagggtcccagctggctgggtcctcttctgcccccagtgcccttccccttgggctgtgttggagtgagcacctcctctgtaggcacctctcacactgttgtctgttactgattttttttgataaaaagataataaaaccgggtactttctaaaaaaaaaaaaaaaaaa

SEQ ID NO: 235645 - DNA, 679 bp, Homo Sapiens
gtcatctgagatttcagataccaccttttctttagtttctcacctgtttaggcatttaggcatgctggtctgtggctaatggtgtttcagataggaaggatggatatgtctttatctacagcagaagttagttaccctttcatgaggtgattagtttacttctaggtggaaaaagagaggactttgaacttggtgttgtcacaggagctgctctcatggacaagagcccatggattttgtggaggaagaatgtgtaggaaacaaggagaaaaatcagaagactttgcacctgtcagggaagaactagtgaagagcaaaaaccagtgttttagtggatgaaatacagttccgagggtttggaattagggaagagatggcctcagagaggagcatggagaccatgggaggtagacctgacttgatacttgttggccattttaagaaccaggtatgtgtgaagccttaccacagggatcagaggagcaggagcagttgatggtgactctgtatttaaccatttgagaaactgccaaactgttctctaaagtggctgtaccattttacatgtctaccagcagtgtataagagttccagtatctgcatccttgtcaacacttgttattgtctttttaaagttattaaagccattctgttgggtgtgaaaaaaaaaaaaaaaaaa

SEQ ID NO: 235646 - DNA, 732 bp, Homo Sapiens
  misc_feature (28)..(28): n is a, c, g, or t
  misc_feature (48)..(48): n is a, c, g, or t
ggcagcatcactctgttctagcattctntgtggagatggtctggtgcntagctgggagtgagcagcagcccatcccctgttcactttctctagcccatcattacctgtgaactgcagtggggcagtcatggcaaatagaattgggctggggtttctccttcttttcagttcattgtttgccctgctaggaattagaagacagacaccatgtcccaggacagtgttacttcttctgcatgatgtgtggtagactccctttgctggcttgtgcagtgatactgagaaaatacatgaacagaaactgcccaggtggaacagcacgtaacctagtgagtgactgtactcctttctaggaatgctgattcagagtgcacctctttgactaggtcccaggatccccttgtccctggagtagggactaactatagcacaaagtaatatgtgccaatgctatttgtgaaatgtttggtctttctaaacgactaaaggatttgttgggtttttgcttaagttttgaaccaaatcctagagccagctgataatatttaataatctggaggagagaataatgatgtaccaataagtggagattcctccttatgatgtatgctaggttatggaagatgtaaaatattcaactttttcctcctttttttggactttgtattttactgcatgttttcttcatttttaatcaataaagagtaaattgtcaaaaaaaaaaaaaaaaaa

SEQ ID NO: 235647 - DNA, 657 bp, Homo Sapiens
tcagtaatggagatgtgatcctggtatatggatgctcatctctggtatcacgaattcttcaggaggcttggacagagggccggcggtttcgggtggtagtggtggacagccggccatggctggaaggaaggcacacactacgttctctagtccatgctggtgtcccagcctcctacctgctgattcctgcagcctcctatgtgctcccagaggtttccaaggtgctattgggagctcatgcactcttggccaacgggtctgtgatgtcacgggtagggacagcacagttagccctggtggctcgagcccataatgtaccagtgctggtttgctgtgaaacatacaagttctgtgagcgtgtgcagactgatgcctttgtctctaatgagctagatgaccctgatgatctgcaatgtaagcggggagaacatgttgcgctggctaactggcagaaccacgcatccctacggttgttgaatctagtctatgatgtgactcccccagagcttgtggatctggtgatcacggagctggggatgatcccttgcagttctgtacctgttgttctacgagtcaagagcagtgaccagtgacgggggaaacacagggttaataaatgccatactccctaccctcagcaaaaaaaaaaaaaaaaaa

SEQ ID NO: 235648 - DNA, 728 bp, Homo Sapiens
attcctctgtgataacatacacccaaataaagactgctatgtatttgactttaaaactataaagatgtaaaaaaggttcactaagccaaacaccttagaaaatagcctcagctatttgctatgtttatattatacctgcataaaagtatttatgtatagatgtacttaccttacacagtaagtacctaaaatttgtaaattgaatacttttgaatgtaagcagttgaagtaaaacctgtagtgagttcttcagtcagtcaacactaaacctgttttgtaaatttgatgctagtattacactggactttctcaaaatgaagtacacctatatatgcatatagtatatgagcatgcgtatttgtacaaaagcccttcaaaaggagttcagcttttataaacaccaaaacactctctgcctgtaaaatgtttttgctgaaatttgtatcattaactctcaaatttacatcttcatgtttgagatacgcttttaggactgtctatgcatgtagactttggtcaactctcctcctcctccctcaataaatcagttaacttaaaaaatatattgtgaccatttttataaaatacatgttcataaaacagatcaacatatttagcttatacagaaataaaattaagtcaatccactcacaaagaatttttattttgtaaaaatgtagcttgtatttcagtataataaaatctgatgtaagaaaaaaaaaaaaaaa

SEQ ID NO: 235649 - DNA, 690 bp, Homo Sapiens
gtgctgacgagaagtgcttagcgggctcacgaaggacctgcagaggagcctgccccctgtcatggctcagaacctctccatacctctggcttttgcctgtctcctacatttagccaatgaaaagaatctaaaactggaaggaacagaggacctctctgatgttcttgtgaggcaaggagattgagttcactatggagaagtcagcagcaggaggcccatcccttactcagttgccgggacatccccagtctcgggggaagaagatgccatgggcttatacccaggctgtagccaactaccaacgtgcctgtttgtttgttgctctttccttctctccatcatagtctgggtgccagcgccctgaagctccgtgctcaactgattaaactttactgccctatggtgaccatctaggagaggggagggcagagggggtgagggtactattctggattgagaaaacctatatccattctttatatcaatgtatagttttagtctcctaaattgatctgttattttccaaactattctcttgtagaaaattttccagtgggcacttaatggtgcccttgaagaacttcctaatccatgtacataaaatacatcatatgtacacttataaatgtatatagaatgctcaaaaataaaattcttaataatagaactggcaaaaaaaaaaaaaaaaaa

SEQ ID NO: 235650 - DNA, 706 bp, Homo Sapiens
  misc_feature (17)..(17): n is a, c, g, or t
  misc_feature (28)..(28): n is a, c, g, or t
gtctgaggatgggtggngacagggctgngactcagctttcattcactggagacttctccactcaggtctttgttgcactaaagcagggacaggaccctgggggttcaggaagcgggtctcaggccgctggtttattcctggaggtggggctggagaccagaatggaaaggggcttcctgagctgctagggggtgaaggacccccgaacccgcatttcttgagtgagagcaaacactcgaggcaggagccagcacccctcccactgcatgcccggcccccagcccaccttgccccctgacccaccttcacccgtgccccttctttctgcccttcctcaccgaagaagggctaggaacaccctggagaggctgcaggtccggccacggacgctcagctgagccccggtctgctccttcagcctccttgctcttgttggagcacaggccccaggcttcctgccagggccccgattcttcttatgtcctccagccccgccctggcgtggacatccactcactccttccagcaataagaaccgtccttggtcgtggagagtactgtgaaacaaaccaatgcacttaccaggaggcacaagactcttgaagaagatgtaaaatgaaccttttttttttttacaaaaaacaaaaagcaaatattcataaagagaaataaaatgtaattttaaagtaaaaaaaaaaaaaaaaaa

SEQ ID NO: 235651 - DNA, 635 bp, Homo Sapiens
gaagcctttgtccgcttcttcgtggagattgtgggacactactctttgttcctgacgtcgggcgagcgtgaggagagaaccctgcagcgggaggccttccgcaaagctgtctcctccaagagcctccgccacttcctggaggtcttcatggagactcagatgtttcggggcttcatccaggagcgggagctgcgccggcaggatgccaaaggtctgtttgaggtccgagcccaagagtatctggaaacactccccagtggagagcacagcggtgtcaataagttcctgaagggactaggcaataaaatgaaatttctccacaagaaataactctcagcctcaagggaaaacttcctcctagtgcagccctattctttaaaaacagttcctggtggcctttctgaaaggctgggtcccaggttgtcacggtgcggaactggaggccgcggtggcttctggccgaggctgggctcttccctggatgaggacctgggagccgcctgggaggacagccccagaaagggagcccgagaccaggcgtgtcgccgacatgcaaatgggttgttttggtggttgggtttttttttttatcttagatattaaaagtaagaaaaatgaaaaaaaaaaaaaaaaaa

SEQ ID NO: 235652 - DNA, 692 bp, Homo Sapiens
aggcccaccagcaagccccccgccagtggcgcagcagccaacgtcagcaccagcggcatcaccccgggccaggcagctgccatcgcctcgaccaccatcatggtgcccttcggcctgatctttatcgtcttcgccgtccacttctaccgctcactggttagccataagactgaccgacagttccaggagctcaacgagctggcggagtttgcccgcttacaggaccagctggaccacagaggggaccaccccctgacgcccggcagccactatgcctaggcccatgtggtctgggcccttccagtgctttggccttacgcccttccccttgaccttgtcctgccccagcctcacggacagcctgcgcagggggctgggcttcagcaaggggcagagcatggagggaagaggatttttataagagaaatttctgcactttgaaactgtcctctaagagaataagcatttcctgttcttccagctccaggtccacctcctgttgggaggcggtggggggccaaagtggggccacacactcgctgtgtcccctctcctcccctgtgccagtgccacctgggtgcctcctcctgtcctgtccgtctcaacctccctcccgtccagcattgagtgtgtacatgtgtgtgtgacacataaatatactcataaggacacctaaaaaaaaaaaaaaaaaa

SEQ ID NO: 235653 - DNA, 726 bp, Homo Sapiens
  misc_feature (32)..(32): n is a, c, g, or t
  misc_feature (128)..(128): n is a, c, g, or t
taaaagaagtgtattctatttatgttgtttanaaatgcatactgagagacaaacatcttgtcattttcactgtttgtaaaagataattcagattgttgtctccttgtgaagaaccatcgaaacctgtntgttcccagcccacccccagtggatgggatgcataatgccagcaagttttgtttaacagcaaaaaaggaagattaatgcaggtgttatagaagccagaagagaaactgtgtcaccctaaagaagcatataatcatagcattaaaaatgcacacattactccaggtggaaggtggcaattgctttctgatatcagctcgtttgatttagtgcaaaaatgttttcaagactatttaatggatgtaaaaaagcctatttctacattataccaactgagaaaaaaatggtcggtaaagtgttctttcataataaataatcagacatggtcccatttgcaggaaaagtgcagactctgagtgttccagggaaacacatgctggacatcccttgtaacccggtatgggcgcccctgcattgctgggatgtttctgcccacggttttgtttgtgcaataacgttatcacatttctaatgaggattcacattaatataatataaaataaataggtcagttactggtctctttctccgaatgttatgttttgcttttatctcacagtaaaataaatataattaatggttaaaaaaaaaaaaaaaaaa

SEQ ID NO: 235654 - DNA, 669 bp, Homo Sapiens
gctatacaaattaagtggtaagcagttataaagacggcaagaccatgctattgaaaaagttcagaaaacatacaccgtggaccagaggtcttaatcctatctatggatgtgttttgtgtgacccatacagtgttgtaaaaaacatttagaaccattattctaaaaaatggggctatttcacattaaagtccagatttctgcttctttttaaacatcagaggctctggctacacagaggcctttgttctttcctggcatcagtctgcaggaccaagcggtggtggctcacttgggaagagccttgtgctctccactttgccacagtaccactgccaccatgctgctcacttatgtcatccacttggcccttgtatgacctgaatttgcaacctctggtatactgttatgttctggagaaaatattcaaagatctgccaaatactgcattagtatactgagtttatacagcatttttgtagggttttaaattgcattcaaggtcactttccaagcactttctggttttgcttgtttttctagaagaaaatgaaaagctattccttataataaacatggcagcaagtaaacagtgtgattgtgaaaaaaatattatttatagattttctacaaataaatatttgtctaccaagtaaaaaaaaaaaaaaaaaa

SEQ ID NO: 235655 - DNA, 602 bp, Homo Sapiens
tcagctcccaggccagttctttgaatgtcgaggagttccaggatctctggcctcagttgtccttggttattgatgggggacaaattggggatggccagagccccgagtgtcgccttggctcaactgtggttgatttgtctgtgcccggaaagtttggcatcattcgtccaggctgtgccctggaaagtactacagccatcctccaacagaagtacggactgctcccctcacatgcgtcctacctgtgaaactctgggaagcaggaaggcccaagacctggtgctggatactatgtgtctgtccactgacgactgtcaaggcctcatttgcagaggccaccggagctagggcactagcctgacttttaaggcagtgtgtctttctgagcactgtagaccaagcccttggagctgctggtttagccttgcacctggggaaaggatgtatttatttgtattttcatatatcagccaaaagctgaatggaaaagttaagaacattcctaggtggccttattctaataagtttcttctgtctgttttgtttttcaattgaaaagtaattaaataacagatttagaatctaaaaaaaaaaaaaaaaaa

SEQ ID NO: 235656 - DNA, 603 bp, Homo Sapiens
aaggtctcagacccaactaagctaagcaaacagaagaagcaacagcgtcttgaacccttgtacaaccgctatgaggaacccaatgcctggagaatatctcgagctttccgacggcgctgaaaggcaagattgttcctttgcctctccagcagcagtagccagggcttggacttatcgatgacaggctggtcctgaggatacagctgtcccgtgactgactgtcttaactgagcattttctcaactcgactctcatttcttccctgctggtaaaatagaaacagggatttaaacctggctttggcaagagcctgcagcctccatcaccccaagtccttgggcccagttgggagctcatatctaacacagagacacattgcatcaacttcaagaaagggacaatttgtgcagctccaggatgggaaggtggagtgggtgagcatcttgtgcagggacatggtgagtgccctgatgccccagctagcaggagctactgtgctcatctaaagtgtttgccccacttcccaccccgtctccagcccctgtactttggcttgacctcgtggaaatatttattttcttaaggaaacaaaaaaaaaaaaaa

SEQ ID NO: 235657 - DNA, 663 bp, Homo Sapiens
  misc_feature (21)..(21): n is a, c, g, or t
accacccgctccagctccagntggattgagagcctgcgcaggaagaagagtgacagtgccagtagccccagtggcggtgccgacaagcccctcaagggttgaaggccgaggatggatgccctgtgccagtaaccagagcacccaggggtggccagtcagtgagggaacagcgtctcggaactgctggtcctcattccttgcttcccgtccccccggtagactctgtcctgctggtcccaccacacatggctgggacatctgttcccagctgtaggcccttccaccagctggggagctagagggagcaggcccaagggcagagcagaggctgaggcacggggagccagccccactcggggaccagaagtggaaccaaaaacaagaaaaaactgtgagagattgtgtctgcccctgccctgcctgggacccacagggagactataatctccttatttttttactcctactccccagaggggccctagtgcctctgttcctgaattacataagaatgtaccatgccgggaagccagagacctgcaggggcctcggcccctcacatcgtgtatgtctctccttgatttgtgttgtgtccagtttggttttgtctttttttatttggcaagtggaggaggcttttatgtgaaaaaaaaaaaaaaaaaa

SEQ ID NO: 235658 - DNA, 653 bp, Homo Sapiens
gcagcatcaccgggtccacagtggcgagcggccttacaagtgcgatgactgcggaaagccttctcccagagctccgacctcatccgccaccagcggacccacgcggcgggccggcgctgacctggggccccagcaggggtgggaggtgtgggcagaagataaggggccagggagctagaggaacctttagggaggatagtggagaagccgcaggagaatggaggagctgaggatgctggaagaagagaaccagggtggaggaagtgacatgccctggagacttgtgggaagtgggttggagggaggccaggccggcagcgggaggccctgggagaaatggagagaggtcagcggagggctggcctcagccgcggctccttggtgggtgcctggcttggcaactgctagagcagggaggggggagggcaggggattacctaattagagtgggttagcttagattggtagctgctgaaactctcgttgagtcaggagcgggtaaaaggtaggtggggtggggagtggggccccggggtggggcctgggcctctgcgtgcaaaccccagcctccctcttcttcctcaggctttggagcccctgagtttgagttcaataaaaactttatgtggtaaacgaaaaaaaaaaaaaaaaaa

SEQ ID NO: 235659 - DNA, 704 bp, Homo Sapiens
  misc_feature (27)..(27): n is a, c, g, or t
  misc_feature (81)..(81): n is a, c, g, or t
atcaaattaataataaaataaaactancggggtctgcaaggaaaactatgaaggccacttaaagtggttcaggtatccctntgtcttgtagggcatagctgttggtttagccaggcttttacagtatttaattttaaagtatcctataactatcaacttcccaggttgaagacgatgtgttgagtttcctactgattgattgattcctgtcctccccagtgtttccgtcactggttcactaaaacagtatttatatagctccactggctctaaagctcttagtccttctaatattttggattttacaagtaaaaatggaaaaaaaatagaaaagagacaatcaaatgcctggagcttaaaacaaagtatgtgcaacctaccatctcacttgaaatttaataaaataataagtaattatgtaaatataacatagagttatagatttatattttgttcataacacatagtgtaatataagttgtatattttcatgtttttggttttatgttatcattcatgccacaataaaaataaaacaggagtttatgtgctcttaaaaaaaagatgtgggttgccaccaacctgtttttcgtttttgttttttgtttattttattttatttttttgcattctcctttttcagtattactgccatgcaaggcaccaataaaaacagcaaatgtgttaaaaaaaaaaaaaaaaaa

SEQ ID NO: 235660 - DNA, 673 bp, Homo Sapiens
  misc_feature (631)..(631): n is a, c, g, or t
tgcccagggtaggcctggcatgaggggtaggtcagccaatgtcagttgttctcttgggccctctcagagttatctccccaagacaggaagggaaaagcaaatttgtaattcaccagcaataaaaattggaggaggcttggccctcagcccttatatctctctctttttcactcttttcctcccacccccaagactgagttttggggggcaaggtggagagagctggcaactactgtgagcaagtcccctagcccctgaccagcctcctcccatgactggtgactgtttaatgagctgtgcatcccccacaaaaacatgagtgcccctctgtgtggcctctaaccctctgcacagcccttctgggtggtcctcaccaggtctctgagctgggtgggaggccatcctggcgaccactgcccattccattcacccctcactgtacctgccctagaacctgggcctaggccacaggggcagggagaagagaaggcattagtaagaaaaaaatagaaaaaaatatgaacagactcagctttgggacgtccaaccacaaaagaaattatatataaatatatataaatatatatctctaccatatgtgatggaaagactttttgttttcctttcccanaagaaataaaacggaaaaagcctcaaaaaaaaaaaaaaaaaa

SEQ ID NO: 235661 - DNA, 717 bp, Homo Sapiens
  misc_feature (42)..(42): n is a, c, g, or t
  misc_feature (72)..(72): n is a, c, g, or t
  misc_feature (163)..(163): n is a, c, g, or t
gcaaaggtgaaggcacgtcccacaggatcaaccagctgcctnggagggagacggcactcagttaggcgctcntacagcagggtcagcaagacaagcaggttgcggcaagggtctgcgcactgctgtgtaaatgtaggggcatcggggggcagaaagaccaggngagaagtgtgcatcacccttggggttaagggacagttgtctgctaggtgttgcttcctggagatggctgaaaagccagtccagtctgcagggaccaggccaccacccacctgatgtgggagcatttcccccaatccctgctgggctgctgaatctgggggacatagggaagctgaggctggtgttctgagtagtggcagagctgagccacagggcatgtctgaggtcagccccgagcaaaatggaatagggactcagggtgggtcaggtaactggaaagcgggcactgtgcacgcagcccttgaggggagccagggtgggtggggatcccccactgtgtgcagaaggcagcagccttggaagcagggtgtgctcctcggtgtggtcgctcgataccagaaaatgactctaaaaactgaagagtgtttgagtttcattcacacaaaacatggacatcatctgtgaggctctgtcccagagagacagggccatccctcatgtctgttattgggttgtagataaacaaaagtataaatcaaaaaaaaaaaaaaaaaa

SEQ ID NO: 235662 - DNA, 656 bp, Homo Sapiens
gactctgttgctaaaacaattgatgcaggttgcaaaccatacatggcccctgaaagaataaacccagagctcaaccagaagagatacagtgtgaagtctgacatttggagtctgggcatcacgatgattgagttggccatccttcgatttccctatgattcatggggaactccatttcagcagctcaaacaggtggtagaggagccatcgccacaactcccagcagacaagttctctgcagagtttgttgactttacctcacagtgcttaaagaagaattccaaagaacggcctacatacccagagctaatgcaacatccatttttcaccctacatgaatccaaaggaacagatgtggcatcttttgtaaaactgattcttggagactaaaaagcagtggacttaatcggttgaccctactgtggattggtgggtttcggggtgaagcaagttcactacagcatcaatagaaagtcatctttgagataatttaaccctgcctctcagagggttttctctcccaattttctttttactccccctcttaagggggccttggaatctatagtatagaatgaactgtctagatggatgaattatgataaaggcttaggacttcaaaaggtgattaaatttttaaaaaaaaaaaaaaaaaa

SEQ ID NO: 235663 - DNA, 765 bp, Homo Sapiens
  misc_feature (79)..(79): n is a, c, g, or t
gaatcaatcaaattaaatcatcatgactacattgttccccatcgctgaaggacagaattcattgtgtggcatttgtatntgatgccagctctattcaatacttctcctctcagatgatagtaaagatcaaaagaattcgaagggagttggtaaacgctggtgtggtacatgtggctttgctcactcatgtggatagcatggatttgattacaaaaggtgaccttatagaaatagagagatgtgagcctgtgaggtccaagctagaggaagtccaaagaaaacttggatttgctctttctgacatctcggtggttagcaattattcctctgagtgggagctggaccctgtaaaggatgttctaattctttctgctctgagacgaatgctatgggctgcagatgacttcttagaggatttgccttttgagcaaatagggaatctaagggaggaaattatcaactgtgcacaaggaaaaaaatagatatgtgaaaggttcacgtaaatttcctcacatcacagaagattaaaattcagaaaggagaaaacacagaccaaagagaagtatctaagaccaaagggatgtgttttattaatgtctaggatgaagaaatgcatagaacattgtagtacttgtaaataactagaaataacatgatttagtcataattgtgaaaaataataataatttttcttggatttatgttctgtatctgtgaaaaaataaatttcttataaaactcgggtctaaaaaaaaaaaaaaaaaa

SEQ ID NO: 235664 - DNA, 508 bp, Homo Sapiens
gccagcaacaccaccacctgggaattcatctcctcacaccgcatcgcctatctccgccagcgccccagcaaccccttcgaccgaggcctgacccgcaacctggcccacttcttctgtggatggccctcagggtcctgggagaccctctgggctgaggaggaggaagagggcagcagcccagctgtttagggttgctggaggccgggctaccgtcttgtgcctgaaaaccacggggcctgtccccagctggggtgagcgctcagagggcctggggccctcactcctgcccacgcctcccagaccccagaacggagcttcaagtcagacagatccctgccttggtgggcagttctgccttccaaggaagaaggggaagaaaaggacctgtgggtggctcaggcccaagcagaccccgggctccaccccagccccgcccaggctgctgccagtgcacacttttacaaatttaatataaagcaagtccagtcttaaaaaaaaaaaaaaaaaa

SEQ ID NO: 235665 - DNA, 703 bp, Homo Sapiens
aaaaaatgcatacttgtaaaacaagtgcttgagttgtcacgtaaaaattatagcatattgctataataaaaccttatttatgtcttatttgaagatgaatagtcttaaaagataaagacataaatgggacaattgttattgagcaaaaaaccaaattatcccaccctcatggagcttatattctagcaaggggagatggatatgatagattacacagtttattggaggacaataagagttttggcaaaaagcaaaaggaacacagggtaaaggggataggtgccatttggtggtgagaatgctgactgaaaaatagaatggtcaatttaatctgaaacaaatggttatttcttttataatccatataataaatttaaaatctaaaatgtaaaattttgaacacaacactggaaagggtatccacagcaggaagtccccagttcacctccatgactacagggcagctttgcacagccctttgggcgcactgtgtgcctttgcccagaagggggcctcgccgttccaccagaagctcagctccaggccctggaggggctgctgctcctcagttgcatttcttcagtagattcatttccttgatgcaaagcatctgtatttgttggttctgtcatttgagcgatgtctctgacttgtttgttttgaattacattacaggctggaatgtaaaaaaaaaaaaaaaaaa

SEQ ID NO: 235666 - DNA, 536 bp, Homo Sapiens
  misc_feature (28)..(28): n is a, c, g, or t
ttgttcaacatcagagaagccatgtagngaaaaaaactctttcacagtgacccatggtattcatgccaacattggtgctcatttgtcactgaactgaagccaccctggagcccttaatggttacagaaattgtggaccagggctttatttaccactatacatcatcgggtattagaaaatgtagtctggctgagacgatgagttatcttctacattctagaaagtgattggaagaagtcatttgataagaggccatgggagagtggtctggaagttgtaggacctaaaatagtttgttctcacccagtgtatttaaatggccttctggacttgttaattgccctcagccagcactttaggacatctggttggatggctctgatgtggggggctgctgctctgaccattcattttgcctctaatgaatctttcacaaattggtcagatccatgaggtcttttactcttctttgtgccttgtatgataggtgctaataaacatttattaaatgtaccagtaaaaaaaaaaaaaaaaaa

SEQ ID NO: 235667 - DNA, 622 bp, Homo Sapiens
tagatggaaaggactaatggcctctattctcacctcccttgtgatcataataggggtgctcattctcttagggtgctgtattataccctgtgtctgcggactagttcaaaagctcatagaaacagcccttaccaagacctcccacaactctcccccaccctattcagataaacgtttatttctaagcaaccaagaagagcagtgaagccagatcctgttagaaatatatgaagaggaaggactacaaaatcaaaaggggaaaattattagacaaaatgagttgctctacaaaggtccaacttcgttgtcctttgttctgtaacctttgttctgtaaactgcccttcccgcagaaactgtctttcccgccgaccaaaactgcccttcactatcactgtaatccatacccctactctatttgaaactgccaatcgggatcagcttacattgtgtggttcaaccaccagccaatgaggaaaaaacacagaagcaaaagctatgatgcattagggttaaaaaccccttcctttccctgtccaatgtgctcttgagactgctacaggcgcaagcagccaccttctgcagaagtaaaccttgccttgctgagaaaaaaaaaaaaaaaa

SEQ ID NO: 235668 - DNA, 674 bp, Homo Sapiens
aatgggcttctctttattgtcctgagtcatccctgtgccaaagagagtgagtcgttgcgaagccctgtgtttcagctcattgtgattaaccctaagacgactctcagcgtgggtgtgatgctgtactgtcttcctccagggcaggctggcaggttcctggaaggtgacgtgaaagatcactgtgcagcagcaatcttgacttctggaacaattgccatttgggacttacttctcggtcagtgtactgccctcctcccacctgtctctgaccaacattggtcttttgtgaaatggtcgggtacagactctcatttgctggctggacaaaaagatggaaatatatttgtataccactattcataagttagggtaaagtgaaaacacaattttctggatatattgggcctcttagtattttttggagttttaaatataaaggagaatatctgaatgacacttaaaatgattgcttgtttatgtccagacagacttattttttattctaatgatggtagcaccactgatcttggatgtacatttatgtatactttgagaaaaagggttttaggttgatttttgtaatttcccacatttgtacatgtgcttttaaaggtgtacataaagcttcaaatggcaataaatatttatttttatacaaaaaaaaaaaaaaaaaa

SEQ ID NO: 235669 - DNA, 652 bp, Homo Sapiens
caattgatgcttgtctaatgcatccacacactgcatgtctgactggcgatgccacgctcctaagtagttctgccatgaaacataaaagacaaaggaaaagccgttacacatcacacagagaacattttcgggtcccacagcggtggtggcaggaagctcactctcgcgtcagtattagagtgtgtgtgtgggtctcggggatctcggtggctcccatcttccttcattgttctgaacatcctgtattgtaaaccatggctggggtgctaaagtgcctgtgaatcccgatgtggaaaaagctggaggtgaaagctcagcataccatgtatttactttaaaaacagaaaaaaagacatgtatggatatgtctattttttttttattggcacattgtatttttgtgttgacttgtttttagaaatgatgtgtccacacacgtacccgtgtctcttctgcatttctgtgtcatggttctgtttcttaatcacgtgcggcggtgtctaagtggtgttaccagtgtacgcgcagtgaccttggatgacagtggctctttctcacagcctcccctgagctgtgagaaacagctttctctgtacatatgcaactcctaataaaaggcatatttcttcctgttaaaaaaaaaaaaaaaaaa

SEQ ID NO: 235670 - DNA, 721 bp, Homo Sapiens
  misc_feature (23)..(23): n is a, c, g, or t
aagccgtggacatccgccaaatntatgacaaattcccggagaaaaagggtgactcaaggatctcttcgaacgggtaccctccaatgccttttttcttgtgaagttctgggcagacctcaacaccaacatcgaggatgaaggcagctccttctatggggtctccagccagtatgagagccccgagaacatgatcatcacctgctccacgaaggtctgctctttcggcaagcaggtggtggagaaagttgagacagagtatgctcgctatgagaatggacactactcttaccgcatccaccggtccccgctctgtgagtacatgatcaacttcatccacaagctcaagcacctccctgagaagtacatgatgaacagcgtgctggagaacttcaccatcctgcaggtggtcaccaacagagacacacaggagaccttgctgtgcattgcctatgtctttgaggtgtcagccagtgagcacggggctcagcaccacatctacaggctggtgaaagaatgagagactcggggagcagggaggggggaagagacgtgtgtgcaggaaacggggacgtggggaggggacctgcaggggcagccccctgaagtgccaagagagctgagaggagcagttgtgactctacccaggaacaaactgtgcctgaacctgaggtgcccaaccccaaataaacccaagatgctgtgtaaaaaaaaaaaaaaaaaa

SEQ ID NO: 235671 - DNA, 627 bp, Homo Sapiens
tgatttcagacatctggcctccaggattgtgagggaataaatttctgttgttttaagccatgcagtttgtggtattttggtacagcagccttaagaatctgatacatgtatctcgtaaaacacctctgatacttacctgcgcttgtggctgtgttttctgatactatgagagccgtagtatctggataccggagagtctgcgaacttgagagaagggccgtgtctgattttccttcagtgtcccaaggaaggatcttgcacagtacccagatttggagaggtgccaagtgaatgcttcggtggactgaatgaatacaaatcaaaaataatgatgcagcgggaatggatgcagtaagattgctgtggcctatgcagttcacacagttcacactctgcatgttgaggagtaagtggacagatctcttaagcccaggggctagcaaaccggtctgtgggccaatttactcaccgtctgtttttgtacagcttgtgagctaaaaatggtttttaaaaaggttgaatacaatcaaaagaataatattttgtggcatgagaaaagcatatgaaattcaaattttagtgttcataaataaaattttattggaacctaaaaaaaaaaaaaaaaaa

SEQ ID NO: 235672 - DNA, 824 bp, Homo Sapiens
attgggcagattgtatattatcacaaaaaacattaaatgtccatcctgtgccaggtactatgcagatgttgagggattggggtctggttagtcgtgactatctatcctgaatctaacagtgacttcataactaggagactgaattagacccttaaggtatagtgtgtgttgcaaatcactctgcaatggaaacttttatattcagggtaggtttgtgtcttaaactaggtgttctaatcaatgtacaagactttaccatacacgcaactatagtttttctaaaccttcatcattttgtgattctttgagaaagggcttttaggaactttatgttctaaaaaatgtttttaacaataataagataaaagaaaaacctgtgattcatatgtccccactggcattactcagcaggagcccccagctgccaaaggttggcagtgatcctgcaagttcaagggctctttctccctggggatgtgctttgtggcttctctttacagctttgtttctgcatcagttcactgctgcatgttgtttggaatttatcaccttaagaaagtgtctctgttttatatagaaacactttctcacttacaggggagaaggaaatgcagggcacatgatctggccctccccagaacaatctggatttcacggagacagcaaccagaagttaaaccatgtgactaaaaatgcatctggctactttttcatgtatgtatgagacagaaactaatccttactatcctattaggataccacttttcattgcaaagtttgtgtcaataaagtcattaattttaaacataaaaaaaaaaaaaaaa

SEQ ID NO: 235673 - DNA, 615 bp, Homo Sapiens
cagagaaaacctggaaggactttacgataaaacgtgtcaattccttagcattggccgaagagttaaggtcatgaatgaaaaacttcagcactgcatggaactaacagatctaatgcggaatcacctgaatgagaagagggcactccgcttggagtggatgattgtcatcctcattaccatagaggtaatgtttgagctgggacgagtatttttctgatcaagtgataaccaaagtgtcactgcaagagatattcaagttctacaatcaaaaattaaatgttcggcccggcgcggtgcctcatgcctgtaatcccagcactttcggaggccaagaagggtggcttgagatgagatcaggagctcaagacaagcctggccaacatggtgaaaccccatctctactaaaaataccaaaattagccaggtgtgttggcacacgcccgtcatctcagctactcaggaggctgaggcaggagaatctcttgaacttgggaggcggaggttgcagtgagctaagatcacaccactgcactccagccagggcaacagtgagactcagtctcaaaaataaacaataaaataaataaataaatgttcaaaaaaaaaaaaaaaaaa

SEQ ID NO: 235674 - DNA, 728 bp, Homo Sapiens
ctcaggagtcatactccatgagcctggacccagtggtctttatgtggaaacaaatttcacctataggtaacctggtaactgctattttcttctgtgtgctctgtcaacaaaggtatcagtggcttgcaggagatgcctttaatactcagagcattctatctccccctatctggtttagaaggaaggccttcattagttaccttttgagaagttactagaactctctattagagacttaccctcctgacctgataaaaagggatacccatgtctctattaacagctttatctctttctacagttttgggtatttgataaggttaaggcaaaattttagttatgcttaaggaggagttcttttttcacaattacagagaaaattttggtttgttgaagattgcagaaacagcaatggtaatgtaagacagttttggcctttaatttttttcttgaaactctacagtatactacaatagtgaaggaaactattatcatgagagatccttctgaataggatgtctttctgagttccactattcagttacaaaactccttaatgcttaaaattcattatgaaaattagatttattttaaatactttcaagtgtatacatttttatttcataatttttattgtcttttaactaaagcatttagttcatttatatttactgtgtaccttttatatttaataaatatatttacttattaaaaaaaaaaaaaaaaaa

SEQ ID NO: 235675 - DNA, 707 bp, Homo Sapiens
  misc_feature (63)..(63): n is a, c, g, or t
  misc_feature (164)..(164): n is a, c, g, or t
gtcagtagttcctcagaccatgacaaatgaaagagctatactgaagaacaatgaggaactctntgaattttcctgagcacgtgacgtactgctgggccttcccttaaacatcagaacaatgagatttgtccctattttacaggggttagaatagactattaagngacaactgagaaaggacagagaagtgacagccagaggttgagaggggccataaaaacatacaatcagacatatatctgctaccactttgtagcaagatggttcctatcataactctgggtcaaaaagatagtaatttggtttataatgttgaaagaaagcagaaaggtggagatggggtctcactgtcgttctggagtgtagtggttcaatcatctctcactgcagccttgaacccctaggctcaaaggatcctcccacctcagcctcctgaatagctgggactagaggcatgagccactatgtcttgctgattaaaaattgtttttgcaaagttggatgtctcactttactgcctaagctggtcttgaaatcctggcttcaagcaatcctttcactttggcctcccaaaatgctgggattacaggcatgagtcaatatgcccagtctcttttctttcttagttactctagaaaatggcttgttgattttgttatttcaaaaaaataaatgttttattttgttgtaaaaaaaaaaaaaaaaaa

SEQ ID NO: 235676 - DNA, 649 bp, Homo Sapiens
  misc_feature (33)..(33): n is a, c, g, or t
gcctcactcaacaaccaagcgcttggaggacgngacagatggacagacagccaccctgagaacccctctgggaaaatctattcctgccaccactgggcaaacagaagaatttttctgtctttggagagtattttagaaactccaatgaaagacactgtttctcctgttggctcacagggctgaaaggggcttttgtcctcctgggtcagggagaacgcggggaccccagaaaggtcagccttcctgaggatgggcaacccccaggtctgcagctccaggtacatatcacgcgcacagcctggcagcctggccctcctggtgcccactcccgccagcccctgcctcgaggactgatactgcagtgactgccgtcagctccgactgccgctgagaagggttgatcctgcatctgggtttgtttacagcaattcctggactcgggggtattttggtcacagggtggttttggtttagggggtttgtttgttgggttgttttttgttttttggttttttttaatgacaatgaagtgacactttgacatttcctaccttttgaggacttgatccttctccaggaagaaggtgctttctgcttactgacttagtcaatacaccaagggcgagattttaaaaaaaaaaaaaaaaaa

SEQ ID NO: 235677 - DNA, 693 bp, Homo Sapiens
cacaggttgtgtgtacatacattttcctgtctttctggtaagcccctggggtggagctctgggccacagggcaggaaaactcagtgttgctaggaactgccagacattttcccggagtgagtgcagcatttacattcccaccagaaagtgtgccaggttcttgtcatactgcgtcctcgccagcgcttggtgttgtcagtcttcttagtttccatttagagattcagtgtttaaattttgaacgtcttgggtgaacaccttggtttgagaaaagtaagaaaaagggtctgtctggctatgggccatggagacccagggcagtgctccacgtgccaaccctggggcagggagcccaagctaggactgtgactgtctgggctgtgggcatctgaccatctccagtgtccccgtctttgatttccctggcgatggtgctagcttagtttgtgcgcatcggcatttgtgggagaaatgaaggattaatacattttgttttatgtcagactctctcagtgagaagttctcagggacaataatagcagggggtcctgctgaagaaaaactgggagatggctgagctctggtccatctttcattgattcattcatttcttcattcattcaaccatgtattgaatgcttatagccaatgaaaataaagtacacagtatattttaaaaaaaaaaaaaaaaaa

SEQ ID NO: 235678 - DNA, 688 bp, Homo Sapiens
tcattcctgccaaagctgtggagctgctcaggcccatcaaatgctccagacatgttctactgcatgaagctcctggaggagactggcatctgtgtcgtgcccggcagtggctttgggcagagggaaggcacttaccacttcaggatgactatcctccctccagtggagaagctgaaaacggtgctgcagaaggtgaaagacttccacatcaacttcctggagaagtacgcgtgaggacgcctgagccccagcgggagacctgtccttggctcttcctcccaatgcccgtcaggctgaactcgcctcccccgtgactctgcctcgggcctcgcagaggccgctggtcacttcgtcatcattttgcccctggagacgtctttctttgtgccttgatgttgagagcgcctctcttttgagcaaacaagcattctatatgcaaccagagtagaggggacctgctcagcaggtgtgaccagggttctctgaatctgttattgtttttgcttctggaaagttcatttggggtttacaacaactaggatgtgttgggtgagatgtttcagatctggagaaatgagcaggtgtcgggaaatgtgtgacttaaccgtggtgagggctggaaatccaaactcaccaccatgatctgtgaaataaagcccttagcggtgtgaaaaaaaaaaaaaaaaaa

SEQ ID NO: 235679 - DNA, 670 bp, Homo Sapiens
  misc_feature (358)..(358): n is a, c, g, or t
cagccccagtaggaggagagcaggcagagcttgtcatccccagcctggtgtcccgcagtcccaggaagccgcttcttgccttcatggctgagtgctgggaagggctgagctcacccaggccagcaggtggggtatcatctgctcggtggggccacccacaggtgacagcatggaccctcaggctggctgcccctgttccttggtccataactggtgagctatggagacccaggccaacaaattatccccagtgatatggggggaggaggggctagaacaagggcccaggggactggaggcaggatggtggctttccctacctgacacagccatggcccagccccaaggccaggctgtntaccctatggccacagcaggaggtcagcccagggccaggagacacatggctggacaaggctttgcagcctgggagaccccgactttctctaacccagtggctgtgcggtgcaggccactgactccccccctgccctctcccctctctccctccccctaactgcatgacatgttaactgtgtgcccaggacagccgtggtggggaccgggtatgccaactggaatgattctagaaccaaaataaagttggggcaggaagagggggcttccagggagccctgctcggccctgaatcaaaaaaaaaaaaaaaaaa

SEQ ID NO: 235680 - DNA, 636 bp, Homo Sapiens
gaaaaacaggagtgatgtcatttctttttcatgtattccaattaaagaaacaagggcaggtcgtataatggcatattaatacattagacttaatctagaacccctgtagctttttgatgtgttttatttcttatctctttgaattcctgtttggttacttggcttccaatggaggtgaacttaacaaccatacttgaatattccgtcttgactttgtaaactgtggctacttgaaatgaagtttatctggggttgatggatgaatggtagatttttgcaatgtctcaaggcaataggatgtgtattaaactgtagatattcttagtacagtaaatttatgctgataattttattttgtataatttttacctttttgttaatattttttccttccactttattggtttgcctcctgagctacccctccttaccctcccttctccctcagtgtttcagtaaatttaatttagggtgcctagaaattgcaagtatgtatcctttttgatttgtattttattataatttacacaaacaactgggtttgtgaactgtattactcctggtatctttaaaatattgtgggtgttttaataaattttatatttattttttgcactcaaaaaaaaaaaaaaaaaa

SEQ ID NO: 235681 - DNA, 651 bp, Homo Sapiens
gcttcattcaacactgtgtaaacaccaaagccttaacttagcaaacagttgttagaagtgggacactccaaccacattccaagctgagataaaatcaaatcacaaatgtttaaccactttgctgctgacttgagttatttatccaaatatattaactatagacttttaccaatgggtagctataaggttacagcttattttgtaactattttatatctcaatatctttaatataaatctttttactgagagatcattatagaaacatgttaaagttggttaggatcatatcttcacatatggccctttctgaatcaaagtgcggcaaagtaaatattgtctaagctttaatccactgtgttaggtcaaaacttcaaatacatgcatttttcaatatagggtatatttcttaactgatgagagaggcttagacatgagtgtgtagtcttccttcaatgcgtgtatgtaatctttgttagtataaaagatattaaatataggtgccaagaattaaatgtataatttgtttaataagagatggatatattaaaattacattcatcaaggcatgatttttgtttcactacaaataatgcaaactgttttcaataaaaagaggagactgttaatgtgtaaaaaaaaaaaaaaaaaa

SEQ ID NO: 235682 - DNA, 636 bp, Homo Sapiens
ccttgactcagcccatcatctgaaaattcagaagtgaaccaagggttagacgccagaggttgggcttctgttagagtggcttcaaaacatgagccttatgggaagtagccttaaaaaaagaatgggtatacgcagtgacttccgatggaaatctccaaaacaatattcctaagtagcaatggggttggctcaagtctttattaacaaagaacattctctttcatctataaagaaattcttaaagatgcattgacagtgttgaattaccaacagcctgtgaagatcagtttgaccggtgtggacacgtgctggttaagcactcaggcctacgtgggccgagcgggatcttgatcatggggctggtgtatggatccaccgtcggattccgtctgcagaggaggacgtagggggccgtcacacccaccaggcctccctgctgtgctttaacacaggcagaagaggttcatggcaatataatagtcaatgaactttcagtttaaattgtgtacatttttaaattgtaagatttttactgtatattgatgcatagtgtgattcaataaattgcttgtaatttaaaaactatttaatattcaaaataaatatagttatatatttataaaaaaaaaaaaaaaa

SEQ ID NO: 235683 - DNA, 637 bp, Homo Sapiens
  misc_feature (71)..(71): n is a, c, g, or t
ctttaatatgccaatgtgtgtggcaaacttacaagaagggagctaagtatccagcctctcccaaacctctntgaacaaagcttctgtccctcccacacctctcacctcacaggcacatcaggctgcagaatgcgctttagaaagcattgttttagtccaggcacagtggctcacgcctgtaatcccagcactttgggaggccgaggtgggtggatcacaaggttgggagattgagaccatcctggctaacacagtgaaaccctgtctctactaaaaaaatacaaaaaattagcttggcgtggtggtgggcgcctgtagtcccagcagcttgggaggctgaggctggagaatggtgtgaacccaggaggcggagcttgcagtgagccaagatcgcgccactgcactccagcccgggtgacagagcaagactccgtctcaaaaaaaagaaaagaaaaaagaaagcattgttttaattgagaggggcagggctggagaaggagcaagttgtggggagccaggcttccctcacgcagcctgtggtggatgtgggaaggagatcaacttctcctcactctgggacagacgatgtatggaaactaaaaagaacatgcggcaccttaaaaaaaaaaaaaaaaaa

SEQ ID NO: 235684 - DNA, 696 bp, Homo Sapiens
taggagagaaagactcctcataggaatactgaagaagtgggaagacccaagctgacacaggcctcactgcaatttgatatgcctgctgatcagagtctcttgggcattttatattttgcattctgatgtacctaggagttttgttaaacagatgatgtatgtgagtatttatcccattttatgcaattaaccaaatcaaccaaaaaaagtgaccatgaagtcctgtatttgtctttttactacatgtaggaactctcatgtgaatgagtactgtagtaatccattctatgggagccttatttcagaaatatttcaaactggtgcaaatggaaaagactttctcttttcctttaaagctaaagacaagaatatcatgctatacaggtgcaactcaatccccgttaataaaaaccaatgtaggtataggcattctaccctttgaaatagctgtgtcccaacctgttgccattgattttttggaaatggctttagaaatatccaagttgtccttgaattgtctaaccatggacataaacagttgtctcccttctactgtgtagaatactttgacttaattttcttccagatacagggggatacctgcctgtttttcaaagtgtttatttactgctgttactatttgattagaatgtattaaataaaaaaaacctgatttctaaaaaaaaaaaaaaaaaa

SEQ ID NO: 235685 - DNA, 673 bp, Homo Sapiens
ccaggccattaaaaacaacgctggcttccgcgtgtggatcctcttcttccctcgtgatgtgctccttctccttgctcttcctcgactggtacgacagctagccagggccacgggggcccagcacgagagtcctcatgggcactcacagactgcgtgctttcatgtacttccagtgctggagcatggtatgaccagattttatcacagtgccatttgaagggaaaggagttcagacagacagacgtattccccaaaaagggataccccaggccgatggtgttcagccatttagcagctgaaaaaggaaacagtgcacaccaatgggaggcagcctgcgtagccctcatcaggcaagacagactgaatgcaggagtgggtgattagctgctccttgaacttgaggctgccttggcagcaggggcacagcaggcctcaagagcccctaattgtctcagggttcaaaggaagacactgacctttcccatcccggtagcttcagggaagatcatagttaataacgtctctcaacaaatgattacttctttgtttccttgtggcttcttgtctgtctgagtcaacgaatacacagacttactggattatagaagagaaaattcacatctgccttgttaatctaataaatataattacagccaaaaaaaaaaaaaaaaaa

SEQ ID NO: 235686 - DNA, 723 bp, Homo Sapiens
agtcagcagagaaagagcagcccccagagagtggagagcgggctggagaagcagggtgcgccggccacttctgtcagtcagatgcttcaggaaagtcaagcatggtgagagaagaccttcaacttggcaatttcagttggtagagaagtgggcaaaggatgttggcctgggacctaaggaagggcttttttccccttaagaatttatgtaggccacagagaagacatccattgtgaagcagttgcgtgggttccagtgacagagatcctgggtttcatttgtatctgctcacctaatttttttccaaatcatttctcacagacccttcagcaatggctactagaaggacgaacaattgccctcctttggaagtacggctaatagaagccctagatccgaataagatccgaataagaatatgtaatggaccaggcgcagtgcctcacgcctgtcatcccagcactttgggaggctgaggcaggcggatcacttgatgccagaagtttgagaccagcccagccaacatggtgaaaccccgtctctactaaaaatacaaaaattacccaagcatggtggtgggcgcctgtaatcccagctactagggaggctgaggcaggagaatcgcttgaacccgggaggcagaggttgcagtgagccaagatcatgccactgtactctggcctgggcgacagagcaagactgtcgaaaaaaaaaaaaaaaaaa

SEQ ID NO: 235687 - DNA, 686 bp, Homo Sapiens
tagaaatgtaagaagaagcaagtggccagatgctccctcttgggcataaaatctcagaggaagctacttaggacatcatcttggccatgatcttctgggactcaccatctccagaatgaaaacaatttctacagtagacttaaggacagtttatgctgaaatggcaattcctcatttaagcaagttttcccaaccttcaggttggtcagccctcctgagcctcacaggtggataattgaggcctacaagagaggggagcctaggagcttggattgaccttctagtcaaccacctgacttcagcacaccattacaatcgggagactaaaccaacaaccagaggatctaaaatgtcacattcagattttcaggaagaaaatcttcattacagtggagcacaaatgttccatacaagacatcattgaggagccatgctgtccccttctaacctgaaacacattctttcccatcctggttgggcttctgtacctccttattaatttatgaacctgaagttgcttgaagtgttttgggcttaataaatggggtgaaagtataggtagcagtaacacctacatgaaacaatacaccttggatcttttaatctaaattacttttcttttttaagtctacttttaaaataaatacttctgtaaatattctgactgtaaaaaaaaaaaaaaaaaa

SEQ ID NO: 235688 - DNA, 674 bp, Homo Sapiens
aggcctttcagcaaccccactaatcaattattagatcctgccccaaggagcagtggcttgggggctggatttagggaggaaaacctgattaaactgttttgcttagtactggttacagctgtagctggagaagagtttataatcataaagtacatttttgttattaccttgtggattttaattatccatcttgtctaatcttgttctctgtcatcctagataatgaggtgtttgtgggagcagagctctgcacacaccaggggatgtaataaatgtttgcacttggcccagtatattatgaatgtggcacagtaaataaagtttgtgtacaaaatactagtttatttctatgggagccattatgttcaggatatataaaatgtatctaattaaacaattttgaatctattttgtgctctagaaatgttcttttggggaaagatggaaagaaatgtataaatggagttaagattaaagtatttggggttttttttccccaaaagcttcccagttgtttagaaataatactatccaaagtaggattcggtcctgtaagtcctaactgaatttcttttgtaaaactgatacgtttaaactgtacattgcataatcattctgttaaactaaacctttgtttaatacataattgtaagagcaaaaaaaaaaaaaaaaaa

SEQ ID NO: 235689 - DNA, 640 bp, Homo Sapiens
acacccctccccagctcccagagaggccccctgaggggtggccctctttccaccttcccctatccatgcaccccctcgcaataaaaccaactctaaaatcacagctgtcgtcctagccagtgggggcgaccggacttggggggtggagccctctgggacttccgtaggaacaagggctgcggcccaccgcgacacttacacagacctcggggattgcactaaaccctcgttcctagctccgcactcagcttcgcctgtcctgcccgcccactttgccttaactacccgcccgtcctgggggccacagcctctgcatgggcccagagccgggacccccccagcccagccccgccctccccagactccgcgcaatcacatactgtatatagacgtgaatcgattttatttttattctttaaattaaggtcgtgataaagtgttgccaaagatacctgctgaattctcgcgtttcaggaaacaaacaaacaaaaaaaaaatgatatttgaggagggtcgtgttgactccatatgaaaggacacagctcaaagcttttttgtttggttgtttggggttttttgtgttttctttttttggggtgttttttttttaactgccttgtacaaaaaaaaaaaaaaaaaa

SEQ ID NO: 235690 - DNA, 677 bp, Homo Sapiens
cgcgtgtgaaaaaaatgagaacttggctgccaacttcctcctgagtcagaactttgatgacgagtgatgccaggaagccaggccaccgaagcccccaccctacccttattccatgaaagttttataaaagaaaaaatatatatatattcatgtttatttaagaaatggaaaaaaaaatcaaaaatcttaaaaaaacaagcaaacagtccagcttcctgtcctcctaaagtggcccctgttcccatctcccgggccagacagctgtccccccgtcctcctccccagcccagcctgctcagagaagctggcaggactgggaggcgacagatgggcccctcttggcctctgtcccagctctctgcagccagacggaaaggcggctgcttgcctctccatcctccgaaaaacccctgaggacccccccccatcctcttctaggatgaggggaagctggagccccaactttgatcctccattggagtggcccaaatctttccatctagggcaagtcctgaaaggcccaaggccccctccccagtctggccttggcctccagcctggagaagggctaacatcagctcattgtcaaggccacccccaccccagaacagaaccgtgtctctgataaaggttttgaagtgaataaagttttaaaaactaaaaaaaaaaaaaaaaaa

SEQ ID NO: 235691 - DNA, 721 bp, Homo Sapiens
  misc_feature (144)..(144): n is a, c, g, or t
gaagacataagcagggcctcagctaacccacaaatagcacatgtgtgcaaactggaaaaatgaacccttcttctgggaggacgccagcccaggccaggtcacccggcttggccagcagaacacagagtggattttggtcccgtntgttccccagtggggtatctatccttgtgcagggcacaagcctacatggtggctctggtcatatcattagaaaatagacagaaatgggctgcacaccagaatgaatgaattgaattgaaagggaggagtgatggtggaaaaaaaaacaagtcaattcatttagactggtagaaccagaaccactgtgtagtacatccaaacggttaaaattccctggaagatgttacataatcctatcatggtgtttatttatggaaatctattttaaaaattttatgtaatactgcacagtctgtttgcatgatgccttgtacgtagtagcaactcagtaaatactttttgaatgaactagtatagtattttaattagctagtcttcatgtactggtacaaaagaacagtgtcatcttacagctgaagtcatagaggggaaatatcccactcaagatcatataacattccaggtactcaggatgaatggtttgaggactggtctgaattcttcaaaggtttcagctgtattaacattctccatctaataaactttatcttgtcattgcaaaaaaaaaaaaaaaaaa

SEQ ID NO: 235692 - DNA, 714 bp, Homo Sapiens
  misc_feature (85)..(85): n is a, c, g, or t
aaatcgagtggcatttacacacagcgccagtgcacacagcaagtgcacaggaagatgagtttggcccctaaccgctccgtgatcntaccaagtcacagacccttttcatcgtcccagaaacgtttcatcacgtctcttcccagtcgattcccgaccccacctttattttgatctccataaccattttgcctgttggagaacttcatatagaatggaatcaggctgggcgctgtggctcacgcctgcactttgggaggccgaggcgggcggattacttgaggataggagttccagaccagcgtggccaacgtggtgaatccccgtctctactaaaaaatacaaaaattagctgggcgtggtgggtgcctgtaatcccagctattcgggagggtgaggcaggagaatcgcttgaacccgggaggcagaggttgcagtgagccaagatcgtgccactacactccagcctgggcgacaagaacgaaactccgtctcaaaaaaaaggggggaatcatacattatgtgctcatttttgtcgggcttctgtccttcaatgtactgtctgacattcgttcatgttgtatatatcagtattttgctccttttcatttagtatagtccatcgattgtatatccgtccttttgatggccttttgagttgtttcccatttgcggttatgaaataaagctgctataaacaaaaaaaaaaaaaaaaaa

SEQ ID NO: 235693 - DNA, 730 bp, Homo Sapiens
gcagagctggagcccacagagcctgggcctcttgactgccgtgaggaacagtacccgtgcacccgcctctactccatacacaggccttgcaaacagtgtctcaacgaggtctgcttctacagcctccgccgtgtgtacgtcattaacaaggagatctgtgttcgtacagtgtgtgcccacgaggagctcctccgagctgacctctgtcgggacaagttctccaaatgtggcgtgatggccagcagcggcctgtgccaatccgtggcggcctcctgtgccaggagctgtgggagctgctagggtggtgctggcatcctgagtcctggccctcctgggatctggggccctcgggccctgcctgacctggtgcttttttccccatccccatgttccttttattctgtaaaaagttagtggactgcagccctgggggttgcaggctgcggtgcctcaggcccctccttcagcctgtggccacctctggggcacgatgggggctccccactgcccagtctgcccctcgggttgggggagtatcccaggcctctctgtgggacctgggcccctgacgggccttctcagcccgttttgaggacagacagtcccccgaggtaggctacatccccccaccccagctggtctgcttggatttcctacagcccccgtgggcatggaccacctttattttatacaaaattaaaaacaagtttttacaaaaaaaaaaaaaaaa

SEQ ID NO: 235694 - DNA, 753 bp, Homo Sapiens
  misc_feature (22)..(22): n is a, c, g, or t
aggcaggaggatcatttaagcncaggagtttcaggctgcagtgaattatgatactgctactgcactcccatctgggtgacagagtgagaacccatcctctaaaaaaaataaagatttgcctattctagacatttcttataaacagaaatatacagtattttgggactgctttttttcacttagcataatgtttttaaggttcatccatgttgtagcatgtataagtatttcatttcttttttgtccaaatcatattccattagaagtataaccatatttgatttatccatttatcgtttgataggcatttgggttgtttccacatttgcctactataaataatgctgctataaatattcacatacaagtttttctgtgaacacatgttttcatttctctccattattattataggctgaactgtggctccaccaaattcataatttgaagtcccaacccctagtatctcaggatgtaactgtatttaaagataaggtgtgtatagaggtggttatgctaaagtaaagctgctaggatgggggctctaatcccgtatgaatagtgtccttataaaaagccatcaggggcctgtccgcacagggaaacaccatgtgaggatacagaaaacaaccatctgcaagaaaggagagagatcttagaagaaaacagacctgccagcactgtaatcttcaactgccaggctccaaaactgtaataaataaatttctgttgtttaaaaaaaaaaaaaaaaaa

SEQ ID NO: 235695 - DNA, 682 bp, Homo Sapiens
ggacccggcgctggactcgctggcctacgagtacgagcgcgagggactgtacgagcaggccttccagctgctgcggcgcttcgtgcaggccgagggccgccgcgccacgctgcagcgcctggtggaggcactcgaggagaacgagctcaccagcctggcagaggacttgctgggcctgaccgatcccaatggcggcctggcctagaccaggggtgcagccagcttttggagaacctggatggccttagggttccttctgcggctattgctgaacccctgtccatccacgggaccctgaaactccacttggcctatctgctggacctgctggggcagagttgattgccttccccaggagccagaccactgggggtgcatcattggggattctgcctcaggtactttgatagagtgtggggtgggggggacctgctttggagatcagcctcaccttctcccatcccagaagcggggcttacagccagcccttacagtttcactcatgaagcaccttgatctttggtgtcctggacttcatcctgggtgctgcagatactgcagtgaagtaaaacaggaatcaatcttgcctgcccccagctcacactcagcgtgggaccccgaatgttaagcaatgataataaagtataacacggattttgatgtgagaaaaaaaaaaaaaaaa

SEQ ID NO: 235696 - DNA, 752 bp, Homo Sapiens
  misc_feature (62)..(62): n is a, c, g, or t
tctcagcagaagcggtatgttccagtaaaaggagaccatgtgattggcatagtgacagctanatctggagatatattcaaagttgatgttggagggagtgagccagcttctttgtcttacttgtcatttgaaggtgcaactaaaagaaacagaccaaatgtgcaggttggagatctcatctatggccaatttgtggttgctaataaagacatggaaccagagatggtctgtattgacagctgtggacgagccaatggaatgggtgtcattggacaggatggtctgctttttaaagtgactctgggcttaattagaaagctattagctccagattgtgaaatcatacaggaagtgggaaaactctatccactggagatagtatttggaatgaatggaagaatatgggttaaggcaaaaaccatccagcagactttaattttggcaaacattttagaagcttgtgaacacatgacgtcagatcaaagaaaacagatcttctccagattggcagaaagttgatataggtggacttttttacaggtcagttgaggcaaaaaactatgggttttttcaggtgaacctcccccatttaaatactcagaagataaggtgtgaatgtatgtattattagagtccgaaagtatttttataagttactggttttcacccacgcttttgtgggagagaaaatcattgcaaaatcattttttttgttcggtacaataaagtttactaaaaaacaaaaaaaaaaa

SEQ ID NO: 235697 - DNA, 639 bp, Homo Sapiens
tgcccgagcccagcgagcaggagggtgagagtggaaggccagccaggagccatcccccaagccaggcacagaagtcatcccggcagcccccaggaagcccagaaagttctccaaactggtcctgctcacagcctccaaagacagcaccaaggtggcgggggccaagcgcaagggtgtgcactgtgtcatgtccctgggggtgcccggccccgccacccttgccaaggccctcctccagacccaccccgaggcccagcgggccattgaggcagcccctcaggagcctgagcagaaacggagcaggcaggacccaggcacagacagaacagaagacagtggattagcagcggggcctcctgaggctgctggggagaactttgccccctgctttgtggcgcccggcaagtccctgtaaccttgacaacaggggcatcctcccaggccaccaacccagccataggcttttttctgtccgcagggcttttggggccaaatgggtgaatctttgctttcaacattgtgtgatttcttttcttttttttttttttttttagatcaagtataagttacttttgtaagcagaaaaatactttcaaacaagaataaaagaagctgttcgctaaaaaaaaaaaaaaaaaa

SEQ ID NO: 235698 - DNA, 729 bp, Homo Sapiens
  misc_feature (12)..(12): n is a, c, g, or t
gcagtgcagcanatgtctctgtatccggaacttattgctagcattttatatcaagccactggtagcaatgagattattgagccagtgtatttctatattggcattgtttttggattgcaaggaatatatgttactgctttatttgttacaagttggcttatgagtggaacatggctagcaggaatgcttactgttgcgtggttcgttattaacagttgcacagacccctggtacagtgtgggaggtgacaacacaggatattaataccaggaggcaggaatcattgggaccgtcttggaggctggctaccacattcaattaactttgctattaatttcatgtaatccctatatctgtcttcatatttgaagaggaaaagatactttctcatgtaaacataatggttttaaagaataagactctcttatgctacttaaacaaaagaataagactctctttagagatcttagtgagaattgtaagaaataaaataaacagaagtctgactgccttatttgatgtcactgatgtatgttgtattgctggagtagaagttaaatagaaaaattgacctggtatattctactcaaatgtatcttttgacaattgaaatgttcttaatagctaagttttaaaaaatgcgtttgtttgctttttgtttatattttattggtatgtatcttgtactgcaaaatacattctaatgccatgaaagaaaaaaaaaaaaaa

SEQ ID NO: 235699 - DNA, 683 bp, Homo Sapiens
accctcgttcaagaactgaaagaagagacatcctccagactctccaggcaacaagaggagctggtagagatgctaacaacgctggaggccctgggagaggccatgagagccaccccgtcacaaggagcttttccacacctgccatgcagctgagagccaagccctgctgctctctcccccacgagggggctgggtcttagagcagcactgttcttttcccctccacccaggcctcccgagctgccaggctctgtgctcccacactgactccatctgaggggtccttgaggccagtggatctggagtaccccgcccctggcctggagttcctcctccttctcacgctgacactgcagccagctcctcaatgggcggtgcctccaaatctaaagaatatggaggtcctggagcacaccaagaaatgagggactttttctttgcagaaagtttgaattctgtcttaatgagacagaatgccatacttgagcacctcatcttttgctcaaattgaaatgtcatcgaactgtatttctcaagtcaatggtctgtaaatatgatttatgtattaatctcctaagtgaacaatttatattttatcctctacataattatcgtattatgctttaaatatatatttagtttatcaataaagacattcagtactcaaaaaaaaaaaaaaaaaa

SEQ ID NO: 235700 - DNA, 678 bp, Homo Sapiens
cagaggcaattattatcccgactgcaaatcgacccagtaatggcagaaactctgcagatgagtcaagctgagatgagtgaactgagtgtggcacagaaaccagaaaaacttttggagcgctgcaagtactggcctgcttgtaaaaatggggatgagtgtgcctaccatcaccccatctcaccctgcaaagccttccccaattgtaaatttgctgaaaaatgtttgtttgttcacccaaattgtaaatatgatgcaaagtgtactaaaccagattgtcccttcactcatgtgagtagaagaattccagtactgtctccaaaaccagttgcaccaccagcaccaccttccagtagtcagctctgccgttacttccctgcttgtaagaagatggaatgtcccttctatcatccaaaacattgtaggtttaacactcaatgtacaagaccggactgcacattctaccatcccaccattaatgtcccaccacgacatgccttgaaatggattcgacctcaaaccagcgaatagcacccagtcctgcctggcagaagatcatgcagtttggaagttttcatgtactgatgaaagatactctacagaacttgtcaaatctttgaaacttggaatatattgctttcataatatgaagttttattgcctaaaaaaaaaaaaaaaaaa

SEQ ID NO: 235701 - DNA, 601 bp, Homo Sapiens
  misc_feature (11)..(11): n is a, c, g, or t
  misc_feature (86)..(86): n is a, c, g, or t
  misc_feature (127)..(127): n is a, c, g, or t
ggagacaggcncaggtatgaatgagccagccatgcttcctcctgcctgtgtgacgctgggcgagtctcttcccctgtctgggccanacagggagcgggtaagacaatccatgctctaagatccattntagatcaatgtctaaaatagctctatcgctctgcggagtcccagcagaggctatggaatgtttctgcaaccctaaggcacagagagcccaaccctgagtgtctcagaggccccctgagtgttccccttggcctgagccccttacccattcctgcagccagtgagagacctggcctcagccctggcagggctctctcttcaaggccatatccacctgtgccctggggcttgggagaccccatagggccgggactcttgggtcagcccggccactggcttctctctttttctccgtttcattctgtgtgcgttgtggggtgggggagggggtccacctgccttacctttctgagttgcctttagagagatgcgtttttctaggactctgtgcaactgtcgtatatggtcccgtgggctgaccgctttgtacatgagaataaatctatttctttctaccaaaaaaaaaaaaaaaaaa

SEQ ID NO: 235702 - DNA, 720 bp, Homo Sapiens
aggagacatgcgtttcagctggagttgttacaaagtttagctggaggtttccttttcctttggtcttttcccagttcctctggcaaccctccccaaggatccttcctaggcaaggcagaaatggcttccttgtggatccagagagcccacagggcttttcccactgcttcctctgccccagtatttcactcggctctctaaactgactcagctccaggaaatattgaaaatggacatgtgaagctcattgttatacatttaaaaaataacagagaacacctacctcttattggaaaagttggcctctcgtggaaaactgatatttttgatggctgtataaagagttgttccatgatggacgtaactcttttggatgaacatgggaaacccttttggtgtttcagttccccggtgtgcctgagatcgcctgccacaccctctgacagctctagcttcttgggacagacatacaacgtggactacgttgatgcggaaggaagagtgcacgtggagctggtgtggatcagagagaccgaagaataccttattgtcaacctggtcctttatcttagtatcgcaaaaatcaaccattggtttgggactgaatattagcagtaggtggcaaattattgttgttatttagttgtttatttttgactggctttgttcttggtgttgaaaattaaaataaagcaaatctgcaaaaaaaaaaaaaaaaaa

SEQ ID NO: 235703 - DNA, 666 bp, Homo Sapiens
aggtgtgtgaacgctactattttaaattttcttttttaagatggcatttattttgttccagaaaagcgcctgatgtagaccctccctctgagaatagccgtggagccatgtagagaggtgtagctcagcacatctcaactaccagtcagcttccctttgagaacttctgtgctcacttcctgttttcagagattccagggcaggggaaaaaaaaaatcagttgaacttcaaacctcctagaggagattgtaaaggcatagagttgaggtgaatagttttgttagaaccttataaaaataaaatgcaagaaaataatatgaagaaatcacatatatatgtttgaattagatgtctgtttgaattagatccttggggaatttcttcaaactagttctggttcttatatttgttttttttcctttaaggaactttctgaaggaagttagactgcgatggtaaagggggaaatgggttaatgagattgcaggcattttctatattctttttggcataagcacttatgtccctgatatgtacaaattcaaaggaggtggttaataactttagtaaataatatattgtcgcatttaatgatgtggagggctaaggtcattacggactttaaataaactacttatatggctggttaaaaaaaaaaaaaaaaaa

SEQ ID NO: 235704 - DNA, 671 bp, Homo Sapiens
  misc_feature (149)..(149): n is a, c, g, or t
acgcaccggatgaaatccagagcctcatccagtgtaacatcacctccgtagtcaagatgacacagctaattctgaaacatatggaatcaaggcagaaaggtctcatcctgaacatttcttctgggatagccctgtttccttggcctctntactccatgtactcagcttccaaggcgtttgtgtgcgcattttccaaggccctgcaagaggaatataaagcaaaagaagtcatcatccaggtgctgaccccatatgctgtctcgactgcaatgacaaagtatctaaatacaaatgtgataaccaagactgctgatgagtttgtcaaagagtcattgaattatgtcacaattggaggtgaaacctgtggctgccttgcccatgaaatcttggcgggctttctgagcctgatcccggcctgggccttctacagcggtgccttccaaaggctgctcctgacacactatgtggcatacctgaagctcaacaccaaggtcaggtagccaggcggtgaggagtccagcacaaccttttcctcaccagtcccatgctggctgaagaggaccagaggagcagaccagcacttcaacctagtccgctgaagatggagggggctggggtcacagaggcatagaatacacattttttgccactttaaaaaaaaaaaaaaaaaa

SEQ ID NO: 235705 - DNA, 643 bp, Homo Sapiens
  misc_feature (10)..(10): n is a, c, g, or t
  misc_feature (15)..(15): n is a, c, g, or t
ctggaccaanagggngaagcaggactagatggagcaaaaggagagaaagcttccagggagaaaaaggagaccgtggtcccctgggactacccggagcttcaggtttggacggcaggcctgggccaccgggtactccaggaccaattggagttccaggcccagcgggaccaaagggcgagaggggcagcaaaggagaccctgggatgacaggaccaacgggagcagctgggcttcctggtttacatggaccacccggggacaagggaaaccggggggagagggggaagaaaggctctagagggcctaaaggggataagggagaccaaggagcgcctggattagatgccccctgcccattgggcgaagatggcttaccagtccaaggctgctggaacaagtgatgcctctaaccttggattggcctgtgtgtgtgtttgtacatagaatatttatttttatacagttttcactttttgaaaatgccagaagtatgatgcatcttacagattattaaaaaagaaagaaaaacctgcatattttgtacagaaaatatcaacctcttcccttttgtttacaagatgttttgtataagcctatgtctctaatacattttttgtttggtcgtaaaaaaaaaaaaaaaaaa

SEQ ID NO: 235706 - DNA, 767 bp, Homo Sapiens
  misc_feature (191)..(191): n is a, c, g, or t
gaaaggtgaggaggacgctcccttcgagggtggagagagtaagactgcatttgcacatgggtgggggggcccgtcgaggcccctctttgcttctgagagtctgttttcatcgacagtcttctactaaatgtacatagcagcttttcagggcaagggtcaccgggattcgtctttatgcctccccagcccgngagccaccacctccaccagacccatccacacagttgaatcttatcttaagttctctggtgcccgaccccccacgcacaccgtgctggtctgggcatctcacctgcatccgcacaagtgcctcaggagggtggagtgtctggtgctcggcgctggaggctcagcccacactgtgccgggcagtcgcaggcctcccagatgaatgaagcatgaatgaatcccgatcctgttatcacagcttctccccacgcatcccaggcagaatgttgtgcaaaaaccacaccaggattcgtacatgccagaggactgaacttctgcgtgttgcagataattcatcttcctgaatcactgtggatctaccatgtggttaaccacggaataaacatgggggagagcgtaagcgctgtcctagcagaaacttatgcttcttccgttacccttaaaaagtaaagggtacggatttcataattgtgtttctcttgtaaatgagactctcatggaaaaatcagccatgtaggcgatagatttgtatacctttagattaaaatgtcacttcgattaaaaaaaaaaaaaaaaaa

SEQ ID NO: 235707 - DNA, 749 bp, Homo Sapiens
  misc_feature (52)..(52): n is a, c, g, or t
gaaaaagtgactcacccctcatttccagagtgtaggcaattatgtcctgctntgataaaactgctagaggatggctatgcaaaagcataacgattcaaggaaacaaagtacaggtagtttttgagctgacagcagcaaaggcaccataagtcaaaatattggttttggtggagatgatcgatgtgtgtgtgtgagagagagctatgtttctaaccaagggcctaatgtttgttacagaaatgatcccagagacctacaagatgtgggaatcagcataacagggcaatgcagcaattaaccccacatcgttttctgtagttcctttttgtttcattttcttctgtctcacctcgttagaaaattcctcccagtcaggggtcgtccagtgcaggacgggggacccaagggtctcaagcctgcaagtccagaaggtgacaaacccaggagcactgggagttaagctttccttggggagggaagagccttgatgtccagcacacagcctggctataaagacacgaagcgacctacccactgtacagtccacttcacaggatcagctgaatcatgacctttaaaagttccgagttgaaactgaaggctctcctcagacctggctttttcctcagtccctgttcataccatctctgcacccacaatcacactgatttttcaaattcattttgtttttgctgtttcatttctggcattaataaaagtcttataaggagaaaaaaaaaaaaaaaaaa

SEQ ID NO: 235708 - DNA, 748 bp, Homo Sapiens
  misc_feature (13)..(13): n is a, c, g, or t
  misc_feature (75)..(75): n is a, c, g, or t
  misc_feature (100)..(100): n is a, c, g, or t
gaaaaagccatgnggaacgaaatgtctgctcatcagtacctggcaaaccttgttggcctggcagaaaatataacncaggaacgtgacagtcttatgtgtntggcaaaatgtttagaaagtgagaaggatggagtgcttaataaagtcataaaaagcaacattcgcctgggaaagttagaggaaaaagtcaagggctacaagaagcaggcagcactgaagctgggggacatcagtcaccgtctgctggagcagcaggaggacttcgccggcaagacagcccagtaccggcaggagatgcggcacctgcaccaggtgctgaaggacaagcaggaggtgctggaccaggcgctgcagcagaacagagaaatggaaggtgaacttgaagttatttgggaatctaccttcagggaaaaccgaagaatccgagaacttctccaggacacactcacgaggacaggcgtgcaggacaaccccagagctctggttgcccccagcctcaatggcgtctctcaggcagacctgctggacggctgcgatgtctgctcctatgacctgaagtctcatgcccccacctgctagaatctgcgggagcccgtggtgtagcctcctctggcctgaaaggtctgcctcacacaggccttccctgcagggcagcccatggtggcagccggaggtgcgtaagcccactgaacgctgcagggcagggaagaaataaatggtctcatagtttaaaaaaaaaaaaaaaaaa

SEQ ID NO: 235709 - DNA, 792 bp, Homo Sapiens
  misc_feature (18)..(18): n is a, c, g, or t
  misc_feature (169)..(169): n is a, c, g, or t
ctcaaagtgtgtgttgtntatacagtcattgaaggctcagagatattactctcacagcgcctatataaatagttctgtaatcagatcaacagtataattgtttattccagtgtaaaataaacaagtggaaatatctccacagaaaccagaaagacacaattacatagtntgaaggaggcaattagaatccagcaaaccagtgggtttgttaaaagcctatttcttgactgtcagcctgttctcttgaaactacaatatatgttgctttaaggtatctttaaacaagtaactattttctcttagctggtagtggatgataattccattttagaaatacttctctacaactatcctctctcaactctgaggctcctagataaacaataattttatccatgtcaaaaataaactaagaaacaatccgaataaattataataaatacctttactagttgtaaaattttaatacctcaggaaataccacagtgttcccactaatgctattttttaattttttaatttagtttgtcataatttggtttcatcaactcctttgttttttccttctttttttttttttgagatgaggtctcactatcttgcccagactggtttcgaattgccctccagcaattctcccacctcagccttcagagtagctggcattgtgggtaggcaccactgtgcccagctcctgttttataataaataagccagagctctatctccaaatggtgcaaatcatcaatgctattaaaacaagaatggaaaagcaaaaaaaaaaaaaaaaaa

SEQ ID NO: 235710 - DNA, 765 bp, Homo Sapiens
gagacggagtccactctgtcgccaggctggagtgaagtgtacaatcttggctcactgcaacctccacctcccgggttcaagcaattctcctgaggcaggagaatcgcttgaacctgggaggcagcggttgcagtaagccaagactatgccactgcactcccgcctgggtgacaaagcaatattctgtgtcaaataaataaattcattcttctgctctcctgacttagagaaatggtttgcttaaaatgctagtaacaaacatcacagtcaacaggagcttgcttcatgcgaaggatcaatgtgatttgtggatggagatgatagtgatgaaattcctgtttcatggggctgtttttcttttcatctcactgggcagcaggtttagtgaggcagtgagatgctgctgctgtggattcttgtagctatgcctcggcttcttggcatatcaggtaggaacctgttacaagtgaaatacttgaaacctctctgaccaagagcctctgatggagtgggaggtgagctaattctctgaccagcttagggcactgtttcagccactggtcacattccttgcttcaaactgaaattcagtttggctttgagtatagggatacatggtggattcatgtacttcagtgtttgttttgaccaaagtttatttttctagtgcattttctaagtcaaagtggtgaaaatatgtaataattttagtatgcatgactcagtctgaaacaataaaaatctctgaaaaaaaaaaaaaaaaaa

SEQ ID NO: 235711 - DNA, 758 bp, Homo Sapiens
aagccaggtatcgcacttcagcagacagtgtgctgacacttgtcttctcctgaaattcccaaattcactgaatggtaccatgccgatctctgagaagttatgttgcaccactgtgaaggtctagatgcaagcttggctccctcagaaaggcgcttcccttttgcatggctgaggatccttgaaggaacctggtcagtctccggttcagcttccgacaccagagtggaacccagtaagcaccatcaggaatgaatttcactacaagtgtggataactctgattttcaaaggagtagttacttgcaaattacatccttgctgaattcaggaggtatgaaaccctattttaccatgttagaaaacagcccaggattttctcattgctctgccatcatatatgtctatgacttgagcccttatttttccatctgcaaaacaataatgcctatgtgtctttgcatatagatttgaaatcttcattcaaggtttagtaggatcatattttctcaaaaataagagaaataaggttcataagcaaacttgctgggattgtggttgttttgttttctcagcagcacaaacaaaaccagaatttagcctttaggactgctgagtaagccaaatttaaatgactactgctttgttcatgggtaagccatgtgcttttcaaaataagtgccactaaaaaccacataatgctttggtttctatgtggataataaatatttagtcctatagtttaaaaaaaaaaaaaaaaaa

SEQ ID NO: 235712 - DNA, 737 bp, Homo Sapiens
atccatatctttagctatgacacttaaaacactagatgaacaccgtgacaaagctgtcactcagcttggctcgatgctttttaccagacaggtttctggagccagggttgtgcctcttgggtccatgcaaactgtgagtggctatactttcagaggctttatgtcacatacaaataattacccttgtgcttacctcaatgctgcatcagccatcggaatgaagatgcaggatgtggacctgttcataaagagacttgacaggtgtttaaaggcagtaagaaaagaacgaagtaaagagagtgatgacaattatgacaaaactgaagatgtggatattgaagaaatggctttaaaactagataatgtacttcttgacacataccaggatgcttcttcatgacatgcgaagggtttcttcttgatcatttgaaagaaatgataaggctgtagtacaagcaagcagtttaaagataagacttgagatttttgaattgagaatttcatgggaatattcagtcaaggagcagactttggtctgaactagccattgatgattgttaagtttcccattcttagactgcatcaatccttgtgatccttaacaggttataatatacaattagcatttttctaattgttagaatatctgtcaattaagcatcatgactcagataatttttactagtgtaatgacagtaaaattacttcaattctctttgaaaaaaaaaaaaaaaaaa

SEQ ID NO: 235713 - DNA, 672 bp, Homo Sapiens
  misc_feature (24)..(24): n is a, c, g, or t
ttcggcacgaggagaatttagggngacagaattcagcccgtagcagctgggcagcaggactcatgggtcccagttctcaggccccaaggactcagagcagcaaaggatacgtgacacaagcagggctgaactggacaccagactttctttggggttgtaaaaggagaagtgtgactccactgccaagggtaagcactcttgtcttatgctaccctttattcttgaaccttggggcagcctgtgtctcccttccctaaacgtcatctgttccgtttttccagtcttccagacctggtccttggactggagaccttcacccttcctattttgtggctttctcttcaaatccacctcgtccttcctccatgacttataagtcatcatctctgctggtttctgaaatgagatatgcttcttggggtcttcagtgaagaggaatagcaagtgaaaggaggatggtggcagggtacatgaacccctaccaggcttctaggcttcccctgcatggcagccagcctctaagttggcccccaaccatccctgccttcttctattcacacccttgtgtggttccttcccacattgaataggcctgacttgtgtaaccactacactattgaagaaatgagagtttgacttctgagggtaagtcataaaataaaaaaaaaaaaa

SEQ ID NO: 235714 - DNA, 711 bp, Homo Sapiens
gcatctcccgcttccagagcagatccacaaagcctcagccaccatcatcgagccagcgggcgagtcagacaaccctttgcggtttacctctgggttggtggttgccctggatgttgatgcaaccctggagcatgtgcaggatcctcagaacactgttaaggtccaggtcttatatccagatggccaggctcagatgattcaccccaagcctgcagacttccggaatcctggcccagggcggcaccggctcatcactcaggtttatctctcccacaccgcttggacagaggcatgccaggtggaagtgaggctgctgctggcctacaactccagtgctcgcattccaaaatgcccctggatggagggtggtgagatgtcaccacaggtggaaaccagcatcgagggcaccattcccttcagcaagcctgtaaaagtttatataatgcccaaacctgcacggcgctaaggcaaaaacagtcttcccaaccgtggcctagagggcccttcttaggtgtcagaatgagccaagcctgaagcacttcacctggaattgatgtgtaggcttaaggagtatgtgacccttacagtctcatctggtatcaaacacaggataaattgtttcttcattaaaaaataaaaaaccttcaagtctacttacccttctcctgtccacaataaagttgagaaaacaccaaaaaaaaaaaaaaaaaa

SEQ ID NO: 235715 - DNA, 774 bp, Homo Sapiens
gctactgatgtcaagtgggatgagtgtgataaatgatatatttgttgttgctgggtgttcatggagatgttaagagattgaggccctgggctgagggtatataatgtatgtcaggtaaagtttgaagactgccaaggagcagattttctccctggaaatgtgaaaactgaacctataactctgataaggacttgagatgtgtagaaacgttgggttatggaagactagtttcttccataaccctgaattggagaccttaatgctaagtgtagattattgaggtttgttagtgaggaaaagaataagagttcagaagcctttgttatcagatagcgaaatcagggcctagtgaggagcacaggtcgactacataatggagtccattggcgaaccctattgcaatttggtccaactatatcttctggtgaaggaaattaatgatgtaagaaaatgcaagaggctcaacttctcttccaaaaatcttctggcttctgaactcttcctctgcctctctttaaataaataacacagaatttcaagtggtaggagacttattaagccagtcaccaagcttggtctgtcagcctgtcttctaacacctcaaagatcttgtgccctgtgctgtccctcccttgtaattatgaaaagttctttggtttctggggtgaattctacccatgtataatgaggaattctctcataaccttttttgtcttgtctgtcatctctgttcatcccttcctataacctctaggtaaaaaaaaaaaaaaaaaa

SEQ ID NO: 235716 - DNA, 771 bp, Homo Sapiens
gaaatggctcgattttattctccagccaccatatttattgatgagatagactccatctgtagtcgccgagggacttctgaagaacatgaagcaagcagaagggtgaaagcggagctgctggttcagatggatggtgttggaggtacttctgaaaatgatgacccttccaaaatggttatggttctggcagctactaattttccctgggatatagatgaggctttaagacgacgccttgagaaacgaatctatattcctttgccgtcagcaaaaggcagggaggagctattacgaataagtctacgtgagttggaattggctgatgatgttgaccttgcaagtatagcagaaaacatggaaggttattcaggtgcggacattaccaacgtgtgcagggatgcgtccttgatggcaatgagaaggcgcattgaaggtttgactccagaggaaatccgaaatctttccaaagaagaaatgcacatgcctacaactatggaggatttcgagatggctttaaaaaaggtttctaagtcagtgtctgctgcagacattgaaagatacgagaaatggatatttgagtttggatcatgctaaattctcacatgtaaactgtgagaaatgtgccttaagtgtttgaatattaaatgcagtaattcattgtactgagtgctatattttttttaactttcataatggtaagatttttttaaaaaaacccttatgattctgaataaaggcaatatttttaagctgaaaaaaaaaaaaaaaaaa

SEQ ID NO: 235717 - DNA, 705 bp, Homo Sapiens
tcagaaaatcactcaactaagaggccaggagagccaaaagttgccctccgcagtttcaaattggcccgggtgatcttcaaccgggacggctgctccgtcttacagaggcattccagggacacccacttctacccactggaggaaggaagtacatctttggatgatgaaaagccaaacccaggactgtcaaaggatattactcatttcctcttgcagcagaatgtaatgaaagacctgtaactggtgccgggcagtgtgcagggtagtaatggaggtgctgtgccatgaccagcagtgttggtggccacccagatcccctagggtctctggccagctctgtgtgcccaatcccaattaagtgctttgaggttaaaggctggcacctgtgacctggtattggagccagtcagcccatatggagagccagcagggtctgggagttctccgtcctcttggccaaggccgctgactgactgggctacgagtcaaaagcccagctcccttgcctcaaggaaggacattctctgaggagtaatttatgctctagcactccctttcctctagatcggcctgaggctgggacattacatgaaatcacacccttgctgggcttaatccctttccctaccctcccatttatttactggtgtctctgggagcctttccttaataaacctcttatatctgaaaaaaaaaaaaaaaaaa

SEQ ID NO: 235718 - DNA, 703 bp, Homo Sapiens
acatggaggaagatgattcagtggtggggaaaatgaacctcggtaacatttccaatgtccttcaagagggaaacaagttcagtgttatcatcgtggcattcgttagtttttttttttttaaatcacttgtttagatacaactttatttttttatacctacatagcacatgactggggggataaagcatgtataagttgggagagggtaaagaatgtgtgactatgtatacagaaaatagactaaaatgtgcagcaaaatgatatatactgtaatctggtttttgaagtatctactattctggaatattgttaaacaactttttgcttttgaaaaaaaaaggtgccttgattcagttgcgtgacttagaacattcatcctattttattgtgatttttaatgtcttctgaccccaaactgtgtttttggttgcagtctggcggctgcaggcatagcgtcggttttgttccaataacagagaccaaagagttaatcagatatggttcagctgctacaattgtatgattcaaaggcaatttaatcaccccaaatttccatggcccccacagtcaagacctgccattcgttttctcttgcaggttggagtaaatttgcactttgaatcatgtgggtcatttggggaccttgttcttttctattttgctttattaataaaggaacttgtagaaaaaaaaaaaaaaaaaa

SEQ ID NO: 235719 - DNA, 524 bp, Homo Sapiens
ggcacgagggttaccattagctgtaggtgttttgtgtatgccctttaaaaattattttattttttgtagagaagggtcttgctatgttgcccacactggtcttgaactcctgggctcaagcgatccgcccatcttgtcctcccaaagtctgggattataggcatgagctactgctcctggcctatggatgccctttatcagtttcaggaattcccttctattcctaattggctgagaggtttattttcctttcatgaataggtattaaattttgtcaaatgctttttctgcatctattgagatggtgatatgggttttgtcttatagcctgttagtatagtaaattatattgattgattttaaaatattaagccaaccttgtattcctgggatgaaactaacttggtcatggtgcattattgtttgtatttactactgtattcattttgctaaattttaaaaggatttttgaaaaaaataaagaggattttgtgtctagatccatgaaaaaaaaaaaaaaaaaa

SEQ ID NO: 235720 - DNA, 661 bp, Homo Sapiens
catcttgcaaagtgccatcagtaagcatttggttgggttgactgtaattcctgacagcacggctggctgtgtttttggtgttatctgtaagctcctggatcatacttgtgtagttagtgagactctactgccatttctggcttcttgttgctacagtcttctttattttctgctcactatagagaaaggggaagcagaacatctaagaaagagggacaagctgtggggggtctgtgtctccatcctggctctcttgcctcgagtcctcaggttgatgctgcagagcctgcgggtgaacagagttgggcctgaggagctgcctgttgtgggccagctgcttcgactgctgcttcagcatgcacccctcaggactcatatgttgaccaatgcgatcttggtgcagcagatcatcaagaatatcacgacattgaagagtggaagtgttcaggaacagtggctcacagacttacattactgctttaacgtgtatatcactgggcatccccaagggcccagtgcactggctacagtgtattgaagaggccatagtacctcctgtttgaagttgtttattcacatctatcttatttgaagaaaaagactgatgtaatagatctttgtcattaaagctgaactttcaaagaaaaaaaaaaaaaaaaaa

SEQ ID NO: 235721 - DNA, 694 bp, Homo Sapiens
  misc_feature (20)..(20): n is a, c, g, or t
caccccaacttggcagcttnttctgtggaggacagacggccggccggacctctgagcacatagtgtcctgcccaccctaccagctcctccagccctgccgggcacatgcccgggggacgcctgccctgcccaggtggcctcctggcctgccctcacctctgatagactttgtgaatctgaactgctctactttgagaagatgaccggtttggagtaatcagaatgaaccctcctcctttttaagggttttttttttttcctttttctaaaaagctatgtatcgctcctattgaaagaccagatccttaaagaagtttgtggtataaaaagaaagtggggacagattcgcagcacagagtcgctggcatgtttcactcctgcttctctcagccagctgtttaagcctgcggcgccagcctcacggagggccgtgtgacactctcgtggtatgtatgggagacggcagcagtgaagcagcagccaccagggagtggccatttggggttgggacagggagggtgttttgggtggcatagaggttttgtattgagggccagtgatgatgttttgatatttatttcctgctacttaaatttgaatctgagtgaattgtacctatttctgatgatgtcggtcttgcaaagcgacagattcataaagtaatgatgaaatctttaaaaaaaaaaaaaaaaaa

SEQ ID NO: 235722 - DNA, 694 bp, Homo Sapiens
  misc_feature (15)..(15): n is a, c, g, or t
  misc_feature (34)..(34): n is a, c, g, or t
cgtgtagagttttgntcatcagacaaggacttgnatcctgtcccctttggcatgcgggaagcagccgcggggaggtaatgaattgtctgtggtatcatgtcagcagagtctccaagccccacgaaccctgaggagtggagtcatacgcgaaggccatatggccatcgtgtcagcagagagagtctctgtacacagccccgtgaaccctgaggagtggagtcatacacgaagggcgtgtggccatcgtgtcagcagagagagtctctgtacacagccccgtgaaccctgaggagtggagtcatacgcgaagggtgtgtggccaggctgcagagctgcgtgccgtttgtgtccgagcatcacgtgtggctccagcccttgtttctgccagtgtagacacctctgtctgccccactgtcctggggtcgctcttgggaggcacaggcatgggtgtgtctggcctcattctgtatcagtccagtgtgttcctgtcatagtttgtgtctcccaggcaggccatggtaggggcctcgcaggggccattggggagcacagggccaggctggggtgaggagagctcccctgttttctgtttaattgatgagcctgggaaaggagtgtgttctgcctgcccgttacagtggagcgttccgtgtccataaaacgttttctaactgggaaaaaaaaaaaaaaaaaa

SEQ ID NO: 235723 - DNA, 697 bp, Homo Sapiens
  misc_feature (46)..(46): n is a, c, g, or t
  misc_feature (50)..(50): n is a, c, g, or t
  misc_feature (99)..(99): n is a, c, g, or t
attcagtggactataataatagtggagggttgagatgtagagtttntaanaagtgaacagttgctgttcttacatctgtaaagaaaaccataatgtctntaaatcactcttctgtaaatagatgacctttttgcagtgtatatccccttgctgtagtatctggtgtacttatgttcaaatcagcgcatcaactttgggggtgatttttaaaaatctttttgtctatctatctttttaaccctagccttctaaacaacctcatacagcccagttacataatgttggctgtcacgggcattgtacttttatctgatattgtttcctctaaattcagctttccagtgatgtttaaaatcttgtgaaaatgtttagatttttaacacagaccctgtcataaaatctgtacattagggtcaaaaggtaaaagtaacaaattctgccatattgtaaatttccagtgcaggctttaatttttttttttcattagtagcactgaaaaaatattactgcatgggtatgttctagttcagtttataaagttttaaaggcttatttgaggcatacctcactgttacgcacactggtaatttaaccatgcccctaagtattccttttctcctgcatttgatgcagcccaacaaagcttttgttttgaaataaatttgactaccctgtccataaaaaaaaaaaaaaaaaa

SEQ ID NO: 235724 - DNA, 756 bp, Homo Sapiens
  misc_feature (46)..(46): n is a, c, g, or t
aatgctgttgttagtctcaggtgcccaaagtggtatagtcaatttntgtactaggaaaggcacccaatgcatttcctgacttttaagcatttccttgttggaagcagcagagggccaggccaagttgctgacagtgactttgcaggttgaataaagaaacccttggaggggaagcaggcttgtctgaagcagcatgtatattcactgggcatgtagctcccacaccagccttgagccaggccctggacaggaggggctgttgcaggatgagggaggccagagaaggcatcgaagccaagacctgggcccagctggggagggatgtgggaaaggaaggatgggagggaggaccctctgggaaaatgtggatttgagctggtgagagtgttgctaaggctgggctaaagcctggagagggtaggaggaggcaagaggggtccaggcagggctgatcctggcctctgacctgtccagggcgacccctgaagcccctgctgcctctgggcattgctgggagaggccaaggcaggactcacgtctgaacagagatcccctcgggcattgctgatgggccaccttcagctgcagggaagaagcctaggagaggaggcatgggagggacctgggccttgttcagattggccacctctgctgagaagtccataccagtacacccctaataagttatgccacataccaacgtactgtggatattataacctgcattaaaacaactctaaaaaaaaaaaaaaaaaa

SEQ ID NO: 235725 - DNA, 723 bp, Homo Sapiens
gaaaatatggtcaggtagttatatgtaaggttacgtggtccagtaatgtcttagattgataaattaggtatggaatccatcagtgttacgtgatgagaataggtgaacacaccttgtcagtgatgatgtaaacttctctccttggcaggacatgggcaaacatgctgattggtgcaaatgtggtgccgagctgtccatagctgcagtgaaagatgaagagcaagaccttctctaggttttctagctttcattaaatgtatttttttccccagagctaatttgaaagttgattggaccactgtggatggggtgtcattaagaatgtgggaaataggggccgagtgcggtggctcacacctgtaatcccagcagtttggaaggccagggcaggtggatcgcttgatcccaggaggtcgagaccagcctggggaacacatcctgtctctacaaaaaatacaaaaattagccaggcagggtggtgcatgcctgtagtcccagctacttgggaggctgaggcaggagaattttttgagcccaggatgcagaggttgaagtgagccaagatcgtgccactgcactccagccttgagacagagcgagaccctgtctcaaaaaaaaaaaaaagaacgtgggaaatatgaacctttgaaagttaatctgtgaattgaaagtttaacaataaaagtagttgtttgtttcctttggaaaaaaaaaaaaaaaaaa

SEQ ID NO: 235726 - DNA, 694 bp, Homo Sapiens
  misc_feature (73)..(73): n is a, c, g, or t
ttcctgtccttcacttttttcctccttagttcctgaaagtaaacaaaacaaaacaaaaacaaaaaaacaaacnacactttggttcctgatggctttctgaacccagccctgaccttgttgtttcacagctgacggctgagatgaggttagaatgactgggcccggctgaacattccaaattggatttcaccatctgctgagaaagtttaaggaaggcaaagcttgccaggtcacagaagctcccaagcccagctttccaaaggcctcagcctgtgcctgtgtcgagctcagtcctgggagataggggagaacctgcaggcaggaacaagcccccctactcctgaccaccctccatcagcagtctcccctccgtggtcgtctttgttgacaaaggtgcagtttctcctctcctgggcacctgtaacatgtgatgcgctgcctgctgggaggttaggtcggggctgccccggcgagtggagcatgagcagaaccgccgagggtcacttctgggcagaagctttgagagcctgggtccaggttgccacatagaagcagctctccagttgaaaccctcctctgccagcctggggtcctaagcgatgagcagaatcccccactcccaccccaccaacccacaatggatatgtagtgagcaagaaatcaacctttgttgtttaaaaaaaaaaaaaaaaaa

SEQ ID NO: 235727 - DNA, 669 bp, Homo Sapiens
cagacatacaggtgcgccgtggggaaggtgtgacatccacttctcgccgcattggaccagaactatccaggcgtatctaccttcagatgaccactttacagccacatctctctttagatagtgctgactgattctagccctcagggatgaggatgaaaagctggaaacttccacttccccaacctcagagcctgactgtaatgaagagactggcagcacctcctggaacacaagcctaggtgaggcccagtctttcttgggtcttattatttgtgaaggtctctctgcctgtcggctggggcagagactgaaatactgccacctacctttggcatttaatgttcctctcctggcaaaaattcactgccacagacaaaccacccccactcctacccagccagccctcaaaacacaaaggaacaaagacagtccactcagacacttatttaataactgtagaaatccaaaagaattagcatcaaatcttgaagtcgtgagtgaagctgcgggttggcttgactgggctcagccactgagctgcctcaaccggccaaggaacgggattatgatgactatgcggacttctatattgtcttcatctcattgtgtgtattatgtatttagtttcaataaagcattcgtaccaatggcaaaaaaaaaaaaaaaaaa

SEQ ID NO: 235728 - DNA, 744 bp, Homo Sapiens
gtgcagcattgctaaaatctataatgcaaactatctgaagatgttaatgaagaggcagtacatgcacgtacttcagcacagctcacaaaagccaggtgtcctcactcatcacagaagccgccttagctcccgttactcacagaaacagcattacccttgcactacatggcgacatcaactggagagagaggactcggggtcttctgatatcgcagctgcatctgcacctgaaatgctcatacagcattccctttggcggccagtgagaaacaaagaagggataaaaactggatatgcatctaaaacaagatgtaagtcactgaagatttttagaagaccaaggaaactgttcatgcaaacagtttcttcagatgattctgaatcacacatgagtgaagaaaaaaaggaagaagatttactaaataattttatgcaatcaatgtcaattgaagaacagggagaacatctgatgttaacttgacagtcttgtctcgtgtattgaattcgtgccaaaggtgagggtaaggggttgtgagttgtgtcctgtatgtttaggatggtattgttatttattaaatcattaagtaattttggtttgttcagaaacttaaaacaatgtaattggtctgatgtagttccatgtaccaatgatagttatgtaagaaaatttacatgtaacatatacttgtacttctagctagatacaattaaaattttcttgcattcaaaaaaaaaaaaaaaaaa

SEQ ID NO: 235729 - DNA, 602 bp, Homo Sapiens
gtccaagaacatacctgaattctttgcatttccttgccttagttgcttttgtagggtggacagcaggactgcatgagaatagctgtgcttctggaccctatggtgaaagctctagtgaactgcaattaggcccagggtcccggaggaagaaggggagagaaaaaggggggtagttttccaaaagataagtaggggacaaaaaagtccacggggcctatgagcggtgagactcctgccctgattgtggcaaagcacctggagatgatagaacttcctagggaaaaggctgcatggagtccccagggatgctgggccctggtcaccaaggctccctgggaaggtctcttgtacctggggcacacagaccaacacttctgaatttgcaagcttaagagcatgtatgagcagaacctgtgcagaccaaggcttagagggctcacctcaatgttttgcactgtgtgagaccccaggaccttttcgtgattctggagaggggaacaaaccataataacaacaaaccaggtagcaggatagagactcattctcatctattttggttaaaagaaaataaatgtatttcttccacaaaaaaaaaaaaaaaa

SEQ ID NO: 235730 - DNA, 715 bp, Homo Sapiens
catcttcctcagaaattgaaattttagagccgctcttgctagcatgtgaaaccttttccttgcttattgccttttggcgggggcagtgaaggaggagcctggcctttcaaaatgtgatcaaaaaaataaccaaactccagggctcattagtccttttataaacgccggtgtgaaatgatgggtatccgtgtgcctggtccaagtttcctggtggttgacttgggcgaataaaaataagacatgttctgcagagttctccttttaaattcttgtgtaatattccgtttgttttgctcctttgcaattaactacaaacttctaagtcctagaaaagatttcaagtatttatagagtgagcaacgatcattttcctagtcaaatagtatggcaaaaatcactgttttaaaaagttgtggcattaaactataaatcctccctcccctcgcttcccacccccaattatgaaagaaaagcatatgacaatgcctactgggctcagcttttgggctaattgagtctgactgagccttcttagcaggttcctgtcttttgaaacctcaaatcccaaaaagctgtctaataattttacttttttagggactaagaccaggtattttcagcagaggttcttacttttctgtaattgaggcgcaactataatgttccagaacacaatcttaaatctgaaagtgagaggaagaaaaaaaaaaaaaaa

SEQ ID NO: 235731 - DNA, 665 bp, Homo Sapiens
agaaaacaaaggaaatacctgccttttgaataagatcccgcttttgagtcttacctatgactttaccagggtagattagaaatacacatcctcctgctgaccctctgccttcaatagctatctatcttaaaagctgaagtttgaactgcagcatctgcttgacagatgccaggttccttcggcagggggacgatcactctatatatcttccgttgcctcagattcctgtggcccaaggatcccaccaatcctcgttccccctaaacatgctaacaaaaatcccttatcgtgggtattaaaataataacagttacactgtatgcatatttatgtgctccttttgtctggtttttcttttcatcatgtataagctgaattcagcattagtttctcacatcttcccccaggtatccccaacagaatttttatgtcccagcttgtattaaatagaagtgaaatattaaggaaaataaggaacttgtgcaactttttttatgcattgttctcaaccatttaatttattgaaaggagatgctgcaacagttcttgatttagcagcagttattctcttgtttacatagttatgtttttttgttgttgttttgctctgtactggaaacaaaaataaagttttctacattattttcaaaaaaaaaaaaaaaaaa

SEQ ID NO: 235732 - DNA, 489 bp, Homo Sapiens
  misc_feature (17)..(18): n is a, c, g, or t
tatcaatataagacttnntaaaattcaagtgttttgattcattttatccaatttttggttactaatttcttggtttctttgtgttgtggtcacatcatgtggcttttacacacattttctctgttttggggatttgcttacttttttttgtagtcgtgcaagattttttgtgaaaagaaaaactgtatcaagttcatcacctttatcaatttgacctgtgccgtgaacttctttagattcatttgattcaaatggatctaagtattttaaacatttagaatactaatttaagcaaggcttgaaaattaaatggagtaaaagcaataaaaaaaatcaatattagcctgggcattggtggctcatgccagtaatgccagtactttgggatgccaaagcaggaagatctcttgagcttaggagattgagatcaggttgggcaaaaacatgaaaagactaaatcacatctctagcagaaaaaaaaaaaaaaaa

SEQ ID NO: 235733 - DNA, 704 bp, Homo Sapiens
  misc_feature (63)..(63): n is a, c, g, or t
  misc_feature (95)..(95): n is a, c, g, or t
gcaaaatatccaggtttctatttgtatgcagtcagcttacaatgaaggaacactaatgaagtntcagaaaattacaggtgatgctagaattcctntgcctctcgactcctttcctgtcccagtttctactccagagggcttaggaacttccagcaacaacctaggagtcccagctactgagcagcggcaggagtcttttgaaggattcattgctagaatgtgttctccttcaccagatgcgacttctggaactggaagtcaaagaaaagaagaggagttgtccagaaatagcagatcttcttcagagaaaaagaccaaaacaggtgaatataccaaaaaacactctgataagcaacaccctggaaaggacctgcattcctgatctgactgtcctgaaaaccagaaaagcaaagaaactagggaaactagttctttggttaatgaaccaattaaaagtaggtctttgaaaaaatacgtttctgtcaagaaagaaaatagaatagtgactgtttcatccaagacaaataaaagtaaatccagtccactagaacattctgaaagtgatactcttggatgtgattttgaatttcaagaaagcatccattctctatcacacctttcatatgactaaatcttttgaaactatgtttttacctttaaattttaataaattttcttatgtttttaaaaaaaaaaaaaaaaaa

SEQ ID NO: 235734 - DNA, 690 bp, Homo Sapiens
  misc_feature (29)..(29): n is a, c, g, or t
gaaaaaatacaggctttagggaacaaagngacaagcagaacaggtgtggaagagagattttcaggaagggaaaaatttatagctacagagggtagttagaaaattcataacttatatgtgaataaaatacatataagcagcatttacggtagtggcattctacttattaagatgcaatgaaatgaagaaaggctttatgttcaaggacctttgccatagttcagctaattgtagttttatatagaaatgatcctgaacactctgaacttgacgtagtcctgcggtgatattctatctgcagtatttgtacctccagaatggcagatccctcagcaggaacaaaggcatattgacggttctctcagcgtatgcattaaaaaaggtacttcctgaaacttttgattcaataatgactaaacatactatgtacacaattactgtaaggctaattcacgtgccatactccacctgaaagcctgagttatcttgctataagcttttcatggagcacttcctttccagaaactgatttgtaactcatttagagaatgtcctggcgtcggtttttagcatatgtggtatttaaacagagctagaatgtgatgtctgaagataatgctgcatttctgggtttcttgtgtggattttaaaataaattgtgcctacaaatgtaaaaaaaaaaaaaaaaaa

SEQ ID NO: 235735 - DNA, 677 bp, Homo Sapiens
aaagagaggaaaactatgttgctgtccggagtacacatgctttagaagttccattaagccataagggaaaactgatggtgacagaggaatatattgacttcctgttaaatgtggcaaatcaaaaaatggaggaaaacaagaaaagaattgagaggttttacaactgcctacagcatgctttggaaagggaaacgatgactaacttacatcccaagatcaaagagaaaaataactcatcatatattcataagaaaaaaagaaacccagaaaaaacacgtgcccagtgtattactaaagaaagtgatgaagaacttgaaaatgatgatgatgatgatctaggaatcaatgttaccatcttccctgaagattactaagctttggttctgatgtgtcttggccgtaatgtttctagtaggttttataaagctgctcttcataagagtattttagtttgttgagtgtatcagccattcataagccagtaatgacaagtgcagagcttcaaactataactttgttgcccagaggatgtgcagttgtcatctaagctctcagcagtacccggcttatcctacgacttcacctgaaatgctatagttatccctacttttttaccagtttctcccagaagcacctgcttaataaatcaaagatgtttgaaaaaaaaaaaaaaaaaa

SEQ ID NO: 235736 - DNA, 699 bp, Homo Sapiens
cttgctcaccaggcctagagaatggctgtaggtggccgctgacaagtgcctttagttgaagagcacatttctttcatctctcttgtctatacctgatagacacattcctctctgccaccttccttcagggaggacccgccctctgcagactgggcttagcgtgagcaggcacttcccatgtacgtgccaagggtaagctggcctgctgagcccagggcgacagaggggcactggtttacactttgccgggaccatcagggccgccaagcaggtcaggggctgggggctgggggctgggctgctggctttgctttctctgggtcttcaattagaatgtggctggcccatattggtttgtgtttaaatgctgtacttactacaagaaggatcttttttcaagctgtacatttataaaaacagatcatatactgtatatataaaaatcttgagatggtagaaacatgtatgaatgtactaagtagtattccactgtactcattcataaggtaggttttcttacaaaactcacaccaggtacttaaagatgtgctctgcttttttccaactacggagtgtcactgctttctaggtcagtccctgcagactcttctcaactctttccctataggaaacttactccgcgtcctgcccccacctcctaaataaataaaggaatcggcgaacaaaaaaaaaaaaaaa

SEQ ID NO: 235737 - DNA, 646 bp, Homo Sapiens
  misc_feature (70)..(70): n is a, c, g, or t
gatatttacacattttacagatttttgtttggtttaactccagatttctcttgatatatctctgtgcttntgagacctggagatctaattctgtttagacattttttgtcccagaaatacagaagcttgaaatgctatgaaggcagagcttctattctttatgggatgaaatatttcaaaagaggataaatcctctgtggtaagccatttggaaaatcctaccaagaattggcttatttaattttccagaaccaggaatgagtatctaatagcttttgtagaaccttccagaatatgtggggaaaaagggctattgctaagtgagctttatctaatatcctcctaagagttttactagtgcttttttgaggaattacagggaagctcctggaattgtacatggatatctttatccctagggggaaatcaaggagctgggcacccctaattctttatggaagtgtttaaaactattttaattttattacaagtattactagagtagtggttctactctaagatttcaaaagtgcatttaaaatcatacatgttcccgcctgcaaatatattgttattttggtggagaaaaaaatagtatattctacataaaaaattaaagatattaactaagaaaaaaaaaaaaaaa

SEQ ID NO: 235738 - DNA, 787 bp, Homo Sapiens
tgacattttaacgaattgaagaaacatatcctaatatcttcctctgtacgttgcacgacttcatcaattggatgctgaaaaggaacgaatgaaaagacttaatgaaattgttgatgcggcaaatgctgtatttctcatatagatcaaacagccctagcagtttatattgcaatgaagactgatcccaggcctgatgcagctactataaaaaatgacatggacaaacaaaaatccaccctcgtagatgccctttgtaggaaaggttgtgccctggcagaccatcttcttcacacccaggctcaagacggagccatttccactgatgcagaaggaaaggaggaggaaggagaaagtcctttggattctctggcagaaacattttgggaaactactaaatggactgatctctttgacaataaggttttgacatttgcatataaacatgcattagtaaataaaatgtatgggagaggccttaaatttgcaactaaacttgtggaagaaaaaccaacaaaagaaaactggaaaaattgtattcaactgatgaagttacttggatggacccattgtgcatcttttactgaaaactggctccccatcatgtatcctcccgattattgcgtattctaaaataggaaacaagactttaaattttaaaaaaggaagttttatagtgaatggatataaaaacaaatttgtggcatttttagtctaatgcatgttttcatccactatccagtactgattattaaaatgacatgtatttatcaaaaaaaaaaaaaaaaaa

SEQ ID NO: 235739 - DNA, 612 bp, Homo Sapiens
tggaggtggtgcagttgaatttttgtgtcttagctgtcttcatattcttgcagagcaatctctgaaaaaagaaaaccatgcctgctcagggtggctgcataatacttcctcttggctggcttcatctctggcaatatacagaccaactgtgcttaaattcctggcaaatggatggcagaaatacctttcaactctcctatataacactgccaattactcatcagaatttgaagccagcacatacattcaacatcatctgcaaaatgccacagactctggctctccttcatcttacatcttgaatgaatatagtaaactaaatagtagaatttttaattcagacatttcaaataaactggagcagattccgagagtttatgacgttgttacaccaaagattgaggcgtggcgccgagcattggatttagtattgttagtacttcagacagacagtgaaataattactggacatggacacacacagataaattcacaggaattaacgggctttctatttttgtagtgttactggctaagtctttggaaaataatttttcataatatgtcatgctaataataaatatattgatagccaaaaaaaaaaaaaaaaaa

SEQ ID NO: 235740 - DNA, 641 bp, Homo Sapiens
  misc_feature (29)..(29): n is a, c, g, or t
agtgcaggcacgcgccacccatgcccagntaattttttgtactttggtggagatggggtttcaccgtgttgcccaggctggtctcgaactcctgagctcaggaatccgcccacctcggccttccgaagtgttgggattgcgggcgtaagtcaccatgcccagccaagaaagctattcttgaagtgtaaaacagccaggtgcaaaattattttggagtactttagtttgcttttgtttttagccaaagggatttcatactggtttaattatgttcatccttgagaatttttgagaagtttccaacagatttgtagttcattttgctgttgttacaatgtaaagctatatatagttgacccttgaacaacacaggttggaactgcaaggatccacttatacatggattttcttctgcctctgccacccttgagacggcaagaccaggccctccccttcctcctccttctcagcctactcagtatgaagacgacagagatgaaacacttatgatgatccacttctacttaatgagtagtaaatatattttcttttccttatgattttcttactattttctttagcttgctttattataagaatatagcatataatataaataaaatataaaaaaaaaaaaaaaa

SEQ ID NO: 235741 - DNA, 700 bp, Homo Sapiens
  misc_feature (12)..(12): n is a, c, g, or t
  misc_feature (22)..(22): n is a, c, g, or t
  misc_feature (97)..(97): n is a, c, g, or t
agaaatggtcantaacttactntgtgtttagcaaatcaaattgtgtgatagatagtttcccagtatgatggccagtcagtctttccatccctgtgcntacatgctgctcttcccgtccacaagtggagtctgtttctcttgagttttggctggccttatgaatggctttgcttactgaagtgcagcagaagaaatttagtatatgtccaagcctaggctttaagagactggcagctttccttttatcctttttggaagctagccaccatgctgcaaagaagctcagctggattactgaaagatgagaggccatgtggagagagactcttgaggatgagagattatcttggatgttccagccttaagctcccagctgaatgtgggtgtatcctcagctacaccacagaaaacagaggaactactcagtcgatcccaatcaacccacagactcactagaaataacaaattattgttttaagccacgaggttttgggggagggttgttaaacagtaatagataagtgagacagattgcttgttatttatggtcaaatggtgattatctctggtgagattacaggtgatgttttttttaagttatgcctatctgtagtttcctttttttcctaaaattgatttgaattattagtgtattaacagaataaagaatgaactttaaaacacaaaaaaaaaaaaaaaa

SEQ ID NO: 235742 - DNA, 689 bp, Homo Sapiens
  misc_feature (60)..(60): n is a, c, g, or t
ggaaaactgacacataatgaattactattacccatgtaatgtgccaaagcagtctgcggnaccagactattgtgacatggagaatgtagaggaatattcaatgttcaggatcaacatgatctcctcactctaggatggatccatacacatcccactcaaactgcatttttatccagcgttgatcttcacactcactgttcctatcaactcatgttgccagaggccattgccattgtttgctcaccaaagcataaagacactggcatcttcaggctcaccaatgctggcatgcttgaggtttctgcttgtaaaaaaaagggctttcatccacacaccaaggagcccaggctgttcagtatatgcaaacatgtgttggtaaaagacataaaaataattgtgttggatctgaggtgatatgttctgaatgtaagcaccgtcaacatcagacacctactcatggacatgtggttgccggattttcttaagatgtttccagaaatgactgatattttatatttatacattttagatgacaaagcttgatatttattgctgtcgcacattttaaagttttctttttgggttgctctgtgtcaagagaggttacatggtgttaaatcggtacctgataatgtacccaaatactatggccagataataaattgtgctgcaaacaaaaaaaaaaaaaa

SEQ ID NO: 235743 - DNA, 654 bp, Homo Sapiens
tccaagctgcctcggtggcaggagacctgtgttgatgccatcaaagtgccagagaaaatcatgaatatgatcgaagaaataaagaccccagcctctacccccgtgtctggaactcctcaggcttcacccatgatcgagagaagcaatgtggttaggaaagattacgacaccctttctaaatgctcaccaaagatgccccccgctccttcaggtacttccgaagatcccagtttacagcgatcagtttcggttgcaacgggactgcaaagccgccttttctcagcggagaaaacccctttgccactgtgaaactccgtccgactgtgacgaatgatcgctcagcacccatcattcgatgagaggacagccaaggactctcccgggcctctccggttctcccttgcggaatgatgggcgcgtcctgtctgccacgtgctgacggtcgggaagcttcagtggagaggcctaactctaatgtcgcctgcttaagcaaatcatgcttctctgtttcacgtagttgggttgacaagtttctgcctttaagataaatgagtaatagtctaatgaccagctcagccatttaaaatattttcttcctattctgttcaagaaacagtaaacttggtttcaatctttaaaaaaaaaaaaaaaaaa

SEQ ID NO: 235744 - DNA, 626 bp, Homo Sapiens
gtagattcaggacattcgcccctgtgtgccaccaaaccaggactttccccttcccccttggcttggcatccctggctctctcctggtacccagcaagacgtctgttccagggcagtgtagcatctttcaagctccgttactatggcgatggccatgatgttacaatcccacttgcctgaataatcaagtgggaaggggaagcagagggaaatggggccatgtgaatgcagctgctctgttctccctaccctgaggaaaaaccaaagggaagcaacaggaacttctgcaactggtttttatcggaaagatcatcctgcctgcagatgctgttgaaggggcacaagaaattggagctggagaagattgatgaaagtgcaggtgtgtaaggaaatagaacagtctgctgggagtcagacctggaattctgattccaaactctttattactttgggaagtcactcagcctccccgtagccatctccagggtgacggaacccagtgtattacctgctggaaccaaggaaactaacaatgtaggttactagtgaataccccaatggtttctccaattatgcccatgccaccaaaacaataaaacaaaattctctaacaaaaaaaaaaaaaaa

SEQ ID NO: 235745 - DNA, 689 bp, Homo Sapiens
aaatggattccagctctcaaccgaatttagagctttggcaaaaatttttaagatttctttgatgtccgatgtgctcatttcttggtttgttcttgagtattttgtggatttttatgaaatccaccaaagtttttgttatatgaatgggacactttcccataaaatgttgtaattctgtattgctgttttagtaaacactgttgattgatgtatattgatgttacacttggtcacttgtaatagtttgtccgttcattattttgaactttttaggtaaacagtcatataattatgcaaataattatagttgtgtctctgcctttctaatatttatactttgtgtatattatcatgttggccaggactcaagcgtctttctcttgtttctgactaatgcgaatgattctaatgcaggggtttccaaactggtggccggggggccaaatccagccaatggtctcttcttgtaaataaagttttattggaacacagttacacacatttttctacatattgtctgatggctactgtcacgccacagcaatgctgttaaatagtccagacagaggcggtattgcccgaaaaacctagaatattcaccatctgagcttttacgggaaaatttgctaatatctgttctcatgcattaaatacaatgtttgttacaggttaaaaaaaaaaaaaaaaaa

SEQ ID NO: 235746 - DNA, 616 bp, Homo Sapiens
aggaatgcccagtgcggacatctctagacttagaactggaccttcaggcatctctgacccggcagagccgcctcaatgatgagctgcaggcgctgagggacttgcggcagaagctggaggaactgaaagctcagggagagactgaccttccaccaggcgtgctggaggatgagaggttccagaggcttctgaagcaagctgagaagcaggctgaacagtccaaagaagagcagaagcaaggtctgaatgcagagaagttgatgaggcaagtctccaaggacgtgtgtcggctccgggagcagagccagaaggtgcctcggcaggtgcagtccttcagggagaagattgcctacttcaccagagcaaagataagcatcccatccctgccagctgatgatgtgtgattacatgacttaagaaattattttttcatctgttcactttcttagggagggtaaaagactgaagatttgtgtttttgttttggtgtttggttttttttggtaacgtaactgtcaactcttgaagaacttttatttcacatcagattttcaacacattaatttgtaaagtaccttgagtgtaatttttatatgcttaaaaaaaaaaaaaaaaa

SEQ ID NO: 235747 - DNA, 633 bp, Homo Sapiens
ggcttggcttatcgagtagtcaatgaaggattcccgtcccctctctcggcagcttagtaactgctgtagccagctcggctcccttccctgtgtatctgtgtcctgctaacagccaagagatgttgcaagggaggaaatgtgagagaccttgaacctgtcaggtttatttgttttgtttttaaaggcatgttgaagtttagttctttacccttctcctaaaatctttttttaatcagcctcaaggttaaaataaggagtgactacagtatgtaaaataaggaaaggaagcattaatggtgtgatgtgacctgcctgtttttttgtaaacaagagaataggaaatgttttcaaggtagtttcacatgtcttgcaccaagctcatgcctcttgcttttcctttttgactttatctccctcagtttttcttctgctgtggccagaaagacagtcactacagttgactattgatacaaaggtgcaacagaaatattatccctgcatttttaaatataagaagtagacattaattttaccatggtgcctccctaatgtaagtgatatttattggtggttttcaacaaaggttaactattaaagaaagaaatatttgtctttaaaaaaaaaaaaaaaaaa

SEQ ID NO: 235748 - DNA, 629 bp, Homo Sapiens
catttttcattgatttctcttcgtactagcactagggcgcaagagaagccgtactggaatattacactactcagcacaagacaggtttaatctttttcttgggggacaagattggaaaattgaggtctgagcagacctgaagagaggcatccagcaactctgagattaaattcatcattgatcaattcgttattgtttggaattgacgtttagctgtgttcctcactcagatacgtgcatgatagctgcttgctaatttggtcttagctcacatttcacctagaatgtatggtctccctctcccctgcaaaatatcccactgttgctaatctgtctgcctcataatttccatgagattgagcatcttgtttgttttgtcaccactatataacagcatgttggaaacaaagcagtaataaagctagaaaaaccaagcgaatacactggattaaaaaaaatactgtttcctagaattaaagaaataaatgaggccgggcgcagtggtgcctgtaatcccagcagtttgggaggctgaggctagtggatcatgtggccgagatcgcgtcactgcactccagtctagcaacagagcgataccttgtttcttacttaaaaaaaaaaaaaaaaaa

SEQ ID NO: 235749 - DNA, 726 bp, Homo Sapiens
tcagatgttttaaaaaagtatattaagatgccttttcactgtagtatttaaatatctgttacaggtttccaaggtggacttgaacagatggccttatattaccaaaaacttttatattctagttgtttttgtactttttttgcatacaagccgaacgtttgtgcttcccgtgcatgcagtcaaagactcagcacaggttttagaggaaatagtcaaacatgaactaggaagccaggtgagtctcctttctccagtggaagagccgggaccttccccctgcacccccgacatccagggacggggtgtgaggaagacgctgcctcccaatggcctggacgggatgtttccaagctcttgttcccctaacgtctcaacaggcgctcactgaagtgtatgaatattttttaaaaaggtttttgcagtaagctagtcttcccctctgctttctcgaaagcttactgagccctgggccccaagcacgggccgggcatagatttcctcttccacaagctgccgcttttctgggcaccttgaagcatcagggcgtgaaatcaaactagatgtgggcagggagagtgttgcttacctgccctgctggggcagggtttcctgaaactgggttaattctttatagaaatgtgaacactgaatttattttaaaaaataataataaaaatttaaaaaaattaaaaataaaaaaaaccacagaaaacaaaaaaaaaaaaa

SEQ ID NO: 235750 - DNA, 620 bp, Homo Sapiens
  misc_feature (40)..(40): n is a, c, g, or t
gctggagtgcaatggtgcagtcttggttcactgcaacctntgcctcccaggttcaaacaattctcctgcctcagccgtccaagtagctgggattacaggtgcatgccacgatgcctggctattttttgtatttttagtagaggtggggtttcaccatgttggccaggctggtctcgaactcctgacctcaggtgattcacccacctcggcctcccaaagtgctgggattacaggtgtgagccacggcgcccagcctcatgagggtctattctttacattcaccatggtctgatggttgctacatgtttgtctatgattttttttttctattatcaggtgtcttggccggttcatgccccacgatgaaagggccagaggttttcatatgagtaaaagaaaaaagcagaaatgtgaaacctacaattaggctaaacaaaaatcaactggaaaagtacaggctgaggggagaagagttggctacatgtttatgttaggggaggagggagtacattttagctatgtattcaaacagctaatagtttaatgttgctgcttataaacttaattttaggctgcattaataaaagtgtagtctccaaaccaagaaaaaaaaaaaaaaa

SEQ ID NO: 235751 - DNA, 744 bp, Homo Sapiens
  misc_feature (21)..(21): n is a, c, g, or t
  misc_feature (62)..(62): n is a, c, g, or t
taacagcacaggcagagttantcataatgttatttttaatttgtcatactttattatggttntgtaaggtacatgaaaatgtaattatgtgtgatttgtaggtattaaagaacttagctaattgaatttacatgaaactaaataaaatctttactactgagccccaaatatgtatttgctatgcctgtctgtataatgtacttcatatagtttaaaatgcacttcagtgatacaaaatcccttttaaagactcttttgtttttgttttccctgtgtattttggctatcacaaaactagggttcttctgtttttaacttatgcatttaatgacacattgccatcttttagaattttttactattcaacagaataagctgatgtttggtggcagaggagttattagttgcgtgaactgtcaagagattgcagtgcaggagggcaacagaaactgtacaaggtgcagacttgagtcatgtaagatctatgtgaatgaaccaaagtaactagagtcagtcaagcacaaagctgtgaaaagtagtgtgtggaaagaatcatactgaattttaggaacaagtacctgactatgatactttttacagagtgactacaagttgtaggacagtctttgtgtgtgctgagtgtcaacagctgcctgcctatgtgttgatgttttcatcctttctttgttgaatgagggtataaccatcaaaaataaaatacctttcaaataaaaaaaaaaaaaa

SEQ ID NO: 235752 - DNA, 713 bp, Homo Sapiens
accatcgacctgttcaaataattacatctaataattatagagagtccttaccatgcaccatttgcttggaatttattgagcctattccaagttataacatattacgaagtccttgttgtaagaacgcttggtttcatagagactgtttacaggttcaagcaataaatgcgggagtgtttttctttaggtgtacaatatgcaataatagtgacatctttcagaaagagatgttgagaatgggaattcatattcctgaaaaagatgcttcctgggaattagaggaaaacgcttatcaagagcttctgcagcactatgagcgttgtgatgttcgaagatgtcgttgcaaagaagggcgagactataatgcacctgatagcaaatgggaaataaagcgctgtcagtgttgtggttccagtggcacacatttagcctgctcctcattacggtcatgggagcaaaattgggagtgtttggaatgtaggggtattatctacaattcaggagagttccaaaaagccaaaaaacatgtattacccaattctaataatgtggggattacagattgtttgttggaagagtcatcacctaaattacccagacagtcacctggatcccagagtaaagatctactgaggcaaggcagcaaatttagaagaaatgtatcaacactattaatagagttaggattccaaattaaaaaaaaaaaaaaaaaa

SEQ ID NO: 235753 - DNA, 626 bp, Homo Sapiens
taatatttggagtactactaagactttcctgaaagaggttattgtaccaaatttgtaacataaaaaaatactaaatgatcttaaagcttcctaaattgtgaaaagggtatgtgctaacatctcagaactttagacctgcttgttgtcatctttaccgatctctgatgataaatgcagaagggatctgagagtttttaaagcaagtagagtcaatcagagttttgaacatcatagtaatacttccgtgattcagagttagatcatataaatcaaagtaacaatttggattttttttaaacaacaatatcataactgtcataaaacagatggtccaaccccaggagcagataataacttgggcagctctgtggggaacaagacggggaaaacaactgttctaactgcccactagaacagtggtttcaactactacaattctcagtgtttgagaggtacaagggaagaaaggactatgtggatcccttgtggctatgcagatacctacctcacagagttgttgtagaagactggtggtttggttcaaaccttgtgattaaagagtttgtcaagcattttattcttttgaataaaagcaacatatctaaaacaaaaaaaaaaaaaaaaaa

SEQ ID NO: 235754 - DNA, 769 bp, Homo Sapiens
  misc_feature (49)..(49): n is a, c, g, or t
actgtaggctcctgtgcatactgtcgtctcctgtgggggatggagagtntagtgtgatgaggtggttctgcccaggagtttctttcaaacatcatgcctcccatccaatcaacatcatcaaattacatgtgtaatcaaggctctgtgccatgggggaaatgaatcatttagctaggccaggatctagtgaaagccacagagtttaaaaccatgaaagaagttgaaggcagcattcctcagctctgtgacttgtgaccctatttgaagtttcaggatttgggtgtcacaaaggattgtccctaatccttggccctggggtcttccgagtgagctggtttaatactctgagaatgagcagggagatccagagaatgaatccctgaccgcatcacctaaactgtcttccaaacatgagacaaagctgactgttcacactgattgcccagcacataccgtcttgccagtttcttcttttctcccagtctcctgttcatccattctgttctcccttggggtgggaatctatgatggaggttactggggaaacagctcagcagatttttggagaccaaaccaaaggtctcactaggaaatttatctgttttaaaacattgcttccttcctggctctgctaaattgaatgctcattgtttgttgttgttgttttttaattctaatgttcaaatcactgcgtgctgtatgaatctagaaagccttaatttactaccaagaaataaagcaatatgttcgtaaaaaaaaaaaaaaaaaa

SEQ ID NO: 235755 - DNA, 791 bp, Homo Sapiens
  misc_feature (128)..(128): n is a, c, g, or t
gccccagagatcctgcacatacagtacgagaaatcatgaagttctgcaaaaaggagatggaaatgcacacagtaagaaagatacagaggtccgcagacgggagctcctagaatccatttctccagctntttaagctacctgcaagaacacgcccaagaagtggtgctagataagtctgcgtgtgtgttggtgtctgacattctgggatctgccactggagacgttcagcctaccatgaatgccatcgccagcttggcagcaacaggactgcatcctggtggcaaggacggagagcttcacattgcagaacatcctgcaggacatctagttctgaagtggttaatagagcaagataaaaagatgaaagaaaatgggagagaaggttgttttgcaaaaacacttgtagagcatgttggtatgaagaacctgaagtcctgggctagtgtaaatcgaggtgccattattctttctagcctcctccagagttgtgacctggaagttgcaaacaaagtcaaagctgcactgaaaagcttgattcctacactggaaaaaaccaaaagcaccagcaaaggaatagaaattctacttgaaaaactgagcacataggtggaaagagttaagagcaagatggaatgattttttctgttctctgttctgtttcccaatgcagaaaagaaggggtagggtccaccatactggtaattggggtactctgtatatgtgtttcttctttgtatacgaatctatttatataaattgtttttttaaatggtaaaaaaaaaaaaaaaaaa

SEQ ID NO: 235756 - DNA, 750 bp, Homo Sapiens
  misc_feature (20)..(20): n is a, c, g, or t
  misc_feature (44)..(44): n is a, c, g, or t
  misc_feature (86)..(86): n is a, c, g, or t
  misc_feature (93)..(93): n is a, c, g, or t
gggagaacactgcccctccntcgggtgggtgcccagccagttgnccagcctccactcccactttgccagacaccctgacacccacncaggctntgaagagcatggagggggagcctcagagctgacagtcctgcttagagcccttaaaaagacttgaaagttcactgggactcagtttaccttaatgccttagcagaagataaatcctacctagagacctttgttccttaaagcaataactgacaactctttgtagtcctccttgtgggtagttaagagtggggtcacccctttaactccaagcactacattttggcggctgccggcctctgggggaggtggcagttatgctgttactagtgattttagggctttgttatttaacttatttcaagggtgctgtgctcagccctgcccatggctgtgcagctccctccgtgcctcagatctgctgtagccagtgcagacctcactgtcgtgtccatgccacccccggcatggctccaggtggcctggtgactccatgatggacgatcttgctcccaggacctgcctcttcccaggcttcctggggaagagttgtacgcccaggcaacaagggctgagctgcgcttgcgtggctgtttcatgaccgcttgtttttctccttttggtgtaatgttttacaaatcctttggcctgagaactaatatgttaattgccttaaataaattaatagaaatctagtccgttaaaaaaaaaaaaaaaaaa

SEQ ID NO: 235757 - DNA, 786 bp, Homo Sapiens
  misc_feature (93)..(93): n is a, c, g, or t
  misc_feature (112)..(112): n is a, c, g, or t
ataccgggactctccagagccatgactagatccaatggattctgcgatgctgtctggactttgctgtctctgaacagtatgtgtgtgttgctntaaatatttttcttttttntgagaaggagaagactgcatgactttcctctgtaacagaggtaatatatgagacaatcaacaccgttccaaaggcctgaaaataattttcagataaagagactccaaggttgactttagtttgtgagttactcatgtgactatttgaggattttgaaaacatcagatttgctgtggtatgggagaaaaggttatgtacttattattttagctctttctgtaatatttacattttttaccatatgtacatttgtacttttattttacacataagggaaaaaataagaccactttgagcagttgcctggaaggctgggcatttccatcatatagacctctgcccttcagagtagcctcaccattagtggcagcatcatgtaactgagtggactgtgcttgtcaacggatgtgtagcttttcagaaacttaattggggatgaatagaaaacctgtaagctttgatgttctggttacttctagtaaattcctgtcaaaatcaattcagaaattctaacttggagaatttaacattttactcttgtaaatcatagaagatgtatcataacagttcagaattttaaagtacattttcgatgcttttatgggtatttttgtagtttctttgtagagagataataaaaatcaaaatatttaatgaaaaaaaaaaaaaaaaaa

SEQ ID NO: 235758 - DNA, 661 bp, Homo Sapiens
gacggagaccgtgcgctcctgcaccactgagtcatgcgacttcgtgcgggccatggtggacccggcccagacggtggaacagaggctgaagttgttcaagttggcgtctgagaagcatcagcatatgtatcgcctcgccatgaccggctctgggatcgatcgtcacctcttctgcctttacgtggtgtctaaatatctcgctgtggagtcccctttccttaaggaagttttatctgagccttggagattatcaacaagccagacccctcagcagcaagtggagctgtttgacttggagaataacccagagtacgtgtccagcggagggggctttggaccggttgctgatgacggctatggtgtgtcgtacatccttgtgggagagaacctcatcaatttccacatttcttccaagttctcttgccctgagacggattctcatcgctttggaaggcacctgaaagaagcaatgactgacatcatcactttgtttggtctcagttctaattccaaaaagtaattccactggagctgctgggaaggaaaacgagctcttttgatgcaaaccaaatgaaaaataggcattaatcctgaccttagctcgggatgaaacactgctcttaaaaaactcagttttccttccagaaaaaaaaaaaaaaaa

SEQ ID NO: 235759 - DNA, 665 bp, Homo Sapiens
tgctttactgcagatgaacttcagctgctaacttaccagctctgccacacttacgtacgctgtacacgatctgtttctatacctgcaccagcgtattatgctcacctggtagcatttagagccagatatcatcttgtggacaaagaacatgacagtgctgaaggaagtcacgtttcaggacaaagcaatgggcgagatccacaagctcttgccaaggctgtacagattcaccaagataccttacgcacaatgtacttcgcttaaatagtccaagtatattctctgagaggaagtactgaaagatgaattgacatacaacgtatgtttccagtgaagtcaattgagtaaggacacctccagccatacagaaaccaacactgtgtgggggccaaggtctgatccttatgttaatacaaggaagattgtttacttcatcaaggaacacagcatcattatgcaatatgaaaccagccaactgctttttgtgcggtctcctataggaagtatcgcaattgttttgttttcatttcttgtagtctaacccttttaatgcctttacctcaagttgcttggcagcacaactatctttgcaaaaaaaagtaaagaaaaagtaaatgatggtttaaaaaatacacaccttcatgaataaaaaaaaaaaaaaaaaa

SEQ ID NO: 235760 - DNA, 772 bp, Homo Sapiens
  misc_feature (9)..(9): n is a, c, g, or t
gtcactctntggatggaccagtcccgttccgtatgctgtgatctatccctgccgtggaatccctccgaggctccaactccgcagccagagaagctgctctctggcctccgcgggcagagctctgcttatgacttcgtcttccagaggtccacatttctccccttgacgccccctgtctaccacctccacctggaaatttgatctttactgtgctcagtgatcacgaaattggtcaagcctattcatgttccttctcatctagaattctgtgtgattgttttagcataaactgccccgctcccactgtatcatttcacgatctccttttaatgtttttctttcagttttgcactgacagtctggtgacaggtgctgccagggtgcaagttacattgcaatgttctaaaccttttgaagtgttcttagcaaaagcctttctttctgggtgtttttgtcgaatgagtctatgaagactcaatgcatccatcttgggctgatcatgccacagatctcattccagctatagtactgccaagaagtgaagtttatcattgaattttacctgtgttgctctcttttaaagtaatgactttgagatgcatgctttgtatcatattgaaaagtatgttttattttccttaaagttgtaatattgtgtgtgaaactgtacatattttaaatgatgtagctttggcaggttttatttggttgatatgattttatattaaaagagaaggctgctttcatatagcataaaaaaaaaaaaaaaaaa

SEQ ID NO: 235761 - DNA, 762 bp, Homo Sapiens
tagctatcacgcaatggtatctctgaaaatattgtattaagatgtgtatacatggccaggcatggtggctcatgcctgtaatcccagcactttgggaggcaggtggatcacgaggtcaggagatcaagaccatcctggccaacatggtgaaacctcatctctactaaaaatacaaaaatgagcggggtgtggtggcccatgcctgtagtcccagctgctcgggagactgaatctcttgagcctgggaagcagaggttgcagtgaactgagatcgcgtcactgcactccagcctggtgacagagcgagattccatctcaaaaaaaaaaaacagtatgcacgtacaaatttcttaacctgttatcaatgtctgagctacataattatctttctagttggagtttgttttaggtgtgtaccaactgacatttcagtttttctgtttgaagtccaatgtattagtgactctgtggctgctctcttcacctgccccttgtggcctgtctacaattctaaatggattttgaactcaatgtcgtcgcttctggtttcctgcatataccaatagcattacctatgactttttttttcctgagctattttcactgagctgagctaatgaactaaaactgagttatgtttaatatttgtatcaaatacataaaaggaatactgctttttccttttgtggctcaaaggtagctgcattttaaaatatttgtgaaaataaaaacttttgttattagaaaaaaaaaaaaaaaaaa

SEQ ID NO: 235762 - DNA, 733 bp, Homo Sapiens
  misc_feature (22)..(22): n is a, c, g, or t
gacattgacaacgtcgacctgnccatgggcaagatgatggagcagggccggtgctgatcatcaccttccaggcacagttggtgatggtggtcaggaaccccaaaggcgaggtggtggagggtgacccggacaaggtgctgcggatgctgtacgtgtggcgctctgccgagaccaggacgagctcaacccctacgcggcctggcggctcttggacatctcggcctccagcaccgagcagattctctgagtgtggtgccggagccaggtagccccggcttgggtcatcaggcacagaggcaccgcaacaccacctgcggcaactccagacctctgggaacaagactgcgggctctgcccccagctctgccaggacggctgcaagaccagctggcccgggaggggacaacgggctgttgcgggtgcgcggcagctggagacactcccccgcagggccaacccctgccctgttgctctgccctgcaggggtcccggcgcctggtcacctggggtgcacacaggtcacacagtgccaagaggccccagggcccagggactccccccacagcagggtgggacccgggacccgcggctcagtggcccgctagccacgtcagccaagccactttaggtccattttttaattttaacagtgctcttccatcttgtgcataagcctgagatttggaaagaataaaacaccgaattgcagaagagcaaaaaaaaaaaaaaaaaa

SEQ ID NO: 235763 - DNA, 722 bp, Homo Sapiens
  misc_feature (9)..(9): n is a, c, g, or t
cttatcctntgacagtcgtgaagcatcatttgtacatggtaggccacaaggaactttggaaataccaagtgaatctgttaaatccaaacagttttcaccatccggttatctttcagatacagaggaaagtaatatgatttgtcaaacaatgaaatgtcagcgttatcaaactccatacctgtcagaagaaaccacgtatttggagccaggaaagatcagtgtgaattgtggacacccatctcgtcataaggctgatagattaaagtcagatttcaaaaaactgagcagtacattaccatcttcagtgtgtcagcagccttcaagaaaattaattgttccgctatctagccaacaagatagtggctttgatagcccatttgttaatctagactaattatggtacagtatttaagaagaatcattaatatattaacaaaaatggaagggaagacctcatactgaaaaaaattgtgagccctgcctcttttgagatgttttaataacatctgttatataagtaaagcattcttctaaaattgcttgagatatttatgttgccttaatattccaaaggcctgatggtgtatgtataatctgcttttgtgtggtgcttatttttggtttctaaaccatctatttttatacttataaattgactcactctgcagtgttaacttatttaaataaacttgcatatggtctgtagaaaaaaaaaaaaaaaa

SEQ ID NO: 235764 - DNA, 821 bp, Homo Sapiens
  misc_feature (37)..(37): n is a, c, g, or t
  misc_feature (42)..(42): n is a, c, g, or t
  misc_feature (107)..(107): n is a, c, g, or t
  misc_feature (113)..(113): n is a, c, g, or t
ctagtcagtattaaaaactcaatagaaataggatttntgatntgttgttgttaaacatatgtaatttaaggttggtacaaacagcaactaaaaatgtaatacttttntgtttntgtgcatccccatgaaatgtaaagtagtgcatagttattccactggagaactcctggacatatagaaagtcattcgttagcagtacaggacatttaaaacacttattttacaatgggaaatgtacaacccccaccctcatttcccccagaaattttagttgcatgagaaagtttagcgggttgccatgactacaatgctatgggttttagatcacttaaatgtggttacaggtttattaaattaaaaatgtctgaaacatttcagcattcatatttttatacaagaagtttgtgtggtatccatcttccagttctcttggtagtatcagccatttgcttgcttatttttaagttttgagaacaaatcgcagtaagttgaagcaaatagtgctaacagaacttgtaaattcagcttggggggtggttcctgaaaagagtcaaagtaacaaccacctacaggtacagtcatgaaccaggaaagtgcaatccaaatgaaacaattcatgctttgcaaaagccaaaaatgaggccactggtgttttcagaataacaccggtgctttgatgctgacttgcagtaaaatcctccctctgggtcccgcagcttggtggctcaggccggccacagtctccacattagcacccacattgtatatgtacagggacatatatattatatatattcatatttacaaaaaaaaaaaaaaaa

SEQ ID NO: 235765 - DNA, 529 bp, Homo Sapiens
gacaccacagtcaggtgtgccgagtgcaagaccgtcttccaccagagctgccaggctgtggtgaagaagggctgcccccgctgtgcccgccggcgcaagtaccaggaacagaacattttcgcctgatgcccatctgctgaccccgctctgaaagccgggggtgagtgtggctcagccatcccggctgggtttgccatcagcccaggatactcaccgtgtcacagctgtgtccccttgtcaggaagaccctcagatgtggccagagcaccggcctcccagagaaagcccaggaagtccccgtggtgtcccctggccctccccccacccctctgctgcaggaggcgtggccaccaccagatgctccctgtctggggcaggcagggccgtttactcaccaggccctggctcaccagcgtcccggcgcctccgttagggctgcccaaacactgtggaaaggggacttggggagcattttcaattccacattcctgattaaaaggtctagttttttaaaaaaaaaaaaaaaaaa

SEQ ID NO: 235766 - DNA, 467 bp, Homo Sapiens
acggtgatcgggggcgaggagcactttgaggactacggtgaaggcagtgaggcggagctgtccccagagaccctatgcaacgggcagctgggctgcagtgaccccgctttcctcacgcccagcactgaccctcttgccgcaaagctgcacagcatcctcactgatgaggcgtttgagttttactgtagccagtgccacaaacaaatcaaccgccttgaggatctttctgcccgcctgagtgatcttgaaatgaatagtccgacaaagcggctctccagcaagaaggtggcaagcttcgtatagatctgttggcttcctgctgtgaaagatggcaacatacacttttatcttcctcccctgccagttcttaccgaaataaacatgcagggttaaggcccttcccagggagccactcagtgtggctgccgggtggcctctgctgccgtcagaaaaaaaaaaaaaaaaaa

SEQ ID NO: 235767 - DNA, 735 bp, Homo Sapiens
  misc_feature (26)..(26): n is a, c, g, or t
cccctcccctcccctcccggctccgnttgactccgggcaggtagagccgggctccgggcgcgcgcggggccgcagcagctgctcccgatctcgcctcggcccagcgcagggcctcgcacgcccatggccggctcggagcagcagcggccgcggcggcgggacgacggagactcggacgcggcagcggcggcggcggcgcccctgcaggacgcggagctggccctggccggcatcaacatgctgctcaacaacggcttcagggagtcggaccagcttttcaaacaatacagaaaaagttttttgacttctgagaaaacctcagcgcttcctggagaaactcaaaggcgcttgtaagagatgttgagtcagcaggcctctgagcctcttctctgcctaaaaccatgtcagattcttgggaggactggaaggacttgcaggctgtccatgatttctagacaagtcatctgctcacagacaagaatgtgtctctgccttgctcctggagacgataggagagtccacagatgcagagatgtaagaaaaggagaagaaatgaaaagcagaaatggtttaagggaactggcgggaaagacaggaaactcatctgttgactttttccatcctcttcaactcagtggtgtgttggaaaaaggcatcttttttcccccaactattacactgtctgaaaaggtcctaattaaatattcattaaagattaaaaaaaaaaaaaaaaaa

SEQ ID NO: 235768 - DNA, 691 bp, Homo Sapiens
ttgcacgagagcaaagggagaaaagacggcggaaattgttaatggaccagttaatagcccacgaagcacaagaggaggcttatcgggaggaacagctgattaaccggctgatgcggcagtcccagcaggagcgcaggatttccgtgcagctcatgcatgttcggcatgaaaaggaagttttatggcaaaacagaattttcagagaaaaacaacatgaggaaagacgacttaaagatttccaggatgctcttgatcgagaagcggctttggcaaaacaagccaagattgactttgaagaacaattccttaaagaaaagagatttcatgatcagattgctgtggaaagagctcaagctcgttatgaaaagcattattcagtatgtgcagaaattttggatcaaatagttgatttgtccactaaagtggcagactatcgaatgttgacaaataatctgattccgtataagttgatgcatgattggaaggaactattttttaatgcaaaacccatatatgaacaagcctctgttaagacactacctgctaacccctcaagagaacaacttacagaactggagaaaagggacttgctagataccaatgattatgaagaatataaggtacctactgatatgaaataattagaatgctacataataaatcctttttctttaaaaaaaaaaaaaaaaaa

SEQ ID NO: 235769 - DNA, 709 bp, Homo Sapiens
ctcatggccaaaatgaagaatatgtagataatggactgggatatattgtatttctcatgttaaagcctcttcccttgaaattaaaaaaaaattttaactgataaaacttagggcaacattaattaatgtatattcttacctgaattgttatactttttgaaaatcctgtgacttgcctgtttctccccgctccaacgaaatcattaactctcctaaaatgtgtttcattctagtaagaaaacctcaaaggatattgtaggatataaatcttacttgaaaacatagctgttgaaatgttttggccttttggagtgggggaaggacaaatctgatcctgtaatctttttctttccagtaatcccttgtgtctgttgcatgaggacatggacaataaagtagtatatgatcctcagatacagggagaaggacaaggcatacagcttattgattagagctggcaagcatcttctcattatgtttggaattgctttctataagaaaattgcccactactactaacttgatcaacaatgaattcaaaatagttaacctatgaaataacatcctctcaaatgtttgctgatgaagtacaagttgaaatgtagttattggaaaagtctgtaacctgtggatcatatatattcaaagtgagacaaaggcaaataaaaagcagctattttcatgaatagacaaaaaaaaaaaaaaaaaa

SEQ ID NO: 235770 - DNA, 630 bp, Homo Sapiens
aggagcttgacccgtccatcgctgtggggtttttctgtaagactgaagatgacttcaatgattggtgccagcaagtcaaaaagctgtctctgcttggaggtgccctgcccatgtttgagctggtggagcagcagccttcacatctggcctgccccgacgtcctgaacctgtccctagattcttctgatgtagagcgactggaaagattcttcgactcagaagatgaagactttgaaatcctgtccctttgaaaatcctggggtcgggggtggcacctgtgagagcctggggctcctggtgccgctgcgtttcatccatcccgcccgctcgcctgccgagggctgcgccccgtgctgcctccccccagagggccacccgctgtgctcgtggactgaggctgcgctgcccgggaggccttactgcttggtgtcagactgcccagctcagagtgcccgtcagggcctgtgcatccgcacgcggagccgtctgttaggagcttccagagcgttctctcgacactgccagccccgtgttagcacctgggcctcagtcccacttgctcccaggcgccggttctgtggttggtttggaattaaagtcctgtttgaagttaaaaaaaaaaaaaaaaaa

SEQ ID NO: 235771 - DNA, 503 bp, Homo Sapiens
cacacacacacacacacacacacacacacacacacacaccccaaaccttttcatggggaatgtgtggcaaccttgccaaacagcaccactcagagtgtgactctgactgtgaccttggccttaatgaggaacttcttaggagagtttgaggacaaggccaacatcgtcatctgggctcgctgcgtcccagcacatcaaactctgtccagagacaaggccaactgcaaatgaaagccagggaacattgctaagggtctgtggctctgtggtggtgttcatcgccttcctgagataggatttcccttgccagtcccaacctgtatatattctgtacagaagacatccctgaatatactgtaggtgagtcgtccagccaaatttatatctccaaaacatttttagctttttctacatgctatgaattgagatgacatgctcaacttgtaaataagtctttttgtacattaaaaaagtaattttttcataaaaaaaaaaaaaaaaaa

SEQ ID NO: 235772 - DNA, 699 bp, Homo Sapiens
agggtgaattggaagccctggaatgggccgaggcacaccaggcagctgatctgggtgcatgtgggccacagaccactctcacaaggttaaatctttaacaagagcctcatgttgttaggagaaggtggaccccagcccaagcacttccccattgcagcctggcatgaaatctttgccttttagtggggatcactcctgcccgagtcctggctgtggtggggactctgcaagttgctaacccagcgtccattctctttcctccgtactaacagaaccccggtgcctctgcccagttccaatagcgggcagacgagagccatgtcctgggctcccttgcagcccggggtgtgcagctgtggcgtggaggtgggtggtgctgggagagacttgcagggaagctcctgtgaaggggactcagctgccacatgcaggacccttcccctttgccttcttcctgcctggaacatggatgtgatggctggtgctgggacagctgtcctgagagcgtgaggaaagggtcacaccctaaggacagtggagcagaacacaggaaggaccctgggcctttgctgacgcagaacgcgggaaggaccctgggcctttgctgacataccagccccagactacttaaattcagctttttttttaatgtgagaaaataaatgcacccctctctggtttaaaaaaaaaaaaaaaaaa

SEQ ID NO: 235773 - DNA, 833 bp, Homo Sapiens
  misc_feature (48)..(48): n is a, c, g, or t
  misc_feature (118)..(118): n is a, c, g, or t
agacaaaggggacgtgtttgacgaggaagcagacgagtcgctcctgcngcagcgggaatggcagagtaacatgcaaagacgagtcaaagaaggttatagagatggaatagatgctgcnaaagcagttactcttcaacagggcttcaatcaaggttataagaaaggtgcagaagtcattttaaactatggacgactccgaggaacattgagtgctttgctctcctggtgtcaccttcataataataattcaactttgatcaataaaataaacaatcttctggatgcagttggccagtgtgaagagtatgtgctcaaacatctgaaatcaatcactccaccgtcccatgttgtagatttattggactccattgaggatatggacctttgtcatgtagttccagctgagaaaaagattgatgaagctaaagatgaaagactctgtgaaaataatgctgagtttaacaaaaactgtagcaagagccatagtgggatagattgttcatatgtagaatgttgtagaacacaggagcatgcacattcagaaaacccaagccccacatggattttggaacagacagccagtttagttaaacagctgggcctatcagtagatgtattacaacacctcaaacaactataaaattaccttcccttttctaatgaaaataatgttcagaacatttggtttcctaacaatcgaaatttgtactggtttctgcatcaaacacctcaactgtagggttaccctttatggaagtttgaaattaacactattgtcttcaaaattaacactattaaatgtaatataagcctttaaaaaaaaaaaaaaaaaa

SEQ ID NO: 235774 - DNA, 694 bp, Homo Sapiens
acgcttccctccagtccttgccgcacgcgtaggcatctccaccgctggagggggcctgccaggactcctgtctctgggtgagccgcatccttcaaggcccatgtgggctgtgcgtttctcagaccctccttctgtccctacaccttccccttggaccccccagtctgtggccaccctgaagaatgtgcagaaacacttgtgtggcctgtccctgtctctctgacagccttccatttgtgaagtgccctgtggccccctccccagcacctctgtctgccatgcgcttcttcctcccaggctaccctgagcctttcctggcccagtcctcaccacagtccacagaagccacaaacaggctcatagccaagctgtgacctggtcctgaccatctggggcacgagggcctgggctggccctgctaggctggagaagccctgtcacctgtgcacatcttgctggtggaggcatggcccactgtgcaggaccccaccctcgggggctttcggctcccacactgatgattctccccagcatccacaccgggcctggcgctacgtactcaggcccccagctctcgtgtcctggaggaagagctagctccagacatgggttgatcacctagaggagctctggctaaggcacagttttctagaaataaaacatttattcggtttttaaaaaaaaaaaaaaaaaa

SEQ ID NO: 235775 - DNA, 745 bp, Homo Sapiens
  misc_feature (90)..(90): n is a, c, g, or t
ataaatgccggttctggttcttagtttagccatttccatcagttgaaattgtggtgtgatctgttgcttgtttcgttgttgttttgtttntgtgtagctttgttttttaatattcatttaataagatgatgggcaatagcaaacatttttactcccaggaatataatttatcaaattgaactattttatttgccaaagaaacttgtttttaatatcacgggtaatgggtaagtgtgaaaactaggcttttttttatgaaacaaaaaaaggtgacgaataatatggcttttgtttctgtttctgaagcctgatttcatttatgccaggttttgaaaaacagatctttttcttaagtgaaagcacctttaatttgctctaacggtacatcctgtaaagacagaattctgcatagccttttaggtgtttttacagtatgtgaaaaatacaagactcattctagagttaaattaccaatcttggttgatattatctgcttccatttttattaatttggaaattaatatgttgctagtaaatattggtttttacagtacccagtttgaaaatgtaagttatcaaaacttaatgtagtgaatttgtgtaaccatgttgtattgttgagaatgtatttttatttaaattttattttcttatcaagagtattataaaaattaacttttgtaactgtcgcttggaaataactcaaataaattacaagaagcctgtcaaaaaaaaaaaaaaaaaa

SEQ ID NO: 235776 - DNA, 711 bp, Homo Sapiens
tagattacttcaggtttttttcctttaaaattagttactaccactcaaatgtatttacaaagagaatttggccaggcacggtgatgcatacctataatcccagcacttggggaggccgtggtgagaggatagcttaatcccaggagttcaagaccaacctggacaacatagcaagaccccatctcttaaaaaaaaaggaaagaaaacttgatgtgattgccataggtggaataatccaacataaattgccatagatagaaggtatctgtaatatatatatatatataaaatgaaatatatgtttcattttagagaaataactattactttagatctttccaaatctgagaaagggaggctagcatgtgttcaaggttagcacgcaacagaatttcctaaaatcagaagaattggaagatcctccccttttgaaatggccctgctgtgtcagtttccctgtggccttttgaactgtacatctcacatgttgggaaacgctggccactgggaaatcattagaaaggaggctgtagaatatttgccgagcctctactgtataccaggggctaactcaccaagcacattctaggaattgggccctgctcatgaggagccttagtggagattccaggtgaatatttatgaaaaagtcaacattagaactgaaaatggaaataaactgcttgaaaagacaaaaaaaaaaaaaaaaaa

SEQ ID NO: 235777 - DNA, 725 bp, Homo Sapiens
aggcccgcgaatcttgatctccggcagcatctggagggatggggccacaacccggaaaactgcccacatgtgcaggtgtctgggtgctgctgccgtggacccctggtgaagatgggcggccgcatcaagacctggaggaagcgatggttctgctttgaccgccaagcccgccgcttggcctactatgcggacaaggaagagaccaagctcaaaggtgtcatctacttccaggccattgaggaagtctattatgaccacttacgctgtgccttcaagagccccaacccccgcctgaccttctgcgtcaaaacctacgaacgccttttctacatggtggctccgagccccgaagccatgcgcatttggatggacgtcatcgtgacagccgctgacgaaaaccacgccccctgagtggccccgccctcttggggggaagtcccttcgaggctccgccggcgcggggcgcgggggcgttcctaggccccgcccactgccggaaaacttggacgcaccgctttggaactctcccgggaattccgcaggcgcggcagttcagctggcctgagctgctgcgttctgggttgcaggtgccttgcccccgacgggatcgccggcccctaaggccctgcccggggcaggaggaagattgcaggggcgggaagaaactatttattggtgctcctgtgataccgaattaaatacggaggaaaaaaaaaaaaaaaaaa

SEQ ID NO: 235778 - DNA, 762 bp, Homo Sapiens
gagaaaaatgtgtggtacttgctaataaacaggtgaattatgcacatccttatctcattgctgcttctttccaagttgagcaacaacaaaatgctgtatttgagtttctgacaaatttgttgtaaaaatcaaatttgaatgtactattctataaattgcctttctgaatagaacatgacatgccattttctagcagctgccagtgataatttgttttacactaacttttaaatcagtgtgtgtactgcagggaaaaggatataggaatactcatcttacaggggaatttgtgaccagaagatgtagtaacttcaatgactgaaagtcaatgctgatagtttactggcaacattaattgaagcatcaaaaataaatggcaaagagaaatcaggacaaaaaatctaattgctgtttgggaaaaaacttgattttgatgtttattctccaggtttttggttgttttttttctttcttctttcttaatgcctgaaattttctccattggcccgaaagcagtaaaaattgttcattaatcttccgttaggccaataaaagaagggcctcacaagacaaaacaggagccagaagtaaggactgaaggagaaggggagaatagctaatagctatagtatatgtatatgttaaaaactgaatatcccatcatcctatttcatgtatagttgagttctcaaatttgtaagtttttatacatcctttcattgaataaacgtttaattaaatgggaaaaaaaaaaaaaaaaaa

SEQ ID NO: 235779 - DNA, 793 bp, Homo Sapiens
gaaaacaaattgacttgttcatttccatattatctgcttgatgatatggagccagtgtcaatttttctgttagtgaatgttttggactagatgttcccgtccccaaaatttatatgatgaagcccttattaatgtgatggtatctggagatgggctcctccaaccatcccatcctggaacatataagccagaaagaaagtagtctccagaaacagaccatgctgacaccttgagtttgaacttctaatcaccagaactgtgaggaaataaatttctggtgtttaaaccacccagtcctatggtattttgttagggcagtctgagctacgacagtgatataagatagatagctagtaaggtaaacttttcaaaggcaagagaggaagatatacaagaaattgaaagaataattaagtcagtaagaggtaatattcagttttggcaaactcctctgacttgagttgaaaatacttttttttttaagagtaaaaaccaaataactaattctaattggcaaaaaaaggtaaataaataaacatcctaagtagctgctgaaatttccgttgtgtcttatagtttctttaggtctgtgttcctaagatgcttaaaatttttatcatgaaaaatcctattttctctatacccttcctgtactgttctattttggaaccagagaatcaataactggcttggtaatgagctcattgtccttaacttttgctttattgattcacaatacacttactgaaatgtaataaactattcataaacttgcaaaaaaaaaaaaaaaaaa

SEQ ID NO: 235780 - DNA, 678 bp, Homo Sapiens
gccttggatctcctgatagagaacagggagtgccgtggtgtcattgcactgtgcatagaggacgggtccatccatcacataagagcaaagaacactgttgttgccacagggtaggaatctaatttctactttatttcctttgtaaaaatgaataaatttcttttagagtgtctttattttaaggaaaatagaggcattgtagaatagcagttcagacacaggccttgatataaccatgtgagggtgatggcctttcccagccgtggttcctcacctgtaaagagtgaggacagcagcacctgcctcggggtgagaaagcatggccctcagtagtcggtagtggctgccgtcagcttcacagcttacctctcccgattttagatgaggcacctgcggcccaaagagtcacatggggttttctggcaaaatctctcttgttttagtgggttctgtgtttatactgattcctgggatagataagtctgtcttctccgcataatgaaaatgaaaaactttaattttatacagtggcagttactttagtcactttaaaagttaagaagtgtcagtacagccaagaaaaaaaatcagcaaaactacaggttgggaaaaaatattttccaaaccatatatctaatgatatcttagtatctaaaatagaaaaaaaaaaaaaaaaaa

SEQ ID NO: 235781 - DNA, 717 bp, Homo Sapiens
atctgctgatctctggagcgtttgtctctgtctatatccaaagaaatgttccgatatgcatattataaactcctaaaaaaagccagtgaaggtttgaagagtataaacccaggtgagacagcaccctctatgcgactgctggcctatgtttctggcttgggctttggaatcatgagtggagtattttcctttgtgaataccctatctgactccttggggccaggcacagtgggcattcatggagattctcctcaattcttcctttattcagctttcatgacgctggtcattatcttgctgcatgtattctggggcattgtattttttgatggctgtgagaagaaaaagtggggcatcctccttatcgttctcctgacccacctgctggtgtcagcccagaccttcataagttcttattatggaataaacctggcgtcagcatttataatcctggtgctcatgggcacctgggcattcttagctgcgggaggcagctgccgaagcctgaaactctgcctgctctgccaagacaagaactttcttctttacaaccagcgctccagataacctcagggaaccagcacttcccaaaccgcagactacatctttagaggaagcacaactgtgcctttttctgaaaatccctttttctggtggaattgagaaagaaataaaactatgcagatatgcgttccattcaaaaaaaaaaaaaaaaaa

SEQ ID NO: 235782 - DNA, 578 bp, Homo Sapiens
ggcacgaggcacgccgcaaggcccagccagccggcgtgaggaccccggcggcgccgcagtcccgcgagccatggcccagtccggcggggaggctcggcccgggcccaagacggcggtgcagatccgcgtcgccatccaggaggccgaggacgtggacgagttggaggacgaggaggagggggcggagactcggggcgccggggacccggcccggtacctcagccccggctggggcagcgcgagcgaggaggagccgagccgcgggcacaggaataggagctcggtgaattcaaggaccatgcttgcttcgttcattgtatcttcagcacctagcacagcacccagcacataggacatgtttgttgactgaatgcgtatctctatcatcacactcactcaatggtgttgagatatttgtgtttccccttccctagacagtgagatccttgaaggcagctgccttatcttattcctttttgtatttccatacctagcctaatacctagcttatataagggaacagaataaatgaacaataaagaaaagtctttacagcctctaaaaaaaaaaaaaaaaaa

SEQ ID NO: 235783 - DNA, 684 bp, Homo Sapiens
caggggaacagggggtaccagaggctgatttctcccctctcctgggccaggggaggggtattatccctgcctcctgcccccgatgcccaaagcagcatcttccagcactttccatcgaggacttgggtggcagagtgtgggtgcagcctggctgttgctcacccaagtgctagctctgcacttcgtgtctgctgagagcaaccagaccttccatgtcctcgggcagctgcaactccccgcgagaccccgcagctgggtgggatgaacaagcaacgcagaccacaagcgagtgcctgggagggagtggcccagggtggttctggagccattgtgggtgagggtcgagggccaccgaggtcccgcgcaccgctgcctgccctgcagtggctttaacagttagttttgccaaagcctctccactcaccagcaggcggtctctgtcttcagggattgtgcctgcgtccctcgggcacctgggcccccccgcttggctccctgggggaatggcccaggcgggctgcggttcctccttagggccttctccccgacaaggagtccgacggggcggatgctgcatcctctgcctccctggtcgctgggcttcaccccacctgggaagggcagtgtgctctgtgggggctgcaatcaataaatgccgggagctgcaaaaaaaaaaaaaaaaaa

SEQ ID NO: 235784 - DNA, 659 bp, Homo Sapiens
tgtggcagcggcattggtgcctgggttcttaaccctctggacccagcagctaggagcttctggaacccacgaggacatctgccactggcatggtctactcactgatggggtcctcctgactccagggcagagacgtccgtgcgggaactgaccgaggcgtggccccaggccccggcatcctcccctcgctgcacgtggtcacttccgaagcagcgctccctgtggccgcagagacagagcccgcaccctggctgtctgtggtgcctgggccccagctcccgcccgccacccgccctgttgagtgcggcctccagactcgagtccagaatctgtttctgtcaagtcagtcgtccccagctgcacacggggactgctgagcgctgcgctctcacgggtctgttccggacagagggtggcaggggtgagccctgatcccttacaaaaaataccagcttcccagggagtaatggcgccttcactgaagccattttgtacatggggacggggtggggacgtctcttttttggtgttggacgtttgaccagtggggaggggttcagaggcggcggtcctgtccttggctccgtctgtccgtgtggccttgctgccattccgtctgatcattaaacagagcttttgataaaaaaaaaaaaaaaaaa

SEQ ID NO: 235785 - DNA, 675 bp, Homo Sapiens
agatattgatcctggcatggaagtcagaccaggaaagagattatttatttatgacttagggatgagacttatttcagtggacaactaacctgggatggttaacatttccagtcccaccatgtattttgctgtgtttctaaaaagctttgtaaaaactgttatttaataccaaagggaggaatcgtatgggttcttctgcccaccgttgtgactaagaatgcacagggacttggttctcgttgcacctttttttagtaacatgtttcatggggacccactgtacagcccttcattctgctgtgtcagtttggcctggcctgacactggctgccccagcggggaccacggaagcagagtgagagccttcgctgagtcaatgctaccttcagccccagacgcatcccatttccatgtcttccatgctcactgctcatgcactttttacacggtttcttccaaacagcccggtcttgatgcaggagagtctggaaaaggaagaaaatggtttcagtttcaaaattcaaaggaaaaagttgaggacttattttgtcctgtcaagattgcaagaacatgtaaaatgtacggagcttcataatacgttatattgttccgaagcagctcgttgagaaacatttgttttcaataacattttagcttaaaaaaaaaaaaaaaaaa

SEQ ID NO: 235786 - DNA, 575 bp, Homo Sapiens
ccccatcagagagtccacactggcgaaaaaccatacaaatgtgacatatgtgataaggacttcagtcaccgttcacgtcttacatatcatcagaaagtccatactggtaaaaagctttagaaatgagaaatgtgttaccaacttttgtctgaatgcacatcttcaagtttttggctagtccatgctggtggtaaaccctgtaaaactactgagagtggaagggggtttgttcacacttggaatctttctaacaaatccatcaagatgataacacagaaccatgaacaggaatagaactcgtatttaggggagaaatagggctggtggctctcttggtaagatctagttaatataaatgatcacctttcattgtgaatatatgcctgaagataatgtgtggaaggatatttgccatatgctaactggttttttggccagggagagttttgggttattatcccttttctttaattttcattttatacttacagtgatcattattttcataaaagctgtaaagctatgaaaaatgaataaaattactaaaaattttctgtaaaaaaaaaaaaaaaaaa

SEQ ID NO: 235787 - DNA, 591 bp, Homo Sapiens
ctggagtgcagtggtgcgaccttggctcactgcaacctccatctccggggctcaagcgcttctcctgcctcagcctcctgagtagctgggattacaggcatgtgccagcatgcccggctaatttttttctttttttgagacagagtctcgctctgtcacccaggctggagttcagtggtgcgacctcggcttactgcaacctccacctcccgggttcaagtgattctcctgcctcagcctcttgagtagctgggactacaggcgcacaccaccacgccaggctaatttttgtatttttagtagagacaaggtttcaccatgttgaccaggctggtcttgaactccttgacctcaggtaatctgcctaccttggcctcccaaagtgctgggatcacaggcgtgagctatcacacctggccccagaagtgtttcaacatggaaattttccttagcccttctgtggttgtcatggcttaatgtgtgtctttccagaactttgaatgtttgcatacttgtggatgtacctttcaaatatgtttgtcttgtgtatcatatataaatggtattgtgttcaaaaaaaaaaaaaaaaaa

SEQ ID NO: 235788 - DNA, 708 bp, Homo Sapiens
gcaacgcccactcctgctgcctgcagtggaatggacgcagcttctccgtctggtttcatgggctggaggctcccctgccccaccccttttcgcccacggttgggtctgcctggaatacgctgaccgtgccttggccttctatgctgtacgggacggcaagatgagcctcctgcggaggctgaaggcctcccggccccgccggggtggcatcccggcctcccccattgaccccttccagagccgcctggacagtcactttgcggggctcttcacccacagactcaagcctgccttcttcctggagagtgtggacgcccacttgcagatcgggcccctcaagaagtcctgcatatccgtgctgaagaggaggtgatgccgggcacgggcgctcctgctgccgtctctgctccaggaagctgcctcctctgggccctctccttcgtctgggaaggcaccagcatgagtcccacacacccagccttctcatttctagaggcttccacctttttatacactcagccttccctctcccaggcaggaggacccccagaccctgttcccctgcagacctcacttctgggagacagagctacagctgggacagctccaagctaccctaacccctcctttcccaggtttctagaatagtgtctggcatgtagtagatgctcaataaacacttgttgaatgaaaaaaaaaaaaaaaaaa

SEQ ID NO: 235789 - DNA, 733 bp, Homo Sapiens
ctataagctgataccttcttcaaattcagccattcagttgtaaagttgggaagaagttcttgacaagactctgcaattaaatgcttaaaatttggaggggatccttccttgataccatcaagtatgttggtacatgggtttatacaagttcctcttgagaaggcaaaaagaccaccatgtgtgagagctctttgacttggccaataggggcctatcttaatgcacttgtttggacacatttctgatcttatttgtaaaggctgcaaaaggagaggatgaaatgctgtaaaagtaggaaatgaagtggaagctggaagaaaatgtaattggtggtacagctatgggccagatggtggaggggagggtggggacccctgccggcaagcagagtgtcacagctggctttcctcacttgggaaaagggtactgccggtctagcagcctcctctgtactcagccaggacacccagcgcgtgggacctgtttgtgtctgttttgcttccttgggaacggcacagtcactcaccctgccatttgcggaaatgacctggtgcactttgactgttaagcaatgcgttattgctgtagtcaaggttagtgcaagcaaggaaacattcccagtaaggtatttgtttccattttctgtctgtgcttctgtcagaaacttgctaggactttagtggccaataaaaaagaaattcctaatttcaaccttaaaaaaaaaaaaaaaaaa

SEQ ID NO: 235790 - DNA, 698 bp, Homo Sapiens
acgacacagtgcgagagggcatcttggatacagctcagaccatctgtgacgtggcatcgcgggaccatgagcagaaggggctgacgggcgccgtggggggcgtgatccgccagctgcccccgactgtggtgaagccgctcatcctggccacggaggccacgtccagcctgctcgggggcatgcgcaaccagattgtccccgacgcccacaaggaccacgccctcaagtggcgctcggacagtgcccaagactgagcctggggtgcccggcacccagagggtgctgcccaccatgctcctgagcctcccaagagctgcagcccacgggcccggcccggcctggcccttcaggggatggccactgtgaaggacgccttcccagcctgcccgttgccaatctgctgtgagaggggggcctccctgccttggggccttagccctggctctgcacttttcctccggggagaaaggacactgcccctcccccgacctgggcccacactgctgccttctcccaggacggaggcttttggaccctcggaccccatcccactcagccaagtgtctttctgtgtctggggggaggaggggatgatatccgtgtggttcgatgtattatttttaagctccgtgagtgcgtgggtcagtgtctgcatgaagtggaataaactgcccaccgccaaaaaaaaaaaaaaaaaa

SEQ ID NO: 235791 - DNA, 621 bp, Homo Sapiens
acccttttaagcatgtgatgttgtcttagcatggtacctgctgggtgtttttttttaaaaggccattttggggggttatttattttttaagaaaaaaagctgcaaaaattatatattgcaaggtgtgatggtctggcttgggtgaatttcaggggaaatgaggaaaagaaaaaaggaaagaaattttaaagccaattctcatccttctcctcctcctccttccccccctctttccttaggccttttgcattgaaaatgcaccaggggaggttagtgagggggaagtcattttaaggagaacaaagctatgaagttcttttgtattattgttgggggggggtgtgggaggagagggggcgaagacagcagacaaagctaaatgcatctggagagcctctcagagctgttcagtttgaggagccaaaagaaaatcaaaatgaactttcagttcagagaggcagtctataggtagaatctctccccacccctatcgtggttattgtgtttttggactgaatttacttgattattgtaaaacttgcaataaagaattttagtgtcgatgtgaaatgccccgtgatcaataataaaccagtggatgtgaaaaaaaaaaaaaaaaaa

SEQ ID NO: 235792 - DNA, 823 bp, Homo Sapiens
  misc_feature (53)..(53): n is a, c, g, or t
  misc_feature (169)..(169): n is a, c, g, or t
ccggcgcatcaaagagctcatcagcgagggggcagacgtcaacgtcaaggacntcgcaggctggacggcgctgcacgagccctgtaaccggggctactacgacgtcgcgaagcagctgctggctgcaggtgcggaggtaacaccaagggcctagatgacgacacgcctntgcacgacgctgccaacaacgggcactacaaggtggtgaagctgctgctgcggtacggagggaacccgcagcagagcaacaggaaaggcgagacgccgctgaaagtggccaactcccccacgatggtgaacctcctgttaggcaaaggcacttacacttccagcgaggagagctcgacggagagctcagaagaggaagacgcaccatccttcgcaccttccagttcagtcgacggcaacaacacggactccgagttcgaaaaaggcctcaagcacaaggccaagaacccagagccacagaaggccacggcccccgtcaaggacgagtatgagtttgatgaggacgacgagcaggacagggttcctccggtggacgacaagcacctattgaaaaaggactacagaaaagaaacgaaatccaatagttttatctctatacccaaaatggaggttaaaagttacactaaaaataacacgattgcaccaaagaaagcgtcccatcgtatcctgtcagacacgtcggacgaggaggacgcgagtgtcaccgtggggacaggagagaagctgagactctcggcacatacgatattgcctggtagtaagacacgagagccttctaatgccaagcagcagaaggaaaaaaaaaaaaaaaaaa

SEQ ID NO: 235793 - DNA, 716 bp, Homo Sapiens
  misc_feature (23)..(23): n is a, c, g, or t
agataattatgacagcttttacnttgagaagtgtagaacttgcttcaggctacaaaactgtattattcctaaatggataaccaggtaggattctaactggcattattgtatgcttaagattgatttaacaacagctattcccagtaaggaaattttaaaaatcagatccagttacatgtattatgatttttctaccttatggactattttggagggataagctattaagactaagactatgaatgagagttggggaaggagcaggaagggaggaacctgcacaccacattggaacctgcacaccacattaacacaaaggcaatcttctggctcggactgttctttactactgttcttaaagaaaatgttcattctgctgcagctaactagcctccatcttctacaccaaatactattccatgccatggaagtgctatgcaataactctcccaggtagcaccttataccgcttaaaagcctttaaaatctccaatctgaaggtgtcacagtaaagaaatgtaaacacttaggaaaacaaaaatgtaattacctgatgaagtcatctatgtccatggaacgggcccgtttgtcactaaaacctgtgctggttaggatttgctgtattttatctgctatgctgaaatcttctggtattatctatcaatataagattcagaataaatgaacgacatatctttaaaaaaaaaaaaaaaaaa

SEQ ID NO: 235794 - DNA, 744 bp, Homo Sapiens
cgaggcacaaatttaaatcgcctcatgaccatgtctgtgagccagggtcaagctggtttggccttcttgatgcattttccaaggcccactggtggagcagcatgagtttttatacagttactaacgattgtggaaaaaaagagctttagccatttcttactaaaaacaaaacaagtttataattaattctctgagcgagcatttttagggataagcctaggaggtattcatcggtgatggtaacaaataacatggtatttgaaagaataaattactaggatcttttaaatagtgataatacaaaagtaatcttaattagtatcacatactaaaagacaactataacttctgaaaaatatttattcttgtttgatgaaagcaacgtttctcagcaatgcattttaaaaaatattttagctgtaaattaaaaatggccataatgtacccttggcagacttcagcatataccaaattttaaatttaaatcagcttgaattcagtggggtatacaaatcattttagttgttttagggctttttattgaatagaaaaaatataaacaatgttgtagagtaatgagaaatcctccacactgaaaaaaaactagtagttttaatttttttggaatcatattttctgaggtgtaactggctttcattagatgatcatacttttcctgacatttttacaatgtattctttctttaaatataaaaactgacaagataaaaaaaaaaaaaaaaaa

SEQ ID NO: 235795 - DNA, 674 bp, Homo Sapiens
tacagcaggtagttctggggcgatactgccgaaaggcccgaacacatgtattttggctgcaattgaggaacttgggatgctattaattttgtatttcagcaactgccccttctcctatcccaaagcaccaattactgccctctgcctcagcagtaccagtataagatgacattccaaagactggaggcaactcagcctgagttaattcacaaaattatgccatgctggggcttgagcttgagcttgggcttaggcttgggctcagcttttgaccctcaggcatctccttttccttcctgtcttcctctcccttctcctctgctgcagcatgattttcttaatcttcagacactcactattttcatgaacagttaccctctgtccccacaaccaaagacaactcatggcctcctttggcccttgtgtaacattgcaaacctgtggctttgcaaaatgtacccaggtcacaaggggatttttttttttttagcaatgatatccctgtctgggtcactttttaagcttgtaaccgcccccccagacttataatcttaaatgtattttcctttgtttaagctgctgcttcctctgtttcattggattgtgccagttatcagtggctcttgggttcaaagtaataaagaattccaaaactgaaaaaaaaaaaaaaaaaa

SEQ ID NO: 235796 - DNA, 715 bp, Homo Sapiens
  misc_feature (73)..(73): n is a, c, g, or t
gtcaaaaaactactcggaaaacactgacaaagacttatcgaggagacgttcctccaggctgtccactaatggnacccatgagatcctagatcctgacttggttgtatcagatttggttgatacggatcctttgcaagacacgttgtctagtaccaaggaatctgaagaaggtcagttgaagtctgctttggaagctggccaggtctcatctgcactgacttgccactcctttggggatggatccggggctgcaggcttggagttgaactgcccatcaatgggagaaaacacgatgaaaacagaaccgacttctccccttgtggaattacaagagatttcgactgtggaagtaacaaatacttttaagaaaacagatgattttgggtcatctaatgcaccagctgtcgacctagaccataagtttagatgcaaagttgtggactgtttaaaatttttccgcaaagccaaactgttgcactatcacatgaagtatttccatggaatggagaagtcactggagccagaagagagcccgggaaagaggcatgtccaaaccaggggcccttcagcttcagacaagcccagccaggagaccctgaccaggaagcgggtctctgccagttccccaactacaaaagacaaggaaaagaataaagagaagaaattcaaggagtttgtgagagtgaagccaaagaagaaaaaaaaaaaaaaaaaa

SEQ ID NO: 235797 - DNA, 747 bp, Homo Sapiens
  misc_feature (79)..(79): n is a, c, g, or t
tgtcacagcttaactatagctctctctgggggtgtcaagattagcccaaccgaataataataataaaatatgtacagtntgctgctgattcttccttgtgtggccttttgaggagcctcctggggaattggaggattaagacatgccactatgagaagattataggaaaaacaccaagactagaggactctgggttccttttatgcaaagtcaactcttctgggtcacagttacccagcaacaaaaataaagaatttccccatggactccagatcctttactactgaactcacagggctgtaacactgttactgtacagagaggaccaggacgatgccagcaccccgtttatcctgagtgaactctccggaggcctcttcaagcttgtgggttctctgctgtcttgaagccatccatccatttgataggttttgcaaagacttggtcctgccaagatggttttaatcatttctgctaaaaggaatggactcgaggatttgatctcattttagatgcagttgtcctcacttggccattttacagcactttagtaaatatggccagtgtatttggtcactattaaatcaatccccattcattatctgtcagggcaactcagtgaactaaatactatgttctgacctctggcactctttctcatgttgtttaaatatttaatattgtctaaggcaattcaagtattttcttaaataaaaaatatgaaaactcaaaaaaaaaaaaaaaaaa

SEQ ID NO: 235798 - DNA, 757 bp, Homo Sapiens
  misc_feature (39)..(39): n is a, c, g, or t
  misc_feature (54)..(54): n is a, c, g, or t
gcatgattccatgaagctttagttttcctttttttgttntaaaagaaagggttntatatgttctattgtaaaatatggaaattaaacagggacttcagaaagccgcacagaaagatcaccttccgatggtgtgatgtgctcctgacattcggccgaggtctgtattctgaaaaagatttaatggcctgtgaaacacgtggattctgttgcactggatttgtaataaatgacgctgaacttcctgcttccaagcagctcaaccctgatgctgaactgacaccaggcgaatgtcagggctcccaaaccactagtgccaaagggtcatgttgaaaagttcagaatatttatttgtcagaatataataattgccccccaccttagtatttttgcactttacagaaatttagatactgtttttcagtggcttgagcgttttgccttttcaaaggataactattattttcttgaaaatggaatataatcatgagaggaagaagatgtaaaaaatgtcaaatgttgattggttgtgtaaaagttttgtcatagacatgtattggggagcttccaattagcatacatagacacatgtgtcagtggccaagacctgcttatattttgctttatagatgtagtcatagcatgttgttattgcctcatgtaaataaaaaggctattaagttttccagtaatatttattaatctgtatgtgttttaaaataaaataacttatttctagctgaaaaaaaaaaaaaaaaaa

SEQ ID NO: 235799 - DNA, 694 bp, Homo Sapiens
cgccctggcccggccctgcccagcacgcgggcccgtcagagcttccccgggccccggcagcccaacggcgcccaggactggcgccgcgcagactccctgccccggccccagggcatcaccgtgcagttcgcgggccgcggctcctcggaggaggcgcgcagggaggccctgcggaagctggggctgctcagggagagttcgtgagggccgcgcgggctccagtccaccccgtttctccccaccctgaagagagggtgaaagagtcgctgcacccaggagctgtttggtctaaaatggaagtgacagcgggagcccctgccctctgtggcacatcggagtctagaggtgcctggctggggcctcctggctgagcacgcaccgcaagctccagccaccggcacagagaactcttccctaaaggaatctggccgagggcttgtctcccttttcccaagaactgagagagagagaataacctgttagacccataggtttccgtgatgtgtaaatgccatcttttgggggttgggaggagtaggactggtctgattatcattcttgagtctcatctaccctcttctcgaagtacatgacatgaaagttcagatcccttccactcaggattctcgccgccttttctaagaaaataataaaaaaaaatgcttgtttcatttttaaaaaaaaaaaaaaaaaa

SEQ ID NO: 235800 - DNA, 786 bp, Homo Sapiens
  misc_feature (51)..(52): n is a, c, g, or t
gcatggaccgatcgcatcctgtggaggctgaagcgcagcccctgtgctgcnnccgacactcccataccgccggcgtcacacttctccttgtctctgaggggctacagcagccacatgacgtacggcatcagcgaccacaagcctgtctccggcacgttcgacttggagctgaagccattggtgtctgctccgctgatcgtcctgatgcccgaggacctgtggaccgtggaaaatgacatgatggtcagctactcttcaacctcggacttccccagcagcccgtgggactggattggactgtacaaggtggggctgcgggacgttaatgactacgtgtcctatgcctgggtcggggacagcaaggtctcctgcagcgacaacctgaaccaggtttacatcgacatcagcaatatccctaccactgaagatgagtttctcctctgttactacagcaacagtctgcgttctgtggtggggataagcagacccttccagatcccgcctggctccttgagggaggacccactgggtgaagcacagccacagatctgagccaggatgggagtgaatcccaggcggaggccagagctggcagccagctctgcctttccactgccgggagtgctgggggcccagcctggccccctgaagagacagccaagtgtcgtccacatactcctcccagagtgagctctaaccaggctcatttgctctctccactactcatctctggaattagccgcttaaatacaggtttttgttgctgagaaaaaaaaaaaaaaaaaa

SEQ ID NO: 235801 - DNA, 742 bp, Homo Sapiens
tccggggcccgccagccgtcagactcgaagtgtggctgtcatgcttctacaatcagtgcatttcttcgctgacgtcagtcggagctgtcctggcactatataaggctggcgacagccccgggacagaccctgtgttccccaaggcgtcttcagcctgccccgagggacagagactggagctcaatcttggaccgtacagacgctcgccgacaacctggccggcggcaccatgaggcaggcgggacgcgcagcgctgctggccgcgctgctgctcctggtacagctgtgccctgggagcagccagaggagccccgaggcggccggggtccaggacccgagtctgcgctggagccccggggcacggaaccagggtggcggggcccgcgcgctcctcttgctgctggcggagcgcttcccgcgccgcgcggggcccggccgattgggactcgggacggcaggcgagcggccgcggcgggacaacccttctctgtccattgacctcacctttcacctgctgcggaccctgctggagctggcgcggacgcagagccagcgggagcgcgccgagcagaaccgcatcatattcgactcggtgggcaagtgatggcccggtttggggctgcgaaaacgttgacccctttcccccaccccagagttgggatgcggggcagagccaccagggcactgtctgcgtgactattttttaataaaagtactgaagaccaaaaaaaaaaaaaaaaaa

SEQ ID NO: 235802 - DNA, 683 bp, Homo Sapiens
cccctgaggtttccagatttcatgtcattaaagcattagttcaacatgaaaaatgtcatgtagaccacatcagatcaaaagtttaaaatcccatctaaaacatccacaccaggtgtgaatgaggcttccgagagtgtccattaagtgcagatccttgacataattcccttacctctgtcgacctgtgaaactgaaaacagcttatctgcccctaatgtgaaatgatgggacagacatagaataaccactacagtgattctagttcaaaatgagggaacatggaggggataaagaagtcaataacccaaaatagtttggaaatggagctgggcaaaatccagcaggagtttcttagttaggatccacagcctgggactgaccctctgtcctgtgggtctttgcctctgggctctctgctctgcatttcttgaaaccattattatttatcatttttctcacactgttttgcgtatggctcctattgcactcaaaatgtttttgagattcatccatgttgttttgtgtgtcaaaagtttgttcctttagccattccatggaatgaatgtatcacagtttattgatccattcttgtattgatagatatttgaatgtttccagtttttcctattatgaataaaactgctatgaacattcttgtataaatcaaaaaaaaaaaaaaaaaa

SEQ ID NO: 235803 - DNA, 771 bp, Homo Sapiens
cattctcctcacatatggaggtgacgctcgtgtcccagcagtagtaggacatgcccttagaggtacgtacctgcagagagctgctatttccaaatgactcgggaacaagaagccaggctgcagtttaaagaagggggtgggtccagcgtgcaggcacgcttgccatgtgcctccacccactcccagccaggcattaatggcaggagattggccagctcttctctgtcacattcctatttctgacttctgcctggctttcagtttctgccccaccttggctttttcccagcttgaacctaatagaactccagagtttggggggaggcccagccctttgttttctgctcttgaagcatattcacacataaaaagttgtattctcttatacaaactgttttgaggctcttaccgtagtcgaaggtatcttagatcttccttagtgatctcattaagaatatccgaaagtgtataaccctcttcaacaatctgaaacaaagatcagatccttaagagctgagcagctgtgtaacaacagcataagaatttctttgttgtaaatttaccttttcaattgtctttgcatcagctccttgcagccgcaaccagtctataagctctttatctgttctctgcccgtaggggcctgctgggttctctgtaatacctgtaacgattggcaatttgttatatattagtctaaccataaaactcttcaaaagtaaccagttggattaataaatgattccagaatgtaaaaaaaaaaaaaaaaaa

SEQ ID NO: 235804 - DNA, 675 bp, Homo Sapiens
  misc_feature (92)..(92): n is a, c, g, or t
ctttctcctcctgctctttctccccgctgtgcctcccccagttacccacagaagtgcctgcctctccagcgctcacagaacacacaaaaagngacaggaattggtcactgggtagtggccgtggctcctgacgatccagaccagcgtctggcccaagccattcagaggtggggtctggggcctgggggttttgtgtcgtgacactttgtctcaaggagattccacatagggatttgaattaggctttctgcttgccaaggcctgtggcatctgagcctggctgagggccgggcaagcctcccctgagcctttggaagccgagttcactctctgcctgcccaggggagcaccggcttggttctgggggctcctctaacatctcaggtttttatcttgtcttaaatttctttctaggaaaaaacccttccctgccaaaggtgactgtgttttctgccgccgaaggagggcccggtccctccaggctcagtgtggcttctccctgacccccgccctagaacttttgccagtgccttttctgaaactcctgtgtcccgggccccccaggcggagaaggatatgccggattctgcctggggctgggctctaggagaccccaaatttgacaccacagaaagcaaataaaacacttgaaatacgaaaaaaaaaaaaaaaaaa

SEQ ID NO: 235805 - DNA, 724 bp, Homo Sapiens
  misc_feature (105)..(105): n is a, c, g, or t
agccctaatgctgaaattcccctaggcagctccagttttctcaactgcattgcaaaattcccagtgaacttttaagtacttctaacttaaaaaaatgaacatctntgtagagaattttctggggaacatggtgttcaatgaacaagcacaagcattggaaatgctaaaattcagttttgcctcaagattggaagtttattttctgactcattcatgaagtcatctattgagccaccattcaattattcatctattaattccttgatccttcatttatccattctgcaaacttttcttgagcaccagcacgggtggccatttgtggacttctcttcattcctatgtgttttcttatcaaagtgatccactctcgaaaggctcctttccagtctgtggttgggttcaagtcatgccagggccagggggcccatctcctcgtttagctctaggcaaaatccaggggatctgcagtggggagcgggggcaggaagctggagggaaggcctgtgaagggtagggatgtggaaagacaaggtgacagaaggacccaataggacctttctatatctctggcttagcattttctacatcatattgtaatcgtcttatttgctagttttcttccttactgtgagtgactaacagtcatctttatcccagtgcctggtacataataagtgatcaataaatgtggattgactaaatgaaaaaaaaaaaaaaaaaa

SEQ ID NO: 235806 - DNA, 617 bp, Homo Sapiens
aggagcccggggaccaggggccagcccaccctcctggggctgacatgagccattccctgtgatgttcactctcctcccaaagcaaaccacagccaagcctgtctgagctgggagtccccttccccagccctgggtcagcggcatcctcagtcgttgttacttactcagctgatgtcacagtgcagacatccaccgttccaccacagaaccagtggctgagcggaccaacgttgccatgtgcgtttgctctgtggggaacagagcacagagggtgagcgacatgtgcagaacggccccttggctgcagttaggacctcagtggctggtatggccaagctgctagaagatgctgctgtccctgtgatcccagcagccctcccttcaccgtgacccctgacctttgtcaggaaggtgcagtttttcttctcaatctaaatgcctttcaggtgggccgcttccttggctacctggttccagggggctgttttgtaatgagatgctgctggcaggccactcagaggctcccagctgggttggtgggacagccaggccagatgacctgattccagcaaaaataaaactcagatttgggcaaaatgaaaaaaaaaaaaaaaaaa

SEQ ID NO: 235807 - DNA, 608 bp, Homo Sapiens
  misc_feature (67)..(67): n is a, c, g, or t
ggaggacgaggcggaacgctccgccctgcccatgtgcggccccatttgcccctcggccgggagcggntaggccgggacgcccgtggtcctcaccccttgagctgctttggagactcggctgccagagggagggccatgggccgaggcctggcattcacgttcccacccagcctggctggcggtgcccacagtgccccggacacatttcacacctcaggctcgtggtggtgcaggggacaagaggctgtgggtgcaggggacacctgtggagggcatttcccgtgggcccccgagacccgcctagatggaggaagcgctgctgggcgccctcttaccgctcacggggagctggggccatggatgggacaggagtctttgtccctgctcagcccggaggctgtgcacggccctcgtcacaaggtgacccttgcagcacaggccgcgggtgccccaggctcggctcagttcttggaggtcaagggcatgggttggggtagtgggtggggaggtgaatgttttctagagattcaaactgctccagcaatttctgtatagttttcacctctgagaattacaatgtgagaaccgctaaaaaaaaaaaaaaaaaa

SEQ ID NO: 235808 - DNA, 387 bp, Homo Sapiens
cccccgccggcccggaccctcggaccccgcagccccacacgcggagctgcaccgcctggggtcccacccggcccccgccagggcgcagaagccagggagcagtgggctggccgcgcgcgggctgtgcgtcctgggggaggacaacgcccctctctgagcggacccggtgggaatccgagcggctccctcgggagcggggactgctggaacagcggctattcttctgttattagtatttttcttactgtccaagatcaactgtggaaatattttggtctcttgtgacgttcggtgcagtttcgttgtgaagtttgctattgatattgaaattatgacttctgtgtttcctgaaattaaacatgtgtcaccaaaaaaaaaaaaaaaaaa

SEQ ID NO: 235809 - DNA, 531 bp, Homo Sapiens
aacaaggatactgtcataactaaatttacatttattaagaaaaactgctttagttaaaattaatgtgtcttcatttttatgcattggcctcgatttgccaatcattctctattggttaaattttatattcagctgtttatgaatatatattcattttatatcaaactttaaaattttgtatctaataatcagcatatattctaaaatcataacagtctaaatcctgggcaccttagaagaatgacaccagaaaaccttattatatcacaatattctgttttccccttcatttatttagaaatatgacaggatatttggtgtacttttgttttttaactaaaagtaccagattatctctccccatgtgggatataaaattatccccatctcttactccctttactcatctaaagtagaagtcatgaaagtggaatttttgccattaaaaggctctgtattatgtgaagttagattgtattaaccattcccaataaatcatctgtttcaaaactcaaaaaaaaaaaaaaaaaa

SEQ ID NO: 235810 - DNA, 637 bp, Homo Sapiens
ctcggaaggagcagcctacaagataacttgaatttgccaattctgcaaaatctgtgcttttttgaaaatttaagagtggggacgtgaaactgtattctgtgccttccatcatgatttccacatgaaagcactttaaggcactgattttaagataatgtttttggaaaacccaatgcatatgggtttctgaaatattttatggacttatttctccccaggaaatgattcttacggaaaaaaattgcttttgtatgtagaacaggaactttttgtattacagtgatgcaatagacatgtctaatgtaacttctacttttccttttgaaagctcagtgtctgtgctatgacttgctctcatcacaatattgttgaattccacaatgtatggacattaaacactggcagactgttcactttttcttttttttttttggtaaaatattacttcaaacccctttttcttgctttatttttcagtgttttattgctttatgaactgtttaaccctgaaatccctctaggttatctatactgtataaaaaagcaattacccttaaaactgtactctggcctacttttctattttgcaattaaattctttttcacatatgttcattgtaaaaaaaaaaaaaaaaaa

SEQ ID NO: 235811 - DNA, 668 bp, Homo Sapiens
gtaaagatgagcccagcagctacacatgtacaacttgcaaacagccattcaccagtgcatgtttctcttgcaacacgcacagaacactcatggattaagaatctacttagaaagcgaacacggaagtcccctgaccccgcgggttcttcacacacccccattcggcgtagtacccagagagctcaagatgtgtggcagttttcggatggaagctcgagagcccttaagttctgagaaaatttgaagcccccaggggtggggtggacgcgtgccgcccagtcgacgtcagcgtggtctgtcatcctgctagtttgtgatgttttctgacagtagcctccaagaagccgttgtgcgaagacagagtcctgcagagtccttccagcctaggcctgcagcgccattttatttatattttttaataaaaagtaaaaacaaaaaaacagacccacattggaacagtgaatcagtcccatagagagggcccgtggaccatcgctgtcatgagtgatgccctggcccttctgaaaccagccaacctaattacctgtattgtggaaatgcgcatgagtccccaaccccttgtttctatacattctatgttgtcttttaaaaagtgtgcttaacattgacacaataaatgttggagctttaaaaaaaaaaaaaaaaaa

SEQ ID NO: 235812 - DNA, 606 bp, Homo Sapiens
agaattcggcacgaggtttgtactcacactgtgtcatcaccagaaaattaaaaatttccagatcttaccttgcgaggacgacgggcagacgttcttcagcctagatgacgggaacaccaaattctctgacctgatccacctggttgacttttaccacctgaacaaaggagtcctgccttgcaaactcaagcaccactgcatccgagtggccttatgaccgcagatgtcctctcggctgaagactggaggaagtgaacactggagtgaagaagcggtctgtgcgttggtgaagaacacacatcgattctgcacctggggacccagagcgagatgggtttgttcggtgccagccgaccaagattgactagtttgttggacttaaacgacgatttgctgctgtgaacccagcagggtcgcctccctctgcgtcggccaaattggggagggcatggaagatccagcggaaagttgaaaataaactggaatgatcatcttggcttgggccgcttaggaacaagaaccggagagaagtgattggaaatgaactcttgccctggaataatcttgacaattaaaactgatatgtttaaaaaaaaaaaaaaaaaa

SEQ ID NO: 235813 - DNA, 542 bp, Homo Sapiens
  misc_feature (16)..(16): n is a, c, g, or t
catttttgcatacatntgctacagacagcactatcctcctctggccaacacagcttgccataaaccctacgttagtctgcgagtcccagcctcactgaagaaagaggagaggcccacagctgacagtgcacccagcttgcctctggaggggatcaccgaaggcccggtatgaccagtgtcctgggaggatggacactaagccctgggcacatctgccaccctgacatcataacacaatagaaatggttttctgtagtgtatttttcatcagttgtttctcaaagtcatcgtacttctgcttctgtttcactgatggtgttcctgctactttaaatgtctacttccaacatccttgaatttgcaagtgaaggacaacaatctctgagagacgtgtggaagaggctgtgaaggtggggtttggggagcttggccgattcgtctatctgaaatgtttgctgtaacagccaccttcctatgttttcatggttgtaaaacataataaaacctcccacgtggaagacttgaaaaaaaaaaaaaaaaaa

SEQ ID NO: 235814 - DNA, 611 bp, Homo Sapiens
agtatgaatgtggatgaggcttttagttccctggcccgggacatcttgctcaagtcaggaggccggagatcaggaaacggcaacaagcctcccagtactgacctgaaaacttgtgacaagaagaacaccaacaagtgctccctgggctgaggaccctttcttgcctccccaccccggaagctgaacctgagggagacaacggcagagggagtgagcaggggagaaatagcagaggggcttggagggtcacataggtagatggtaaagagaatgaggagaaaaaggagaaaagggaaaagcagaaaggaaaaaaaggaagagagaggaagggagaagggagaggaatgaattgaggaagtgaaagaaggcaaggaggtaggaagagagggaggaggaaaggaaggagagatgcctcaggcttcagaccttacctgggttttcagggcaaacataaatgtaaatacactgatttattctgttactagatcaggttttagggtcctgcaaaaggctagctcggcactacactagggaatttgctcctgttctgtcacttgtcatggtctttcttggtattaaaggccaccatttgcacaaaaaaaaaaaaaaaa

SEQ ID NO: 235815 - DNA, 666 bp, Homo Sapiens
cgcagaatggcgtcctcctggggatcagcactgccaaagtggatgccattggactagagcttgtggacggcaaggtcttgttccatgtcaacaatggtgctggcaggataacagctgcatatgagcccaaaaccgccactgtgctctgtgatggaaaatggcacactcttcaagctaacaaaagcaaacaccgtatcactctgattgttgatgggaacgcagttggcgctgaaagtccacacacccagtctacctcagtggacaccaacaatcccatttatgttggtggctatcctgctggtgtgaagcaaaaatgcctgcgcagccagacctcgttccgcgggtgtttgaggaagctagctctgattaagagcccgcaggtgcagtcctttgacttcagcagagcgttcgaactgcacggagttttccttcattcctgtcctgggaccgagtcctgaacttcaagcagaatcctcagttggaatcattgctaatattttgaggagaagtgtatgtgtgaattaagaatctcttcagttcatatttcatttccaactcaggttaagtgtttctggggagagatgttgtgtttacgttacactaaaaccacatgtgcaacaaatacctccattaaatggtctaaaatgtaaaaaaaaaaaaaaaaaa

SEQ ID NO: 235816 - DNA, 725 bp, Homo Sapiens
gcccagcatcatgaaggcccttgcagctgccctccttgtcctcgtctgcaccatggccctctgctcctgtgcacaagttggtaccaacaaagagctctgctgcctcgtctatacctcctggcagattccacaaaagttcatagttgactattctgaaaccagcccccagtgccccaagccaggtgtcatcctcctaaccaagagaggccggcagatctgtgctgaccccaataagaagtgggtccagaaatacatcagcgacctgaagctgaatgcctgaggggcctggaagctgcgagggcccagtgaacttggtgggcccaggagggaacaggagcctgagccagggcaatggccctgccaccctggaggccacctcttctaagagtcccatctgctatgcccagccacattaactaactttaatcttagtttatgcatcatatttcattttgaaattgatttctattgttgagctgcattatgaaattagtattttctctgacatctcatgacattgtctttatcatcctttcccctttcccttcaactcttcgtacattcaatgcatggatcaatcagtgtgattagctttctcagcagacattgtgccatatgtatcaaatgacaaatctttattgaatggttttgctcagcaccaccttttaatatattggcagtacttattatataaaaggtaaaccagcaaaaaaaaaaaaaaaaaa

SEQ ID NO: 235817 - DNA, 780 bp, Homo Sapiens
  misc_feature (142)..(142): n is a, c, g, or t
tccatggcacagtgtgcgctacgtggcacccctcaagatgcgtggctctgcagtactgcgtggtcaacatcctctctgtcacttccgccatcgtggtcatcacttcaggcatcgcagccatcgtgttgtcacgctacctccntagcacccccctgcgctggacagtgtttagctcgagcgtggcctgtgctctcctttctctgacctgtgccctcggcctcttggcctccatcgccatgacctttgccacccagggcaaggcactgctggctgcctgcacttttgggagctctgaactactggccctcgcacctgactgtcccttcgaccccacacgcatttatagctccagcctgtgcctctggggcatcgccctagtgctctgcgtggcggagaacgtgtttgctgtacgctgtgctcagctcacccaccagctgctggagctgaggccctggtgggggaaaagcagccaccacatgatgcgggagaacccagagctggtggagggccgtgacctgctgagctgcaccagctctgagcctctgaccctctgagagatgatgtcctgcccaggcccgatggccactaggaccctgcaagcaactctgctctgtgaccaggccaggattcctggagctggcctgagagggctcaatggaccctcggggacccaagtggggctttcaaccctctcccccaccacccagcccactgcactgaaatgagactttattctgaaattattaaaaagaacagagatgcaaaaaaaaaaaaaaaaaa

SEQ ID NO: 235818 - DNA, 622 bp, Homo Sapiens
ggcacgaggaaaaccatgttatttaacctgccaatcaaatggaaagggatcatggcaaaagcaaatactgcatccttttcttccgcagaactagagtcagagttcggcagctgcgtacaaaggcctctgccctcggcttgagcaaaagttgtaaataactagtatttattaagcacttataagcagtttttctcacttagtcctggctccagttctagagttcctctttattgcttttggtgaaagtttggggttgggggtacacctcagaggttcagtaattcacctggagtcccaccctgaacagagctggacccagagccacacacgcccgggaacacacactgtgctggggaggaagtgggcctaggagggcctgcaggtccaggcagctgtagagctgctagaagctggggtgttgctctccccgctttctcatagacacagaggtactgtctgcctgttgtcacacagttcatatgctcgcttgagatggaatctgaaccttggtcccaggatctgtgctttttcccactttgccacactgtctaaggtggctttgaactggaacccaagtgcaaataaaggttggtattcgctcctgaaaaaaaaaaaaaaaaaa

SEQ ID NO: 235819 - DNA, 712 bp, Homo Sapiens
ttactcggatgtgacaccccagccggtggcgaaccactgcaggccgatggcatggccatgatccgttcctctctggctgctttggacaaccacggcggtgaccccctgggcagtcgagcatcttccaccacttataggaactcagagggtcagtttttctccagcatgactctctgggggctagcgatgaagacgctgcagaatgaaaacgagttagaccagtgatgtaccgcgcttctccacggtagaggcgtgttctcagtttagcaggctggtgttaaggctgtaggaggacccagtttccccatgacagtgccttctaactagccagagaataggtagcttccctcctgatgatggctcataatctgaagcatcttgagctgggggtgtgagggggagggcctgctggctcaccgtgaggcagccgcgggagggagcgctgacgtcacagaagcgaaggcttgatgctgtctcagcagcctcagctgtgggggggaagcgcgtgtgcatcgtgtcaactactgtacatgttggtcatgtgaaaggaattatatatgtatagtattacaagtatttttgcatttttacaagattgaaatttgtagcattttgtattatttacacagaatttatttgtatatgaaactcataccataatttaattcgaataaatgaaacttttctatatattaaaaaaaaaaaaaaaaaa

SEQ ID NO: 235820 - DNA, 436 bp, Homo Sapiens
tccccacagcttgagtcctagacagcccacctctgcatcctgcccctcttgtctgagccccagactggagggcaggggcagggctggagtgtgagggatgggggagatgctacctcccttctaggggccaggggagggagggtctgggtccaggccctgctgctcacacctctctcctctgttttctctcttagagcccccagaactgcagcatcatgtaatctgggacctgccaggcaggggtgggggtggaggcttcctgcgtcctcctcacctcatgcccaccccctgccctgcacgtcatgggagggggcttgaagccaaagaaaaataaccctttggtttttttcttctgtatttttttttctaagagaagttattttctacagtggttttatactgaaggaaaaacacaagcaaaaaaaaaaaaaaaaaa

SEQ ID NO: 235821 - DNA, 541 bp, Homo Sapiens
gatatcattgatgtgctgtcacactatatattgagtgactttctgaacaaatttatccagaacatccatagcccaataagcttttgtctaagttgtcatcttacttactcacaaaggaggggaaaacgttattttcatagctgcttttagaaatgtagattgtaacagcctccttggacaacattgtgagtctgttttaacattaatatactcttacaacctaggaatctcctgggaatctatccctaaggaataaaaagcgccagcacttaagattatatgtttactaatgtatattgtattttttggtaaggaccaaaaaaacaaacaaaaaaaagaccatcagtaagggaatggatgaataaattgtggtaaaaacataccatggctgaatggtatttccttgaaaagaatgtgtgggaacaaactccaaacttctctaggtcaaatgaggaaagcaagaggggagagagagagtgtatgtgtgtgtgtagcagtttttataaaataaagataaacccttataaaaaaaaaaaaaaaa

SEQ ID NO: 235822 - DNA, 549 bp, Homo Sapiens
gacatttggtgtctgcccactgcagccatactgtgacctccagccagacttccgcctaattgactccactggatttgtgctctgttgagtcagaggctcccgggggttggggatcgaggggcgggggtcagctatgcagcccatcacgtgtgtttttcatctgggatgaaaaagcctggttctcttttgaaatgcttgattgtacttattgagctaaacaagtcttggtgactgttgttgatttgcctcaaaagttttaagtcctgggttttcagactactgtgtagcagctgtgtgtttaacatactgtagctttttctcccttgggggcacatacaaataggatgtgttgatgtggactctaaactgtaattttcctgtaactattttggaatgatgcatatttctaatgtttgttatacttgtacagagtattgctgttggttgcttttttttttttttaaggaaaaaatggcctgaaaacatttttttaaagacttacaaataccaaatataaaaaaatgtcaatgcaaaaaaaaaaaaaaaaaa

SEQ ID NO: 235823 - DNA, 544 bp, Homo Sapiens
caaaggaattcttaataattcctgtaagcctaggaaataggaatgccaaagtaacatttaatgtacttctctataacttttcataatcagaaattttaaattatgtttatataacccatttacttttattttaatgtgaatatatattcagaaattatttgatgtaaatttcaaaatgattataggaattaagctgaattctaatttttttgcttagatttagaaatatgtatgtgaaatttaagaatttatataatctgtgattagtggaaataagaacatccctactttgttcctaatgagtatattatgttattgttttgtttagtttgtgaacaaccatgtattagctttacttagctgatgtcagtaaatgtttctgtctcctaaatgtaaggactgtactcattaatttgtgtaaaagtaaaacactacagtagcagaaaaaattgcactggctctttagccaaaataagcactgtaacatggatgtattactattactgccaaataaaaaagtgatggtaaaaaaaaaaaaaaaaaa

SEQ ID NO: 235824 - DNA, 512 bp, Homo Sapiens
  misc_feature (25)..(25): n is a, c, g, or t
gagcagactcagccacccacaccantacagctcagatcgagaaaatgaccgcaatctctgccagcaccttgggaagagaaagaaaatgccgaaggcactcagacagctcaagccaggacagaacagctgcagggacagtgacagtgaaagtgccagtggagaatccaagggcttccaccggagcagctctcgggaaaggctcagtgatagttcagctccttccagcttgggaacaggctacttcagatcagggaagatgtgccttggagaggaagcatgtcttaaatctggaaatgatatgaagagggatgtcagcaacacttcatcctgggccagtaatagggagagtttcttttctctcgtcaaattgcttaaaggattctagttccgtttggtgtggtcactcacatttgaattctaatactctatgtgatatagattctgttgactactgttagcgtgaccccaatgagaaattaaacacttccctccttaaaaaaaaaaaaaaaaaa

SEQ ID NO: 235825 - DNA, 744 bp, Homo Sapiens
gtagcatagagtgagtagcccctaaacaagaaccaaaatggagggtacggatgaggctcagatcgtcaccacctggagaatagagacagtgactgagtcaccaggaaatctgtcccctgctcatcccagaatccccgagctttgactttttaagagaacatgtgacagataatgccatctgagaaggattgcctcctttactgtatgttttccactgagatgaagattttggtcatttcctcattcatgttcctgcttttcaaaacccaagcaagaaaggaaacttctacagtgactttctcattatgaaatcttagcattcactagtcggccataatggaaaaccagccaaatggacacatatacactggtctgtacccgcagagaaagaaatgcaaatctctgtgatcagaaaactatcctatcttgtacattgttaaaagtctgcctccaaaaagtttacttctggaatactgtaattgaatagaatcagggatcctacctgtgtccttcaactttcacatcttgtctactcaagtaagggttgaatttgcatgactatatctaaggttcgagggcttacctgttggcagtagacccagtagtctatgaatggaaatgggcaaacctgtgacctcccaaaactttaatatgaaagttttgtttgtgtatactcatggcattattcttttaataaagagataatctatatagttttctttttttaaaaaaaaaaaaaaaaaa

SEQ ID NO: 235826 - DNA, 516 bp, Homo Sapiens
actgcacagctgggaccccctgcccctagatcccaatactggggatgggaggaccttgcactattcccctcagtccatctatcgaggtctttgcaggaagcatactgggaattgaaacgagagcctaaatgacatctaagaaaggcagtgttcaataccaggtattaggtgaggatgggattctaaggacatcagtgggaggcagggagccaccttcagacctcagcatggaagcttccaagatccagaggaagaggcaacagcactgagagtcataggtagaagaatcatcacagccctgctaaccaggcagctgatgcccctctcccctggctccctgtgtccaaatcctacaggggcatctgttggctgaactcaacctgaagccaaagagaagatgagtggagagaggcaacatttatagagctcaggtttctagggctggagagggatctggagggacacacaggagacacctggcataaccaaaaaatgattaaaaaaaaaaaaaaaaaa

SEQ ID NO: 235827 - DNA, 648 bp, Homo Sapiens
  misc_feature (43)..(43): n is a, c, g, or t
aggcaacatagcaaggtcccatctctaaaaaagaaatttaatntaaatttgtaagaaaaaagaaaactgaaacagaactgccagtacaatgtttgttgcaattgtttccaaaactttgaaataacgaaacccctattcaaatgtaaattttacccattcccacctgatagtactgtttattactttgctatgcaggagaaacaaaacagctttttatttgtgtgtatactctgaagtcaatgtgcatgggttaaatcccacctctgcttcattttatttgtgtggctttggacaagttcctaagccctctgtgtcaggcccctcattaacaaaatggagtttatgatggcatctacctcacatggttattgtgtggttgaaattagttcaaatctgtaaagtatgttgatgagtatctggtacttggcaaacactatataattgttagctttattattatgtgttgtttgaaggggaaaaaagtttttgtagattggagaacaccatgtaagagctactaagctcaccaccttcccatccaattattactcctctaaatgaatactacttaaaagtgatggagcttctgtttgtttattgaattgctaatacaaataaatatttgactataaaaaaaaaaaaaaaaaa

SEQ ID NO: 235828 - DNA, 720 bp, Homo Sapiens
  misc_feature (63)..(63): n is a, c, g, or t
  misc_feature (93)..(93): n is a, c, g, or t
aagagaaatatgaatacaattcccctaaactctcctcaaaagagaattcagtctacagccatntaaatgatcattgctgctacagaagtgctntaagagaattgcctgaaacatctgtattatatcggccacctgccaatcacagctttactctttcaggtcactctggggctgcctcttgcatgtattactaaataaaatgatctctctttctctctctctctctcttttctaagaaacaattatgtgcactttgatacacaaccttctctaaccaactatatatcaagacccaaaaattgaagaaaaatattgttttctcatacagtgagcagatttttcaatctactaattctgtgacttgtcttggtgtgctagcctacaccttctctttggtttagttttccttttctataacactctgaattgctaatcttactaacacctatgatgttacctgaaatcaatctcccatatgtatgctgtatgctatgctaagactcctgaaatatacttactctgtgcttgtgtatgtgaatgttaatgcaactattacctagagtgaactttaagctttattgttgaatgtaattccattatatttccttttgtacacctgtgaaaaagtggagtagtgtttttttaaccattgttaatcagcttttgtgtatgaaagacacagtaaaatttctttcttaaatcaaaaaaaaaaaaaaaaaa

SEQ ID NO: 235829 - DNA, 658 bp, Homo Sapiens
tccacatgagccagaaacacacggagatgttctggagatgacatggggcgccggaagcccagcaacgcctggccctgagtgagcacctggttaccactgccaccttctccatcggctccactggcctcgtggtgtatgactaccagcagctgctgatcgcctacaagccagcccctggcacctgctgctacatcatgaagatagctccagagagcatccccagtcttgaggctctcaatagaaaagtccacaacttccagatggaatgctctctgcaggccaagcccgcagtgcctacgtctaagctgggccaggcagaggggcgagatgcaggctcagcaccctccggaggggacccggccttcctgggcatggccgtgaacaccctgtgtggcgaggtgccgctctactacatctaggacgcctccgggtcagtggaagccccaacgggaaaggaaacgccccgggcaaagggtcttttgcagcttttgcagacgggcaagaagctgcttctgcccacaccgcagggacaaaccctggagaaatgggagcttggggagaggatgggagtgggcagaggtggcacccaggggcccgggaactcctgccacaacagaataaagcagcctgattgaaaagcaaaaaaaaaaaaaaaaaa

SEQ ID NO: 235830 - DNA, 640 bp, Homo Sapiens
  misc_feature (617)..(617): n is a, c, g, or t
tgagttgaactgaggaataaccactgaaagagacaaagcacacctaaataatgatgaacaaatcaagacctacaagaaatgaacacatagatgctttttaagtgtcattagttatcggaatcaaagaatttgaggtggtgacaactggggattatctgtaactccccaaatttactgttcttgaatgacattctcaaactatttattaatgagttagtctcatccctgctttctgtttcctctctctgcatcttctcttggcataggaagttattttactcatgctgtgttttttaatataagctttacaaaaaaagatgcattcccttcctgttcacactcttaccatgtttttgttcttccttaagaatgattgtgtgtgtgtgtgtgtgtgtgtgtaagtgtgtaagtgtaacatcatgggttttctttcttcacttgtaaagttttatctagaaatacttttacaggttatgttgaggtacacaaagataatgttctaagattgtgtattggatttggatttgtgtgtgtgtgtgtgtgtgtgtgtttaaagcatttgataaggtttaaatgttttttatacagagatttttgttcattaaactcaatctgcntcttgaaaaaaaaaaaaaaaaaa

SEQ ID NO: 235831 - DNA, 556 bp, Homo Sapiens
gattgggtacggcggcagccagtactggactttgagagtggccacaaaagtaatgtgttccacggtgaggcaagggagcataatagcaactgagagaatcaggcatgagttagagaaatctgaactgcagcatggattgggagctgatagtgagttattgtaggaattacatatcgggacatggccctactttggctcccctaatgacctaaatacactgaaagactcttggcaaccctagattccttgagcatgtggactgttggaagcctcataggtagggtgcatgcagcttattaaatgtgtgctggtaggaggcagtgtagtataagcacaggctcttgaaccaaactgcctgagttcaaatcctagcccttctgcttactagctcagtgatcttggccaagttattttacctttgtcttcagtttatctgtaaaatgggactaataacacatagggttatgaggattaagtaacaatagaagctaagcagttagaactgtgactggtacttaataaacatttgataaatgttaaaaaaaaaaaaaaaaaa

SEQ ID NO: 235832 - DNA, 657 bp, Homo Sapiens
agtctgtctcaggagaagctctggaggacttgaggcatgctgggcctggtgcagtgatggcgctaaggagacccggggaaagacagtatcgtggtcacgtatgcttaggaagcagcacagccgtgtccttagggatgttcgcgtccagtaaagacactggtaactgcggtttcagccaacactcttcatggcagtgtcgacctcgggttagcttctgttgtctttgtggatggttttcctggagcggcctgacgttgacgtgttctctggtcccatgtcttagcggggcatggtacggtttcgtgcctgacgcgtgcattagggtgttctcttatactttcagtagcatctttccacagcaagggccaaaccctcctggttcccttcagagtctttttggcctgatgatgactcttgagtgataccctgtgatgcagacatgccccagatggattctactttctttaaaactagggactttcaagattaaaaaaaagattgtcactactaatttgacgcctaacttcagaagcttcactgtctacatgtgaacttttccagaaaaactgtgccatggacatttttcctctggggaattaacatctaaattctggtaactattaaaagacagatctggttaaaaaaaaaaaaaaaaaa

SEQ ID NO: 235833 - DNA, 627 bp, Homo Sapiens
ggagggacattacttggatttgcagtaacagtgtttatcatctatctgtcagtcagtcaggagcccctgggaaggaaccagcatgtaacatgtttttatcatcttatatggcaaaagggactttgcagataaggatgctgggatgaggcagaacatcctagatgatccaggtgggccttaaatgtaatcacaggtagtatccttttaagagagagacaaaagatttgactacaggagaaggcaatgtgatgatggaagcagaaactggagttatgtgctctgaggatggaggaaggagccacgagccttcccacacctagaagctgaaaagagcaaggaaatgaactgatcctccctgctctgagagcctctgtaatgaatgcagccctgtggacccattttagactttaagcatccagaactttcgaatagatttctgtttttttaagagccactaagtttgtggcaatctgttaaaccagctgttacctaagcccttgatcctatgtagtgcgcttcccaaaatgtacaccaccacctttagtagaattgggaagttttagcacatacccatggagggaatcaggaataaaggcagactggtctcccaaaaaaaaaaaaaaaaaa

SEQ ID NO: 235834 - DNA, 640 bp, Homo Sapiens
tgactccaggcctgaatgacctagtgtggagagtttaaactatgtacaagggaggaaagaaaaaaaggaaaggaaccttaagtaagcctcagccaaaggttttatgcattggacttcctgtgcctgcccccaggggcaagactgatccccatgcctgtgcccatgacatctccctgaaagaggacaccatgacagcccggctttgccttgactgacccactgctaccccagaaataagaatcaagagcagctattgttatccttagagtgttttccgtctagggccggctcgtgaacagccacatatccttgcacctgacactgtccccacacaaatagctggctttcgttgcttgttgaatgaatgagtgagttggctctatatccccttggagctggccggtaagatattagtgcctcattttacaagaagagaataggaaggaattaagcaatttggccaacagatacaagatagattccagagttttatctcccactttagggtggcagccagtaggccaaactccaaagaccgttgctgatgtctttttctgcctcccctctttgggttagtgtggtatgtacaagctcactcttgttgaaaattagaaaatagttgaaaacaaaaaaaaaaaaa

SEQ ID NO: 235835 - DNA, 627 bp, Homo Sapiens
actcgttatccagctcttggtagccacacctgcaatgtaaaatggaagaaaatgcaaagaaaccaaatgtgccgagtgaataaaggattgtcatatcaattagtgtgggtccatctgtagcaaatgggttgagtgtgtcagtatgtggttggttactgtgtattcgccaggaatcaccccgataggctgccaccctattaggtgatacctgtttaatatgttgcccaggtagactagtagttgcatcagtttgctgtaacaagtaaccagtgaggtaacacagtggtgaagcaggtcaggggaggtcaggaggatgtctgagagaaagaagtccgggagatgaatggctgtctaggaaggaggatgtcagtgcacggttagtgtttgagcagagggcagacttgtaaagtacctgtagtgaaaagaatgtggggacccgattagcagaaaggtgtttgcacatactttatacaaaatacagaatactttatattggaagtgaaagaaatgaacgtggacttttacacatgtgcatatttttctggaggctatatggattatttgaaatgaaaagcatactaattggactttaataaatcattttcaatcaaaaaaaaaaaaaaaaaa

SEQ ID NO: 235836 - DNA, 711 bp, Homo Sapiens
  misc_feature (29)..(29): n is a, c, g, or t
accaccatgcccagctaatttttgtattnttagtagagacagggtttcaccatattggtcaggctggtttcgaactcctgacctcgtgatctgcccgcctcggcctcccaaagtggtggattacaggcgtgagccagcgcacccggcaacaataacatttaataggcattgtctcattctaatgatatataccttctacctagtgggcactttgtacatatttattttttattttatttattcattttttttgagacagagtctcactctgtcaccaagttggagtgcagtggcacaatctcagctcactgcaacctccgccttccaggttgaagtgattctccagcctcagcctcccgagtagctgggactccaggcacgtaccaccatacccagataatttttgcatttttagtagagacggggtttcaccatgttggctaggatggtctccatctcctgacctcgtgatccgcccaccttggcctcccaaagtgctgggattacaggcatgagccaccacagctggccgtaaatattttttgaatttgaatctgttttggaagccaaatatgttttggaagccaaacaattaagagaagtaaaattttaaccctagtaggtttcgcagattcatcccccagatatgtttttgtttggcttgtgttattaacaaataaatgagtgtctttcaaaaaaaaaaaaaaaaaa

SEQ ID NO: 235837 - DNA, 627 bp, Homo Sapiens
cttgctttttaaatgactttgtttttcaaggtgctgtcattttgcaaaaggaaatctttatatgaaatgtacaaaaaccgttactaactggacaacagggaaggtgctggccccacattagtgcctgcccaccgctctacttctaaccagggacacggatcttccattctctacatccaccggactgcagcccaagtctggacctggctgcagtgggcatattaccgtatggatatctttttctttctttttttaaagtgaggagattcttcagggggtcaggctgagaatgtaataagcctgacattggaacagatttctcccgtgtggtctagctggacccctccggcatttgccacactccctgccagtcctgacattgacttcctgaatgtgattaggtggtaatgagcaagaatttcctaggatgttgaaacatctgtatccaggcccccaatcaaatgctgctgaatattgtgaatgtttttactccgctcactttcccactgtgctttcctctaaccaaaatatacgtgtagccattaccaatgtacaactctcaatgcggagttgccgccacggtttaaaataaatctctgtgaaaaccttaaaaaaaaaaaaaaaaaa

SEQ ID NO: 235838 - DNA, 649 bp, Homo Sapiens
gagacggagatctgctcttacgcccaggctagagtgaagtggcgcgatcttggcttactgcaacctccaccccccaggttcaagcgattctcctgcctcagcctccggagtagctgggattacaggcgcccgccaccacgtccggctaatttttgtattttcagtagagacggggttttgctatgttggccaggctggtctcaaactcctgacctcaagtgatccacctgcctcggcctcccaaagtgttaggataacaggtgtgagccaccgtgcccggctgaagatttttcttaattgcaataaatattcagcattttttctaatgaaaatgaattttgtttaccagtaaaagtatgcattttaaaagactttcagatttatgctttttacgtgaagctgctaaactaaaagtaaatggaagaaaccaagtctagtaggttttttctttttttttgtgggggtgggatgggggaggttagttacacttaaaatatcttctccagagactgtatgctcctatactagactgtaagctctttgagggcagtctgtcagatttatctttgtatcttccccagcgcctagtgtagtgccttgcacataataggcgccccaataaatattggtgaagaaaaaaaaaaaaaaa

SEQ ID NO: 235839 - DNA, 691 bp, Homo Sapiens
  misc_feature (6)..(6): n is a, c, g, or t
  misc_feature (28)..(28): n is a, c, g, or t
ggcccntgaagctccttgaggggcaagncccaggagttccagccctcaggttcctgagggtccaccctcagtccttccccccgccgcccctccccggactccccacaagagcctccctggccccagggccgcctaccaggctggtactcattctatgaccaccgcccccaaccagctgcccccagctctccctgccccctcccctctctggcagctagcagggcaattggcggggaggagtgcggactgaggactgaggaccaagggggcccaggccctgccctcctacccggaggggctccgtttgcattccttggtgctctctgagtgcagctggtgtcccgccctgttctgggcggacgcctgtgtgcgtgtgtgtgtgcctgtccagtgtatattgtgtcttagcttccattttaaaaattgttctgtacagagagagatgcagcaggggcgggagggcagagtgggcggaggggagcagccgcacccccagcaccgggtgtctgcggtaggaacaagagggctgagagggtctggtcctggcccaggctcccccttgggctcagcacgaaagggctttcaatgaattaagtgaaaactttttccttttttacaaaaatgcaaaaatcaacaaagctccaaacctattggaaataaaatatgaacttgcaaaaaaaaaaaaaaaaaa

SEQ ID NO: 235840 - DNA, 653 bp, Homo Sapiens
gccaatagagaacaccacagactgcctcagcacaatgacaagtgtctgtaaagtcatgctggaaactccggagtacagaagtaggtttacgagtgaagagaccctgatgttctgcatgagggtgatggtgggagtcatcatcctctatgaccatgtccaccctgtgggagctttctgcaagacatccaagatcgatatgaaaggctgcataaaagttttgaaggagcaggccccagacagtgtggaggggctgctaaatgccctcaggttcactacaaagcacttgaacgatgaatcaacttccaaacagattcgagcaatgcttcagtagagctctgctcaaagaagaggatctatgtgctgacctcagaagatgtatatgtttacataatttaatacagattgatgttaatacttgtgtatttacataaccgtttccttcttgtcactgaaatatatggaccttaatttgtatcctgactgactcaacccagcagagcataaattgacttgagagccttacctttgatgtctgaaatgaaacccccttctccaaaggcaaaattcggagactttgatctttgctactggagtcctttaacaacacctataacgataaaaaattcctaattgttaaaaaaaaaaaaaaaaaa

SEQ ID NO: 235841 - DNA, 469 bp, Homo Sapiens
gaaccttggggcagcctgtgtctcccttccctaaacgtcatctgttccgtttttccagtcttccagacctggtccttggactggagaccttcacccttcctattttgtggctttctcttcaaatccacctcgtccttcctccatgacttataagtcatcatctctgctggtttctgaaatgagatatgcttcttggggtcttcagtgaagaggaatagcaagtgaaaggaggatggtggcagggtacatgaacccctaccaggcttctaggcttcccctgcatggcagccagcctctaagttggcccccaaccatccctgccttcttctattcacacccttgtgtggttccttcccacattgaataggcctgacttgtgtaaccactacactattgaagaaatgagagtttgacttctgagggtaagtcataaaatacatcgtggcttctgaaaaaaaaaaaaaaaaaa

SEQ ID NO: 235842 - DNA, 607 bp, Homo Sapiens
gattgcaaggaagctatttaacatggtgctgagctagccaggactgatggagcccctgggggtgtgggatggaggagggtctgcagccagttcattcccagggccccatcttgatgggccaagggctaaacatgcatgtgtcagtggctttggagcaggctaggctggggctcatcgagggtctcaggccgaggccactgtagtgccagtgcccccctgaggactagggcaggcagctgggggcacttggttccatggagcctggataaacagtgctttggaggctctggacagctgtgtggtgtttgtgtcttaactatgcactgggcccttgtctgcgtcggcttgcatacagagggcccctggggtcggccctccggcctggcctcagccagtgggatggacagggccaggcaggcctctgaacttccacctcctggggcctcccagacctcctgtgcccccacctgtgtgggcaggtgggccagtcttcgggtgatgggaccaaaccccttcagttcagtagagaaaggctaggtcctctacaaagagctgcaagacaaaaattaaaataaatgctccccaccctagaaaaaaaaaaaaaaaa

SEQ ID NO: 235843 - DNA, 639 bp, Homo Sapiens
ggcacgaggttgccagctgtgattccaaacggactgatgtcactggctcaatagctttagcaattggattttctgttgcaattggacatttatttgcaatcaattatactggtgccagcatgaatcccgcccgatcctttggacctgcagttatcatgggaaattgggaaaaccattggatatattgggttgggcccatcataggagctgtcctcgctggtggcctttatgagtatgtcttctgtccagatgttgaattcaaacgtcgttttaaagaagccttcagcaaagctgcccagcaaacaaaaggaagctacatggaggtggaggacaacaggagtcaggtagagacggatgacctgattctaaaacctggagtggtgcatgtgattgacgttgaccggggagaggagaagaaggggaaagaccaatctggagaggtattgtcttcagtatgactagaagatcgcactgaaagcagacaagactccttagaactgtcctcagatttccttccacccattaaggaaacagatttgttataaattagaaatgtgcaggtttgttgtttcatgtcatattactcagtctaaacaataaatatttcataatttacaaaggaaaaaaaaaaaaaaaaaa

SEQ ID NO: 235844 - DNA, 677 bp, Homo Sapiens
  misc_feature (65)..(65): n is a, c, g, or t
taggcgattgggccccattcattcttactcgtgcatcaggtcctggtctgtgtcaggcccagggnacacaggtggtcccagctcagaggcccagtgtccactgcagcccctcccacagcctgcccacccctactgcagggaaaaatgcccagggaggagatggtccaactcctgatcagttttgtgtccgatggagcaggccttgctgagtgaagacactggaactagctgggtcctggggtgacttggaggctttgggcctaaaagggcagcctgaacctggagtcttatctcccccaggagccgaaagcactttttcttgatttcccccaggaaatcaagcgctgcttctcagctcctgtggttttagtatttatatatctgtatcttctttgtagaaatttatttatttttgaataagtaatacctgcctggtacaaaatttaaaaggtacgggagggcgcaagctgcaagggaaggcctgctcccatgccgaccccagaggcagccactgttaccaatttcatgtgtattcctttaactctgttttaaagtaagtctctgaaaactgttcatttccttttgtcagtatttgttgctgaaaacctagaaaaacccagaaaagtataatgaaataaaaactacaaatttcacaacccagaaaaaaaaaaaaaaaa

SEQ ID NO: 235845 - DNA, 694 bp, Homo Sapiens
catataaaatcttgacctgccttgtggaaaatttttctctcaaggatgagaaataaaatgagaattctggacttacttcttatcaacattaaaaaagccatgggggttgtatttgttgacctttcctgtttgtatattagttttctgatatggagaattgttctgctttttcgtcctctaccagtctgattaattcgtaggcttaacacttcctttttctttctccttggaatgcctcttgggatatgcattagttggtcttatgtcttttcttggtctaggtggtgtgtgtgtttggcttgtttggggcacttttagaggctccagctgcacatttccactcctctctgtgtgttcctctctgcatctgctgtttgtgtgtgtacactttttttctgagcaatctttctccttagccacattgagttctttaacagtttttctgttttcttcttcattaagataattaataatcatactactcacatatcatgttttagaacttcctaagcctttccctttcccaccttttggacctcctaactgaatttcaaagtcttcattccttagattaaaaaaataaatccaaagataaaagaatgtaatgtcttataagtcgtatcagtgtatattttctctgttattgttgttagtgttataataaatcctaagtgacacaaaaaaaaaaaaaaaa

SEQ ID NO: 235846 - DNA, 613 bp, Homo Sapiens
agctccaaccaggagctgcagcaccggggtgctgtggtggtgctgaacatggtggaggcctcgagggagattgccagcaccctgatggagagtgagatgatggagatcttgtcagtgctagctaagggtgaccacagccctgtcacaagggctgctgcagcctgcctggacaaagcagtggaatatgggcttatccaacccaaccaagatggagagtgagggggttgtccctgggcccaaggctcatgcacacgctacctattgtggcacggagagtaaggacggaagcagctttggctggtggtggctggcatgcccaatactcttgcccatcctcgcttgctgccctaggatgtcctctgttctgagtcagcggccacgttcagtcacacagccctgcttggccagcactgcctgcagcctcactcagaggggccctttttctgtactactgtagtcagctgggaatggggaaggtgcatcccaacacagcctgtggatcctggggcatctggaagggcgcacacatcagcagcctcaccagctgtgagcctgctatcaggcctgcccctccaataaaagtgtgtagaactccaaaaaaaaaaaaaaaaaa

SEQ ID NO: 235847 - DNA, 690 bp, Homo Sapiens
  misc_feature (61)..(61): n is a, c, g, or t
  misc_feature (67)..(67): n is a, c, g, or t
  misc_feature (107)..(107): n is a, c, g, or t
  misc_feature (199)..(199): n is a, c, g, or t
gcagacaaggaagaaaacttaggggctgctctgacgtgggtaaacaggctgtctatatccntgtacntcagagcatggcccggcagcagtgttgtcacagggcagcntgttaggaatgagaatctcaggtctcattccagacctggtgagccagagtctaaattttaagattcctgatgattggcatgttacccaaatntgagaagtgctgctgtaattccccttaaaggacgggagaaagggccccggccatcttgcagcaggagggattctggtcagctataaaggaggactttccatctgggagaggcagaatctatatactgaagggctagtggcactgccaggggaagggagtgcgtaggcttccagtgatggttggggacaatcctgcccaaaggcagggcagtggatggaataactccttgtggcattctgaagtgtgtgccaggctctggactaggtgctaggtttccagggaggagccaaacacgggccttgctcttgtggagcttagaggttggtggggaagaaaataggcatgcaccaaggaatcgtacaaacacatatataactacaaaaggatggtgccaagggcaggtgaccactggcatctatgcttagctatgaaagtgaataaagcagaataaaaataaaatactttctctcaggaaaaaaaaaaaaaaaaaa

SEQ ID NO: 235848 - DNA, 646 bp, Homo Sapiens
gtcgtaataccgtactaattccaggcccaagaaaaatcggaaggcaatagccctttggtaaattgtagtatttacttttccgagaaaaatacagttctaagtgattcttatgggattttaaggtaaactatttagtcaaatttttattttagtttttgtttactaaacaaagtataatcaggcagtcttaatgtgcaagttttcctgagtttaaacgtaacaatttaccaaaaactgtgagtggcttcttttgtccttgagaagcccttgacctgtttcagttgaaaattacaaaaacttttagaattgatttcttttgcccatgttatttatataatcaaactatatcaactctagcctgggaattcactactgtggagtcgaggatgaaatgagaggatgcttttgaaaacactttaacatgatgttgttatttattttatatatttgttttgtatatttcagttgttatgagcccatccttgttggggaggtgctataaatactaatctttaatgaaacataggtgtaataaggcagacattaagaaaaataaataccaacacttgaaaaaagctcgtattatagatttttaaaaagtacttcaataaattacatacttgtaattaaaaaaaaaaaaaaaaaa

SEQ ID NO: 235849 - DNA, 714 bp, Homo Sapiens
tggattcaagtttatcaatgtcctttgacatgtgtaaaaatctgtctgctaaaatctatcaaatacattaaggaaaagtcccacttggcacatctcccacaccagatgttaattattcatactgcatgactgaggattttggaggcagagagagattcatctgcaatatttggaacaccaatggaggtctacgtcaacacagaatttatacagcagctggtgctagtcagagctaatgacagaatttcagtttaataaaaagacccccaactgagcacaccatcttgaaaaaagtatacttatcaaacagctttcaatcagttcaagagagacaccttaattggggagaggaagaattgcagagtagtttgtaatcatgccaattccagatcaataactgcatgtctgttctttggtagaaatagcttttgctttatattaagtaatcacatatatattctctctatttggataaggaaaccttcgctttatttgacaatgtataatgatatactcttctaattcacctctgtgtcttcacaataaacatgagtaaaatttagacaagtgatggtaaaggtcaatataattatttatttttaaaataaattttgtatctaacaggaaagcagttcttatgaaatttttatattttcaaaaattgttttgttcaaataaaattttatgagtaaagttaaaaaaaaaaaaaaaaaa

SEQ ID NO: 235850 - DNA, 644 bp, Homo Sapiens
gcaggtcctattacctctgcctcatcctcccaacatgataaccagagtcttccttcacattgtactgcctacccccttatgttcccaggctctcccttggttttattacctccttgcagtccattttcagatcctgtccattgatctccacccgcacaatgatgacctcataataccactcccgccggatgggtgtataccagagactgcctgtgtacagcgagtggtcgatacctccaatgatctagggaaaaaaagaggcaggtacccgtgtcctggcacagaaggagagtgagtcccccaaggaccaagcaataagatcagtgatttcttggggtggcaaggtcttctacaggctacccttttcatcttcctgcttctaaacaaatcatacccaaagtgatttctagtttcttaaatgtgttcaggagaaaagactttccgggatttttaattatttgtttcagaatcatacagcccttgatataaagttatttaaatctaaactgccacaataaatgttgaatgaatggttatttgtttatattataagttttattttctctgcttattggagaaccattcaccattgttctaattaattaataaatagacaaacttcttgtaaaaaaaaaaaaaaaaaa

SEQ ID NO: 235851 - DNA, 664 bp, Homo Sapiens
gagggcatcatagggggacccctagagtcagttcaccacaggccctggggagagtcaaagacccccgagggtgcccagccccccacactgtgactcctcacactcagcgatgacctgtggggtggggggccctgggacgtttttaaacctagggtttggagtctggactaagctccatccacgtcactcacaagtttctgtttatatttctagctttttttaataaaataaaaaaaaaaagaaaacagaagttttcacaacccaggggcctggcacgccggtctgtgcctgcccgccccgccctggcccaccggccccactccctgggcacagagtcacacccactcatccttccgccaacagtccaggtcacacagcagcagtcactgtaacagactgccacatacacactcggtctcacactcacctgtgggttttggttccgttcaatttgggtttttaactttacagggtcagttccgcttcacctccttttgtatggagttccatccagggggtttcaccccctgctccagtcctgaggcctcctgaccctgacgttgtgatacgccccacagagatctatgtttcttatattattattattgataataattattataatattattatgtaataaatttataagaaatgaaaaaaaaaa

SEQ ID NO: 235852 - DNA, 697 bp, Homo Sapiens
ctataaaaattataattcagtgagttacgtggaagtggaggaagattctactctccctggaaacaggcctgggaaaccttggcatttgtaacaaggtttcactgagatgtacttttccttctaattccgttttgcgggggcagggtctcttgtttctttttttttttttttttagcctctaactagtcacatttactcttaagaaatgaaaggttttccaggagagaactgtgtacaaataaggtgactggagatgtgacctgatgtgtcacgaggcccttcggggcggcaggcgctatcgtgggcgtggtccttgcaccgtcccatcggccttgccttccagctccgtggcacggtttcctggtctttgggccagtgtgtaccttggagtgacttcctttctcaacttccactgcagtgtgtgtgccttctgctctgagagctgccttgtgacccgtgtgatagaaagcagggagtgagggtccccgcggacctggcccttccctccttcctcccccagaaagaggagttagagcaggggtgcgagagccgttcgctgtgggtttgtctttgaacaaacattaaggtgtcttgtttttgttctgggctgggggttggctgtagtcttaggtaactgaaagttcctactctcccttaaggtattaaatgctctttttccaaagaaaaaaaaaaaaaa

SEQ ID NO: 235853 - DNA, 671 bp, Homo Sapiens
ctgtcgtcatcaacgcctctgtggccaatgttggggaaccttacgctacaagggcgagaccctgccccctgtgggcgtcaacagaaatcgcatcaaggtgaccaaagatggctatgcagacattgtggatgtcctgaacagccctttggaaggacctgaccagaagagcttcattcctgtggaaagggcagagagcaccttcctgttcctggtaggtcaggatgaccacaactggaagagtgagttctatgctaatgaggcctgtaaacgcttgcaggcccatgggaggagaaagccccagatcatctgttacccagagacagggcactatattgagcctccttacttccccctgtgtcgggcttccctgcatgccttggtgggcagtcctattatctggggaggggagcccagggctcatgccatggctcaggtggatgcttggaaacaactccagactttcttccacaaacacttgggtggccgcgaggggacaatcccatcaaaagtgtaaattttatttgatcatgtggcctctctgttgctaatctctcctggaaacatctgccacatttagtgtgtgtatgtgtattcattcttttgtttttaataactaaagtttttcccctcattattaaaatgaatttaccagtaaaaaaaaaaaaaaaaaa

SEQ ID NO: 235854 - DNA, 690 bp, Homo Sapiens
  misc_feature (8)..(8): n is a, c, g, or t
  misc_feature (73)..(73): n is a, c, g, or t
gtgtgtgngaccatgtccagccctctccagtgtatccacagccccgacctttgatgagaactcagctgtccangaaaaagacaccgtcctttaaagtgctgcagtatggccagacgtggtggctcacacctgcaatcccagcaccttaggaggccgaggcaggaggatccttgaggtcaggagttcgagaccagcctcgccaacatggtgaaaccccatttctactaaaaatacaaaaaattagccaagtgtggtggcatatgcctgtaatcccaactactcagaaggccgaggcaggagaattacttgaacgcaggagaatcactgcagcccaggaggcagaggttgcagtgagccgagattgcaccactgcactccagcctgggtgacagagcaagactccatctcagtaaataaataaataaataaaaagcgctgcagtagctgtggcctcaccctgaagtcagcgggcccaggcctacctcactctctcccttggcagagaagcagacgtccatagctcctctccctcacaagcgctcccagcctgccctccagctgctgctctcccctcccagtctctactcactgggatgaggttaggtcatgaggacaccaaaaacctaaaaataaacaaaaagccaaacaagccttagcttttcttaaagactgaaaaaaaaaaaaaaaaaa

SEQ ID NO: 235855 - DNA, 625 bp, Homo Sapiens
  misc_feature (19)..(19): n is a, c, g, or t
atgaactcagcaccagatntaagatggataacaaactgcagttaatccctggggtctgtggattccgaatttcaaatcctcccattttgttggtctgttccttgcatgctagtttagagatctttaagcaagcgacaatgaaggcattgcggaaaaaatctgttttgctaactggctatctggaatacctgatcaagcataactatggcaaagataaagcagcaaccaagaaaccagttgtgaacataattactccgtctcatgtagaggagcgggggtgccagctaacaataacattttctgttccaaacgaagatgttttccaagaactagaaaaaagaggagtggtttgtgacaagcggaatccaaatggcattcgagtggctccagttcctctctataattctttccatgatgtttataaatttaccaatctgctcacttctatacttgactctgcagaaacaaaaaattagcagtgttttctagaacaacttaagcaaattatactgaaagctgctgtggttatttcagtattattcgatttttaattattgaaagtatgtcaccattgaccacatgtaactaacaataaataatataccttacaaaaaaaaaaaaaaaa

SEQ ID NO: 235856 - DNA, 674 bp, Homo Sapiens
gaaatattcagtttatccttatgtgggccgatggcagcttatgtgaatcctcatggatatgtgcatgagacacttactgtgtataaggcttgcaacttgaatctgataggccggccttctacagaacacagctggtttcctgggtatgcctggactgttgcccagtgtaagatctgtgcaagccatattggatggaagtttacggccaccaaaaaagacatgtcacctcaaaaattttggggcttaacgcgatctgctctgttgcccacgatcccagacactgaagatgaaataagtccagacaaagtaatactttgcttgtaaacagatgtgatagagataaagttatctaacaaattggttatattctaagatctgctttggaaattattgcctctgatacatacctaagtaaacataacattaatacctaagtaaacataacattacttggagggttgcagtttctaagtgaaactgtatttgaaacttttaagtatactttaggaaacaagcatgaacggcagtctagaataccagaaacatctacttgggtagcttggtgccattatcctgtggaatctgatatgtctggtagcatgtcattgatgggacatgaagacatctttggaaatgatgagattatttccggtgttaaaaaaaaaaaaaaaaaa

SEQ ID NO: 235857 - DNA, 682 bp, Homo Sapiens
aattctggcttgtcattggtccttgttatctaaattaaatatttttaggaaatatatcaaaagtatcctagagccccatggcaaagtgtcagaggaaatagttttcattatattttaggaagctgtaaaaacataagcccaagtattttgtgtcatctgcatatgtcaggatgaagaccaggcatgtaagaaatatcctaaagtagccaagtgataatctcatgaaaaaatatgagaatcgtttttacagagtgagttctcttttgaatggttttgactatgcttttaaaaacatttttaaaatgtacttacatctttttcgatagcccacgtatttcagaatatcctcttgatagaataatatcactcagtgtgatttttagaaaaagaaaaactcggtggtctcatatcttttgacagttgtttgtgaataataccctccccaacaaccttcccagtactcaactgctatgtaagaatgctttcttatgtggtaaatgtctcagtattttgctgcctggtatttgttcagtttccttgtatatctcagggtcagaaggaatcaggctttctcccaactctgaaacattcagacttactttctttttggtcagccttttaacaagcaagacaataaactccttttgtcagaatcgatttgattaaaaaaaaaaaaaaaaaa

SEQ ID NO: 235858 - DNA, 690 bp, Homo Sapiens
atctcagcacagactatcagcatgttccattctcagattcctggaggaaagtaccctctgttgaccaaggggctggctgcttctgagacttaccaacccaagaaatttggagacattcccctcaggctaaaaggcagcggtccccagagttcagaaagcaaaagatcttgacaactgtgccagtagtggctctggtcctatctctccacagtgctggcctctgctggggaaggcatctttcccaaaggtatccccaagtaccatgttgaaaatgtcctcagtctgttgctccatctttctgagcctctgcttggtatgtcatgtttatggtcactacggatgagtgtgtgcagagtttgggttgattcttttaaatgctacaaacaagagctatttcttttcaataaaaaaggtttggattcggcctcttcctctgagcccacctcccagccctccagggagcatcagtgtacctgagtcactttgtctgcatctcttcatcccacaaaacacgaggctgggtctcattcagcggcctctcaccaaccttcaagatccagaagaaaacaggaacgttcagctctgccctgtgtcgtatctaatcacatacattaatttatctaaccacattaagttatttttttttatttgccagaaataaacctttaaaggaaaaaaaaaaaaaaaaaa

SEQ ID NO: 235859 - DNA, 699 bp, Homo Sapiens
taaaataactatggtgaattcatgtttattttttactgtgaaaattgtagtactcaggtggtatttaatgggaaaggatcctttgggtataaatcataatgtattttaaggaatgcatctataacattgataactttagccttaaaaaaaaggtctattattccttcctctgcatcccatggtatattagcaaagtagtttacagccctgtacagccttacaaagttgttttacaatttttaatggaaagcccttaacaacaacaacaaaaaattgtatcattttaccaatatccacgaattactgatcacagtttgtaaataatttgtttaatatcagaaggccaaagaaagtcttaaaattttagctattgactctatggtgacttcacaataagatttctgtgcaaaaaggtaaggtgataattgatctaatagactttttttttttttttttgctgtccatgagaattagacttcatattagcttcaattaaaaagctcattccattttattaaaatgtttgtaattgcaattttgtgtttaatgtttactttgtctttcctttctttagcatttaggtgactgttcggcagtttgatatatggccattgtcggccttaaactgcactagtaacaagcatggtatttatcttgtattgaaaataaaacaaacttttgataaaaaaaaaaaaaaaa

SEQ ID NO: 235860 - DNA, 681 bp, Homo Sapiens
  misc_feature (3)..(3): n is a, c, g, or t
  misc_feature (5)..(5): n is a, c, g, or t
ttntncttcagactgaggccttttggtagtcggagcccccgcagtcgtcagcctccctgacgtctgccaccagcgcccccactcctcctcctttctttgctgtttgcaatcacacgtggtgacctcacacacctctgccccttgggcctcccactcccatggctctgggcggtccagaaggagcaggccctgggcctccacctctgtgcagggcacagaaggctggggtggggggaggagtggattcctccccaccctgtcccaggcagcgccactgtccgctgtctccctcctgattctaaaatgtctcaagtgcaatgccccctcccctcctttaccgaggacagcctgcctctgccacagcaaggctgtcggggtcaagctggaaaggccagcagccttccagtggcttctcccaacactcttggggaccaaatatacttaatggttaagggacttgtcccaagtctgacagccagagcgttagaggggccagcggccctcccaggcgatcttgtgtctactctaggactgggcccgagggtggtttacctgcaccgttgactcagtatagtttaaaaatctgccacctgcacaggtatttttgaaagcaaaataaggttttcttttttcccctttcttgtaataaatgataaaattccgaaaaaaaaaaaaaaaaaa

SEQ ID NO: 235861 - DNA, 699 bp, Homo Sapiens
  misc_feature (82)..(82): n is a, c, g, or t
tcatcgtcgtgtgatgtgggagccctgctcatggtctccacatgagccagaaacacacggagatggtcctggagatgagcantggggcgccggaagcccagcaacgcctggccctgagtgagcacctggttaccactgccaccttctccatcggctccactggcctcgtggtgtatgactaccagcagctgctgatcgcctacaagccagcccctggcacctgctgctacatcatgaagatagctccagagagcatccccagtcttgaggctctcaatagaaaagtccacaacttccagatggaatgctctctgcaggccaagcccgcagtgcctacgtctaagctgggccaggcagaggggcgagatgcaggctcagcaccctccggaggggacccggccttcctgggcatggccgtgaacaccctgtgtggcgaggtgccgctctactacatctaggacgcctccggtgagcagggtcagtggaagccccaacgggaaaggaaacgccccgggcaaagggtcttttgcagcttttgcagacgggcaagaagctgcttctgcccacaccgcagggacaaaccctggagaaatgggagcttggggagaggatgggagtgggcagaggtggcacccaggggcccgggaactcctgccacaacagaataaagcagcctgattgaaaaaaaaaaaaaaaaaa

SEQ ID NO: 235862 - DNA, 681 bp, Homo Sapiens
  misc_feature (20)..(20): n is a, c, g, or t
  misc_feature (25)..(25): n is a, c, g, or t
tccagtcatgaaacttcatntgttntatccatatccctgaggactgtgtagactttatgtcagttctgtgtagactttatgtcagtttttgtcattatgtgaaaatctattctgacaactttttaattcctttgatcttataagttaaagctgtaacaactgaaattgcatggatcaagtaagcatagttttatccagggagaaaaataaaaggaagccatagaattgctctggtcaaaaccaagcacaccatagccttaactgaatatttaggaaatctgcctaatctgcttatatttggtgtttgttttttgactgttgggctttgggaagatgttatttatgaccaatatctgccagtaacgctgtttatctcacttgctttgaaagccaatgggggaaaaaaatccatgaaaaaaaaaagattgataaagtagatgattttgtttgtatccctacccatctcctggcagccctactgagtgaaattgggatacatttggctgtcagaaattataccgagtctactgggtataacatgtctcacttggaaagctagtacttttaaatgggtgccaaaggtcaactgtaatgagataattatccctgcctgtgtccatgtcagactttgagctgatcctgaataataaagccttttaccttaaaaaaaaaaaaaaaaaa

SEQ ID NO: 235863 - DNA, 698 bp, Homo Sapiens
agggagccatgaatggaatggagtcaggtccactcaggcggattctttcttctcccactccttttcctttaaaaaagaaaaattccccatttcactttcatcagtgttagcatctatgcagaaacgcagccatccaccctttgcagttgaatgtgttactttaattagtctgaaaattaaagggcaactccgggccaatgtgaatgattatgaaaatacatgtgcatcccatgcaatcttctcatttaattaatagtcttgtaaactatatggctcactttaagtcagtcaagaggtataacaactccattttaaatatccacttaatacttaacaggatgtgaggaacacactatagcatacggtcccttctcaagtttcactgtctgaaatttttcaaagctgacccaagtcaacctgaaaaatgtttaacaccctgggcttgaacacaagaaactctgtgatgaacagacattcaattacattttttaaaagtgagaagcatttttgtaaaatagcgactctggaaactaattggcagccgcaaaacttgtgagcaaaggccaaatcttgtggggaacttttactacagtaacacgactcaaagaaaatgtgaataaaaggcatctttgtttcccagtcaaattagctgattaagaaataaaacatcttaacatgttaaaaaaaaaaaaaaaaaa

SEQ ID NO: 235864 - DNA, 539 bp, Homo Sapiens
gccccaacagaacactaaacagactatttaacttgagggtaataaacttagaataaaattgtaaaattgtatagagatatgcagaaggaagggcatccttctgccttttttatttttttaagctgtaaaaagagagaaaacttatttgagtgattatttgttatttgtacagttcagttcctctttgcatggaatttgtaagtttatgtctaaagagctttagtcctagaggacctgagtctgctatattttcatgacttttccatgtatctacctcactattcaagtattaggggtaatatattgctgctggtaatttgtatctgaaggagattttccttcctacacccttggacttgaggattttgagtatctcggacctttcagctgtgaacatggactcttcccccactcctcttatttgctcacacggggtattttaggcagggatttgaggagcagcttcagttgttttcccgagcaaagtctaaagtttacagtaaataaattgtttgaccatgaaaaaaaaaaaaaaaaaa

SEQ ID NO: 235865 - DNA, 621 bp, Homo Sapiens
agaaaatggaacatggacatcacctcctatttgcagagctgtctgtcgatttccatgtcagaatgggggcatctgccaacgcccaaatgcttgttcctgtccagagggctggatggggcgcctctgtgaagaaccaatctgcattcttccctgtctgaacggaggtcgctgtgtggccccttaccagtgtgactgcccgcctggctggacggggtctcgctgtcatacagctgtttgccagtctccctgcttaaatggtggaaaatgtgtaagaccaaaccgatgtcactgtctttcttcttggacgggacataactgttccaggaaaaggaggactgggttttaaccactgcacgaccatctggctctcccaaaagcaggatcatctctcctcggtagtgcctgggcatcctggaacttatgcaaagaaagtccaacatggtgctgggtcttgtttagtaaacttgttacttggggttactttttttattttgtgatatattttgttattccttgtgacatactttcttacatgtttccatttttaaatatgcctgtattttctatataaaaattatattaaatagatgctgctctaccctcaaaaaaaaaaaaaaaaaa

SEQ ID NO: 235866 - DNA, 598 bp, Homo Sapiens
  misc_feature (34)..(34): n is a, c, g, or t
gctcccgtggcgctcccgctggctgtgcaggcgnccatggattccttgcggaaaatgctgatctcagtcgcaatgctgggcgcaggggctggcgtgggctacgcgctcctcgttatcgtgaccccgggagagcggcggaagcaggaaatgctaaaggagatgccactgcaggacccaaggagcagggaggaggcggccaggacccagcagctattgctggccactctgcaggaggcagcgaccacgcaggagaacgtggcctggaggaagaactggatggttggcggcgaaggcggcgccagcgggaggtcaccgtgagaccggacttgcctccgtgggcgccggaccttggcttgggcgcaggaatccgaggcagcctttctccttcgtgggcccagcggagagtccggaccgagataccatgccaggactctccggggtcctgtgagctgccgtcgggtgagcacgtttcccccaaaccctggactgactgctttaaggtccgcaaggcgggccagggccgagacgcgagtcggatgtggtgaactgaaagaaccaataaaatcatgttcctccacccagaaaaaaaaaaaaaaaa

SEQ ID NO: 235867 - DNA, 601 bp, Homo Sapiens
  misc_feature (71)..(71): n is a, c, g, or t
tataaattacccagtcatgggcagtcctttacagcagcatgagaatggactaatacactcctcaaatgttntgaagattgttgcaccttggaactaccagtgtgcacacaatctggctcaatgtatatattggcccagcaaggcaaagaactgaagttccaggatggaagaacctgtgttctcctcataatagtatagaataattcaagataggcaagaaggacagcagtaaatgaagaccatggaagaaaagaaggaatgccaaagatcgaggaaatctaccaagactagtagggtagtccagaagaagctgtttcagggcctgttgccagctatgcctttgagaacctcgggatcccaaagaatgaggggaatttcttcagaaagacaatctcggcatgcattatttctttgttttgaagattcactcatgttgcatgcatctgtagcttgtgccttttttattgcctagtagtattctgtcatatgcctatcttacaatttgattatctattcacctgttgatgaatgtttgaattttttccatttgaggaattttatgaataaagctgctataagcatgaaaaaaaaaaaaaaaaaa

SEQ ID NO: 235868 - DNA, 683 bp, Homo Sapiens
aaaaataaaagtgtcctctatttgaacatgaaaacagctaataaagatgtgttattttattttattattattaatttgtcctcccatattggcaaagataaagcaattgacaaaaatggaattcttgttcaatactggcaggagtgaaaattggtagaacctttctagaaggcaatttggcaacatgtatgaaaacctaaatgttgatacacctttacccagcagtttgtttaggaatttatcctaatgaataaaagttgtccaagtcttcaaacatgagcccaaaggtatatttcatgatgtttatgatattaaaacattggaaacaactgaaacatccttcagtaaaagatggattaaataaattccatgcagttgtcatttaaaaatatttagatatatgtttattgctatggatatatgttcccaaaatattattgaatcaaaaagtagactacaggatatatgttgaatatgagctcatttataacattgaatattttaagataatgtatgtttcatagagagatcttcaccaaatgttaaggatttttttttctgggctgtggtatttgggtgatctttacattcttcagactcatgtgtgtttgaaactttttataatgaacatatatcatttttattagaaaagaataaagtttttgaaaaaaaaaaaaaaaaaa

SEQ ID NO: 235869 - DNA, 676 bp, Homo Sapiens
ctgccacattttcattgcagcatgggctctacattttctgaagtcattaaatttctcgttacagcacaggaaaaagaagataaagtaggagagggatcagtttcacattcagtcctaagcagcaacacggttgagatgtaatcataaaagcaaatatttcacccaggacatggaaaagcggcggatcaccagaaagcagagagtcaaacgctgcaagcagaagcagtaagaagacgccacgtttggagcaaggtcttatttacacctgccatggtcatcggctcgctcttttaggtctccccaacccggcccccaaaaagaggttatatgcagaggtaatataatatatgtacttttgaaaataacaaagtcaccgtggagataatttcaaaacaatttattttcattttcagatacattggactatttcactgatgttaaaaagagtatgacttgtttaaattttttgttgtttcttttttgcagcctaatgttctgtaatagtaacttgcttccaagtaaagtatgaaaagttagtggaggggccatggctgtggtctctgataggtcaaactatactattttggaatgcgtggagttagaacaaagtttttattttgttattaattagtaaagcaataaataaaattgtcttcctaataataaaaaaaaaaaa

SEQ ID NO: 235870 - DNA, 690 bp, Homo Sapiens
atcggcacgaggcggtgatgtggagccctgctcatggtctccacatgagccagaaacacacggagatggttctggagatgagcattggggcgccggaagcccagcaacgcctggccctgagtgagcacctggttaccactgccaccttctccatcggctccactggcctcgtggtgtatgactaccagcagctgctgatcgcctacaagccagcccctggcacctgctgctacatcatgaagatagctccagagagcatccccagtcttgaggctctcactagaaaagtccacaacttccaggccaagcccgcagtgcctacgtctaagctgggccaggcagaggggcgagatgcaggctcagcaccctccggaggggacccggccttcctgggcatggccgtgagcaccctgtgtggcgaggtgccgctctactacatctaggacgcctccggtgagcagggtcagtggaagccccaacgggaaaggaaacgccccgggcaaagggtcttttgcagcttttgcagacgggcaagaagctgcttctgcccacaccgcagggacaagccctggagaaatgggagcttggggagaggatgggagtgggcagaggtggcgcccaggggcccgggaactcctgccacaacagaataaagcagcctgattgaaaagcaaaaaaaaaaaaaaaaaa

SEQ ID NO: 235871 - DNA, 714 bp, Homo Sapiens
  misc_feature (109)..(109): n is a, c, g, or t
gaggacctgtggactgggcggcccacacaactgctgtaacctcaggcagttttcaagcagattgaccttcctgctggaacacggcacatgaggtgaattctcctctacncaggagaaaatgaacagctggacaatgctcctggtcagtaggcctgaaggatgctgggatgcagccctcaagatggaacagccaggatgccaagtatccctcttgcccagatcctaaggcactttttctactgatccatattggcctcaggagatgtctcaacacagcaccccagccaatggagctgccacataagatgaactcttgatcatctctaaactagagagttaaactcaacactagcaaacgactttgggtttatgcatatgtcatgttttctctggcaactgcacagaatcatctctaaatatcacatctatggttggcaggagtggcatgtataatacaaaatgtctggtggccctactgtcacaaaacctgtataaaagtaaattcacaaatggctttttagaactgatgacaaaaagttactcgttatcacttttctaattaatttcctaaaagggcaatttgaaatcatactgggattctcacaattttggttgacagtcaagtaaattgcagctacttatcaagcacttttgaatgaatacatgaagaatgaataaaatgaaagctctcctgttaaaaaaaaaaaaaaaaaa

SEQ ID NO: 235872 - DNA, 604 bp, Homo Sapiens
aaatatgaaatgtaaacaaatttgttttttaaggttaaggccaaatgtaacaataaaaccctgtcgatggttttagctaaattagaggaagttgtatgagaatgatctaaaaacttaaaattgaattggtttgattaaaaataaagcttgcaattttaaaagtagctcacatttaatttcttgtgtgaaatagaacatgctttaaaggaagtatttttatgtgaatttgcattccagtataaatagtattcacaaaaaagattttcctagattttatctattgaataggtgtcaatatggcatgcatattgtaactttcattagaaataagttgctttgacttttaaaaatgacatagttagattatttaaagtcaatgtatatagtatatattatgtatggatttatataccaaattttggaatacagcctatctcatgaccatattgaaatgtacggaatttgatccatgcgatactatgtgtgcattatttgaaagttattggaaattttattcaaaccgtggaacaaatgtatgtgattttgttatacttcttaatttaaataaaatatttaatgcactattaaaaaaaaaaaaaaaaaa

SEQ ID NO: 235873 - DNA, 634 bp, Homo Sapiens
cattccgctgctgtggaaagcctgtagctgccaggagtgttacagagggcattcctcccttgagttgacatttgtgccaaaccggctttgagggcttctccagcttttaagatgcgataatgataagatgatcatcgggaaaacatccctcagatgaaacgttcacaggctggctctgaaaactggcattcagatgattgcggctcccccatactgtaggaatattgtttatggcttaaggttgcctcgctcctcatctgtaatcagtgaaagtttatccagaggttaattaccggttttctggtgggtatctgggaactgaggatgggagattaactgttgtatatgaccatagtaaagcaaaagactgttagagaatgagtaaacgttcgttttcctccctacagaatttacagttactctctgtccattccactcactactgtcttcatcacacacacagaggcaaacgtctgattcagatagccaggtgtgccatgcatgcactccaccatattgtgatctcttcgaggcttgtttctgtcccctgtcctccacagtcctggattgttaatgaatagttcatacatgtttgttaaataaatataccttctttaaaattaaaaaaaaaaaa

SEQ ID NO: 235874 - DNA, 632 bp, Homo Sapiens
tcagatacagctcctacgtcccaagcagcctaccatagtgtcctcctttttttgcgtgtgtgatggggtttcgcacttgttgcccaggctggagtgcaatggtacaatctcggctcactgcaacctccgcctcccaggttcaagtgattcttctgcctcagcctctcaagtaactgggattacaggcatgcgccactaagggaggagaccactcctcatattgtcttatgcccaatttctgcttccaaagaaagaagaagtaaaaactaaaaggcagaaatgaaatccacaggcagacagcccagcgccacaccatgggcctggtagttaaagatcgagccctgacctaatcggttatgttatctacagattacagacattgtatagaaaagcactttgaaaatccctgtcctgttctgttccattctaattactggtgcatgcagccttcagtcacttactccctgcttgctcaatcgatcacgaccctctcatgcaaacccccttagagttgtaagcccttaagagggataggaattgctcactcagggagctcagtttttgagacgtgagtcttgccaatgctcccggccgaataaagcccttccttctttaaaaaaaaaaaaaaaaaa

SEQ ID NO: 235875 - DNA, 690 bp, Homo Sapiens
  misc_feature (25)..(25): n is a, c, g, or t
gaagtgcagagagactgcagccatnacaggaagcaaacagcgtagtcgcctctctgttatggctcagtacctctgcaatttcgacacatctttacaattccaggacaagctttgtccccaaaccagaggtggacgtgggcgtggtgcacttcactcccttgatacagcccaagatagagcagccattcaagctggtggaaaaagtggttcagaatgtatttcagttccgaaggaaatactgccatcgagggctcagaatgttattccctgaagcgcagcgcttggaaagcacgggcaggctgttagagttggcagacatagaccctactcttcggccccgccagctctccatctcacactttaagagcctctgtgatgtatacagaaaaatgtgtgatgaagacccacaactctttgcatataatttcagagaagaactcaagcgaagaaaaagcaaaaatgaagaaaaagaagaggatgacgcagagaattacagactctagctgctgcctgggggcgagcagcctaccagatgtcgatttgcactacgtggagcttcttatataggtactcttttgtctttacagaatgacgatacaaatgccaatgaccagatgtgacttattttccttttactatacagcttggcagagaaaataaatatcatcaaataagaaaaaaaaaaaaaaa

SEQ ID NO: 235876 - DNA, 694 bp, Homo Sapiens
  misc_feature (99)..(99): n is a, c, g, or t
gagagacttgaggttagagtctgcaaagtgagaagacactacatggtgcagctgccacatgaagaacccaagctcctgtcaaagttgtgaatgcgactntggatgagattaagaaggcccagtggacggttggtcttgaagagtggcagtgtgtggatttgaggacctctgcagaccatcagatcaaaggagggagagctgttttgggtgttttgttttttttgtttttatagcattttgctttttcttggaatgtaattttcctatggcatgttaactggtgcacatcgtgtaacctgtctggtgagcaacctacaattgggatgagttctaggtacatgtgtttgctgactttggggtaaacaactttgttataatacagtctctgccacagatgcatgtgacctcttcaggggcccagagtggctgaggaaggaaagcttcaagctggccatgggggtcccaaacagtcattccaggcttagatgatgactagcctaggtcatcagagcccagactccacagagactaaaatcagagctctgtcttgttatgataaatttcatttgcttggaaaaagaaatgctgaaagccagtgtttagaatctttgtgcagatgaccaaagcaattgacttggccaagaaaaggtaaggtaaataaacatttttcaaaatgaaaaaaaaaaaaaaaaaa

SEQ ID NO: 235877 - DNA, 674 bp, Homo Sapiens
  misc_feature (148)..(148): n is a, c, g, or t
gaaatatgtggtaagagcttctgtcttagtcaaagtcttaataggcattgcatggtccacacagcagagaaactgtacaaatctgaaaagtatggaagaggtttcattgataggctagatttgcataagcatcagatgattcatatgngacagaaaccatataattgtaaagaatgtgggaagagcttcaaatggtcctcatatcttttggtccatcaacgagtccacactggagaaaagccatacaaatgtgaggagtgtgggaagggctacattagtaagtcaggtcttgacttccaccatagaacccacacgggagagagatcttataactgtgataactgcgggaagagctttagacatgcttctagtattttgaatcataagaaactccactgccaaagaaagccattgaaatgtgaagactgtggaaagaggcttgtatgccggtcatactgtaaagaccaacaaagagaccacagtggagaaaacccatccaaatgtgaggactgtgggaagcgctacaagaggcgcttgaatctggatataattttatcattatttttaaatgacatataagttatacatatttatggagtgtgaaatttgatacatgtatataatgtgtgctgattaaatcagtttaatttcacctgaaaaaaaaaaaaaaaaaa

SEQ ID NO: 235878 - DNA, 638 bp, Homo Sapiens
gtaagccctgagtacaatacacttcctggaggcatcctcactgctgttgaagcaaaggatatgcatggggtggaaggacggcttcgaacctgggactcatatgccttgagaacaaatagattgttacagccttgggctgctgcgtaatcacggttcctcgaggctcttcctgagcacatgcccaagcatctgcctctggagagactgactccaaatgcaggtgcttccattggagctaggtcggaggctgctttatatgacgaactccagaaatggatgccagaatacggaggccaaacgttctgagtcctggtaaggacagtcgctctgggggtcctcattttactgcagttcctgcacgccagtgaaagagaggagatagaccctggaaggcagagctgcagatgctcatcatcaggtcaattctggagctacagttttgtttctgactggatagggatgcaccagtgactgtcacatcaagcagtccttttattctctctcctttagtatcgattttaaagggcattaggcactatggttccagagtttcttggggaaaacttgcagattcttattaattggttctgcaatacttaaataaattattttacaattgtaaaaaaaaaaaaaaaaaa

SEQ ID NO: 235879 - DNA, 657 bp, Homo Sapiens
  misc_feature (20)..(20): n is a, c, g, or t
gggggagtcgcctttccatnttccagatgttaccgtccagctgctgctcgccgctgctggattccagtttcctccccttctggcgacggattggtgatgacaccgagtctcactttctccttcccccgcccggaccaaccgccgtggggggccgagggtgccggggacggccggagagcgatcaccggctgggcggcgggagccgacgaggggcgagccccgctccggctcaagcgcgcacacccctcacggcccgcactccggccttccacacccgtgcacactctcgcccgcgggcggcggcagccgtgcccaggctgctgcagcgccacccgcccgccgcggaccctccgcgccctccgcctagtcacccggcccggccgcgggccgccggggctcgcagagtgtcagccatcccgggcaggagtcgcgtctccccaccccgacctccactcgcgccgggagctgagcggcagtgtaggtagtgaagactccctggggctcccagccttccctctccgcgctctccccccatcacttttatgaattcgactccactttctaaaggaattatgagtcttgtggcaaacacaaaccggagtggccgggagggggaaaaggggggaaaagaaaatctttaaaaaaaaaaaaaaaaaa

SEQ ID NO: 235880 - DNA, 581 bp, Homo Sapiens
tggatgcgcaagctgcacataagtcatgacaacataggcggcccggaaggcaaaagggcccggacggcctacacgcgctaccagaccctggagctggagaaggagttccacttcaaccgttacctgacccgcagaaggaggattgaaatagcacatgctctttgcctctccgagagacaaattaaaatctggttccaaaaccggagaatgaagtggaaaaaagataataagctgaaaagcatgagcatggccgcggcaggaggggccttccgtccctgagtatctgagcgtttaaagtactgagcagtattagcggatcccgcgtagtgtcagtactaaggtgactttctgaaactcccttgtgttccttctgtgaagaagccctgttctcgttgccctaattcatcttttaatcatgagcctgtttattgccattatagcgcctgtataagtagatctgctttctgttcatctctttgtcctgaatggctttgtcttgaaaaaaaatagatgttttaacttatttatatgaagcaagctgtgttacttgaagtaactataacaaaaaaaaaaaaaaaaaa

SEQ ID NO: 235881 - DNA, 584 bp, Homo Sapiens
gggagatggtccagctgaaaatccccagcatccacaaagaaagggtggaagccctgggggccctggcctggcccaggtgcaggctgcatggccgggcggggcggtgtctcctttcacagcttccccgtctgtccgcagcctccaggagccccacacagggctggggctctgtgcccccaactcacacccgtcggctcccccaggaggagcaggctgggcccagagccgcagggtgggctgcagggaggtctgacttagctggggaaagtgccatccctgccattgctagtgacaagctcgggctgctgtggccccagcacagattcaacactcactgcgctacgtgccagctgttgcacactcacctccacacccaactcacaggaagcaaggctgggaaggagggaactggccccaggccacacagatgctgcgagttgggattatgatcgggtgcagtggctcacacctgtaattccagcacttggggaggccaaggcgagtggattgcttgagcccaggagtctgagaccagcctgggcaacatggtgaaaccccatctctacaaaaaaaaaaaaaaaaaa

SEQ ID NO: 235882 - DNA, 609 bp, Homo Sapiens
  misc_feature (590)..(590): n is a, c, g, or t
aaacaagttattttaaaacttattggaatattcaaatattaaccaaagtagaaaaatataatacacatccatgtgcccatcacagaacttcactgattatcatcatttagccagtcttgaagaagcaagtgctaattacaatcacaaatgaaacaagattcagacttcatgaagagcactgcgctataataaaagaagaaatgagcacatacattcttttactgacagtcaaatggtgaaggtgggcagaatcattatgtgatgcaacatggcaaaagtatacagacagtgcatccagaggaaggcaccttgctgaatgactagaatggaagtaggagacattttgcaggcccccttcatcctgcagggagaaccagaaccacagcagctctatttgcctattcctctttaaattacaaagttaaaatttgggagtagtagaaaatcaattggttatcttatagagtctcctagaatatttcattggcattgagaaggtggaaaatgcaaattatatactttaaaatgtaatttttgcttttcacatatgcttaaagcctaaaacctcttaataaacttcttctgaaatntaaaaaaaaaaaaaaaaaa

SEQ ID NO: 235883 - DNA, 724 bp, Homo Sapiens
  misc_feature (56)..(56): n is a, c, g, or t
  misc_feature (86)..(86): n is a, c, g, or t
gtattactgcaagaataacaaagcaggtttcctgatccaagcagaaccctgttatntgaagagcctgagaaatcttatcccgttancaaatgtcctgggagtgcatccaaagtgaaacttgggtatcctcaatactaagaaatctctgagaatgactgggtcttggctctttgatcttacctctactcctctgaaaaacatgattatctaaaattgtgttaggtggatgaaccgcatcaaagacttccagaagccactccagtgaccataagataaatgtcagaatcgcataacccccaggatcagcctgttgctcaggctggagtgcaatggcacgatctgagctcactgcaaccacctgcctcccgggttcaagctattctcctgcctcagcctcctgagtagctgggattacaggcgcctgcaaccacacccagctaatttttgtacttttagtagagatggggttttgccatgttggccaggctggtctcgaactcttgacctcaggtgatctgcctgcctcagcctcccaaagtgctgggattacaggcttgagccaccgagcctggcctctactttttattactgtcatgtagttagtgataaaatgcttctatctgaaaaaaaatttgttgttctaaattctaaaaaattctcgtgattattgcttaaattttaataaagcagatgtgattttcaaattaaaaaaaaaaaaaaaaaa

SEQ ID NO: 235884 - DNA, 828 bp, Homo Sapiens
  misc_feature (19)..(19): n is a, c, g, or t
  misc_feature (34)..(34): n is a, c, g, or t
  misc_feature (98)..(98): n is a, c, g, or t
atacccatgtagccaaccntacaaaagacagttntcacaaattgagtgggaggtgggcggttcagtatctgccactggacttgattataaactgtatntgaatatcagtggtattatcttttaagttgtcagcaagttaccaaggtattcattaaagaacttgtaatatcaaattactatttattcataacaattgatttgatgctaataataattttctttaaactctaccattcattatgtggtaactgtattgaacttactttatttggattttattttaatgtgactagatgtcaccacttcaaaaaatcaatttgttcttagaacctggttgaaaataccaggaaactgttacagacgccatttttttttttttttgagacggagtcttgctctgttgcccaggctggagtgcagtggcacaatctcagctcactgcaagctccgcctcctgggttcacgccattctcccacctcagcttcccaagcagctgggactacaggtacctgccaccacgcctggctaattttgtttttgtatttttagtagagacggggtttcaccgtgttagccaggaaggtctcaatctcctgacctcgtgaatcgcccccctcggtctcccaaagtgctgggattacaggcgtgagccaccatgcccggcccaaatattttttattcaggatggtataacctaactgataataggtaataaggttaaatttttttatgacgtattttatttacaaatatcatacactgctggtgttaccatatgaaaggaaataaagtcaattgataattgcctcaaaaaaaaaaaaaaaaaa

SEQ ID NO: 235885 - DNA, 776 bp, Homo Sapiens
  misc_feature (60)..(60): n is a, c, g, or t
  misc_feature (115)..(115): n is a, c, g, or t
gatgcagagaatgtgatacagaataatgtacaagaaaaggactaaaagattggtcgtttntgatgctcgatgaatgctgggaattcagaggaatgtcttcacttatacttggatntgctctcttcccatttctgattgttgtatagctttcgattttgcttacagtagttcccccttatcttcgggagatacattccaaggcccccagtgaactcctgaaacctcaaacagtaccaaacctttatacactgttttttccatatatatatacctatgataaagtataatgtataaattaagcatagcaagagattaataataatgtaatagaacaatgataacatactataataaaagttatgtgaatgtggttggtctctcttgctttcaaaatatcttcttgtacagtactcacctattttagaatgtggttgactacaggtaaccaaaaccacagaaagggaaactttggatgaggggggcactactgtacttaggaatacaactatatacatatgattttatttttaagaccatattatatttgggtatctactaatattttgtataaagcaattttttgttccattacgtgactttttgttttattgtatatgtaatttaacacacaataaagggtaaagttgcttccccaaaccacacttttaatcaaaacctagaatcatctgcagtccttgttaaaaatgcaggtttctagaaccctctgaagttctgattaaataaatttattgcaaaccacaaaaaaaaaaaaaaaa

SEQ ID NO: 235886 - DNA, 653 bp, Homo Sapiens
gggtgaatgaggccagggcaacccccaggagctgaggccaactctttgagtcaggactgtgccgtgtgcccagggccttgcatgtgtgggccctcgagtgatttctactggcaggctgaaagccctgtgaggggcggctgtgggcggaggccacgcaggaagagtgcttaggagtaacttgtttctaacacctgtgtgctgagtgccaatgctgggtgtggtgttatgatatatattggttttcatccagcattcctgactcgtaactctcatagtccttgttccagtctttgttagaatactgggtatgttagggcttgggacaggcctctgacctctgggtatcctttcactaatgttcgcccacctttttcacagtgggtcctaaagaccttcccatgagagggtctcaatcctaggggaaggaatgttgatgtcatgaaccttccataaaaacccaagaggacagggttcagagagcttctggatagctgaacacctggcacttcctggagtgtggcgtgcccagggagggcacggaagctctgcactccttccccttccctcattccttgctctatgtgcatctcttcatctgtatcctttgcgatatcctttataataaaccggtaaacataaaaaaaaaaaaaaaa

SEQ ID NO: 235887 - DNA, 795 bp, Homo Sapiens
  misc_feature (26)..(26): n is a, c, g, or t
  misc_feature (31)..(31): n is a, c, g, or t
  misc_feature (136)..(136): n is a, c, g, or t
gtcaacatgctctgggttcagtgatntgacntgtcagaaggtgacgatgatgatgatgatgacggtgaggaggaggataatgacatggataatagtgaatgaaagcagaaagcaaagtaataaaatcacaaatgtntggaaaacacaaaagtaacttgtttatctcagtctgtacaaaaacagtaaggaggcagaaagccaagcactgcatttttaggccaatcacatttacatgaccgtaatttcttatcaattctacttttatttttgcttacagaaaaacggggggagaattaagccaaagaagtatatttatgaatcagcaaatgtggtgcctgattatagaaatttgtgatcctatatacaatataggacttttaaagttgtgacattctggctttttcttttaatgaatactttttagtttgtatttgactttatttcctttattcaaatcatttttaaaaacttacattttgaacaaacactcttaactcctaattgttctttgacacgtagtaattctgtgacatactttttttttcttatagcaatacactgtaatatcagaaatggttggcctgagcaacctagtaagacctcgtctctactaataattaaaaaactagctggcatggtagcacacacctgtagtcccagatacttgggaggccaaggcaggaggattgcttgagacctagcaatcagtcagggctgcagtgagccatgatggcaccactgcactctagcctgggcaagagaacaagatcctgtctcaaaaaaaaaaaaaaaaaa

SEQ ID NO: 235888 - DNA, 716 bp, Homo Sapiens
gggaaaacaacattgtctcgaattctgcttggtcagaatcgtgatggcattgtgttcagcactgatgactattttcaccatcaagatgggtacaggtataatgttaatcaacttggtgatgcccatgactggaaccagaacagagcaaaacaagctatcgatcagggaagatctccagttataatagataacactaatatacaagcttgggaaatgaagccatatgtggaagtggccataggaaaaggatacagagtagagtttcatgaacctgaaacttggtggaaatttgatcctgaagaattagaaaagaggaataaacatggtgtgtctcgaaagaagattgctcagatgttggatcgttatgaatatcaaatgtccatttctattgtaatgaattcagtggaaccatcacacaaaagcacacaaagacctcctcctccacaggggagacagaggtggggaggctctcttggctcacataatcgtgtctgtgtcacaaataatcattaaattagctattttcagctaacacatttgttgttgcacttgaaaaagagttagtgagcctgtcttggagtttaagtagtttcaaataaaaaaaggctacagtgcctcacaaaggatgttcccagcaagttgtttaaattcccagcaagttgttaaagtgtaaataaaaatatatgaaattgtattttaaaaaaaaaaaaaaaaaa

SEQ ID NO: 235889 - DNA, 753 bp, Homo Sapiens
ccatttcttttgcaatgtagtttatgtactgttaaagaatgtattgattctttttagatcaaagtaaaaataggtcagcagagatttcagtttcccagggcttaaccagaaccgccacctcaatgcattgtcagtaggatacattattagaaactgttagggtctttcccaggacatttttttttctgtatcatgtctccccatcattgaagcgcaagttttcttgaattcaaatactcccaatgagcttgtatacttccaaacagctaaacttgatttccagttgtggatttcacacatataattgccgccttcttccctcctcttttttcccccctagttgaatcagcttgtctaacaagcccattttcatgccccagctgtgctgtgggttttccaagcctcatatttgaatattcaatgagtttaagatggatatgatttcaaaaaatagggccgggcgcggtggctcacgcctgtaatcccagcactttgggaggccgaagcaggcggatcacgaggtcaggaggtcgagatcatcctggctaacacagtgaaaccccatctctactaaaaatacaaaacattagccgggcgtggtggtgggtgcctgtagtcccagctactctggaggctgaggcaggagaatggcgtgaacccgggaggcggagcttgcaatgagccgagatcgcgccactgcactccagcctgggtgacagagcgagactccgtctcaaaaaaaaaaaaaaaaaa

SEQ ID NO: 235890 - DNA, 751 bp, Homo Sapiens
tggcagaccaagtgagactcaggaatggttgcattataaatgacacacattgccacttgtgtagatatttttaagttctttggctaagtcctctcctaactgcctgtcctctggttaggcccctccctctccactagtggtgaatgcatgtgtctgtctgatcagcatcactgcacacggaggtctagtgagcctcttgctaagtgtcacacacactcttcccaaagacgtgatgagttaaagttgtattctgaaatcatgaagccagagcctgtgccagaccttctgctacctctcatagaattgctctgtaattctaaatttaaaattagaagtagagagagataagccatcgcccctttgcctctgagaattggctgctgtttctaatataattattttctaagatagccagatagttagaaaaagattttcattgatgacatatctttaaactttcttgcatcagtattctaaattgagcaaactgaaagattttcatcaggaaaggagcactgtgggaagagcccagtattcacattttttccccatttttcagaagcgacatttcatatataggtgccaaaagtgaatcggggtgcggagagtgggaaccttttgaatttatgattgtcacagagatggtagaaattatgatctgactggaaaacaatcctgtatcccctccccaaagaatcatgggctttttttttgaattaaaaagcagacaaatagaaaaaaaaaaaaaaaa

SEQ ID NO: 235891 - DNA, 749 bp, Homo Sapiens
  misc_feature (36)..(36): n is a, c, g, or t
  misc_feature (191)..(191): n is a, c, g, or t
attgtattgggtaatataagtaatctagtgatgatntaaactgtgcaggaggatgtgggtaggttatatgcaaatactgcaccattttttatcaggggcttgagcatctgaggattttagtatcctcaggagtcctggaaccaaaccccccacagatacggggacaactttatgacattgtttttcaaccnaatgaatgtttataccttttgttttccttgccgcgactgtgaagataaagttcaaaagtatttttaccaaagtgtagctaatatttcaagctgaaaataatagttctactgcccgtgtctccagaatgtagagcccatcaatatttttattttaggaggtgtacttgacacccaataaactgcacgtatcaaaagtgtacaatgtgttggcgtatgtataccctgcgtaaaactatcaccacaactgaagtgaggaacggacccatcattcccaagtgcccttgtgccctgttattagtttgcatgtcctagaattctatgtaaattgaatcatacaatatgtatcccttttttggtcaggcatattttactcagtatagttattttgagattcatccatgtggtagcatgtgtcacgagtttttgtttttatgtttttcattgctgagtactgcttcattgaatagatttgttcattgacctatcgatggacacctgggttgtttccagtttggggctgttataaataaagctgttatgaacaaaaaaaaaaaaaaa

SEQ ID NO: 235892 - DNA, 710 bp, Homo Sapiens
caaggaaggaaatgaaaagtgaacgtactgttttacccacccctttctgtttgcttattgttgttgcttcactgtgcataaagttgttttcaatgcaacgcttgttaaataaatattgtgaactattttgtaaatgaaatgtattatgttgaaagctgtcagttcaaaaataagcttttttgttgttgttgaagatgaagtgtgttaggtgaaaccaaaaagccaaaaaaagtaatttcatatatagcatctatttgaatataatctttctttaaaatttcttttagcatagcattttcagtgctaagaaagaatctctatgttatattttgttaaaataatggctttctaacaaagcaaatggtaaagtacaaagttggaagatgtcaagttaacgagacttgctgcaaagccttgcagaacggaggaggctctgcctgctggctgtctctccctccaacctctctacaatcatgcctgctttgaggtgttctgttgcagcaagctgcaccttgggtcactcttttggaatattttgactataggctgcgtcacaggcagaaaaggagttgatggaaaatggactaaaaaactgacatgtttgaatcagtgctagagggaacagattgtgaattttgtttacagcatccaatatttggatttttttgtaaataaaaaagttatttttttctaaaaaaaaaaaaaaaaaa

SEQ ID NO: 235893 - DNA, 758 bp, Homo Sapiens
  misc_feature (139)..(139): n is a, c, g, or t
  misc_feature (182)..(182): n is a, c, g, or t
agttcatcaagccaggctggagtgtgatgaggagtttcatccctggaaaggaaaaagagattagcagaggcatttcatatcagtgaggattctgatcctttcaatatacgttattcagggtcaaaattcagtgatagtntgaaagaagatgccaggaaggacttaaagtttgtcagtgacgntgagaaggaaatggaaaccctcgtggaggccgtgaataagggaaagaatagtaagaaaagccacagcttccctcccatgaacagagaccaccgccggatcatccatgacttggcccaagtttatggcctggagagcgtgagctatgacagtgaaccgaagcgcaatgtggtggtcactgccatcagggggaagtccgtttgtcctcctaccacgctgacaggtgtgcttgaaagggaaatgcaggcacggcctccaccaccgattcctcatcacagacatcagtcagacaagaatcctgggagcagtaatttacagaaaataaccaaggagccaataattgactattttgacgtccaggactaagaagatcatgatgcacttagataaaagaatgattaggtatagtggagacttatttgccagcagataaatcatgcccgttcccctctgcctggcagaatcacagtctcacatactgtcttgtactgacacatccaaagcatgagtgtgtcagaaatcccttgtctattcctgtctgtataaagtgtttcattatgaaaaaaaaaaaaaaaaaa

SEQ ID NO: 235894 - DNA, 745 bp, Homo Sapiens
cattcccgaatgtcctagtggattgtgttgtgctgcctaagctgccggctgcaggagccagagaagtgacccccgcgggagcagcggcaggtggatctccacggtggctcgctttgtttttgttttgttttttcttttaagacggagtctcactctgtcgccgagtttggagtgtattggcgcgatctcggctcactgtaacctccgcctcctgaattcaagtgattctcctgcctcagcctccctagtagctgggattataggcgccccccaccacgcccaagtaacttttgtatttttagtagagatggggttttgccttgttggccaggctggtcttgaactcccagcctgaaatgatccacccacgtccacctaccaaagtgctggaattgcaggcatgagccaccactcccggcctgctttttgtttttgaagacaggacttaggtctcctcctcccgaactctaaacctgcgtgtgtggctgtgcaccgctcgtttgtagcgtcacctcaggtctggggaagtctgtgctggcatctcctcattgtgccttcatcagagctggtgccttcgggccagaaagactctcgttctttctagatggtgggatcaggggcctttgctgtgtttcccttggtggatttttgtgttttgtaagttgtctattttgataatgtattatttttataactgtaaaaaaagtaaatagcatattttaaagtgaaaaaaaaaaaaaaaaaa

SEQ ID NO: 235895 - DNA, 676 bp, Homo Sapiens
ctaaaatagtttgtgtggatatcagggctaaaagttctccccatctattttaggggctgtctgcttttctagtctgtccacaccagggattacctgtcatcttgcatgcaatcaggagaatctcataggggcaggaccttcccctactctgcctcttcctccatactaggttggaaaaatctggtttagcccactttttgcaacactcctgccaagtggtcttctacccattgcttgaaaatctctcttgacagggagctcactacctcacaaggcaggtcatttcattgtgggatctatagaaggttaagtaccacattctcctctaaaccttgcctacgacatgtttaatacttcatctacatagcagcccttcagataatcacaaccactttgcccccaagttttcaggttaagtagcatgaatttggtcattccttaaagacagggtttcaatttccacacatgatctctgcaaacaggcactgggttttcagtgtcctttttgaagggtcatataaaaataaggtaacaccacagtgccactacaccttctggggctggacttgtttcagcagctttggttgcactgaatttgggggagctgcatggtacccaggggtttattgggttgcagatatataaatgccctaaacttaaaaaaaaaaaaaaaaaa

SEQ ID NO: 235896 - DNA, 769 bp, Homo Sapiens
  misc_feature (93)..(93): n is a, c, g, or t
agcaaaatatcgatgttttgatgcacgagcagatggtgaagtattggcaagctcagggtaacagtcgaagctctccatgccctccagtctgtntacaagcaatacagagatgacttggaggcttgaaagcaaatgctccagaggcatctcctactcctcagtaaatgctcacatgaaagtacctacatgagatttttgtaattactctggtgtatataatctataattcatgggaagctgggagcggggagacctgggtttgaagtgttgaagttttgtatactttttcatttgtttatttctctattccctccttctcataactgccacccctcaggacttaagttctccataatgggcagtaccttctcaataatttatacctacgtgatagcgtgagaaagtctatttgcattttcaacattttcttaggaagaaccgaaatgcaattcccatttttatttttaataagcaaaagcataaatcttagaaaacctatgaaaaagaaatacttttatgttatccctaatcgtcccactaaatggaatgcctatgattagcttcattaagagttttatactgtgaagattttattagaagcaatatatgaaaattacttggattaatgtgttaatcttcctctttaaaatgctaatatccattttatgcacattaaagctcagtatgcattttctttgatgcatgcagtttctatcaattaaatataaagaatgaaacttagcaccaacttaaaaaaaaaaaaaaaaaa

SEQ ID NO: 235897 - DNA, 545 bp, Homo Sapiens
  misc_feature (8)..(8): n is a, c, g, or t
ttcaattntaagtttctaaaaaaggtgatattaaagtatatgtattccttcagcattaccttaaaggctagaaaaacgggataaatcttcagaaaagtgtcaaaagtgtcacagtacatgttcaaatttaaacttgaatcctggttcatctttgacttttgttgtgcatttttaatgcttctttatttttgatacacagaatgcagttgaacttgatcttttaaaattgagacatgtaagctaatcagcaaaagacagaaacaaaactgcacatctgtaataatcagatagcaattctactgcacaattcattgattgtaaggtatcctgtaacaagcaatgtttgtctcctattttttgatacctcttaaacttatgtcttttagaaagacagtgcctctgtatgctttttgtatttttactgagtgtaaatatttgttatatttttggttaagagaatgtaaaaataccatttattattatcatatctactaatacattggtggaatcaataaagaatctacattaaaaaaaaaaaaaaaaaa

SEQ ID NO: 235898 - DNA, 653 bp, Homo Sapiens
  misc_feature (37)..(37): n is a, c, g, or t
aaagattgcaacatacacaagaacacactcctattcntaccccacacactcagggacaagcccaactaaagcttacaaggagaccagggtggctctgtccaggggagaagccagttatggaacagtgcattgagagccatggtaggagaggcccacagttctctggagcatgcagcaggggcaccccacctggccttgaggatcagggggagtcaaaggataaagcatggggctgatgacgtctgagggagtgtgatcctccatgtatggcctctgcctgctgtctcacatgtcccttctggtggtcacttgggctctaggagtatacgtcacctcagaccatctggcagaaatactccaggctcctaccccaaagcacatgtcagccttgctgctggagcacgaagacaatgtaaatgaaacatgaaatggaggagttgtgagaccctgaccctgagtccttacttgaaagctgctgctggtgttctgagtgtcttttggactcttatttcttgcccttttccttattaggcaagcagtaacttaggaagtaggtaagagcaataaatgtgacatgttatgtcatcatagtaggagctcatgggaataaaagtcagtggcttgatgcttctgttagaaaaaaaaaaaaaaaa

SEQ ID NO: 235899 - DNA, 713 bp, Homo Sapiens
agatggcattactctaaccctaaatggaatttcagctctcctattgagaagagacaggtaaatcaaggtcttaacttaggttggtgtaagttaacttttcctgatggacaagagcagttaattcagattgaacaccctgaaccatatgaaagatatgtgacaacagtaacatcatggtgcaggagactgacccagactagtcccagagagatgcccactcattcgtcatcttctgttctccaagaaaattggtctgttgcttctgaacttgaaaagatacagaagtttaacttgctactagaaaatagtggtatcctaaaccagatttctaacaagaaaaatgaacaacagtcttttgatcattataaaccaggatcttcagaaaccttgctaggagaagttaatgaaaatagagtatcaatagcattgaaaaaaacctctgaaatccttcacgatattgactgtcttctatcaaactctaaaaagtgaaaaatggaattattacaacatattattaaagtttaaggatgttgtttcaagtgactggtataaaattactagtaagccaagatattgtacgtattaccccggcacaatgattgtgaaagaactgacatttaactttgaaggtatttttaacttgtacatttttaaaatatgtatttatatcttaataataaatatttcgaagttttaaaaaaaaaaaaaaaaaa

SEQ ID NO: 235900 - DNA, 494 bp, Homo Sapiens
  misc_feature (16)..(16): n is a, c, g, or t
  misc_feature (67)..(67): n is a, c, g, or t
taaggtcgcaaacatntgctagttgtccttctcaatgcatgtgcaggctgcatcctgtccttgtttntaagccagggtttataaataagtagatttataccaatcttaatagaattgtatattttatgcaagaattaaatgctttacaacatgaagtataactcaacccattgtaaactttggtggcaatatggatttgaaactcgacagttctcttgtatttgcttcctaggtttctgcatgcaagttatgacaggtaggactgaaaaaacactgccttttgacttctagcatttagcaaccgagagtcgtagagtcaataaagctgtaagtgtcttcacttaatctgtggttctcctaaaactattatctgaaacctacagcatcccaccatgaaatatttggtaaatttatgttgtgacgtgttgcagcatgtaaataattataacttctctgcaataaaacatatttatatgaaaaaaaaaaaaaaaaaa

SEQ ID NO: 235901 - DNA, 530 bp, Homo Sapiens
  misc_feature (33)..(33): n is a, c, g, or t
agggtagaaccagtccatgctgtttttattttntatctccgtaattgtagaatcatgtttactcaacgtttttccccagctgcctcagtaactgggcactcggaggccttggcacgggttctggaggacagacagcaattctatgagtgctcactgagatacttgctggagacctcagaaaacacaagtgccttctccacggtgcaattcagacttcagtgatctccagtggtcaaaagacatttacccttaatatcagacaacatttatattttagtgaagaaacaagttctcgggtggggaatctatgtttcactcagatttatatgtttggaggaaaaaagcctttttttgtaaaatatttaaatttatataagaaaatgttagaaaaaaatatggggagtgtatataaaacttgctttattgcatggggcaggggaagtccaggcctaatactcctaaagtaagagttgggtcctttttttcttcaatacaactgtgctgtaccttgtaaaaaaaaaaaaaaaaaa

SEQ ID NO: 235902 - DNA, 635 bp, Homo Sapiens
gatgctgctggaacagcgctccagcatgcccgtggaggccgcctccgaggcgctgcggcggctctcggtctgcgggaggaccctcagtttagacttggccaccagtgcagcctcaggcatgaaagtgcaaggggacccaggtggaaagacggggactgagggcaagagcagaggcagcagcagcagcagcaggtgcctgtgaacatacctcagacgcctctggatccaagaaccaggggcctgaggatctgtggacaagagctggtttctaaaatcttgtaactcactagctagcggcggcctgagaactttagggtgactgatgctacccccacagaggaggcaagagccccaggactaacagctgactgaccaaagcagccccttgtaagcagctctgagtcttttggaggacagggacggtttgtggctgagataagtgtttcctggcaaaacatatgtggagcacaaagggtcagtcctctggcagaacagatgccacggagtatcacaggcaggaaagggtggccttcttgggtagcaggagtcagggggctgtaccctgggggtgccaggaaatgctctctgacctatcaataaaggaaaagcagtgattcaaaaaaaaaaaaaaaaaa

SEQ ID NO: 235903 - DNA, 686 bp, Homo Sapiens
gcagacccagcctcagaagcagcaaccgggagacctctggctctagctgtcggtgaacacggaaagtggtgtttgcttaacgtggagccagactacccggaataggtgttttcataccggacggagatcagggtgttagtgagcagggtggtagagctttacgcccaagttactacgacttactcgattacacgctttactgaatgtatattgctaactcttgcacatcaccagaaactctggagtttgaggtggcagaacagtcatggcattgacgatcccaatggaaaaatgtatttcaccatacaggactgtagagtcccgggaagccataataccagaaacagacctccagtttcattctcatccctagtactccactgacagctttattttttttctcctggggttgccaagagtctttgtctataaaatcattaggaacaaaaaaaaaatacacaagattagccctgatattttaatggaaatactgaccaagtttacaacatttcaaatgcagatcacacggaaaggtgactaagtacagaataacaaatgtgatttaaaacaaagataacctgctgctgcatataatacaggttgggtttagagcttggagctcagatgtcagacagcaggaggaataaaaatgctacttgtgaaaacccaaaaaaaaaaaaaaaaaa

SEQ ID NO: 235904 - DNA, 608 bp, Homo Sapiens
  misc_feature (86)..(86): n is a, c, g, or t
taatcagtatcagttgtttctaggacttaaaaagggctaaaacatgcagagttgggagtgtttcgtggcctcgtgtggcttttgtntggtagtgctggacatcttaattcagataggtgtgattcaaatgtcaaatcacctactattgtaggttttcctaagcgtaaaaaccccaacatattggaatgtatttctgctgtattctgaaatcttttatttaaacactaaaatgctttaacacagtaacgacttagtttaataaggatatatacataacaagtaataagtttgattaggctggtaagccacggtgacattatctgctaccttttttttgagtgggttcttttttccccatttaggctgcttgtcgaatgagagaggttttattttttgcatctgttaaagttctttttatgtaaaattaaccattttcccactttatcgtgaaatattttaaacacagagaccagtagagagtaagataatacctatatattcactactcaactttaaacaatgttaacatttgccagacttatgtcgaatttttcaaaataaaagacggctaaactctcccattcttctttaaaaaaaaaaaaaaaaaa

SEQ ID NO: 235905 - DNA, 687 bp, Homo Sapiens
  misc_feature (43)..(43): n is a, c, g, or t
agtgatcttttgcatcatgagtatttacctagagatggattangtgaaaaattcatgccagaactgaaagctaaattactgcaggaagcaaaagtcaattcattaataaagccaaaagagagttctaaagaaaatgaactcaggaaagatgaaagaaaaacagtttataccaatacactgctaagtagttcagttttgggaaaggaaatagaaaaagagaaaaagcccaaggagatcaaagtcagagttattaaagtcaaaggaggaagaggagatatctcagaaccaaaaaagaaagagtatgaaggtggacttggtcaacaggatgcaaatgaaaatgttcatcctatgtctccagatacaaaacttgtaaccattgaaccaccaaaccctatcaatcccagcactaactgtaatggcttgaaagaaaatccacattgcggaggttctgtgacaatgccacccatcaatctaactaacagtaatttgatggctgcaaatctcagttcaaatctctttcaccccagtgtgaggtgagctgtaacagagaagaaacctaaataatacaacattcctgtataatggtatttcaaagaatcgtgttcatagtgtctgtatgtaaactgaacttgaagaaaatatattgaaattaaagctgtataatgggccaaaaaaaaaaaaaaaaaa

SEQ ID NO: 235906 - DNA, 791 bp, Homo Sapiens
  misc_feature (22)..(22): n is a, c, g, or t
  misc_feature (125)..(125): n is a, c, g, or t
gccaccacaaaacaaggcagcntcgggagaaacacagtgaaaagtgacgcggacggaccgaggggaagcgaaatcgaggacactgatgattcttccaagcccgcaggagtcgccgttaaaacacntactgaaaaagttgaaaagatgtttccacatcgcaaaaatgtgaacaaaccagtcggtggaactaatgtccctgagatgtttatcaaaaaagaagaattacaagaactaaagtgtgcggatgtggaggatgaagactgggacatatcatccctagaggaagagatatctttgggaaaaaaatctgggaaagaacagaaggaacctccacctgcgaaaaatgaaccacattttgctcatgtgctaaatgcctggggcgcatttaatcctaaggggccaaagggagaaggacttcaagaaaatgaatcaagcacattaaaaagcagcttagtaactgtgactgattggagcgacacttcagatgtctaattccacatgtcagaagattattccagaagccagcagtatttcagtatcacagtgtttcagtaatttgcctccatgattctagtgcttctgccttaccgtgtttcccacagcaacacagagactgattcaaagaacaatggtctctttaatggcacccaatacagtattgaaaatcagatcatcaacagtatttcgaagcatgtaaaggtgtttaagacttccgctgctgcttaaaaataacatgtcattgaagtcataaaaagttttttcttcagaaaggtaaaaaaaaaaaaaaaaaa

SEQ ID NO: 235907 - DNA, 737 bp, Homo Sapiens
gcttgtcattccagagtgctgaggccagggctgatggtcttaaatgctcattttctggtttggcatggtgagtgttggggttgacatttagaactttaagtctcacccattatctggaatattgtgattctgtttattcttccagaatgctgaactccttgttagcccttcagattgttaggagtggttctcatttggtctgccagaatactgggttcttagttgacaacctagaatgtcagatttctggttgatttgtaacacagtcattctaggatgtggagctactgatgaaatctgctagaaagttagggggttcttattttgcattccagaatcttgactttctgattggtgattcaaagtgttgtgttcctggctgatgatccagaacagtggctcgtatcccaaatctgtcagcatctggctgtctagaatgtggatttgattcattttcctgttcagtgagatatcatagagacggagatcctaaggtccaacaagaatgcattccctgaatctgtgcctgcactgagagggcaaggaagtggggtgttcttcttgggacccccactaagaccctggtctgaggatgtagagagaacaggtgggctgtattcacgccattggttggaagctaccagagctctatccccatccaggtcttgactcatggcagctgtttctcatgaagctaataaaattcgctttctaaagttaaaaaaaaaaaaaaaaaa

SEQ ID NO: 235908 - DNA, 651 bp, Homo Sapiens
gagggaattccgcagaccctgcagctccagccctgaagactgaactgttggcagagagaagctggtggagtcctgtggctttccagagaagctaggagccaaaagctggggtaggagaggagaaagcagagcagcctcctggaagaaggccttgtcagctttgtctgtgcctcgcaaatcagaggcaagggagaggttgttaccaggggacactgagaatgtacatttgatctgccccagccacggaagtcagagtaggatgcacagtacaaaggaggggggagtggaggcctgagagggaagtttctggagttcagatactctctgttgggaacaggacatctcaacagtctcaggttcgatcagtgggtcttttggcactttgaaccttgaccacagggaccaagaagtggcaatgaggacacctgcaggaggggctagcctgactcccagaactttaagactttctccccactgccttctgctgcagcccaagcagggagtgtccccctcccagaagcatatcccagatgagtggtacattatataaggattttttttaagttgaaaacaactttcttttctttttgtatgatggttttttaacacagtcattaaaaatgtttataaatcaaaaaaaaaaaaaaaaaa

SEQ ID NO: 235909 - DNA, 664 bp, Homo Sapiens
  misc_feature (55)..(55): n is a, c, g, or t
agcctccaagggctcctcccttctctccctccctgtccctgcctatctatacctntgaagctctgggatggatctgaagccagacgtacggccaagtgcaggccgatgcccgaggaacagccggtgatgagcaccacggtgcgggccatggtgagactgtggggagaggctggggctctgggcttgatatcacctgcttcgccccgccccgcctgcgggcccccaccccttgttgtgtctcccacgcaatctcaaggataagccttcctgcgggtccctggcccgctctccccaccctgttctgagccaaaacagacatgagcccactgcttggaacaacaaactgtcctggttgctggtcagagggaggggaggctttacaagcaggtgtgggttcccacgtgggcacagagtggccccctgggcagattcccctgggtatgcctctgtgccacaggagcgattatagtgaccgcagtttgctgcagaggctgtgaaagtaaaggcgttgggaggtgggagatgattgtatatgtgttggtttcgtccagggttcctagctcataactcacatgaccatggttacagtcttacgttgtcatgttggggtgcctcaggcctcaaaaaacagcctttcgtctctctgaaaaaaaaaaaaaaaaaa

SEQ ID NO: 235910 - DNA, 624 bp, Homo Sapiens
  misc_feature (12)..(12): n is a, c, g, or t
tttttttttttntgagacggagtcttgctctgtcacccaggctgctggagtgcagtggcatgatctcggctcatggcaacctctgcctcctgggttcaagcgactctcctacctcatcctcccgagtagctgggattacaggtgcccaccatcacacccagctaattttcttgtatttttagtagagatggttttcaccatgttggctagatgggtctcgaacttctgacctcgggtgatccgcccgactcggcctccccttccaaagtgctgggattacaggcatgagccaccgctcctggccagtttagttttcacgctaagctttttgttctgcaggttgcccccaagtttcctggcagtgtgtgatactgaggaggtgagcttgtttctggagctgtgctttaagattcatgttacatgtaaagctgtcctcatttgtgactatggacctatggagttgggacaatctctatgggaagcagaaggcaaggaccccggtcattttaggtagaaacaacagcatgctaatgcaaaaaattatgcagtgtgctactgaacttcagaggtgatcaataaaagaagaataaaaagactaataaaagtaaaaaaaaaaaaaaaaaa

SEQ ID NO: 235911 - DNA, 555 bp, Homo Sapiens
agccacagccctccacagtaagcactgatcagggacatgggtttgggggtcagactggcatctccagctgctcccatgccgtgtaatagacaatgagtcattctttcttgagccctacaatcccctgttgcccagtttctcacctcaggcctcctggaaacccctacccgctaacctggggcctgtggtcacccatccatcataggtctggtctgcatagcctccattttcaatgagtccatcatggtccttgtcaaacttcatttcagattccatcacagcctagagagggaccaagatgttgaagacctaggtaccgaggaaaggcaacaaccagctaggctcttcccagacaccaaccatacccctggcacactggccactgcatgtgcatcccttactagacacacaggccacatgtccttcaggaagttttgatcacccgtgaggtaatagtcccgataaacctgcagcacaaacttcaggttcaggtccttccaatcagcagtatcatggattaaatatgcattgacgcggaaaaaaaaaaaaaaaaaa

SEQ ID NO: 235912 - DNA, 560 bp, Homo Sapiens
acctgaattgcctaaaaccaagaactctgcttgataaaataagcatagttttaggaacagccatgcagatataaattttatcaacactttatacataatttgggacttatatttaaatgtaatatttgatgcttataaaagggtaaatggggaatgcaaataaattatcaagcataataactcatcacctaacttaagaataacattatgagtgcttgtattttatctatttgagctcttctcctatctttgccgacccccccgctctctttttaatagatttgttcgaatgtagaaagacctaaaatacatatgtatccctaaagtgacttattttatagttttctttctttttgaacttcaaaaaaattgtatcatactctatgtagtctaaggatttggtttttttcactcaacatgtctctagaattcacaagttttattgttttatagctgtcattttcattgatgtatatttcattgttgggttatacaacatattgttaaggaatacatacatatataataaattatacatttttaaaaaaaaaaaaaaaaaa

SEQ ID NO: 235913 - DNA, 745 bp, Homo Sapiens
ctatgtacaatgtcattcacactagttgatcattttcagattgttcatactttttcttgagtaagaataagctttttcaagttgattttcaagcttactttttatattctaatctgacaaatgaaaatgtaaaatctgagttcagtgtatctaagctgctttacaattttttttcaatgctgtactactgtctcaagatttaaattttaatgcagagtactttattggtgtgaggcacacaggtaagaagaaatgtcaacattaaatgtatgacttacttggtacaaaaattttttaaaaagggaactaccttgacattgtgtattaaatgtttacctaagactataatctcaagtatgatgtttgtttaacatatacctctcaaaatttatcaccactcaatgacactgcatcaaaattgactataaaactaattcaagaaatatttatatatattttttaatatacaaaaaatatttagcctgatggaatggctttccttttcaaacattattttctaagtttctatacaaatgaaatctttacctctgcatattaatgagccttgccataattactgtagagtggcttttcaaagatattttgttgcactaaaactgtggtagtaaactcagtgaacatgatgtgtggaagagcataattagctggtcaatatttttgtccaaaatacctgcaagagtaataaaatacatacctttcaaacatgataaaaaaaaaaaaaaaa

SEQ ID NO: 235914 - DNA, 618 bp, Homo Sapiens
tagctcctgaataagacctgtcagcatcctttagtctaaggtgatgagaaatccatgttaccgatatagaagccaaactctaagccaagatcacataaagagaagaaaaagtacaacttctgataattcctctttgagaggcatgacagcagagctcagggatcttcttgcatttctacagaagatgcactggctgccctgggtttgtatctttcacaacaaagagtcttttccaagcacagaccagaggtcaggagaggactgtcaatccagtttgcactgaaataggcattagctgcctctaaattataaattatctcagccatcccttgtccttaggattagtaattaatgaaatgctaagagaactgatgaaaagatacaactgtttcttaaaaagattcagacaaatttattatgggtttacttttcctaattaataaagacttttacatcatagaaagcattaccttccttaggtttcacaattggtttttccttaggtggaataaatgctttgtttctttcctcttgtctcttactgatggcttctgcttgtttagcctacattaataaataaaaaatatatcagttaaatgtaaaaaaaaaaaaaaaaaa

SEQ ID NO: 235915 - DNA, 630 bp, Homo Sapiens
ttcctgcccacccagccccgagcattctcacacagagaaagaacaagcaagggctccagggggacaggatggggcagggcatacagtggggggtgggggggcagctgggaggagggagggacaaaacaaaacattttcctttgggttttttttttctttcttttttctcccctttactctttgggtggtgttgcttttcctttccttttccctttgagatttttttgttgttgtttcctttttgtattttactgatatcaccaggatagtttactctccttctagctttctgcttaccgcacactggataacacacacatacacacccacaaaaatgctcatgaacccaatccggagaaggttccagcaggtcccccaccctcccctcctcctcctacttctcctcttgacagcgaggacaggagggggacaaggggacacctgggcagacccgccggctctccccccaccccaccccgcccctcacatcatactccaatcataaccttgtatattacgcagtcattttggttttcgcggacgcgcctacctaagtaccatttacagaaagtgactctggctgtcattattttgtttatttgttccctatgcaaaaaaaaaaaaaaaaaa

SEQ ID NO: 235916 - DNA, 580 bp, Homo Sapiens
cccctttttttctttaacatcttttggagaaagcattttaaaaggaatatgtgttcctggcctcagttcgctttttcctccttttttgagctggtttcttgtcgctaggatggtttattccaggaaattcaggtctcacgttactaggaaggctcattcctaggaagtcatgttccatgttgctaggaaggctcattcctagaagtcatgtcccacaaagattaaaaaataaattgggggaggaaagagggaaaaaggaaggaaaggagatgattctgagggctccagacttaaaggagaaaagggtcctatctcttttctcttaatgttaaatgttattttgtttgtggaatgttcactctataatatatatgttgattaagtataccattatgcatgatttgcaatattgattgacctgtggagtgccttgagcctgtgtgtccaagactctgagtgctgagtgagtgggaagtactaaggagaattgctttcttggaaactccatgtagttcgtggcttttgtgattgaaatagcatcagtaaaagtctggcattgtggaaaaacaaaaaaaaaaaa

SEQ ID NO: 235917 - DNA, 591 bp, Homo Sapiens
atcccaccaaccctcagagccacccctaaagagatcctttgatattttcaacgcagccctgctttgggctgccctggtgctgccacacttcaggctcttctcctttcacaaccttctgtggctcacagaacccttggagccaatggagactgtctcaagagggcactggtggcccgacagcctggcacagggcagtgggacagggcatggccaggtggccactccagacccctggcttttcactgctggctgccttagaacctttcttacattagcagtttgctttgtatgcactttgtttttttctttgggtcttgttttttttttccacttagaaattgcatttcctgacagaaggactcaggttgtctgaagtcactgcacagtgcatctcagcccacatagtgatggttcccctgttcactctacttagcatgtccctaccgagtctcttctccactggatggaggaaaaccaagccgtggcttcccgctcagccctccctgcccctcccttcaaccattccccatgggaaatgtcaacaagtatgaataaagacacctactgagtggcaaaaaaaaaaaaaaaaaa

SEQ ID NO: 235918 - DNA, 564 bp, Homo Sapiens
  misc_feature (39)..(39): n is a, c, g, or t
caatcccatctccctccccaccccccctttcctccccantacctgaggctccccagcctaaggaggagccgccagtgcctgaagcccccagctcggggcccccctcctcctccctggaattgctggcctccttgaccccagaggccttctccctggacagctccctgcggggcaaacagcggatgagcaagcataactttctgcaggcccataacgggcaagggctgcgggccacccggccctctgacgaccccctcagccttctggatccactctggacactcaacaagacctgaacaggttttgcctacctggtccttacactacatcatcatcatctcatgcccacctgcccacacccagcagagcttctcagtgggcacagtctcttactcccatttctgctgcctttggccctgcctggcccagcctgcacccctgtggggtggaaatgtactgcaggctctgggtcaggttctgctcctttatgggacccgacatttttcagctctttgctattgaaataataaaccaccctgttctgtgaaaaaaaaaaaaaaaaaa

SEQ ID NO: 235919 - DNA, 697 bp, Homo Sapiens
gactgaacacgaactaaagtccctaaggaggaaaaaaccttaacatattcctgagatgtgattcttttattacttctttttgcaaagctaattatcaaatgatttgattaaacctagacgcattaggaaatgcaagttttacctaaaacttgcagaaatttaaacacatttccatttacttactaacgaacagacctgatttttatttaaaaacacaatttagctttgccaacagaagagtaaaggaaaccataacttataaatttgtaatgtgttcctccttgttggagacattagccagtgtttagttttagaccaacttatacaaacagagtattgatttgtacacattctggagacttgctatatcatggtttgctatggcacagactcagcttagcatggggacattttgaacttcattcaaagttgagtagttactggaacctttgacattgccttgtaatgaggtacttccaaaaaaagacccctaacaatggcataatagtgaggtctctctgtgcatatacataatatatatgcaggataaatgtgtgcaccaatcaaatctaaaattttatgtgactgtcaaatgaatattatttgggttaagatttttcatttctgatttggatagaaaattgctattaatcttgtattaaaatagtttttaaaaatcaaaaaaaaaaaaaaaaaa

SEQ ID NO: 235920 - DNA, 689 bp, Homo Sapiens
tttttgtgtctgaaatacatctaattctccagactgcagcccctctcagccccgagcacctgagcgctggggaggcccttattgagctcagcctggagaggggagggtcgcacgggtcccgggggcaggtctcctgcactggctcttcccttctgccagcttggaatttggttctcatcttgccacaggggtgcgtttcctaaagggcagccggagcagctcaaaggtgacaactgagatgcatttctaggcaggggcagggaaggccaacccaccttgcagccagttttctgtttctgtaaatagcagtgtatagagatggaagggcagcgtgggtgtatccacagatgggtttaggttttttttttggatgttttctattacctcattcagcaactttatgtttcacaatgactcaatgatgctttatttatattgtttgtactgtaattaaaaccattgacagacatttcactttgcttgttatttcatatgatcttgttttgattaaatatgccagtttgtattttcctgccttgggatttttttgtgtccgctgtacagtattctaagggaaaaagaaaaagaaagatgtgtaaagtaacagagagaggtggctatggtgtagagacctctttctaataaagaaatgaaaatatgtctacaccgctaaaaaaaaaaaaaaaaaa

SEQ ID NO: 235921 - DNA, 740 bp, Homo Sapiens
cacaaacgctggcgggtgtgccgccctccagcctctccgcccccgtcccctcggtcctgcagatcaccaagcagctctcctgggcccgcggctgctccgggcctcacatctgctgctggcctcggtgggctctgactgcggggctcacggggcctggggccatggctttcttctcggcccccaaatgcctttcctggagtggctaagcctctcctgacgaggctcctcatgcggggagagggctggggtccaggggtttcccggccctttctgcaggctgtgccagccccctccagtctgccactgccgtgcccgggggacatcctgcgcccaggctggaggccctgcctcgctgcttgccagcctcacctgctggggctggaggccatggatccctcatagtatccaaggtttgagttcctgtttttcgccttatagttttgtgagtgtttgagggacaacgaccaaaggtcttttccccaccatctttaaatcaaagttgtttaaaacaacattaattttaaaaaatacataaaagcaacccatgcttatggttaaaaaagagtacaggagtctggagtccgttgaagggtaaaggcctcccgcaagctgccagtcggctctttttcgcaaagccttccagaagttttctgtgcttatgaaagcgtatgtgtggcctttctcttcccttcttttattaaacacagataggtttatgctggataaaaaaaaaaaaaaaa

SEQ ID NO: 235922 - DNA, 693 bp, Homo Sapiens
taatgccacattgaggttctggctacttgtaagtaagagtaactgcatctggatgtgtttttattatacaattctatgtgtatctttagatgcagtgaaattcagattgcagcaaaatcacttatctgttcttttcggctaaaacactctaggtgaattttctaaacttccatggtttacatatttatatatgactaccaagatggagcaatccacggatggacttttgaataaactcaaatatttgatactgcttcctccaaggaatggagagtgtcaggcaggtaggtaagaaccactcctacacttatttctagctcctgaagccaactgcagccttggagccaatggctgtatttggctgtgtgttacaggttggccaaactgattgccatcaggtcagacaaaactgccttttatggtgtagtctgccagcttcagacatatgctgtattgttgttattggctagactatttattagactattgttggactattttttatcaaatgctttaccccacgcctgtttgtattgggagctctggaccaatagtgtctctcctagtgacagaaatatgagcatctgtggattacacagcctcatccctctctacaatattccagcccatccaaaatgctatattatgaattaaataaatatatatgtattcatgaaaaaaaaaaaaaaaaaa

SEQ ID NO: 235923 - DNA, 701 bp, Homo Sapiens
ctgtaacacattgtaattggagaagaaggaaactctgcaaggctaaactgtcattcacaacttggctacacatagactctagtcagttttgtctccagaaccttaggcttttgtattttttaattttaatttcactgttaatccttattgtcttttttattaagatgttggaaaagcaggaggtagttgtgcctcaattattgcaaaaatgtaacaataaagttcctcaaaataagatctgttcctcatagctatactgtgtacacataagacgcatatagggttttactgaaatctatttttaactcttatgttcgtagagaaattgtttcaaggattttgagtcataggtctgtaatttatagagatctctagaattcttattgtaattttcctacttctttgataaaagaaaaataagtcagattgttaactccaagattgaaaaaaaaaactcttgaaagaagattattagttgtaactaatttgggggttctgggcacagacatctaacctggtattgtaaggcagaggctcccattggaatggtagtggtccgggtcagttgttcatggtgtaagctttgcacagtgtattaacattgggagggtctggcttgaaaatttggccaccctcagcctctgaatgtttattaaaataaatttagtctttctttgcttaatataaaaaaaaaaaaaaaa

SEQ ID NO: 235924 - DNA, 687 bp, Homo Sapiens
  misc_feature (48)..(48): n is a, c, g, or t
gaatatgttatgccacattgcaaaagaattttgcagaagtgattaatntaaaatgttattaagggccttgagatggggagattatcctgaattactttggagggcctaatataattgtagggatctttaaaagttgaagagggaggcaaaagaggaggtcagagtgatcctgtataagaaagacaactacttttgaaggaagttaaaaggtggctttgaaggaggaagacaccttgagccaaggaatgaagggggcctgtaaaaaaagattgaaaaggcaaggaaacagattctccattagagtccccagaaaggaatgcagccttgctggcacctttttagcccagtgagatcaatgtcaaacttctgacccacagaaccataagatggtaaatttgtgttgttttaaaccactgagtcagtgataatttgctgaagaagcaaatagattaacatagcaactaagtagatgattagttgcattataggtgaagtcaaaaatacagtcctttagtaaagtctctatttcttccttttataagagtaattatatttaaaaaatctacctacccttctggaattgctaatgttagtgtttataaagtcttaaatgtgtgcataaaaaactaaatgtgaatataaaatctaaataaaggaatatgtttgcctaaaaaaaaaaaaaaaaaa

SEQ ID NO: 235925 - DNA, 704 bp, Homo Sapiens
  misc_feature (157)..(157): n is a, c, g, or t
acatgggagattgtcctaggtcatcttgcaggcccagggcagccccatgggcccttaaagcttgagagcctttcctgctgagtctgagagatgccagaagcaggagaggttagaacccgaggagggccgcacctgcgctgctggccttagaggaggnccgaggagtgtggtggcccctaagcagctgggactggggacctccgtcccagccctgcaagaaactgaattctgccagcagcccccatgatggaggaaaggaaggatcctgccctgccagcaccttgacctctgacctccacaattgtaagcctgaggttttgtgtagtcaccatagaaaactcacacacataagaactctgtactgattcaacaatagaacatgtcacacacgaactggaaactgattctgtgggcgacaagagtctatagtaaacgttatgacagattctttgaatgcgctaatctcagactggactaaagttgggattaaatttaatttgtacttgagttcagtgcattgctgttctgggcataggaaatccaggttgctggtgatgaacagctgaaaagagctgtgtcaccatggttgtctctgtcagtcatgtgaccacccttacccttgtaaaatcaagcaagggagagattattttctaatgtaaatgaaaataaaaaataaagcagcttgcagaaaaaaaaaaaaaaaa

SEQ ID NO: 235926 - DNA, 706 bp, Homo Sapiens
agaaagacccccaggcctggccctcccgatacagagaagctctggaggaggccagagctctgcgggaggctaatcccactgcccactaccctcgcagcagtgtctctgaggactagcaaagtctggaggcagatgaatggtttctgaccctcaccagggctgtggaagggtgggggtgggtcattatagtattcaggatttacagtgcagtattcacgtgtaacttttaagttttcagtacagtgcttttatacctttaatgcaatgttgtattcatttgggtactattgtgtagtatttaggatgtatgcatgtttgtttatatgtaagcttggttggtgctttcgcttttgtgctacctttcttggatttttgtaccagagatgtgctaaactgatgaaatacattgagaaagtttccatcttattcttttatatgggactgatgatgtgtgttggggtagactgctcctgcagagtttggaagaagtcaccagcaaagccggcctaaccaagaaaagtcaaggcccttcatgaccttgctgggcacagaaaacaccctcgtggagtacactaatttgaactggactggtctcagtgtgagcacttggcacactttactaaacacatatacaaccccaccgtgagtcaactttaaagtaaacattaaagattcttgtgatacaatcaaaaaaaaaaaaaaaaaa

SEQ ID NO: 235927 - DNA, 680 bp, Homo Sapiens
caaccaacagaaaagatgctcttcaaaggtggaggtcttcatgaaacacagctgccaggagcccaggcacagggctggggcctggaaaaaggagggcacacaggaggagggaggagctggtagggagatgctggctttacctaaggtctcgaaacaaggagggcagaataggcagaggcctctccgtcccaggcccatttttgacagatggcgggacggaaatgcaatagaccagcctgcaagaaagacatgtgttttgatgacaggcagtgtggccgggtggaacaagcacaggccttggaatccaatggactgaatcagaaccctaggcctgccatctgtcagccgggtgacctgggtcaattttagcctctaaaagcctcagtctccttatctgcaaaatgaggcttgtgatacctgttttgaagggttgctgagaaaattaaagataagggtatccaaaatagtctacggccataccaccctgaacgcgcctaatctcgtaagctaagcagggtcaggcctggttagtacctggatggggagagtatggaaaacatacctgcccgcagttggagttggactctgtcttaacagtagcgtggcacacagaaggcactcagtaaatacttgttgaataaatgaagtagcgatttggtgtgaaaaaaaaaaaaaaaaaa

SEQ ID NO: 235928 - DNA, 679 bp, Homo Sapiens
aagaccacaagaccaaaaattcattgtgttaccagcaataaacataaatgagaatgtgatcaatgggcaggactacgaagttgatgatgcagattgactgtcaggtgatggacaccaggatcctccatatcaaaagttcgtcggttcctccttacctccgagatcagcagaggaatcaaaccaacaccttctttggctcccctcccgcagccacagaggcaacccacgttgtcagcaccatccctgagtcattacaatagcaccctgcagctatgctggaaaactgagcgtgggaccctgccagactgaagagcaggtgagcaaaatgctgctttctgccttggtggcaggcagagaactgtctcgtactagaattcaaggagaaaagaagaagaaataaaagaagctgctccatttttcatcatctacccatctatttggaaagcactggaattcagatgcaagagaacaatgtttcttcagtggcaaatgtagccctgcatcctccagtgttacctggtgtagatttttttttctgtacctttctaaacctctcttccctctgtgatggttttgtgtttaaacagtcatcttcttttaaataatatccacctctcctttttgccatttcacttattgattcataaagtgaattttatttaaaaaaaaaaaaaaaaaa

SEQ ID NO: 235929 - DNA, 693 bp, Homo Sapiens
  misc_feature (13)..(13): n is a, c, g, or t
tgagtcatactgnacattgtacctgtggcacatcaatccgcactgtttgatactctggctgaatctcagctttcaccaacattgtcaaaggaccttttttagtgcccagccatgcctaagagtgtgtcatctgaagagggaagcatctgcatactgctgtcctgattgctcagtcctcactacctaccagacccgttggtaaggtacaaaagtacatgcttggaaaagcagtctgcaccaccagtgataagctgtgacagagtggaacagcctcaatgaaatgaaggaaggattgctacagtggcattaaggatggtctcttaatcctgtgttaaccactagattaactttacaatcaactcaaaatccttcaaaggctttccactttctttagtggcattcagaccccctctagtttgacccctacctccaacttgaacctctgttactcttccgtatgaacattttcctctagccctggactactagtaccgaagtcactagtcacataggactcatttgaaatatgactagtctcaattgagatgtaatgtaagtgtaaaatacacagcagatttctaagacagcacacaaaatgtaaaatatgtcaaaaatatttgatactgattacatgttgaaatatatgtgttgggttaaataaaatgcattaaagttaaaaaaaaaaaaaaaaaa

SEQ ID NO: 235930 - DNA, 698 bp, Homo Sapiens
  misc_feature (4)..(4): n is a, c, g, or t
gcgngaccaaagggcgagagggcagcaaaggagaccctgggatgacaggaccaacgggagcagctgggcttcctggtttacatggaccacccggggacaagggaaaccggggggagagggggaagaaaggctctagagggcctaaaggggataagggagaccaaggagcgcctggattagatgccccctgcccattgggcgaagatggcttaccagtccaaggctgctggaacaagtgatgcctctaaccttggattggcctgtgtgtgtgtttgtacatagaatatttatttttatacagttttcactttttgaaaatgccagaagtatgatgcatcttacagattattaaaaaagaaagaaaaacctgcatattttgtacagaaaatatcaacctcttcccttttgtttacaagatgttttgtataagcctatgtctctaatacattttttgtttggtcgtaatgtctgcatgatatttgtgcacatttattaagtatcgaaggttaataaattattgtgtcctggtgccaaagggggccagccagaactgaggtgctggctagctcatgtgtgaattcacataaatgtagaggtccatgatatttgctaagctaggtgtgtctaagagtattttaaacccttatggattttcattattaaaggaaatgaaacatggcaaaaaaaaaaaaaaaaaa

SEQ ID NO: 235931 - DNA, 684 bp, Homo Sapiens
gccggttagctagttctgctgttgcttcacgagttctgagcattctctgctagcctatggaagctgcagccctcggaggacagaagtgtttgcgcccaacagaaccctctgagacgcaagctgctcccttggctagctcatatgtggaaatagccctgtaattcgaggttgaaggggcccggccaggactcggggaagggtggcctgagagcagcgatgacctctggggtcactgtcccaggagggacttcacctggaacaagagctggaggcagccgcttgcccaggaggcttgtcccctgtaagtgctttcgggaagagtggcatgtggcgctgagccctgtcccgggcggcacctgggcgtttcagtgagtcctgctctcccgcacctatggccccatggcgggcgcctttcggtgtgtgttgggtgcagggcagcgcctcccgggagcgccgggtcccccgcctggagcccgcgcctgttctccctcccttcctcctccttccaggaggcgcttcgccagtgaggtgcgggctcagggcctcgagtctctcctggagcacgggctgcggtgcgccggcagcttacggggcggccagtccttgcccacaacgatgtggagccctgtgaaagtcggattcgaataaagggccacgtgtgcacccagaaaaaaaaaaaaaaaa

SEQ ID NO: 235932 - DNA, 694 bp, Homo Sapiens
tgaatttttgtatgtctgtcatatgacacttgggttttttaattaattctattttatatatataaatatatgttcttttcctgtgaaaagctgtttttctcacatgtgaacagcttgcacctcattttaccatgcgtgagggaatggcaaataagaatgtttgagcacactgcccacaatgaatgtaactattttctaaacactttactagaagaacatttcagtataaaaaacctaatttatttttacaggaaaaatattttgttgtttttataaaaagttatgcaaatgacttttatttttatttcctgcataccattagaagaattttatttcatttcttcaaattatcaagcactgtaatactataaattaatgtaatactgtgtgaattcagactataaaaaacatcattcagaaaactttataatcgtcattgttcaatcaagattttgaatgtaataagatgaatatattccttacaaattacttggaaattcaatgtttgtgcagagttgagacaactttattgtttctatcataaactatttatgtatcttaattattaaaatgatttactttatggcactagaaaatttactgtggcttttctgatctaacttctagctaaaattgtatcattggtcctaaaaaataaaaatctttactaataggcaaaaaaaaaaaaaaaaaa

SEQ ID NO: 235933 - DNA, 763 bp, Homo Sapiens
agccagatgaggacaagcatagaaaaggagcggaactgacggagataaccgtcggcacatcactgagtcagtcaactccatccgtcggctggaggaggcccagaagcagcggcatgaccgtcttgtggctgggcagcagcaggtcctgcaacagctggcagaagaggagcccaagctgctggcccagctggcccaggagtgtcaggagcagcgggcgaggctcccccaggagatccgccggagcctgctgggcgagatgccggaggggctgggggacgggcctctggtggcctgtgccagcaacggtcacgcacccgggagcagcgggcacctgtcgggcgctgactcggagagccaggaggagaacacgcagctctgaactggctgagcgaggtggccacagggccagggcgggcgctgggtggagggcaggaggcaatgacactaatgctttttttttttttttttaactttttatctagaaattttatttttttaaacccggggcaagtacctcagctaactcccttcatcctcctggggcccctccttcctgccctcagtcttaggttagggccttggtcagggctttgctccctgtgacacccacaccctcgagctagcagcgtctcctcccttccccgggagagctggctggagacttggagctccgggaagtaggagtcacatttttttctctattctttggggattttttttacatgaataaaagtggatttcagggaaaaaaaaaaaaaaaaaa

SEQ ID NO: 235934 - DNA, 622 bp, Homo Sapiens
aagaaccctgaagagcggcctgaccccagaagaagccagagccctgggcttggttggcacctcggagttgcagctgtgacactcataggttactcccaggagtgtgctgagcagaaggcaagctcttgctggatgaaacccctccaggtggggttggggagacttgatattcacatccaacagtttgaaaagggagagctcaattcccagcgtcaccccatggcttgtgttgcctgctacgcattgacttggatctccaggagtcccctgcacataccttctccatcgtgtcagctgtgtttctcttgattccgtgacacccggtttattagttcaaaagtgtgacaccttttctgggcaaggaacagcccctttaaggagcaaatcacttctgtcacagttattatggtaatatgaggcaatctgattagcttcacagactgagtctccacaacaccaaaatatccagatgtaaaccccaaacttgtacacaaaagaaagcacagattgtttacttgttgtggattttagatgtaacaaatgtttatacaaatacatacatgtacaccatgtttcaaatactaaataaatagagtttaatgccaaaaaaaaaaaaaaaaaa

SEQ ID NO: 235935 - DNA, 681 bp, Homo Sapiens
gcaaacaatcaaattagtgacatgcagtttatacccacttctcttcagacacctcccgagtcaagtacagtagaccaggctaagagagttggaagaaatcagtctccgccagtgggttatatgtctcagcccaagtccttgcagcttttaaagccatccatattgagttctttggtaccgcctccagtttctgaatcatctccaagtaggactcccacttgtaaaaagtcaccaataatcacaacatgtaattcagcaaaacttcagccaacatctagtcaaacaaatcttgcaaataatcagaatctgaaagcatctaagctccgccccccctcaggctctttcaaacaaaaacaaacaaacagcccccaactagagcctcaaagcttccaggccaagacaagcatcccaaggccactaacacaacgaaaagaaatcatgcagaatccaaatggcaatttgcattctggggattgtttggcctctaatcgatattctcgtcttcctaaaccaaagatacattaagtacatagccatcacctgccaatttgtttcttaaaaacaatctcttctgtaatagctttatgtgcagcttgcagcttgctactgtggtggaggttccattgaaagcctgcaaatcttaaattaaaatgtggaagcttcaaaaaaaaaaaaaaaaaa

SEQ ID NO: 235936 - DNA, 683 bp, Homo Sapiens
ctttagctagcagaatagtgtgcctctgatcctcacacatcctgtattatggacacagtagccatgcttcacggggaggtcagagctggctaccagcagtcttgccctttactgagcttagtgtcatctttggatgctgtcatatgctgctttgagtgaaccagagaaacagccatttgcagcatgagaaagccccaaaagctctgggatttacctccactttagtaataatgaatattttttagcattagaatgtgttatgtcatttgaattaattttgactacactttggcttgggagaggaattattttaaatagacattggtactttttgaacttgatagctaaagattctaaaatgcatgttttatactaagttttaaccagtcaggaaaattttatgtaactagtgatagtttatttttttgtatgaattttgtttaggctgcaatgtttagcttttgttaactcctcactcttgctgtcttaagttcattactatgtttaatggcctacttgccaagatatttagcatgtaaaaagcagggttttgattaaaaaaaaaaaacggcttcatattgaagctgagacttacaataacaagttgagtggcaagcctggtatgctgtgtcttattgccagaatcttagtaaatgtaatgttttaaaaaaaaaaaaaaaaaa

SEQ ID NO: 235937 - DNA, 705 bp, Homo Sapiens
  misc_feature (7)..(7): n is a, c, g, or t
  misc_feature (45)..(45): n is a, c, g, or t
cttagtntgtttaccatgaacatgttgcagcaaaccttatgcatntaattcctacaaggttaaagaaaggcttttagacttgccaggttaagcaacagccaagttctcagtaattgtttgccttgatttatcttttagacttcattttgccagctctaaaactcccagtcttccttgattttagtccttaatcttttatgttctgagcaggaagggtaaaagacaggaacctgcttcactgtattaactagtccatgggctgagaccggggcatctcttttcttcatactgcaatgttgctagatacatgatcagacaccagagggttgggcattcttgcaataccttaacagtgctgaaatctgcagcatggtactaaggaagttaaagtttgaatgtaaccactttatttaaaaggtttttttctttaatttaaatgaaatggggttgaagtgaacatgattttgttgaccatgttcgtgaattacagatgcaacatgcattggtagaatcgtgtgatggtcttttgtgatacttaatttttacatatcccagtctctgtatgtatctgcatagacaaagaaaaaacaaactcctgctttgcttttattgaagggtttccaggactgcgtgtctgctcctgagctctgttttaagtatgtgtatcctttgcttgtattttgtattaaaaaaaaaaaaaaaaaa

SEQ ID NO: 235938 - DNA, 679 bp, Homo Sapiens
  misc_feature (120)..(120): n is a, c, g, or t
ctatttctgttcataattattatcagaaggcatagcacccacaagcctaatcatactgccttacaaccttattcctcttcattgttcttctcacttacctgcagaaacccagtttatttntgttctccctttaccacaccagccttgtaactgttatgaatgaccctcaatctcactggaatctgaatcactcaggaattcaagcaaactggatgttttaaccactgttcagctttcttatggaatgacagagaacttgtaaagataaaacaccagtttgcaggaagaaaggaagagaatggaaattgcttctggaaaatactagttttacaatatgttttgtttgtctgctctcttaaataaacttaatcctataaacattttttaagaactagccattaagactgttaagttctcaattataaaggaataaaatgttttaaggaggatttatttgcccttgcttatatgaactgcatatttttagtaggaaatcatgtaatttaaattagtattggttaacagatttaacgtagaaaatggacatataaagaatacaaggataaatgtctacatgtaataatggatggtagtgatataatgcatttttgtcatcccatgctgaattcagtaaaaataaagctaatgacttggagcttttaaaaaaaaaaaaaaaaaa

SEQ ID NO: 235939 - DNA, 732 bp, Homo Sapiens
  misc_feature (40)..(40): n is a, c, g, or t
  misc_feature (52)..(52): n is a, c, g, or t
cttgttctgtgccatcttcttgctcatgtatttctcctgngaatgagcagtntgacttctgttcccacgttcctcattctatcagctctagatggattttgcctgcatagctggcttaatatgtctttgtgtatgggtagtctgtagcctgagaatatttacctaaaaatgtctaaacagccaccaagaatgtttataggggtataggaatatagttaacagagtgctaatctctcctcaaatgtccttttggaatgcttcccccaaaattgggaagttggtaggagcttttctttactttgaatttctttacttggacagaacgattctgccttaaagacacgctttgcagctctgataaagaacatccctgtttagtctcttgagttttacaggccacaaaatgtccgtctcagagggatctgtctcagcttttcttatttttgcttctctccgttttcaaaattaatcatcttgttctctgtataagaaaatttgagaagctgtggacaatttaatagtctgatctggcaacagcgatttttgtttggaaatattttgtgttttctttgaggaggatataattactgatatcctaggatgtgaaatttttgagtgacagtatgcacattttaaagaaaattatgattaatctgtataatgttttttggtctgtaaaaattataaaaaataaaatcatttatctttggttgtaaaaaaaaaaaaaaaaaa

SEQ ID NO: 235940 - DNA, 701 bp, Homo Sapiens
  misc_feature (61)..(61): n is a, c, g, or t
ataaaaccgtgtcattacagtagtttgtaacatttgtagattggatagcatttttatgatntgatgagtttcttgtaaggttaccgtttctaagagttgtgctttatggccactgagagaattcagaataaattgaaagatggagtctaaaaattattagctgttacaaatggaacatttcattataacgtgatcactttgacttgagcaaatggtttaatttttatcttaaaaatcagttaagaatatataaaatcctactttggccaagtttgtttcttttcattatagtttatatgaaaagatcaccttaagtgaaattattttcctttaatcttttatgtatttattcacttctggaagctaggaatgagcaacacaaattttactctgaagtcagaagagctcatatataataattctaatgtcccacctattttcacttgtccattccatgtaccagcttagttatgatacttagtcacataattatctttgataaaggtagaggcacaaagaggcaaactaagcaagtcaaattctaatgtgtgtacttcataataattttttatccattttcatctttatattctgtaacatgaaacttacctaatcttcaaatgttagcttcattttttacctttgaaatacttaatctttctgaataaatataatgtgtctataaaataaaaaaaaaaaaa

SEQ ID NO: 235941 - DNA, 778 bp, Homo Sapiens
  misc_feature (44)..(44): n is a, c, g, or t
actttcatagtattgttctggtcactatataggcatcacatttntgtgtggatatgaaacttaggaaggatcctcttgactccttgtgatgtggcaataaattttttttaaaaaactgaaaatacttaggaaggatccgcataatttttttctgcaacttaaatgaaatgcatcattcttgttaattataccatggtgaattaatcacttttgaagcaatatcagttattttttgaataataacttttctaaagccttaagtcttaatattaaatatatgattagccaggcacggtggctgacacctgtaatcccagcactttgggaggccaaggtggggggattacccgaggtcaggaattcgagaccagcctgaccaacatggagaaaccccgtctctactaaaaatacaaaattagccggtcatggtggtgcatgtctgcaaacccagctactcgggaggctgaagcaggagaatcacttgaacctgggaggcagaggttgtggtgagccaacatcacaccattgcactccagcctgggcaacaagagtaaaactctgtctcaaaaataaataaataaaatagataaataaatatatgattaactaattttaaaaatgttaaaatgtattcttaaattcattttaattttgtacaataacctgctagacacatttttaaaatgcaacatgtgtacttaatttctttatgtaatctatgtatatacatttatgaattaaagtaattgttggttatcttaaaaaaaaaaaaaaaaaa

SEQ ID NO: 235942 - DNA, 636 bp, Homo Sapiens
acaattcagtcatcaaagtaagtaaaaattagatgctacagctagctaactgtatccctagaaatgatgaataatttgccatttggacagttaacatccaggtgttacaaagtcagtgttaattctaaagatgatcatttctgccctttagaatggcttgtcccatcagcagatgaatgtgttaagcacaaagcatcttccttaaagcacaaagagagggactaactgatgctgcatctagaaaacacctttaagttgcctttcctctttgtagttagcgttcaggcaggtgacgtgtggaaagtctagggggttccattctggccatgcgagcccagctcctaccaacgtcggtaacttgagcagtccctgttgctggccagagactgcctggtcgccagcgctcaccatgggtgccaggatgcttcgcagaggcactgtgctcacggttggacttggtgtcagtgggaaagggcagtgtggggactgtcatttttgtgatttaataacacacagtgaaaatccaggaagaatgaattaagcttcttctgggagttgtttattcctgctcgtgcttaagattgatgatttcgtgaaataaagaacatcatttcatttaaaaaaaaaaaaaaaaaa

SEQ ID NO: 235943 - DNA, 715 bp, Homo Sapiens
tttcctcacatccttgccagtacttcatttgcctaattttgccattctcataatgtggcaattgttcaattttgcatttcttccattttatttttttgcatctctgcttttcttttggttagctttgccagttctgcctattatattaatctcccagaatcagcttttagttttgttaaatctctgacatgtttcgttgattcctgctttcatcttaaacatttcttcgttgttaatttgtgtttgctataaaataagcaacatcttaaatgcttgatttgctttcgatgtttattctgtaataagatatttaaagatataattttttccctaaatgctttattagacttttctcataagttttgactggtactgttttcattgttatttaattttgtgttttttaacttctttcatgatttccttttaactgaaggttttcttagatatttagtttgctggtatattcttttaaaattgtatcattgctttctttctatattggattattgtcagagaacatgatttgcatgatattaactttttggagtatattgttgcatctttgtggcctagtacatagttaatttagtgaatgcttccagttgtacttgaaaagaatgtatattttctgattattgagggtaaatttctctatatatgttttcctgtttaataaatatgtagctatgtgcttaaaaaaaaaaaaaaaaaa

SEQ ID NO: 235944 - DNA, 608 bp, Homo Sapiens
cgcaggccccaaggcatcactccggccaccctgtcccgctactgcttacacaggccgggttcccacgcagaggggaggctgctccacccctactctcctcccttgctcccagcagcggaagcgcctctgacccttggcttgagtcccacgtgggggaggaggaggcaggcagcaccagcaggggtccaccaagagcccagaccagcccctctgccctcctacccgggcctcgaagggtgtggcacaggctacgtgttgagcgtggcctacgtgagccaacaagaagcaggggcctctgagtgccaagcgacgtggcgggctccacgttagcccaggctctgagagccagcccaggggcggcgctgctcagcttgggctggtccagggcctgcccaggctggggcacctttgcctcctgaggcgcagcgcactcctcccctgcccaagcctactgcctcccgctgccgccagtaccccctccagccccacacctgggcctccccctgccactcccctcccttgctcccctctgtccccagggatcaaacagaagcagccgtgggcaaaatacaatttcatttaacaaattgaaaaaaaaaaaaaaaaaa

SEQ ID NO: 235945 - DNA, 669 bp, Homo Sapiens
taaaacacctgttctccagcccttggacagtggagagaatctgtaaaagtgtgaccccctctaagatttcgttttaaatgatcagattcggttccagttttattcttgttgagtttttccctatgaaggctccttttgaatgtgtcttgagacccaaattgagcatgttgctgttattcctgccctgcacctgtggagcaggagtggcagggctggctgtgctgggttccagctcgctcctgccgagggactagcttggcctttgcgctttgattccagatagtaagatgagtggaagtgtttatcgagcatgcaaaagaaaccctcacggctaacggctctgggagttgtgtctgtgtgacctgagagtgatccatctcctgcctgtgtgaggtagcagtgggcacttttcattgagacaaactccagggtgtccagagggggttctgccccttgtgaaggcccattcctggcacttagagacagaaagaactcagcaatctttcgttctagttatattcggtctttgaaactgacaatctttgaaatgtgaatactgtaacaatatgttttcttggattgttgtctttaaaaaggatttttgtgaagcaattgatttatcaaagcaaaaaaattaaaaatagaaacttgaaaaaaaaaaaaaaaaaa

SEQ ID NO: 235946 - DNA, 646 bp, Homo Sapiens
gcattcgggtcaaatccatggacaccctgggctacaaaccaaggctgctgttcatcccacatcgtgtggggcagtgtccatcccctgcagctacttggtgacttaacaactccaggagccctgtcagctgccctcctccacctaaaccccttcgactcttctgctttgacaaagaaaatgacattggggaggggaggtgctccgcctcccagcttttctcaaaatagtcctatagatactggtaatctggaaatgaagaagtaattctgtctctgcacctacttttgcagaatgttcaaggaagtattctgtgttagtattaatgccaaaaagttgtttttaaaggttttgtactcagcacatcatacaaaccacattacttctgtcacttcagggcatcgggactggctggcgcccttgttatgtgctattttaatcagtgtaacattggtcaagttgttacccatgtatgctgtgtttatcatgtgtatatcgtccagaaagtattaaggctttaggtagatgcaactggcgaaccttggagagggaatgctgattgtcttgaccaaacccacagcctgtctcttctcttgtttagttacttacggcaataaatcatctatgagttaaaaaaaaaaaaaaaaaa

SEQ ID NO: 235947 - DNA, 706 bp, Homo Sapiens
ctgactcctgtgcctggattccttttatgataatttgccacctacaggacagattaggtgctggtcgcctgaattattttgtgttctgaattattttgagctctaaaatggtaaagtacaaatactcattgttttactgtgcctttggccttttataaaaaggtatttataattcgttgataaaaaccaatatttgaagctgttgattaccaacaaaaaagtttcactctctttatagtgcttcaggatacaactttttcagggccttattagagaaaaactgattcacatgttattcttctaaagctaaattattaaaatgtaggttgaaagattggattgattgtgaatctacactaaagatatggttccaggcagacctccttagagacctccaggcagacctccttactgtcttcagtgatgtttaatttcattactgttactgggtgccaagtgtctttcatttggaagtgaacttactccagttattgaatgtttatcatatcataatttgcatttttccaacattgaaggtattttaaaaagtcactaagagattcattcttttattattcaactacaaaaaaatagtgtaatgatcagaatttaaaatgtgtgattctttttcttctgtaagtatgtattgctatgataaataaaaaatggcaggaccattgtttttattaaaataaaaaaaaaaaaa

SEQ ID NO: 235948 - DNA, 788 bp, Homo Sapiens
  misc_feature (142)..(142): n is a, c, g, or t
tcatatgtcttttatgtaagtcatgtttctgaactatcgtataatttcattagggtaagaatcatgttgctttatgcactgtgtaacatgccttgcagtcagtataggcacttaaccttattgatcagttgttccttggtgntgaataatgtgttaggtagccaggtggacctgtgtcctagcctggagaagctctatgtcaccttgtaggaagccatctgaatttgactcagcatcatatgctgggcctgtgctgcacttgagctttctttccagccgccaggagggatggttgtcctggccaacagcgaatttaatgggtggtcaaaagaagatgtgcctgcatagaaggctgaaagagggagctggaagtaggaggagacaaggagatagtgacaccagtatcttgtcacagaaatcaaggaaggcaacagtttaaaggaggggagggagatcagtggtgccaactggctcagaagaggtttgctgggttaaatctcaagatgagcccatgagatctggtggttagcagaggcctttcctgacaaccccattttaagcacctcttccccatcactctatctcatcactgttactgtctgtgtagccctgtcatgagctaaaatcatcctgtttgtttattgctagcttatgtgtctaaagtatactccttgagaacagcaactttgtctttttcacctttgtactgagtcccctgacatggaataagatatgaataaatgcacagacttgtccaaaatcatccaattaaaaaaaaaaaaaaaaaa

SEQ ID NO: 235949 - DNA, 537 bp, Homo Sapiens
ccctccccacccacctttttccctccattcttctgtttttaatggggacgtttaaaatccaatctcacattaattttttcttaagtgtaaataatgggaaaacttcacttcgagagggggctcctcagtagacctccataatttcctggcttttactgccagttagtcatcaggaatagccatggctaagagagtaccaactgggcaagccagtgaattataccagtgcatctcagatttattgatttgtttaacttttgttttttgttcttttttttttttcagagatagaatctcactatgttgaccaggctggtcttgaactcttggcacccaagcgatccttttgcctggaatcccaaagtgtcagatttactgaagaatatttcattgtaattactttttatactttataggtcaagagctctgttttaaagacaaaatttattgaatatactttttcaaacaaagtttcatgttttaatcattgtctgatttcagcattaaatgaaacaccgtaaagaaaaaaaaaaaaaa

SEQ ID NO: 235950 - DNA, 720 bp, Homo Sapiens
ttctttctttctttctttcttttgtaactgtaaacccagaaaacaattgtggggatcaaggacagacatagcacttagacaggactttcatgacccaatatggaacaatttgagtaccagaataggagattatggcctattgaacaaaatgtgaaactgggagtccacaaagacataaatggaaagatgaagtacctcctgacagagcaagaatggcactgaacaatgttatatggacaatggctattttattcaagactattacaatagggaaaagagactaggactcagtctgaactgaaatctgtcaaaacaaaggggggtggggctttaagagtgaaggtgaggaggagatcacacaccgtatgtgtttgctaactggctttacccaaaagaaaattaaactttctttgatctgtacaagttgatcaaacaaatggggtcattcttgtcatatgcaactaaaacagggtagacaggccaggggaaaaaggcactcagggcacacagcattgcttcaaaatataattctctacaaacctagttgctaaaactacctgttgtaacctaaaaccagttttatctaacagctattaaaacaacctactgtgactgcaaaactggttttacccaccactgtcacacaccaatcagaacttgccagctcctcaaaactttactagggccaataaactttctttcaaaacaaaaaaaaaaaaa

SEQ ID NO: 235951 - DNA, 743 bp, Homo Sapiens
  misc_feature (16)..(16): n is a, c, g, or t
tcctttgtacacattntgaatgcttcttctgtagtgatagaacaaataaatgcaacgaatactctgtctgccctatcccgtgaagtccacactggcgtaagagaaggcccagcagagcaggaatctgcctagactttctcccaatgagatcccaatatgagagggagaagagatgggcctcaggacagctgcaataccacttgggaacacatgtggtgtcttgatgtggccagcgcagcagttcagcacaacgtacctcccatctacaacagtgctggacgtgggaattctaagtcccagtcttgagggtgggtggagatggagggcaacaagagatacatttccagttctccactgcagcatgcttcagtcattctgtgagtggccgggcccagggccctcacaatttcactaccttgtcttttacatagtcataagaattatcctcaacatagccttttgacgctgtaaatcttgagtattcatttacccttttctgatctcctggaaacagctgcctgcctgcattgcacttctcttcccgaggagtggggtaaatttaaaagtcaagttatagtttggatgttagtatagaattttgaaattgggaattaaaaatcaggactggggactgggagaccaaaaatttctgatcccatttctgatggatgtgtcacaccttttctgtcaaaataaaatgtcttggaggttatgactccttggtgaaaaaaaaaaaaaaaaaa

SEQ ID NO: 235952 - DNA, 762 bp, Homo Sapiens
  misc_feature (16)..(16): n is a, c, g, or t
  misc_feature (98)..(98): n is a, c, g, or t
accatattaactctgngacagaccatgataggtctgtcaccaaacttttcctaatcattttttatgtatcattcttctttctaatctgttagcagtantctcccagaagtatccctagcatcctgaagcaaacagaactgccgagccaccgcacccagccagtccttattttatatttccacctaactcccctttgcccacgatttcagggaacctaggaggcttcctggccttgtgaccttttccttgaatctcttataattctttctacctgtgttgcatggcagattctcagattgaggctaaagaaaagaagggtggggacaaagcatacagaatgtgtgtatctgtttttatgtgggtgttggctgtttttcgtcactgctttttaagctgaatcttagctggttttcttgaactttgactttaggtgtaaaaattcaaccagacattctctccttactgtggtcagctgacatcataaccactaaggcttaatgagcttaacttgcactttcatcactagcaaaggtcttgaagttatttctcttactgattcataatgggtgtgtgtatgaatcactctcacataatttagatataaaaacctatgaggatgagggagggaggggaagaaaaaaaaggactcctttcattttcatccgtacttcccagatgggctgaatctccgattatttgacccatcattgttattaatatggttaataaactacctatttattgaaaaaaaaaaaaaaaaaa

SEQ ID NO: 235953 - DNA, 784 bp, Homo Sapiens
  misc_feature (25)..(25): n is a, c, g, or t
  misc_feature (41)..(41): n is a, c, g, or t
caatccatactcaaataatagtctntgatgtctgtcttccntgacccgtgttcgtgcaaagattcagagtctgtgtgtgcttctactaggctgatgtacaccaaaggtgggtttattgagatatcatgtgtctgttcctccccctgtcctgcattcactcctgtggaggaaaggaggccacgatgtccctaaggaaagctttgtcctgagctcttcattcattggctaacccctagctcccttttcttctgccctttcacaccaggagaaataattttccattttgttcctattgctttggccttttgtattattctacccccttagtccctttgcagatccccactcctgctcagcaggctcttacctctgacccccagctttcattgtggctgttagcaacatcctggggtttaaactccacccacgcccgatctggctgtctagagggattctacgcctgcgtgctgccgcctccccaagaggcattcaggttattggagaactaatctcatctcaaggggccagacaccaagtcccaaagcctacagacctctttccgccaggccctgaaacctggccccgtgccagcaggatgacaagccccagggcgctcctgatgaatatggattggagatgatgtacagtttttattcccctctggcttttgaggaatgaaatgatttgcactttgaaaacctgttaaccgtagcctctggacactgagactggaaggagaataaaggatgcttgttgtttttaaactataaaaaaaaaaaaaaaa

SEQ ID NO: 235954 - DNA, 617 bp, Homo Sapiens
cttattttgtaactgaaaaaagtccagttttgcatacacagaaatttggtcattttagaagtctcacaacctgaataatttgataataattgaatatgctattaacagctttttaagaaaaggttctattagtcagttttttccttgtctgtcatattatgttggttaatgtctcttatggccaatcttagtaaacagacctaacactcactgcatccttttgtgccttactttttactttccttttgcccttttggtatgtgcgcatgtaagatggtaagtttaaggctaatgaatatatgtttgtaatttcctactcactactctgcagttaaagctaaggccttaggcaaaatctagaaatgtttatattgttttgttttttatcaagtggtgtcaacttgagaaatacaaagaaaggctatgcttaactgtataaccgtgggggattttagccatgagaatatgaagctgatgtcagcctgctaacctgttttaccaaaaggaaaagatgtttccaaaaatgttttcggtgtagactgtttaaagatgaaaataaattatataatttattatatgaaataaatttttgataagtcaaaaaaaaaaaaaaaaaa

SEQ ID NO: 235955 - DNA, 734 bp, Homo Sapiens
agtggaagggtcaaataaaacaaaaaaagagaccgtaccacaaaaggtactatagccaaaattcccagagcaaagaagaaatatgtgacaagagtatgtggccttgcaacttttgaaattgatcttaaagaagcacaaagattttttgctcaaaaattctcctgtggtgcctcagtaacaggggaggatgaaattatcattcagggagattttacagatgacataattgatgtcattcaggaaaaatggccagaggtagatgatgacagcatcgaagatcttggagaagtaaagaagtgaatttgaaaatttgtctgtatttaatggcctgaactgagagttgatatggccaaagggagagaggccttttaaaatatatatatatatacacatatatatgtatatatacacatatatgtatgtatacacatatacacatgtatatatacatgtgtgtatgtatgcatgtatatacatatatacatacacatatatgtatacatatatacacatatatgtatacatatatacacatatatgtatacatatatatatattctacagtaaaactgtagactgtcctcgtccttggcattttcactgttctgtacaaggctgcttgtttttttattgccaaagtcaaataaacgggagactgtcatgctcatgcatgaatagaatttagtcaaataaaaaattttggtcatttggtactgaaaaaaaaaaaaaaaaaa

SEQ ID NO: 235956 - DNA, 720 bp, Homo Sapiens
  misc_feature (133)..(133): n is a, c, g, or t
ctgatccttcacctcagaagcttaccagtggctaaatagatcccagtttacttcctaacaaaatcacagagtttattgacattcagtacaaagtctccagaagaaaaactcacaccaacaagcaaacagctgntagcagaagaaagtcttcccacaaccccattttatttcatattgggaaaacacaggcaacagcaggatgaaaaactaaacgaaactttagagaatgagctggtacaactacccttaacagaaaacatacccgcaattagtgagcttcttcacactccagcccatgtcctgccatctgctgctttcctgtgctccatgtttgtaaattcattgctgctgtctaaagagactaagagtgctaaggaaattcctgaagatgtagatatggaagaagaaaaagaaagtgaagattcagatgaagaaaatgattttaccgaaaaagtccaggatacaagtaacacaggtttaggagaagacattatacatcagttgtcaaaatctgaagaaaaagaactgagaaaatttaggaaaatagactacagctggatagctgccctttaagccttggagatggggaggatccttggactttgtgtttttgattgtatgttgatattctaaaaacatctattttaatgttatttctgttctaaaaataagataataaatattaacaaactttgcttttttaaaaaaaaaaaaaaaaaa

SEQ ID NO: 235957 - DNA, 687 bp, Homo Sapiens
atgccggggacgccgagtggctcagtgacacggagacatcctctccatgggatgatgacagcggccgcctcatcagctggagcggctcccaaaagaccctgcgcagcccccgcctggacctgattggcagcagcgggcacagcctccaaccccagccccgagatgagctctaggtccaggtgatgactgcaaagcagtgtccaggagcaggccactactgcccagagagcagaggaggaggttgttggcagggactgcagatcctgtcagacctggccaccaccttgggcatggccactctgccctctggacctgtctttcatcgggagaaaccactcagagatggatcccattccctaaaggtctcacagcaaaggagcaggactcccaggcccctgtaccctgcctggcctgattcagggccttgtggcccccagcttctgtttcaagctgggcagaccccaggatcccttccctccctaaggactcagctgaggggcccctctgcccccttctacctccacctcagcaccctcccccagcttgatgtttgggtctccccagcaccctcctccctggccggtgcaaagtacagggaggtaaagcaggacccttgcagacatgttgcccagcacacagtaggccctcaataaaagccatttgcactttaaaaaaaaaaaaaaaaaa

SEQ ID NO: 235958 - DNA, 847 bp, Homo Sapiens
  misc_feature (86)..(86): n is a, c, g, or t
aaggtgtgctttaggagcagtgggaggtaccagcagaaagttagtatcatcagatagcatcttatacgagtaatatgcctgctatntgaagtgtaattgagaaggaaaattttagcgtgctcactgacctgcctgtagccccagtgacagctaggatgtgcattctccagccatcaagagactgagtcaagttgttccttaagtcagaacagcagactcagctctgacattctgattcgaatgacactgttcaggaatcggaatcctgtcgattagactggacagcttgtggcaagtgaatttgcctgtaacaagccagattttttaaaatttatattgtaaatattgtgtgtgtgtgtgtgtgtgtatatatatatatatgtacagttatctaagttaatttaaagttgtttgtgcctttttatttttgtttttaatgctttgatatttcaatgttagcctcaatttctgaacaccataggtagaatgtaaagcttgtctgatcgttcaaagcatgaaatggatacttatatggaaattctgctcagatagaatgacagtccgtcaaaacagattgtttgcaaaggggaggcatcagtgtccttggcaggctgatttctaggtaggaaatgtggtagcctcacttttaatgaacaaatggcctttattaaaaactgagtgactctatatagctgatcagttttttcacctggaagcatttgtttctactttgatatgactgtttttcggacagtttatttgttgagagtgtgaccaaaagttacatgtttgcacctttctagttgaaaataaagtgtatattttttctaaaaaaaaaaaaaaaaaa

SEQ ID NO: 235959 - DNA, 703 bp, Homo Sapiens
  misc_feature (60)..(60): n is a, c, g, or t
aacataagagaattataccagagagaaaccctacacatgtaaagaatgtggcaaagcctntaataggttctcaacccttactgtgcacaagataattcattctggggaaaaaaatgctacaaatgtgaaaaacgtggcagagccttcagaccatccacaaacctttatgaaaattcatatttgagagtagaagattcattccacaaacttacattgagaagatatgaaagatgaatataagaaaattcatcctagatataaaaccatagaaatgtaaaagatgtgacaaaacctttaagccatactccaggcttcttaaacataatgagaactcatactggaggaaagtcttacaaatgtgaagaatgtggcagtctttaaatcttcctcagtcttttctaatcataagataattcacactgaagagaaactgcaaacgtggaaagtgtgacaaagcttgcaaccacactcaatctattctaaatataagagaaatgatattggtgagaagccacaaaaatatgaaaaatgtggcaaagccttcaaatgcttgtcacatcttactgtatatatataattcctactgaagaaatcccctggaaatgcaaaaaatgtggcaggatttttaccaatgctcatctttttgcacatgatatcctttatattcgagaaaagttatagaaatataaaaaaaaaaaaaaaa

SEQ ID NO: 235960 - DNA, 727 bp, Homo Sapiens
  misc_feature (47)..(47): n is a, c, g, or t
agcaggatgctcaggacctggacaccatgcagcggctgaacatcggntacgtcatcaacgtcaccactcatcttcccctctaccactatgagaaaggcctgttcaactacaagcggctgccagccactgacagcaacaagcagaacctgcggcagtactttgaagaggcttttgagttcattgaggaagctcaccagtgtgggaaggggcttctcatccactgccaggctggggtgtcccgctccgccaccatcgtcatcgcttacttgatgaagcacactcggatgaccatgactgatgcttataaatttgtcaaaggcaaacgaccaattatctccccaaaccttaacttcatggggcagttgctagagttcgaggaagacctaaacaacggtgtgacaccgagaatccttacaccaaagctgatgggcgtggagacggttgtgtgacaatggtctggatggaaaggattgctgctctccattaggagacaatgaggaaggaggatggattctggttttttttctttctttttttttttgtagttgggagtaagtttgtgaatggaaacaaacttgtttaaacactttatttttaacaagtgtaagaagactataacttttgatgccattgagattcacctcccacaaactgacaaattaaggaggttaaagaagtaatttttttaagccaacaataaaaatataatacaaaaaaaaaaaaaaaa

SEQ ID NO: 235961 - DNA, 812 bp, Homo Sapiens
gcccgttagtatcactctgtttctcacaactctaggtaaccactaatctactctccatctctatagatttgcccatgctagacatttcatataaatggaatcatacatgtgtctttttcactgagtatattttcaaggtgcatcccagctgtggcatgaatcagcatctcattcctttttattgccaaataatattctatcatatggatatgtcgcattttatgtatccattcatcagctgatggacatttgggttgtttgtactttttggctaccatgaataatgctactatgaacttttgtgtacaaatcttatgtggacttgttttcatttctcttggatgtatattcctaggagaatggctggattatacagtaactctttcctcataactttgcatatcaaaattatatccatctttcagaacccaaattcagtgttatttccaaagtgttccaacatctcccactcaaaatgaatcttctccctagtactcccattgtttagtacctaattgttcttaccagtttgtcttagagctcagtcattcctacacagcacttttcttcattatactgctaatttcattacactgtaagagtggggacaagctgttcttcttgtataccagaaagtagtgagtgcactgctgtgaagaaagcaggaactcaaaagttaagaattttgaatgagcctataaaatgtgtctaataaataataatgttcattttcaaatctcaacaattaaatgtttaacaaataacacttgaaataaatgtttattagaaaaaccaaaaaaaaaaaaaaaaaa

SEQ ID NO: 235962 - DNA, 717 bp, Homo Sapiens
  misc_feature (23)..(23): n is a, c, g, or t
tcagaggggcagatagaaactgngacggattcaagtcacatgcacgcggatagcagtaagccacacacctgccacttagccagaatgcccaggatcgcgttggtcactgttatttgcctactgctggaagaaggacaaccgctggcaaggtagcgttccccaatctgaatacctgcaggctcccacatgagggagagggcagactcaggtgggaagatgtgccatgcgtaaggcatcaacgtgtatctgtgggatcttcgttgccttcagtaatcagggtgtgaaaaaagcagacaagttgtgtgtgtgtgtgtgtgtctaagaaaacttgtgtgcttttcaaaaaggcagtgctaagcacaagatttcaagaaagcctcttcttgttgcctagctgagtgggagagtcattttccccagacactacatttggatacaggtgccaaagaacattattaaggaattatttagaaacaatgtgtctagtttaagaaagtggttttcagtattgtgacaatacaacgtttttacaaggttgttttctaccaccatattttaaagatatttttatgaccgtgtatactcacactttgcttgtattttaaaaggaggatatatttgcacttatgtatacttttacagtttgccaaaatattttgttgtaaaatttttttcaataaaatgtatataacaaatagtaaaaaaaaaaaaaaaaaa

SEQ ID NO: 235963 - DNA, 440 bp, Homo Sapiens
cactcacagagccccagctctcaccataacaaaccaaatgggggctggaaggcatcctttacaactttatggtctcgtatgcaagcaccctcagcattctctgcacccatggagtggagatgggtgggagtaatccaaggcctttattttcaggccatggtttgacagcaagggtattttcttccccaataaacgtagcttctgtctaccttccactggcagcaaaatgattttctgttctctgcatatactgaggggatctgcacagtgcagaaaggaagatgtccgagatccaagtgaggcctgttcagtgtgaaatgtctagggtagaagaaagaccatcctccattatggctggcatgtggcagtcatccttaagattatttttaaatttcctaataaatataggaaagtaaaaaacttaaaaaaaaaaaaaaaaa

SEQ ID NO: 235964 - DNA, 644 bp, Homo Sapiens
  misc_feature (7)..(7): n is a, c, g, or t
  misc_feature (20)..(21): n is a, c, g, or t
  misc_feature (95)..(95): n is a, c, g, or t
  misc_feature (99)..(99): n is a, c, g, or t
cactatnttagttctgtctnntgataaacaggagcttttaatttttatgtcaaatctatcaagctttttctttttgatttatgttttttatgtcntatntgagaaatccttctataccccaagatcatgaggatgtttcctgtgttctcttctgaaagctatatagtctttgtcatttaggtttatctttatacgtggtatgaagtgtaaagttctacttttaattttttgcatattttattaggataggatgggctttttctgtagtaataatccctaaatctcaggggcttaatatataaaattgtctcatgcaaaaaaccactgggtctagggcaattgctatctactgccgtctaatctccctctagtggcttccattggtagaccctaacaggaagccagctgataagggaatctgggaaatgtagtttacagagtggcagctacagtagaacagtagagactacaaggatgagcttgcagctgagaatagaaacgtgactggcacactaggtggtttgtttgtaggttttttcttttcctgtttgagacttttttggattcttgaatttgtacaatgatgtccttaatcaattgtggaaaattaaatgattttttctttcaaaaaaaaaaaaaaaaaa

SEQ ID NO: 235965 - DNA, 766 bp, Homo Sapiens
  misc_feature (66)..(66): n is a, c, g, or t
  misc_feature (129)..(129): n is a, c, g, or t
  misc_feature (228)..(228): n is a, c, g, or t
aggctccacaacaagctgaggtgcccgactcaaactgtagaaccgggagtgacacccacagacgcncaggctggatgcgtgcgcaggcacactggatctcgtggctctctgggccgctgccaccgcctntgaacgtgtcggggagcaggagccaggccagagtctggcccagaggacagcgagaagcacctgttgatgctggggccactggaggaagctccatccctntactctcagcccgcaccaggcggccagctcagagcaccaggcgtggcgcaagcagggtggtcgtgggcagccagtcccgccctgctgcctggactgtgcccagcgggatgtgggcccgagcaggccagagaggccgagggcctggggtctctgcggcagccacagcccgtggtgagtagcagccttagctgtcctggagataccggggcctcgtggagtctaggcaggctggggcactgtggctgtggccgtggccaggtgagaagccccattcgcgcaggaaagactggccacctgggaacccacgcctccacggagggacttgccggccacaggctgtgggctgcccaagaggactgtgcaggcagggctgcctgctgattggcagctccggatcaggcccggtgcctgcagacctggtgctcccctcgggcagggctgggtgccgcagccgcctgctggcttttctggcagctcctctgtatcagaaccaataaagtgcacttgttctcggaaccgcaaaaaaaaaaaaaaaaaa

SEQ ID NO: 235966 - DNA, 653 bp, Homo Sapiens
ctttagcttggtgaaaaaaagttcactgaacaccaagaccagaatggatttttttaaaaaaatagatgttccttttgtgaagcaccttgattccttgattttgattttttgcaaagttagacaatggcacaaagtcaaaatgaaatcaatgtttagttcacaagtagatgtaatttactaaagaatgatacacccatatgctatatacagcttaactcacagaactgtaaaagaaaattataaaataattcaacatgtccatctttttagtgataataaaagaaagcatggtattaaactatcatagaagtagacagaaaaagaaaaaaggactcatggcattattaatataattagtgctttacatgtgttagttatacatattagaagcatatttgcctagtaaggctagtagaaccacatttcccaaagtgtgctccttaaacactcatgccttatgattttctaccaaaagtaaaaagggttgtattaagtcagaggaagatgcctctccattttccctctctttatcagaggttcacatgcctgtctgcacattaaaagctctgggaagacctgttgtaaagggacaagttgagtttgtaaaatctgcatttaaataaacatctttgatcacaaaaaaaaaaaaaaaa

SEQ ID NO: 235967 - DNA, 688 bp, Homo Sapiens
gatcatcacttcctatttcctgttctggacctgtataaaaatgtctacacagtagaagtgacatcaaggtttaataagtatatcaatgattggcacatataaaaattgttgaaccacatactctgaacttggctaatttagttactgcaaggcctccattatccagttttattttttacacgattgaccttgccttgtagctggtgctgtgtagacctgtgttgaaaacacaatcggaatatatgaataattgaataaacagcattatggtgaggcagagacacatggagaagtgttaaaaaaaaaatgggcttcctgcctttctgcctcttttttatgcagtcatctatgttacatctatcctgcctaagaaaaagctgcacatcctaccttcagagtacaaaaaggtacatctgagactcaagactctcactgattggagagcttgtggaaaacaaaacacaccatgccaataaatgagatgaaaacttgagtttgcctttttaactatttatgttctaagttaagctttgataacattcaaatgtcaaattctctcattcttataaaaagttgaattaattgcctgtatttattttagcaattattcaatgtatttccagtataggatgtatagtataattaattttttgtaaataaaatatttttgataaaaaaaaaaaaaaaa

SEQ ID NO: 235968 - DNA, 762 bp, Homo Sapiens
  misc_feature (21)..(21): n is a, c, g, or t
  misc_feature (39)..(39): n is a, c, g, or t
ccacagtgcacccaccacacncagtaattttattatttntgtagagatgggtttcaccatgttgcccaagttggtctcgaacttctgggttcaagcaatcctccagccttggcctcccaaagtgctggaaaaacaggcgtgagccaccacgcccgggcacattctctatcttgatagggttttgggttttgctgatgcatgtacttgtcaaaacccagtgaacatgtacttaaaatgtgtacatttctttgtatgtaaactttccaccaagaggaaaagctataaagaaatacttaacaccagttaatgatgtacatattgaaatatttaaagataagtatacagatgtctatagtttactttgaaatgtgtacaaaataagaggtggatagataaataaaggagtggatagatgaatagatttgtgatgattaaacaaacatagtttaaaaaaagatgggctgtgtgctgtggctcatgcctgtaatcacagcacttcgggaagctgaggtgggtggatcatgaggtcaggagttcgagaccagcctgaccaacacggtgaaaccccatatctactaaaaatacaaaaattagttgggagtggtggcacatgcctgtaatcccagctactcacaaggctgaggcaggagaatcgcttgaacccgggaggtagagattgcagtgagccgagatcatgccactgcactctagcctgggagacacagcaagactccgtccccccccaaaaaaaaaaaaaaaaaa

SEQ ID NO: 235969 - DNA, 717 bp, Homo Sapiens
ggactccagtggcttctatggttgctggcagtgggccagatgggcaggtgcaccactgggctcctgggtggtgtgtgtggcaggctgatctctagttctccaggtgacctatacaggttctggtggtgggtaggcaggcgtttcctcaggcctctcagtagtaagtgtgagcaccagctctggaggcaggtgagtcaatctccaggtccccggatggtacattcaggcaccagcatattcctatgcatttctagataaaagtatttttcagaaaacctgagcatatgtcctattaatacaacttaccctcatcagctctgcatgagaagaaggcggaattccctcagtagaacagtcagaatggaatcacagacttgttttgagccagtcactggtgagggggggtaggataacatgataagctcagaatctaaaccttagactagggaatggcaaactttttccataaagaggcaaacggtaatattttaggctttttgtctagataacctcttttgtagtgacacagtggtgccatcgtagcctaaaagcgtatgtagacaatggataaatcaatggacctggttttattccagtaaaacttaatttatacagtcagagggccagatttggcccttggtctgtggttgtttagagcagtcaaaatttattccctggggctgggccaactttttctttaaaaaaaaaaaaaaaaaa

SEQ ID NO: 235970 - DNA, 416 bp, Homo Sapiens
  misc_feature (108)..(108): n is a, c, g, or t
  misc_feature (115)..(115): n is a, c, g, or t
ccccctcctccatgtgggtacgaaacccggcccccccaccccctcctccctgtgggtccgatcccccggcccccccccaccccctcctccctgtgggtccgaaccccnggccccnccccccaccccctcctccctgtgggtccgaaccccggcccccccaccccgtgcccaccagggtccagggagatgttcgttctcgctttaagtcaggagtcacaaatgacttttttttttttcaattaaggaaaaagctccatctctacctttaacatcacccagacccccgcccctgcccgtgccccacgctgctgctaacgacagtatgatgcttactctgctactcggaaactatttttatgtaattaatgtatgctttcttgtttataaatgcctgatttaaaaagaaaaaaaaaaaa

SEQ ID NO: 235971 - DNA, 772 bp, Homo Sapiens
  misc_feature (13)..(14): n is a, c, g, or t
  misc_feature (35)..(35): n is a, c, g, or t
  misc_feature (73)..(73): n is a, c, g, or t
  misc_feature (78)..(78): n is a, c, g, or t
tgattaagtcttnntgactattgacatacagtctntcacagatggtggagtgttttcccccaaatctgttgtntgtcntataatgttgtatatgaggtttattggtgtatgaatatgaatgcttctgtaatgtcaaacagatccctagtaaactccttcttcacttttactgtcagatttacaaaggtcctcccattgcaaagcagtgtttgtcctaatttatatattgtttttctagttcattttgtgtttccaacttttcatgtaaaattttaattatttttgaatgtgtggatgtgagactgaggtgccttttggtactgaaattctttttccatgtacctgaagtgttacttttgtgatataggaaatccttgtatatatactttattggtccctaggcttcctattttgttaccttgctttctctatggcatccaccattttgattgttctacttttatgatatgttttcataagtggttaagcaagtattctcgttacttttgctcttaaatccctattcattacagcaatgttggtggtcaaagaaaatgataaacaacttgaatgttcaatggtcctgaaatacataacaacattttagtacattgtaaagtagaatcctctgttcataatgaacaagatgaaccaatgtggattagaaagaagtccgagatattaattccaaaatatccagacattgttaaagggaaaaaattgcaataaaatatttgtaacataaaacaaagtgaaaaaaaaaaaaaaaaaa

SEQ ID NO: 235972 - DNA, 807 bp, Homo Sapiens
aaattcaactaggtctttcagctttttatacaatactgcctgttatcagaaagtatagtcttaaaatctgctatcaagcatctatcagaagcctgatgagaaatattcagatgatctaacgcagttcccaaacctgcattgtggcccgttttcattacaattacctaaggtgctttaaaaattttcttgggccctactcgttgtggttcagcagctgtgtaatggagcaaaaaggaatagtcactaaacagcgaaggaaagtggtggaattattgaaagacctagcacttacctgctgggatgagtctctaaccccacagaattgatttcaaacacaggatcttattcaagataaggataataacagctatcttcttgggttgtaaaaagtagcattagactgcattttaaacatttggtatgattttgaggacataaccgtaaacagctatttaatactattccaggtagtcaaaggccaatgtataaaagttaaaaatataggtcttgtcagctttttaagcgtctgtcccactgactaccatatctctacaagagaatagatgaggaattgaggttatgtgggaagtacgtgtaagtttacagtattaagaaatgtacaataaaatttgtttctatgtcagcgtatattcttgactcaaggagtttgaaagtgtaaactcaaaggtctttcacatgtaaagaggaacctctccattctgtacttgtatagtcattacctcatatagatttaattttattaaattaaattttacttattttgggtttaaaaaaaaaaaaaaaaaa

SEQ ID NO: 235973 - DNA, 680 bp, Homo Sapiens
cactgtgatccagaagagaggtgcactacgtgggaagtgctgattccacagcatgcagcctggtaggggaaggaaaataaaagggtgtgaagaaggaatagttttataatctcggaagatgataccaagagcagaggcaacaaatagaggcctggcctccaggtgccggatccagacacctgacctagaatgcctgcccgctatccctgtggcaggaaatatcccctcatgtcccagggaattgcagatgggtcttctatacccttctacctgcccttagatctccatttttatcaaatagtacattgcattttgaagttttgggttttgtccttcatctttccctttcccttcaaatcttttaatggtaagaaagcaagtgaagcttggtgcaagctaaaatttttaaatggtgtggaaatgcaaataataccaagtaaaataatacagatattattaaagtttctggttttgaggtgttgtagataaatgtatttatgtgcctagtggggaatccaatattatgaatatgaaaaagggggcaataaaagggtatgtaaaatatgtatgaagaaaaggtgtacaaaaatttgcccttatgcacggaactctgtttctaagtgccaagcacagaaagccgctaaataaaatctttgcaattgaaaaaaaaaaaaaaaaaa

SEQ ID NO: 235974 - DNA, 683 bp, Homo Sapiens
aaaaatatttccacaaatgcttagagttaccactaagataatggccagtaaatacgatatgactaagtcccatatcacacacaaaaacaggataagtggtagcccattatataagaagaccgataagaatttcttaaatatgccaaaaataatctgaacaatcagccatttctgtgaactgtggctttagtacctccaattgtctttcacaaattctgttggtgaatgtgtaaactggcataaacatgtacagaaatcaattagcaatttatctgaattctctccctcaggaagtactctgtgaactaaacataatgcagagtaagtactttcacttgaaatgacagggcatctgagttttgcttcaaaataatgttggggccaggtgcagtagctcacacctgtaatcctagcactttgggaggccaagggagaaggatcacctgagctcaggagttcaagaccagcctaggcaacatagtgagatctcgtctctaaataaaatatacaaaagagtattgggagggggtatgaagaatgtatagggcaataattgaaatctgttgaagctgggtacacaaaagttcattatgttgtttctctacatttatatctatttttaatttttttatatctatttttaattttccataataaatctctttaaaaaagaaaaaaaaaaa

SEQ ID NO: 235975 - DNA, 707 bp, Homo Sapiens
gaggtggtgatggagggccagcccctcttcctcaggtgccatggttggaggaactgggatgtgtacaaggtgatctattataaggatggtgaagctctcaagtactggtatgagaaccacaacatctccattacaaatgccacagttgaagacagtggaacctactactgtacgggcaaagtgtggcagctggactatgagtctgagcccctcaacattactgtaataaaagctccgcgtgagaagtactggctacaattttttatcccattgttggtggtgattctgtttgctgtggacacaggattatttatctcaactcagcagcaggtcacatttctcttgaagattaagagaaccaggaaaggcttcagacttctgaacccacatcctaagccaaaccccaaaaacaactgatataattactcaagaaatatttgcaacattagtttttttccagcatcagcaattgctactcaattgtcaaacacagcttgcaatatacatagaaacgtctgtgctcaaggatttatagaaatgcttcattaaactgagtgaaactggttaagtggcatgtaatagtaagtgctcaattaacattggttgaataaatgagagaatgaatagattcatttattagcatttgtaaaagagatgttcaatttcaataaaataaatataaaaccctgaaaaaaaaaaaaaaaaaa

SEQ ID NO: 235976 - DNA, 705 bp, Homo Sapiens
acattttgcactgtcaaaatacttggtgaggaaaagatagctcaggttattgctaatgggttaatgcaccagcaagcaaaatattttatgttttgggggtttgaaaaatcaaagataattacccaaggatcttaactgtgttcgcattttttatccaagcacttagaaaacctacaatcctaattttgatgtccattgttaagaggtggtgatagatactattttttttttcatattgtatagcggttattagaaaagttggggattttcttgatctttattgctgcttaccattgaaacttaacccagctgtgttccccaactctgttctgcgcacgaaacagtatctgtttgaggcataatcttaagtggccacacacaatgttttctcttatgttatctggcagtaactgtaacttgaattacattagcacattctgcttagctaaaattgttaaaataaactttaataaacccatgtagccctctcatttgattgacagtattttagttatttttggcattcttaaagctgggcaatgtaatgatcagatctttgtttgtctgaacaggtatttttatacatgctttttgtaaaccaaaaacttttaaatttcttcaggttttctaacatgcttaccactgggctactgtaaatgagaaaagaataaaattatttaatgttttaaaaaaaaaaaaaaaaaa

SEQ ID NO: 235977 - DNA, 691 bp, Homo Sapiens
  misc_feature (30)..(30): n is a, c, g, or t
  misc_feature (77)..(77): n is a, c, g, or t
taattcagttctgtatgtgttcaacatttntgaatacattaaaagaagtaaccaactgaacgacaaagcatggtatntgaattttaaattaaagcaaagtaaataaaagtacaaagcatattttagttagtactaaattcttagtaaaatgctgatcagtaaaccaatcccttgagttatataacaagatttttaaataaatgttattgtcctcaccttcaaaaatatttatattgtcactcatttacgtaaaaagatatttctaatttactgttgcccattgcacttacataccaccaccaagaaagccttcaagatgtcaaataaagcaaagtgatatatatttgtttatgaaatgttacatgtagaaaaatactgattttaaatattttccatattaacaatttaacagagaatctctagtgaattttttaaatgaaagaagttgtaaggatataaaaagtacagtgttagatgtgcacaaggaaagttattttcagacatatttgaatgactgctgtactgcaatatttggattgtcattcttacaaaacatttttttgttctcttgtaaaaagagtagttattagttctgctttagctttccaatatgctgtatagcctttgtcattttataattttaattcctgattaaaacagtctgtatttgtgtaaaaaaaaaaaaaaaaaa

SEQ ID NO: 235978 - DNA, 667 bp, Homo Sapiens
tgaaaataactgaatttggaggctggagtaatcagattactgctttaatcagaaaccctcattgtgtttctaccggagagagaatgtatttgctgacaaccattaaagtcagaagttttactccaggttattgcaataaagtataatgtttattaaatgcttcatttgtatgtcaaagctttgactctataagcaaattgcttttttccaaaacaaaaagatgtctcaggtttgttttgtgaattttctaaaagctttcatgtcccagaacttagcctttacctgtgaagtgttactacagccttaatattttcctagtagatctatattagatcaaatagttgcatagcagtatatgttaatttgtgtgtttttagctgtgacacaactgtgtgattaaaaggtatactttagtagacatttataactcaaggataccttcttatttaatcttttcttatttttgtactttatcatgaatgcttttagtgtgtgcataatagctacagtgcatagttgtagacaaagtacattctggggaaacaacatttatatgtagcctttactgtttgatataccaaattaaaaaaaaattgtatctcattacttatactgggacaccattaccaaaataataaaaatcactttcataaaaaaaaaaaaaaaa

SEQ ID NO: 235979 - DNA, 727 bp, Homo Sapiens
cagtaacacagtcctggtctttggccctagagaaactttttatatgagaagtttctctatatacatgtctgaggtgactctggaatggattatgaggtcatatctcaaaatgtcagaaaacgttatagagcactcgaacttttgtatttgctgcttaacctcaatattacagccacaaacaaggggtaccaagacaaagtataactgagcataagcagaaaatgttaaccctccaggtttctttcttaagcacaataaaagtgggagcgaacaacacaaggatatttttacatttgacccgtctcaaaagtagcacaccctatccttgtgccattatttgtacaaggaaatatatgattagaaggaatagaacccccagttgtcatcagcttttttagacaccacaggttgtagcagtttgaacaaactgaaaactttatacttctgtgtgagctgaactcaagtttcagaataatcatcgccatgtgggaggctttttgttaaatgcagaagaaatttcaaaatattgtatttatatctgccttccactgctgccaatttagtaagcatctcctatacaatcgacaataaacagcaaatgatgcagttcatagagtattttgcacttggggaaaaatatgtatctgaattgtaaaaagaaatgtttggattttgtatgtcttttttattattattaaaatactaaatgaaaaaaaaaaaaaaaaaa

SEQ ID NO: 235980 - DNA, 664 bp, Homo Sapiens
ggagaaaagccccggtacgagtcccctgctctcccggaaagatgcagactgcagatgggctacccgtaggggtgctgaggttgcccaggggtcctgacaacaccagaggatttcatggccatgagaggagcagggcctgtgtataaataccttctatttttaatacaagctccactgaaaaccaccttcgttttcaaggttctgacaaacacctggcatgacagaatggaattcgttcccctttgagagattttttattcatgtagacctcttaatttatctatctgtaatatacataaatcggtacgccatggtttgaagaccaccttctagttcaggactcctgttcttcccagcatggccactattttgatgatggctgatgtgtgtgagtgtgatggccctgaagggctgtaggacggaggttccctgggggaagtctgttctttggtatggaatttttctctcttctttggtatggaatttttcccttcagtgactgagctgtcctcgataggccatgcaagggcttcctgagagttcaggaaagttctcttgtgcaacagcaagtagctaagcctatagcatggtgtcttgtaggaccaaatcgatgttacctgtcaagtaaataaataataaaacacccaaaaaaaaaaaaaaaaaa

SEQ ID NO: 235981 - DNA, 674 bp, Homo Sapiens
  misc_feature (24)..(24): n is a, c, g, or t
aagctaaaaagcataaaggaggcnagaaagaaacagcagtgtgggagaaagagcgcaaacaccgagagaaagatgtctacctggcagccatgtcagagaatcaccagtatgtatgtcactgccaccaagaacctaagagccacagaggcctacagaagccaatcccaatggaactctctctgggtgtgggggttgagagaacctaaagcattcagctgcacagagcctctttccagcgatgggaaccagtctcaaagcctttacatctctcccctgccctccatcactgctgagaaccctgccccaggctggcctgcctacatgacacaaatagcagtggactgtcactcatcagtatctgcagttctgtttaccaaagcctgcttgctagagacgtttcagggcctccttccctcaaagcgtccactgtacctccatctggatacaattagctggctccccacttcctggactgacggtaaccaccttttccaatgaccctgaagaaaacatgcaatctaagctgctttaagagtaacctacaactgaggacaaattttctatcaactcccagtacccctctctgccgtggctgatttgttactggttttcctttttttttttaatttgaaaatgtaagtaattatactaagaccaaaaaaaaaaaaaaaaaa

SEQ ID NO: 235982 - DNA, 637 bp, Homo Sapiens
gctccctccccccatattcgcaggtctgcacaacccccggacctgttcacacccgcatggggacagctgtctgtgggctgcagagcaggcactgctcagtctgccccacgccaagggcccttgactcacacccaggtggcccacccaagatgcctgatgcgctatgtcctgttccttctagattcttctgatgtagagcgactggaaagattcttcgactcagaagatgaagactttgaaatcctgtccctttgaaaatcctggggtcgggggtggcacctgtgagagcctggggctcctggtgccgctgcgtttcatccatcccgcccgctcgcctgccgagggctgcgccccgtgctgcctccccccagagggccacccgctgtgctcgtggactgaggctgcgctgcccgggaggccttactgcttggtgtcagactgcccagctcagagtgcccgtcagggcctgtgcatccgcacgcggagccgtctgttaggagcttccagagtgttctctcgacactgccagccccgtgttagcacctgggcctcagtcccacttgctcccaggcgccggttctgtggttggtttggaattaaagtcctgtttgaagttgtcaaaaaaaaaaaaaaaaaa

SEQ ID NO: 235983 - DNA, 636 bp, Homo Sapiens
agaagaagtactttctgactctgaattatcaagaacatacctaccttgagcccgctgccatctcttgttaactgcaaagaataaatgaaatatcttggtttttatttcccaggaagcttgagagaaatgagtttatacagagctgactcaaaaagacaaaaagtaacttgggccagtttggtttcaagataataaatgtgttattaattaatgataaaattggcgcttgttttattttcgatattcaatgcactttatgtagcattgaatgatcaaatattggatttacctttaaaaaaaaaacctgagtatcattgcatgaatttttatctccctatggttatatcctgcatcaagtggataattttgaagtgtgttcagaatataaaattgaaattttagagttgttgaaaatcctgacttgttgaaaactaatatatatgtacatggatttctatagatgtgtttgtttagaagtgggtagatattgcagataagactgttcttcagaatcatgttaactattgggttgtgactgaagtagtccagggtttgccttgaaaccattacattctacatttaccaaattaaacaaataaaaactgtattaaatgttgcaaaaaaaaaaaaaaaaaa

SEQ ID NO: 235984 - DNA, 721 bp, Homo Sapiens
  misc_feature (17)..(17): n is a, c, g, or t
  misc_feature (103)..(103): n is a, c, g, or t
  misc_feature (116)..(116): n is a, c, g, or t
cgtctattgcccacagngactttaaaagtaagaatgtattgctgaagagcgacctcacagccgtgctggctgactttggcttggctgttcgatttgagccagngaaacctccaggngacacccacggacaggtaggcacgagacggtacatggctcctgaggtgctcgagggagccatcaacttccagagagatgccttcctgcgcattgacatgtatgccatggggttggtgctgtgggagcttgtgtctcgctgcaaggctgcagacggacccgtggatgagtacatgctgccctttgaggaagagattggccagcacccttcgttggaggagctgcaggaggtggtggtgcacaagaagatgaggcccaccattaaagatcactggttgaaacacccgggcctggcccagctttgtgtgaccatcgaggagtgctgggaccatgatgcagaggctcgcttgtccgcgggctgtgtggaggagcgggtgtccctgattcggaggtcggtcaacggcactacctcggactgtctcgtttccctggtgacctctgtcaccaatgtggacctgccccctaaagagtcaagcatctaagcccaggacatgagtgtctgtccagactcagtggatctgaagaaaaaaggaaaaaaagttgtgttttgttttggaaatcccataaaaccaacaaacacataaaatgcaaaaaaaaaaaaaaaaaa

SEQ ID NO: 235985 - DNA, 745 bp, Homo Sapiens
  misc_feature (127)..(127): n is a, c, g, or t
agtagaaccgttactaaaatagtttcaaagttgacaaaaaattttcaaagataaaagcagtttacatttgggggttgctgaggtaggcacaagaaaaagtcaggcataaagcacaaggcagactgtntgagtggattggttgctgctcactaaagttgttcccctgatctctaaatatggaggtcattaccaagaaatgctttggtatgaatgagagccagatctccactgtgtgagccagtgaattatggctaattcggctgttacagccactggttggctggattttaaaccataaaacttgaagattacctacaaaagtaacagtgtggctataagcctgagctttaatggatatacatcctcacagaaaagttggaaataaccaaaactgaagtcttaatttaccttcagtttaatctgtggatttgttcaaatactaaagatcctcaggtccagaattccagcatcatttattcttttaaaatttttaagaacttgatccattgtatcagtacctcacaatcagagttggcaaatgatggatgagtgattcaagcagtgcacccggtggaagctgaaatccatctgtgaatggaactgaagtgaacgtgaatatgctgactatatcctggaagcatttttataccatcttgaaatttcaacaaactggcttttgccagttaatccagctgtctttcaagaataaaagttggggttttcaaggaaaaaaaaaaaaaaaaaa

SEQ ID NO: 235986 - DNA, 674 bp, Homo Sapiens
  misc_feature (172)..(172): n is a, c, g, or t
tcaggtcccgtggcctggcccaggcccagacggggtcttctgaataccacccctacccgcattccaggagagcatcagtgctgccttctctggggctaccaggcccgctgcgtcaccccgggatcccaggcagcttcacaagctgcccacatccttccccagcccaccactntagccagtagaccagcgctgaggcaggagaagaggggccaggcagaagcagagaaaggctgacagcctgctctgcatccctctctggtctcagaaaccaggagtgagtcacacaaccagctctccctcctgctgtgctcttctgcactctcccaagcccctgggcactcgggaagtttattagggcagggggacttaggttagtggctgatgtgtgtctgtcaccaaaggccaggccaggccaggccatgatgcactttcttgattactcaattctgcaaatagatagataaagagagccccttcttccctccctatgtgcaccccaattcagaacatcagataacaaagccctattgtccagccccagtaaccaccacagagaatgttctgcagccccaggggacaaaaggacaaatagaggcttttttcttaacttagggctttgcagaaaattcaagaatttcacttagggctctcagtccaaaaaaaaaaaaaaaaaa

SEQ ID NO: 235987 - DNA, 657 bp, Homo Sapiens
ccacctttgagctctttgcgagagatgtggatttccagctttgaacaatccaagaaagaagcccaggcactaaggtggctggttgataggaatcaaaacttttcatctcaagagttttggggcctagtattcaaggactgatttcaaaaatgatcagaatgaaacagactagagccttcttgaggtttattttctaggttgccttaatatttgaacataatagctattctgttgactatccatcaggataataattagttgctgcagtactcataatgagccctttcaaggaatagatgtaaattacccttaggggtagccactatattttttatactaaaaaaggaaatatttcttatggacactggttatcttccatgtccgtgtctgtggacccacatacttactgccttttgtggaaattcacctagagtgagtactttccttgtgcaatggagggagacgatctagctatagattcttgatactcacctcactctcaacagcttattggtatttggcaaacctggtatcctgcagccgagcatgaacatgaaatacattagaacttggcaatgagagatcccatctgttggtttcccagggatgtaagtgagtaataaaagctgtttcaagtttaaaaaaaaaaaaaaaaaa

SEQ ID NO: 235988 - DNA, 627 bp, Homo Sapiens
tgcccaagtcagacagacagcacctgcagacgcagggggactgcacaattccacctgcccaggacctgaccctggcgtgtgcttggccctcctcctcgcccacggcgcctcagatttcaggaccctcctcctcgcccacggcgcctcagacctcaggaccctgccgtctcacgcctttgtgaaccccaaatatctgagaccagtctcagtttattttgccaaggttaaggatgcacctgtgacagcctcaggaggtcctgacaacaggtgcccgaggtggctggggatacagtttgcctttatacatcttagggagacacaagatcagtatgtgtatggcgtacattggttcagtcagccttccactgaatacacgattgagtctggcccagtgaatccgcatttttatgtaaacagtaagggaacggggcaatcatataagcgtttgtctcaggggagccccagagggatgacttccagttccgtctgtcctttgtccacaaggaatttccctgggcgctaattatgagggaggcgtgtagcttcttatcattgtagctatgttatttagaaataaaacgggaggcaggtttgcctaattcccaggttaaaaaaaaaaaaaaaaaa

SEQ ID NO: 235989 - DNA, 623 bp, Homo Sapiens
cgagcttgggaaactgccatgctttttggatgtcaaggcgctgttggaggctgggtgtgacagcacagagccaggttgtcttgtggaaaccacagccacgggtttgccactggctcagcatggcctcactgccagtcccagcctggctgagggacaagatggtttctcttgggagttcctgagtggagcacccttccaggctttttgaaagccagctgatctgtggagccttgttaagggactcaatacggtgtttggatattgatgtttttccttgagactgtcttgtccatcaataaagatggaggatgtctcctctttgaaccccgcttccccaccagtactctctctcccttagagtttatgagttattcaaggaggagacttcttaaagacagcaacgcaattcttgtaacttgtgtaaatagccccatctttcagagtgataccatttctacatttgataatgcctgtattcctgtaggatgtatatagtttaggggattttttttttgtttggttttgttttttagaagtcaatatgtctggttttatttattgcttgaaaaagatcatttgaaaaaaataaatacattttcaaccccaaaaaaaaaaaaaaaaaa

SEQ ID NO: 235990 - DNA, 690 bp, Homo Sapiens
gccccatgtccacccctgtcctgcccttctctgggatagggctggccttcctctgcctctgcctggctgcatccatggtcgatctcaagtgccttggcatgaactccactctcctgcagccttcaatcaaggaatgatggggatgtgtacataccccaccccaccccttggcagggtgatgctgaggtgtggatttttaacagttcccagactttcccaggaggcttgggtttgggtgcccacagtgggagctggtgtgatatcataccttcgccggccgcctttccttcctgttctctgtgcccctactcccactctagagctgccccgtttctctgttttcgtgaaagagctgaccctgtgctgcctcccactctcccaatgcccctgccactcctgtgagcctgctgctggtgaggtcggtgctgacctctgtgttgctggataatgagtcatctatctctggaggagaagaaaggcaggtcctccacagccctgataaaatctccaagtctcccagtttcgggtccctctcctgggatgcagacccactgcctgcccagctggtacgatccacatgccctcttcttgggaataggggcatgggaaagtgactaaagatactgttctggctgctgtgttcactgtgagtaataaactgtccattctccgaaaaaaaaaaaaaaaaaa

SEQ ID NO: 235991 - DNA, 739 bp, Homo Sapiens
  misc_feature (14)..(14): n is a, c, g, or t
  misc_feature (28)..(28): n is a, c, g, or t
agccttcagagttntaaaggaccctctntgaccctcaggacttattagctcccagttagctgcctggaaaactcatagaaccattccctagatcccatttgtccgagaggctttggtgcttagttaaggtgcattttcttactctaggtttatagagtgatgtaattcaactgaagaaaacacacacatgcttttggtgcttattcttcagttaaaaggaggtatccattgattcttttatatgaaattaaatcaaactgttatttttatagctcttcacatattaaaaagagctttcatgtacatttacgtgtttaatttacccaacaatcttgtgaagttgatataattaatatctttactgttttaaaggtagagaactgaagttcagatatattgaaactttcttaggacatgtagcaagtaaacagtggagcccaggtcccctgactccatatcttacattcttttactaataacatgtcatgctgagattcagaaggcccatgcttataatttaaaaatgagactatttcagtatttctttgtgtttgttttctactattcctttctgagctatgttttagagaaaacaatttgatatgcttcaattttgtaaaatcaaattacatatatataaaaaaacctatctgtattagacaaaaactgtttttatttatttctgtaagatatcaattaaataaatattttagtggaaatgaaaaaaaaaaaaaaaaaa

SEQ ID NO: 235992 - DNA, 564 bp, Homo Sapiens
agtaaatgtcctgatgggcattgcctactatctccagggcagctgcctttgtcctcctaacagctttattggagtacagttcacttaccatacaatccacaattgaccctgcacaatttgatgccggtttagtatagtcacagttcagcagccatcagcacagtcagtcttagagtttactacccccaaaagaaatccagccccccttagtcaccaccccaacctccccatccctaggcacccctaggctactttgatctctgtagacttgcctcttctggacatgacatagagaaaggagtcataaattctccaaggtgtctgtttcttctttaatgtcattccctgtttctcctcacattccctccccatttcctgggcccagtctcacactggtccttgcttaccctaaatgctattaattccatcactctgagtatggtgtttgctgtccgctgaatgccaagagcttcaagagtgtgtgtaaataaagccacacctttatttttgtattattctgaaccatggctaataaattgtttcaccaaaaaaaaaaaaaaaaaa

SEQ ID NO: 235993 - DNA, 765 bp, Homo Sapiens
cagttcaatctaccataccttctctcacctggaattccagatgcttgagctacgaaacttagatgcaaagaaagttaaagctagaaggaacctcaggcccagttgctcattttgcagattccaaatgtgaatttcagagagctgagataacttgcccaaggccatatagaggctgtgactaaatctggacttaaatccagactatcaatcttaggccagtgttcttttttcaatatagtccttggcataatgctatgcttattaggtagataaaagggcttatgtcaagaaatttggagcagagtctgattacttgagcatgaacatacccgaccaaggtatgttctggagtcatattctagcctctgagctcattttttcatgcgagttcatataaaatcctcgaaagtttagaaactaggttttagtagtaacggagctagaatcatcttcgggcttattcctgctagttgttccatatttctagatttcatcttgaattttgaaaactgatttaagaatatatttagtattattattagtaagggaatacgcaatccagtttcaattttattcagaagtaggtcacctaattctagaaaatggttattagtctagtgtcgcttagcaaggtacttaaaagaaaatctgcacatatccttgtgctgcccttcttaaaaacagaaaacaaaaagtgtaagatcatcattgcttcccacataggaaaaataaaatgtcttcagacttaaaaaaaaaaaaaaaaaa

SEQ ID NO: 235994 - DNA, 774 bp, Homo Sapiens
  misc_feature (49)..(49): n is a, c, g, or t
caagaattcggcacgaggcggcacgaggcctcatgttgttcctactttntaaataataaatggctctcagcatcttaggaactagatgggtcccatctgggtagaacctgctataatttttagaatcactcttgtaattcttacctcacttaaaatattaggaaacacagtaatagaaaagacagggagaactcgtctgcaggttttggcagtgaaatttgtcttccagtgaattgctattattttcaaattgcctatagtcaaaaagcttttccattgatggagacttactttcaaatgagcttgtgttgaattcagcactctagattctctctgacattttcctgtcttttgggaaaaaaaagcagatattccaaaaatggcagaaatctaatttttgtaaactttttcatctataggattgagccaaaaaacatacatactattttaaagaaaggtaccatctaattcttttattaaagatagctacttctgaaatgtcttaacagagtttcaagattgcaaagtagtattgcatagctggttttcttacatgtgatgatggaggagagaggaagacccagacttaggcatgtagtgaaatatgtacagtttctggcatcagtgtactatttatagtctatagcatacattacttgcaaatgggaaaagtattttataattatttttgtacctcaaaataattattatattctactgtattatattcaaattaaagtttattatttgattcttaaaaaaaaaaaaaaaaaa

SEQ ID NO: 235995 - DNA, 675 bp, Homo Sapiens
gaagacttcaactatggtactgtgctgcgactagattgttctcagggctacactgaggaaaacaccatctttgcccccaggatacaattctttgccattgaaattgctcggaaccgggaaggctataacaaagctgtttatatcagtgttcaggacaaagaaggagagaaaggagtcaacaatggaggagaaaaaagagctgacagtggagaagaagagaacaccaagaatggaggagagaaaggagctgatagtggagaagaaaaagaggaaggaatcaacagagaagacaaaactgacaaaggaggagaaaaagggaaagaagctgacaaagaaatcaacaaaagtggtgaaaaagctatgtaaggtatacagggaacagcactctagaagctatgactcaattgagactacaagtaccacggtgctacttgcacagacccctttggttaaatgtaaattcttgtacaattgaaggatacgcagaaggacatctttctagtctaacagtcaggagctgctctggtcattcccttgtatgaactggtctaaagactgttagtggggtgttagttgatttttcctggtatactgtttcttggctgacactactggtcaagtaagaaatttgtaaataaatttcttttggttcttattaaaaaaaaaaaaaaaaaa

SEQ ID NO: 235996 - DNA, 605 bp, Homo Sapiens
ggcacgaggagaaagaaggggttggagaggtttggaaacagatataagggaatggtctaaagtcaaagaagtttggcagagatcacggagctaattcatattgctctccttgtacatcgtgggatagtaaatttaaatgagttgcaatcatctgatggtccactgaaagacatgcaatttggaaataaaattgctatcctgagtggagactttcttctagcaaatgcctgcaatggactagctctgctacagaacaccaagtcattttcatttaatggacctattgctatatatcagatgggagactgtgagtcagcctggatcttgtctaaacacccaagagcattgtcatgatgtcactcctggaggttgttctattaagcattagtgatttatacttccggataaccagtggcacagatgtactctttacatagctgatgtatttccttatgttaactttgttttcctaaaggcgtaaatatgttgtttaaaatgaagtattttgtttgtacaaatatgctcaatttatgcatataaatctccctttacaccatctatatagtttaataaagatgctattgtctaaaaaaaaaaaaaaaaaa

SEQ ID NO: 235997 - DNA, 723 bp, Homo Sapiens
gagcgcccagactctgaactcagcagaaagtggcaagaagagggcgattagggcgcacaactttggaagctgctacttacttggaatgcggggagaccgacggtgcgaaggcccttctcccacccgcaggtgggccaagctctgggggcaggtggagagggcgggcaggggagagacccagcggcactgatcgccttgtgaccggaagagtgacctgttaaaagccacgcagcagactcatggggtctcacaaatccgtgtccgggtgcgctcccactcttctcctgctccccccctgccctggaggggaggggcgataaatacctttgattgtaacgtgccgttttaagaggttttgtgtttgtttgcttgaatacaaatgtttgataagtctttttctgccccagtggcctgtttgcctgcctgaggagttacagttttgtcattgtgggagaaggggtggggggagggggagcctgcgaatttgaacggggtgagttgtttcttttagtgcatttcccactgggtcttttgggaggcgtctagcgttcctgctggccctgggacaaagacccagaatagaactcgtagctcgtgactgcacggtttacgccacaaaagtgctcttgacatccgtgacaccgttttgactttttgtttttttcttatttaacatttccttaataaatgcaacatttaagcgttaaaaaaaaaaaaaaaaaa

SEQ ID NO: 235998 - DNA, 592 bp, Homo Sapiens
ggcacgaggaactttataaagatatcacaagtcaagcagcaggagtattggcacagagctccacctctgaagaacctgatgaaaactcatcctctgtaacatcttgtcaggctagtctttggatgggaagggtgaagcagctgaccgatgaggaggagtgttgtatctgtatggatgggcgggctgacctcatcctgccttgtgctcacagcttttgtcagaagtgtattgataaatggagtgatcgacacaggaattgccctatttgtcgcctacagatgactggagcaaatgaatcttgggtggtatcagatgcacccactgaagatgatatggctaactatattcttaacatggctgatgaggcaggccagccccacaggccatgaccttgaagtgaaagtcttctgttgctattgtgggctcaaatatttggtcatgggggaagaatgtagggttgtggcactggcacagacacaggaaaatccattttccccactcttttatttttgctattctgatcatttgtcccccttttaaaaataaacttcccatgtcttccatttgtggtactaaaaaaaaaaaaaaaaaa

SEQ ID NO: 235999 - DNA, 756 bp, Homo Sapiens
  misc_feature (9)..(10): n is a, c, g, or t
  misc_feature (37)..(37): n is a, c, g, or t
  misc_feature (48)..(48): n is a, c, g, or t
agattcgcnnacgaggagaaagatgaggagacttttntgacttacatntgtaaatgaaaacaagtctgtgaatattcagatgactacttcgaagtaattcattttttttattagtatttttccagcttatgttttcccatgagctattttactttgctgaattttgtgggtaatttggtggatatatcctgccttatttaggattatagctggataagaaaattgccttttcattgtaagtgcccagttttggtctctagtttgaaggtactacatactgccgataaaggaaaacactcccctacaccccagtttttgtgttaccaagaaaaaaaaaacagtattggtttcatagtaggactcaaccagaattggtcctacatatatgtgagtgttcagtttttgcaaataaggtttttgagtgtgataaaacactacagaagtgctaagtgtattgagaatttgctgctgattgtatttataacaattacttgacgtttgcagaaatttagcactttccctccaaatttataggtgtaagagaagcgggggcaaggtgcaccacattttaaaactgcaaatgtgtgaaaatttatttagagattcagattcctaaaaggaaatttcaccacccaagtcatgcacttcttagccttttacaagccaacagactgacatgaagattgttcacagttcctaagatttagcacatatacaaaaataaaactttataaattcaaaaaaaaaaaaaaaaaa

SEQ ID NO: 236000 - DNA, 668 bp, Homo Sapiens
  misc_feature (148)..(148): n is a, c, g, or t
taaagccgacccccgctccggcggggctcgccggcccccaagtcgccagccgcttacctcacaatcccgcttggactgcatggctctccagctggccccctcgtaccctctttataacttcctccccaccggcctctggaagcttccntacccctccaccccgcaagctctcattggctctgagcgcgaccccgcctcccaggggggtggaggtatccactgcacgtgcgccgcccgggcttcgctcagaccttcaggtgaaagctgcaaagtcgcgggtgcgtatgtacgggggctgcctcccgaggaggagctcccaagccgcagggtggacgctggagacaagaacctcagggtcacaagtttactgtttttctcccttttccatccctacattggtctgctggggaaggcggggctaggcatcactgacacacgcagactccgtggttgaggcattttattggacctttggcaattggtggtggggaggcatctgctccaactggtgcggggccctgcagatgggaccatctcaggctgggtccttgtagcccaggagcacagactggactaagcctcctgggccttgtatgaaaaaggtgttgtacctggccgtttttgccagtaataatcaataaaataaccataataaaaatcaaaaaaaa

SEQ ID NO: 236001 - DNA, 639 bp, Homo Sapiens
ttgtccaaggattcaccgtattccaaaccagagatgttcaaattggtgagaaacccaacaaatgcctttcatatatacgagaaccaaatgaagtcagaatttgccattattgcacattacatttttgggggggaaagtgcttatgaatggtgcaggttgactctgatattcattcccaaatgacagtatggcagagtgttccagaaatgagagtggcatctttatggaatcactatggatactgactgtctcagtaaacagctgtcttgtctgtgtgtatattgtttgatcagggtacatggcagccagtcacagattggaattacatatgacaaagtatcagtgtactataaacaggtttttagttatccctgcattatttttgcaattaatctttatatgcaatgagattgaaaagctttgtatgggaagactcaaaatgtaaagctgcttccgtagagtctcactgattctgagatggcttttgctgctctgttctccctctacatttctctgcagaactcgcgttagaaacacagatatttgttttacaaaaagggagatttttcctttgttaaaccatcgtcttataagcaatagcaaattcatgttagaaacttcaaaaaaaaaaaaaaaaaa

SEQ ID NO: 236002 - DNA, 592 bp, Homo Sapiens
cttacatcctgcaagcccctttcccccacaggttcaactctggtacttccctttggaatacggattctctgagaggttttaaatttggacatagcactaatggttccagcttcatacccatcatgtgtcctacattaaaacctggcccgagaccttgaagagtctgtaatcttaatttcctctttagtattcctataacccactctccatctccccacctaccaggtctgccagtgaggagcaggccttgtcacaggatgggtctggggagaagcccatgcacacagctcctccacaggccccggccccgccagcccagtcctggacagtgggtggggacatactcaacgccaggttcattcgaaacctgcaggaacgtcgcagcaccaggccttggtgaccgcagccccgtcaaacatcttcaaagtattatttctccctcactacaggaaagagccaaagcccaaccctcataatagatggatacattcattcattcattcattcagcaggcttatcagattcaagtcatttgtatcttttaaccagaccaataaaagtatttatttttatcacaaaaaaaaaaaaaaaa

SEQ ID NO: 236003 - DNA, 729 bp, Homo Sapiens
  misc_feature (86)..(86): n is a, c, g, or t
gtgctgttttcctggtctgtggaaacagagtctccgaggaataggctagacatggtaagaacaaagttctgttgtgataaaagctntggcctgaggttccaaccattcagtttgccagctcagacttgatcttgaacgaaggcggggttctgtgactggagaccatttctctccttttgtatttgttggtgtgtccaaaaacctcagatctcccagcttcaggcttctttgagggcagtgctaaattggttgaaaccttatttgaggcagttcctgaaaagggtaggtgaaatttcctgctgataaaaggcatcctgtgtcttgttcatccttagcaaattgccaattagcaaagaagagagggcagatgaagtaccagccaatttgaaattggtgtggacttccatcaaggtatattaattcattttacctagatgattcgaaattagttgcttttttcttttaatcctaaaaggataattttcttcatgttcttcttgtcatgtcagccaaatcctatagtgtcaactttcagtaaatgtatcttagaaataactatggaccaatctagatctttctctctctatcatctatacagtttagagattttaaaactcttaccacttagtttgaaattttattttaatttataaaatgatatattcttatgtaaaaaattcagacaataaagatgtatttaaagtaaaaggcaaaaaaaaaaaaaaaaaa

SEQ ID NO: 236004 - DNA, 689 bp, Homo Sapiens
  misc_feature (40)..(40): n is a, c, g, or t
agtagagatggggcttcaccatcttgaccaggctgtcttnaactcctgatggtgatccacccacctcgccctcccaaagtgctgggataccaggcatgagctaccgtgcctggcccccttttttttaattatagagaaataagttacaccttagtatcagatattaattttcttcagtgttcaggcaattagtatttagaaagctcttgtcatgagatggctctgggatgtgatgatgattgttgggattgaaaaaatggtagtatcatggagagatcataataaattcttagtattaaaagtggttttgctttcagttagggagaaaaattagattgtactatttttcctctatgatttccttcagttatcttccaaatgttgttttttccccacagcccccttaacattgttctctatgcacttctcaatacattttcatttgtttctcaagcctctttgtggatgactcctaaatataacttcttccactagctctagatccgtatttccaataaaatcccctacctgaatattcaagttaaacatgtccagaatacttactgattttattgttaatagccactattctgttgtctggaattaaaacctgtataactaatttgcatccctttatcttcttagtcaataaaacctacaatcctctttctaaaaaaaaaaaaaaaaaa

SEQ ID NO: 236005 - DNA, 700 bp, Homo Sapiens
ctaactcactgggcgtctctagccgttataccaacaatgactgcgaccagtgttgggaaagcgccccctgggcccctccctgacgccagcccatccttgagactccctgcaaggaggcggcccgacccagtgggtgcgtgtcgtggggtgaggaggaatggccgacctaatggtcccgcttccgtgagtagcacaggggtgcctgctcagagtgtagtacaacgctgacaagtagaaggcgaggattgcggggcctgggtgagatgggacccactaagttgtgggatcgaaatctcagtaggtccttggggaaagcggggacgggaggggagatgagcagattggaatagaaccgagagagacggaggaaactgacagttgcgtccctggtgggaagactaaaatctatgcagaaacagggataggcaaaagcattgtgcacaagcgggacaggcagagcgccgggacagaaacccttaggacattctgacaccttgctgaacctggatccttacagaatatgtcttgtaggtgaagctagatctgcaaggcataggcaagcctcttagagaatcagaaaagtgatttggaaggaacttcagctgttactactttgtttaagcaaatcaaatgctgttctttaatgttactggacgtttcaaattaaacacaagaaaacctgaaaaaaaaaaaaaaaaaa

SEQ ID NO: 236006 - DNA, 770 bp, Homo Sapiens
  misc_feature (19)..(19): n is a, c, g, or t
  misc_feature (214)..(214): n is a, c, g, or t
caagtacagcaaagagagnacattaaagtggctggaaaaaaaggtaatcaaactgtgcagcattaaaaaccaataatgtgaatgtcagttcccgggtacagtcaactgcatttttctctggtgaccaagcttccactgacaaggaagaggattatattcgttatgcccatggtctgatatctgactacatccctaaagaattaagtgatgactnatctaaatacttaaagcttccagaaccttcagcctcattgccaaatcctccatcaaagaaaataaagttatcagatgagcctgtagaagcaaaagaagattacactaagtttaatactaaagatttgaagactgaaaagaaaaatagcaaaatgactgcagctcagaaggctttggctaaagttgacaagagtggaatgaaaagtattgataccttttttggggtaaaaaataaaaaaaaaattggaaaggtttgaaactttgaaaataaaatctagcaaaaatatttgctttttacatgtttcagtttgtccttcctgactgttaatgactacctttggttgggggaaggaagaggccaatttcatgttctcttaaacatttctttgcatttggtttttgtgttcctgaacaaaatatgggaaagtgtctaacttcatggctatggccttttggagtctcatctgacataatgaaaagtaatcacttgaagagaattaacatatagcatcatgattttctcaataaactgatgtgtgacaaaaaaaaaaaaaaaa

SEQ ID NO: 236007 - DNA, 633 bp, Homo Sapiens
ccccagtcaactcctagatttcaaaaacctttttctaattgggagtaatggcgggcactttcaccaagatgttctagaaacttctgagccaggagtgaatggcccttccttagtagcctgggggatgtccagagactaggcctctcccctttacccctccagagaaggggcttccctgtcccggagggagacacggggaacgggattttccgtctctccctcttgccagctctgtgagtctggccagggcgggtagggagcgtggagggcatctgtctgccatcgcccgctgccaatctaagccagtctcactgtgaaccacacgaaacctcaactgggggagtgaggggctggccaggtctggaggggcctcaggggtgcccccagcccggcacccagcgctttcgcccctcgtccacccacccctggctggcagcctccctccccacacccgcccctgtgctctgctgtctggaggccacgtggatgttcatgagatgcattctcttctgtctttggtggatgggatggtggcaaagcccaggatctggctttgccagaggttgcaacatgttgagagaacccggtcaataaagtgtactacctcttacccctaaaaaaaaaaaaaaaaaa

SEQ ID NO: 236008 - DNA, 777 bp, Homo Sapiens
catgaataggaatgtctgcccatatgtcaggattggaaataatggatgaagatcaattaatcaaagacgtcttggataaattccttaattgtcatgagcaaacatatgatgaagaatttctgaacacttttactcatctttcacaagaggatcatgtgtccaaaaggggagtgtttggaactgattcttcagaaaacatttttacctcagcaaaagttactcataaaaatgaagcagatgactaccatcttagaaataaaaccatctttcttcgtacttcatcacaatgtttggaagaacaggtagataatttcctagatttagaagatttggacatggatgaagagattaaaccccaaatgagtgaggatttgctgctgcttccaggagaagtggagcaggatgtaagcaccagcattccttcctgtatcccttttgtggcccagcctcctacctgtgaagtgaagccaaagcccagtgttaaaagaatggacaaacagacggaagagatacttggagatgaagttcaacttttttcacttgatgaagaatttgattatgacaatgtgatgctaacctccaagtttagtcctgcagagatagagaacatcaaagagctatgcaagcagcagaagagaaaggacaccagcccagacttagagaaatcctgtgactgattcacagaggcattttgtgtgtgtgtgcttattttaattttgttcttattctagcaacattagaataaaagataaacctactataaaaaaaaaaaaaaaa

SEQ ID NO: 236009 - DNA, 756 bp, Homo Sapiens
catatgaagccaagtctcactgagatcaccctactgcttaataattcagaaaattttcacatgcaaagtgtttggaattttatgtatgttatgaaagccatcttttacaattcttaatcacatctctgcctaaactgattcatgatgtttatgttttcctgtttgtagtgtacaaaatgaagctgaaggctcacatgttaaaatgaccctgaatagaataggaagaacagtgttcttacaggtcataatgtatttcacaattaaaaaactaaaatatgtacccatttttaagaaatcatacttctctccacattgatcttttcatttcttactagcttttaagaaattaaatacttgcctgagatagaaatactttatttttgtaactttaaggtctaaatgactaaacttcaaagtaagattttgtcagaataaattgagaccattaatctaatataatacttgttcatgagcactgaaatcctgaagaggagagatttggttataaattaaaaaggttgggtgatcttaagtgcctcagttaatgcacgtacagtattcatttggttggttgtactacctctcagaagtaaaatttgtcaccttatggaatgagagtttttgggtttgggggttgtttttttgttgttgcttggtttggtatttttggttttgtgtgtatttgtataaattttctgtataattagcccaggctgatgtaactataaaaattagttgaaaaaaaaaaaaaaaaaa

SEQ ID NO: 236010 - DNA, 746 bp, Homo Sapiens
aatcccccagcctgtgttggaaacatcaccaaactgattgtaaatgtgcggctgtagcagacattttagtgtggtggtgtgcagccatttcggccctacacctgccagcctggctaccttacagttgtgttccgatttttgcgtctatgcttggtgtgcctcacttgctgcattttccagcatgcaaccaggagttgacgtaggaaaaagggatgctttcttactttggaagctctcagggaagttggtgtcaatttctcctccactgcctggcctaccctgcactcccaaagattttgtgcagatgggtagttccattttttaaaaattgtgcagatatggaaaattgtgacttacttcatgaccagaactatctagaatatgtgtgggggtataaacatcttgcttaaccaaatatctatgtaggcagaggtaaccaggagagaagcaagacttgctgcctaaaggagcccaccattttacttttcacatttaatctgccacgttgaatcaattggaataaaacctgactcgcaggtgactggacaggaaatcccaaagttccaccatttctatgcttaattttaacgtccccccgcttttttttttgtagaaaataaaaacaagaaaatcgttccaatgtaagatgtttgttatagaaactttaggcaatacaggtgtgtaataaaatgtttaataaacttctaaacacttttgtatttggatttaaaaaaaaaaaaaaaaaa

SEQ ID NO: 236011 - DNA, 681 bp, Homo Sapiens
  misc_feature (55)..(55): n is a, c, g, or t
  misc_feature (62)..(62): n is a, c, g, or t
agaattcggcacgagggttggagcggccgcggctgtaggcttttttttttttttntgccatntgcatcctatttcatagtgccaaaaatgaatttttgtatcttgtcttgtctttgtccattataaactggaggatcacagttaagccttccatgaattcatagtttggaatcatttaccttaccattattttggatttttttcttattacagtgtcactacactgtattcatgtgggggaacaaacatgtaggtgcttgaacatgccccacagacacagttgtagccctagtatttgtgacggtcattattgacacagtgcagactttacagatggagcattatgctctcagaggactttaaaaatatgtatattaagcaattaactttctggagttggagttatcaaatcttgctgggaaattaacttccaagagctctgaattggatggaattccatctggcttcagagaacaatcagcctatatgaaacggagctttgaaatgtttttcttgtgcagaaatacgaactagaaagaaaagtgctgatctaatgctaagttttctctgtgtactgactcagttgccagaattataatgaaaactgtattttagtctaacaaatgtatagaattttttatgtaataaataaaattttataggaaagaaaaaaaaaaaaaa

SEQ ID NO: 236012 - DNA, 702 bp, Homo Sapiens
  misc_feature (96)..(96): n is a, c, g, or t
agtgggtacccccattcacaggttcccaggtcccctggctttggctgatttcaaaatatagagccctttcttgccagtacatccaagtttaaaatnatcagcgaaatggtccatgtttttccaattacctgctgacacggttctaagctaagtgaaggggaagatctgagagcgtgctgtttgtggctgttgatgcatattcgtgatgtaacaggtcctggggcctcactttaccccatttgtaaaatggggctaatgtcacctgcctcttacctacctcagagggatttggtgaagcaaactgttaatcttcgaaaacgaccatttcacttcttggatatcaagtgctaacccagtatgttcttcttttttatgtaagggacagctttggagaaaggactgctctgtggagcagagtcctttctgctggtgaggacagcatttctgagcagggctttgttctctatgtgcattaggacttttatcatgcccttgttctgtgtgtagttacttgacagcatcaaatgccgcctcttcctaatgtccttcaagttttcatgaactagcaaccccaccttccaccatggttctgggcgcctgattttgctgtgactcccagacccagccactgtttctgccaccctgtaacaggccattaaagctccccagtgttcagcctccttcaaaaaaaaaaaaaaaaaa

SEQ ID NO: 236013 - DNA, 748 bp, Homo Sapiens
caggtatgaatgctgactttctaaagtctttaactgatcaattctgtatagagggatatttatctaaccactttccgtattttacaagtctctttctaaaaaggaataactattatagctctatttccccaatctctataggactcatgagagattgcttgtgtaaatataaaagcaccatatgtgttcttaactcctatggctgcttgaagctcatgatgaaaaagtctttttgtcagttttaattgttaagtacagaacaaacaattgtttggtgatggcctggttgaaagagagcatataaatatatcccagtggaactcaccaaagaagaccacacctcagaaattattgcattttctcattatgtgttgggtttgatttgcttttgtttttaatgcagctcttttaatataaagattcttgatacagtgaaatctcttatttcaagtgtaagttattcttcacccaccccttcccctgccattgtatttcccatctgtttcaaggagtttcaacaatttacattgcatcgtatgcagtaggtactgctttttcagaaagacctggaaaacatacctgctatgaatattttgttcagatgtagccatttacctggctctcaagttgtctttgtggagagggtcttagacaaaaatcttccttgtatttacttgggttaagtgaagtccaaattcttacagtatgctatttcaggatttctgatattaaaaaaaaaaaaaaaaaa

SEQ ID NO: 236014 - DNA, 619 bp, Homo Sapiens
ggcacgagggacatttgcatgtaaaatgtagctaacaaaaattacacagaagtaaatttagtcctctagtgcctacctctatggtgaaatcagaccatttggcatagtttgaagtcttccaagaagcctggtttccacctggaaaataaattactaaatttgaatgtgttacttatactatggtgagttgtctatctgttacattttattttagtgcatatactagaaattgtatttagggtgttctaaaattgtcatctgtcaaggtagagaattataataatataattatactcagaaagcgttctgattttagattattttggcactgttacaaatatgatgaattttaaaaaaatgcagaatgtttattacaaattcatatgtttaattgtcaaattctgagattaatttagataagctataaccaaagtttattttctttgcatttattggtacatagttaatgcttatacacaggcttcagtgtaacacctatacactattacaatatttagctgtacttatttgctttatctttaaatggtactttgtcccaaaattttctgagtttgataaattattaaacatttatcaaatcaaaaaaaaaaaaaaaaaa

SEQ ID NO: 236015 - DNA, 660 bp, Homo Sapiens
  misc_feature (103)..(103): n is a, c, g, or t
  misc_feature (121)..(121): n is a, c, g, or t
  misc_feature (128)..(128): n is a, c, g, or t
  misc_feature (474)..(474): n is a, c, g, or t
gaatgccttggataaaattgtggaagaaggcaaagtccgcaaagagccagcctggcgccccagcgggatcccagagaaggatctgcacagtgttatggcaccntacttcctgcagcaacgngacaccntgcggcgccatgtgcagaaacaggaggccgagaaccagcagctggcagatgccgtcctggcagggcggaggcaggtggaggagctgcagctacaggtccaggcccagcagcaggcctggcaggtgcgaagcccagcggtgcagagtccagcaaaggtgcagcctttgtgtccaagcaggagggcagcgaggtagtgaagagacccaggcgctacctgtatcaatggctgggagccccagtcccctacccggatcccctggagcccaggagggaggtgtgtgagctcaatccggactgtgacgagttggctgaccacatcggctttcaggaggcctatcggcgcttntacggcccggtctagggtgtcgctctgctggcctggccggcaaccccagttctgctcctctccaggcacccttctttcctcttccccttgcccttgccctgacctcccagccctatggatgtggggtccccatcatcccagctgctcccaaataaactccagaagaggaaaaaaaaaaaaaaaaaa

SEQ ID NO: 236016 - DNA, 416 bp, Homo Sapiens
tttttttttttgtagagaccaggtttcactatgttgcccaagctgatcttgaactcctaggctcaggtgatccacctgccttggcattccaaagtgctgggattacaggagtgagccaccacacctggccccgaaatattttaaaaccttgaatcaccttaacaaagactaccagttaactaacagagtgaacttgcatctgttcctatgtgaaagctattattaccacatctagttacatgaatctcagctgcaacaaagccatcatcccatgaaaaagtgaaacacacttagaaaagatcaacagccattttcctaaagaaaacagcttcattctcagaggatcaaaaagtgttttaggagggtatggatgttctacttaccttgctcttcatgatctttgaagtgcgtcgacc

SEQ ID NO: 236017 - DNA, 1000 bp, Homo Sapiens
tttttttttttttttttttttttttttttgagacagcgtcttgctctgttgcccacgctggggtgcagtggtgcgatcttggctcactgcaacctccgcctccgaggttgaagccattctcctgcctcagcctcctgagttgctgagattacaggcacgtgccaccacacccagctaattttttttgtatttttagtagagatagggtttcaccatgttagccaagatggtctcgaactcctggcctcgtgatctgcccgtctcggcctcccaaagtgctgggattacaggcgtgaatcaccacgcccagcccagaagccagcctttctttggttctggaagcaacagcagagccatgactttggtggtggagactggtctttgttcaaataaatgtcaccaccctggacactaggccgggcataacagaccacaaagccaggtggtggctgacctgcaagaccgtagcctcagagctgcagcttctcccagggaggggcgcctggcagtgcctgcaaggacggagaccccggcagtgtctaggtccgtgtcccatgctgagggtgcactgggtgacgtgggaggcgggccctggtcacatgcatgggcccttgaccacatgcagctcggttggccccagctgactgtccccatcctggagacccgcggcagcctgagaagggcctcggtggtcatcctcgtctgttccttctgctaaaacaaaatacctcagagggggcaatttgtaaccagaatttcatcgctcagttctggaggctgggacgtccaggaccgaggccccagcagattcagcgtctggtgagggctgctttctgctctctgctcccaggacggcggcttcttgctgtgtcctcacccagtggcagggacgggagggtggggaagggcaaccaggaccctcaaaactcttatgaggctactggtcccattcatatcctcctcatctcccaaagcccaccagtgatgccatcgccttggg

SEQ ID NO: 236018 - DNA, 573 bp, Homo Sapiens
gctgggaggacacgcaagttcagctccagccgactggggcattggtggtagcccctggagacattgtgcaatggggctacgaggctgcatctggctccagggaagcgtgttgcaatccatgagtgatgtctgccatgcgtacaggcatggagagtgaggcgcctgtactgtctttctgtagaccctagactggtggggcctctgaaatgcatccagacactgtgctgggtgtgttgcatggccctcccaaccaattcagtatttttctccccattttccagggagaaatctaaggcgtcagaatgtaaggttcttattggaacccaggctccagggtccctggttttctgtgacatcatgctgcaggaccctgtttctctctttgctttggctgctggggagctcagaagggagctttaggcttgctctcagtcaccacattagctcaggggtttgggcatttttgtcgccgtctcctttgggctctgtctcctccctgctgtgcttcctgaggagcaggccggatgtaagttatcaactataaataaaaccaagacttccgttctggctctc

SEQ ID NO: 236019 - DNA, 455 bp, Homo Sapiens
ttgactaggggctaagagacttgaggggaactagcccacttctgatgctgcatgactgagaagaagtagtatcatagaatcatggtactttaaagctggagagaaacatctcaaaaataagcaacctggaccagagattaaactccaggtctgagagccagataacagccctcctcaagataaccagtcaagtttggcactgcaggccctgagccattttggtccaccctgctttgaccccaccccttgtccacatcagctcctgtgaagccaccccagaagaaaaccactattcgttcacattggctgattgatgctccatacgtccaaaccttccagtcctcaagaaacaagtatggctgagttctgggtaaaagtggagaacatgaccctctcctcactctgtgccatgttttatataagaaataaattaaaagtatataaaaacacaaaaa

SEQ ID NO: 236020 - DNA, 377 bp, Homo Sapiens
ggtgcatgcagaaacttttcctgttcaacacacttatatggcactatatagggatataccaaatagctcaggtacatagtgaatacaactttaacacttatattgaaatgctaatcttacttgccaatattagtggcacattagcataatttaacttttataaaattatggaaaacagtttaaaattattctccctaatattagcaaattgcattaatggcatgtaccgtgtgccagtttgtttccaaataaacaaaatgtaccttgatatgccacttcagagccagcagagggagctcatacttttttattgttttcaacttactgaagaaaatttgcttttaaaagctactgtgttataaccaatgagaaccaag

SEQ ID NO: 236021 - DNA, 570 bp, Homo Sapiens
gctcagcttctggttgtattctccatgagtttaataatgacatgaaaaaatgtggaagccgagagagtaaaatactctgccctgtaaaaacatggaagacatgcaaacagaataaaaataattgtattgttttagataatacttaagacaactgtgaaacaacaaaaacacaactattcctttgtgaccgatgaagataaaaagaaattctggtaaagacaggtatgcagttttttaaaatgggtttagaaaattgttgcagaagaatttctaacatctgaaaatggttttatgtttaagaaggatggtctgaattgtgtactaatagcaaggtataagtttggtgtagagcctatccagtagcgtccactgtaccacttttaagtaagactcagtccacagaagctggaagattgccttcgctttaaatatcctttaccttctgcatttgacactcctcctgttactacatagattccggtccccagaagcaattttacactggtactagagttaccagccccatttagtaatttttaatggctagatgaggtttaacaagaatatgaa

SEQ ID NO: 236022 - DNA, 499 bp, Homo Sapiens
gtttcatttttgtttttgttttttgcccttgagtaattttgacatgcagagttattcacaactttttgcaaagtactattttcattggcttttcagagccagtgaagttgccttctcctccaacatgaccacattttcctctgagcagacaaaaacagaacaaataagtttgtgggcttgcttggaggttgaaagaaataagtccagttaaaatgagagttgagccaggtgccctggctcatgcctgtaatcccagcactttgggaactttgggaggcagataacctgaggtcaggagtttgagaccaacctgaccaacatggtgataccccatctccactaaaaatacaaaattagctgggtgtggtggctcatgcctgtggtcccagctacttgggaggctgaggcaggagaacccgggaggcagaggttgcagtgagctgagatcgcaccattgcactccagcctgggcaagaagagggaaactccgtctcaaaaa

SEQ ID NO: 236023 - DNA, 446 bp, Homo Sapiens
agccaacttatcccaccttctgcctgttttgttctagccacactggcagctgttagatggtgtccacccacattgagggtgggtctgccactcacagtccacggactcaaattttaatctcctctggcaacaccctcacagacacacccaggaacaagtttaccagctatctaggcatccttcaatctgatcaggttgatatattaacatcacaagtccttgtcaacttgaaccccttgtcaacttgaacccatacacatctcctgaaatcatatttaatctccaaataaaggaaataataaggtcataattacacctaacgtaatacagctatccttcatacaaccagaagcacactaatccttaacctaaatgctattacataaagttaacaacatttaaatgctgatataaaatcaataaatcttatgtcacatgaaaaaaaa

SEQ ID NO: 236024 - DNA, 535 bp, Homo Sapiens
agaaaggagaattcgagtgaaccaagagaaatccaaagacctggggaaggaggacttaagatgaaagtgaagcaagagagggaaggggaaatgaagtgaaaatggcgtgagggtgtgagagaggtttgggttaggaaacatgtttttagtgctatttccaaccaggggtcgcaaactcagcagcctgtagaaacaggggtgggaggtgggggggaagctgtgcccacctttaaagagggggccattgctcagccatgcagaaaaaaatggggcaacaagctggaaatcaggttttttttttttaaagtgaaacttgatgatttttaaacaagtaattaaaaaaatgtccaaaacaccatgtgggccaaacatttgtttgagcctgggggccaccagtttgcgaccactgccttacgtagttaacaccctgagtatgtatacagtcatattttttgttttggatatggtagtgttatatatacttgggggcgtgatatttgaagtcatctttatctctcagagttaagctttattg

SEQ ID NO: 236025 - DNA, 533 bp, Homo Sapiens
acaccagtagcattgacttcacttagaaacctgttagaaatacaaattatttggccccacccaacacttgagtcacaaactttgcagatggggctcaatctgttttaacaagcgcttcatgtaattttgatgcaggcctaagtttttgagccactgcagtatgcatttctatttttaagcaaagatcttggtctttctttttggacattgtagaaataacatgaacttgttttttgtttgtttttgttttgttttgttttaagctcctgatctttgttggttatgttgcaaaagattgtatcaggagaagcctcagcatggacattggcatcctgacataacccccattaatttagtattctttctgaaactcaaatggattctcaagtccaagagactatggaataaaatcattgtttgtctgtgttaagttttatctctgttattgcctgaagacttttggtaacaataatgcgctttcatcaaacttttaagacttgattggaaaaaataaatgtatgtttcatcagtta

SEQ ID NO: 236026 - DNA, 627 bp, Homo Sapiens
ctgcaagcagtcgcctgtccacttagccgcaggaagcggccttgcttgctttcttctctggcagctgcaaacgggcgctgacctcaaccagcaggatgttttaggagaagctccactacacaaggcagcaaaagttggaagcctggagtgcctaagcctgcttgtagccagtgatgcccaaattgatttatgtaataagaacgggcaaacagctgaagatctcgcttggtcatgtggatttccagactgtgccaagtttcttacaacaattaaatgtatgcagacaataaaagcaagtgaacaccctgacaggaatgattgtgttgccgtgctcagacagaaacggagtctcggaagtgtagaaaataccagtgggaaaaggaagtgctgatgtcacgtgggttatgaagaagtctgaagaacgccttcatttcatgcaaatctataagctcctgcttttggctttaccatatgttgtgtctaatctccttctgagaaggacgaaaaactttcttccaagtgaagatccatttaagaacacatgtatttacatgcctataatatgctggttgtgtatgctttgtcttttaagttattaaaggaacgtctaaaaaaaaaaaaaaaaaa

SEQ ID NO: 236027 - DNA, 646 bp, Homo Sapiens
  misc_feature (646)..(646): n is a, c, g, or t
tgatgaatattctcaacaaagtcctttctaagcacaaagatcttaagactgacggttttagtcttgacacctgccggagcattgtgtctgtcatggacagtgacacgactggtaagctgggctttgaagaatttaagtatctgtggaacaacatcaagaaatggcagtgtgtttataagcagtatgacagggaccattctgggtctctgggaagttctcagctgcggggagctctgcaggccgcaggcttccagctaaatgaacaactttaccaaatgattgtccgccggtatgctaatgaagatggagatatggattttaacaatttcatcagctgcttggtccgcctggatgccatgtttcgtgccttcaagtctctggatagagatagagatggcctgattcaagtgtctatcaaagaatggctgcagttgaccatgtattcctgaagtgggaactgagaagtcaagatcctccctggaggacaggactgaaaaccttgccaagctgtacacagttgctgataccctgtgcaacagctctcatttcctggcaagctctttcacaaccctacatatttctgatcatgtgctgccttttactgctgaattaaaacagatatttcacgaaaaaaaaaaaaaaaaan

SEQ ID NO: 236028 - DNA, 716 bp, Homo Sapiens
actgaaagtgaaagtccagaaactgttcccacctgctggagtgaaggggccaaggagggtgagtgcaaggggcgtgggagtggcctgaagagtcctctgaatgaaccttctggcctcccacagactcaaatgctcagaccagctcttccgaaaaccaggccttatctccaagaccagagatagtggggagacttcttggcttggtgaggaaaagcggacatcagctggtcaaacaaactctctgaacccctccctccatcgttttcttcactgtcctccaagccagcgggaatggcagctgccacgccgccctaaaagcacactcatcccctcacttgccgcgtcgccctcccaggctctcaacaggggagagtgtggtgtttcctgcaggccaggccagctgcctccgcgtgatcaaagccacactctgggctccagagtggggatgacatgcactcagctcttggctccactgggatgggaggagaggacaagggaaatgtcaggggcggggagggtgacagtggccgcccaaggcccacgagcttgttctttgttctttgtcacagggactgaaaacctctcctcatgttctgctttcgattcgttaagagagcaacattttacccacacacagataaagttttcccttgaggaaacaacagctttaaaagaaaaagaaaaaaaaagtctttggtaaaaaaaaaaaaaaaaaa

SEQ ID NO: 236029 - DNA, 713 bp, Homo Sapiens
  misc_feature (18)..(18): n is a, c, g, or t
gccagaggcagtcttctntgagctcaatgggcagctgcggtccatcttggtcaaggacacccaggccatgaaggagatgcacttccaccccaaggccctaaaggacgtgaagggccagatcggggcgcccatgcctgggaaggtgatagacatcaaagtggtggcaggggccaaggtggccaagggccagcccctgtgtgtgctcagtgccatgaagatggagactgtggtgacctcacccatggagggtactgtccgcaaggttcatgtgaccaaggacatgacactggaaggtgacgacctcatcctggagatcgagtgatcttgccccagaccggcagcctggccatccccaagccttcaacagaagctgtgctgccacggcaggcccaggccagccagtgcccgaggccaggaaggccgggccgtggaggtcctgtccacagctggacaggagagacaccgcctgcggtggttcattcctttcagccatcgtcctttcctccggcggacagctgcttacatgttcatctcttgccaaataagggtcccctcctcactggagactacaagtggtgggtcaggtggtcctaggacccaggggaggtttaggggtcctatctcctgggggaaggggagatctaagatgtcccaggtcctgggaagtttactcaataaagctggctttcccctgcaaaaaaaaaaaaaaaaaa

SEQ ID NO: 236030 - DNA, 720 bp, Homo Sapiens
  misc_feature (94)..(94): n is a, c, g, or t
tcactgcctggccgccgccggcttggcggcctacactgccaagatggcagcagctaatgggagcaagaaggctgagcggcagaaattctccccntactgaggccagctgaggtacaggcaggggcaggcaggaccaccagcagggggctgcctctgcaccctacccgcccaaggagactccaccctggggtcccaaacgccgctaacgcccagacgcatggatgcaccccctaccctgcctccatctatgggagttctttctctcagagtgggggcagtttctggcccaggggtctgagctgcggcagccccagggcagggggccctacctcctcagctctgtgcttggatacagggagcagccaggagactccctagtgcccccaccatggcgggtgtcactcacgcactccccatcccttagggcttcctggcctactgcatccttgtgggagtcagggaggagggcccgttgggtagctggggccaggcttctctccccaccacctgcagatttcttgctgcttccactgatacccttttgactggaatgaactggctgggcttgtcagggggcaccccaaagagggggcactgccaggtagctgggggagtggcatggggcaggggcccagttctcagcagcagacactctgtacagttttttcaatccctgtttttgaataaatattctcagcgaccaaaaaaaaaaaaaaaaaa

SEQ ID NO: 236031 - DNA, 727 bp, Homo Sapiens
aaagtaagcctcagaatttccaaaccaattcatccacagctgtttctgggctggtttttaaagtagctgcaacagaatcatgaggctttccctttttatcaaatacgaaaaacattttttaaaattctgcacacccagtgatcatcttttgtgcgggaaagcaagatgatgatggatgattttattcatccttttagtaaagacacaaaacatttttctcaacatttgtacagttctgaaaaaaacctggtcaccaaaaatatcttctctgctaattcagcaattcttgggctccagttaggggagctggggcctcactttctcccagaattgtgggcttcactggaagtgaaggtgcaggaatgactggactgtccaccccagccctgcctgcctgtggttttggccagggagcaagccatgaggtgccctggcacatgcacaaattgatcctttgcgtgacagtcttgtatggaaaacagatgctgacagaattgtagactaccatgccacacaaaaaggctaaatatctactccaatgggtttccagttcagtttgaagtcaatcaaatttttgtattttcggtgtctccttgattggttttgctagtaattctgtaaattgtacatttgcaatatgaggttttttttccttttgtacaatttgaaactgatgcttcacctttcctttaataaactattcaaaatcaaaaaaaaaaaaaaaaaa

SEQ ID NO: 236032 - DNA, 612 bp, Homo Sapiens
tttaaagggaccacacttttgaatacctactggtgtttggcagaaatctgagactggcaccagacacaaattttagacatgggtatcttccctccagtaattcactgctcagagtaatttagaagacaaaaacagaaaaaattgtaatgattttttaagtgttagaatatgtttgttaacatactctgcaaaataaatttcaactaatgcaatagacttaaaatatagcctatggaatactgtgattgaagtttgaaggcttgctggttcttattttgcatgcaagtttagacagggtaaagaatgtataaatttatttgagatgagatacagtattgtaaaaatataacctcatctagaattgcttttaaaacaagcaaaagcctattttagtacaaatgtagggtgggtagttgttttaaggtagcaaaatacttcaagattttctatctttttaatttttcatgaagacagaagaaatactttcaccccaaccaatgactgtaagatcttgagagtatgttcttactcatttctgtaattgcagtagtgtagtcatctgcatataaatttaataaatgcatgttaaaatttaaaaaaaaaaaaaaaaaa

SEQ ID NO: 236033 - DNA, 519 bp, Homo Sapiens
gcagtgtgccgagaagagggctaatttgaggaacaggatggtggtgcggagccctggcctgagggccgaggcagaacttccccttttcttgggccttggcccgttacaaagaggggtgttgcagcagctgatgcaaactgagttcagtttccctggggagcagaaggactggtacccggcagaggcgatgagacaggccgctgatgatgcacaggacttgcggtacatgatccctgtaacacagacccaaaggagctgagttaacgtgcaccggcaaaagaatagctgtccctctcagcccaaatccaaacggacagctcttccttactcctcccacagcccagagactaggtgaggtcagggaagtgcttcggattgtctcattgatattcaagatagatggtgaaagagacaggcactatttcattagttttaacaaaactgttccaaaagcgatttgagatgccaatacctgtgaatacctgttaataaagagctgttaaatagaaaaaaaaaaaa

SEQ ID NO: 236034 - DNA, 438 bp, Homo Sapiens
aacagaaagacctatggagataatgggatgtaataacagaaaacatacagaaacaattggttctgaaatcagttaagagcagaactggaattcatactctgtggaatgaatcagcaatgtggaaggagtaacaagattttttaaaaagattttgaatttaggctgggtgcagtcgtcacgcctgtaaccccatcactttgggaggccagagtaggtggattgcttcaacccaggcattcgagactagcctggacagcatggcaaaaccctatctctacaaaaaataaaaaattagccaggtgtggtgcatgcgcctgtagtcccatctacttgggaggctgaggtggatgaatcacctgagcctgggaagtggaggttgcagtaggctgaagtcatgccactgcactcaacactggcggacagagtgagaccctatct

SEQ ID NO: 236035 - DNA, 443 bp, Homo Sapiens
  misc_feature (129)..(129): n is a, c, g, or t
ccctggggcctcctacgggctctcctttaaaccctaggctcccaaacaccaggctcagtgcttcctcggagtcttcctagccctgggccccctcctctagggatctctgaccccttgaccccttggccncaggctctcaccccccaggctaagtttggccataatcccccgggggagcccttagcttccttccatcccaagatacggaacctactgtggctgggatccctcagcccacttacctgggcccttgcctctgcaaccccagtcctgcccctcttgtctacccggagcctccctgatcccgggtcccttctccacccccccttgcaggtccttggagtctcgaggttgaaaccacagatctggacgttcacgtgcactctcttcctgtacagtatttattgttcctggcactttatttaaagatatttgaccctcaa

SEQ ID NO: 236036 - DNA, 394 bp, Homo Sapiens
gcacgaggctctttagtatgacactggcaactgacggcactgcggatatgtttggaataaggttcaaaagaagaggctgttctaagaaagactaccgagtaatcaatcacctcctcagagaaagtctgctcaggaaactctcctcccaccagcccctgcacttggttccttgcgttcctctggctggaagctgttgtccccaacttcagaaagtgtctgcagatttcacaggctctctcttgggtcaagggaccagctctgtgaacacggcaagtaacaacagagagaaaacgtgaggagaaaagagagaccgggattttgaaatcctgtttcctgaatgccatctcaccaggcacacgaaagaataaaattaaggaatcaagaaaaaaaaaaa

SEQ ID NO: 236037 - DNA, 314 bp, Homo Sapiens
ggccacctcgcctggcccatacaattttttaaagggcattgagatcctaaaattgaaattgtagatagatatagctgtgggataaagaacttctgctgaatgatgatttgcaaaagtatgtcttcagtatagtactgagtactaattttatggggcaaataactctgtatttaatcttatgaccttgtataaaatcttgccctaaactaaattcaaatgtatagtcatttatacttaattacaaaatttggtgctatgttaatatttaccaaaaaaaaaaaaaaagtcgagcgccgccaatttagtagtagtag

SEQ ID NO: 236038 - DNA, 299 bp, Homo Sapiens
cacactaactactcatgcagaaaaaagggttatgtaaaatgacattagaagaaaatcatttgtaatcgttgcatcgggctgcactttgaggagacattaggagtaaatccgtggcgtggtaggcttatgctttatcttctgatatttactgagtttactggtgcatgaaaagctttcagcaagaatagcagatggaatggacctttcataggtaatgctatctaccaggttattacttctatatattgatagtaaagtaatctccaagatatcaccctacaaatatagattatttaaat

SEQ ID NO: 236039 - DNA, 520 bp, Homo Sapiens
gaacccaagattagttgacagtgttgattgtgagttgctttcttgagactcggagacttatgatcattcagtgaaaatatcaatgtgggtaatgtgctggacaccctgcagcagtacatcgaaggcagcatggaagaataggcagtattggatttgaaatcaggagacttggaattgaattcggcctcttcccactcccagctgtgaaattggctaaaacagaagaccatagaattaacacgagcatgtcagaagcaatatgagctggaacaggaattggccttttataaaattgatgctaaatttgagccactaaattattatccatcagagtatgctgaaattgataaagccccagatgaaagcccttacattggcaaatccagatacagaaatatgtttgccacagagagttatattattgacagtgctcaggcagtacagatcaagaagatggagccagatgaacaacttagaaatgatcacatgaacttgagagaccacacaccactggaaacgc

SEQ ID NO: 236040 - DNA, 676 bp, Homo Sapiens
  misc_feature (157)..(157): n is a, c, g, or t
tcttgtgatctcttctacacaagcaagacctgctgctgagaagtcccggtggcaaatcgagattgaggactactttccagagttcgctcgctacacactctgtagggatgcgactcccgagccgggagaggacccacgcgtgacccggccaagtacnttcattcgggatgagtttctgagaatcagcactgctagtggagatggcgccactactgctaccctcactttacctgcgccgtggacactgagaacatccgccgtgtcttcaacgactgccgtgacatcatccagcgcatgcatctccgccaatacgagctgctctaagaagggaacacccaaatttaattcagccttaagcacaattaattaagagtgaaacgtaattgtacaagcagttggtcacccaccatagggcatgatcaacaccgcaacctttcctttttcccccagtgattctgaaaaacccctcttcccttcagcttgcttagatgttccaaatttagtaagcttaaggcggcctacagaagaaaaagaaaaaaaaggccacaaaagttccctctcactttcagtaaataaaataaaagcagcaacagaaataaagaaataaatgaaattcaaaatgaaataaatattgtgttgtgcagcattaaaaaatcaataaaaattaaaaatgagc

SEQ ID NO: 236041 - DNA, 595 bp, Homo Sapiens
ctccaaagcatctgtaaaatcattctatcattgagtatcgtttaatgcaaaaggacaaaaacaactcccgtgatatgattgccaggagattctgtttccccatttctatatttgtggattttatatgtaatcacctatgtcagagaaagaaaacctttcaaccaaatgattggttcaaaaggaaagaatgattcaaagcagaggaatttattatgcacagcaaaatgtgtcttgtattaaatatttttattaaaagaatgtttcattaatgcattgataagaaaactaggttagttgcgagggatgtttctggtttcatttcaaataattaaatttctactgctactaccaagaggactggctcagtggtggcaaaatactggtgatgctccctagagcaggaggcccggaagtgctgacgcagccatcagcctgccaagattgttttttaatcttcacagtgttttaaagaacatgttaaaaaaaaaaaaatctagtgctcctgctgtcaagatttctgtcatggaaaccttgtttgagaaaggtgttaataaaattctattgcaaaaatttctttttctagaaaaaataaata

SEQ ID NO: 236042 - DNA, 476 bp, Homo Sapiens
caagggagcatctttggactctctgtttttaaaaccttctgaaccatgacttggagccggcagagtaggctgtggctgtggacttcagcacaaccatcaacattgctgttcaaagaaattacagtttacgcccattccaagttgtaaatgctagtcttttttttttttttttccaataaaaagaccattaacttaaagtggtgttaaatgctttgtaaagctgagatctaaatggggacaaggcaggtggaggggaggccagtgtacatgtaaatgcccacagcccagcattgggtttccctcccaaggccccagcaccaacctctgagcccaagaccttgcctgaaaacaagcagataccgattgcttcatcctatttatggacatgtaggtctagttgcattttcactggggggaggggggaaggtgaattatggtaacttttaatgatctattcaggcagtagagctcttaag

SEQ ID NO: 236043 - DNA, 777 bp, Homo Sapiens
atgggagtttttgttgaaagtcaaaaccctgtttctcttgcttctctttgaaagtctgttaacattttgagggttttgaatggtgatttgttcccagttggtagtgtgcctccattccctgttaataaaagactgatctgttcttgagccagatattagttgggtggcgaaaagtagctatctggagtcgcgggatgtaaaaacaaatatttcatggaaacgtctaaagaaggtaggatctttattttctttgaatctgatagatatttttggctgctgacctagggaatgattctactctatcacatctgatactatgatacttactgagtagactcagattttgagtaatcataccttgactgtagttgtcatatactctgaaagaaatttatatatcaacctgaaataattggttgaaaccctttgctcaggtactttttaaacttcgtaattatggaaatttgttttaagaaatgttcagtgctgatacatcatctttctgaaaggatgtaagttctgtctgtgatcaatgtgaagtaaaagagttacagccttttttgtaccattttatccctgaatacttacctgtattttaatctgaagtatgatcatttgtgccttctaaagcagattatttaactgattaaagagtcccttgaaattgatttttcaagcgttagaaggttagccatgtaaaggtatttatacttacctcaaaaaaggatcaataaatgtttatgaaatccatacatatgaagggtttggcttttggta

SEQ ID NO: 236044 - DNA, 555 bp, Homo Sapiens
acctttcatctaccaatccatgtgcattggattgcacactaagatgtattttcttacgaaatagttctgtgtttattttttaattatagaaattccaaagaacagcacatcagaatgctcctctcttttcagtaattgttttagttcagagatcttcccgctcagcctccataaatctaatgtcattttttttttaataagtcctaggagctgggcttcattcctccagcgggagtccagtcagggtcctgaagtttgctggttcaggaaagaacaggaaagagaaaagccttctgtgcccaggctaaagctgttacatttccacagtgtggatgcagtcagaatccctgcacattctggtcataaggattagagtcaccagatgaggctctaaacagatcgcatcccttggaattagaaagcagtggagaccgggcgcagtgactcacacctgtgatcggcacttcggaaggccgaggcgggcggatcactgaagctcaggagttcaagaccagcctgggcaacatggcgaaagtccatttctataaaaaatac

SEQ ID NO: 236045 - DNA, 654 bp, Homo Sapiens
gatttgcactttggaactattttatagttgtaatgcatcaatcaaatacatttcaagcacatttcttgatcaatttaccagcaaccctctgaaggaatgaaggagagttgtgattgctatgtcaatgagtgaaatatacttaaaaatggcagagttatatagtacattattgtagcaaccttatatctgatttgagatactgtgttgccaaatgtccatgttatgtttatttctctattggttgtatttattaatttttagaagcctttaaactgtgttagaatctttttgaaaaatgttgattttgcatcataaagtttcaatttatcaaggatatcttttcagttacacttttagaaagagtgaataaaaagggcagtgagttatgctcttggacttggtgaaagctatcatctctccatattgtatttgttcagctggtttaattcactcaggtggatgattgcacatacattggaattggctggagagactacacagagaagtttaatgatcgtgtacaatttgagggttgatggtagggctttctaaaaaaagtaatatcaagtgtgttgttagtattcatttagtcatttttattactaatctataaatatatttattaaatttgaaaagtaaatggaattataaagg

SEQ ID NO: 236046 - DNA, 621 bp, Homo Sapiens
atggcacaatctcggctcactgcaacctccgcctgaagggagattttcaaagcaacattgcctctatcataggtagtcttcaatgtaatactggcaccaacaagagaaccgagctaaattaaaactaccctcaaaatgtcatcacagctgatgtgcacagcaggaaggacgatgtcacaaaatgcacagatctgttcctattgcacattccacctttcccacgtactgctggcagcccagaataaccaaaatctttttagatgtctgtcttaaagagagctataatatgcaaacatacacacacacacacacacacacacacccacacacacacacacacacaacctcaaacctggtttataaaagagctttgtggatcagagtacaccctcacttggtccaagaatctaattgtcaacattaggcaaatagacccaatgaatgtaaccaggaagagaattaactggttggctggaatattgtatttgatatgatgtgcttatttgcaaactaatctccaactgtttgtccagtactaattcaactgactcatcttctaaatgtataagagaaagcctttaaaaaagttaagctcttcagcaacgaatagtgggacgcgtg

SEQ ID NO: 236047 - DNA, 799 bp, Homo Sapiens
gtcacccagtctggagtgcaatggcacaatatcagttcactgcaattttcacctcctaggctcaagtgatcctccccagcagctgggactacaggtgcacttggctttagttttacaactgaattgtcatggtttacaaacctgtgtccctgatgcatcccacacccaatactaacattcactgttacctattttaaaagcacaaaagctagtatttgaaagtattctcatgcaggtttatgactgtaaatattagacgattacaaaaatataatcccacttcagtgttttagtaatgagacccttatcggccattaataaatagtataaattttacaccagggtaactgggatgttttctgtttcttctcacattgctaagtggttttaggtttgatatcatctgcacacagcatctgtgtcatatatgacaatcacattttagtcaattatgttagaagctcatatttaataaggttcaagttctcctcaatatgattttcattaacatcatgatttaggcagaatgttttcctatacatgtaaataaagagaactttagctttaaaaaaaagattagagaactctatctttgataactaaatctataacaaatttaataatgaaggctctgaaagatttctgtcagctctagatggaattattctatgacttcatttgaagcacccagttggtgctggagtttcagccatgcactatatatattcagcatatcagaattctgttcaatattctgattttaagagaagctaaaaagaaacataaaatatacatcatc

SEQ ID NO: 236048 - DNA, 631 bp, Homo Sapiens
ttaaatgaagatttagttttcatatcgtatacatagctgtatagatttcaaaattaggttgttaatttgtgtcacttactatttttgtgttggtaatgctttaaatgcatacttaaaaatgaagtactgttatctaagctactgtgtttagaaaatgttaagaatgagcagaaatttttatagaaaagtataaacggaagaagagataagatactgcgaataggccctcaaacttaaaaaagaaaaaactttgccagttttaaggacatattttgattctttcagtattcttaacacctttttaaacaaagttcttgatagtacccactattattgggtttgttttatgccattattgattcttgatattcaagcatttacaatgtagcatatttgattttcttttttctttctttttttggcatcattaacatttcatttgaaatgcatattgttcttgaagtactttgtttttagcataaatgttgtgcattttatcttagtgtttggatgaaaacatttgtgttgtttagctttcatttgctttgtatatttaataatgtacctttattttccagtatgcctacattttgtattgcacaataaatttattttaagctgaaaaaaaaaa

SEQ ID NO: 236049 - DNA, 495 bp, Homo Sapiens
ctcaagtattgtaacagttgaaaatacttatattcaactaccaagttttgtttcattttgattttttgttataaaacatttttaagttatttgagaagtaattattagtaaaattgtatcttgataaatcatttcctcatcctgccattcccttttataaaacactgagtttttttattccttaagtcacatatcccagaaatgttttggttgtgaatcatttgccagcgagccaagggagaggcagggattcccttgaaatgtactcttacacttttttattttatttttaatgtacatttgtgtgcaccagaatggaatgtgctctttttaaagagctggacagtggttgcttcagacttctgaataccagaaagacttgccttttaatttttaaatattactttttacatcataaaatgtgttatcttatccatgtatttgaataacatcatatataaaggtagttttttgcttgtgcttaaaaaaaaaaaa

SEQ ID NO: 236050 - DNA, 610 bp, Homo Sapiens
agaacacgtatctttctcaaacttgaccttgaacagagctggatgggggtgggagggaaacagatttggggcatatggaagatattcttgggagccccatattctacctcagttaccgaaggctattagaacctctgaatttttcctcctctgaaatcctaagcacaacttcagaaaaccatgtctgatagcggatgtcttcctgctgtgaggagctgcttgatgtggggaccaaggtgtgggtgtgggcggaatgtatcctagtagaaacagtgaacctcagatatgaataaataagcaagagaccgaaagttaagtgtgtgacaacctcagtactgtagttaagctacattctttaaattagcttttgtgaactgattgggaacctaatctcttttgtaactgtttgagaaaaactctgaagcacctgatattcaaacaaacttatggtacttactaactcatttgtaaattggcgatgtagctggctgtagtattgctttgataatttttttcttttaatttacctaatatatataaggaaggggtttggatatattaaaataggtgttaattttatctatttaccaataaattcatctctttaata

SEQ ID NO: 236051 - DNA, 468 bp, Homo Sapiens
tagcagaagtgaggaaaggggcaagggctgggcggggatcacacagcacaacggcagcgcaagcaggctcgctgtcttgtgggccaccccacacacagccagtctgagctctgtctgtgctgttgctggaaagaatgagagaacacacagagagaaaaccgtgtctagggaaggcgatgcctggggctggaaaaaggaagcactctgcttgcccagaggctggaaggagctgctctgttccctccattcacccctgcctggctaagacctgcggtattcgggagcgtctgcacgcaagtgttcagtgtgcatatatggggagtcttcagttccgaagtcagccccgtaggtcattcccctaccatgctgggagcacgtgtcgtccacacagagcgtgcgtgtcaaaggatcaatcaccatcacagttgtgtgctgatttattaaatgtttatatgtccacagttatgt

SEQ ID NO: 236052 - DNA, 710 bp, Homo Sapiens
tttttcaaaattgttttggcttatatctttcttatataaattttagaatcagatcatcagtttctgcaaactgagattgtgttgaatctgtagatcaattttgtgtcttaacatcccccagcaaagttagaaagccaggcagtaatatcagagggcacaagcccagattgaagctggaagacatagtgctccagaaaggtccttccaaaaaaaagaaaagaagctgctcaaaacagacaaaatctttgatctatctttatccagaggatattgttagttctctagaatttcaagctgaaataatgattggtaactgaaaattaagctattttaaattcagaaaagcaaaacacggtataaggaaagaacttgactacacagtatggctcagcaatgattaatacatacagttaagtagtgaaacctaggcctggcacggtggctcatgcctgtagttccagcactttgggaggccgaggtatgcagatcacttgaggccgggagttcgagaccagcctggctagcatggtgaaatcccatctctactaaaaatacaaaaattggccgggcatgttgctgggcacttgtgatcccagctacacgggaggccgaggcaggagagttgcttggacccgggaggtggaggttgcagtgaaccagaatcaagccacttacgctccagcctgggccgcggagcaagactccgtctc

SEQ ID NO: 236053 - DNA, 606 bp, Homo Sapiens
cggcttggttccagctgtgcagctgacttctgtgagactggggccagccacactactctctaggcctcaggggtcaaggagctcagaggagggccctgaggtctctttccggtgggtatgttcattcttcaactgttcttatgtcacagagggctccttgctggtgggcagtgggttgtaaatactttttaaaaaacactaagttccttatctcagatgctgttctactggagaagttctagattcccactgtccaatagaaacacgtgagccatatatgtaattaaaatgtttctagtagctgcattacaaaaaagaagcctgggcactgtggctcactcctgtaatctcagaactttgggaggctgaggcaggcagataacctgagatcaggagttcttgaccagcctggccaacatggtgaaaccccatctctactaaaaatgcaaaaattagccaggcatggtggcacgtccctgtaatcccagctactggggaggctgaggcaggagaatcgcttgaacctgggaggcagaggctgcagtgagctgagatcgcgcgactgcactccagcctgggcctcaaaagaagactgtgtctaaaaaa

SEQ ID NO: 236054 - DNA, 793 bp, Homo Sapiens
cttccaaaacttcatactctaagaatgtcacacaacaaactacaagacatcccatataatatttttaatcttcccaacattgtagaactcagtgttggacacaacaaattgaagcaagcattctatattccaagaaatttggaacacctatccctccaaaataatgaaatagaaaagatgaatcttacagtgatgtgtccttctattgacccactacattaccaccatttaacatacattcgtgtggaccaaaataaactaaaagaaccaataagctcatacatcttcttctgcttccctcatatacacactatttattatggtgaacaacgaagcactaatggtcaaacaatacaactaaagacacaagttttcaggagatttccagatgatgatgatgaaagtgaagatcacgatgatcctgacaatgctcatgagagcccagaacaagaaggagcagaagggcactttgaccttcattattatgaaaatcaagaatagcaagaaactatataggtatacacttacgacttcacaaaacctatacttaatatagtaaatctaagtaaacatgtattactcaaagtaatatatttagaattatgtattagtataagatcagaattgaatttaagttgttggtgacatctgcatcatttcataggattagaacttactcaaaataatgtaaatctttaaaaatataaattagaatgacaagtgggaatcataaattaaacgttaatggtttcttatgctctttttaaatatagaaatatcatgttaaaaaaaa

SEQ ID NO: 236055 - DNA, 714 bp, Homo Sapiens
ttaagtttaatacaaattttatacaaagaaaatgtgaaaaaatacttccatatgctaaaagcaattatgcttcacaaataaggccagctaggctatttttttttttgacaactgcaattcacaaatgttctttctctcctgttttcttctaatactctcttatttcttctctaatatgggtaactagctggaaactgtacagttcgcatcctcttaacaatgaagagaaagtaaacaagactaaaatgtacaacaaaacgtactggaatgatatcgtacaattaattttctcatatacatacatcaccttttgctttttcatcaatgctttttgttttacacaacatacaaaatggctctacagcatacgtagtgtacggacagcatgacgggccttgctttctctcatactgcctgtgtttcatgcttacataaaaacgtgaaattccatcatataaataatacgtacatgcttcatcccagactcaaacgtcctctgcgtgcaccttgcctttgagtccttgcttccaagaagcacagcatctctgaccaagtgtgtgtgagtgtgtttaaaggaaccacaaagcaaagataaggtttctctttttttcagagttcatgatcctaagactttctgtgttctctcctgtgactgagctgagtggggcttgtttgtttctcttctgtaaacaaggatatttaatcggacgcgtg

SEQ ID NO: 236056 - DNA, 566 bp, Homo Sapiens
caaaaaaacctttattctttaattgttgcttttacggtgatattgtgcatgcaaaccaggagcattttgtgtcttaagaaaaataatcttagaacagatggctgtgaaaattacacccatgcacagaacaagccacaggaataatagttcaggatttggtttttctctttttcttgtaaacctggagggttgatatattctttccatgcagttattagaacttagttttgttccaacagttaaacttgcaatgaaaagaaaatgtgccatttttttcactcagaattattcatagctgtatatttgaaactgctaattacacacgtgtgatgtatgttggttttttagtgcaatttcttctgtagctattctttgaccaaactgtgggtattgttaatattaatttatatttgtctcattttgtatgtatgtgtagtgtgtttgtgagtatgtgtggtttataatctgacaaagtcatgaagctcagtttggctgtaatttaattccccttcccttatttttatttatttttgtactgtgctgattcaataaaatgcactgaccat

SEQ ID NO: 236057 - DNA, 621 bp, Homo Sapiens
ggggagacgctgtggtgtgactggggcaggaccatcaggagctacagggagctggccgactgcacctggcacatggcggagaagctgggctgcttctggcccaatgcagaggtggacaggttcttcctggcagtgcatggccgctacttcaggagctgccccatctcaggcagggccgtgcgggacccgcccggcagcatcctctaccccttcatcgtggtccccatcacggtgaccctgctggtgacggcactggtggtctggcagagcaagcgcactgagggcattgtgtaggcggggcccaggctgcccgcgggtgcacccaggctgcagggtgaggccaggcaggcctgggtaggggcagcttctggagccttgggacagagcaggcccacaatgccccccttcttccagccaagaagagctcacaggagtccagagtagccgaggctctggtattaacctggaagcccccctggctggaggccaccgccaccctaggaagggggcagggacgtgaccttgacttacctctggaaagggtcccagcctagactgcttaccccatagccacatttgtggatgagtggtttgtgattaaaagggatgttcttgaacttg

SEQ ID NO: 236058 - DNA, 566 bp, Homo Sapiens
gaccccatgcggcggcctccccagggtctacctaatcagctacctgtgcacccagatttggaacaagtgccaccatctcaacaagagcaaggtcattctgtccattcatcttctatggtcatgaggactctgaaccatccactaggtggtgaattttcagaagctcctttgtcaacatctgtaccgtctgaaacaacgtctgataatttacagataaccacccagccttctgatggtctagaggaaaaacttgattctgatgacccttctgtgaaggaactggatgttaaagaccttgagggggttgaagtcaaagacttagatgatgaagatcttgaaaacttaaatttagatacagaggatggcaaggtagttgaattggatactttagataatttggaaactaatgatcccaacctggatgacctcttaaggtcaggagagtttgatatcattgcatatacagatccagaacttgacatgggagataagaaaagcatgtttaatgaggaactagaccttccaattgatgataagttagataatcagtgtgtatctgttgaacc

SEQ ID NO: 236059 - DNA, 675 bp, Homo Sapiens
cacccagaaatccatttgagtctgctccttgtggttaaggactggcgtttgcagggaggtgcggactctcctgcggggctcacgggaaactcttccctcttcgtgcgacaggcatttaggggcgtgcctgccatgggcaaagccatggtgtgtgttcagctcttggcctgtgttgtaaacttagttgcacttcagttcctttcatcccttcacaaaattttgtttcacattcatgcagcaaatatgggctgaggtgccagacctgtacctgggcttggtgcgtttcaaatttcagaccagttctttgggctgggtcaaggcaaagctcagtcgtcccagcagcacctcagccatctgtagaaggttctaccattaccacggtttcagcttcctctaaacttctcacccgcttctcctggcaatctgtcagaacggtgtcatcctggggaagagaaggagcttgggtgcatttgccctcatcctgagaaggccagaatactggagaccagcgtgaaccctcacccagagtcaggggaagatttagaaacagtgacacctgcatatagaattttgattccttgaagagcctatttagttccataaaattggagaactgctgaaggtcagtaattccgactttctcagcagtggtgtctctgaattactgcaaagggt

SEQ ID NO: 236060 - DNA, 780 bp, Homo Sapiens
atataaaacccaataaaataacagacagtatggaaatgtgattcaatctcaatatgcatgcttgtacatgtatgactttatacacatacacttgtatgtattctgcaggagaggaaataatagcagaaatacacttaaacatgatggaaaatgtactctagagaaatataaggacaggatatatatattgtaagtgcaaatataaattatcagtcaaaattttattagtaataagtggtgggactggtttacacatagtgtgtgacaatggtaacaaaagtggcagcaaggaactcagcactcactcaacacgtctaataaataaagcttagtgattcattaaatattgacactgtgaaggatcaaaaattctaacacttccagagatcttaaattgatatctttcagataagccaaatattctagataagtaagaaactgcatgccaataccatattctaaaggaattaccttggaaaattaatggtttcactgtgtgcaaaattgcatgattccaaaatatgatatgttctccaataataatagaaaatattagcctaccattttgccatcattttggctgctctttatatcttcaaatgtatttcacaagtagggtacatatccacacactagcaagtttacaaaacattgtaaatatggtccattttcttgcaattattttaataatgtggttatttaataatgtacttttgtatgaaatgatttattaacacatttagatttttatatgaaaaataagtattccagttctttact

SEQ ID NO: 236061 - DNA, 807 bp, Homo Sapiens
gaaggcatagactcagttgatagggaaatatctttttctttctttttgagatttctatgtactcattaagagtatctagagtgagtgatttcttctaactttttgccttccctaactcaggtgttaagtgcctcctttttctgatacaaagatcttttagtttagtttttagagaactgggattataaatacatagagggagagccaggaattttctttgaagtattttaaaagtaagcgctttactgtgtgagccctggctcttggccagtcctatgaatgggccttagatgatgcccctgaaattgcatgcaaaatgtctttatttgctcaaatgtgtattttttgtgggggtggggggaatgaccttttatcagattctcacagggttcaagatccaaaaaagtttagatctagtgggttaggtgtggatttctctgaaataggccagggaaaaggctgtgacctctccttgggtctgctgcagcgttctagccttggctaggtgaggggaactgttgggccgatgctgtgtggctggagcagaacccacagtgctgtccatagaggagaacaagcaacgaagatcatggctaaagatcttagagatccttaaaatgccgattcctaatctcttgctgaaaactactgacttttagatattttcccgcttgccactctgtaatccagaatattaggaacaagttcttaaactcgagtttacttttcactggtgtttgcatgtgtgggggacaaaagtttatgttcttgtggcaggaaactgtgggatctgcagcatggaggagt

SEQ ID NO: 236062 - DNA, 744 bp, Homo Sapiens
gatcaagaaatattagaattaaatgcaaaaaataatccatgcatttatggttttgatttttatatattcccagctagttgaaaatgatgattcccacaagaagcataactcagcttgtttctgcttactgagtattttctactatggtatatattgataacatttcttccattatgtatgttgtataccagagttacagttactgtgggaatcataatttgaaattttgactcctgtgtttctggaatctttacaacaaatgttgcattaacatataacttttttcagttgactttaccaaaattaagcccatctttagtagatactgttttaacatgtgaaagaaatacgttataaacataccacaagatatggctataaaacaatgagatcagtatccatttttgctttaaagaattggccttattgcttcagtgtcacatctcatactcaagggcatttactacaaagaaagagttctccaatattgctgttctgttgctgcctgccctatttacacatgtacctgctacttaaataggaaagcctttcaattcatggacaatacaccttggtggtaaccaggcttttatttttatttttttttcttagtgtaaaaactgtactgttttggaaatgtgctgtgaaatattaggtttaactgtgtagatcctagaataaggggatttatatagatgaagttgtaaccaagaaactgtttaatgaaaatttatttactccaac

SEQ ID NO: 236063 - DNA, 638 bp, Homo Sapiens
caggtgtttgctgacattcattggccatttaatacagtgttgagtggttctccgtaaaagtataagtgctaacactacgaagaaatgcacacgatcattcttgctcacttctataacaaacttacataaaatggatttaaaaattcctactcacagcctaaaacttctggagttcactacctttttttcaaatcatagtaagatcacctgtgtattttatattttagtaaagccaattatgaagtacaagtatcatacacgtacttttgagctactattatttgaaaaaaatctgccaaatagcatctttaggatatatttacattttcactcatctaaaaagtatacaaaaataaaaagtggaaaaaggtatcttctgaatgttcaagagcatcctatagtgccaaataataaagcaccatttttttcttcataaccaggattaaaattcatatatactgcagggcagacatacatatgatagcttgtgctgattaatttaaccccatttgtaaacagatgaaaattttattttcttatttcatttataagatggctcaatgtattgggaggcttcttttttattacagaaagtgtatattggtatataataaaagggcttttcaaatggaaaaaaa

SEQ ID NO: 236064 - DNA, 567 bp, Homo Sapiens
ccagacaccaaggtaaattctatgcctgcaaagaatgaagtcggcagcagcccgtagaagtctggagggctggcccttctgtcgaaagctgtcctgcgggccatgccctgtggtcaaactcttcccagccgtgggagcccctgcagctgcatgtggataaagccgtcagtggcttcgcagcctcaccactctgcttcgggctctgggagcccagaaggaagccatctcccctccagatgcggcctcagctgctccactccgaacaatcactgctgacactttccgcaaactcttccgagtctactccaatttcctccggggaaagctgaagctgtacacaggggaggcctgcaggacaggggacagatgaccaggtgtgtccacctgggcatatccatccacttccctcaccaacattgcttgtgccacaccctccccctgccactcctgaaccccttgactccggggtggtgggaaccatgaatacaggatgggggctgcctcttgctctcttggggtccaagttttgtgtattcttcaacctcattgtcatgaattgaaaccacc

SEQ ID NO: 236065 - DNA, 408 bp, Homo Sapiens
tggcgaggggcagaagacattgtttcctgcttcctattcacccggagaagaggagcaagaggctcctttacccatcatttcttttccctgtcactacctgttagtaatgttaaagacaggtcctctggttaaaacggtttctgtagaaagaggatgatcaattttaatttcctttcccaacatgggctttgattttctgttttcaaaaacaggatacacagtgagaaatgctgggcgctccccactttgtgaacctcatctacgatgagttatgacgggttaattataactgcagggaattatgcttatatcataggagattgatattttctgtgaggaaattagaaagctgttaggaaggcccagaacatgcagaaagaaaaaaaaaacctcctttgaggcagagtt

SEQ ID NO: 236066 - DNA, 430 bp, Homo Sapiens
actatcaaatgtgaatggctggtcctaaccaggttctattttacccattccttacccacacaagtttcttttcccaaatatgtgagaagaggttttcttgcctccccttttttccctttacatttcccacttcacatttatttggggctggtgaaagatttcctccagctttcatttaatctccttaacttcttagatgaaatatcacttggtgtctgtatattgtcctatccatatttacaatttatttgactctaaaatgacaatataacaactataaggaattgatatgatgtccttacaatcttgatgatggactgtctatatttttaagagatgtacatcctagtcacttgtaatcataagttgtctttaactcagctggctccagctaattaaaaaaaaaattggggagatgaaaaaaaaaaaa

SEQ ID NO: 236067 - DNA, 442 bp, Homo Sapiens
gacacaagaagatgtcttttatcttaataatgtagtacattctaataacatgcctctgatggtctgtgagagatcaaatgaggacaggtgtaattaagctctattattaacaataatgccttgtatttgtatagtgctttataatttacagagagcgttaacatccatcaatttatttgaccctcaaaacaaccctctttgtttacttatgcatatgtataagtaaaatatgtaatattacctccagttgaggaaaccaaaacttggctgggcgcggtgggtcacgcctgtaatcccagcactttgggaagcctaggcaggtggatcctgggacctcacttagaataactaagcacggtgctcgcttcggcagcacatatactaaaattggaacgatacagagaagattagcatggcccctgcgcaaggatgacacgcaaat

SEQ ID NO: 236068 - DNA, 471 bp, Homo Sapiens
agttaagtattcgcccagtgaggtttttggccttctcctgtgcctttgcctgccttagctctctctcattggttggtgagtcaagttgatccttgcaagagctgctgtttattgtgtgctcatgattcagccaggcactaagtacttctcatgaattacttctgttccttacacgaaagcatgtaggaaatgagaggctgatatgggagctgaatctggggctgtcttactctgaggtctgggtcactccatataccatgctacctctctggttcactctagtaaatctagcttctaaccaaggtgttttcagttgttgatgagaaaagcctctctgtgtattgactccagaaaagcattgatgctcgtccaaaggtagtgagttagctcagttgattgttcacagtcagttacggatcgaacagtctcgttctagtctttcctcccttactattgcacttgactagtctt

SEQ ID NO: 236069 - DNA, 479 bp, Homo Sapiens
gaatatgagtgttaggaccactgtagtaattgggaagaaagttacattagttaaactctgttgcccaggctggtctctaactcctgggctcaagcaatcctcctgcctcagcctcctgagtagctgggactacaggcatgtgccaccatgtctggcagattttagctttttaatattcctggaggacttgttttgagactgtttctcgttaggaaaccaggaatgcttctgaaatattctaaaagtcatgtggagagagtttacctgggaatgtacatttctagtaaccattttatttgttatgaaacaagggattcttatggctttagaaatgtaacaggaagggatttgaagggggcacatggaccaatcttgtcagattggatttagtcccttgaacctgggaggcaggggttgtagtgagctgagattgcaccactgcactccaatctcggtgacagagcgagactccattgttt

SEQ ID NO: 236070 - DNA, 485 bp, Homo Sapiens
cgttttaaatgtaccacatggcagacatgcactggaaagtcatgtgtctgcatgtcctgacacggataaaggcatatagtcaggtgggtgatagactatcctgaaagattttttggtcaggaatgattggtcagagacagcaatatacccatataacaaatctgcacatgtaccttctgtatctaaaataaaagttgaattgcaaaaaaagaaatgccacagccacccaatcttcaacagccaccaccctgttcagttagcagccatcaacatcaaagcaagaccctccaccagcaaaaagattacaacttgctgaaggcccagatgatcattagcatttttttaccaacaaaatatttttaaattaaaaaaaaaatgacaatatgacattaactggaagaaaattgaaagtcttgtgcttaaatttaaaaaatccaaaacccagaaatgctagccgtgggagattggccttatagcaatttatg

SEQ ID NO: 236071 - DNA, 442 bp, Homo Sapiens
aacaattgctagcacataacggtcactctgaaaatagtagctgatatatcagctgcattgtttgattattgttggctcaattaaaagttggcttttccaaatcctccattaggaagaatttttaaatagccatattgaaaataaagttgtcagaaaaccaatgtaacatatgttgaatttttattaccaaaaagaagttactatccagttgtacagaaaagtagaatgaggttgtgcatcaagaaaaaaattgttcgttctcaacaaaaatttaatcacatgggtagtttttttttttttagctatgggttcatgctgtatttggttgcatcatatttgataaagaagcttccaacttagcatgaaatacctaaagacaatttttttttaagttagtaggcactttttagaatttccaggaacttttaaagatgttgtctcc

SEQ ID NO: 236072 - DNA, 591 bp, Homo Sapiens
gtcgagatcatttccaacaattcaatccaagcagtctttaacccaactggcgtatatgctccctctggttactcctaccgctgccaacgcgtgggcagcctgcagcaggaccaggccctcttgctgcccagcgacacggatgatgggtcgagcctgtgggaggtcacttttattgatttccagatccaaggttttgccatcaaggggggacgatttaccaaagcccaagactgcgcctcctccttctcgccagcttttctgatcggcctggcaatgtccctgatcctgctgctggtgttggcctatgccctgcacatgctcatctacctgcggtatctggaccaacaatatgatctcatcgcctctcctgcccacttctcgcagctgaaagctcgagacacagccgaagagaaggagctgctgaggagccagggggctgaatgctataaactgagaagccaacagatcagcaaaatctatgtttagcagcacaggctggcccccaccatgtccacagtgggctccgaaagttgtctctgttctgtgctatttgacttgtgaattacagattttcaccaaatggcttgatta

SEQ ID NO: 236073 - DNA, 564 bp, Homo Sapiens
cgagctaatcttcttcttttttttttttgtagagacaggggtcttgctatgttgcccaagctggtcttgaacccagcttcaggcaatcctcctgccttggcctcccaaagtgctaggattacaggcgtgagccacactgcacctggcctcaaactgccattgttttaggcttctctaattacacattttaaaatgtataacctttctctggcagaatatatgggctgcctatttacaacagatgtatctattaaatcttcagaattttttctactcatatagaattttaaacatcttcattaatatatttctttctctatttatatcacattgtatgcatatatgtaaccactggacttttttaacttaagtaatcaggaggttgagagttccgcacagtttgcataaatatggtgtactggataggaatgtgggatctggaattcaggagacatagactgcaatcctggctatcaaatttgctagttatatgaccttggtaatttacttaacctctctgttcctcacatcctcatttataaagtggctataacacctacccgg

SEQ ID NO: 236074 - DNA, 567 bp, Homo Sapiens
cataatagacaattgcagatagtgataagtgtgtaagacaaggataccacgagcgtaatagacagtggggatggaggaacctttagaaggttggttaagttgaatgataaggagccattcttttgtctttacctgaatgacttatcattcagccctttttgagttttgggttgcttgcagagtttaaccttgcctgtaattgaaacttaattttgtaatagcataacttcatgtaagaaaagcaaagcaatacattacagaattattttactgaagaacttgtttcagagaaagaggctgtttcacatttattagcacatttggattatatttaggtgttttatttttttttaaacaaaggagtttggatcataatacaagagaagcacagggcaaagacactgcataacctcaagaactaagaatggaaggactggccaggcctggtggtgcacacctgtaatcccagctactcaggaggctgaggcgagagaatcgcttgagcctggggggcagaggttgcagtgagctgagagaacggcgggcggcagagcgagactccatctc

SEQ ID NO: 236075 - DNA, 534 bp, Homo Sapiens
tttgaggcctctcctaaagtggggtccagccctgttttttttttaggtggggaaattgagaagggacggtgagctcaggttgctccagcagagccaaggcttaaagccagaaccactacaaagtttagagtttgctggagcaaacctctttttccccagtgtgaccccagctgcaccattgagcccttaatggggcgtccatcctttgtcactggagtgaagccttatagcaagcagagagtgaggccacagactcttgagatattctaggccattgcttcgaggtcgtatgtgagatatgaacgtaagaccatttgaacccccaaagtctgggattttaaccctcaagggcaatttgatactgagaggttaagggcacagacttctgaatcatttcctggctgtgttgccttgagtacattcaggagtccctctaagcctcagcttcctcacctggagaacctggagaggttgggaggatcccaggagatgatgccagtaaaaggcagatcacagaccctggcaggttctcag

SEQ ID NO: 236076 - DNA, 592 bp, Homo Sapiens
tagtgatgccaaccttgcaaataccataattggcaaagcagtggaacatatgtttgagggagagcatggttctaaggatgaatggagggggatggtcttagctcaagcacctatcatgaaagcctggttttatattacctatgagaaagatcctgtcttgtacatgtaccagcttctagatgattataaggaaggtgacctccgcatcatgccagaatccagtgagtctcctccaacagagagggagccaggaggagttgtagatggcctaataggtaagcatgtggaatataccaaagaagatggctccaaaaggatcggcatggtcattcaccaagtggaagccaaaccctctgtgtatttcatcaagtttgatgatgatttccatatctatgtctacgatttggtgaaaaagtcctaactgttagggtaaaatttggcacatgtgtggaaacaaatgtataatttgtagacatgcaaaaaatgttgcctttcagtgtattgaaagcttatggaatccctgataactaaacatctttgccagcattaactgttgttttgctctaaaaaatacaaacttgtgtgtacatga

SEQ ID NO: 236077 - DNA, 488 bp, Homo Sapiens
taatcattcagtttagtatacagtgaagaggaagtattggcatgaataatcaaaaaacaaaaaacatgctttgtaataccttaaattatccacatgtatcatctggataatcatttaacccttttccatactgcccagctttattccaggaaccacctccagctattaaaaaaggtttcagaaattcagagttatttttattcaggcaaagaagtaccaagtattgtgactagttagataaggggtggggggaagacagtagatggtggatcattaggcatattataagaataaaactagttttatagtgcctcatttttacttacccattcacatattttgcttacatttcgtagcatcatttaataatttacaaagaaagttgtattacattgtttagattttgtacatacaggttagctaggtttttagtaaagtgaccttgtgaatgttttagaagggcaagggaaattatgacccctggttag

SEQ ID NO: 236078 - DNA, 595 bp, Homo Sapiens
atgcatttttacaaaaacctttttgtagactgtagtttattgattagttcaagcccatcacgaactaattaaacatattgttggtaaaaacagagattgaaattactgtttttatcatatttaaatccctctggtgtatttattgaaatttaattaaaaatatttctacatattgatttgaagccaggatattgatggacctacagatttaacagctcttcaaagttttaactagcattataaaatggcctattcattatatgtatatttttttataaatatttatcaagaacatgaaaatattttattttgtatttgcagtgcagtttggcacctctcttccaggccttcctaagtttttgttagttgtgtcttcgaatttattgtagttcaccgctggtcagtaatctggttcataaggaagctggggcagtgaaaaacacttcgttgatccatccagccctaaagttcattgactaatagctcatgcatcttattaaatgggattctggacttctacaatagtgtggaaagccacatcacaaaaaaagccacatcacaaaaaaaagccagtgcctattgagtatatcaaacc

SEQ ID NO: 236079 - DNA, 599 bp, Homo Sapiens
attgtattgcagcatattgattttgccattcaatatggagaagacctagaatttaaagaaccaaaggaacgtgaagatgagtcttcctctatgtttgacgaatattttcaagaatgccaggatgaatgaagagtttactaaaagtaaccatctaaagagcttgtggccaaaccagcagaacattcttctcttcaaaggatgcaatagtagaaagctacttattttaatgaaaaaaagtaaaacttcgttctttatcagcctcatgcctgaatcaaatttttaattattctgaaactgctgctgtttaaagtggaatcttttagtattataacagcatcactttagattttgtaagtcaaaattgaaatgaatgcacatagatttatatataaattagcacctgagctaaggttaaggctggtctaaacttattttcactttttgtattatttttgagatgcaggaattactgtaacaaaatatgtatgtccgaagggaaaaagctgcaaggatatatataagaccactgcttatctgtatcttcccattttcctattgaaaatgtatattatttatataacttaaaaagtaaaaataac

SEQ ID NO: 236080 - DNA, 617 bp, Homo Sapiens
gagaagcaccatcacatctgtggacagaccctgcaggcccagcagcagggagacacacctgcagtcagctcctctgtcacgcccaacagcggggctgggagcccgatggacacaccaccagcagccactccgaggtcaaccaccccgggaaccccttccaccatagagacaacccctcgctagacgtgaactcagaactgtcggaggaaagacaacacaaccaacgcgaaaccaattcctcatcctcagatgctcaaagttgttttttttgtttgtttgtttattagatgaattatcctatttcagtacttcagcaagagagaacctaactgtatcttgaggtggtagtaaaacacagagggccagtaacgggtcgtaatgacttattgtggataacaaagatatcttttctttagagaactgaaaagagagcagagaatataacatgaaatgatagatttgacctcctccctgttattttcaagtagctgggattttaaactagatgacctcattaaccgatgctttaccaaacagcaaaccaagagattgctaattgctgttgaaagcaaaaatgctaatattaaaagtcacaatgttctttatatacaataatg

SEQ ID NO: 236081 - DNA, 439 bp, Homo Sapiens
cctgcctaatactagtgtgtttctataacttcagatgattcaaaagtttagtgcttcattgtagcaaaaaatgtatataactcataatatcctacatgtagtattcaaaatcaattattaataaccaataaaggactcaacacattttcattgcgtgttcttctttaagacacctaaactcatatctcataatttctgaatccgcaatccctattcattaattgattacagtttttgagttgttggaaagcctagccctctcagattcagggttcagaaagaattaccaggtctggtaaaattgtctgactagcccttagcctcagaatggtcaacttcatagtataagcaaagaaagtggtgatctcatatagtcagctttttcatgaacattaattcatggtgaatgcactcacagcaaccaaaatccaaaaaaaaa

SEQ ID NO: 236082 - DNA, 431 bp, Homo Sapiens
atttgtcttactctgtttatatttaggttattttatcacattgttgattcagatgaagtcagcacgaagattttaatggagtttaataaaatgaatcttcctggagaggttacttttctgcctcttaacaagttagatgtcagggatacagcctatcctgaaaccaatgtgagtcattgtgtgataaggtgtatttctcttttataatgttattttttatcacataatctaacacatgctagtgcccaggcactatacactgggattcagtggtgtatgagataaaaatatctgtcttcccatggaccttagtgctgagtgggttttggggagggagacagaagtcacagctatgattggtgtggtgatgcacgcctgtaatcccagctacttgggaggctgaagtgggaggatcatttaaaaaaaaaaaa

SEQ ID NO: 236083 - DNA, 420 bp, Homo Sapiens
tagccccagctgaaatgaaggccataccgcggccacagaacttggttcagtttcaaaggctaatgtagtccctgggttttctgctcaatgtgaattacgctgcctgtgccttagaggaagccgcggagctcttcgttgctgcaattgcctcaggtggaataagccttcctaaggaggaccagataagaatctttggaaatggctttttttttttttttttttttttttaaagaagcttagtagtacaccatgctttctgtttactttaaacggttgctggattgtactgccctgggtgtctaaaagtctggtgtttttttctttcttcctttgagtagttctgaatagcattgaagaagcttaaaacaggaagaaaacctgccttttcaatcaagtttatttatagctactcccccctcc

SEQ ID NO: 236084 - DNA, 359 bp, Homo Sapiens
gcctggcccttgcctataggcggcattttgaaatgtctttgtggccgggtgtggtggctcatgcctgtaatcccagtactttgggaggctgagggaagtggatcacagggtcgggagtacgagaccagcctgcttaatattgtgaaaccctgtctctactaaaaaaaaaaaaatacgaagagcagccagccatggtgactggtgcctgtggtcccggctgctcgggaggctgaggcaggagaattggttgaattcgggaggtggaggttgcagtgagccagggtctgccactgcactccagcctgggtgatagagtgagactccatctcaaaaaacaaaaacaaaacaaaaaaaaaaaa

SEQ ID NO: 236085 - DNA, 391 bp, Homo Sapiens
gcagattctggaactccatctccctgagattgtcactcatggggtctgcaggaagtttcaggaatctgcattttcttctaataaacgtggtccacaggttataagttgagatacaaatagaatatataaagtaaaaaaggaaaatttgaagtttcctgcctagcccaactcttctcattggtagtgtctgttaaattggaaacatatctctttccagacatattaataccttttatacagttgactcttgaaccacattagtttgaactgcgtgagtacacttatatgtggatttttttcagtaaatggaatatttttggcgatggcaacaattttgtgaaaaacctcacagatgagtcgcttagccaagaaatatggaaaaaaaaaaaca

SEQ ID NO: 236086 - DNA, 476 bp, Homo Sapiens
ctaacccaagtcctttacggaaacaagtgagttatcaggaaatatacatttaagagcaacaatatacttcgtgttagatgcagttattttcagtacttgcaaaagccagtaaactgtgattcttagagtgaatcaaactcatatctaccaaatgaaaacataaccctgaagtatatatgtgtgcatgcatatttatatttgtatgtatgtgaagtataattttctcttaaaatcattcaccttataagctgccataaattttctaacactagatacttgtaatttttaaataaatattttatatacgtgtatgtgtttgtgtgtgtgtgtttattcacccaggcattagaattgataactaaaaagcatgcagagccataaaaaacattttttgcaagtgtgaaataatatggcttgactgccaatgttactatttttggcaaaaattttctgaaatatttgtatcatcttagctg

SEQ ID NO: 236087 - DNA, 446 bp, Homo Sapiens
ggtggtaagtacaggaaaaggagcaatgtctaccattttctttctaaccttcgatttaactattgtaatgttgtaagcttaacagagacttacacttaggcttaatttcaagctcttcaatcatttttcccggttggtgattcaggtgtattctcatgtcttatgtaaacttatcatgagtgttgttgatttataatatatttctttatgtaagccatagccttgtcagtttgagttatatggaagacaaattgtagggaaaaagagcaacagattactcagaaaccttctgtgtgagctgggcatagtagtgcactccagtaggcttagctacttgggaggctgaggcaggaggatcacttgatcccattagtttgaggctgcagtgagctatgattgtgtcactgtactccaatctggacaacagtgagactatgtctgttttt

SEQ ID NO: 236088 - DNA, 442 bp, Homo Sapiens
gataagttatttccttcttccagctcagtattctcatctgtaaaataggaataataagtactctgtacaattcctgtgaagattaattgaatacttaattggcatgtagttgcactgagtcaaaagtatgtattctgtacaattcctatgaaaatttgttgagacacttaagtgccgtgtaattgcactgtctcaatgagttgcagtgagtcaatgagctgcttttattattttctttttaaagaaggaacaatttgaaaaatacaagtagaaaattattaactttggtaatattagagatttggtgcagaaaaagaaaaccagaaatttcaataccattaatatcagaagcccagataattacttgtaaagtgttttaatgctctcaggccaagagtttgagattagcccaggcaacatggcaagaccgccatctccgatt

SEQ ID NO: 236089 - DNA, 487 bp, Homo Sapiens
gcagcattccttatatccttataatctaataatctttatctgttcttatttattttatgtatgttcttctaaccttgcaccccacaaggacatggactctattgacacactatccctagcactcagaagaatgcctgacacatagaagttgatttgcaaatgtttgttgaaagaataagtgattgaatgaatgaatagaaactattttcttatctatgtgccaatagtagccaggtagaaaatataatggtgatgaaaagagattgataggaacaaaaattattaaaaagagcctaggagtaaactttaaaaatacgtaggacctacattcattcattgactcagcagtctatatcaagcacttaactctgccaggcactatgattttaaggataaataaggcaaacatgatccttgcttgttttgaacttagaaaaatacaaaacttatacctgggagacacagggatgaagacatcatttctcct

SEQ ID NO: 236090 - DNA, 472 bp, Homo Sapiens
tggaaaacctgtgctgtggggttttcctcagattacacacacgtgcacacgtgtttatatcaggtgctgaaaaaaagataattaatttagatatttaccaggaattctttcagaagcatttttaatgagtcatatttgcactgcacaattctttttgcttcatttttatatagttgaaggcagtaaggaattcttgtacaagtaaacatcttttccttttgtacccctcatcactgcgaatttgatagaacccttagtaaatgaccaggttgttttttacacttttttttctctcccacaacgtaacatgggtttggcaagctttaaaaaatgttagtatgtttgtatccactagtatacctctgaccatttaataggagatccctgccaattagagctagtgatgttttgttctaatttggagagacagggtgtgtctgtctttaaattctctgtcagttttcctttttgt

SEQ ID NO: 236091 - DNA, 422 bp, Homo Sapiens
gagatagaatttgctcttgctattcatttcaagaaattggtgatcttgcaccagccggcttgtttttgaaagatgtttttcttggcatccatgcaaactaacgatatgaactgtatcaaacccagagtggcgtgggccttccttgtactgccttctgacttcttcagctgctatgtctgtacttgccctcctatgtgccctgagctctgccctctgactgagaagatctagaatttgactgtcctctttaggccagagctatcattactcatataaatgatattctttttgagatagctttctcctttcctcttcatttggcatcaaaactaataaatgatgaaactaacttcctttccagtaattagaacctttctctttttctcttttttgtctctcttttcctgagtgaaggcagtgtg

SEQ ID NO: 236092 - DNA, 464 bp, Homo Sapiens
  misc_feature (264)..(264): n is a, c, g, or t
aaatacagctttggtgccacctgcgtgaagaagtgtccccgtaattatgtggtgacagatcacgggctcgtgcgtccgagcctgtggggccgacagctatgagatggaggaagacggcgtccgcaagtgtaagaagtgcgaaggccttgccgcaaagtgtgtaacggaataggtattggtgaatttaaagactcactctccataaatgctacgaatattaaacacttcaaaaactgcacctccatcagtggcgatctccacatncctccggtggcatttaggggtgactccttcacacatactcctcctctggatccacaggaactggatattctgaaaaccgtaaaggaaatcacaggtttgagctgaattatcacatgaatataaatgggaaatcagtgttttagagagagaacttttcgacatatttcctgttcccttggaataaaaacatttcttctgaa

SEQ ID NO: 236093 - DNA, 460 bp, Homo Sapiens
gcgtgggtgtgagtgtgcctgtgtgtgtgctcgtacagcagttgttatcatgatgtacttactggctgtctaccgatggctttcctttcattctactattttttggttgacttctgtgagctgtgagtcatcggtggtaacattatgcattgaatggattagctggtacctaaaaatagccgaggccctcatgcaggcggcacatgagcctgtagagtcagtccctttgcagccaaggcagacccacttgccaacattgaacatgccgagcttggtggcgatgaatcctaatgtatcaaaaaatagatagttggtgactgccctgtgtgcagagcccagccctggatttgtgccgcagttgttggtaatacacacttcctgtctgttctggtgctggaaaggctccaacagagaaactatgtcaaaccacatttttgtttgtgggtctttgtacctctct

SEQ ID NO: 236094 - DNA, 458 bp, Homo Sapiens
gatcatctcacttaatcatcccagcaactctttaagggtaggccaagcagtgcaatgccacccctgttgtgaggatgaatcatctgatttttggagaggttgagcaactggtaggtgcacagccgggttctcgcactgcaaaaccacaggcccctttggtggacagagattccgaggattggatagtccattgggtccatggcccattaccagaatcacgtgagaggcatgtaaaatgcagattcctgggctccaccccaatcacaggagtaccacagcaatcaccaaactataactgagctcccaatttttgtacagtcatgagctaagaattatttgtacatataaacgttgcagtcaatttgatggtatggaacactctttgaatcccaatgacttgaaatgttattctcccaaaaaataagaaatccacttgtctcgttaacagatctcgttac

SEQ ID NO: 236095 - DNA, 468 bp, Homo Sapiens
actattgtgaataatcttgctaggtacatgggtggacaaatatctgtctgactccccgctttcaactctagaaagctttcttttaaaatcggtctatttaagtttctttaaaaagttaatttaagaaaaatactaaggtaaattgtagaacaggtgatatgtcaatatgaccccaaaaattgtaaagatggaagacgaatgcctgcagtttgggaaaccggatgagaggaaagacctggaagctattgtaaaatctatgctgagggtctggtgactactagaccaagggcatggcagcagagggcagctgaaagacttcaggaaggaaagatataagaattaagaaaggggcctggtgcagtggctcatgcctgtaattccatcaccttgggaggtcaaggcaggatgatggcttgagaccaggagttcaagaccagcctgggcaacagagcaagacctttttttagg

SEQ ID NO: 236096 - DNA, 404 bp, Homo Sapiens
gatttccagaaactctgacccttctaagaggtctgggtggaattgtgatggtgattctgctagtagacagtgtaacttctgcgtctacaaaaagaggataggccgtcactgctcacatggctttgcgtgaaagcccaatggtactgtctctatggcagagatgaggaaggaacaccagcgtcctccaactttcctgttcttcctttgggttaatggccactgtaaggaaacagttttctgccacgtgtggggtgatttgaatgtaaaatgcccaactctcatagcaggctgaacagaaacattttttatactcattgttaatttgttctaatctaaattacttttagactattaaatattattctattttaaagttaagggactaatgcctctgataacctgat

SEQ ID NO: 236097 - DNA, 468 bp, Homo Sapiens
agcagatgatttcccatccattgctgaaacccgggctgccccattgtacaacctcagggaataccattttcacgtgactttcctggagcacagcagtgtgactggtgctccctggagctgggcagcacactggcctggctatcccagtattactccccgtactttgctgcatctgctcaatgctgcatttcattccctatcttggttaatggtcccatcaaaaccagaaacctgggagccatccttgattccctccttttcctcactttcctttccaagtctggttagttttctctgccgaaagtggacaacttaccttctctttttcctcatatctaccaccctgatcccttcttgcccactgaaacaattgcaccagcctcctaattgatctcttagctatcgtcttccacatcactgctagagggactgatcagaagggcaattctgaccatgtcagtcgtcatt

SEQ ID NO: 236098 - DNA, 501 bp, Homo Sapiens
tgaactctgtttgtgaaatgaaagagactatgcatctgcgcgtaaccatcacaatcgtgtttctgttttggccttaccagtgaaacatgtttcgcagaacagccaggtttttggagtgagatgaaaacgaactggaaacagttcctgatctatctaactgtcacctaattacaagcatttagcattctttatgaagtgtgcaatgaggcagatactttctgggaaaacaaaaatggggtctatcttattaggtcaggtttttgagacagacacatgagataaaggcttggtacagaaacgctggctataaaaagcaaaattagggcaccttggcatccagttggagtgaatagtttcagtgatgtaataagatactctggcacattctgtctgctagaaagggtgtatagaaattcaggtgtgcccctgctgatgtgatttttctgtcaggaccttgcaaaatggaaagatcgtcgaaaaagttacacttcagatctgcag

SEQ ID NO: 236099 - DNA, 470 bp, Homo Sapiens
gctcagactaaaaaacttgcctgccaataagagggagcagtgcttccagtgaaaatgtgaggcagtgcctggctttccctgctatactccaccctcctccactccctggactgcctgccaagaaagagaagggtgagcaatagagaaggaagtgaatcactagcacttcacaagtgctgctgcagaggcctgccatagagagctggctgagacctaggtgctctcctgctgatctgagagggcagaaaaataaataaatagaaatgtcaaaaagaggacagcagcagtgtagggaagggaggcagagaggaacaaccccgggcaggaggagtgtgggtcaaatgtgagaaccaataccctccttccgtagctaaagttgttcccccatcagcctcagtttccaacatctatgaggcattcacaggaggaataactggtgtgttaaaatccaccaaccacttatatacagg

SEQ ID NO: 236100 - DNA, 533 bp, Homo Sapiens
aaagtgtgctccctcagtcattcattctgcccatgaccagtgacaccaccttggaaaatgcaggtcacaccagtcaccaccatcaaaaacgcatttcaggcttctgtacatttaattttcttcaacattaccttggaaaccacagtaaatcaataacagaatagttaaataccacaggttctttgtgttttgttttagaaaatattgctcaaggctaagagtgagttctattgatgatttttatttgctgctgggatgcaaaacaatcagaattttcgaagagtttgcttcctttttgtgcatttccttttttaaaaaaggaggggtctgtttcagatggaaaacattggtcgctaatagcagaaacttgagaataattggtaattttcaatcctatagaaaactagactaggtctgatgactttgacctttgttacgctcttcttcctaattttcccctgccagctccctgcactcctgaccctcagcagcccattccactgagggtcgggtaactctggaacatcacagct

SEQ ID NO: 236101 - DNA, 502 bp, Homo Sapiens
gcaaatctgctcttatgcctaaacagttaggagtagaggagacttggcttcctttggaaagtcaggatgatagcttcatcccattctggtttttgtgattaattgtgacctacaaaggggtttactactctagcaggaactttgaatttcctatatacatctctttctggttagcaggcagaggaaatatcgttgacttttggcttcctggcaaatgtctcatttgccttgtcatttgttgattccttttccctgatctctgtttggtgtgataatgtacagcaaagctgaaaaccgcagggctacatgtacacttgtaggtacctatgttgtgattgccaaaaggctcagaaagccagttttctagtgaaaatggctaacattctaagaaatgctttcactgagaaagagaacgggtcaggggaaggtggaacttaaaggaagatggagtgttcctgaattcagattcctgaattagccatttatagtttcatgggaagac

SEQ ID NO: 236102 - DNA, 592 bp, Homo Sapiens
atcggagttgatgctgcttcctgtcctgaccctgtgggtctgtgttccctgataattttacacaacactgaggcgggaagaacgtaaattccaggaatgcatttatggttaatctgttgttgaggtttagtcagacagccagtgttttataaaccaagcctcccatgaaattgggctggaggaagagggatctaatagagcagataattaccacttgctctccattaactcagcccttgtgcccgggacacttttccttttggccagcaaaattggagtggctttgtcatgtttacagggagcctgcctgttggctattagagagggacagaaagaatctgcatatagaaaccctgaaagaatacacactaggcaactaataaaaatggtcgggaacctgagcagcatagtgagaccctttctctaaaacaatttttaaaaacttagccaggcatggaggcacacactaggtcccagctactccggaggctgaagtgggaggatcccttgaacctaggagtttgaggttgcagtgagctgtgatcgcaccactacactacagcttgggcaacagagtgagacccagactctt

SEQ ID NO: 236103 - DNA, 600 bp, Homo Sapiens
  misc_feature (51)..(51): n is a, c, g, or t
  misc_feature (97)..(97): n is a, c, g, or t
tcaggcagacagcttccagtgactgacatgacgctgccagcctcctaaaanaggccaaagctcagctctgcaagattgagaagagtaagagtcttanacaagccgaccagcccaaagcacagggtcaagaaagtgactcatcagagacctctgtgcgaggaccccggattaaacatgtctgcagaagagcagctgttcccttggccgaaaacgagctgtgtttcctgatgacatgcccaccctgagtgccttaccatgcgaagaacgagaaaagattttgtcttccatggggaatgatgacaagtcatcaattgctggctcagaagatgctgaacctcttgctccacccatcaaaccaattaaacctgtcactagaaacaaggcaccccaggaacctccagtaaagaaaggacgtcgatcgaggcggtgtgggcagtgtcccggctgccaggtgcctgaggactgtggtgtttgtactaattgcttagataagcccaagtttggtggtcgcaatataaagaagcagtgctgcaagatgagaaaatgtcagaatctacaatggatgccttccaaagcctacctgcagaagcaactaaactt

SEQ ID NO: 236104 - DNA, 595 bp, Homo Sapiens
gcagctaataaagagctgaacttggccactttgttgtgcccaggatacaaactgctgttaatttcagtacctgtttcttctgctgttagaactaggaagaaaggatttagtgaccctctttcaaaaggtggatcacaagcttagaggcattgctggataaattcaacagcaagactttatttcttccccagaggtgacgtctgatggttctgtataaataaagtcacaccacctttcttatgctgaattgatgctgctgacctgctgttagtaggacatgcacttttatggcgtttccaggagtggtgatgtgtgttgctgagctcatctaatctctgctttgagcaaaggcaatcctctatatcatggcagggattagaggtatagcctggggctgcagaatggtgtgatttaaattttcccatgcaggttcaaagcttgtaactttgcctgcgtgtacatccacactgggttccagccacatgaactgggccaccttcatagacctccctggtaaccacagcctgacgtgacaaggaatcacagttttactttctgcttactatccatgttagaaatctctgaggaaattcag

SEQ ID NO: 236105 - DNA, 446 bp, Homo Sapiens
gactaagtgattctttgcgcactgtctcacctcaggaatgagccatgcgagtgcgcttaaggcagcggctgtgttggaagcatgttatgacgctgcaccgagagcccagcccgttaccatgaggtcctcgtggtacttcactaattaactctctttggatcagatccagaaaaagaccagccctaaacttaatttcactagtaggaaaggttgttgtaaagaagttccattgtagtttgattttcttaacggggcctttgaaattaaactcttctgtagtcatgattttccaggtaaaagtaagagtgttagttcagctatgcttgaggaaccttagaaacaaaaattaaaccccaggctttttacttacctttttcatatgtcttttcttaaagtgtgtgtatgtttgtgtgtgggggtgtttaaatgaataataatataaattt

SEQ ID NO: 236106 - DNA, 473 bp, Homo Sapiens
tcctaatgtaggatttttaattctcttattggtgtattttccacttgtctatctttaccaaaggagcatcagtgatttttagtggatttcacaaaggagtaataggacagcttccttgtcctgtttttttctttaaaaactacaacccaataatgatgagtgaggctgttgtaatttttggaaacatgataatgggttgttgcaaatatattgaaagttaggggctgtgtgcagtggcttacacctgtaattccagccttttgggagtccaggtcaggtggattgcttcagctcaggagttcaaggtcagcctgaccaatatggtgaaatcctgtttctactaaaactacaaaaactaggtgggcatggtggcacaggtgagaggatcacttgagcctgggaggtcaaggctgcaaggagccaagattgtaccactgtactccagcctgggtgacagagcaatatcttgtctc

SEQ ID NO: 236107 - DNA, 555 bp, Homo Sapiens
gatgatattccatgtgatgaatatttccttgatggttaaacctcaggattgttctctctggccaatgagaatactctggggctattttctgtcacccttagtaaacaggacatccgcttatggaatataagcaacaaatccaaattacgcatctatggggtgaacagtaagattccaaagcaagctatgaatgattcggattacctgtgctactgttttgcaacaaagacatataaaaccatagagcctgctgctagttctgaagtgctatacagaaatgctgtaagtaacacttgataaggatgtactttctgttgtacataaaagtaacccattccacttaccaggttgggatcatagtaggattcctgagttggtggaatattatttagctgcgtgatatcagcaggaagcatttttgagcaatttattagcatgtgttccagacctgtcaaatcctaacaaagaaaaagatgataaatctgttatgcgcattgtaagtaatgactgtggttttaaaaataaaaattaagtgaaagcttcaaaaaaaaaaaa

SEQ ID NO: 236108 - DNA, 511 bp, Homo Sapiens
tggaggtatgcagtgagccgagatggcacacaatgcactccagcctgggcaaacaagtcaagactctgtctccaaaacaataaaaaacaagaaatttcccgtgggcggggcacagtgactcatgcctgtagtaatcccagcacttttggaggccaaggtgggcagatcccctgagctcaggagtccaacctgggcaacatggtgaaacccctgtctctacaaaaaataaaaaaatgagtccagtgtggtggtgtgcacctgtggtcccagctactctggaggctgaggtgggaagaccacctaagccccaggaggtcgaggctgcagtgagccatgattgcaccactgcactccagcctgggcaacagagtgagatccagtctcaaaaaaaaaaaattccccctttcctcaatccccaccccacccaaccaccatatgcctgtgacccactgaggcttgcatactctgcattgcaattatgtgttattcttgattaaattcatttattctg

SEQ ID NO: 236109 - DNA, 546 bp, Homo Sapiens
ggcacgagtgaaaatatgtgggacccttttctacaacacagacttcaagaatggtggaattacactaaaattaatcaatggatatccttcagtagtgaatgcagaaaataaaaatacacaggtatacctaaaggcacttttattgagaatgagaagaactttagatgatgatgtatttatgcccttatatcccaaaaatgtcttagaaaataaaaattctgggccttacttgttttttcaacgacagttttggtcttcagttaaggtcataaaacccccattccagagagggtcctgccccatacccagaaggaaagaatgctgctcagagaggccaagaagaatctggacggacaggccttgtgttgtcttctcttgagcagtagatcatacctttttgtccagtcatgtttctgcatgcctgtacatatttcgttaaacctaaacatagtagacaatttctcctccatctttgggtcttcattctgaaggctgtcatgttacataaaactgtgatcaaataaatttatatgccttttctcctgt

SEQ ID NO: 236110 - DNA, 790 bp, Homo Sapiens
gatcaaatttttgcctctcatctgcacaaagtgtgtgaacgtgaaaattccacagttccgtgttttgtaaagcaatgcattgaagctgtgagaaaagaggtctagatgtggatgcaatatatcgagttagtggcaatctgcaaacaatacagaagttaagatttattgtcaaccaagaagagaagctgaatttggacgacagccagtgggaggacatccacgttgtcaccggagcactgaagatgtttttccgggagctgcctgagccgctcttcccttacagtttctttgagcagtttgtggaagcgatcaaaaagcaagacaacaacacaagaattgaagctgtaaaatctcttgtacaaaaactccctccgccaaatcgtgacaccatgaaagtcctctttggacatctaactaagatagtgccaaagcctccaagaacctcatgtccacgcaaagcttggggattgtatttggacctacccttctgcgagctgaaaatgaaacaggaaacatggcgatccacatggtctaccagaaccagatagctgagctcatgctgagtgagtacagtaagatcttcggctcagaggaagactgacagacaagacaagctactgaatacgttcacatctgtcttgatgcctaatatttttacatttctgtaaacatatttctgaaatattttttgcctttcaagcgacagatgcctcattttgtgaaaacttaatgatgattttgtgtttaagttccaaacatttgaataaaataattgacaataaaaaaaaaa

SEQ ID NO: 236111 - DNA, 315 bp, Homo Sapiens
cgagtaggggactgtgctgtgctgatgtcctgagccaccctgcctggttgagtgtgttgacctgggttgggggaaaaagccttggaatcagatttaaactgcagttcctcccaggttgtcatgttgtgtgactgcagaggacaaagcttcactccccaaaagtcgggccgggatggagcgcagtcgtcacgcctgtaatcccagcactttgggaggctgaggcaggaggatcgcttgagcctgggcagttgaggctgcagtgagccatgatcgcgccactgcactccagcctgggcaacagcgagacccagtctc

SEQ ID NO: 236112 - DNA, 560 bp, Homo Sapiens
tgatttctagtgtgttttgtacagtatataactacaagatagtacattttgtagcagttcaaagccaaagttgctagcatcattttgctgttgtgccagttaatcataggatcccattaaataagtgtgctaacatcgaatatagagaaaactggtaaagaacattccagtaggaaaagaaaagaacaatcttccatttctgggcttggccaccatcaccctggtcggacctgtcctggacttccaaccttgactgctgagctcctggcttagcttcttgggttcctaattcctggtgtttaataattctctccacgatcatgtttttctgattttttttttcagaaataatgttttttaaaagacaaaaacaaagggaagaatatttaattactgagcagaagtaaatactgttggtattttgtacataatctaatttttatatgcatgtttatgctttttaatttttttatcaaaaattaagtcatctacctactacttgtaaccagcttgtttcataacatgttattttcctgtgtcattaaataattacttcaaaa

SEQ ID NO: 236113 - DNA, 580 bp, Homo Sapiens
ttctactagtcattcaaaaaaataataattcaagtctacacaaactttcctgagattagaaaaaataaagaagagtccccccacctgtttcttactttatgagaccacacctaaaagatagaagactgctttgcaaccaagaaatccttcatgaacacctctttaatcacaagtcctcaactccaaggttagctttatttcaacttttataatacttttcttacttttcttgatagctttaccacccatgtattcattcctaaaaaatacacagttttgtctgattttgaattttatgtgaatggaattgtacatatctgtgtttgtgtcttccttgttttactcaatactgtttctgagatcaatcatattatttgttaatattttgtttaggatttttgcatctctatttcagtgtgtgtttggaatgtaaatttccattctcagactatcttttggcctgaatttggttacatgagtatatgttctaaaaatattacttacactttcaataaattttaaggacttttatattgttatgtatcaaattttttagaatgcaagaataaatattataaaa

SEQ ID NO: 236114 - DNA, 595 bp, Homo Sapiens
tcatcccgtgaacgccgtggtgccagccgtagcccctcaccccagagccgccgcctgtcccgagtggctcctgacaggagcagtaatggcagcagccggggcagtagtgaagaggggccctctgggttgcctggcccctgggccttcccaccagctgtgcctcgaagcctgggcctgttgcccgccttgcgcctagagactgtagaccctggtggtggtggctcctggggacctgatcgggaggccctggcgcccaacagcctgtctcctagtccccagggccatcgggggctggaggaagggggcctggggccctgagggtggggtaggcagatgggccaaggtgaccaccattctgcctcaatcttttgcaagcccacctgcctctctcctgctgctcctccagctgtatctgcacctgcctctctgtcctggccaggggtggacaactggggtcccccaaaactcagtcctggcacctcaactgtgacaatcagcaaagccccacccaggcccccatctgggatgatgggagagctctggcagatgtcccaatcctggaggtcatccattaggaattaaattctccagcctc

SEQ ID NO: 236115 - DNA, 580 bp, Homo Sapiens
ccagcgaggtagcattaccacatccacacagggcttttaccataaccgccccagtactggaacgaggagctgcagatgatgagggacctacccaacaagaaccaacctgagcagctgcttcaagaaaaagccatgttcaaggtgcctgaatcccctggtaagtgagtgacagcctcacagcctcaggcccacctggctcctgctggaaggttttcttgtgctcgggagagaagtgagggaagccggcagtcccagccctgtcaggtgccctgaaggcccgtcaggtttgccctgcaaggccttctagcattctgcttcctgggagaccatcccccacctttctccggcctctgagactttgagtccttgggaggagaaggccctccttgctatctgggctgagtggccagggccatccagcttcccaccctccactgactgccatggggccctcccctgagcacatggtgcccaactgtagcccttctagggcaggggctcattggcagcacttgcagcttgctggcacttaaaagtcattagtgcggttactgagagaaatgaggaaaaaataattgtt

SEQ ID NO: 236116 - DNA, 470 bp, Homo Sapiens
gtgcttggggattgaaattcagaccaggcaattccaatacatcagtgcatgtggaggacatgagtatttaaggagaaggttctaggcttccgaagtaaaattggatgtggaggttggggattgattcaaacattaatactttcaagcgtttctatggtatttgtcagctgtggagcaacagcacacatctgtattaatagcctgtgttaagagattactgtgaatcctgaaaaacatcctcattgtagagatgagaaaacacaggcttttgcacatccaatgtctccttaaagcatgtggttcagaattgagaacgtgcagagtgagagtggtatgaattttcctgtaagctacctgaagttctgtttgctgtcatgtggaagaaaagagccttggagaagttttatttttttctgtttggaaagaatacacagagcaagatgatttacaataaaccttttgacctaaaa

SEQ ID NO: 236117 - DNA, 445 bp, Homo Sapiens
taatagcagaatatttcatggccgaactcttgatagtgacaaatcagtaaatacaaccaagaaaaagaaaatgaggggtcagagttgcaataccccaaatgaaaaataacagttttttcagggctttttggtaccagaactcaggcacttggattttatgaccttatactttttctgcatctctctaaaacttgtgttttcagaccatcctgtgtatagagcaggagagtttctactgcaagtgacaatcagaggtgactatctatatttgcacttaaaatcaaagtagttcaacatgcaaatgctagggtctagccctgggtaagggccatgctggtgtactgtgttgtgatgatggaagcagtaaatcaaaattatggaaatttgcactgttgaaaagcatgctttagctttattttcaattaaaaacactgtttgggaaaaa

SEQ ID NO: 236118 - DNA, 531 bp, Homo Sapiens
cgcccgccaccacgcctggctaacttttttgtatttttggtggagacgggttttcaccgtgttggccaggatggtcttgatctcttgaccttgtgatccacctgcctcatcatcccaaagtgctgggattacaggcgtgagccactgcgcccagcatgttagacaatttttaattcatcctctctgtgctgttgttttctcagctgtgaaaggaatattctggtggggacaaggttacagagttgctgagagggtctcatgacatgaaggtactggccttggcacagtgcctgggggggcggggactccgcacatgcctgtgatgtcacagttactgtcagttcacagtgaaccttccctccttttcctgttgactttcccacactcctgtaaccctccctccctcccttcttcctctctctctctctcactcacgcacacgcacacacacacacacacacacacacacacactccattcactgtctccatgactctggagtaaactaacgtctcgagttgcaaaaaaaaa

SEQ ID NO: 236119 - DNA, 435 bp, Homo Sapiens
gggtgtgccgtcttctctttgcatagaatcttgagctgatgatggttttgtgggttttttattaagagaaaaggcttactgaacgctttatatgcatcaattcatgagtccgtaccacagcctatgagatgttacactcatttcacagatggagaaactgaggccagaagaggtgagcttaccatcccaaggcatctagtgaccagaggggcagccagggtgtgatcctgcctcatctgacttcgtagttgggtacacatttaacttccgccttcctgtgtgtgttttccaagagcatcattaaaaagttttggccgggtgcggtggtcacgcgtgtaatcccagcactttgggaggccgacgtgagtagatcacctgaggtcaggatttcgagaccagcctggccaacatggcaaaactctgtctctactaaaa

SEQ ID NO: 236120 - DNA, 551 bp, Homo Sapiens
acgaagccccgcagggagtggatactcgacagccttcggcctccgctcgcttctccctgcgcgctttcctgctcccctttccggctacagccctggggtcgagctctggtcgaagcgcattccgcctctcctttggccctgcggcttcctttgcaacccgccgcccacccttgctctccgtggtttacccctgggctctgaggcctggtggtagcggccactgccgcggattggctgttgcggacccggggcggggcaggtgggagaggctcgttctccgcgggtttcgttgtgtttcgcgccatgtcgtttgctgagagcgggtggcggtcggctctgcggcgccgcggtcccggcaccccgggccctgtggctcggccatcgtattcctcctttactcagggggacagctggggtgaaggcgaagtcgacgaggaggagggatgcgaccaagtggcccgcgacctgcgggcggagttctcggctggggcgtggtcagagcccagaaagcgctcggtgctcccgccggacgggaacgggtcgcccgttct

SEQ ID NO: 236121 - DNA, 562 bp, Homo Sapiens
tcttcttggttaatcttgctaatggtctatcagtgttatttaccttttcaaagcagcagctttttgtttcatttatctttccttttttttttttttggtttcaatttcatttagttctgctctgatcttcattatttcttttcttctgctgggtttgggtttgggtggttcttgtttctccagttctgtgaggtatggccttagattgtctatttgtgctctttcagactttttgatataggcatttaatgctatgaactttccacttagcactacttttgctgtatcccagaggttttgataggttgtgccactattattgttcagttcaaagaatttttcaatttctatcttgacttccttgttgacccaacgatcactcaggagcaggttatttaatttccatatttgcatggttttgtggcttccttttggagttcatttccaattttattccactgtggtctgagagagtacttgatataatttaggttttcttaaatttactgagacttgttgtgtggcctatcatatggtctattttggagaacatttcatgtgc

SEQ ID NO: 236122 - DNA, 678 bp, Homo Sapiens
  misc_feature (47)..(47): n is a, c, g, or t
gaccagcgcttatcacattcccaattcagtgagaaaaattcatctgngacacaacagggtctcttctctgtttgcccagaatcagctctggattttaagcccagacttcagtggacccagatagaaaatataaagtctctgatctataggccacatcaggatgttattttatgaagagttctagagcaaggttgcggaaatcggggtggagatggggagcagtgactcctccaaatattcattgctaacaggccattctatgcagtttgttttaacaaatcctgggttaaactgaggccacaggacatgatgggctgttctataaagcattctaagtggagaggagacgatagggcatatgaaattcactaaactctctggaaaaaaaatatgtatatattaaaaaccaagactggaatcagtgcaacagtgggaactaccttttacaagtatccattgcttcataaactccatttgtttggaccaatcccttaaacaaaagcaaggcaaattttacatggatttagagcctaggtcaggttattaggattataaattttccactggtatgtcattgtgattatctttgtttttgtctttctgaaagattggattttctataacaccttgtgtaagaaaataaaaaacttgatctaactgaaaaaaaaaaaaaaaaaa

SEQ ID NO: 236123 - DNA, 728 bp, Homo Sapiens
  misc_feature (62)..(62): n is a, c, g, or t
  misc_feature (123)..(123): n is a, c, g, or t
gaacacgtgagcacgtctcacctgatccggcctatggtggggagaagcagttgaggaagccnttctgggcaggaggaagttgttgctgaggctgccgagcaggatgtgttgggcctgtgactnaggcagaaagggcgctcaggcccaaatgctcagatgtgaggacctgcttgctgtgttcagggagccacaagtcacctggtcttagggaaaggtgaggggactggagagttctgaggaccttgaggtagattggcactgccaggcatgtaggctggctttagctcactgatacgccttgttcagcccagagaggttttctttttttaattgattagttgatttaagaaacatttagatttgggatgagctgttttggatgtttatcctcaatgaaactcatgttcaaacttaatctccaatgtggcagtactgagaggtggggcctctaagcgtggttgggattaacctgtcaatggattcatggattaaagggttatcaccggagtgggactggtgacttcattagaagaggaaggaagacctgagctggcctgtgaatatgctcggccccctggccatgtgacacctgcgccaccctcaggactctgcagagtccccagcagcaagaaggccctcaccaggtgcagcccctcaaccttggacttctcagcccccagggctgtaacaaataaattcttttttaaagtaaaaaaaaaaaaaaaaaa

SEQ ID NO: 236124 - DNA, 725 bp, Homo Sapiens
  misc_feature (49)..(49): n is a, c, g, or t
  misc_feature (77)..(77): n is a, c, g, or t
gaaagccagaagctaaacattgtcttgtcatgtgtttaggtggttgatntggagaaaatgattgtttagcatcttancagatggagaggacagagtcagtctccttcggataattccaatcgtcttccttttacaggtggataaagtagattaggacaagatcacacattctatctgtgtctgtggctgcatattttgcaaaaccagaaacaaaatcgcagactgccgtggtttagaccatttataatgtcaaaactgtaatgacaaatttctgttcacttttatgctaccagtatgactttataggggagaaggaaagccttttaattagccacctgggaattactcttttaaaaaatgccttttctcaaaagaacatgataccactccaagtaaatcattgccactaggggttttcctccttccttctgttgcccatgcccctgcctgaaagtgtagggtaagaggaaaaacaagtaaaaccttagtgttgatggtaaactgagaactctgtagcttaccttggattccagagcagaagactggtttacattcagtactcatccttattgacgttaacaccaggaatctccatgtttattatttttcgtggaaactccatgtttattatttttggtggtctctattgaccaatgtatttcaaacttttttgactgcaagtcataataaaaataactttttacatcaaaaaaaaaaaaaaaaaa

SEQ ID NO: 236125 - DNA, 752 bp, Homo Sapiens
tcaggagctacaaagaccacctggaagtcctgacatttcaccacaccgaccagggctgctatcccacctgcatggtctggtacccaccactcaccagggaactcttcctgcttatttgcaacagtggctaccaaagtgaagctttttaatgctactaccaaaatgtgcagaaagacgcttctggggccagcttatggttcccctattgagcagacacaagtcctcccagtgagaagcatggcggagctacagaaacgctacttggtgtttattaacagagacaaggtgggacttcagatcttaccagttgacggcaatccacataagacatctgctattgtttgccacccgaacggggtggccggcatggccgtttcctatgatggctgctacgccttcactgcgggagggcacgatcgctcggtggtgcagtggaaaatcaccttaagagtcacaccaagcctaggctggtcttgaactcatgggctcaagccttgggcacctaaagtgttgggattacagatgtgagccactgcacccagctagaaccttccttctgaaatgtttgtcttcttctcagtcgtcgtgggatctggaatggtagaaatttaagaagaagaaaaaaaggcctctgctttccaatagctttcgcctggcccagagtccaggcttctgagaatttcaatttaatctgtggtggggacaaaggatcattataaactaattatcacttcaaaaaaaaaaaaaaaaaa

SEQ ID NO: 236126 - DNA, 525 bp, Homo Sapiens
gtcacagctaacagatctgagggcaactgctgtgctagtggccagggctgcacctgccatccccggctctgccactttagggccttctagaggcagtgtccttaggaagtagctctgaggcatgggttttctgctcctgtgcagggcagctgatgggataaggtggggaaggacggtcagtgcttgggccccagctggccagcctggcgatggggaaaccaaaccatgtcccccagcgaagggccagagtgggaacctgtcctcatgcccttcgtcctgaggagccctgaggtgggcagcaggggccaggggaagttttcaggccttcatcaaagagaacaacatcctcagctccgcacccctcatcctgtatcagcacttaccggtgtgtgactgcccttgtcagctagcatacggtgggcccacctggcccactggctgtttatgccactgatttatgatagggaatattatctttgaacccaatgaagtgttttctcccccatcacaaaaaaaaaaaaaaaa

SEQ ID NO: 236127 - DNA, 733 bp, Homo Sapiens
  misc_feature (106)..(106): n is a, c, g, or t
atgtggggcctccctggagttctccacatgtaaatatagcgaaaaaagaaaacactacgttactagaataaacacgtcctaaaatttctgtgcaaaaacacctttntgaacagcaaagatttcacccaccaaaacaaggaagcaagaagcttccacagtgtgcaggatccgaaacaggaccggcccggcgttgggtgagagtgggggaggggttgtcggcttctccatccagcttgccatgttctgtcgtcggtttcacattttcagagagactttaccagatgcaggaaatgaggatgaaggcaactctggaaggatgcaaagaagggagagcaagcactgtacctactgtctgctgtctaagagggctggtctcataactaaaaggtccagtccctgagatcttgtgtgcaaccgtcagaaatagttcaggacatcaaattgcacagagaagattcagatgaagggaaacaagaactctgtggaaaactgttggggacagtggcacgagttgtcttgcaaggtgatgtctgtcccgtggagggacacaagagcgaggacagcatggttctaatggccagggcatgtcttcttattccatgtgacagtggctggctgagttgctagtacgtttttgaaatataccctttgaaatatgttgattattctggacatctgtaaggtgggagatttgaataaaaagacttctgctgtcaaaaaaaaaaaaaaaaaa

SEQ ID NO: 236128 - DNA, 595 bp, Homo Sapiens
tcctgaaattcaaaagttttggcagtgcccagcaggccctcaacattctcacaggcaaggactggaagctgaaaggcaggcatgccctaacccccaggcacctccatgcctggctcagaggcttaccacctgaatcaacaaggctcccagggcttcgtgttgtacctcccccctttgaacaggaggccttgcagactctgaaactggaccacccgaagatagcagcctggcgctggagccggaagattggaaagctctacaacagcttgtgcccgggcactctctgcctcatcctgctgccaggaaccaagagcactcatggttcactctctggtctaggactgatgggaataaaagaggaagaagaaagcgctggcccaggcctgtgttcgtgagtcggcctgccatgtttccatgtgccatttcttaccccttgtaggcaatggcaaagaatgtggtcaggctgtagcctccccaaccagcagacagttttatggaaacttggtatagcagctaaaagagtttagtttgtttatatggcatgtataagttttcaataaatgcctaaagttcaagcataaaaaaaaaaaaaaaa

SEQ ID NO: 236129 - DNA, 801 bp, Homo Sapiens
  misc_feature (83)..(83): n is a, c, g, or t
tacagatgtccattatgtatgcactctgctttagatatgaccaggtattggagacagctggatgatgaagtagcacagactcntatgccatcagaatatcagaacatgactgtgatattctctgcaatgactgtaatggacgatccactgttcagtttcatatattaggcatgaaatgtaagatttgtgaatcctataatactgctcaagctggaggacgtagaatttcactggatcagcaatgacgagcctacacagtactggagaacttggcattttctgatatagaaaaaggctttccttggtatcgtgttatcatgtgtcgtcatctatgcattagagttgatgtgttttgtactagtgtcacagcataaaatcatattacaagtacgtaaggattcagggtctcttgatagacttatcatagctctatattgaatgaaagccactgtgcttgtgttttgattggaaattcctttagtgtcagttttttggaagccaatgatgtttgccactgatacattcatagaagtgtattatattttcatgaagctttgctttaagtgacactacgcgtgcagttcatttctagttcttgatagaactgcacttaattttcagtagtagtcttgactttttaagggctgtgttatattaagttctcccttactgttaaaacctaattaaatatgctttagaattttctaagacagtcctctggatcctctaaatgtgaattttgatgtaataactgctaataaaattatattgaaactgttttttagaaaaaaaaaaaaaaaa

SEQ ID NO: 236130 - DNA, 699 bp, Homo Sapiens
tccccagccaccccaaccctacccagcccagcggcccccagggccccgctaccccccatacactactcccccacgaatgagacggcagcgttctgcccctgacctcaaggagagtggggcagctgtgtgagtcccacatcctgggcagagggcctggtggggccccttgctaggagaagggaagacgcccgagacgctgcttccccagaagtgctggggcagggaggcccaggagatgagagagaaggtccgagtaggtgatagaagacaagggggagaccgagccggaggctgaggaaaggaagagggcacggagttgccaggagcaaaccaaagtgaagagagagataggaagctgcctcggggccaccccttgcaaagggggtgtgtcccacaaacgctgctatgggtggggtggggggctggggtgctgcgtagccagtgtttgactttcttttcaagtgggggaaagtgggagaggactgagagtgaggcaagttctccccagcccctgtccgtctgtctgtctgtctgtggtggtttctgtttcttgggaggcatggtaggatcataagtcattcccctccccttccaggcctcctgctatatttgggggacctgactggtttggctggagtcccatgaggatgtgggccctttaataaaggatagcaaacagggaaaaaaaaaaaaaaaaaa

SEQ ID NO: 236131 - DNA, 680 bp, Homo Sapiens
  misc_feature (30)..(30): n is a, c, g, or t
  misc_feature (35)..(35): n is a, c, g, or t
agaattcggcacgaggagatttttaaaatntgatntaaatgaagaaatggatttttctctctgcccctccctgccattcatattttctgcataacactattaataatatcaacctccacagccccttattttattatttccaataattccaagttcatatagaactgataatgtagcaagccccaagtatgataataggcagactattcccaactttctgtctagtttccagccattgaagtgaactgctaaaaaaagaaaaataattgaaatgttgagagagatggttatgtaagttagtcctctgctgtttacttctgcaggagctgatccatttataaatgcagttttaataaaccatggaataccaaggcacaacatatcaaacacattggatcccacgatgttagacatagccatatctcctttccctacaaaagaaaagcatactgttaaaatgtgcttaccaatactgtgttttattaataatcttcataagaaaagaaacactggatacttttttgttgttgattcgttttgaaaaattgttgttagagcaaaagtcttactgaatttgtatttttaaatttttcttgggttagtatttaaagtcttaacatttatttaataattatatttattaaaccatttttcaataaggtaaaaaaaaaaaaaaaaaa

SEQ ID NO: 236132 - DNA, 648 bp, Homo Sapiens
cgccgagtgtggcaaggccttccgccagcggcctacgctcacgcagcatctccgcgtacacacgggcgagaaaccctttgcctgccccgagtgtggccagcgcttcagccagcgcctcaagctcacgcgtcatcagaggacacacaccggcgaaaagccctaccactgcggtgagtgcggcctgggcttcacgcaggtctcgcggctcaccgagcaccagcgcatccacacgggcgaacggcccttcgcctgccccgagtgcggccagagctttcggcagcacgccaacctcacccagcaccggcgcatccacacgggtgaacggccctacgcatgccctgagtgtggcaaggccttccgccagcggcccacgctcacgcagcatctgcgcacccaccgacgagagaagcccttcgcctgccaggactgtggccgccgcttccaccagagcaccaagctcattcagcaccagcgcgtccacagcgccgagtagctccagccgggacgcactgtgtccgccatggtcagaacacctacctcccctggttattgtgaggctggcgattacataagtataagcaggtccgcccagggcttggctactgtaggtgtccaataaacagtagatggaaaaaaaaaaaaaaaaaa

SEQ ID NO: 236133 - DNA, 631 bp, Homo Sapiens
ggactgaagcctcaagctgcccggggtggcacgtcgcgaaagcttgtttccccacggtctggcttctgcaggggaaatttcaaggccactggcgtggaccatctgggtgtcctcagcccctgtggggcagccaagttcctgatagcacttgtgcctcagcccctcacctggccacctgccagggcacctgcaaccctagcaataccatgctcgctggagaggctcagctgcctgcttctcgcctgcctgtgtctgctgccgagaagcccgtgcccccgggagggctgccgcactgccaaagagtctccctcctcctggggaaggggctgccaacgaaccagactcagtgaccacgtcatgacagaacagcacatcctggccagcacccctggctggagtgggttaaagggacgagtctgccttcctggctgtgacacgggaccccttttctacagacctcatcactggatttgccaactagaattcgatttcctgtcataggaagctccttggaagaagggatggggggatgagatcatgtttacagacctgttttgtcatcctgctgccaagaagttttttaatcacttgaataaattgatataataaaaggaaaaaaaaaaaaaaaaaa

SEQ ID NO: 236134 - DNA, 672 bp, Homo Sapiens
gagaaaggaggagtttaaggctctccatcttggcctgcaggtggtgtgtcaagaaggatggtccgggcccctgttggctcagcgcctggtaccagcttccttgggtcagagccagcccgggataacagcctctttgtgcccaccccagtgcagagaggggccctggtcctcatccatggagaagtggtacacaagagcaagcagaacctctctgaccgctcgcgccaggcctacactttccacctcatggaggcctctggcaccacctggagcccggagaactggctccagccaacagctgaactgccctttccccaactgtacacctaaaggctctcgcagggcaggagccctcgcccctcccgggtgaagctgtgggctgtaaacaccagtgccttgctcagcctcctggttgcaacagggaggtcttgtctcccctcctgggctttcctcctgccctgtgggcagcagcctaggctgggtcaggggcttccctaagatcttcacctctctgcctccctactgccccaacatagccttgaggaggcttctcagccaccaaagggttctggccccttctcactctcctctcctctcagatggaactctggttattatggtgttagttatcgaataaaaacgacttcagaatgcaaaaaaaaaaaaaaaaaa

SEQ ID NO: 236135 - DNA, 719 bp, Homo Sapiens
gagcaaggggtatgcctgttaggcagcatcttacgcccagtgttctcccagatattctgcctaacaggtttaagtaggagattaaatagtcagtttatctaaaccctctatttttccaaactagcttgagaggtcttttcatctatttttactccatgggcctctgatatgctgagatgtggcacggttatgattatggtatcaccgttacagaggcaaagggataaaggtctaccagggccaacgtaaccagaatgtgaggagagtgaagagtcggtctccgctttgcacagtaccagaatgtgaggttgccactggagagtggagagtcggtctccactttgcacagttggagctgttctcctctaactcctttgctgggttttctgtttgaaattggcccctactcctctccagccctttactgggttttctgtttgaaattggcccctactcctctccagtgtctgctttttgaatccttctgttcgtgtgtgtgtgtgtgtgtgtgtgtgtgttccctatgatactggcagtggcaataattttccacccagagagaagcttgtggtccacaatgctcgaagaatgaatttccaagtatttgccagtggaaacggagcagaggctatgacaagagtgatttagtgttgcactttcagagcaattatctactgcagtaataaattgaaaatatcagcaagaaaaaaaaaaaaaaa

SEQ ID NO: 236136 - DNA, 702 bp, Homo Sapiens
caagaattcggcacgaggtatataagtctaataaatacagaagtagttatgagcaaatagatttttattgcctgcaagctgttatactggagcaggagaatatggtatcttgacggaagcacacttgctaccccacacctggggattacttatagttgaaagaagaaatgttgagaatggaacaaagacacaaacccattggataatctagtctatatttgggtttggcaatcctttcatcccaggaatatacctgtagaccaattcaaagtactaagaaccaagattaaagattttatacacatcacaataatagcaaattaagtacaaaacgaacctggcacataaattataatttgtaaggtacacaccattttaacaaggatacgacagtgttggtgcagtggtccgaactgacttctcacaatgctgcattatgagaaatatgtatctcgctttacacagaaaacatcattttgatgtgattacagaaaaatgctcaaatcttctttaaaaaaaaaagttcatgttctgatcacaagcagagccaaggttcatttttaggtcaaactacacaaaagaggatgctcttctccaaaaaaacaaacaaacaaacaaaaaaaggaaacaaaaaaaccccaaaatcttggcatttccccttttactctacattcaggcttactttttaaaaaaaaaaaaaaa

SEQ ID NO: 236137 - DNA, 588 bp, Homo Sapiens
ggcacgaggaggattgaaagttgtaaattcctcatatcactacagtgacgattattctagaaatcgttgcttgtgtagcaaagaccaaataaatagatttcagacacaaccttgagcacagttgattttggacagctgctgtttattaggaaagggctccaggtggcaaaggtgcacacttcctcagacacaggtgagaagatgcagcaccttccacaggtgaatgggacggattcgaagtgagcaaagggattcacaaattatgtatttatttgttttcatagttaagtagctgaagctcagaggctttcagcaacagagatgaaagtgtggctttttagttttgtgaatggatgatcacaaagaaaaagcatttttaaaaagttggcaaacgctgaaacgcactgtggtatgaagcgcattgcatttccatagcactgaagtaccagtttccattcctgggctgagattgtttttcccgtggttgtattgttctgatttcacgtacaccagagtaactgatttttttttgtttgttttcttgtggagttaacaccaaataaaaattgtaaaaaacaaaaaaaaaaa

SEQ ID NO: 236138 - DNA, 675 bp, Homo Sapiens
  misc_feature (72)..(72): n is a, c, g, or t
ggcacgagcctcttgcaatggtctgaccacagcaaatcacccaacctctctgtgcctgagtttccccctctntaaattggggatgataatagtacccactaaaggatcctggctctcaccacacacttgttcatgggcgcagcaaagaagagggatccacagagctggagccatgagggctgacacattggaatgaaagctggcagaattcgtagggagagctttcccatcctgccagccccatgtctggctttaagacagttctattagtgaattaactgttctcaaaaccccaaattaatttgaaccgaatgttactaaaaatgaaatagaataaagtgacctactcttgcctcatccggagttattacgaaggagctccgcagcctgactgagctctggagagcagggctctgtgcacacgcctcctggtccagaggcctccgtgaccatccatgatgccactctgtcccctcagcaagctgcctttttcttcctagcacctgccccagcggtggtatgttttccagtcagttaccacctgtctcatcagaatggaagctccatgagagcagggcctttgtcttgtccccttgtatctccagtgcataggacagtgctgacacagtgcagagtctaaataaacgctgttgaacgaaaaaaaaaaaaaaaaaa

SEQ ID NO: 236139 - DNA, 681 bp, Homo Sapiens
accacaggcaactggagaggaatgctgaaaacttcaaaagctgaagagtattagcagaagaaaaatcaaaacccattccaattatgccagccagtccacaaaaaggtcatgccgtgaacctgctagatgtgccagttcctgttgcacgaaaactatctgctcgggaacagcgagattgtgaggttattgaacgactcattaaatcatattttctcattgtcagaaagaatattcaagacagtgtgccaaaggcagtaatgcattttttggttaatcatgtgaaagacactcttcagagtgagctagtaggccagctgtataaatcatccttattggatgatcttctgacagaatctgaggacatggcacagcgcaggaaagaagcagctgatatgctaaaggcattacaaggagccagtcaaattattgctgaaatccgggagactcatctttggtgaagagaactatgtaatactgagactttgttgactcaaaacttgctagttactgcctacctgagtagaatcttatttatgaactcctgtgtattgcaatggtatgaatctgctcatgtggagactggctataaactgaaaagtgtattccaaattgcagaacacatcacacatttaatccaaataataaatggctgtttctaaagttaaaaaaaaaaaaaaaaaa

SEQ ID NO: 236140 - DNA, 733 bp, Homo Sapiens
  misc_feature (87)..(87): n is a, c, g, or t
gagagactggacctaggtgagggtgacctgaataaagtggctgatgcctgcttgattaccctcagtgtcaaacagcccgtgaaatancaagaggctgccaggagcgtcttcctccacttgatgaaggtgacccagactccacctggttcctcctgaacgagctttactgccccgtgcagttcacacctccccaccccagcctccaccctgtgcagctgcacggggccagcgggcagcagaacccctacacgaccaacgtgctccagctgctcaaggagctgcagtgaccctgctcccccaccacagaggccaccgatccctcccctactgccagccagaagctgggctgaccccaccccggccataggcggtggcagcggcagcagagaaggtgaattagttagccaatcgatttataaattgatcgatcacacaactgcttagaaatggattgaaggaaagtagctgactattatttatgtttcataccttgtgttttcaagtgacattgtctggtggctctaagggtttaaccccttagcctaccatctctatagccccagctccctcacaggccacacacacacacacacaagaggtcagttcccctccatctgcatacacctccctgtcttcaaataatgagatggaactaatttgttttacctaacctgatctttgggaaacaaacggaaataaagacacttcttggatgaaaaaaaaaaaaaaaaaa

SEQ ID NO: 236141 - DNA, 660 bp, Homo Sapiens
gtggggattgccgcttggcttcaagtatccggaaccctgtgcattgctttgacttggcttctctggaccctagggtcactgtgtgtgacatggcccaggttcctctggaggatgagtctgtggatgtggctgtgttttgcctttcactgatgggaaccaacatcagggacttcctagaggaggcaaatagagtactgaagccagggggtctcctgaaagtggctgaggtcagcagccgctttgaggatgttcgaacctttctgcgggctgtgaccaagctaggcttcaagattgtctccaaggacctgaccaacagccatttcttcttgtttgatttccaaaagactgggccccctctggtagggcccaaggctcagctttcaggcctgcagcttcagccatgtctctacaagcgcaggtgacctctggatcttccttgaaaggggaggcagatctcaaactccaggctcagaactgtgaagactgtttccagcctggctgtgagccaagacctggttcctggtggaccctgaggacaaagtgtgataaaacctctggctcagacttgctctactgaaggcttcttggttataagatgcataaagtcactggggctagctaaacaataaagagtttattgtgagaaaaaaaaaaaaaaaa

SEQ ID NO: 236142 - DNA, 615 bp, Homo Sapiens
ggaaggttccgccagcgacctcccagcccctgggtccgtggaggggttggtcccccagcagagcccctgggccagcagaacagcactcctgggcggctcctgtgggcttcaggactggccggctccagccgcaagggcgatgctgtggacgtttgtgtggatggtgcagtgttcttggaatctgtagaccagatcggtggaggtatagaagtgcaagagtctaaaggctgattttacacacacacacacacacacacacacacacacaaaatcactgctgtgtgttttcttccgcctgaggcatcagcgtcacctcggtgtggtcgtcgcctcccaggcccttggcctggcctcctctcagtttgggttttgccctcacccacatgagcccccccatgccctgccccccttgcggccttttgtgttccccgatgtctgggctgtgtccctgccgggattcccagccttcggggtcagccgtcgagccacttgctttgctcagttctgtgtttcagccacatttccacggtggaccctgtttgttttaaatattctgttcccatgtcaatcagtgacgataaatacagccttgatttgaaaaaaaaaaaaaaaaaa

SEQ ID NO: 236143 - DNA, 708 bp, Homo Sapiens
  misc_feature (14)..(14): n is a, c, g, or t
agccgcccagtccntagaaggctggacagaggtctccagggcccttctgactttgttgcccagtggccaacgcccgagtgtctgttttcaggagccccaggtcaagccttgtcccttcctgctcccagcaacagtcccaacaagcaggcttctgagagcccgtggccgcacactggccgccacggaaaagcagtcttctgcacgggacggggagcggcaagtggacagactttgccacggtgctctgctgccccctcctgggcacgtccaggtgagggagggctggggctggcaccacgcacagtgcctaaccctagaaaagccatgtcttcagccgcacatgctcaggcagctaagggaggacgcctgcccacgcctgggacagaaggcttcactgctaatcacatcgtgcatctgtgtgtcctgggagctgcctgctcccggcccaccctttaggaggctctggctcaaacagcaatagggtcttcctcactgaccttggaggatgcctgtggccttgtgataaaatgtgggaaatcacagaaaacaccagaaacaacaactgccagcccggcctggccacaggtgaggtctgtgatttccgagcacgctccaccttgcactcaacttggccttttgattgcacaagcctttgttttcagtcctagtgaataaagttgtgttttctggaaaaaaaaaaaaaaaaaa

SEQ ID NO: 236144 - DNA, 515 bp, Homo Sapiens
tcttgggtgatgacagtaaaaataatggaataggcctgagagacaggaaaagggagaactgatgagactcagttactgatagggctaaagaggaggaaggacagggcaaggtggctcacgcctgtaatcccagcactttgggaggcaaggcaggaagatcacttgagcccaggaattcaagaccagcctgagcaacatgacaaaaccccatctctacaaaaaatacaaaaattaggctgggcgcagtggcccaggcctgtaatcccagcactttgggaggccgaggtgggtggatcacctgaggtcaggagttcgagaccagcctggccaacatggtgaaaccccatctctactaaaaatacaaaaattagccgggcgtggtggtgtgcgcctgtaatcccagctacttgggaggctgagacaggagaatcgcttgaacccgggaggcagaggttgcagtgagctgagatcgtgccattgcactccagcctggtgacagagcaaaacttggtctt

SEQ ID NO: 236145 - DNA, 474 bp, Homo Sapiens
tgagataagcagcttttttgtttcataaaagctctagtcatttttctgtgttgaaagtggaccacagtaatgttcatggatttgttggctgaagcacttccatgtggcttagaagcttagcagacacggcacctccgcctttgtgaactgtcattggccactctgcaaatcctggtggtgcagtagtttagaactgtgtagaaaagatctggttgtagaggacaggaggctgatccagaggcgtctagtcacttgcctgaatcacagctaaaaagcagcagacagaatgaggactcacagctcctgatttattttttccttttgtttaaagcccagtgtattgaactgggcagtcagcatggtatttactgttttatattgtccaggtaagaaacctggagcttattgggagcagaattacaaatataagcaatgccaaccttccctgcaccttagcattacctttaatagtgt

SEQ ID NO: 236146 - DNA, 569 bp, Homo Sapiens
tacggatggacctggccaagacgctccaggagctgagagtgcaggagaacccagggaggaggcccaggctctgctggagggcttcgagggtgagatggacatgaggcctggagatgaagatgcagacgtcctccgggaagagagccgggagtatgaccaggaggagttccgctatgacatggatgagggaaacattaattctgaagaagaagaaactagacagtcagacctccaggactaagatgaagtgagccgagaggagatcgtatcataagaatgcttctgtcgttagccgggtgcagtgctgtgtgtatctagttccagctacttgagaggctgaggcaggaggattgcttgagtccagaaagtggcagttgcagtgagtggagatcgcgccactgctctccagcctgggtggcagagcgagaccctgtctcaaaaaataaacaaaaacaaaatgcttctgtcagttaacaatctttattagagggtttttagtctttctttctcagctgtatgttaagttggttgacaaatgcaaataaacgtctttattatcctttctttct

SEQ ID NO: 236147 - DNA, 511 bp, Homo Sapiens
gatttttttaaaaaaatgaaaaaagaccctctgtgttgtgttcccttctacgatggttgtgttggtggctggggtttgggggtggggggtcctgacagttgagcagataaatgaccccaaaccaggtgctgaaagtcccaagctgtcacagggcccctgaccacctcagagagccaatctccactccgcgccccctccccgccggcccccgccaccccacaacccgccaggatttaatcttttatggatttttttttcagtttatagtttccaggaggaaagtcttgtaacgctttactttttctcttctttttttaaagtaaagtgagtgtcagtagatgtgttttttacagtctggattttaaaaaaagtggggcaggagagagggaaccagggaaagggctgtttagaaatacagtttgtggctctgagcgatgccaccggcttcctctacagagactgccagtttccctttttctttgcaaggtgtgtgtggttttaataaataact

SEQ ID NO: 236148 - DNA, 483 bp, Homo Sapiens
cttcctacataaaaactgggggcctctactagagaggactcagagctgtaatcatattttctttctttctttttgagatggagtctcgctctgtcgcccaggctggagtgcaatgccgcgatctcggctcactgcaatgccgcccgggttcaagcctcagctcctgcctcagcctcccgagtagctgggattacaggcgcccgccaccaagcccgtctaaatttttgtatttttagtagagacggggtttcaccatgttggtcaggctggtctctacctcccgacctcagatgatccacccgcctcggcctcccaaagtgctggggttacaggcgtgagccaccgcgcccggcctgtaatcatattttcaaaggtgcctttgactcttaaaaagtcaattgtttggggcaaccaactcgggtccccttcccaccctgtgtaagctttgttctttcgctcttcacaataaatcttgctgctgct

SEQ ID NO: 236149 - DNA, 476 bp, Homo Sapiens
atacttctgttgaaatgcttatcttaaaaaaaaaaggcaaattagccaagagaaagaaggactaactttcaacagcaacagtgaaagtcagaaattattaaaatgaaatctttaatgtgctgaaagaaaataactgcttacctagactctgcccagtgtagatatctttcacaaataagacgatataaagatattttcagataggtgtataacattcgtctaagtcaagatcgacaaacactgcctgttaaaataagacagaagctggaaacggaagataaacctgagagagaaagcatgactctggaatccacctgccatcagagctctctccagaccagtgctccttcccttcctcaccttcctgaatgcctcggcctggcacctgaactccccatcgctgctgccaccttcccccacccacttctttctctttcatgtgtgctacttcatcaattttttaaaagaaattctag

SEQ ID NO: 236150 - DNA, 605 bp, Homo Sapiens
gaaggggagatgtatgaagttcaaagtacagtgataatcatcattccatagttatgccacacttttatagcttttcaatatctcacacaatttgattgtaaaaataatgcttctattattgtgatgaatgcaattagtgcttcatgaaagttttccttgaatatgtatccatccttcttaaggataatccagctatgttcagctttacagaaagaatatagtagaaccacttataacattcagacagaacagtgatacgtgaatattttccttgagaagttagtgctgtttcagtttttctctgacggtatgccttatcaataaacaataaataatgagacacatgaccggttcctctctatcagcctccttctgaatctcttcattctgagagttctgcccataaagttagtcttgcatttatttcttcttcttgattcccaaggaatgattcagtagtacattctgtgaagaatgtaatacttggccaggcacagtggctcacgcctctaatcccagcacttcaagaggcggaggtgagaggattgcttgagcccaggagaccagcctgagcaataaagcaagcaagacctgtctctaccaaa

SEQ ID NO: 236151 - DNA, 616 bp, Homo Sapiens
ctcccaaagcattgggattacaggcatgagccaccacatccagcagaaaacataaaattctgtgtgtggcccacgctgtacttctactggccagcactggtacagatcaacttgccttaacaactaaaagaagaggaacagagagataggggcctgggaatgggaaacgtggatcagttcaacacatacaagccacacactctgtgccctggagctgccctggggaaatcaagtcacgtatataaacaaacagttcataacaatttcaggcaattctggacagtgtggaaagtattggttttaaaagtaatactacaaaagcagagagcaaaatgcccaacaagacagtaacaatcctacccgtttctggttttgttctatttgttttattataaagctctttctaatgggaaataaatgcctctagaatgaggtatgtgatgctaagtttgagaaatcaaaaagtttgtgttcaggcaaaagatgggtgactttttaattctattttcctttattcctatattgtttttagtatcaaaggagggagggatcgtccttcaattgcctcaaaattgaaggcagccaagtagatcatttttattttctcggacgcgtg

SEQ ID NO: 236152 - DNA, 550 bp, Homo Sapiens
tatttttagtagagatgggtgctgggattactgtgcccagcccatataaaatttttctaattgcacatttaaaaaaacataaaatgcaaaagacaaaaagagtttagggaaaaatactgcaatgtaactgacagatggttaatatccttaatggacaaagatgttaatatctctaatgtaatatccctaatgtacagtgtaactgacagactgttaatatccctaatgtacaatgtaatttgtacactgtttacaaattgatacgaaaaggaaaaatcaccctaaagaaaactggacaaaggatatgaacatttgcaaaagagaaaagccaaatggccaatagaccaaaacaatcctcaattgcacaaagtagtcagaaaaatacaaaattaaagacagcatcaacatccagcgctggaggggatttgccttaatgaacttaatgattttgctggtaggactaggaaactttataatcttttgggggaaggaatttggctatatctattcagtaatgaaacctgcagttaataataaaacttcaaaaaaa

SEQ ID NO: 236153 - DNA, 575 bp, Homo Sapiens
gccccggactttccgcggccagaggtgtgttttataggcagaagcaatgttggaaaatcatctctaatcaaggctttattttcactggcccctgaggttgaagtcagagtctccaaaaaaccaggacacacaaagaaaatgaattttttcaaagttggaaaacattttacagtggtggacatgccaggttatggctttagagcacctgaagattttgttgacatggtagagacctatctaaaagaacgaaggaacttgaagagaacatttttattagtggatagcgttgttggaattcaaaaaacagacaatattgccatagaaatgtgtgaagaatttgcattaccttatgtgattgtattaacaaaaattgacaaatcttccaagggacatcttttaaaacaagtgcttcagatccagaaatttgttaacatgaaaactcaaggatgttttcctcagttgtttcctgtaagtgctgtgaccttttctggaatccacctgttgagatgctttatagccagtgtaacaggaagtcttgactaatggttcccggtttagctgaagattcaaaaaaa

SEQ ID NO: 236154 - DNA, 492 bp, Homo Sapiens
tgattctgaagataaaactgaagtatttttcagagcaaatggcattatttctccatttttcctagtatgcccctttaatttgtcagtttgctgttagcactgttatatgctgccttagaaagacttttggttgaaggctgaatatgaggggaggggatatttatgactgtgttaatcttttttgatcattagctgaatattcaatatttgatatgtaaccatatagggatgtgttcgatataactatataggcaagggatatattgatttggccacatctatttgatttatggagggcaaatacctgtttcttttagatacagccattgccggggcattctaaaagttttctactaagataaagatgattgtgtatggctgggagcagttgctcatgcctgtaatcttagtactttgggaggctgaggcaggaggatcactcaaggccaggagtttgagaccagcctgggcaacgatgagacactgtctctc

SEQ ID NO: 236155 - DNA, 472 bp, Homo Sapiens
tcatacaaaactttggaaattcagtaaagaaaattcacacatattcccaacacccaacaacaattaactgttaacatcttgatctgtgcactagtctgtgattattagggtgttagtgataagtatgcataaatgtcaaagatgggaagaaagatgaaaaacaagaaatagttgtgtggttgttgtgggattatggttattttgtttcggtttccttgaaaggtcatcattctagtgttttggtagtccacctttactacatatatttccattatatatgaaatgtgttcattatagaaactttgaagttacagaaatgtagaagagaaactcacccatgttttcaccatccaaagagtgtggttaacatcttgatatattttcttcatcttgtttctgtgcacaggtttttggtttgttaatatggttgtggtcattctatctgtaatagtgtcaacaatgaaaataaagt

SEQ ID NO: 236156 - DNA, 571 bp, Homo Sapiens
tgatgtttgtgtcagttcatcattaagctaaactctgactttcataataaaagggataaacaaagcctaaatgctagttgtgggaatactaaagcagttttttaaaaaggaaatagtagtttcatgccctcacataccattaaaagatgaacaaacatggacaaatattcaaaactgcagtcattgaaaaatataattcacaataatttagacttcatattattgtatcataaaatattcagtggaccctgaaatgaagtcagttttattcatttagaattatatctattgtgtctgtgaaatgataaatcctaaatagagaaatttgaatggatggggtttttctgactaaaatgaaattttttttctgaataattcagtttagtgagtgcttatgatatacttgtctgcagtgatagagtcactatagattatttggttattttggaaaaaccaagggttttcttaaatcagggatgtccaatctttttgcatccctgggccatacttgaagaagaagaattgtctttggcctcacataaactacactaacaatagctgatgagctact

SEQ ID NO: 236157 - DNA, 527 bp, Homo Sapiens
ttcagaaataatgaagcatattcaatattttatttaaaatatttgtgagaacaaacttttgtaccataaataaaacaaattttagtctttttcttatgctctatttttgggatacagacgattattttatattgtcatattgtaaatcctataaaaatggtagataagtaaacatagataccaacatgggtatgtaattatgaataatatttggagatctttagtttaaattcttccataaaatagctttcagggccaggcgtggtagctcagacttctactccaagcactttgggtggctgacgcaggaggatcgcttgaggccaggacttcaggaccggcctgggcaacatagcaagacctaacttctaaaaaattaagataaattagcgggcatggtcgcacatgtagctactccagaggctggggggaggattgcttgggcccaggaatttgaatttacagtgagctatgattgtccactgcactccagcctgggccacagagtgagaacctgtctcttaaaa

SEQ ID NO: 236158 - DNA, 934 bp, Homo Sapiens
gacttccccgggtgggcgccccggaaagcctggcccttggctgttgcgggcccaccaggattttatgggttaagggtggcccgttcccccaaaacgggggcaagcccgccaggggtacgtggcccattttcgaatgtgaggaaggactgctgggaggaaagggcccccagctggaccaactccatcttcaggcctggcggcctgtgtggttcaccctggccccgcttccctgtttccctgagccgccccgcgggacccctgaccgcagccaggccgacccggactttgcctctgaggtgatgagtgtgtctgactgggaggagtttgacaactccagtgaggactaggctccctgtgcctggcatcagagggaagggaggctggggctgcagggcagtgaaacccacgcagcctaggccagagcactttactccaggcagggcccctgcccctgttggccacagcttatgggccctgccctctttcttcacaccagccccttggccagcctgccgcaggcatctcagggccatgcagatcccaggctgtggattacgtcactgcaggaactgcttctgaaaggctttggccttcctcagtgagccctggaggggttggccttctctcctccctgcctagatcagtccttctccaaaaggacctgggagctggcagcctgggcaggggggctgaggcacgtggtagccctctttctgtgaatggggtggggctgtgggggcagctggggttggaggatgagagctcctgaggggcagaggagcagagatgcatcagctcgcctgggactggctctgtgataaaaagacccctcccgctgggttttcagaccccatgttgttggtcaatgaaataaagcatcttacagaaaaaaaaaaaaaaaagggcggccgcccacgcgtccgcccacgcgtcc

SEQ ID NO: 236159 - DNA, 639 bp, Homo Sapiens
taccatagaattattatccagactggaatttttgtttgttagaacacccttcagttgcaatatgctaatcccactttacaaagaatataaaagctatattttgaagacttgagttatttcagaaaaaactacagccctttttgtcttacctgccttttactttcgtgtggatatgtgaagcattgggtcgggaactagctgtagaacacaactaaaaactcatgtcttttttcacagaataatgtgccagttttttgtagcaatgttatttctcttggaagcagaaatgctttgtaccagagcacctccaaactgcattgaggagaagttccagaaccatcccctttttccatttttatataatttataaagaaagattaaagccatgttgactattttacagccactggagttaactaacccttccttgtatctgtcttcccaggagagaatgaagcaaaacaggaatttggttttcttttgatgtccagttacaccatccattctgttaattttgaaaaaatataccctccctttagtttgttgggggatataaattattctcaggaagaatataatgaactgtacagttactttgacctattaaaaaggtgttaccagtaaaaaaaaaaaaaaaag

SEQ ID NO: 236160 - DNA, 664 bp, Homo Sapiens
tcacgtgataagtgctaaagtacagtttgtgaggctttttatttaaaatgggagagttgctggttgatatgaaatgatgaaatgactgaatatattaacaagctggattttcactgaagaccacaatttaattgttaattaaatttagtggttgcatttctgcagatgatgattttggaagctataccaggcatggttatgagttgttttcttgtaggttatgtattataagagactagtctacaaaccaagatttgtctagtaagaattgtcttttttatattgattggaaccattcaagtataaccagtatgttttaaaataatcattgttatgcataatgtttaggaacgggaaatggaagccaaaaaacgagccctggaagaagaaaaacgacgccgggaaatcctggaaaaacgattacaggaagaaactagccagaggcagaagttaatagaaaaggaagtaaaaataagggagagacaaagggcacaggttggtcggtcaatctgaatgcatatgggcaggttgccccctggtggcagttcctagaagacagctattctgtgtctgaggatgctttcctgggcactgagcattagcacttgacatgtaagggttaagagaagagtgtgcattcctgtgcaaaaaaaaaaaaaaaaag

SEQ ID NO: 236161 - DNA, 663 bp, Homo Sapiens
ttatttgttttccaagtagatgataatattcaaaagcaataatgtatatgatatctataaaggaagcaaaattaagtcatacactgattccactgtaaacaatctgtccagaattccagacaccttcagcaaactttttctgtaaaggcctgatagcaaatatttttgtggtgggttgaatttggcttatgggttatagtttgctgacacctagtttagagggtgtgtaaaactatcttcataactttgagatttttataaaattttacatgaaaatatactgataaattatatgcacatattttctaccagtagcattatagtggcatcatagaagaatatttaccaatgatggggaaactgtaaaactacagtatcaaggcatacaacttaaattccacttggaagattgtaaagtgtcaaagtattttaatgataatttaatttgggcttttgaaatgttcttctacaaatgaaaaagatgtttaaaaacgttacaagggaagctatgccttctgaagtctatccttagttgaaacagaaaataaacacaaaggtacaagatccttaaattattttgaaccacagaggttgaaattgttttgtgatcttcagcagaaataaaatctgtacatgattttcttttaaaaaaaaaaaaaaaag

SEQ ID NO: 236162 - DNA, 662 bp, Homo Sapiens
gatatatttgcatataaaaataaatgcacctgctctgggaactacttgtctttagttagtagaactgttttatttcaactaatctttacttcaaatgtcttattttttagaaaaagggtatctcatactcatttaatattttggcaaatttcttctttaaaaatgttacctgatgtaattcctgcgtgacatagctgaatttttaccctgccctaactctgcttatctttaagaaacaggatgcctgtgatgaaaagttccttttgtaaccagtccagaggagactggttacaaccacgatagctgaccaaacgactttaaaaagacctcagcctttttataatcttatttctgtgctaaataacgctcctgctagctccatgacagttgacaatcgccatgacagtgaccagaagaagccatgaaaggacaaaaaggaaggcagcactctggttttaggaagttcactgcccatttctgaaaaatccaggaatattcctccctttgcttgaatgtgaaacacctttattagaaaaattatattttaaccccctcactcctcattagttgaaaagttgatttgtgagccatactcctgcttctcaattcagtggcgattgaataaaacctgcagtgtttgtcactcaaaaaaaaaaaaaaag

SEQ ID NO: 236163 - DNA, 640 bp, Homo Sapiens
ctcttcctctagggcattgtaggcttgacttacctgggattagagtaataaagctatgatgctggtacaataatgaatgaggaagtaaaaatgggcaatgtcttcataaaatttactttcaaatctagatcagaagttcactcaagcctactgcaaaggcctgacactggttttgtctgtataaaactactctggctttttaccacactttcttcatcacagcttagtgttccctgcattctgatccttttgctcactaaagctcacttcaatctgtcaaaacatcaagggggaaaatccccaaaatgaaccgacgaataaacactcttaatgtgaacaatcatattcagaccagcctcttgtgcaaaaatacaagtcagtggattttttatccttacataactcaaatattgctatttttttcctgcctttactaaaatggcactttcgtttacatcaaccaattattttctacttgcttctaagtttctgagattgtatgctgtactggctattctttttgattaagctttacaatttccattccagaatatctggtctttgaccaactttatctaattttgtgaagaaatgtgctattaatccggacgcgtgggcggacgcgtgggcggacgcgtgg

SEQ ID NO: 236164 - DNA, 654 bp, Homo Sapiens
aaatgctgccactctcttccgtttgaaatttatcagttctacaggaagaaaaaatgtttatgaaaccaagaaaaactaaacaattttcatgttcactttaactaccaaatggcattcttacaaatggtctccaatgctttcaggcaccagcattatttcctcacatttgtattatctctgtgactgggacacatcagacatctattaactgtggtgatacagctatcactgtctttaagtggaaaacatcactgaatcaccaagcatcgtgagtgggagagcagcagcttatgacttggagaacacgttgatgagcagcctcactctcaccctctaggtaccagtgactgggaacagggctggagtatgggtggtggtgagccacatacttcaccaatggcttgtgaaaatgcttctcaaaagaagacataccaggttcatgcaaacaacgttcagcagcactagccattagggaaatgcaaattaaaaccacaatgagattacctcacacctgctagaatgcattttctcaaatagatgaaagatcagtgttagcaacaatgcagagaaaagtgaactcttctacaccgttgctgggaatgtaaattagtacagccaccatggaaaatggtatagaggttcccggacgcgtgg

SEQ ID NO: 236165 - DNA, 508 bp, Homo Sapiens
cttgtccagtaaagagaccgtacggtactgctgatggacgtcccaacacaatgccagatgcaaaaacttctttggtgattgcttttgataacactgagtggctaaaggtcttctttcacatctttgcccacctcaaatcctgaaggcaaggtctctggaatttgaggctgtgccctcacatgcctccaaggcaccaacaaagcaaaatgaagagtctgcactgcttatcagttgacccaacactcagtccacattggaggggaaggggtggtgggctgaggatgtcttcttcctgtccaggatgcaatatggtcaaggatgaaaggaaagagatgctgggagcaagtctgcattgaagatgtatttctgttgctttactaccaaccctggttataaatgatgaaactataatgggtctgtaatagctactttcccatatagctcttgtctgtacatacataaaattaaaaataatagaatacttccattactaaaaaaaaaaaaaaag

SEQ ID NO: 236166 - DNA, 542 bp, Homo Sapiens
caagtttgggtttttaaagacagcaagtctggtcattcagtttaaatgaatggttatactgtttttaatgaaataagccattttcttgttgttttcagtactacatagttggatttgtttgttctagtttctccagtttttgtcaacttattgtatggtaaaacatagattttttccccccaaacttctgttttataatatgtaatttttcatgaaaagaaagggctcagaaaaattaggatgtgattttggttggttttaaattactgtaagttttagattctaaggttcaagatttttaaaatttgatttaaatgaagaaatggatttttctctctgcccctccctgccattcatattttctgcataacactattaataatatcaacctccacagccccttattttattatttccaataattccaagttcatatagaactgataatgtagcaagccccaagtatgataataggcagactattcccaactttctgtctagtttccagccattgaagtgaactgctaaaaaaaaaaaaaaag

SEQ ID NO: 236167 - DNA, 697 bp, Homo Sapiens
cccttgtcatatattggaatcgtgttttttaggcaaatataacaatcctctactgcaggagagaaagtcttcttggtgatatgagaaatactggtgtgataatttcataaattattcaagtctgtggaaacactccagttcagagaagggtacctggatttgttttcagctttctcaattttcacatgcacgttaggctatctggttttgatagtgcgtgttttcttctattaagtgagatagctttctcaataattatatcagaaacagcagcagtgagtgactagagggcctctactggcctcaggcattttctaaaaaccggaattagctgtcaaattttgagaatacagagcttcccacggcctcccccatccctgcatttggtgtgcacctcacaatttcatgcaatttagtgacttgccaagctcctgcaggcatctgtgtttgtgctgaagatgtctgtctcctctgcggtgcaccgtgtcgtgtatcacagcatattggaatgggtctgtaggtaggaatagctgatttgttattcaggatggctttaacagccgctggaaggaacacaccatcttatggtagttgctcttccacacagctttgttctctgcatgggtgaggggtatctctggggtccatcaactattacatcatgatgcctgtgcaatatttacttgctcctcgtgcc

SEQ ID NO: 236168 - DNA, 491 bp, Homo Sapiens
ggctccctgcttcccccttccctctttccgaggaagggtcaacctattctctctcaaagccaacccctaggccaattgcctggatctcctcccctctcccttctttaaacgagcttgcctccctcctgccaagtttgagggcaaggctaagaaatgtcagccacggaaacaactctattatctggtgactttgggtaatgtgaatcagtgcctgaggacctttgctgtgtccttggtacagaaccatccacttgacctaactacctcccctggccgcgctctcgctcttctcttctttgttaagccaacaactatcaccctctcctactcttcttctccctgccccctggagggcactgtgtttggttgtgcaaatgtatttactatgcgtgtttccagcagttggcattaaagtgcctttttctaataaaatcagtttattatgacagtttaaaaaaaaaaaaaaaaaaaaaagaatgcggccgcaagct

SEQ ID NO: 236169 - DNA, 680 bp, Homo Sapiens
actgtgtgtgtatagagagataataaattcaaaattatgttctcatttttttccctggaactcaataactcatttcactggctctttatcgagagtactagaagttaaattaataaataatgcatttaatgaggcaacagcacttgaaagtttttcattcatcataagaactttatataaaggcattacattggcaaataaggtttggaagcagaagagcaaaaaaaagatattgttaaaatgaggcctccatgcaaaacacatacttccctcccatttatttaactttttttttctcctacctatggggaccaaagtgctttttccttcaggaagtggagatgcatggccatctccccctccctttttccttctcctgcttttctttccccatagaaagtaccttgaagtagcacagtccgtccttgcatgtgcacgagctatcatttgagtaaaagtatacatggagtaaaaatcatattaagcatcagattcaacttatattttctatttcatcttcttcctttcccttctcccaccttctactgggcataattatatcttaatcatatatggaaatgtgcaacatatggtatttgttaaatacgtttgtttttattgcagagcaaaaataaatcaaattagaagcaataaaaaaaaaaaaaaaaaaaaagaatgcg

SEQ ID NO: 236170 - DNA, 417 bp, Homo Sapiens
agaggtcgggtctgtttatttctttgccaccagggcttcacgcacacctaacctttagtgggtacttagtagatatttattgaatgtttggatgggtgaatgcattttggcacaaaaccttcacttctggactggaagatagattggatggagcagagacgggaggcagtgagaccaagtggagcgtcatacctcgccttggtaagggtctcccctgctgttggatttagcttccagttgtgtcatttcaaatgcccgtgatcctctactgtaacacacagatccgtcgtacaaattatgctttgtttgctgaaaagcctcctgaagctgaatgggtttactttggcatcagcggaggccatgattgagggcggagatgagacattggatcgctcttgtgtggcttcccctcgtgcc

SEQ ID NO: 236171 - DNA, 474 bp, Homo Sapiens
  misc_feature (29)..(30): n is a, c, g, or t
aatcctttttttttttttttttttttttnngccaaggctgttcaaggtttatttggttttcttctcagccaagggaggggacccgcagggcaggcgccggccccgtcagttccactcggttgtcaaaagacaaaccgggtctgtgttctcctggttggttagtgggttttgccagctccttggttggtgggtccgtggtgaaggaattgaaccgaattttctggaaactgttgatgtctgcaagtgagtgccgatcccctcctccattctcgatcttttcaagcgaagtctacctctgggcttagataagagcgatgaggcgctattttctttcatgcccgactccaggcgcccaggcccgcctgtagtggctccatctccagacaagcaacctgacccggcgacggcgcatcgagatcgcccacgcactctgcctgtccgagcgccagatcaagatctggttcccctcgtgcc

SEQ ID NO: 236172 - DNA, 547 bp, Homo Sapiens
ccatacaaaaaccaaagaatcaagatatcaaaccttttcaacttgatgtagggttcagaagatacatacattccaaataccacagtaagcattcatctgaaagtttgccggttggtctttctattaattaaaaaaattcaaaacagaatacagatttaactatgtacaatatttacaacttacagattttacaacgaaattatacagttaagtctgtcgtggaaatgttggcattttggtatataacacttcagaaatttcaaaaacaactttacctcaaaaacatgttacacaaattttccaaagtgctgtagctcactggctcattttatctcaacaatccagtttagcaatccaggtacccaaatcttgaggcatgaagtaaccgctatactactgagagacagcactttttatacaacagcagaggctgttagaaaccttgggtctttaaaaccctataacaatgcccctttcaccctccaatcctgagacaacaaatcctgtagttccccctcatcatcgctgtcagcattctcctcgtgcc

SEQ ID NO: 236173 - DNA, 536 bp, Homo Sapiens
ggcacgaggttttttttaactagttctgaaagtgtcaagaatagcttccctttccaccctacctaggttccctccttgctggcataaaggccaagcagtgaaatgaaccttgggttagagttatggtaggcaaaaagaaaaggagaatttaggaaataaatatgctataaacaaggtacagtacagtgagagttaacaatcctaggaatcctgcctgtcacaagctcccagttccctgtcattttatcttcatgattagaactgatcttccatttaactattacagaaagcagtaactattgcaactatctaatagttcacacaaaagaattaaaagcttaaaaataatttttaggaaacacaatattcaaaatctaaacacactgataaattattaagattaagattatttatgtgataaatgaaatctcctaccaatccatccagcctttaccagggaagaaaagcaattatttcatttcagatagaaatacaaaaaaaaaaaaaaaaaaaaaagaatgcggcggcaagcttat

SEQ ID NO: 236174 - DNA, 600 bp, Homo Sapiens
acagcttcccatcactcacactcgacaggtgcccagcaagcccattgaccacagcaccatcacttcttgggtatcacctgattttgatacagcagcaggaagcttgttcccagcctaccagaaacaccaaaaccaggcggcgacggaatcagtccccaatgcctggaaattcctcattggattactgtgttttaaacagaatttcgtgaacagccttttatctccaagcggaaagaaagatgtggaaagcttcagcaggccacgctgtgtccatcgcccaggatgacgcgggggccgatgactgggagaccgaccctgattttgtgaatgatgtgagtgagaaggagcaaagatggggtgccaagacggtgcagggctccgggcaccaggagcatatcaagtaagaggcgtcgccaccaccctcccgagggcccctctgcggatggagccccaggtgcaacagggcccatggtcatctgtggagggacagcccgtgtggaaactgcatttatcttcttgacctgatacccatgcagtaaatgaatataagacacacaaaaaaaaaaaaaaaaaaaaaaaagaatgcggcggcaagcttat

SEQ ID NO: 236175 - DNA, 691 bp, Homo Sapiens
acttatgatcgctgctgtcagcctgggcttctttggttccatatttgcgctctttggaatgaagtgtaccaaagtcggaggctccgataaagccaaagctaaaattgcttgtttggctgggattgtattcatactgtcagggctgtgctcaatgactggatgttccctatatgcaaacaaaatcacaacggaattctttgatcctctctttgttgagcaaaagtatgaattaggagccgctctgtttattggatgggcaggagcctcactgtgcataattggtggtgtcatattttgcttttcaatatctgacaacaacaaaacacccagatacacatacaacggggccacatctgtcatgtcttctcggacaaagtatcatggtggagaagattttaaaacaacaaacccttcaaaacagtttgataaaaatgcttatgtctaaaagagctcgctggcaagctgcctcttgagtttgttataaaagcgaactgttcacaaaatgatcccatcaaggccctcccataattaacactcaaaactatttttaaaatatgcatttgaagcatctgttgattgtatggatgtaagtgttcttacatagttagttatatactaatcattttctgttgtggctttctataaaaaataaacagtttatttacaggaaaaaaaaaaaaaaaaaagcatt

SEQ ID NO: 236176 - DNA, 680 bp, Homo Sapiens
tggcctcaccctcagtgaccttcctctgcacatgctgaacaacatcctataccggttctcagacggatgggacatcatcaccttaggccaggtgacccccacgttgtatatgcttagtgaagacagacagctgtggaagaagctttgtcagtaccattttgctgaaaagcagttttgtagacatttgatcctttcagaaaaaggtcatattgaatggaagttgatgtactttgcacttcagaaacattacccagcgaaggagcagtacggagacacactgcatttctgtcggcactgcagcattctcttttggaaggactcaggacacccctgcacggcggccgaccctgacagctgcttcacgcctgtgtctccgcagcacttcatcgacctcttcaagttttaagggctgcccctgccatccctattggagattgtgaatcctgctgtctgtgcagggctcatagtgagtgttctgtgaggtgggtggagactcctcggaagcccctgcttccagaaagcctgggaagaactgcccttctgcaaaggggggactgcatggttgcattttcatcactgaaagtcagaggccaaggaaatcatttctacttctttaaaaactccttctaagcatattaaaatgtgaaattttgcgtaaaaaaaaaaaaaaaaaaagcatt

SEQ ID NO: 236177 - DNA, 641 bp, Homo Sapiens
ggcacgagggtcatttctgagctttttacacctaaaattaggctgaaatagctgagataattaatttggaacctatcaatttgagtggactttttctttagtagtacaccattttggttgttgtagtttcaaagtctttctgaagcagatatattgggattggagcggggtggggaaaactgtcactcctttcagaggaaaaggggaggagcatggagaaaaacaaaaattaaaggacttaaagaatggctatacagtgttgagtgttgaggatattaaacatgttatttttcaaacgtatgtaatatatattaaatttataaagcaaatttatgttgtgatcttgcctgaacaaattatattttaatgaaaaaactttctattaatagttcacgcaagagaaaacactttcaacatagtcgaaggcttcaagatctaagtgtatcagacttagggaaaaagtggcacaaccttcgatttaaaattctagtctttaaaatgagtttgtaaataattagctattacgttctattaagttgttttatattttaattttctggaagacaattttattttacaacgtgaacccaaataaagtaacttctgtatttaaaaaaaaaaaaaaaaaaaaaaaaacactt

SEQ ID NO: 236178 - DNA, 514 bp, Homo Sapiens
ggcacgaggggcacttcttacaaggcagcagcaagagaaaatgaggaagaagccaaagcagaaccccctgagaaacccatcagttagtgagacttactcgctatcaggagaatagcacaggaaacacccgcccccatgattcaattacctcctcctaagtccctcccacaacgcatgggaattctgggagatacaattcaagttgagatttgggtgagggcacggccaaactatatcagaaagggatgaagtgacagcatatcctgatgtgtgtgatggtttcatgagttattatctatttcaaaatttattgcaatgtgtggaaaagaacaaggacttgtactatctgactttaaggtttactataagctattagacacaaggcatcaggagtgacaaacggataaacagcctgagttagaagacctgaaattgatccacagctatacggtcaataaatgggttttcaataaaagcagttcaataaaagaaaaaaaaaaaaaaaaaaacactt

SEQ ID NO: 236179 - DNA, 697 bp, Homo Sapiens
agaaaaaaaaacatgagggaataaaagaaattcctatcaaaaatcaaagtgaaataataccatccagcacttaactctcaggtcccaactaagtctggcctgagctaatttatttgagcgcagagtgtaaaatttaattcaaaatggtggctataatcactacagataaatttcatactcttttgtctttggagattccattgtggacagtaatacgcagttacagggtgtagtctgtttagattccgtagttcgtgggtatcagtttcggtagaggtgcagcatcgtgacacttttgctaacaggtaccacttctgatcaccctgtacatacatgagccgaaaggcacaatcactgtttcagatttaaaattattagtgtgtttgtttggtccagaaactgagacaatcacatgacagtcaccacgaggagagaaaatttaaaaaataaaaataaaaacaaaaaaaaattttaaaaattaaaaaaacaaaaataaagtctaataagaactttggtacaggaacttttttgtaatatacatgtatgaattgttcatcgagtttttatattaattttaatttgctgctaagcaaagactagggacaggcaaagataatttatggcaaagtgtttaaattgtttatacataaataaagtctctaaaacttctgtggaaaaaaaaaaaaaaaaaacactt

SEQ ID NO: 236180 - DNA, 575 bp, Homo Sapiens
aagtgttttttttttttttttttaacatttaaagcactcatatgcattttataagtggtctaaggtcatttagcataaaagcaaatagctccccgtgcccctactgttacaacttcagaagacactgctggagaaaagccattggtttctgtgaatgatcctcagttatgcagaaaattattatattgcagatatgctgaagacaagtgtaacattttagaatgacttccttccaaaatgagtatttttatttttttcagagggagggtctcaccctattgctcgggctggactgcagtggtgcgatcatggctcactgtaacctcaacctcccgggttgtgcacttgcccgtatccaggctccctcaggaatgggaggtcccatggaatggtgggacaagggtgagatttggaacgaagccatgccggctctaaatccaccacttggtagagactgggccagtcttctgatttccctaaagctcctcctgagcttgcaaaatggggtttatgatgcccatggcccagccctgttgtgtgggttcacttcaggtgatgaagaatctcctcgtgcc

SEQ ID NO: 236181 - DNA, 707 bp, Homo Sapiens
gagtgatacttaaatttaataagaggttcgtgaaggtagcttaacttgagaactcttggttttttgaaaggttgactgcacatgccaaaaacaactcctgctatctcagaattaattatctttgaccttcgtggaggatggtctctggttaaaatctggccaaagaaactcacataaacttggtgttagagaacatctagagagagagagaggaacttagagtcatttaaactcttcagtttacagagaaggatgctgaggacctagatgagaagttacctgcaaaaggcaaaagggttacttagtgtcagaaccaaggcaatgacttctctctcccagatctcctagctactggtcctgggccatttttttttttaaataatcccaacttttctttaaaagacaagcatttcagtaagctagttattttcatgggttgctcatccatttttttcagtgatctaaaaatgtagggagatggctactactgaagttgtctgtctacttgggataatagcaaattaattgaagacaatgggaaagtaagttataaaaaatactgggaaatctgtttctcttctgagcaagcattcagggcaggtataaacatcaaacatagtgacattgtcaaaacctcttccatttgaacattgattaattcatcaaataaatggtatagtaataaaaaaaaaaaaaaaaaaacactt

SEQ ID NO: 236182 - DNA, 662 bp, Homo Sapiens
agcacatggatgtttatagcagctttatctataattgccaaaactcaacccaaaatgtctttcagtaggtaaatgggtaaataaattgtggtgcatgtagtcattattcagtgcttaaatcaagctatgacaaattatgagttatcaagctataagaagtcacagaggaacttaaatgaatgctactaaatgaagccagtctgaaaaggcttcatattaaatgatgccaactatatgacactgggatgtattctggaaaaggcaaaactatggagacagtaaaaagcagtgggtgggggaggggagggaggaataattggagcacagaagatttttagggcagcgaaactactctgtatgatactataattataaatacctgtcattgtacatatgtccaaccccctaaaatgtacaacaccaagagtgaaccctaatgtaaactgtggactttgagtgataatgatgtgtcagtgtaggttcatcaattactgcaaatgtacctctttggtgggagatgttgaaaatggtggagactatgcatgtgtggggacaacaactatatgggaaatctctgtaccctctcaattttgctgtaaacctaaaattgctctaaaatataaagtctattaaaaccacaaaaaaaaaaaaaaaaaacactt

SEQ ID NO: 236183 - DNA, 589 bp, Homo Sapiens
cagcttgggtttcagtaaaaacatgcgacaagtttttggtgatgagaagaagtactggttgctacccattttttcaagtctaggtgatggctgctcctttccaacttgccttgttaaccaggatcctgaacaagcatctactcctgcagggctgaattccacagctaaaaatctcgaaaaccatcagtttcctgcaaagccattgagagagtcccagagccaccttcttactgattctcagtcttggacggagagcagcataaacccaggaaaatgcaaagctggtatgagcaatcctgcattaaccatggaaaatgagacttaactcttcaagcaagataaattcatactttataaaagtatcaatgctgtagatggatggaagaggcttcccacaggaaggtgccaccagtcagttgtgcctatgtccctttggctggaaatgcagaatatgaattgattagttctctccaagccattgcttaaaatataacatgttttggatccaatacacacattgttacaactaacacaaattcctattaaatattaaaagtaaaaaaaaaaaaaaaaaaaaaaaaaaacactt

SEQ ID NO: 236184 - DNA, 534 bp, Homo Sapiens
aagtgttttttttttttttttttcctaggtttggtcctttattttattcagcagtgaaagccatgaatacagaacgaataacagctgttacaattctcaaccatgacttctaacgtcagagaattcaaagtatgaacatagtacacagtaatgaaaagtatcaaaaattagtttacctcaaaaaagataaataaaacaggtatattccaccaatacataaacagatgtttgtgctacagtttaaaatttgctgtatacaaaagatcatagtccccataatcagcttatgatagaagcaagaatacatgagccatttaaattgtcagacattatgctttataaggtatgcacagaagttcaagcaataaatacatacattagttcaaagccttacaatagctacgcaaagcagatgcagaaaagcagatttgctattactagcaagcaatgatataagagtaaaaattcatgaaatgcattaaagcaacatttttcttagaaaaagtctggtcatttatgggtccacctcgtgcc

SEQ ID NO: 236185 - DNA, 572 bp, Homo Sapiens
cgggggcctggcctgggctccacgcagggccagtccattgcgctgcccgcgcaggggctcatcgagttccgtaacgctctggccaagctcatcgacgactacggagtggaggaggagccggccgagctgcccgagggcacctccttgactgtggacaacaagcgcttcttcttcgatgtgggctccaacaagtacggcgtgtttatgcgagtgagcgaggtgaagcccacctatcgcaactccatcaccgtgccctacaaggtgtgggccaagttcggacacaccttctgcaagtactcggaggagatgaagaagattcaagagaagcagagggagaagcgggctgcctgtgagcagcttcaccagcagcaacagcagcagcaggaggagaccgccgctgccaccctgctactgcagggtgaggaagaaggggaagaagattgatcaaactgaatgaaacccccacacacacacacatgcatacacacacacacacagccacacacacagaaaatatactgtaaagaaagagagaaaataaaaagttaaaaagttaaaaaaaacctcgtgcc

SEQ ID NO: 236186 - DNA, 599 bp, Homo Sapiens
tggatattaacaaagactcttcttgcgtctctgcttcaggtaacttcaacatctccgctgatgagcctataactgtgacacctcctgactcacaatcatatatctccgtcaattactctgtgagaatcaatgaaacatatttcaccaatgtcactgtgctaaatggttctgtcttcctcagtgtgatggagaaagcccagaaaatgaatgatactatatttggtttcacaatggaggagcgctcatgggggccctatatcacctgtattcagggcctatgtgccaacaataatgacagaacctactgggaacttctgagtggaggcgaaccactgagccaaggagctggtagttacgttgtccgcaatggagaaaacttggaggttcgctggagcaaatactaataagcccaaactttcctcagctgcataaaatccatttgcagtggagttccatgtttattgtccttatgccttcttcttcatttatcccagtacgagcaggagagttaataacctccccttctctctctacatgttcaataaaagttgttgaaagattaacaactatacaaaaaaaaaaaaaaaaaaaaaacactt

SEQ ID NO: 236187 - DNA, 676 bp, Homo Sapiens
gcagtagaatgacctaacatgtcgttttcattgcagtcattataggattgaaatacgttcaaaataacctctctaggaaagtcttctgctagaatttctcccctctattcattataatattctttgtttttaaagccagtcaaatataatagtcttaataagatcagaaactctccaggagagtgagtctaccctcacgtccttgtaggatgatcttgattatagtcttattataggactataactgtattctcaacatttctccagaaaggaccttgtaaaaaggtcttttgtaccacagtattggttttttcccctctctcttcacttaaaaaaaaaaatagcaaggcagaaatagtgtattgaaaagttgttcatctattatgaagtccttgagtggtgaaaaatccgttgtacatgagaacatttctatgcatttaagccagaaacgaggtacatggctgtgtgctcttctgtcaaccaatgaaatgtgttttcacatgtgtggcagtgcaagtaaataacacattatttgactgaatcaggcatgatactgcaccaaagtgttggtacatattcacggtagtaaatcagtacccctgttaaaggatttatcccattgcttcatattaataaaatggttacaatataaaaaaaaaaaaaaaaaaaaacactt

SEQ ID NO: 236188 - DNA, 624 bp, Homo Sapiens
tggatgggaaaaacatcaacacttgtggagccaagtaacaccagctggccttgtccaagggacagagccttctattctgagaatcccaggggccctcagaccctgcctgatgctatatgcagaggcccagggaccaggtgtgtttcctctcaccaagaagaaagtacacactgatgagaaactgagaaccaagacaggcatccctgggtggcctttcctgctgacactccacgagctgacccagcagaattctctgtgtaggaagcatcggactttgtccattgaatatgtagcggctgccagagatcacacatcaatgcaaattccagagcctgtctgctatagctcagtgactgtgttgtgattcatagtacattaaaaagagagagagagagaaagaatcccacagggcactattaaaatacttctctccttccctgactcatgacactcttcctgacagcagaatgactgtgtgaccttgaacttcacatttcccacattggcccttggattgttcggattaaccccttccactcctcactggctggttcactgtgttctgactagtccataaaaataaagatggaaggagatcaaaaaaaaaaaaaaaaaaaaaacact

SEQ ID NO: 236189 - DNA, 552 bp, Homo Sapiens
ggcacgaggtgagaaatctgattctgttcatgagtgggaggcaaaactggtttgaccgtgatcatttttgtggttttgaaaacaaatatacttgacccagtttccttagttttttcttcaactgtccataggaacgataagtatttgaaagcaacatcaaatctatacgtttaaagcagggcagttagcacaaatttgcaagtagaacttctattagcttatgccatagacatcacccaaccacttgtatgtgtgtgtgtatatataatatgcatatatagttaccgtgctaaaatggttaccagcaggttttgagagagaatgctgcatcagaaaagtgtcagttgccacctcattctccctgatttaggttcctgacactgattcctttctctctcgtttttgacccccattgggtgtatcttgtctatgtacagatattttgtaatatattaaatttttttctttcagtttataaaaatggaaagtggagattggaaaattaaattttccctgttactataccaaaaaaaaaaaaaaaaaaaaacactt

SEQ ID NO: 236190 - DNA, 601 bp, Homo Sapiens
tataatacgttttattcatctagtggtacttggtgctcacagggcactgtacaacaaattttaaaaatacaatatgaaaaaaatcaaacagccagagatcaattccattagagggcgatggcccacagaaaaaccaacaaaggcccacagaaaaacccaccctgtctccttaagaacatttctttgtttggctttaagaaacaccaaaagaaaatacaaaagaaaaggtctttgagaagataggtaaaacttcacatagcgtcttccacatatcacaaaatgctttccttatttaataataagcacataaaataatccaaatatctgtgagcctctatttggtcccaatgttttaggtcatagctttcactacttccctcctctctatcctcaaattatttgcatcagtaaaaaaagttaattaaggtgtaacagtctcctttgctccacaatgccactacaaagcctattttccataaagaaccagaggccaagcaaacgtaggctactaagtacttgaattgaaaatacaactaaaatttcctgagtcatttaacatcaaattttggctttgtaatctatttgtattcaacctcgtgcc

SEQ ID NO: 236191 - DNA, 619 bp, Homo Sapiens
ggcacgagggcagcattcactgcgtcattgtaacatgaagggataaaaatgaaggagaaggagggtttgggatgggtgtctaaggcaggagttgacatcgggcaaccaaagaaatgagttttggggaggaacacaactcccatcccagtcagtttccttcccatggctgcatcttaagatggatgcacggagaaaccgtctgcctggctccctgtcttcattctccacgcagcctggtgatggcaggcctgggtttggatttcagaatcctagctccgggctccactcgtgtggcagcaagactgcttcgttccagcgtttagaaacacacctgtatttgattctcagccaggggagcactcgctgcactggtgggaggcggttgggaaagttgcaggaaaaccttagtcttccatccttctgacccatggtggaaattcacaccatggatttttaatggatctttgttctaggcagctgggaatagacatggtacttaccttagagttttccaatttatctcaattttatatggcttgtgattcattttcttaatccaaatatatataaacgtgtgtggtcttaaaaaaaaaaaaaaaaaacactgcggccgcaagct

SEQ ID NO: 236192 - DNA, 699 bp, Homo Sapiens
ctgccctcagtgacagagtcagtctctggtgggcacacggacacgggtgaagtccacggttcccggccctcctcacagctggctatggcagagactggctttgcccagtgggtttcagtgggatttggagaagggcccttaggggaggggtttgccctcctccccatcagctgaacgcagctgtgacctctagagctcatgggagctgcagctggaaggacgcagggggaaaacagaaagagggaaaagcaaggagctggacacccaaccagcagggcccaggccacccctgcacacatggtgggtctgcattgataagacatgtcacacgtgcacacctacaaagacctagaaatgtctctgactcttacctgtgtgctgttaactcaaatgaagataaaggagaatgaagaggcctgtgtcagaagctgccgaagtcggcaaacaaccagaacacggcctccttgggaccccacacacgtggtcaccctcctcctgctgctggggagaagggacaccagcacgggatgggctcctgggatgaaatgttctggggttacagtggaggcagccacaccacactgtgaatgcactaaatgccactgaattttacgtgttaaaaggtgaattctgtgaatctgatgctatgtaagttgtatctcaataaaaaatggacaaaaaaaaaaaaaaaaaacactt

SEQ ID NO: 236193 - DNA, 668 bp, Homo Sapiens
atcaatggtaggaaaagttggaactggttacctggatgccatggttctctgttaaataaagtaagagaccaggtgtattctgagtgtcatcagtgttattttcagcatgctaataaatgtctttccggttatatatctatctaaattaacctttaaaatattggtttccttgataaaagcaccacttttgcttttgttagctgtaatattttttgtcatttagataagacctggtttggctctcaataaaagatgaagacagtagctctgtacagggatatatctatattagtcttcatctgatgaatgaagaaattttctcatattatgttcaagaaagtatttacttcctaaaaatagaattcccgattctgtctattttggttgaataccagaacaaatctttccgttgcaatcccagtaaaacgaaagaaaaggaatatcttacagactgttcatattagatgtatgtagactgttaatttgcaatttccccatatttcctgcctatcttacccagataactttctttgaaggtaaaagctgtgcaaaaggcatgagactcaggcctactctttgtttaaatgatggaaaaatataaattattttctaagtaataaaagtataaaaattatcattataaaaaaaaaaaaaaaaaaacacttgcg

SEQ ID NO: 236194 - DNA, 539 bp, Homo Sapiens
  misc_feature (472)..(472): n is a, c, g, or t
gtttttcagatacactgtgataagttcttttacaaatatctatagacatggtaaacttttggttttcagatatgcttaatgatagtcttactaaatgcagaaataagaataaactttctcaaattattaaaaatgcctacacagtaagtgtgaattgctgcaacaggtttgttctcaggagggtaagaactccaggtctaaacagctgacccagtgatggggaatttatccttgaccaatttatccttgaccaataacctaattgtctattcctgagttataaaagtccccatccttattagctctactggaattttcatacacgtaaatgcagaagttactaagtattaagtattactgagtattaagtagtaatctgtcagttattaaaatttgtaaaatctatttatgaaaggtcattaaaccagatcatgttcctttttttgtaatcaaggtgactaagaaaatcagnttgtgtaaataaaatcatgtatcataaaaaaaaaaaaaaaaaaacacttgcggccgcgagcttattc

SEQ ID NO: 236195 - DNA, 576 bp, Homo Sapiens
gagactaagccacatgagaaaaacagcaaaaatgaaatagtcatctctcttcagaaaagctctggaaaggacagttatttcctcttcaattctgatgaaagctattcccccccacccccggttgtttctgccaagaaaagatttcctaccatggtggctggaagcagtaattagactcctccctcaggatgctgccctcttactcagctgccctctcttactcagcagcgaagtcaagtcccaaattaactgacaggaggagccagtggtctcttctggggtttgtcacaatgaaccaaccttagatccccattgtaaggatctcactcattagaaaatgtttgaactggtttctaacagctgataatgatttatagagtatgttctgatgactttaaaatatggctggatctaatgttgtatttttcaatacagatgaagtttaagcagttggtcattttaaaaagaccagatttgaggagttggatgtgcaaattaattgaattatacaatgtgtgcaatattattttgaatggaaagttggatgttataaaactgaaaataaagaaaaaatac

SEQ ID NO: 236196 - DNA, 605 bp, Homo Sapiens
aagtgtccatgtatgcaaaaggggtaattcggtttgaatttccccgttttagtttagaagcctagtctgtttgttcccctccaccgctctccctctcattcctgatgagccctctcattcctcctttccttgcccagctatggccccctctcattcacaaagtgccccctccatgtccctggacccttaagatatccccttggcaccctggtcagagactctgtgtctgactcaggtggtccctgcagagtgccctgggaagggaaggagcactgatttgggggttttgagggtcaagtaggggttggtaacacctggaaagaaggactctttcacttcgatccctggacaattatggaggattcggaggtagaagaggggaaggaagatggtttctatctcatgacccccactccctgtgagagggaatgggggaagcctgatgaccctcagctgttccaatctagtattttttttcttttttaaaattactgtatttattatgacgatggtgactccccagtgcaaaggggggccagattctgtgtgtttctctaacctctttgtaaataaatgcacagtgtaacataaaaaaaaaaaaaaaa

SEQ ID NO: 236197 - DNA, 561 bp, Homo Sapiens
ggcacgaggataaagtgaaaaagaagcgaaagaaagaaacaaaaggcagagaggttcgcttcggaaagcggagcgacaagttctgctcctcggagtcggagagcgagtcctcagagagtggggaggatgacagggactctctggggagctctggctgcctcaaggggtccccgctggtgctgaaggacccctccctgttcagctccctctctgcctcctccacctcgtctcacgggagctctgccgcccagaagcagaaccccagccacacagaccagcacaccaagcactggcggacagacaattggaaaaccatttcttccccggcttggtcagaggtcagttctttatcagactccacaaggacgagactgacaagcgagtctgactactcctctgagggctccagtgtggaatcgctgaagccagtgaggaagaggcaggagcacaggaagcgagcctccctgtcggagaagaagagccccttcctgtccagcgcggagggcgctgtccccaactggacaaggaggggaaagttgtcaaaaaacaaaaaaaacaaaa

SEQ ID NO: 236198 - DNA, 671 bp, Homo Sapiens
aatcttccttcagtcttgtttctgcatcaaaaagtctgggacacagagtgctacaggatgcctgggctaaggactgtaacagaaaaatatcaacatcagagcctggcacagtggctcacaccggtaatcccagcactttgggaggccgaggcgggtggatcacttcaggtcaggagttcgagaccatcctggccaacatggtgaaacccccatctctactaaaaatacaaaaattagccgggcacggtggcacatgcctgtaatcccagctacctgggaggctgagtcagaagaatcacttgaaaacaggaggctgaggttgcaatgagccaagattgcaccactgcactccaacctgggcaacagagcgagaccccatcttaaagaccctgtctcaaaaaagagagaaaaagaaaaagaaaaatatcaggcatcacatgaaagagtattcagctgtcgttcttgtgaaaaaggaaaaggacaaaatcaaatgcattttaactgtggtaactaattcactgacttgaagtttgctttgtttgttttctttggtgcgtagagaagaatacttcatactaactcctgatcatcttacagcagacataacaacagagtgttagagactggaataaatatgaatttggctgaaaaaaaaaaaaaaaaaaacgatt

SEQ ID NO: 236199 - DNA, 627 bp, Homo Sapiens
  misc_feature (52)..(52): n is a, c, g, or t
caatcgttttttttttttttttttcaattataggaaaggctttataccagtntgaaagattgatattttgaggagaaaggcaccaaattattatttttactattttttgcatatggcacaaaggagatatgtgaagttcccactgtagagtttttaaaacctcccatcttggatcagtgtggcttcttcggtgaggtatcctgtcttcagagtttaaagcatttctcattgtatctatgaatagtcacacagccatgataggacactggcctgggcattgcagctacccctgtgatgatacttgttgcaggatcataacagagaatagtgtctgtggcttctccattttcccgtcttccgcccaggatatatattttaccattacacacagacataccacagttttcctgtttaaccaaatatataaacaaaaaattaaccattgaagataaaggatttggtaacaaacagaaaagcaaaataatgctttagcacagtcaaaaaaaagggagacatgataaaagctaaggtcctttggcccaactctgctctctgtgtgagcgctggacaactttgcatgaatgaaatgaatttcaagatagatgctatgtcagtagccctcgtgcc

SEQ ID NO: 236200 - DNA, 591 bp, Homo Sapiens
aggtacaaagagtttgagtttcactgtggattaaaaagccttccctaaaaagagagcatgccagtcatagagacactaatttggcacttttcctccttcttaggtttaaatgttataccaatgcatgtgtttgaaatatccattaagatgatttaaaatttgtcttgtattttgagtttcttaaatgcgtggattcttgttcatttatctctgaatatgtctcttttatattttggcacaattatacacattggaaagggccaacctattagggctcaagtatgtatatgcaaaaaaaaaaagttatatcaaacaggcacagttattacaactagagagaaattccagaaatatttgtttttttaagagaaagtaaattttcacattagatttctattcaaagtactaatatctacatggtccacacttttctattttaaaaaattgtgttctcttgttaaatagattaacatttccacttctgtttatcacaaaagactgtatttgaaatatgcatacggaaaattgaaattatattagtaataaatgtaacttgaaaaatcaaaaaaaaaaaaaaaaaaacgattgcgg

SEQ ID NO: 236201 - DNA, 714 bp, Homo Sapiens
tgcccgttcatttatcgtttgttgggtttcatgagggatccccattgaagtagatcccttttatgaagggatccccattgaatgcagcattaactcagaacgtagcataaagtcgtcactgctcccagctgggacgtggtgtcttggcatcccttcctgccgtccttgactctttcccatcttcagttctataattttctcccaaacaaatgctcttttagagttaacactaaagatctggtctttgccgtcaaggttgacagaacagctgttcatggtgtttgcggtgaaacccgtgttctctttcaatgcagtctgtggctttaacgtgtgtcctgtaatttcgccaagttcatttcttgcctctggtaacttgggggtggatttccttgggctctctaggtgtactgctatgtcagatgcaaaatgtcacccagcttcctgtcacatatccttgtctgtgcattcatgcatctacctcattccggttttctttctaatctcatgtattcctgttgtgaggaaatgtgttcttttcccgatccttttgtagttcatacacgtgacaattgggtttccacgcacgtgcatgagatgttcctccttcaaaccttgttactatgtcagcacattaactgcctggcatggaaaaagaaaaaaaaaaaagaaatatgtcttttcctaccatttgaaaaaaaaaaaaaaaaaacgatt

SEQ ID NO: 236202 - DNA, 543 bp, Homo Sapiens
tgtctgctatactgcctaatatttgagaacctactctagaaagcactcttctgggcattgggttgggaagtggctaagacagggttcttcaggtttagttggcaagtatatgatcactaccaaataatgagatgtacagatagtaaattggcagttgagaggagagaaaacaatgggctgtgactgttgtggaaagtttactggaagaactcaatttaggtcttaaaagagagatcctttggatgggagaggagggcattgtaggtagaaagaacagttgatgctgagaagcaggtctaggcaaggcttatttaagaggagtgtcgttggagataccaggctgtgtctaagggtgatgttaggattaatgagaaattaaggagcaaagataggttatggccagtgagtgactttagaacattataccagtctttccggcagaatttaaaattattttctgtaccttttctcctttaaaaagcattttatcttgaatcatgcaagtctataggtaagattaaaaaaaaaaaaaaaaaaacgatt

SEQ ID NO: 236203 - DNA, 518 bp, Homo Sapiens
attttttgttgttgttgttgttttgtggccaccctttgcactagaccatcccttttattggtggtattggcctatattcccattgacaaatgcaatttttaattatttatttaatataggagtattttactgtttaatatttaaacaatgtttaatgtatttcattattaactagtattatagtttgtttttttcccatgtctccataacttttactaacatttgtttttagcagcacaacagtaatccatataaaaacaactaattcataatgaggaaaatctcataatttttaaggcagaaagaagtattaatttttgatctgccatgtagaatgagacaaatacagtttgcttatgaaaggaaagtggcatacttttaaattggtctacacagaaaagtaaaagtaaactattcatttaaataagattcattatctaataaatattgagggaatatttttcctaaataaaaattttctgactgctaacaaaaaaaaaaaaaaaaaaaaaacgatt

SEQ ID NO: 236204 - DNA, 623 bp, Homo Sapiens
gcgaaaacaggatcttcacacaaaagcttgatgcagttttttgacatagcagactaaagtggggagaagatggttgagcacttacggttgagcacggaaaaaacttacacggaaaaaacttacacagaaaaaacatacacttgtgtatgatggaatctgaagccactgaaaatcctacttgaaaagccatgtctaactcacctattgaatttttagttaacagcaactatttttcatacagtaaaatgttactaatttagattaagggagtgctgggggaagacactgatgccgaaactgaacaaatgttttaaaagaaatgcaggtttattatccagcactgagagagttaacaaggactggaaaaataaggctaacaaagaataggatgtgaatgttttcaagggccaaattaatgtatttataggtaaccagagcatatgttgcaaaaagacacattttaagaatcaaaatcaattctccaaaatgttttaaactttactgtatattctcgctagcaacagtaattctgtaaataccttttccccccataaacactgcaagggtaaacaataaatcttctttcctaattatctcaaaaaaaaaaaaaaaaaaaaacgatt

SEQ ID NO: 236205 - DNA, 697 bp, Homo Sapiens
ccattgttgctgctgtagtggccttgatctactgcaggaaaaagcggatttcagccaatcccactaatcctgatgaggctgacaaagttggggctgagaacacaatcacctattcacttctcatgcacccggatgctctggaagagcctgatgaccagaaccgtatttagtctccattgtcttgcattgggatttgagaagaaaatcagagagggaagatctggtatttcctggcctaaattccccttggggaggacagggagatgctgcagttccaaaagagaaggtttcttccagagtcatctacctgagtcctgaagctccctgtcctgaaagccacagacaatatggtcccaaataaccgactgcaccttctgtgcttcagctcttcttgacatcaaggctcttccgttccacatccacacagccaatccaattaatcaaaccactgttattaacagataatagcaacttgggaaatgcttatgttacaggttacgtgagaacaatcatgtaaatctatatgatttcagaaatgttaaaatagactaacctctaccagcacattaaaagtgattgtttctgggtgataaaattattgatgatttttattttctttatttttctataaagatcatatattacttttataataaaacattataaaaacaaaaaaaaaaaaaaaaaaaaaacgatt

SEQ ID NO: 236206 - DNA, 557 bp, Homo Sapiens
cagggacttacagatgaaccaggccctgcgatttttggaaaatgagcaccaggaactgcaggccaagattgaatgcctgcaaggggacagagacctgtgcagcttggatacccaggacctacaagatcaactaaaaaggtcagaggcagagaaactcaccctggtgaccagagtacagcagttgcagggtttgcttcaaaatcaatccttacagcttcaagaacaggagaaactcttaacaaagaaaggtcagcaaatttattaccacaaattctaagatattgctcttctcttacctgcctagaggcagcgggatggactacatgacctcctggagtcccagccagttctgggagtctgttaagtccgggatgtgtgggagctttttaaggactgatcattggctctgaggacacttcaactagttagccttctatcttgaggtatataaactgtgaaaaagggtttctattctctctgaaagcacatgtctgtgttgaacatttcaataaatttattttgaactcaggaaaaaaaaaaaaaaaaaaaaaacgatt

SEQ ID NO: 236207 - DNA, 736 bp, Homo Sapiens
agtcctcaagaatctgatgttcagcctgtgcagcctgaggaagtgtcagccagagatttcctgcagagacttgacttgcagattaagttatcaacacaggcagccaagaagctaaaagaagagagcagagatgaagaaagtccctatgcaacttccctctatcacagttaggtgatttgggggcataactctaaccaaaattaagatatgtttggaccataaagaatccaacaactgaagattcaaaaacatcccttctggattcctatagtgtccatcttaaaatcataactaggtagttctacctgctgcagttgcactgaagtgattagttccctctggctttctataattttaagtctttattatggcatgatggcaaggttgtagcctaaagctcatcacttttgtaggtggtgttagtttttagactagcttttataaatactaattgacataaagcatcaaagattatttatatatttaggctaaaaataatgtttatctccttatgcaatcctgattatgtgaaaatatggttgctgtttaagtgatgctgaatttgctgtgtgtttataacttaagtgctatatatatatttcgatatgtcttacatattctctattaatataaagaaccaaattttgtctgctattttgtaaaaataaactacaaaagcctgaatgagaaaataaactatgttttcaaacttgaaaaaaaaaaaaaaaaaacgatt

SEQ ID NO: 236208 - DNA, 710 bp, Homo Sapiens
agaaaagtatggaagaagagaaagaaaagcctaaattggaatgagatccaagtctaaacgcaagagctagattgagccgccattgaagactccttcccctcgggcattggcagtgggggagaaaaggcttcaaaggaacttggtggcatcagcacccccctcccccaatgaggacaccttttatatataaatatgtataaacatagaatacagttgtttccaaaagaactcaccctcactgtgtgttaaagaattcttcccaaagtcattactgataataacattttttccttttctagttttaaaaccagaattggaccttggatttttattttggcaattgtaactccatctaatcaagaaagaataaaagtttattgcacttctttttgagaaatatgttaaagtcaaaggggcatatatagagtaaggcttttgtgtatttaatcctaaaggtggctgtaatcatgaacctaggccaccatggggacctgagagggaaggggacagatgtttctcattgcataatgtcacagttgcctcaaatgagcaccatttgtaataatgatgtcaatttcatgaaaagcctgagtgtattgcatctcttgatttaatcatgtgaaacttttcctagatgcaaatgctgactaataaagacaaagccaccctgaaaaaaaaaaaaaaaaaaaaaagatatgcggccgcaagct

SEQ ID NO: 236209 - DNA, 619 bp, Homo Sapiens
ggcacgaggatgaaagctgctcaaagtcacagaacaaccgagggacaaaggagattggatgactgggaagcgctggcccggaacagcccctgcaactgtggggcctgcacacagcccttccacagttggcactgcaggtgcaggccaaccctttaaagaataaacaaggaagtcagctctttcactttttacaagttggcaaaaacagacttccggggaatttcgatgttttcccgtgttgtagagcttccagggtttaataaaactggttaaaaattgagtctttccctgaagtaagtgctctttccagatgaaaactactcttttggttttgtttgaaagtaagaaagggaggggaaactttgctcttttaataattatgttcagcctatgatgaagtatttgattattagacagcaatgtcactaataagttttaagttgtccaaagttaattgtaaacatcatcagtacagtactcttagttacagtaaagcaattgttgcaagatgaatggctaatattttggtgcagtgtttgatgttcaaaacaaaatgttacaacaataaacgaacataacataaaaaaaaaaaaaaaaaaaagatatgcgggcgcaagct

SEQ ID NO: 236210 - DNA, 694 bp, Homo Sapiens
tgattgtagcatccagcagtctctgtagccaggttactcaagaaccacatttgatttcctggccctttgccttggcagtgatggcatttttatttcactgtgttttaaagtcttcatttatttttataacatgggttagggagaagggccacaaatggagggattgtcctttcaagcaccacagcttcagataaaattagtactttcaaatattgtccactttaacttaaaaaattctagagggattatattggagactcaactgcccttggttttagtttataaaatggcctagtactgtggaattttaattttagaaagtcttagcatcagatcataaacattcattaaaagaactcacatcccatctgaaacttcccaggggagttgggattcttagtagattggtagaaaggggctcattttctactgcatttcccatttttggtatcttgttcagcatgttttatttttatttcttgtctgcagaacatcctatatttatgagaacattctttaagaagaccaccacatagaataccccttcctatcagctcgctctgatttagccttaattttgttaaattttttagagatgaatgaagtgctgctgtggaaagaaatgtacatatactatttctgtatcattaaaattacatttttatggttaaaaaaaaaaaaaaaaaaaagatat

SEQ ID NO: 236211 - DNA, 707 bp, Homo Sapiens
gtatttagttcagtgaaccgcccgttagttttgtcaaacttcccactgcaatgcctttatttaaaaaaattgtctacttatctaaatattcataccacaatttcaaacctactcatgtccctgataaagctaaatttgtcccttttttattgttattaattgcacttaacatttttagttatactggatattgagtatggattttctctatatttgatctattggtgattaatctttttgtaatcataaattactcaattaggataaaaataaattatgttttaatgaaattcttaaattaacatctttttaatggaacatttaagtgaatatatgcatattgaatttctaaatatttgttgtgcctgtctttaccatgtaacttaatgtttgcaaggccagagtgtttgaaagttttgtatttaactttataattaccttgtcctttctggttgactatactaggctaagccctcttaatagccatgagtgtaaaatttagtttactcatttttcacaaattgtatataaacatgcacttcactacattggtaatacactaaaattgtggtccttttcctcttgtgaccaccacatgtctagtgattattttgtttatttggttgctacttacctagcacattgtaatgttccatgaatgctaatattaaattttgtaaaaataaaaaaaaaaaaaaaaaagatat

SEQ ID NO: 236212 - DNA, 644 bp, Homo Sapiens
ccctgcccatccaccccatcatcaacaactttgtcaggtactacaacaagcagcgcgtcctggagaccgcggccaagcacgagctggagctgatggaactcaactccagcagcgggggcgagggcaagaccgggggctcccgcagtgacctggacaacctccctccagagcctgcggggaaggaggcgccgagctgcagcagccggctgaagctctcccacagcgacaccttcatccccctcctgaccgaggagaagcaccacaggacccggctccagagttgcaagtgacaggagggcccctcaggcagagatggaccaggcggtggacagatgggtagatgtggcaggcatgtcatcgacagcacagaagggctgtcctgtgtccccccaaccctcccctggacagactttgaaggccctcccggcacctctgccaaggctgggtaagactcctctatgttgcctgctgtccaggagcccgggagggaggggtgtgcaggagccgcagggccgtgtgggacgagtggaggccgcggcctggctggcacgagagcccacgcccgcttctgtatctccctcaataaagcctcctgctctgtgcaccctccaaaaaaaaaaaaaaaaaaaaaaaaaaaaagatat

SEQ ID NO: 236213 - DNA, 657 bp, Homo Sapiens
cagtcacatgtgctctcgggtgccctgcattcacagctacgtgtgcccctctcatggtcatgggtctgcccttgagcgtgtttgggtaggcatgtgcaatttgtctagcatgctgagtcatgtctttcctatttgcacacgtccatgtttatccatgtactttccctgtgtaccctccatgtaccttgtgtactttcttcccttaaatcatggtattcttctgacagagccatatgtaccctaccctgcacattgttatgcacttttccccaattcatgtttggtggggccatccacaccctctccttgtcacagaatctccatttctgctcagattccccccatctccattgcattcatgtactaccctcagtctacactcacaatcatcttctcccaagactgctcccttttgttttgtgtttttttgaggggaattaaggaaaaataagtgggggcaggtttggagagctgcttccagtggatagttgatgagaatcctgaccaaaggaaggcacccttgactgttgggatagacagatggacctatggggtgggaggtggtgtccctttcacactgtggtgtctcttggggaaggatctccccgaatctcaataaaccagtgaacagtgaaaaaaaaaaaaaaaaaaagatat

SEQ ID NO: 236214 - DNA, 706 bp, Homo Sapiens
ttcataccccccttaggcaggttggctttcatatcacctcagccaactgtggctcttaatttattgcataatgatattcacatcccctcagttgcagtgaattgtgagcaaaagatcttgaaagcaaaaagcactaattagtttaaaatgtcacttttttggtttttattatacaaaaaccatgaagtactttttttatttgctaaatcagattgttcctttttagtgactcatgtttatgaagagagttgagtttaacaatcctagcttttaaaagaaactatttaatgtaaaatattctacatgtcattcagatattatgtatatcttctagcctttattctgtacttttaatgtacatatttctgtcttgcgtgatttgtatatttcactggtttaaaaaacaaacatcgaaaggcttatgccaaatggaagatagaatataaaataaaacgttacttgtatattggtaagtggtttcaattgtccttcagataattcatgtggagatttttggagaaaccatgacggatagtttaggatgactacatgtcaaagtaataaaagagtggtgaattttaccaaaaccaagctatttggaagcttcaaaaggtttctatatgtaatggaacaaaaggggaattctcttttcctatataatgttccttacaaaaaaaaaaaaaaaaaagatatgcggccgcaagct

SEQ ID NO: 236215 - DNA, 646 bp, Homo Sapiens
gtgcaagcgggtcctccgccaacggggagagcctcttcgcggcgctgttggcgacagcagcgctgtgattcgcgtagcaggggagttgtttgaaacaccttcctgagtagtccggccttgtcaatgagtgcttgttttcctttaaacagtctgacatatttactcgtcactttcaaaccagaagcatgaaaggaaggagatattgtggggtccgtttaactcgatagaaagcgcagggggatggcccccggcgcaggctcttgacccgctcagcgctgaccccaccgccctggccgaggcacttggccttgctgagctggacttcctcctcctcctcctcatgaccggggtgaattagaacgtttttaaagacacccccttccaaattctgtaacacattgtaattggagaagaaggaaactctgcaaggctaaactgtcattcacaacttggctacacacatagactctagtcagttttgtctccagaaccttaggcttttgtattttttaattttaatttcactgttaatccttattgtcttttttattaagatgttggaaaagcaggaggtagttgtgcctcaattattgcaaaaatgtaacaataaagttcctcaaaataaaaaaaaaaaaaaaaaagatat

SEQ ID NO: 236216 - DNA, 721 bp, Homo Sapiens
gtgaggcacaacacaagcagggcattagtttgaataggaagtcaatcatatttggttttatggcctggtgtattttgggtttaagataaaatagggaaaaatgtcagaaatgatccctatgcatttattttcatggatacccttaatttcatgggcatgcctaataatgatctatgttctaactggagcttagggcttattttagatattggagtgtagctttattacagatggattttatctttcaacattgcattttgatcaactttgtatattcacgtgtattaaaatattgtgcactaaatgttttgcccttgtttgctattatatggtcaaggcatttatcagcactattgtaatgaactcatgtaagtggcatgggtcagggaaaattatttcctacttttctgcctaattaaatttctgttttccagtattacattaatttatttttggcttccatttctgtataaccaaaatagttactgtatttgtgtggcattcctattattttgttgctaaaaatattgtagtttttatttaaaataatctgtaccttaattttttaaaatgtaaccaattcaagcactttaagcaataatgtcaatcttgtgaaattttaatcagtttaacaccctgcctctaaaattgtttgcaaaaaataaataaatgaataaaatgggaaaaaaaaaaaaaaaaaaaaagatatgcggccgcaagc

SEQ ID NO: 236217 - DNA, 714 bp, Homo Sapiens
aggaccaacagacgttcgcgcgctctgtgggtctcaaatggcgcaaggtggggcgctcactgcagcgaggctgccgggcgctgcgggacccggcgctggactcgctggcctacgagtacgagcgcgagggactgtacgagcaggccttccagctgctgcggcgcttcgtgcaggccgagggccgccgcgccacgctgcagcgcctggtggaggcactcgaggagaacgagctcaccagcctggcagaggacttgctgggcctgaccgatcccaatggcggcctggcctagaccaggggtgcagccagcttttggagaacctggatggccttagggttccttctgcggctattgctgaacccctgtccatccacgggaccctgaaactccacttggcctatctgctggacctgctggggcagagttgattgccttccccaggagccagaccactgggggtgcatcattggggattctgcctcaggtactttgatagagtgtggggtgggggggacctgctttggagatcagcctcaccttctcccatcccagaagcggggcttacagccagcccttacagtttcactcatgaagcaccttgatctttggtgtcctggacttcatcctgggtgctgcagatactgcagtgaagtaaaacaggaatcaatcttgcctgcccccagctcacactcagcgtgggaccccgcctcgtgcc

SEQ ID NO: 236218 - DNA, 730 bp, Homo Sapiens
ggcacgaggtgtcaggggacacatgtaactgtgcaacatggtattttctacagggagggctaggaagggtggttttggaacctaacctactttgtgtcttcattgtcagaactaaggttggaaatgccctttaaaggacttggtgaggcatatgctaggacaatagagctgctttagaaagaaattgagacatgttttgtcaggacagataaaagtttaatgcaggcttttgaacagatgttttaaaacaaatttgaccttaccaactatttttttcttctagccaaatcattgtacaggagtttcatatatgataaaaagtgttttgttattgtttttgctttcttggcaggggagaacccctaccattgtgagcagttactgtcactctggctgaatggacaaatagctgtgtaaatagcttctcataaaacgcttctactgatagctgtttgactttttcttcccgttatgaatgggaggaacatttgtaaacttcctttctgggtagctaccaaaaaacgtactggcttatggtcccatgtgaccttgtctccgttaagcccagaatctgagtgcctttagcaagtgttagcatttcacagagagaagagagacagaattattgctattaatcaccattcataaataggagcttggaataacaaaggtctgtgtgaattctgttctacgtcttttttttcccttttttaaataaatgtcaatttgg

SEQ ID NO: 236219 - DNA, 717 bp, Homo Sapiens
  misc_feature (107)..(107): n is a, c, g, or t
gtcctcctagagtccccctaggtctctggctgcccatgaggctcatgaagcagagggtatcccagtcatagggagcagaaagagcaagtgggttaaggaagcctgtngggggacctggtggatggagttgaccaacatcgctgggtggctacggccctccttaggaagcccagaaggacctttattattaaaataatcattttgaaccctgctctatcccctgccctcttccagccccacccctccctggtcttgaaagaagactaatcagtgggcacaccaagggccctgaggggcagggagatgccaccatgcttctctgtcaccgtaagaaggctgaccagccacgcccacctcctctgtctgactgagttccttcctgtggccacagggaggggctggtccttccccttggtgctggctctctgtcacaatgcctcaaaagacatggaacccaggcctacaaccgtcccaactgctaattcttttcctttcattttgctttctgaaagcagtttgttatactattcataacattgtagagtttaatttcatgtcattttggatcttatataaaaatgtgaggatttggatttttaaaaagaatgactccattttaggtagccacttttgatgttaatatatagtgagtccaatgtatgctttagaagtaaagacattgaccgtcacagaaaaaaaaaaaaaaaaaaaagatat

SEQ ID NO: 236220 - DNA, 691 bp, Homo Sapiens
tcagtgccgactgccggggagcccgtgcgggggctagaaacagctctgcggtggctggagaaccaggaccccagagaggtggggccactgaggctggtgcagttgcgctcactcatcagcatggcccggaggctggggggcatcgggcataccccagcaggcccctatgacggtgtgtgaccaggccagcccagtgacctttctcctgctgcacttggagggaggggacatacacacagtctcccatctctcctcccctccccctggggtggcccaccgcatgggtacagggggttccaggaatccaaatccagcatggcttggaggagctctgttggtgagaggtcgccctgcctcactggcaccctgggggcacagctggaagagaggcctggcccatgctcctctcagggcaggcacatgtacggggcatacaaggcacagcgcctgttggaacaggtggctgtgttcctgctctggcccccgtggggctgggcctccgcccctgcaccagtcacatgcactggacgagggccgaaactcctgtctgctatcgagccctggtgctatgtggccccggagccacagcacaatcatctcagtggcgaagcacaccacttgattctatttttttttaacacattaaatctgtttttaaagataaaaaaaaaaaaaaaaaaagcctcgtgcc

SEQ ID NO: 236221 - DNA, 481 bp, Homo Sapiens
tagttggtgtgataaatcaagtatagtaaaataaaaagagatgcagttaacctagctgaatgtatggcagcctttctttatcaaacctaacccataagcctgctgcatttaaggtcttaatgcaatttgagaatatttctagtagtagaatagtacaaaagctaagatttgttttattccttttctttgtgttatagataactttgaatttaattttatctggagaggaaaaggtgaaaatcaaatttcccaccaaaaggaactagtattcctttgagaagggccagctaagcttgggggcagcaaatgtacaggattggtcttagacatattttactggagagcagggcagcagtggtgtcccagaacagccttttatcagagataaaaacttcattacttcataatgatactcccaaaaagcttattggtcatttttggagtttgctcaggtatgaactcagtcttccaaaagttggtt

SEQ ID NO: 236222 - DNA, 539 bp, Homo Sapiens
cattaaagtgagcaaatgaaatttcaaaaccacttgtaataatgtattttataatcgcactgtgatactatataacacagtctcttttgtattaaaatagtatttttttcacaagctgaaaaatatcttttcctttgttgacaatgttttgtaagatgactttattttcagatctttttctccttttttgcacaaaactatgcttatggtttgtgtcacagaagtgaaaatatatctttgcatttttatatctggtctgtttttcttgtttcctttgtttttaacttgatatagattttcttcaaatatataatggcaattttcagatatctcaccttaccatatctttccttattttcactgcatgcatttaatcactgtattacttaatgtttgatttgttattatgggcatttcaaataggcaagcattgaattgtaatgacaaaaaggctattttatattaaggatatatgcatttgtatttcacacaccagagatgatattaaacactgattattttatgctgctgtttattaa

SEQ ID NO: 236223 - DNA, 455 bp, Homo Sapiens
tccgcggggtgattcagtccagtgattgggtttgtggctccaggcctcgcccacagacggacagacccctccctttcttccggcaaaaggaccgagccctggggtagtaaggcccccacactcctgttttttgcaagtacatttttgtccctcctccacccaggtatctgcctattttcttgctaatcccagaacctttccttttgctttttttaaggacatttgggaagttcctggtgtaggacccttctccctgggataagaaacctgcctgtaaacgctctgtaaatactcccttccacccatcccagcccctgggcagccgggcagaagggaatccaggctatggacctcccaagtccccgctccccgctcccctcggcggccccgccttgttctgatctgtgtgtgagtgtgtgtgaacttctgaaagacaatattaaagagacttagtt

SEQ ID NO: 236224 - DNA, 383 bp, Homo Sapiens
tttaggagaaaagcttgcttcagggtccttagagaaagtcactggggcctgccaagctgccacctaaagacaagagtgagagggctgagttcttccaggtcatcagagttgttgctgcccgtattaggccacacagtggaaccccatttatatcatagcagaagaaataggattatcaatgtgaactgcttagcatggtgcctggtatatacgagagctccacaaatgtgagctataatcctactagtaaaggatgctaagcagttccactgtggcaggtgtcatttgctagtagaatttgtaatcaaacaataggaggggaatctgtgaacgcctagaaaatgagcagaataaaggatattatctttggaaaaaaaaaaaaa

SEQ ID NO: 236225 - DNA, 580 bp, Homo Sapiens
gcaaagcattaaatggttaaatggtgcatttaaagagatttgttatctgtttgtaaatatttcccatgaaaagaaggcaaataataataccctgacactgcattgtagtaaatctctgtctcttttgctttcatcttgtctaggcacagagatgttaccagaatgtttttgggtcgaagttctcctttggaaaatctatggggtgatgtgtcctcagccaccctttggttttttcctggtcatgggtttcagtactatctggggataaaccaagataactgccatggttatgttagctagagtgtccattggatctcagcttctggtttattttctcccataagatgacctgaggtatggagtgtatcctctcaagggagcaagtggatattctggggctgaggggaatcttccggtgtactcttattttgaaacgggtaaccctttgaaatgttaaaattgccttccctcaaccaggcttccatttcttggagacaaattgctggtcagccaatcagatgctggtaatgaggggaaaacacagaaaaatagtgaaattaatatagtaaaagaaaaagag

SEQ ID NO: 236226 - DNA, 582 bp, Homo Sapiens
ttgccctggacaacagtggccctgtgctttaacggcagtgccttcgtcttgtacctctctgccgctgttgtagatgcatcttccgtctcccctgagagggacagtcacaacttcaacagctgggcggcctcatcgttctttgccttcctggtcaccatctgctacgctggaaatacatatttcagttttatagcatggagatccaggaccatacagtgatttaccattttgataattaaaaggaaaaaaaaaggaagactctcactgtaaaaacagctgtaggtataatgtatattcccagagaattgtatttaactaattaatgttttttatattcttaaatttgctcacaaattgtggtttgttacaattaaactggatacttatttgcaaagtgttgtagcttataatgaactcttaagtatcttattaatgtattaatgtcttcatagatcatattttcttagacaatgtttaaatagataaattgctaatattgagaatgtgtcaagtttgtaaacctaacttttaagatgccagattcttttttgattaaatgttgcaaaatcccaagtaaaaaaa

SEQ ID NO: 236227 - DNA, 580 bp, Homo Sapiens
gccgtgctgggcgccccacgacggcggcgtgttgggctcggcgccctgcgggacgggacgctggtgtcggagggggcccgtgatcggcgggtgttcctctggggttctgactacagcaagctgcaggaagtggaggtccctgaggactttggccctgtgcgcaccgtggcagagggccacggagacacactgtacgtggggaccacccgcaattccatcctgcagggctccgtgcacacaggcttctcactgctggtccagggccatgtggaagagctgtggggcctggccacacaccccagtcgggcccagtttgtgacctgcgggcaggataagctggtgcatctatggagctcagattcccaccagcccctgtggagcaggatcatcgaggaccctgcccgctcagccggcttccaccccagtggctctgtcctggctgtgggtacagtgactggcagatggctgctgctggacacggagacccatgacctggtggctatccacacagacggcaatgaacagatctcagtggtcagcttctccccagacggggcgtacctggccgtgggctcccacg

SEQ ID NO: 236228 - DNA, 587 bp, Homo Sapiens
  misc_feature (581)..(581): n is a, c, g, or t
tttttttttttttttgtcaaagtacaaagcataccaatatggtcatttgctccaatatagcccaacggatggtattttttattaataaaatgtggaagtaactagtatgtttttatggggaaaattacaaaataagtttaccaaaatagactgggtcactaaaacaagaagaatggtttggcatatataacttttaaaagtatggtaacaaaacaaactgttaagttccattttacctggtattatctgttccttctgattaaaagaattagatttgagaaaatcacatctatctcttgagtacaaattagctatcactttttagatgaccatgccattcttcagtttttgatatagcttccaaacagaagtttcaaaatgactctgcctagcaaacacatcactgtactttaaacagagtgatgttttctatcccatattttcggaaggttaaagcacacacagaggcaagaatcatgacagacagcagatcctaagagagtttattaactctttaggtagattaggcaacacttgtttttaaactagactacaaatcaaagtctttttttttttaaagnattcaa

SEQ ID NO: 236229 - DNA, 637 bp, Homo Sapiens
acaccagcctgggctgaggcatccactgaaatgccttctatttccaccaacagttcccggacttgagtcctcaagccagtgctgaggcaggtgggaagagagagggcccaggtaatgatagctctgtcagtgagacaaagtgagaaagtttcatttagcccaacaattatggtaatttgaggaaagaacacagggtttaaagccatgcagacttgagttggaatctgcttctatcacttaagcgctgagtggccttggctaaaatacttattctccctaaaataacccaactgatttgagaagcaaggtaggtagtgcacagggcacgaagcagtggctggctgacaggcgcttgaaagcaaggatttttgccgcttttgtttactgctgttcacctacccccttgttgccaaggcgacatcgtaaacactccattatttgttgaatgaacgaatgaattggctattttctaccacgaacttaagtgtccatactaattacatgaactaatttttaaagaaacacttcttaaaatcacattttacctgcaagatattattgcttgtaagaaatgccattgatttcatgtttttaatgaccacattaaatatacacattatttgaaaatcatcccaat

SEQ ID NO: 236230 - DNA, 742 bp, Homo Sapiens
  misc_feature (16)..(16): n is a, c, g, or t
  misc_feature (729)..(729): n is a, c, g, or t
agtaaaaatggtatcncatttgttaattttaattagctagatgttgggacagaaatatgaaggccgcatagtctgtcagtattttaaaagaactcagtactgaacggaaggcaaggacatgaagggagcacatgttagtgtaacttctttacagatagaaatgtaattctcacatagaagactcatttagtatgtagttttcatcttggcaaggaagactgctctttctttctccataatgggtaatttctaaatctttcctagtctaggtcatggaggccaaatactattgtgggtcaggtgggtccatcgttttcttaggtgactgtatcacataagtctgaaatgtaattttaaatatgagataataatatcaccttctgcttagctatgactacagtctagcaccaaaggaggtcagaatttccccctttatatttagtccatctttctgttgaaagcatttgtagattgagtgttttttgtattatgaatcgggtttagtctctcccaaggcaggaagttttcaagtattacattttttaatacacagcaggtggattttgtctgaaagatagttttatgccaggatattgtacttgtttcactattgaactacagaaccttagaattattttaaagattggaaaggtataacctgtctcccatgaaagacctttgtagtggtaaatttgccaaccttgttaattttactcaaactttgttttnaaaaaaaaaaaaa

SEQ ID NO: 236231 - DNA, 400 bp, Homo Sapiens
  misc_feature (1)..(1): n is a, c, g, or t
nttttttttttttttatggatatttagttttatttgatacacttggatgcaactttactcattaccatttttaaacccatgtttaaaagttttaaaatttgggtagaggcagaaagaggaggttgagttggagatgctgggggtagtcagcagctcagtcatcggtgcttgtgggctttgtttgatccaggccttgactctctctggaatgggaggcttcgacgtcaagagggagctgctgccacccgtagttctgagcttgaagttgctaggacttctttcaaacttgtgtgctgaagagactcagatgttggtctcagctcctaggctgaattcagcagatcggcccatgaaaaatcctgtaatcccagccacttgggaggctgaggcaggagaatca

SEQ ID NO: 236232 - DNA, 701 bp, Homo Sapiens
  misc_feature (670)..(670): n is a, c, g, or t
  misc_feature (699)..(699): n is a, c, g, or t
aaatgataacggctaccatttatttctaagtacccactccataagaagtcctacatacatagttttctcacttaattctgtgaggaatcgattatgctcgtgttaccagtaaggaatccaaggcccagagaagttaaatcacttgtgcaaagtcacatagctagcaagcagcagaactgaggcccgtacccatgtctgtctggctcaaggcatatactgattgactgtaacatcatttgccttcaaggatttgccaaaaacccttgtccccagatcttaagtaaatttagaatgctgagtcagattggggatgcaggaatcaaagaataattgggttatataatgctatgattttatgctaatcttggcactaaagagagattgtctcgcagtctggaagactgtaactgcctatctggtctctagccactgggcctccagtctggcctccctccaatccattctcctcactgtagccacagagaacattctcctgcttctctcagtggttcccagctgccctcaggattatatccaaacccactggggccagggcttggcctgttcttagtaggccctaccccgtttttaaaatcaaatgcattaaaatatacccgtatcgcttactaaatatgaattctatcatgtaaaatttttgaaacaattcgtnctcgtgccgctcgtgccgaattctggccncg

SEQ ID NO: 236233 - DNA, 503 bp, Homo Sapiens
  misc_feature (485)..(485): n is a, c, g, or t
tacatatcacaaactttggtaaataggatagtaatctgaagaacttttgccctttttaccccatttactgtaactcttgtttctaggtaatcgttctctctcaacaaacttctcaagcgtctgtgtaacaagccacatgttctaacaaattgtctccatcgcacttcaacagccaggtccctattttttataacgtattaaccttattattttcttattattttaaaagaatctatgcacattagcaaaatttaaaagatagagaaaaatataaacagaaaaaattatgtttacttctaccaccctaaatcaactattatcaattttatacatattttactccatcttttttcaaagtttcttacattttccaatgtcattaaaattctctgtgaatgtaaattttaaaaactgtacctactgttttttggaaatctgtaacaagctatgtgtaatcattcttctaatattaaacatattgtgtnccagaaaaaaaaaaaaaa

SEQ ID NO: 236234 - DNA, 449 bp, Homo Sapiens
  misc_feature (408)..(408): n is a, c, g, or t
  misc_feature (420)..(420): n is a, c, g, or t
tttttttttttttttgccaatctgctcaaacacccagttggaacaggaatgcctcgtggcactggctttaggagtttaatctagatggtttgctgtttctagcagcagagcacctgttcagactctacgtatatgcacccatgaatggtgcagctgccaagagaaccaaagctaaatgttggcaggatcacagcaggtgtggaggggaggtcactgggaattccctggagactcagtcgttacccactcaactggaaggctgagcatggctttttcctctgatggttacccatgccaggccccacctctccatgtccaatgttctttctttatttgtttgtttgtttgtttgtttgtttagagacggagtctggctctgttgcccaggctgtctcccccagaaccatnctgggtaacatnctaaggaaatgttccctctcttacatgct

SEQ ID NO: 236235 - DNA, 502 bp, Homo Sapiens
tttttttttttttttaagaaatgtgctctcactgatgcccaggctggagtgcagtggtgtgatcatagctatctgtagcctcaactcctgggctcaactgatcctcagcctcagcttctcgagtaaccggggaccacaggcacgtaccaccacacctggcttatttatttattttgtgagatggattcttgccatattgcccaggctgtcaacaggatttattaataaactgaatgtgaagcatgagagagaggaaattaaggaggactctaatatttggtctcagtaaccggacaaatagagctgccacctactgagacggggaagatgtgggaagagcaggtttgggagtagaaatcagaagtttatttttgaacacataagacttccaatgcctgttagacagcagtagcagcaaattggtgcctcagccatattccttgcctgtgccacatcagtgtgctatggacagcctgatctccaactgccagcacctccattt

SEQ ID NO: 236236 - DNA, 722 bp, Homo Sapiens
tttttttttttttttatatgaaatttaaatctcaatgcacataaagttttattagaacatatccatgatcatttgttcacgtacagtattgtctatagctgctcttacaataccacagcagaggtgactaactacaacagacactgtgaacaccacgtaaggctgtctagcccttaccaaaaaagtttgccaatccctcaatagttcatcctttccccccatgatctgcagtactgtctctgttgtaaattagagtttcatttatttgtgggtctgttttggaaatttggctcaatccattggccaatttaactatctctacaccaaaaatacactatcttgatcacaataataatttataataagccttaataataacacaagtctccctgcctgatgttccttctttgttaatgaaatagctaaccctgcctctttacttttccaaatacatttcagaatctggcttccaattccaggaaagaccttgttgggatttggtttggaatcacattgaatccataggtgagttttgaaagaaactgacatacttatgccattgaggcttcctatccattaatgatatatctctctccatttatgaggtcttctttaatgtccttcaatattttctccatagaggtctcactcatttgttaccataatccttggtaaaactcacctacacgaccatccaggcacaccatttctttgtagaaaaa

SEQ ID NO: 236237 - DNA, 543 bp, Homo Sapiens
  misc_feature (530)..(530): n is a, c, g, or t
ttggagtatccattgcctaaagcatttatcatttctttgtgttgggaacattccaattccactgtcataattgttttgaaatatatagtaaatgattgttaactataattgccctatagagttacgttgtcagtctacttagtggcctagcaaagaggaagaaacatagtaatttacgcaaattccaggtggaaaatagagaaagtttagagaactaaattagtgtaaaacttaaaagtatttctgactataaattctaccattaaaaacaaaaaagcacccgtgaacccacaaggataaaataatgtgtttgtccctgcccttccttgcatatcctgggtgaggctggttgatggtacattgttgtagaataattgcggaattttatttacctggaagtttgctgagaaaacaatgtctgaggtggtgtaagtttttggaaagcaaacatttgacagagttctcataattgattttcattttccaccctttattctgttaaagttctgaaatattgcataaggccatcnaaaaaaaaaaaaa

SEQ ID NO: 236238 - DNA, 480 bp, Homo Sapiens
  misc_feature (2)..(2): n is a, c, g, or t
gnatcatcatcatcatcagttttcttgttttaaaataggggtttggagtctcttcaaggctttctgttttggaaaagtaaaacttaaaaatctatagccatgtgaattatacttatggagaaaaagagtcttgttttattaacatcagacatctttgttcctactaattattttggagtaatgttcagtatcgggctaatgatcgatggatatcactcatccaattatgatgcatggattagaccacggccttaaactttgtacatagtgttgaataaattcatcttatttgcagtcttattgtcatctagctttgatacacttgccctttcatatgtctcttgtcactattctgtgtaagattataatcccaaataccactatatgtatttttcttcatattctattattgaacagtattaatgcttaatgttaatatataagtaatatatacattttaaaaattaaaaaaaaaaaaaa

SEQ ID NO: 236239 - DNA, 416 bp, Homo Sapiens
tttttttttttttttaaaacaggcttactttcaacatccatttacaaacatttgttgaaaaatattttaggagtatttgtttaaacattattccgaatttactgctccataaagcctagtgaatatttaaattcttgaatatgttgccagaaaaagaagcagagatccaaaaacaagtatatgaccagagttagagctgaaataatagcttgttgaagaagagaaaattgtaataaattgctttatcaaacttgctttcaaaacctgttttttaagttgggcacagtggctcacgcctgtaatcccagcactttgagaggccaaggtgggtagatcacgtgagctcaggagttcaagaccagcttgggcaacatagcaagacttcatctcaaaaataaaatagcgttaaaaaaaaa

SEQ ID NO: 236240 - DNA, 498 bp, Homo Sapiens
acacacttttccttacccccagtctctgtagtcattccctatctcattgcctaattttatgttcttcattatttttatcaatatgtaaacctgtcttatctatttatttatgggtctattgtcttcctaccaccccgagtacaaagaatcttctttaggtcatagactatctagaacagtataagttgcatagaaaatgctcattaaatatctgtggactgacttattgattgaccagccaagctgccatccatcctcatctataaggctagtaatatgttgggtatcatcaggtaagacattatacataaatataaaacatcatacagaaccagcccggagctttgcatcctctatggtcatcaacattgtacttcacaaaaaattattggagatggttgggtccaggggagacgatcgaaataatcaagagaaggatgattggcagaggaggaagatagttgaggaactgctgtacaaaagcaaaaaaaaaaaaaa

SEQ ID NO: 236241 - DNA, 372 bp, Homo Sapiens
  misc_feature (335)..(335): n is a, c, g, or t
ttttctaacaagtcttcaaatgttacattctaacatcttagcaaattatttccaaatactgctggaattacatgtaactatcaggaaacaaaagggcttctcaacaacttgtgcgttctacattatctggccagtttccggacaattataatacaattgtgctccaaagtaggagagttccatgaatcaattacccctaaaatatatttctgtatatttaaggagttctaagcattgggttaaattccaaacagactctgaatacaagcatttatttagtaagagaggttagaataaatcaatcctaaattaggcacagctgccctccccccatnatcaaaaagacaggaaattacatttatttaaaaagtt

SEQ ID NO: 236242 - DNA, 539 bp, Homo Sapiens
  misc_feature (514)..(514): n is a, c, g, or t
gtcccttcttaccttcgccctctgccatgttgacattcttatctgatggcacaggctgggagttcaggatccacttagatggggtccgttcaggggataccagcgttcacatttttccttttaagaaagggtcttggcctgaatgttccccatccggacacaggctgcatgtctctgtgagtgtcaaagctgccatgaccatctcggtaacctactcttactccacaatgtctatattcactgcagggctctatgattagtccataatgtaaatgcctggcccaagacgtatggcctgagtttatccaaggcccaaacaattaccaaacattcctcttagatagaagacagatttctttcccttggcaaagatcttctactaagatatgttacaggatgttttacattctcttggtcttataataacaccacgcccaatccagtatttgatgcgtcggtggtcactcggaaggttgttattttaaaaatacttattgttctcagtctgcagttnctcacagctgtaaaaaaaaaaaaaa

SEQ ID NO: 236243 - DNA, 465 bp, Homo Sapiens
tttttttttttttttgtagagacagggttttgccatctttgcccagactggtctcaaactcctggactcaagcaatctgcccgccttggcctcccaaagtgctatgattatagtgtcagccaccacacccagcctatatttgtattcttaaaaaggtcatctaactttatatattctaatgcagattagcatatggattttaccccctctactgtatttgggagtttactatgatcttaaatatatgtatataagaaaactttaaaaatgcaattcaaatcatgacatggtaatacttttgaaaaggggactgattaaaaaagatccaaaccggcagcataaaaaaaactggaagaatattaggtttcagctatttattatctctccattacacataatcaacgataatctggtactaaggaatatacaaatggcaattaattttcctcagttatcttatatttt

SEQ ID NO: 236244 - DNA, 679 bp, Homo Sapiens
  misc_feature (23)..(23): n is a, c, g, or t
tttttttttttttttacttgacntgcattgtgtcacatatatccatgccaggttataacctcaaattctcagccactgattgcttatgaagaactggttttaatttaaaaattcttaaggcagtaggaatttgagactgagaaggaagccttttaattctttcattctctttcttctttatcgtgcctcataccttgttacagtttctaaggtttcaattaaacatttcatttgatatgaactactgtgtcaccaagacagaatctttgctcattcacataacacttcttcaaggaaagcaggatacaaatgccaagaattctcaaataaaactacaaccgccacatatcaaataggcctatacagaataccatgcaacatggcttcttttctttttggttgttgtttttacaagctttcaagggtgcaaaaaaattacacaaagccatttcattatcaagcatgctgaaatttcacaaccacaaggaaggagtttctacaaccacaaggaaggagtttctaatagtagagcaatgccacataatgatccagctacaggatacctttataatcaaacgccggcgaataactcgggtagtgactctccgctcttcctctgagcttgaatcactctcactgtctttcaagtcctgacaaatgcatttttagtataatttta

SEQ ID NO: 236245 - DNA, 620 bp, Homo Sapiens
tggatagatttttattcagaaatcctttcatattcactaactgcaattaaaagtttaaaattacatggctcttaggaatgacgccaaacatgcaacattttaagagtaatattaaacagtaattttgccctcagaagtttacttatcaaattattacaacaggaacacaaatagaccacatattactctttaattagatttgttttacaatatgttcttgtcaacgagctatgtcaaactgtttgtttaaacctgacagaaaagcattttcacaaaaacgtaccatggagagggagggggaggggaagaagcactttttctagagatggaaaatagttccagtaaaaagttcttattcctttcttctaaggagctcgttctgaatattttcacttagttctactgttctttaaacaggactttaaaaagaattttgtatttacaaaatttacattttgttcctacaaaatgtaattttttaattttgtaaaataaaaatgtaaaattttaattttgttcctacatgagaagtgtgcgtactttcaattagttttcattaatatcttctgagttttcctcttaggtggttggtttctgggtaaggcagagttaggctggtg

SEQ ID NO: 236246 - DNA, 506 bp, Homo Sapiens
aggaacctgccatttctcagagggtctgccctgttgctgggattcctcaccagagttcttgcctcctcttcgggcagtggcctgcagcagcccctcccagagcagaaatcctagggttttaggaagcagaggtggggaacagggttggactgcctgggcctcaggtctctggagggaccagggtctctggccttcaaccccctgttaggagctgctacccctccctgtgccctgtgctcaccctctcttctcccccaggggcagctggactctctgtgacatctaaagttatcgggggctttgctgggacagctcttggggcctggctgggttcacccccttccagctgaacaccacactgaggcagggagttggctctcttggtggagatgactttcctgggcctctggatgacaatcttccaaaggacaagtctcctactcccaaaactatttaaggaagcatgaaaaataaagatgctggttatcttctaaaaaaaaaaaaaa

SEQ ID NO: 236247 - DNA, 451 bp, Homo Sapiens
  misc_feature (12)..(12): n is a, c, g, or t
  misc_feature (27)..(27): n is a, c, g, or t
  misc_feature (40)..(40): n is a, c, g, or t
  misc_feature (51)..(51): n is a, c, g, or t
  misc_feature (74)..(74): n is a, c, g, or t
  misc_feature (83)..(83): n is a, c, g, or t
  misc_feature (405)..(405): n is a, c, g, or t
ttaacaaccccntaataaagcagaggncaagatcagagcncatgaagagcnctttgctttcttaaaatatgccncctcccaanaatgtagggcccaattatcactgcggctataagctaattatcagatacaaaatatggatcacaactaattatcagaatctgaccttatttccaagtcatagattcctataaactaggttaacattagagatttaagcaggaactcaagaactgcagtaacccatggaaatgaatgtttatatttctaacaaatggctaaggcaagagatgattttctgaggcttatgtctggtgaaattttccagaagttcacgctctgcaaggccttattagtagaacatggatgatgaacggtccatttcattagtaacctgaaaccttnctatttggagataaagatgactgcttccatttaaaaaaaaaaaaaa

SEQ ID NO: 236248 - DNA, 552 bp, Homo Sapiens
tttttttttttttttgctttttgcagtagtatatttgagaagatctttctacgcagagactgtgattgcttaaactgtacacaaacacctggaagaaaaataagagatgtagtcaatcacttgggaattttgcctgcaagaagccacacagctatatgcctggcatcatgtaaatgtccagatccaggagcccatgagagaaattcgtaaagttctagatgtgtaggtgtcatgtagataaggattggttcatatcttcccattttaacagtgcttccagtttcctgtcaccattgagtgacgctcattttacagtcagaactgtatgccatggacacattttatgtgtaacccatgtggcaatcgcttcaagtcatttagcaggaggggaaaactccctaagcctctaagtcaggctttcccacccattttggaccaggcaattctttgttgcgggaggctgtcctgtgtgggaatgatgtttagcagcacctctgtcctcctcgcattagatgtaggagcaccacttccctccagtcacgacagccaaaa

SEQ ID NO: 236249 - DNA, 730 bp, Homo Sapiens
cattagtataaatattcaattcagtctttccggattgtgttgttagataagaatacatccaaaaagggccacagatcgagggagaaaccaaggaggggtgaggtcatcctgcgcaaggccgtgcagaagatctgccacagcaagagtggagagatcaaccccgtgaaggtggccaacctggtgaaggcgtacgtggacaagtacaggcacatgcgcaggcacaagaaaccagaggccggggaggagccgcccacgcagggggccgagggctgaggccaggcaatcacgggctatgcccggggagctgtcgggagtggcgggaatcggggccatgcccggggagctgtcgggagtggcgggaatcggggccatgcccggggagctgtcgggagtggcgggaaatggggggcatcagcatgcctgccgtcgggttcctgcgctgacacctggtctgtgcacctgtgttgctcacagttgaaaactggacacttttgtatgtatattatagagacactgtttccattctaatttatcaaaaatggattatctttagaaacctcttgattgacttactacttggaagataaagcacttggtgatcaagaggggctcctggtggggtggcgcgtccttgataaatctccaggtggcctcccgccaacagctgctgtgtacctctggctctgaattaggaatatctttactttctcttttccaaaaaaaaaaaaaa

SEQ ID NO: 236250 - DNA, 482 bp, Homo Sapiens
  misc_feature (103)..(103): n is a, c, g, or t
  misc_feature (443)..(443): n is a, c, g, or t
  misc_feature (447)..(447): n is a, c, g, or t
tccatagttttagagtaccgcaaactcctaaagtactaaggtagaaaagattatataaggggatttaatgtatatcagggtttctctgcctcagcactatagncatttttgaccagataattcttcgttttgctggggctgacctgtgcactgtagattgtttagcagcatccctggcctttgccaactggctgccagtataccctccccctagttatgccgatcaaaattgtctccagatactgtcagatgtctgtgggagggaggaaggacaacgtcaccaccaattaagaatcactggtataagtgtacctttgtgctctccaaacctcaatcccctcaaattttgatggtcaacttatcaagaggtgatcagagccaagggtgaggaatcatcaaataataatttgtttacagaaggaaatatctccaggcagtccatnctgnttcagaaactaggctaaatttaaaaaaaaaaaaaa

SEQ ID NO: 236251 - DNA, 510 bp, Homo Sapiens
tttttttttttttttgacattttttaagaagcatcctctgcttagctactttcccaaagctttttcctttctcattcctagtgacatatgtgctatgcatcatcctagctccagttacgcagatgtttaaatgagtttggccatgctgcttccccacaggcaggatcaaacaccagttgacccctcttaggagtatctaggagctgatctagaatggtttctccattcccaagatttcagggtactgcctgtggaagttgaggatatttacccaatagaatcaatgactttctttcagaaaggttatcttactatggatctcattaaacaagcatgtgtttgtagcctggtatacccaacgtggttgttttaaaatagaggataccagagcttatacagagaagacccttttcttgctcattagaaccaagggcaatttggagctttcctaaaaatcctcagagatggtgactaacaaaagttgtcagtgagtgcttacttttcaatgcc

SEQ ID NO: 236252 - DNA, 495 bp, Homo Sapiens
tgatgccaaataagggcaatgatcagcttccccattcctggagccaggacctgccacatcatttgcagtgcaaaatgcaaatgagagccccttgttcaaagagcaagataaaagtgccatcctaggcgctcaaaatacaaaggttcctcctttcttctatggtctgtcaattggtcaaggcattttaatttgctacttaatgtcatgcttgctgggcactggaatactcatgcggtgagtgtaggatcccacgggtatctggaggctcgccctgcaatttagcatgtgcaaggagctccccacctctgccagcccaggatgggcgtgtgatgccctggctggggtgagtgaggttgagccaggtatctctgtgtctcatgggcccaaccgacacgggagagaagacaatccccatggggactgcaacctttgaactgggacacatgaggcctctgggttagggtcggggagaggctcgtccccctgcccagccac

SEQ ID NO: 236253 - DNA, 566 bp, Homo Sapiens
tttttttttttttttagtattttttatttttgctcatggaaatgagaaatcccatagcaataaagaagctaatacccccactaaaataaaccagaaagtctctcccgtctttattcctcttaagccctttgtttagtctatagataaggatctaaactttttaagttttaaaatttaaaaatcacctgctttaattgtcgtaattcaaagtcagaagaacaaagaagaattctgatccaagaagctccaattattgaaagctcaggtggtggaaacaacatgtaattcagggggctcagagaagtgacaagcgggagcccgaaaacacacctttgaccggcaaagtgagcagagctcagtagaggggaaatagcacagcacggatcctccccaggaagagcccatgctacgaaaagaacatctagcagcaaatcaaagaaaggggcttctttcctgtctttagggctatcacagcccaattctatgtggaaaatcccttgctcttcctctaattctcgtctccatgttctgatcatctatttcctttatctcctctgacagtctat

SEQ ID NO: 236254 - DNA, 487 bp, Homo Sapiens
ctgtgatggaatggcgtcctgtccagggctggttccctctttgtgccctgagctactgaaacaggcttcagctacacatgacccagaactggaataattaagtaataattatctttttattcatctttcttaaatgtatgtatagctcacatttatttcaatgtttaatattagaatactttggcctttagaagcttagtgattttttttttccttggccagaagtatgctttaggaacttaatccttattttttagcctctggtaaaattggttttgctatacgttgtttcacttaaaagtcctgattcccaagaacgcactgacagcagtgaggacttgctgcgcatgcgggaggccagattttcttatctgtgtgaagccagacatgaaagagatctgtcaacacataaaacaaaatcaaagtctgttttttgtctggaaaagatttttaataaaaatataacttatgttaaaaaaaaaaaaaa

SEQ ID NO: 236255 - DNA, 570 bp, Homo Sapiens
tttttttttttttttgtttgtttgtttttgagacagagtcttgctctgtcactcaggctgggttgcagtgagccgagattgtacgcattccagcttgggcagcagaacgagactctgtctcaaaaaaaaaaaaaagccacgtaggaaattatccacagcatcaattggacttgatcttggctcagggaccaggcccggtgccttgatattggtagatttatttgccatcagactaatgagctggggacattgactgtttcctggcaactgagtcctctgattgtgtaaacaatttgcctgcaaacaaaacctgagtgcttgaaagggtaagtgatcctgatctgccatagaaaccttcatgcttagggagtttccctagctaattcctcagctaagattctccccaggagtttcactcacctgtttccagtgcctcctttgggctgtcagcatctgtgattccacattccccagagggagattcctccccaaagctggttgtatttactgccagtcctgggctgtagccagggcagtctttgaacacattatcaagaatactttttaaaa

SEQ ID NO: 236256 - DNA, 471 bp, Homo Sapiens
actattagcgaataatatattactcatttaaagagtatagcctactgaattaaaaatcactagataaaataattggaaagaagtacttttgaggattctggtatatttagatgttacccatagaaattagttatatattatataatgggagaaatgaacagtatcattggaatgaaataacaggtggacatttcaattggtgaatatagtatctcaagttggctcttacaaagtctgttacctggccaattgtggtggctcacgcctataatcccagggtgctgggattgcaggcgtgagccactgttgctggctgatttttattcttttagttaaggctggttgatattaccttgtgtgtatataccacatgttgtttatccattgttgttgatggacatgtgggtggtttcaccttttggctattgtgaataaagctgctatgaacactgtgtacaaaaaaaaaaaaaa

SEQ ID NO: 236257 - DNA, 396 bp, Homo Sapiens
tttttttttttttttggtagagacagggtctcactatgttgcccaagctggtctcaaactcatgggatcaagcaatcctctcagccttccacagcgctgggattacaggtgtgagccatcgcacccagcagattttttttttccaaattcaagaaagaagtctcagtgtgaatgtagacttctgcatggcagttcttaacagaaaaggggctaggaggtagcaagctttggttcttaaggaccaaaggtatagacagaagaaaagaacttggagtggctggaacacaacgtacataattcacgtgtctgggttaagagctctgatgtataaattattttgcaagtacaaaaaagggctccaaattcctgagtggacagaggaaaagtacagaccat

SEQ ID NO: 236258 - DNA, 498 bp, Homo Sapiens
cctttaccttctggatttaggtgctttttaattccagttcaggaaagataggaagagtagaatttccccacagcaaccttgctcctgacattggggattccgcccctgatctctgaagactgcttcttgtttgttcctctgtgagccttaaggattcctccacagctggatgtgcagaacaattctttgtcaaaaacatcacttttcagctctatgtccaattttccttgagctgtctgtgtcttcaagcaatcaatagtctccttatgcccaaccacaatctattctgctttaagacgtagcctcttgtttggttctctctaaacatgtactgttaactgttgagcatcctcataagatccctcttagactaaaagacagtcatgcaattttaattttcccttatccatttatttttttaatctgattttctgtatttgcccacggccagtacttgtggagagtttaaaattttataaattaaaattccatttaaat

SEQ ID NO: 236259 - DNA, 425 bp, Homo Sapiens
tttttttttttttttgtaaagatggggatctcactctgtttctcaggttggtctcaaacttctgggctcaagtgagccttccaccttggtcttccaaagtgctgggattacaggtggcagccactgtccctgacccaggatcacatcttaattcgcctttgtatacccacacagcacctccacacacacgtggcaggtgatggggtttccagaaagtttgctgaaggagtagaaaatccactgtcattttcacggccaaagcctgacacctacagcttgagaaggaaggaattccttccccatgcccctcagcatatctcttgtacaggtccaagtgttcctattaatgctttgtggcttaaactttttattccttcagttttttgtttcttctcttccctggaacaagagtcttagtgatttca

SEQ ID NO: 236260 - DNA, 682 bp, Homo Sapiens
  misc_feature (48)..(48): n is a, c, g, or t
tttttttttttttttccaaaaaaataatcattcaaaataatcggttancattttcaataagagcattacatacaaggagttagggaacaaagagttttaaaatctggctctttttatctctacttagggcgtgcatcttctcttcttaccccaacatatactgactttttaggacctcctttagggagatctcaatatcccgaatttttctgtgtggagaggggaaggaatatgtctttttttgctttggtcagagtggatacattttatagtttgttttttcaaagacgggtcttctgagtcacttctttcactgctgccgtaaagaaactgtataaaggtgattgagcagtgaaggcatggataaaaggggaaatattcagcagttctgaacgtgcatgtcatcaaatataaaggagtgagaacttgatgtataagaaaaaatggaagttaaaaaaaataaaaatccaagaatgggctgcttgttgcagtagtgaactcctcgctggaggtactagagcggagtctgtctcaaggatgctattggaagcaccccagctgtgggtggaaaactgcactttctgagcctagtcttttatagcctggagtttttgatgctgatgcttttactacttgttcttagactattttgccatacgctgctctgttttctcacctccag

SEQ ID NO: 236261 - DNA, 345 bp, Homo Sapiens
tttttttttttttttgtattgttttgttttgttttgtttttagcagcaattatctagtgggagcagttagctacgctttaggggtgtatgtttgtatgtgcattgtgtataacagaagtgttctctagagtgagcagtcagattacactgcaatggtcatattaccattgagtcccccaaacactaaagaaagacattatttttttctatataaacttaatacgcagagttataaacataaaatattgatatagacacacatacgcacaccactgcttcccaaagcctatgaatgcatccacgtactagtccacaagaatgatctttattcacaagatataggaa

SEQ ID NO: 236262 - DNA, 471 bp, Homo Sapiens
tttttttttttttttaactttagggctttaatacagagtaacaggaaaacaagtgggaaaaataagctgctgttttataccaccatattgctattgctttcttgcctagaaaaaagtatttcccggactgcaactggagagttcagaagcaaaacctcagcccccaattttccaaggctgtatgttaggggagaggcactcaccatttccagaccttcaccaggtcatctagggagcctgtgaccactgtctcagagttttccttcttgtttgtcccccaagcaactgaccaaatggcatcatcatgggctagaatggaaagtgcttcatttataaagtcttcttgcatacgacttaatgaagccgagatactgttcaacaattgtgaggtaacatttatttgtatttgctttactattttacaaagtgctttcctatacagcttttattgaaattttggggccacatatg

SEQ ID NO: 236263 - DNA, 433 bp, Homo Sapiens
  misc_feature (118)..(118): n is a, c, g, or t
  misc_feature (124)..(124): n is a, c, g, or t
  misc_feature (261)..(261): n is a, c, g, or t
  misc_feature (277)..(277): n is a, c, g, or t
  misc_feature (408)..(408): n is a, c, g, or t
ctctgtgagacagtgaggaaggagaggggaggccacctagagttttgaacacagtcagctcagaggatggtcatgaaaatgggagggaagtcaaagaagccaggaagaaagaagcatncaagtncgataagggaagatgagcttgctttgggaatgataattttgagggccctgtgataaagtgctccaaacagttggaaatgtgggtcccaggctttggaaagaaatgaggcagaaaggtgtaggtttggaagttatccncaagaagaatcagatnttcaaggaagagaacattaagaggaaaagagagctgagggcagaatcttctcgactatacctttatggcagcttgctttccataaacgtagatcatggcagcataaaaaccagcaaaggaaacagaggccnccagaggttttaaaaaaaaaaaaaa

SEQ ID NO: 236264 - DNA, 446 bp, Homo Sapiens
aacatacgtaaacctatgtaacatatgtattaataagggcaagaagatgttatagacttggctagacagcagtggctgtggatgtggcatgaaagcctggctttcaggggacccagttctgtgattttagcctggtaaagatcggctgagttgttaatttctttcagaaaagttagatggtgtcagcggcttagaatatcccgtgtgggagggtggccatcctgggcatttcaggaggcagcacacataccacacacccaagaagaggctgggaagggaatttattagcgctccccttaggttgagtttattgtcagaaacctgtcattgtgatttcatttgatgatagaaaccggtggcctcaatcacatttgtgatggccaacaaatttacctaagcattttgctaacctgaagaagtaaagcagggcttaaaaaaaaaaaaaa

SEQ ID NO: 236265 - DNA, 424 bp, Homo Sapiens
tttttttttttttttcaggggccaaggcaaaattggtttattaaaacagctatttgcaatggcagattttaaagacaaagacacaaataagtcaatggatataaaaaactgtaaaaggctgtaaatacatgatcatcatttataaaatcaacaacatctcatgtatctggcactttatggaaacccattttacattttatcatttggaataaatgaagggttttttttcctaaataaaatactttcctaccccataagctacgctttcaaagtgctcctttcttctggtacagtacccatctgacaggtgctcaaatctcctttagtcctctgccaatggacacacttttatctcttcattcagcttccttcctgagtctgctatggagttggaaatcaaacagccatgtttgttagaattgtt

SEQ ID NO: 236266 - DNA, 506 bp, Homo Sapiens
ttgtagaaaagatgtgtgaaacaaaagtagagaatcaaaaaataaataaacaataaaggaccccttagcttggcatacagttccaaagtcaagaataagactttattaacagagagaaaagagagctaacctttgacgtggcataaaaggcttaagagttgaaatagagaagtaactgtacaattttgttcaaaaaagaaagttttaaacataaaagatattcagagttttgggtcaactgcatctttctggagagtttagtttcttgttaagtcaatttgtgtattttcattgagcatacatccttaacaaggtttcatacatgctggcactttgagggacagtcaagggacattctgaaagaactcccaatagactggggatcaggagattgaatttcaaattatatttcgtccattaattgactctgtaaacttgaaaaagtcatttcctttctctgggctatgtggaagttcctttttttataaagacaaatagccttatca

SEQ ID NO: 236267 - DNA, 604 bp, Homo Sapiens
tttttttttttttttgataaaggagatctaagatggaaaattgggtatcaattcacttcaactctaaaaccacgatatggattaaaaatatctttcttctaatgccaagaaataaagacacatttcacaggtctacaaaactagactggtgggtcttgtctttcaatttatttttttattttggtagcaggaagagatggtaagatataagtccatcctgcaagttatgctgccgcctcactggctgaccttcctattcaagagggcactgtgtgcacctcggtcatgggctgtccgcacatctggaatctggggccagactctcaggtgcaggggagtagatgatgccttgctctgagaactaatacagtcttaagatgtatattctctaaaaaagtcaagaataatgacgccattatattttggaatacttaatcatatttagcaaaaattctcagactaatgtaaaagtatggtaataatgtattttctttgaaagagagggaagaagtggtttatgaaataaacaagtcctcttattggtattttaaaaatactcaacagatgtagcatatataataataaaggccggtgcgtctgattt

SEQ ID NO: 236268 - DNA, 451 bp, Homo Sapiens
tttttttttttttttgaccaagcacagatatctttattgtttttgaagacgactgccattggagggtgagcagaacctgggactgagtgctaatgctgttatgttcttctaagaagtatccatgcagcgatgtcgacaggaaaataaccgttcctaagcactggtttgttgtccaagtgacataaaagtcacagaatgagaagaacagtttctttcattttagaaaagccttttgtttctcttcctggaaacttggaaaattgtttttgtttaaaaatatcttttctgttgattgcgaacacagtgcatgttactttcccagccttgacgctcctccagcatccacagtctctggatcagattttgctccttccacagtccttaagagtataatagatctgaatttaaattccagctctatgtgaccttgagcaagcttcttttcttctca

SEQ ID NO: 236269 - DNA, 226 bp, Homo Sapiens
tttttttttttttttgtgggtaatctgtcttttctctctgcaagcttaagatttttctctgtatcctggaccttttgaagtcttactgcaacatctctaagtttggacttttcttttttggtacttcttgtgactgtttctagtgctcatgtcttttattaattctggaaaacttagccatgatctgttcaaatattgtatcccttctgtcgtcttctcgcagccg

SEQ ID NO: 236270 - DNA, 472 bp, Homo Sapiens
gatatatatatttttcagtattcagactctgaaatctgtcattacaatcaagtgcttgtcacagctgaaagatttctggtggcttaaagtttactagcagtaaatttatgatatggtacagttctttgtacagaaaggcaccattatgttagaataaatttccagaacttagtgggaagaatcaggttttaaccttgtgtgtctgttacttctgagtgcatttctataatataaatgttgatttgcgtcaacattataaaagagcacttctgtggctcatttaaaagaaaaaaaaggttaagtcttttaaattttggccttgtttccaaatcctgtcttccatgttgtttttctgcacttcctgaccactcttataaaaagctcacaaacctttgaagaaactggagtaggctgttatttcattaaggtttacaaattaaatgcttgatttttaatgtaaaaaaaaaaaaaa

SEQ ID NO: 236271 - DNA, 463 bp, Homo Sapiens
cctcctgcccacccattccccatgcgcatttactgcctttcctctgtattaccttgggctgcactttcctttaaaactataactctacttgttttcatttggaaggtcctaattctttccctatgcaaaagaaatttattctggttaccaagttatgtgtgtgttactttttttaaatatggaaaaaatctgaagaccagtataatcttattcccctcagtgccatcccttgctctcttgcctgatatatagctactattaatagcctggcatatattctttcagatttttcatgtaaatatctctcattctttttaatacttgtacgtattctattgggaggatgtatgatcatttatttctctaatcccttatttgttgcagcagtggaattcttagatcaaagaatatgtacttcccttaggttatagagactgtgggaaaaatagaaaaaaaaaaaaaa

SEQ ID NO: 236272 - DNA, 480 bp, Homo Sapiens
tttttttttttttttatgggttaaggagcagaaagtttaataagcaaaagaaaggggagaggacagcagctctctgttgcgagagagagaggtgtccaaaagggaagaggtcagatgaatatttttataagcaagtatttttaacaaacttttcaaataagtaaataaataatcttatcacagtaagtttttaaattgatactgggtgactatttcacacaagtgttgtgaagcatctgtgacactatgaaaagatccaagtaaggtagtaaagtctggagtagatccaagtaagttagtaaagtctgggggtagtaaagtctagatacttaacagcttgaagattccattttatgaaatttgcgtcatcaactgacacattcttgctgaggctgaacatactatgttcagaaaccggcaaagtggcggggtgcagctcatgcctgtaaccgcagtaccctggcaggtgaggtggcagat

SEQ ID NO: 236273 - DNA, 667 bp, Homo Sapiens
tttttttttttttttctatcagtgagaaaagatctatgggtactagttgtgtgtggagtatcttagccactatgaagcgtaagcccatttagtttcaggatagaaaaacacagtaaacgaagcgctatttcttggctgtgagataatattattttgagaagatgtcatctgtgacacagcaactgacagaagcaaactgactcatctggtttatctcagtagatggcataaagtataaccttgcccaggagaagtggcaaagaatttcttattcatatttatatctttagttttgctatccaaaggaacacacctgctagattctgagttccatagtcttagactggaaggaacttccaaaatagttcctgagctctttgttttctgggtgacgaggtaatttgttcactggcttccctgtaaaagtctagaagccagtgctgtggtggcccatcacacactgtgggtctcatgaaggttggagagaggagtctgttcagatggagcttcttgtttctgcttcttactcttcctgcttttaaattcccaggcctcatagactctgaactgcttgcttcgatctgcaatactgcctctcttccaagggctttgtctggctccctaaccttgatctatttcgtgctttcgattttgctaccggtcaaat

SEQ ID NO: 236274 - DNA, 686 bp, Homo Sapiens
tttttttttttttttattatacgattccatttatgtaaaatgtccagaataggcaaatgggatgaggggtaaaggacgcctaagggatatggagtttctttctgcagtgatgaaaatgttctgaaattttttttcgaatgatggctgcacaactctgaatatactaaaagctatttaattgtatacttttaagtgggtgactgtatggtatgtacattatatatatcaataagctgtcttaaaaaagtgaactcaggggttgcaaatgaccacacatctgagctttagtccccattcatcaggggcataacctgtggagaaaaatcagggaattatgcagtatatgggttagacaggaaaacattctaggaagaacgagattctatgtataatcttaagggcaataaagcatcatggaaggttttaagcagtatataatcagatctacactttagaaaccccccaaatcactgaattgtacatttcaaacaagtgaattttatagtatgtaaattatatctcaataaagccattaacaaaaaaatccctttgggagcttgaggaggataaactggagggcatcaactgggggaggttgtagtgtaggagtttgggtgagggggcccgagcccatctgtttggacttgagggaaagtggcttggggttagagtcgggggaggatcag

SEQ ID NO: 236275 - DNA, 447 bp, Homo Sapiens
ctgccagtgcagtggccttggtcttggaaactgaagggagaaggtctggcccccagggtggggctctcctttccctcccccagccccgccgtcagcactggccctctgtgaggttcgatacttgaacgccccctgccctgtgccttggacctgggcaaagctaggaggaggaaacagcacaactcacagtttgagctggggggtggtcttggcaaggctcctgtctgtacccctccctaaccttctcaaaagaggtgcacagcctctcgggtgacttggaaactcctggacaaattccattctaacttattttgacatgtatacaaaccaactgtttagagattccacttgtgcaaagccctactgtgtttttatgttcctgtttaaaagagaagtttacttagcaataattataaataaatgaatattctttaaaaaaaaaaaaaa

SEQ ID NO: 236276 - DNA, 455 bp, Homo Sapiens
acgcactcggcatctttccctgcctggcctcagctgcggaagccctgacccgggagttctcggtgctcaagatccggcccctcacacagggaaccaagcagtcaaagctcaaagccttgcagaggccaaaactcctgcgtctggtgaaggagaggccacagacaaatgcgactgtggcccggcggctggtggcccgggccctgggactccaacacaaaaagaaagagcggcctgctgtccggggtccgctgccgccctgaggcctggagacccaactggcctggatctgcgtcccgacgtagctggcgcccccaacaccataagccttcacagacgccagagcagccccgcaccaccctcgagcttcaccatggggtgtggtgggctttagtttagtcccagaaatggagaaaaaataaaaactcacgttgttctaatgtgaaaaaaaaaaaaaa

SEQ ID NO: 236277 - DNA, 465 bp, Homo Sapiens
gggctctgagagtgaggatgaagacctcctgagtgagctggaacttgcagacagggacgggcagccgggctgcacgacagccacatgccccattcagggagccccagactctggtaaatgctctgcttcctcctgcctggatacttctaatgaccctgacgacctggacgtgctcagaacccggcatgccaggcacacccggaagcggaggcggctggtgtgagcagcaggacaagcactttctcagaagcccgtggccctgctgacgagagacagcccacccccagcctgcaagagaggcagccagaggccaggtatctgctggccgctgactgaccaggtccgcagtgaacagaggcgggcctgccgactgactgtgtggcatggagcatggctgttccccaagtgcacacctgaacacttggaggaataaagttctgtttttaattgtaaaaaaaaaaaaaa

SEQ ID NO: 236278 - DNA, 736 bp, Homo Sapiens
  misc_feature (8)..(8): n is a, c, g, or t
agtgaaancagaaccttttatatgtgacttcttttagtgcaatatttgctttattgtggtggtatggaaaagaaccccatgctgggccaggtgcagcggctcacacctgtaatcctagcactttaggagactgaggtgggaggactgcctgagcccaggaattcaagaccagcctgggttcctaaaacaaaaccaaaccataatgtctccaaggtatggctgtacttgattttggtttctccatctaaaaaaatctaattcatccaaggaaggagttgtaagatacacattttaaaacaagaattttgcattctcagagtagttgacagcactttaaagcaccaatgcactctaatttgttaaaatttggataataatatatacgaatacatataattaacgagatgtagttcttaaaagttcaaagacactttaaaaatacgtaactaaaatttgccaacttcctgaagacctctctggaagttagttttgtggaaggtaatatgaaattctggcccacaggatgtctaaggtttcttccagctctaagtttgaggggaaaaaaaagaacaatggagacacccccacactaatctttataccggaaagaaagaggcagagagcttatttgaagaaataatggccaaaactccccaactttgagggaagacatggatatataaaaaggtcaacaaactccacgtaggataaactcaaaagagtcctatgctgagtt

SEQ ID NO: 236279 - DNA, 389 bp, Homo Sapiens
tttttttttttttttagcagagacggggtttcaccatgttggccaggatggtctcgatctcctgacctcatgatccacccacctcagcctcccaaagtgtagggattacaggcgtgagccaccgtgcctggccaacaaatgtgtgtgttgagtgattcatgagcttggtgacctcagacactctgaatttcattaagtgttgtcagcagtgaaaagggaatatgctcctctaccttgatatcaggtgggtaaagcatagtaagaacttgataaagagcattccctctctggcctggtaccagctctagatcttcctcaaagcccagcacagggctgagcacagatctgcttgatgatggcattttataacattacaattctaatattca

SEQ ID NO: 236280 - DNA, 451 bp, Homo Sapiens
tttttttttttttttgaaccactgctaacaatcactaatgttcactaaaacactaggcttcaggagcatttggaaataattcctgaccgcacaaagaaacatgctggtgagagacagtgaccaagcccaggagaccatcatgagttccagaaaaagtgagagagagcggccacttttcctgtctcggagatacctcctactcaggacgcaggaagcatggggcagggcagcgccatggacaaggcgactcggtgcagggcctgcgggacctgcaggtgagaggaagcacaagctccagctcctcagctgtggaacgctgcgtgcgcggtgcacagctaccagctcggatgggtatttgagaatttaccgcactgacttggaccagacggaaagcagagaagagggagagctacacctgactgtccaccatccccgccagccccaacgtcgg

SEQ ID NO: 236281 - DNA, 432 bp, Homo Sapiens
ttttttggtcttgaagattttattaccgtcagcttaatgtacaattttaaaacgacacagtcgcaacccacttctcaaacattttgaattaccacgggaattaaaacatagaagtgtgtgacctagaatccctcaaacaaggaaaacaactcatccgagccgagtatggaagaatctttactttttaggggagtatcttcaaactatcttttttaaatagtagaaatctgcttttaaatctcagccaacaacaagcggattttaaatctattttacaaccctaataaaaaccaacctcttagctggtggacccagtctgtagctgcaaatacaaagacgtgatttttgaaaagctgcccacaagagcaagtgattaatcattaaaatccactaaaatcaattgtgaacagccactgcctcagggattactag

SEQ ID NO: 236282 - DNA, 619 bp, Homo Sapiens
  misc_feature (28)..(28): n is a, c, g, or t
tttttttttttttttaactgtaaaggantgcttttattttgaacttaagctgaggaaaagaagccaaaagtattttaaattttattctatttctagcacattctgtgagggctttaaaaagaaatttctctctttataattttcctttcctttattctttacagaacagtaaattctgattactcaagttctcaaaaatgaaagctatatctggaatgtttctattttgctccccctgttggcctgagagcaggataacactgcctgagactaacaattcaagacgatctaaacatttattttcatggacttgactaatataaagatgtaatggcattccacagaaagacctaaaccacagtttcagctctatcttatatatatacctgacaattaaaagcagtatgtttatgtttaatttttaatttttaactattagggttcaaatctagaaaattatttttatacaaaggctagctgcatgccattcatttttcaaaataattacttttcaaaaattctgctgtttctatatttaaggctgaaatccactgaaaacacccaaacttgcaattcctatcattatttttgttttgctaccactgatttttacaattta

SEQ ID NO: 236283 - DNA, 623 bp, Homo Sapiens
  misc_feature (613)..(613): n is a, c, g, or t
tttttttttttttttgacaaaattttaaaatcctttatttgtgctgataaagcatgttaaatacattaaatctatttacactgtacaaagcttttaaagttctaaaaatcagatttttatctaaatgaataaatttctctgtattgttaaaaccattctacttaactgcattgttctccaagtccctccagccaggaggcacggtaacaatgtgtcagatctccacactgagacaccaccttcccaagatcatggtacatcagcagcagaactgagacaaaaactggaacaaggaccaccttgctcctactgcattatagcttttgatagtatttgctacttgaagaggaggctataccttgtctagctcaatacagtttatgtttcagacactataagtatgatacccaaatgcttcatgagtgaacaaggtcagcagatcaccctgagaacaaggaagacacaatttccttataggctaatgattataaaaatagaaattaagagctccccagaaacaaaccacttagtcaaaaaggaaggagttttgactttcttctaagccaagtactcaagtttaagacttattggcctatttaaaaattctttctangacttctaaa

SEQ ID NO: 236284 - DNA, 758 bp, Homo Sapiens
  misc_feature (11)..(11): n is a, c, g, or t
  misc_feature (751)..(751): n is a, c, g, or t
ggttcaagcantccttcccacctcagcctgcagagtagctgggactacagatgtgtgccaccccgatgaactaatttttaaattttgtgtacagacagggtcttgctatgttgcctaggctggtctcgaactcctgggctcaagtgatcctcccacctcggcctcccaaagtgctgggattccatgtgtgagccactgtgcctagcctgattacaaaaaccaaaacggactaaatttgtaatttttaaaaaaggatgtcctaaccctaactttcacttttttctagtggaagtctcacactgtgtccttcccactctcgcattttcataatgctggtcatgggacccttatcaatcctaatcattcttaaaataataatgacctcagaagagccaaattttctaaagatgggggagaggcatcgacgatacctccaggtgcccagcgactccctggaggcggtggtcctggcagttccagtccagatctaaaaattctcaacaggacaatttatctaccaggtggacagagagagaaagtgtttccaggtccatatattcttgacaaactaccataatcaacgctgccttcccagctggactgaggttggtaagttggttttgaaggctaaaacaaaaattttagatgttgaaaaaactaccttacatacaaaggagacttaacaacctaaaccattgtaaaaaataaccaactcttgtgaaatctgccatttgaagtaaaactgccattnaagaaga

SEQ ID NO: 236285 - DNA, 450 bp, Homo Sapiens
tttttttttttttttagatggagtttcactcttgttgcccaggctggagtgcaatggagctatctcggctcactgcagctctgcctcccggattcaagcaattctcctgcgtcagcttcccgagtagctgagactacaggcatgtatcaccacgcctgactaattttgcatttttttagtagagacggggtttcaccctgccggccaggctggtctcaaactcctgacctcaggtgatctgccctcctcggcctcccaaattgctagggactacaggcatgggctaccgcacccggccctttttccttcttaaagaaggcaaagcaggttttttgtgagtttttgttggtttgtggtcttgaactaaaacttcccaggttcaagttattttcgtgtctcagcctcccgagtagctggggttacacgcgcccaccggatccaacgttggat

SEQ ID NO: 236286 - DNA, 753 bp, Homo Sapiens
tttttttttttttttattttccctttgctttattaggttaccaagcaaggattaaagcaacatattttcctttgctttattaggttaacatagcagataacctgaattccttggcttagtgtttgtagagtttaaaaaaaaatctttaaatccattataattaatgacctcaatagggcagaatagcagaaataaatttcacgatgatcccctgtccccaaacattttatcttacattgtgcatggcattcccttttatgcgtttcttaggtcaaagtgaacatttctctatgttctcccatttcacccactgcccaaagaagtaaggggctcaaatggcatctagggtctgataagataagcgtaggtaattgcagataaccataggtaatcaaatattggtaacgttgtgtcaacatgcttccccaagtgcatcaggaagtgatgaagaagttaggatgaacaaatgggctaggcaaggccaaggccatctgtaaactccagtttgtaccatatcataagtggtgaagaatttgcatatagttaaggttattagtaccgtcatagaaattgattattggaggtgtggggcttaagcacagccctgccatgtggaaaatggttatgcagtcgctgttaattttatcaaccattagtacctgttgcctctggttctgtgttccagagccatctcttgagatagaaatgctgaggtcaatggagttacccccaatgacacacacaagaaaaccc

SEQ ID NO: 236287 - DNA, 821 bp, Homo Sapiens
  misc_feature (5)..(5): n is a, c, g, or t
  misc_feature (65)..(65): n is a, c, g, or t
aatgnccaaactcaaaaaccaaaagagatccaatttaagccaatagtttgggtgatccccattgncaaaaatgttaaatatttataaaatccattgtctgtgaggctgtaggaaagctggcaatctcattcattgccatttgaagataaagttgttaaccacatttttgaaggcaatcttgcaataattttcaaaatataaatataaagtgtgcacatacttaatcccagtaattcaactgataagtaatttattatgatattatagacaaatgcaaaattactgatatatagggaggttcattgcacagaaatttggtgctaacataaatatctatgagtgagaaatgcttaaaacatttaattatattttatctacaaaacattcatgtcgtcattcaacaaatgacacagatgtgtatgtactactgaaaaagaaaaaggccattgaataagggctgttaaatgaaagaggtgatttgcagaaaaatgtgttacaatatggccacacacgtggatccttccccataatggcttgtgtgtttgtgtgcatctatccactaaaagaatgcatgtagttcacttaatagaggaaaactatagggacagaattggaagagaggagggcatttaatttatatattatttaaatatgctttgaatttttgaaaaaaaatcatgcagtttctttttaatatagtctgtatttttcagtttaccatgtggcaaatgaaaattataaatgtatatttatgggagcactgagcaattccaccattttgagcatcttgtgtaatattatatcctctactgaggctcctg
